United States Patent Application Publication US 2004/0241651 A1 - sequence listing, part 10

SEQ ID NO: 265424 - DNA, 13 bp, Artificial Sequence
  Oligonucleotide for detection of SNP TSC0064322
tttctttatatta

SEQ ID NO: 265425 - DNA, 13 bp, Artificial Sequence
  Oligonucleotide for detection of SNP TSC0064323
tattttattagat

SEQ ID NO: 265426 - DNA, 13 bp, Artificial Sequence
  Oligonucleotide for detection of SNP TSC0064323
atctaataaaata

SEQ ID NO: 265427 - DNA, 13 bp, Artificial Sequence
  Oligonucleotide for detection of SNP TSC0064323
tatttttttagat

SEQ ID NO: 265428 - DNA, 13 bp, Artificial Sequence
  Oligonucleotide for detection of SNP TSC0064323
atctaaaaaaata

SEQ ID NO: 265429 - DNA, 13 bp, Artificial Sequence
  Oligonucleotide for detection of SNP TSC0064323
atttaaggaaata

SEQ ID NO: 265430 - DNA, 13 bp, Artificial Sequence
  Oligonucleotide for detection of SNP TSC0064323
tatttccttaaat

SEQ ID NO: 265431 - DNA, 13 bp, Artificial Sequence
  Oligonucleotide for detection of SNP TSC0064324
tgtgttattttta

SEQ ID NO: 265432 - DNA, 13 bp, Artificial Sequence
  Oligonucleotide for detection of SNP TSC0064324
taaaaataacaca

SEQ ID NO: 265433 - DNA, 13 bp, Artificial Sequence
  Oligonucleotide for detection of SNP TSC0064324
tgtgttgttttta

SEQ ID NO: 265434 - DNA, 13 bp, Artificial Sequence
  Oligonucleotide for detection of SNP TSC0064324
taaaaacaacaca

SEQ ID NO: 265435 - DNA, 13 bp, Artificial Sequence
  Oligonucleotide for detection of SNP TSC0064324
cgtgttattttta

SEQ ID NO: 265436 - DNA, 13 bp, Artificial Sequence
  Oligonucleotide for detection of SNP TSC0064324
taaaaataacacg

SEQ ID NO: 265437 - DNA, 13 bp, Artificial Sequence
  Oligonucleotide for detection of SNP TSC0064324
cgtgttgttttta

SEQ ID NO: 265438 - DNA, 13 bp, Artificial Sequence
  Oligonucleotide for detection of SNP TSC0064324
taaaaacaacacg

SEQ ID NO: 265439 - DNA, 13 bp, Artificial Sequence
  Oligonucleotide for detection of SNP TSC0064328
ataaatgaattaa

SEQ ID NO: 265440 - DNA, 13 bp, Artificial Sequence
  Oligonucleotide for detection of SNP TSC0064328
ttaattcatttat

SEQ ID NO: 265441 - DNA, 13 bp, Artificial Sequence
  Oligonucleotide for detection of SNP TSC0064329
taataagagggga

SEQ ID NO: 265442 - DNA, 13 bp, Artificial Sequence
  Oligonucleotide for detection of SNP TSC0064329
tcccctcttatta

SEQ ID NO: 265443 - DNA, 13 bp, Artificial Sequence
  Oligonucleotide for detection of SNP TSC0064329
taataaaagggga

SEQ ID NO: 265444 - DNA, 13 bp, Artificial Sequence
  Oligonucleotide for detection of SNP TSC0064329
tccccttttatta

SEQ ID NO: 265445 - DNA, 13 bp, Artificial Sequence
  Oligonucleotide for detection of SNP TSC0064330
tttattatatttg

SEQ ID NO: 265446 - DNA, 13 bp, Artificial Sequence
  Oligonucleotide for detection of SNP TSC0064330
caaatataataaa

SEQ ID NO: 265447 - DNA, 13 bp, Artificial Sequence
  Oligonucleotide for detection of SNP TSC0064330
tttattgtatttg

SEQ ID NO: 265448 - DNA, 13 bp, Artificial Sequence
  Oligonucleotide for detection of SNP TSC0064330
caaatacaataaa

SEQ ID NO: 265449 - DNA, 13 bp, Artificial Sequence
  Oligonucleotide for detection of SNP TSC0064330
tttattatattcg

SEQ ID NO: 265450 - DNA, 13 bp, Artificial Sequence
  Oligonucleotide for detection of SNP TSC0064330
cgaatataataaa

SEQ ID NO: 265451 - DNA, 13 bp, Artificial Sequence
  Oligonucleotide for detection of SNP TSC0064330
tttatcgtatttg

SEQ ID NO: 265452 - DNA, 13 bp, Artificial Sequence
  Oligonucleotide for detection of SNP TSC0064330
caaatacgataaa

SEQ ID NO: 265453 - DNA, 13 bp, Artificial Sequence
  Oligonucleotide for detection of SNP TSC0064330
tttattgtattcg

SEQ ID NO: 265454 - DNA, 13 bp, Artificial Sequence
  Oligonucleotide for detection of SNP TSC0064330
cgaatacaataaa

SEQ ID NO: 265455 - DNA, 13 bp, Artificial Sequence
  Oligonucleotide for detection of SNP TSC0064330
tttatcgtattcg

SEQ ID NO: 265456 - DNA, 13 bp, Artificial Sequence
  Oligonucleotide for detection of SNP TSC0064330
cgaatacgataaa

SEQ ID NO: 265457 - DNA, 13 bp, Artificial Sequence
  Oligonucleotide for detection of SNP TSC0064330
tggatgtggtgga

SEQ ID NO: 265458 - DNA, 13 bp, Artificial Sequence
  Oligonucleotide for detection of SNP TSC0064330
tccaccacatcca

SEQ ID NO: 265459 - DNA, 13 bp, Artificial Sequence
  Oligonucleotide for detection of SNP TSC0064330
cggatgtggtgga

SEQ ID NO: 265460 - DNA, 13 bp, Artificial Sequence
  Oligonucleotide for detection of SNP TSC0064330
tccaccacatccg

SEQ ID NO: 265461 - DNA, 13 bp, Artificial Sequence
  Oligonucleotide for detection of SNP TSC0064330
tggatgcggtgga

SEQ ID NO: 265462 - DNA, 13 bp, Artificial Sequence
  Oligonucleotide for detection of SNP TSC0064330
tccaccgcatcca

SEQ ID NO: 265463 - DNA, 13 bp, Artificial Sequence
  Oligonucleotide for detection of SNP TSC0064330
cggatgcggtgga

SEQ ID NO: 265464 - DNA, 13 bp, Artificial Sequence
  Oligonucleotide for detection of SNP TSC0064330
tccaccgcatccg

SEQ ID NO: 265465 - DNA, 13 bp, Artificial Sequence
  Oligonucleotide for detection of SNP TSC0064331
gaagtaggaatat

SEQ ID NO: 265466 - DNA, 13 bp, Artificial Sequence
  Oligonucleotide for detection of SNP TSC0064331
atattcctacttc

SEQ ID NO: 265467 - DNA, 13 bp, Artificial Sequence
  Oligonucleotide for detection of SNP TSC0064331
gaagtaagaatat

SEQ ID NO: 265468 - DNA, 13 bp, Artificial Sequence
  Oligonucleotide for detection of SNP TSC0064331
atattcttacttc

SEQ ID NO: 265469 - DNA, 13 bp, Artificial Sequence
  Oligonucleotide for detection of SNP TSC0064332
ttagaaggagaay

SEQ ID NO: 265470 - DNA, 13 bp, Artificial Sequence
  Oligonucleotide for detection of SNP TSC0064332
rttctccttctaa

SEQ ID NO: 265471 - DNA, 13 bp, Artificial Sequence
  Oligonucleotide for detection of SNP TSC0064332
ttagaaagagaay

SEQ ID NO: 265472 - DNA, 13 bp, Artificial Sequence
  Oligonucleotide for detection of SNP TSC0064332
rttctctttctaa

SEQ ID NO: 265473 - DNA, 13 bp, Artificial Sequence
  Oligonucleotide for detection of SNP TSC0064338
gtttaggaattaa

SEQ ID NO: 265474 - DNA, 13 bp, Artificial Sequence
  Oligonucleotide for detection of SNP TSC0064338
ttaattcctaaac

SEQ ID NO: 265475 - DNA, 13 bp, Artificial Sequence
  Oligonucleotide for detection of SNP TSC0064338
gtttagaaattaa

SEQ ID NO: 265476 - DNA, 13 bp, Artificial Sequence
  Oligonucleotide for detection of SNP TSC0064338
ttaatttctaaac

SEQ ID NO: 265477 - DNA, 13 bp, Artificial Sequence
  Oligonucleotide for detection of SNP TSC0064339
tttataggtttat

SEQ ID NO: 265478 - DNA, 13 bp, Artificial Sequence
  Oligonucleotide for detection of SNP TSC0064339
ataaacctataaa

SEQ ID NO: 265479 - DNA, 13 bp, Artificial Sequence
  Oligonucleotide for detection of SNP TSC0064339
tttataagtttat

SEQ ID NO: 265480 - DNA, 13 bp, Artificial Sequence
  Oligonucleotide for detection of SNP TSC0064339
ataaacttataaa

SEQ ID NO: 265481 - DNA, 13 bp, Artificial Sequence
  Oligonucleotide for detection of SNP TSC0064342
tgattaatttggy

SEQ ID NO: 265482 - DNA, 13 bp, Artificial Sequence
  Oligonucleotide for detection of SNP TSC0064342
rccaaattaatca

SEQ ID NO: 265483 - DNA, 13 bp, Artificial Sequence
  Oligonucleotide for detection of SNP TSC0064342
tgattagtttggy

SEQ ID NO: 265484 - DNA, 13 bp, Artificial Sequence
  Oligonucleotide for detection of SNP TSC0064342
rccaaactaatca

SEQ ID NO: 265485 - DNA, 13 bp, Artificial Sequence
  Oligonucleotide for detection of SNP TSC0064347
aaggatatgtaag

SEQ ID NO: 265486 - DNA, 13 bp, Artificial Sequence
  Oligonucleotide for detection of SNP TSC0064347
cttacatatcctt

SEQ ID NO: 265487 - DNA, 13 bp, Artificial Sequence
  Oligonucleotide for detection of SNP TSC0064347
aaggatgtgtaag

SEQ ID NO: 265488 - DNA, 13 bp, Artificial Sequence
  Oligonucleotide for detection of SNP TSC0064347
cttacacatcctt

SEQ ID NO: 265489 - DNA, 13 bp, Artificial Sequence
  Oligonucleotide for detection of SNP TSC0064348
gataaagttttat

SEQ ID NO: 265490 - DNA, 13 bp, Artificial Sequence
  Oligonucleotide for detection of SNP TSC0064348
ataaaactttatc

SEQ ID NO: 265491 - DNA, 13 bp, Artificial Sequence
  Oligonucleotide for detection of SNP TSC0064348
gataaaattttat

SEQ ID NO: 265492 - DNA, 13 bp, Artificial Sequence
  Oligonucleotide for detection of SNP TSC0064348
ataaaattttatc

SEQ ID NO: 265493 - DNA, 13 bp, Artificial Sequence
  Oligonucleotide for detection of SNP TSC0064350
tatatgtaaaggg

SEQ ID NO: 265494 - DNA, 13 bp, Artificial Sequence
  Oligonucleotide for detection of SNP TSC0064350
ccctttacatata

SEQ ID NO: 265495 - DNA, 13 bp, Artificial Sequence
  Oligonucleotide for detection of SNP TSC0064350
tatatggaaaggg

SEQ ID NO: 265496 - DNA, 13 bp, Artificial Sequence
  Oligonucleotide for detection of SNP TSC0064350
ccctttccatata

SEQ ID NO: 265497 - DNA, 13 bp, Artificial Sequence
  Oligonucleotide for detection of SNP TSC0064352
aggtttgaaaatt

SEQ ID NO: 265498 - DNA, 13 bp, Artificial Sequence
  Oligonucleotide for detection of SNP TSC0064352
aattttcaaacct

SEQ ID NO: 265499 - DNA, 13 bp, Artificial Sequence
  Oligonucleotide for detection of SNP TSC0064352
aggtttaaaaatt

SEQ ID NO: 265500 - DNA, 13 bp, Artificial Sequence
  Oligonucleotide for detection of SNP TSC0064352
aatttttaaacct

SEQ ID NO: 265501 - DNA, 13 bp, Artificial Sequence
  Oligonucleotide for detection of SNP TSC0064353
ttaaacgtaagta

SEQ ID NO: 265502 - DNA, 13 bp, Artificial Sequence
  Oligonucleotide for detection of SNP TSC0064353
tacttacgtttaa

SEQ ID NO: 265503 - DNA, 13 bp, Artificial Sequence
  Oligonucleotide for detection of SNP TSC0064354
aaagttatttttt

SEQ ID NO: 265504 - DNA, 13 bp, Artificial Sequence
  Oligonucleotide for detection of SNP TSC0064354
aaaaaataacttt

SEQ ID NO: 265505 - DNA, 13 bp, Artificial Sequence
  Oligonucleotide for detection of SNP TSC0064354
aaagttgtttttt

SEQ ID NO: 265506 - DNA, 13 bp, Artificial Sequence
  Oligonucleotide for detection of SNP TSC0064354
aaaaaacaacttt

SEQ ID NO: 265507 - DNA, 13 bp, Artificial Sequence
  Oligonucleotide for detection of SNP TSC0006483
tgtttttggagty

SEQ ID NO: 265508 - DNA, 13 bp, Artificial Sequence
  Oligonucleotide for detection of SNP TSC0006483
ractccaaaaaca

SEQ ID NO: 265509 - DNA, 13 bp, Artificial Sequence
  Oligonucleotide for detection of SNP TSC0006483
tgttttcggagty

SEQ ID NO: 265510 - DNA, 13 bp, Artificial Sequence
  Oligonucleotide for detection of SNP TSC0006483
ractccgaaaaca

SEQ ID NO: 265511 - DNA, 13 bp, Artificial Sequence
  Oligonucleotide for detection of SNP TSC0006483
ggttttggaggta

SEQ ID NO: 265512 - DNA, 13 bp, Artificial Sequence
  Oligonucleotide for detection of SNP TSC0006483
tacctccaaaacc

SEQ ID NO: 265513 - DNA, 13 bp, Artificial Sequence
  Oligonucleotide for detection of SNP TSC0006483
ggtttcggaggta

SEQ ID NO: 265514 - DNA, 13 bp, Artificial Sequence
  Oligonucleotide for detection of SNP TSC0006483
tacctccgaaacc

SEQ ID NO: 265515 - DNA, 13 bp, Artificial Sequence
  Oligonucleotide for detection of SNP TSC0064355
tatttatattttt

SEQ ID NO: 265516 - DNA, 13 bp, Artificial Sequence
  Oligonucleotide for detection of SNP TSC0064355
aaaaatataaata

SEQ ID NO: 265517 - DNA, 13 bp, Artificial Sequence
  Oligonucleotide for detection of SNP TSC0064355
tatttagattttt

SEQ ID NO: 265518 - DNA, 13 bp, Artificial Sequence
  Oligonucleotide for detection of SNP TSC0064355
aaaaatctaaata

SEQ ID NO: 265519 - DNA, 13 bp, Artificial Sequence
  Oligonucleotide for detection of SNP TSC0064355
aaaagtatgaatg

SEQ ID NO: 265520 - DNA, 13 bp, Artificial Sequence
  Oligonucleotide for detection of SNP TSC0064355
cattcatactttt

SEQ ID NO: 265521 - DNA, 13 bp, Artificial Sequence
  Oligonucleotide for detection of SNP TSC0064355
aaaagtttgaatg

SEQ ID NO: 265522 - DNA, 13 bp, Artificial Sequence
  Oligonucleotide for detection of SNP TSC0064355
cattcaaactttt

SEQ ID NO: 265523 - DNA, 13 bp, Artificial Sequence
  Oligonucleotide for detection of SNP TSC0064356
aatttttggtagg

SEQ ID NO: 265524 - DNA, 13 bp, Artificial Sequence
  Oligonucleotide for detection of SNP TSC0064356
cctaccaaaaatt

SEQ ID NO: 265525 - DNA, 13 bp, Artificial Sequence
  Oligonucleotide for detection of SNP TSC0064356
aattttcggtagg

SEQ ID NO: 265526 - DNA, 13 bp, Artificial Sequence
  Oligonucleotide for detection of SNP TSC0064356
cctaccgaaaatt

SEQ ID NO: 265527 - DNA, 13 bp, Artificial Sequence
  Oligonucleotide for detection of SNP TSC0064356
tttgttggagatt

SEQ ID NO: 265528 - DNA, 13 bp, Artificial Sequence
  Oligonucleotide for detection of SNP TSC0064356
aatctccaacaaa

SEQ ID NO: 265529 - DNA, 13 bp, Artificial Sequence
  Oligonucleotide for detection of SNP TSC0064356
tttgttagagatt

SEQ ID NO: 265530 - DNA, 13 bp, Artificial Sequence
  Oligonucleotide for detection of SNP TSC0064356
aatctctaacaaa

SEQ ID NO: 265531 - DNA, 13 bp, Artificial Sequence
  Oligonucleotide for detection of SNP TSC0064356
tttgtcggagatt

SEQ ID NO: 265532 - DNA, 13 bp, Artificial Sequence
  Oligonucleotide for detection of SNP TSC0064356
aatctccgacaaa

SEQ ID NO: 265533 - DNA, 13 bp, Artificial Sequence
  Oligonucleotide for detection of SNP TSC0064358
ttgggaattagty

SEQ ID NO: 265534 - DNA, 13 bp, Artificial Sequence
  Oligonucleotide for detection of SNP TSC0064358
ractaattcccaa

SEQ ID NO: 265535 - DNA, 13 bp, Artificial Sequence
  Oligonucleotide for detection of SNP TSC0064359
tttatgtggagtg

SEQ ID NO: 265536 - DNA, 13 bp, Artificial Sequence
  Oligonucleotide for detection of SNP TSC0064359
cactccacataaa

SEQ ID NO: 265537 - DNA, 13 bp, Artificial Sequence
  Oligonucleotide for detection of SNP TSC0064359
tttatgcggagtg

SEQ ID NO: 265538 - DNA, 13 bp, Artificial Sequence
  Oligonucleotide for detection of SNP TSC0064359
cactccgcataaa

SEQ ID NO: 265539 - DNA, 13 bp, Artificial Sequence
  Oligonucleotide for detection of SNP TSC0064360
ttatgtatatagg

SEQ ID NO: 265540 - DNA, 13 bp, Artificial Sequence
  Oligonucleotide for detection of SNP TSC0064360
cctatatacataa

SEQ ID NO: 265541 - DNA, 13 bp, Artificial Sequence
  Oligonucleotide for detection of SNP TSC0064360
ttatgtgtatagg

SEQ ID NO: 265542 - DNA, 13 bp, Artificial Sequence
  Oligonucleotide for detection of SNP TSC0064360
cctatacacataa

SEQ ID NO: 265543 - DNA, 13 bp, Artificial Sequence
  Oligonucleotide for detection of SNP TSC0064360
ttatgcgtatagg

SEQ ID NO: 265544 - DNA, 13 bp, Artificial Sequence
  Oligonucleotide for detection of SNP TSC0064360
cctatacgcataa

SEQ ID NO: 265545 - DNA, 13 bp, Artificial Sequence
  Oligonucleotide for detection of SNP TSC0064360
tttatatgtatgg

SEQ ID NO: 265546 - DNA, 13 bp, Artificial Sequence
  Oligonucleotide for detection of SNP TSC0064360
ccatacatataaa

SEQ ID NO: 265547 - DNA, 13 bp, Artificial Sequence
  Oligonucleotide for detection of SNP TSC0064360
tttatacgtatgg

SEQ ID NO: 265548 - DNA, 13 bp, Artificial Sequence
  Oligonucleotide for detection of SNP TSC0064360
ccatacgtataaa

SEQ ID NO: 265549 - DNA, 13 bp, Artificial Sequence
  Oligonucleotide for detection of SNP TSC0064364
ttgtatattgttg

SEQ ID NO: 265550 - DNA, 13 bp, Artificial Sequence
  Oligonucleotide for detection of SNP TSC0064364
caacaatatacaa

SEQ ID NO: 265551 - DNA, 13 bp, Artificial Sequence
  Oligonucleotide for detection of SNP TSC0064364
ttgtatgttgttg

SEQ ID NO: 265552 - DNA, 13 bp, Artificial Sequence
  Oligonucleotide for detection of SNP TSC0064364
caacaacatacaa

SEQ ID NO: 265553 - DNA, 13 bp, Artificial Sequence
  Oligonucleotide for detection of SNP TSC0064364
tcgtatattgttg

SEQ ID NO: 265554 - DNA, 13 bp, Artificial Sequence
  Oligonucleotide for detection of SNP TSC0064364
caacaatatacga

SEQ ID NO: 265555 - DNA, 13 bp, Artificial Sequence
  Oligonucleotide for detection of SNP TSC0064364
tcgtatgttgttg

SEQ ID NO: 265556 - DNA, 13 bp, Artificial Sequence
  Oligonucleotide for detection of SNP TSC0064364
caacaacatacga

SEQ ID NO: 265557 - DNA, 13 bp, Artificial Sequence
  Oligonucleotide for detection of SNP TSC0064364
ttgtacgttgttg

SEQ ID NO: 265558 - DNA, 13 bp, Artificial Sequence
  Oligonucleotide for detection of SNP TSC0064364
caacaacgtacaa

SEQ ID NO: 265559 - DNA, 13 bp, Artificial Sequence
  Oligonucleotide for detection of SNP TSC0064364
tcgtacgttgttg

SEQ ID NO: 265560 - DNA, 13 bp, Artificial Sequence
  Oligonucleotide for detection of SNP TSC0064364
caacaacgtacga

SEQ ID NO: 265561 - DNA, 13 bp, Artificial Sequence
  Oligonucleotide for detection of SNP TSC0064364
tagtagtgtgtgg

SEQ ID NO: 265562 - DNA, 13 bp, Artificial Sequence
  Oligonucleotide for detection of SNP TSC0064364
ccacacactacta

SEQ ID NO: 265563 - DNA, 13 bp, Artificial Sequence
  Oligonucleotide for detection of SNP TSC0064364
tagtagtgtgcgg

SEQ ID NO: 265564 - DNA, 13 bp, Artificial Sequence
  Oligonucleotide for detection of SNP TSC0064364
ccgcacactacta

SEQ ID NO: 265565 - DNA, 13 bp, Artificial Sequence
  Oligonucleotide for detection of SNP TSC0064364
tagtagcgtgtgg

SEQ ID NO: 265566 - DNA, 13 bp, Artificial Sequence
  Oligonucleotide for detection of SNP TSC0064364
ccacacgctacta

SEQ ID NO: 265567 - DNA, 13 bp, Artificial Sequence
  Oligonucleotide for detection of SNP TSC0064364
tagtagcgtgcgg

SEQ ID NO: 265568 - DNA, 13 bp, Artificial Sequence
  Oligonucleotide for detection of SNP TSC0064364
ccgcacgctacta

SEQ ID NO: 265569 - DNA, 13 bp, Artificial Sequence
  Oligonucleotide for detection of SNP TSC0064365
tagagttgtatgy

SEQ ID NO: 265570 - DNA, 13 bp, Artificial Sequence
  Oligonucleotide for detection of SNP TSC0064365
rcatacaactcta

SEQ ID NO: 265571 - DNA, 13 bp, Artificial Sequence
  Oligonucleotide for detection of SNP TSC0064365
tagagtcgtatgy

SEQ ID NO: 265572 - DNA, 13 bp, Artificial Sequence
  Oligonucleotide for detection of SNP TSC0064365
rcatacgactcta

SEQ ID NO: 265573 - DNA, 13 bp, Artificial Sequence
  Oligonucleotide for detection of SNP TSC0064365
tagagttgtacgy

SEQ ID NO: 265574 - DNA, 13 bp, Artificial Sequence
  Oligonucleotide for detection of SNP TSC0064365
rcgtacaactcta

SEQ ID NO: 265575 - DNA, 13 bp, Artificial Sequence
  Oligonucleotide for detection of SNP TSC0064365
tagagtcgtacgy

SEQ ID NO: 265576 - DNA, 13 bp, Artificial Sequence
  Oligonucleotide for detection of SNP TSC0064365
rcgtacgactcta

SEQ ID NO: 265577 - DNA, 13 bp, Artificial Sequence
  Oligonucleotide for detection of SNP TSC0064365
gtgtgtggttttg

SEQ ID NO: 265578 - DNA, 13 bp, Artificial Sequence
  Oligonucleotide for detection of SNP TSC0064365
caaaaccacacac

SEQ ID NO: 265579 - DNA, 13 bp, Artificial Sequence
  Oligonucleotide for detection of SNP TSC0064365
gtgtgtagttttg

SEQ ID NO: 265580 - DNA, 13 bp, Artificial Sequence
  Oligonucleotide for detection of SNP TSC0064365
caaaactacacac

SEQ ID NO: 265581 - DNA, 13 bp, Artificial Sequence
  Oligonucleotide for detection of SNP TSC0064365
gcgtgtggttttg

SEQ ID NO: 265582 - DNA, 13 bp, Artificial Sequence
  Oligonucleotide for detection of SNP TSC0064365
caaaaccacacgc

SEQ ID NO: 265583 - DNA, 13 bp, Artificial Sequence
  Oligonucleotide for detection of SNP TSC0064365
gcgtgtagttttg

SEQ ID NO: 265584 - DNA, 13 bp, Artificial Sequence
  Oligonucleotide for detection of SNP TSC0064365
caaaactacacgc

SEQ ID NO: 265585 - DNA, 13 bp, Artificial Sequence
  Oligonucleotide for detection of SNP TSC0064365
gtgtgcggttttg

SEQ ID NO: 265586 - DNA, 13 bp, Artificial Sequence
  Oligonucleotide for detection of SNP TSC0064365
caaaaccgcacac

SEQ ID NO: 265587 - DNA, 13 bp, Artificial Sequence
  Oligonucleotide for detection of SNP TSC0064365
gcgtgcggttttg

SEQ ID NO: 265588 - DNA, 13 bp, Artificial Sequence
  Oligonucleotide for detection of SNP TSC0064365
caaaaccgcacgc

SEQ ID NO: 265589 - DNA, 13 bp, Artificial Sequence
  Oligonucleotide for detection of SNP TSC0064368
attgtaatgataa

SEQ ID NO: 265590 - DNA, 13 bp, Artificial Sequence
  Oligonucleotide for detection of SNP TSC0064368
ttatcattacaat

SEQ ID NO: 265591 - DNA, 13 bp, Artificial Sequence
  Oligonucleotide for detection of SNP TSC0064368
attgtagtgataa

SEQ ID NO: 265592 - DNA, 13 bp, Artificial Sequence
  Oligonucleotide for detection of SNP TSC0064368
ttatcactacaat

SEQ ID NO: 265593 - DNA, 13 bp, Artificial Sequence
  Oligonucleotide for detection of SNP TSC0064370
atagttagatgta

SEQ ID NO: 265594 - DNA, 13 bp, Artificial Sequence
  Oligonucleotide for detection of SNP TSC0064370
tacatctaactat

SEQ ID NO: 265595 - DNA, 13 bp, Artificial Sequence
  Oligonucleotide for detection of SNP TSC0064370
atagttggatgta

SEQ ID NO: 265596 - DNA, 13 bp, Artificial Sequence
  Oligonucleotide for detection of SNP TSC0064370
tacatccaactat

SEQ ID NO: 265597 - DNA, 13 bp, Artificial Sequence
  Oligonucleotide for detection of SNP TSC0064370
atagtcggatgta

SEQ ID NO: 265598 - DNA, 13 bp, Artificial Sequence
  Oligonucleotide for detection of SNP TSC0064370
tacatccgactat

SEQ ID NO: 265599 - DNA, 13 bp, Artificial Sequence
  Oligonucleotide for detection of SNP TSC0064370
tatatttggttgt

SEQ ID NO: 265600 - DNA, 13 bp, Artificial Sequence
  Oligonucleotide for detection of SNP TSC0064370
acaaccaaatata

SEQ ID NO: 265601 - DNA, 13 bp, Artificial Sequence
  Oligonucleotide for detection of SNP TSC0064370
tatattcggttgt

SEQ ID NO: 265602 - DNA, 13 bp, Artificial Sequence
  Oligonucleotide for detection of SNP TSC0064370
acaaccgaatata

SEQ ID NO: 265603 - DNA, 13 bp, Artificial Sequence
  Oligonucleotide for detection of SNP TSC0064371
aatgggaatatag

SEQ ID NO: 265604 - DNA, 13 bp, Artificial Sequence
  Oligonucleotide for detection of SNP TSC0064371
ctatattcccatt

SEQ ID NO: 265605 - DNA, 13 bp, Artificial Sequence
  Oligonucleotide for detection of SNP TSC0064371
aatggggatatag

SEQ ID NO: 265606 - DNA, 13 bp, Artificial Sequence
  Oligonucleotide for detection of SNP TSC0064371
ctatatccccatt

SEQ ID NO: 265607 - DNA, 13 bp, Artificial Sequence
  Oligonucleotide for detection of SNP TSC0064372
attttataagtgt

SEQ ID NO: 265608 - DNA, 13 bp, Artificial Sequence
  Oligonucleotide for detection of SNP TSC0064372
acacttataaaat

SEQ ID NO: 265609 - DNA, 13 bp, Artificial Sequence
  Oligonucleotide for detection of SNP TSC0064372
attttagaagtgt

SEQ ID NO: 265610 - DNA, 13 bp, Artificial Sequence
  Oligonucleotide for detection of SNP TSC0064372
acacttctaaaat

SEQ ID NO: 265611 - DNA, 13 bp, Artificial Sequence
  Oligonucleotide for detection of SNP TSC0064373
ggatgaaagggga

SEQ ID NO: 265612 - DNA, 13 bp, Artificial Sequence
  Oligonucleotide for detection of SNP TSC0064373
tcccctttcatcc

SEQ ID NO: 265613 - DNA, 13 bp, Artificial Sequence
  Oligonucleotide for detection of SNP TSC0064373
ggatgagagggga

SEQ ID NO: 265614 - DNA, 13 bp, Artificial Sequence
  Oligonucleotide for detection of SNP TSC0064373
tcccctctcatcc

SEQ ID NO: 265615 - DNA, 13 bp, Artificial Sequence
  Oligonucleotide for detection of SNP TSC0064375
tagagttttttay

SEQ ID NO: 265616 - DNA, 13 bp, Artificial Sequence
  Oligonucleotide for detection of SNP TSC0064375
rtaaaaaactcta

SEQ ID NO: 265617 - DNA, 13 bp, Artificial Sequence
  Oligonucleotide for detection of SNP TSC0064375
tagagtgttttay

SEQ ID NO: 265618 - DNA, 13 bp, Artificial Sequence
  Oligonucleotide for detection of SNP TSC0064375
rtaaaacactcta

SEQ ID NO: 265619 - DNA, 13 bp, Artificial Sequence
  Oligonucleotide for detection of SNP TSC0064376
aagtagtttttat

SEQ ID NO: 265620 - DNA, 13 bp, Artificial Sequence
  Oligonucleotide for detection of SNP TSC0064376
ataaaaactactt

SEQ ID NO: 265621 - DNA, 13 bp, Artificial Sequence
  Oligonucleotide for detection of SNP TSC0064376
atgaaggttattt

SEQ ID NO: 265622 - DNA, 13 bp, Artificial Sequence
  Oligonucleotide for detection of SNP TSC0064376
aaataaccttcat

SEQ ID NO: 265623 - DNA, 13 bp, Artificial Sequence
  Oligonucleotide for detection of SNP TSC0064376
atgaagtttattt

SEQ ID NO: 265624 - DNA, 13 bp, Artificial Sequence
  Oligonucleotide for detection of SNP TSC0064376
aaataaacttcat

SEQ ID NO: 265625 - DNA, 13 bp, Artificial Sequence
  Oligonucleotide for detection of SNP TSC0064377
tttttggttaatt

SEQ ID NO: 265626 - DNA, 13 bp, Artificial Sequence
  Oligonucleotide for detection of SNP TSC0064377
aattaaccaaaaa

SEQ ID NO: 265627 - DNA, 13 bp, Artificial Sequence
  Oligonucleotide for detection of SNP TSC0064378
aatgagttatgat

SEQ ID NO: 265628 - DNA, 13 bp, Artificial Sequence
  Oligonucleotide for detection of SNP TSC0064378
atcataactcatt

SEQ ID NO: 265629 - DNA, 13 bp, Artificial Sequence
  Oligonucleotide for detection of SNP TSC0064378
aatgagatatgat

SEQ ID NO: 265630 - DNA, 13 bp, Artificial Sequence
  Oligonucleotide for detection of SNP TSC0064378
atcatatctcatt

SEQ ID NO: 265631 - DNA, 13 bp, Artificial Sequence
  Oligonucleotide for detection of SNP TSC0064380
gtttttaaagatt

SEQ ID NO: 265632 - DNA, 13 bp, Artificial Sequence
  Oligonucleotide for detection of SNP TSC0064380
aatctttaaaaac

SEQ ID NO: 265633 - DNA, 13 bp, Artificial Sequence
  Oligonucleotide for detection of SNP TSC0064380
gtttttgaagatt

SEQ ID NO: 265634 - DNA, 13 bp, Artificial Sequence
  Oligonucleotide for detection of SNP TSC0064380
aatcttcaaaaac

SEQ ID NO: 265635 - DNA, 13 bp, Artificial Sequence
  Oligonucleotide for detection of SNP TSC0064381
ataaattgaatty

SEQ ID NO: 265636 - DNA, 13 bp, Artificial Sequence
  Oligonucleotide for detection of SNP TSC0064381
raattcaatttat

SEQ ID NO: 265637 - DNA, 13 bp, Artificial Sequence
  Oligonucleotide for detection of SNP TSC0064381
ataaatggaatty

SEQ ID NO: 265638 - DNA, 13 bp, Artificial Sequence
  Oligonucleotide for detection of SNP TSC0064381
raattccatttat

SEQ ID NO: 265639 - DNA, 13 bp, Artificial Sequence
  Oligonucleotide for detection of SNP TSC0064381
gagtttaatttat

SEQ ID NO: 265640 - DNA, 13 bp, Artificial Sequence
  Oligonucleotide for detection of SNP TSC0064381
ataaattaaactc

SEQ ID NO: 265641 - DNA, 13 bp, Artificial Sequence
  Oligonucleotide for detection of SNP TSC0064381
gagttttatttat

SEQ ID NO: 265642 - DNA, 13 bp, Artificial Sequence
  Oligonucleotide for detection of SNP TSC0064381
ataaataaaactc

SEQ ID NO: 265643 - DNA, 13 bp, Artificial Sequence
  Oligonucleotide for detection of SNP TSC0064382
aatttagagtagg

SEQ ID NO: 265644 - DNA, 13 bp, Artificial Sequence
  Oligonucleotide for detection of SNP TSC0064382
cctactctaaatt

SEQ ID NO: 265645 - DNA, 13 bp, Artificial Sequence
  Oligonucleotide for detection of SNP TSC0064382
aatttaaagtagg

SEQ ID NO: 265646 - DNA, 13 bp, Artificial Sequence
  Oligonucleotide for detection of SNP TSC0064382
cctactttaaatt

SEQ ID NO: 265647 - DNA, 13 bp, Artificial Sequence
  Oligonucleotide for detection of SNP TSC0064383
ttatatgttaaaa

SEQ ID NO: 265648 - DNA, 13 bp, Artificial Sequence
  Oligonucleotide for detection of SNP TSC0064383
ttttaacatataa

SEQ ID NO: 265649 - DNA, 13 bp, Artificial Sequence
  Oligonucleotide for detection of SNP TSC0064384
gagaatttttgag

SEQ ID NO: 265650 - DNA, 13 bp, Artificial Sequence
  Oligonucleotide for detection of SNP TSC0064384
ctcaaaaattctc

SEQ ID NO: 265651 - DNA, 13 bp, Artificial Sequence
  Oligonucleotide for detection of SNP TSC0064384
gagaatgtttgag

SEQ ID NO: 265652 - DNA, 13 bp, Artificial Sequence
  Oligonucleotide for detection of SNP TSC0064384
ctcaaacattctc

SEQ ID NO: 265653 - DNA, 13 bp, Artificial Sequence
  Oligonucleotide for detection of SNP TSC0064384
tttaagaatttty

SEQ ID NO: 265654 - DNA, 13 bp, Artificial Sequence
  Oligonucleotide for detection of SNP TSC0064384
raaaattcttaaa

SEQ ID NO: 265655 - DNA, 13 bp, Artificial Sequence
  Oligonucleotide for detection of SNP TSC0064384
tttaagtatttty

SEQ ID NO: 265656 - DNA, 13 bp, Artificial Sequence
  Oligonucleotide for detection of SNP TSC0064384
raaaatacttaaa

SEQ ID NO: 265657 - DNA, 13 bp, Artificial Sequence
  Oligonucleotide for detection of SNP TSC0064385
tatttaaattaat

SEQ ID NO: 265658 - DNA, 13 bp, Artificial Sequence
  Oligonucleotide for detection of SNP TSC0064385
attaatttaaata

SEQ ID NO: 265659 - DNA, 13 bp, Artificial Sequence
  Oligonucleotide for detection of SNP TSC0064387
tagttatgtgtaa

SEQ ID NO: 265660 - DNA, 13 bp, Artificial Sequence
  Oligonucleotide for detection of SNP TSC0064387
ttacacataacta

SEQ ID NO: 265661 - DNA, 13 bp, Artificial Sequence
  Oligonucleotide for detection of SNP TSC0064387
tagttacgtgtaa

SEQ ID NO: 265662 - DNA, 13 bp, Artificial Sequence
  Oligonucleotide for detection of SNP TSC0064387
ttacacgtaacta

SEQ ID NO: 265663 - DNA, 13 bp, Artificial Sequence
  Oligonucleotide for detection of SNP TSC0064387
ttatatgtaattg

SEQ ID NO: 265664 - DNA, 13 bp, Artificial Sequence
  Oligonucleotide for detection of SNP TSC0064387
caattacatataa

SEQ ID NO: 265665 - DNA, 13 bp, Artificial Sequence
  Oligonucleotide for detection of SNP TSC0064387
ttatatataattg

SEQ ID NO: 265666 - DNA, 13 bp, Artificial Sequence
  Oligonucleotide for detection of SNP TSC0064387
caattatatataa

SEQ ID NO: 265667 - DNA, 13 bp, Artificial Sequence
  Oligonucleotide for detection of SNP TSC0064387
ttatacgtaattg

SEQ ID NO: 265668 - DNA, 13 bp, Artificial Sequence
  Oligonucleotide for detection of SNP TSC0064387
caattacgtataa

SEQ ID NO: 265669 - DNA, 13 bp, Artificial Sequence
  Oligonucleotide for detection of SNP TSC0064388
tgaagtatgggtt

SEQ ID NO: 265670 - DNA, 13 bp, Artificial Sequence
  Oligonucleotide for detection of SNP TSC0064388
aacccatacttca

SEQ ID NO: 265671 - DNA, 13 bp, Artificial Sequence
  Oligonucleotide for detection of SNP TSC0064388
tgaagtttgggtt

SEQ ID NO: 265672 - DNA, 13 bp, Artificial Sequence
  Oligonucleotide for detection of SNP TSC0064388
aacccaaacttca

SEQ ID NO: 265673 - DNA, 13 bp, Artificial Sequence
  Oligonucleotide for detection of SNP TSC0064389
ttttggtaaggtt

SEQ ID NO: 265674 - DNA, 13 bp, Artificial Sequence
  Oligonucleotide for detection of SNP TSC0064389
aaccttaccaaaa

SEQ ID NO: 265675 - DNA, 13 bp, Artificial Sequence
  Oligonucleotide for detection of SNP TSC0064389
ttttgggaaggtt

SEQ ID NO: 265676 - DNA, 13 bp, Artificial Sequence
  Oligonucleotide for detection of SNP TSC0064389
aaccttcccaaaa

SEQ ID NO: 265677 - DNA, 13 bp, Artificial Sequence
  Oligonucleotide for detection of SNP TSC0064389
aattttgttaaga

SEQ ID NO: 265678 - DNA, 13 bp, Artificial Sequence
  Oligonucleotide for detection of SNP TSC0064389
tcttaacaaaatt

SEQ ID NO: 265679 - DNA, 13 bp, Artificial Sequence
  Oligonucleotide for detection of SNP TSC0064389
aatttttttaaga

SEQ ID NO: 265680 - DNA, 13 bp, Artificial Sequence
  Oligonucleotide for detection of SNP TSC0064389
tcttaaaaaaatt

SEQ ID NO: 265681 - DNA, 13 bp, Artificial Sequence
  Oligonucleotide for detection of SNP TSC0064390
aattagttattta

SEQ ID NO: 265682 - DNA, 13 bp, Artificial Sequence
  Oligonucleotide for detection of SNP TSC0064390
taaataactaatt

SEQ ID NO: 265683 - DNA, 13 bp, Artificial Sequence
  Oligonucleotide for detection of SNP TSC0064390
aattaggtattta

SEQ ID NO: 265684 - DNA, 13 bp, Artificial Sequence
  Oligonucleotide for detection of SNP TSC0064390
taaatacctaatt

SEQ ID NO: 265685 - DNA, 13 bp, Artificial Sequence
  Oligonucleotide for detection of SNP TSC0064390
tgaataattaatt

SEQ ID NO: 265686 - DNA, 13 bp, Artificial Sequence
  Oligonucleotide for detection of SNP TSC0064390
aattaattattca

SEQ ID NO: 265687 - DNA, 13 bp, Artificial Sequence
  Oligonucleotide for detection of SNP TSC0064390
tgaatatttaatt

SEQ ID NO: 265688 - DNA, 13 bp, Artificial Sequence
  Oligonucleotide for detection of SNP TSC0064390
aattaaatattca

SEQ ID NO: 265689 - DNA, 13 bp, Artificial Sequence
  Oligonucleotide for detection of SNP TSC0064392
tttagtaattgaa

SEQ ID NO: 265690 - DNA, 13 bp, Artificial Sequence
  Oligonucleotide for detection of SNP TSC0064392
ttcaattactaaa

SEQ ID NO: 265691 - DNA, 13 bp, Artificial Sequence
  Oligonucleotide for detection of SNP TSC0064392
tttagtgattgaa

SEQ ID NO: 265692 - DNA, 13 bp, Artificial Sequence
  Oligonucleotide for detection of SNP TSC0064392
ttcaatcactaaa

SEQ ID NO: 265693 - DNA, 13 bp, Artificial Sequence
  Oligonucleotide for detection of SNP TSC0064392
tttagcgattgaa

SEQ ID NO: 265694 - DNA, 13 bp, Artificial Sequence
  Oligonucleotide for detection of SNP TSC0064392
ttcaatcgctaaa

SEQ ID NO: 265695 - DNA, 13 bp, Artificial Sequence
  Oligonucleotide for detection of SNP TSC0064392
tttaattgttaaa

SEQ ID NO: 265696 - DNA, 13 bp, Artificial Sequence
  Oligonucleotide for detection of SNP TSC0064392
tttaacaattaaa

SEQ ID NO: 265697 - DNA, 13 bp, Artificial Sequence
  Oligonucleotide for detection of SNP TSC0064393
attattaagaata

SEQ ID NO: 265698 - DNA, 13 bp, Artificial Sequence
  Oligonucleotide for detection of SNP TSC0064393
tattcttaataat

SEQ ID NO: 265699 - DNA, 13 bp, Artificial Sequence
  Oligonucleotide for detection of SNP TSC0064393
attattgagaata

SEQ ID NO: 265700 - DNA, 13 bp, Artificial Sequence
  Oligonucleotide for detection of SNP TSC0064393
tattctcaataat

SEQ ID NO: 265701 - DNA, 13 bp, Artificial Sequence
  Oligonucleotide for detection of SNP TSC0064393
attatcgagaata

SEQ ID NO: 265702 - DNA, 13 bp, Artificial Sequence
  Oligonucleotide for detection of SNP TSC0064393
tattctcgataat

SEQ ID NO: 265703 - DNA, 13 bp, Artificial Sequence
  Oligonucleotide for detection of SNP TSC0064393
tatttttggtagt

SEQ ID NO: 265704 - DNA, 13 bp, Artificial Sequence
  Oligonucleotide for detection of SNP TSC0064393
actaccaaaaata

SEQ ID NO: 265705 - DNA, 13 bp, Artificial Sequence
  Oligonucleotide for detection of SNP TSC0064393
tattttcggtagt

SEQ ID NO: 265706 - DNA, 13 bp, Artificial Sequence
  Oligonucleotide for detection of SNP TSC0064393
actaccgaaaata

SEQ ID NO: 265707 - DNA, 13 bp, Artificial Sequence
  Oligonucleotide for detection of SNP TSC0064394
ttgtttgggggga

SEQ ID NO: 265708 - DNA, 13 bp, Artificial Sequence
  Oligonucleotide for detection of SNP TSC0064394
tccccccaaacaa

SEQ ID NO: 265709 - DNA, 13 bp, Artificial Sequence
  Oligonucleotide for detection of SNP TSC0064394
ttgtttaggggga

SEQ ID NO: 265710 - DNA, 13 bp, Artificial Sequence
  Oligonucleotide for detection of SNP TSC0064394
tccccctaaacaa

SEQ ID NO: 265711 - DNA, 13 bp, Artificial Sequence
  Oligonucleotide for detection of SNP TSC0064394
ttgttcgggggga

SEQ ID NO: 265712 - DNA, 13 bp, Artificial Sequence
  Oligonucleotide for detection of SNP TSC0064394
tccccccgaacaa

SEQ ID NO: 265713 - DNA, 13 bp, Artificial Sequence
  Oligonucleotide for detection of SNP TSC0064395
taagagttttttt

SEQ ID NO: 265714 - DNA, 13 bp, Artificial Sequence
  Oligonucleotide for detection of SNP TSC0064395
aaaaaaactctta

SEQ ID NO: 265715 - DNA, 13 bp, Artificial Sequence
  Oligonucleotide for detection of SNP TSC0064395
taagaggtttttt

SEQ ID NO: 265716 - DNA, 13 bp, Artificial Sequence
  Oligonucleotide for detection of SNP TSC0064395
aaaaaacctctta

SEQ ID NO: 265717 - DNA, 13 bp, Artificial Sequence
  Oligonucleotide for detection of SNP TSC0064395
aaaaaaatttttg

SEQ ID NO: 265718 - DNA, 13 bp, Artificial Sequence
  Oligonucleotide for detection of SNP TSC0064395
caaaaattttttt

SEQ ID NO: 265719 - DNA, 13 bp, Artificial Sequence
  Oligonucleotide for detection of SNP TSC0064395
aaaaaattttttg

SEQ ID NO: 265720 - DNA, 13 bp, Artificial Sequence
  Oligonucleotide for detection of SNP TSC0064395
caaaaaatttttt

SEQ ID NO: 265721 - DNA, 13 bp, Artificial Sequence
  Oligonucleotide for detection of SNP TSC0064396
agattttgttata

SEQ ID NO: 265722 - DNA, 13 bp, Artificial Sequence
  Oligonucleotide for detection of SNP TSC0064396
tataacaaaatct

SEQ ID NO: 265723 - DNA, 13 bp, Artificial Sequence
  Oligonucleotide for detection of SNP TSC0064396
agatttcgttata

SEQ ID NO: 265724 - DNA, 13 bp, Artificial Sequence
  Oligonucleotide for detection of SNP TSC0064396
tataacgaaatct

SEQ ID NO: 265725 - DNA, 13 bp, Artificial Sequence
  Oligonucleotide for detection of SNP TSC0064396
tatgatggggttt

SEQ ID NO: 265726 - DNA, 13 bp, Artificial Sequence
  Oligonucleotide for detection of SNP TSC0064396
aaaccccatcata

SEQ ID NO: 265727 - DNA, 13 bp, Artificial Sequence
  Oligonucleotide for detection of SNP TSC0064396
tatgatagggttt

SEQ ID NO: 265728 - DNA, 13 bp, Artificial Sequence
  Oligonucleotide for detection of SNP TSC0064396
aaaccctatcata

SEQ ID NO: 265729 - DNA, 13 bp, Artificial Sequence
  Oligonucleotide for detection of SNP TSC0064396
tatgacggggttt

SEQ ID NO: 265730 - DNA, 13 bp, Artificial Sequence
  Oligonucleotide for detection of SNP TSC0064396
aaaccccgtcata

SEQ ID NO: 265731 - DNA, 13 bp, Artificial Sequence
  Oligonucleotide for detection of SNP TSC0064398
gttagtaaagtta

SEQ ID NO: 265732 - DNA, 13 bp, Artificial Sequence
  Oligonucleotide for detection of SNP TSC0064398
taactttactaac

SEQ ID NO: 265733 - DNA, 13 bp, Artificial Sequence
  Oligonucleotide for detection of SNP TSC0064398
gttagtgaagtta

SEQ ID NO: 265734 - DNA, 13 bp, Artificial Sequence
  Oligonucleotide for detection of SNP TSC0064398
taacttcactaac

SEQ ID NO: 265735 - DNA, 13 bp, Artificial Sequence
  Oligonucleotide for detection of SNP TSC0064399
agttattagatta

SEQ ID NO: 265736 - DNA, 13 bp, Artificial Sequence
  Oligonucleotide for detection of SNP TSC0064399
taatctaataact

SEQ ID NO: 265737 - DNA, 13 bp, Artificial Sequence
  Oligonucleotide for detection of SNP TSC0064399
agttatgagatta

SEQ ID NO: 265738 - DNA, 13 bp, Artificial Sequence
  Oligonucleotide for detection of SNP TSC0064399
taatctcataact

SEQ ID NO: 265739 - DNA, 13 bp, Artificial Sequence
  Oligonucleotide for detection of SNP TSC0064399
agttacgagatta

SEQ ID NO: 265740 - DNA, 13 bp, Artificial Sequence
  Oligonucleotide for detection of SNP TSC0064399
taatctcgtaact

SEQ ID NO: 265741 - DNA, 13 bp, Artificial Sequence
  Oligonucleotide for detection of SNP TSC0064399
tgatttggtggtt

SEQ ID NO: 265742 - DNA, 13 bp, Artificial Sequence
  Oligonucleotide for detection of SNP TSC0064399
aaccaccaaatca

SEQ ID NO: 265743 - DNA, 13 bp, Artificial Sequence
  Oligonucleotide for detection of SNP TSC0064400
attattattgagt

SEQ ID NO: 265744 - DNA, 13 bp, Artificial Sequence
  Oligonucleotide for detection of SNP TSC0064400
actcaataataat

SEQ ID NO: 265745 - DNA, 13 bp, Artificial Sequence
  Oligonucleotide for detection of SNP TSC0064400
attattgttgagt

SEQ ID NO: 265746 - DNA, 13 bp, Artificial Sequence
  Oligonucleotide for detection of SNP TSC0064400
actcaacaataat

SEQ ID NO: 265747 - DNA, 13 bp, Artificial Sequence
  Oligonucleotide for detection of SNP TSC0064400
attatcgttgagt

SEQ ID NO: 265748 - DNA, 13 bp, Artificial Sequence
  Oligonucleotide for detection of SNP TSC0064400
actcaacgataat

SEQ ID NO: 265749 - DNA, 13 bp, Artificial Sequence
  Oligonucleotide for detection of SNP TSC0064400
atttagtgatggt

SEQ ID NO: 265750 - DNA, 13 bp, Artificial Sequence
  Oligonucleotide for detection of SNP TSC0064400
accatcactaaat

SEQ ID NO: 265751 - DNA, 13 bp, Artificial Sequence
  Oligonucleotide for detection of SNP TSC0064400
atttagcgatggt

SEQ ID NO: 265752 - DNA, 13 bp, Artificial Sequence
  Oligonucleotide for detection of SNP TSC0064400
accatcgctaaat

SEQ ID NO: 265753 - DNA, 13 bp, Artificial Sequence
  Oligonucleotide for detection of SNP TSC0064401
taagatatattta

SEQ ID NO: 265754 - DNA, 13 bp, Artificial Sequence
  Oligonucleotide for detection of SNP TSC0064401
taaatatatctta

SEQ ID NO: 265755 - DNA, 13 bp, Artificial Sequence
  Oligonucleotide for detection of SNP TSC0064401
taagatgtattta

SEQ ID NO: 265756 - DNA, 13 bp, Artificial Sequence
  Oligonucleotide for detection of SNP TSC0064401
taaatacatctta

SEQ ID NO: 265757 - DNA, 13 bp, Artificial Sequence
  Oligonucleotide for detection of SNP TSC0064401
taagacgtattta

SEQ ID NO: 265758 - DNA, 13 bp, Artificial Sequence
  Oligonucleotide for detection of SNP TSC0064401
taaatacgtctta

SEQ ID NO: 265759 - DNA, 13 bp, Artificial Sequence
  Oligonucleotide for detection of SNP TSC0064401
tggatgtgttttg

SEQ ID NO: 265760 - DNA, 13 bp, Artificial Sequence
  Oligonucleotide for detection of SNP TSC0064401
caaaacacatcca

SEQ ID NO: 265761 - DNA, 13 bp, Artificial Sequence
  Oligonucleotide for detection of SNP TSC0064401
tggatgcgttttg

SEQ ID NO: 265762 - DNA, 13 bp, Artificial Sequence
  Oligonucleotide for detection of SNP TSC0064401
caaaacgcatcca

SEQ ID NO: 265763 - DNA, 13 bp, Artificial Sequence
  Oligonucleotide for detection of SNP TSC0064403
gtttggatagttg

SEQ ID NO: 265764 - DNA, 13 bp, Artificial Sequence
  Oligonucleotide for detection of SNP TSC0064403
caactatccaaac

SEQ ID NO: 265765 - DNA, 13 bp, Artificial Sequence
  Oligonucleotide for detection of SNP TSC0064403
gtttggttagttg

SEQ ID NO: 265766 - DNA, 13 bp, Artificial Sequence
  Oligonucleotide for detection of SNP TSC0064403
caactaaccaaac

SEQ ID NO: 265767 - DNA, 13 bp, Artificial Sequence
  Oligonucleotide for detection of SNP TSC0064403
tagttgtttaagy

SEQ ID NO: 265768 - DNA, 13 bp, Artificial Sequence
  Oligonucleotide for detection of SNP TSC0064403
rcttaaacaacta

SEQ ID NO: 265769 - DNA, 13 bp, Artificial Sequence
  Oligonucleotide for detection of SNP TSC0064403
tagttggttaagy

SEQ ID NO: 265770 - DNA, 13 bp, Artificial Sequence
  Oligonucleotide for detection of SNP TSC0064403
rcttaaccaacta

SEQ ID NO: 265771 - DNA, 13 bp, Artificial Sequence
  Oligonucleotide for detection of SNP TSC0064404
tggatgaagttat

SEQ ID NO: 265772 - DNA, 13 bp, Artificial Sequence
  Oligonucleotide for detection of SNP TSC0064404
ataacttcatcca

SEQ ID NO: 265773 - DNA, 13 bp, Artificial Sequence
  Oligonucleotide for detection of SNP TSC0064404
tggatggagttat

SEQ ID NO: 265774 - DNA, 13 bp, Artificial Sequence
  Oligonucleotide for detection of SNP TSC0064404
ataactccatcca

SEQ ID NO: 265775 - DNA, 13 bp, Artificial Sequence
  Oligonucleotide for detection of SNP TSC0064405
tagaatatgtttt

SEQ ID NO: 265776 - DNA, 13 bp, Artificial Sequence
  Oligonucleotide for detection of SNP TSC0064405
aaaacatattcta

SEQ ID NO: 265777 - DNA, 13 bp, Artificial Sequence
  Oligonucleotide for detection of SNP TSC0064405
tagaatgtgtttt

SEQ ID NO: 265778 - DNA, 13 bp, Artificial Sequence
  Oligonucleotide for detection of SNP TSC0064405
aaaacacattcta

SEQ ID NO: 265779 - DNA, 13 bp, Artificial Sequence
  Oligonucleotide for detection of SNP TSC0064405
tagaacgtgtttt

SEQ ID NO: 265780 - DNA, 13 bp, Artificial Sequence
  Oligonucleotide for detection of SNP TSC0064405
aaaacacgttcta

SEQ ID NO: 265781 - DNA, 13 bp, Artificial Sequence
  Oligonucleotide for detection of SNP TSC0064405
agggtatgttttg

SEQ ID NO: 265782 - DNA, 13 bp, Artificial Sequence
  Oligonucleotide for detection of SNP TSC0064405
caaaacataccct

SEQ ID NO: 265783 - DNA, 13 bp, Artificial Sequence
  Oligonucleotide for detection of SNP TSC0064405
agggtacgttttg

SEQ ID NO: 265784 - DNA, 13 bp, Artificial Sequence
  Oligonucleotide for detection of SNP TSC0064405
caaaacgtaccct

SEQ ID NO: 265785 - DNA, 13 bp, Artificial Sequence
  Oligonucleotide for detection of SNP TSC0064408
gttttgtgatagt

SEQ ID NO: 265786 - DNA, 13 bp, Artificial Sequence
  Oligonucleotide for detection of SNP TSC0064408
actatcacaaaac

SEQ ID NO: 265787 - DNA, 13 bp, Artificial Sequence
  Oligonucleotide for detection of SNP TSC0064408
gttttgcgatagt

SEQ ID NO: 265788 - DNA, 13 bp, Artificial Sequence
  Oligonucleotide for detection of SNP TSC0064408
actatcgcaaaac

SEQ ID NO: 265789 - DNA, 13 bp, Artificial Sequence
  Oligonucleotide for detection of SNP TSC0064408
attgttgtaggay

SEQ ID NO: 265790 - DNA, 13 bp, Artificial Sequence
  Oligonucleotide for detection of SNP TSC0064408
rtcctacaacaat

SEQ ID NO: 265791 - DNA, 13 bp, Artificial Sequence
  Oligonucleotide for detection of SNP TSC0064408
attgttataggay

SEQ ID NO: 265792 - DNA, 13 bp, Artificial Sequence
  Oligonucleotide for detection of SNP TSC0064408
rtcctataacaat

SEQ ID NO: 265793 - DNA, 13 bp, Artificial Sequence
  Oligonucleotide for detection of SNP TSC0064408
attgtcgtaggay

SEQ ID NO: 265794 - DNA, 13 bp, Artificial Sequence
  Oligonucleotide for detection of SNP TSC0064408
rtcctacgacaat

SEQ ID NO: 265795 - DNA, 13 bp, Artificial Sequence
  Oligonucleotide for detection of SNP TSC0064409
gtttaagttagga

SEQ ID NO: 265796 - DNA, 13 bp, Artificial Sequence
  Oligonucleotide for detection of SNP TSC0064409
tcctaacttaaac

SEQ ID NO: 265797 - DNA, 13 bp, Artificial Sequence
  Oligonucleotide for detection of SNP TSC0064409
gtttaaattagga

SEQ ID NO: 265798 - DNA, 13 bp, Artificial Sequence
  Oligonucleotide for detection of SNP TSC0064409
tcctaatttaaac

SEQ ID NO: 265799 - DNA, 13 bp, Artificial Sequence
  Oligonucleotide for detection of SNP TSC0064410
tatggttagatat

SEQ ID NO: 265800 - DNA, 13 bp, Artificial Sequence
  Oligonucleotide for detection of SNP TSC0064410
atatctaaccata

SEQ ID NO: 265801 - DNA, 13 bp, Artificial Sequence
  Oligonucleotide for detection of SNP TSC0064410
tatggtgagatat

SEQ ID NO: 265802 - DNA, 13 bp, Artificial Sequence
  Oligonucleotide for detection of SNP TSC0064410
atatctcaccata

SEQ ID NO: 265803 - DNA, 13 bp, Artificial Sequence
  Oligonucleotide for detection of SNP TSC0064410
atgtttaattatg

SEQ ID NO: 265804 - DNA, 13 bp, Artificial Sequence
  Oligonucleotide for detection of SNP TSC0064410
cataattaaacat

SEQ ID NO: 265805 - DNA, 13 bp, Artificial Sequence
  Oligonucleotide for detection of SNP TSC0064410
atgttttattatg

SEQ ID NO: 265806 - DNA, 13 bp, Artificial Sequence
  Oligonucleotide for detection of SNP TSC0064410
cataataaaacat

SEQ ID NO: 265807 - DNA, 13 bp, Artificial Sequence
  Oligonucleotide for detection of SNP TSC0064414
tatatatagaaaa

SEQ ID NO: 265808 - DNA, 13 bp, Artificial Sequence
  Oligonucleotide for detection of SNP TSC0064414
ttttctatatata

SEQ ID NO: 265809 - DNA, 13 bp, Artificial Sequence
  Oligonucleotide for detection of SNP TSC0064414
tatataaagaaaa

SEQ ID NO: 265810 - DNA, 13 bp, Artificial Sequence
  Oligonucleotide for detection of SNP TSC0064414
ttttctttatata

SEQ ID NO: 265811 - DNA, 13 bp, Artificial Sequence
  Oligonucleotide for detection of SNP TSC0064415
ttttgtagtaatt

SEQ ID NO: 265812 - DNA, 13 bp, Artificial Sequence
  Oligonucleotide for detection of SNP TSC0064415
aattactacaaaa

SEQ ID NO: 265813 - DNA, 13 bp, Artificial Sequence
  Oligonucleotide for detection of SNP TSC0064415
ttttgtggtaatt

SEQ ID NO: 265814 - DNA, 13 bp, Artificial Sequence
  Oligonucleotide for detection of SNP TSC0064415
aattaccacaaaa

SEQ ID NO: 265815 - DNA, 13 bp, Artificial Sequence
  Oligonucleotide for detection of SNP TSC0064416
tgtaaaaaatttg

SEQ ID NO: 265816 - DNA, 13 bp, Artificial Sequence
  Oligonucleotide for detection of SNP TSC0064416
caaattttttaca

SEQ ID NO: 265817 - DNA, 13 bp, Artificial Sequence
  Oligonucleotide for detection of SNP TSC0064416
tgtaaagaatttg

SEQ ID NO: 265818 - DNA, 13 bp, Artificial Sequence
  Oligonucleotide for detection of SNP TSC0064416
caaattctttaca

SEQ ID NO: 265819 - DNA, 13 bp, Artificial Sequence
  Oligonucleotide for detection of SNP TSC0064416
cgtaaaaaatttg

SEQ ID NO: 265820 - DNA, 13 bp, Artificial Sequence
  Oligonucleotide for detection of SNP TSC0064416
caaattttttacg

SEQ ID NO: 265821 - DNA, 13 bp, Artificial Sequence
  Oligonucleotide for detection of SNP TSC0064416
cgtaaagaatttg

SEQ ID NO: 265822 - DNA, 13 bp, Artificial Sequence
  Oligonucleotide for detection of SNP TSC0064416
caaattctttacg

SEQ ID NO: 265823 - DNA, 13 bp, Artificial Sequence
  Oligonucleotide for detection of SNP TSC0064418
tatgtaatttgay

SEQ ID NO: 265824 - DNA, 13 bp, Artificial Sequence
  Oligonucleotide for detection of SNP TSC0064418
rtcaaattacata

SEQ ID NO: 265825 - DNA, 13 bp, Artificial Sequence
  Oligonucleotide for detection of SNP TSC0064418
tatgtattttgay

SEQ ID NO: 265826 - DNA, 13 bp, Artificial Sequence
  Oligonucleotide for detection of SNP TSC0064418
rtcaaaatacata

SEQ ID NO: 265827 - DNA, 13 bp, Artificial Sequence
  Oligonucleotide for detection of SNP TSC0064418
gttagattatata

SEQ ID NO: 265828 - DNA, 13 bp, Artificial Sequence
  Oligonucleotide for detection of SNP TSC0064418
tatataatctaac

SEQ ID NO: 265829 - DNA, 13 bp, Artificial Sequence
  Oligonucleotide for detection of SNP TSC0064418
gttagaatatata

SEQ ID NO: 265830 - DNA, 13 bp, Artificial Sequence
  Oligonucleotide for detection of SNP TSC0064418
tatatattctaac

SEQ ID NO: 265831 - DNA, 13 bp, Artificial Sequence
  Oligonucleotide for detection of SNP TSC0064419
tttaaaaaagtga

SEQ ID NO: 265832 - DNA, 13 bp, Artificial Sequence
  Oligonucleotide for detection of SNP TSC0064419
tcacttttttaaa

SEQ ID NO: 265833 - DNA, 13 bp, Artificial Sequence
  Oligonucleotide for detection of SNP TSC0064419
tttaaataagtga

SEQ ID NO: 265834 - DNA, 13 bp, Artificial Sequence
  Oligonucleotide for detection of SNP TSC0064419
tcacttatttaaa

SEQ ID NO: 265835 - DNA, 13 bp, Artificial Sequence
  Oligonucleotide for detection of SNP TSC0064419
ttatttgtttaaa

SEQ ID NO: 265836 - DNA, 13 bp, Artificial Sequence
  Oligonucleotide for detection of SNP TSC0064419
tttaaacaaataa

SEQ ID NO: 265837 - DNA, 13 bp, Artificial Sequence
  Oligonucleotide for detection of SNP TSC0064420
agagaatgttttt

SEQ ID NO: 265838 - DNA, 13 bp, Artificial Sequence
  Oligonucleotide for detection of SNP TSC0064420
aaaaacattctct

SEQ ID NO: 265839 - DNA, 13 bp, Artificial Sequence
  Oligonucleotide for detection of SNP TSC0064420
agagaacgttttt

SEQ ID NO: 265840 - DNA, 13 bp, Artificial Sequence
  Oligonucleotide for detection of SNP TSC0064420
aaaaacgttctct

SEQ ID NO: 265841 - DNA, 13 bp, Artificial Sequence
  Oligonucleotide for detection of SNP TSC0064420
aaagatgtttttt

SEQ ID NO: 265842 - DNA, 13 bp, Artificial Sequence
  Oligonucleotide for detection of SNP TSC0064420
aaaaaacatcttt

SEQ ID NO: 265843 - DNA, 13 bp, Artificial Sequence
  Oligonucleotide for detection of SNP TSC0064420
aaagatatttttt

SEQ ID NO: 265844 - DNA, 13 bp, Artificial Sequence
  Oligonucleotide for detection of SNP TSC0064420
aaaaaatatcttt

SEQ ID NO: 265845 - DNA, 13 bp, Artificial Sequence
  Oligonucleotide for detection of SNP TSC0064420
aaagacgtttttt

SEQ ID NO: 265846 - DNA, 13 bp, Artificial Sequence
  Oligonucleotide for detection of SNP TSC0064420
aaaaaacgtcttt

SEQ ID NO: 265847 - DNA, 13 bp, Artificial Sequence
  Oligonucleotide for detection of SNP TSC0064421
atatgagataaat

SEQ ID NO: 265848 - DNA, 13 bp, Artificial Sequence
  Oligonucleotide for detection of SNP TSC0064421
atttatctcatat

SEQ ID NO: 265849 - DNA, 13 bp, Artificial Sequence
  Oligonucleotide for detection of SNP TSC0064421
atatgaaataaat

SEQ ID NO: 265850 - DNA, 13 bp, Artificial Sequence
  Oligonucleotide for detection of SNP TSC0064421
atttatttcatat

SEQ ID NO: 265851 - DNA, 13 bp, Artificial Sequence
  Oligonucleotide for detection of SNP TSC0064422
ttttttaggttat

SEQ ID NO: 265852 - DNA, 13 bp, Artificial Sequence
  Oligonucleotide for detection of SNP TSC0064422
ataacctaaaaaa

SEQ ID NO: 265853 - DNA, 13 bp, Artificial Sequence
  Oligonucleotide for detection of SNP TSC0064422
atagtttgaaagg

SEQ ID NO: 265854 - DNA, 13 bp, Artificial Sequence
  Oligonucleotide for detection of SNP TSC0064422
cctttcaaactat

SEQ ID NO: 265855 - DNA, 13 bp, Artificial Sequence
  Oligonucleotide for detection of SNP TSC0064422
atagttcgaaagg

SEQ ID NO: 265856 - DNA, 13 bp, Artificial Sequence
  Oligonucleotide for detection of SNP TSC0064422
cctttcgaactat

SEQ ID NO: 265857 - DNA, 13 bp, Artificial Sequence
  Oligonucleotide for detection of SNP TSC0005119
gaagaagttttty

SEQ ID NO: 265858 - DNA, 13 bp, Artificial Sequence
  Oligonucleotide for detection of SNP TSC0005119
raaaaacttcttc

SEQ ID NO: 265859 - DNA, 13 bp, Artificial Sequence
  Oligonucleotide for detection of SNP TSC0005119
gaagaaattttty

SEQ ID NO: 265860 - DNA, 13 bp, Artificial Sequence
  Oligonucleotide for detection of SNP TSC0005119
raaaaatttcttc

SEQ ID NO: 265861 - DNA, 13 bp, Artificial Sequence
  Oligonucleotide for detection of SNP TSC0064423
ttagtaagatttg

SEQ ID NO: 265862 - DNA, 13 bp, Artificial Sequence
  Oligonucleotide for detection of SNP TSC0064423
caaatcttactaa

SEQ ID NO: 265863 - DNA, 13 bp, Artificial Sequence
  Oligonucleotide for detection of SNP TSC0064423
ttagtaggatttg

SEQ ID NO: 265864 - DNA, 13 bp, Artificial Sequence
  Oligonucleotide for detection of SNP TSC0064423
caaatcctactaa

SEQ ID NO: 265865 - DNA, 13 bp, Artificial Sequence
  Oligonucleotide for detection of SNP TSC0064424
ggtgttagggtta

SEQ ID NO: 265866 - DNA, 13 bp, Artificial Sequence
  Oligonucleotide for detection of SNP TSC0064424
taaccctaacacc

SEQ ID NO: 265867 - DNA, 13 bp, Artificial Sequence
  Oligonucleotide for detection of SNP TSC0064424
ggtgttggggtta

SEQ ID NO: 265868 - DNA, 13 bp, Artificial Sequence
  Oligonucleotide for detection of SNP TSC0064424
taaccccaacacc

SEQ ID NO: 265869 - DNA, 13 bp, Artificial Sequence
  Oligonucleotide for detection of SNP TSC0064426
ttgtagcgtttta

SEQ ID NO: 265870 - DNA, 13 bp, Artificial Sequence
  Oligonucleotide for detection of SNP TSC0064426
taaaacgctacaa

SEQ ID NO: 265871 - DNA, 13 bp, Artificial Sequence
  Oligonucleotide for detection of SNP TSC0064426
tagggtgttatag

SEQ ID NO: 265872 - DNA, 13 bp, Artificial Sequence
  Oligonucleotide for detection of SNP TSC0064426
ctataacacccta

SEQ ID NO: 265873 - DNA, 13 bp, Artificial Sequence
  Oligonucleotide for detection of SNP TSC0064426
tagggtattatag

SEQ ID NO: 265874 - DNA, 13 bp, Artificial Sequence
  Oligonucleotide for detection of SNP TSC0064426
ctataatacccta

SEQ ID NO: 265875 - DNA, 13 bp, Artificial Sequence
  Oligonucleotide for detection of SNP TSC0064426
tagggcgttatag

SEQ ID NO: 265876 - DNA, 13 bp, Artificial Sequence
  Oligonucleotide for detection of SNP TSC0064426
ctataacgcccta

SEQ ID NO: 265877 - DNA, 13 bp, Artificial Sequence
  Oligonucleotide for detection of SNP TSC0064427
tttttaggtgtat

SEQ ID NO: 265878 - DNA, 13 bp, Artificial Sequence
  Oligonucleotide for detection of SNP TSC0064427
atacacctaaaaa

SEQ ID NO: 265879 - DNA, 13 bp, Artificial Sequence
  Oligonucleotide for detection of SNP TSC0064428
tatattataggtg

SEQ ID NO: 265880 - DNA, 13 bp, Artificial Sequence
  Oligonucleotide for detection of SNP TSC0064428
cacctataatata

SEQ ID NO: 265881 - DNA, 13 bp, Artificial Sequence
  Oligonucleotide for detection of SNP TSC0064428
tatattgtaggtg

SEQ ID NO: 265882 - DNA, 13 bp, Artificial Sequence
  Oligonucleotide for detection of SNP TSC0064428
cacctacaatata

SEQ ID NO: 265883 - DNA, 13 bp, Artificial Sequence
  Oligonucleotide for detection of SNP TSC0064428
tatattataggcg

SEQ ID NO: 265884 - DNA, 13 bp, Artificial Sequence
  Oligonucleotide for detection of SNP TSC0064428
cgcctataatata

SEQ ID NO: 265885 - DNA, 13 bp, Artificial Sequence
  Oligonucleotide for detection of SNP TSC0064428
tatatcgtaggtg

SEQ ID NO: 265886 - DNA, 13 bp, Artificial Sequence
  Oligonucleotide for detection of SNP TSC0064428
cacctacgatata

SEQ ID NO: 265887 - DNA, 13 bp, Artificial Sequence
  Oligonucleotide for detection of SNP TSC0064428
tatattgtaggcg

SEQ ID NO: 265888 - DNA, 13 bp, Artificial Sequence
  Oligonucleotide for detection of SNP TSC0064428
cgcctacaatata

SEQ ID NO: 265889 - DNA, 13 bp, Artificial Sequence
  Oligonucleotide for detection of SNP TSC0064428
tatatcgtaggcg

SEQ ID NO: 265890 - DNA, 13 bp, Artificial Sequence
  Oligonucleotide for detection of SNP TSC0064428
cgcctacgatata

SEQ ID NO: 265891 - DNA, 13 bp, Artificial Sequence
  Oligonucleotide for detection of SNP TSC0064428
tgtttgtgatgta

SEQ ID NO: 265892 - DNA, 13 bp, Artificial Sequence
  Oligonucleotide for detection of SNP TSC0064428
tacatcacaaaca

SEQ ID NO: 265893 - DNA, 13 bp, Artificial Sequence
  Oligonucleotide for detection of SNP TSC0064428
cgtttgtgatgta

SEQ ID NO: 265894 - DNA, 13 bp, Artificial Sequence
  Oligonucleotide for detection of SNP TSC0064428
tacatcacaaacg

SEQ ID NO: 265895 - DNA, 13 bp, Artificial Sequence
  Oligonucleotide for detection of SNP TSC0064428
tgtttgcgatgta

SEQ ID NO: 265896 - DNA, 13 bp, Artificial Sequence
  Oligonucleotide for detection of SNP TSC0064428
tacatcgcaaaca

SEQ ID NO: 265897 - DNA, 13 bp, Artificial Sequence
  Oligonucleotide for detection of SNP TSC0064428
cgtttgcgatgta

SEQ ID NO: 265898 - DNA, 13 bp, Artificial Sequence
  Oligonucleotide for detection of SNP TSC0064428
tacatcgcaaacg

SEQ ID NO: 265899 - DNA, 13 bp, Artificial Sequence
  Oligonucleotide for detection of SNP TSC0064431
gtggggatttatg

SEQ ID NO: 265900 - DNA, 13 bp, Artificial Sequence
  Oligonucleotide for detection of SNP TSC0064431
cataaatccccac

SEQ ID NO: 265901 - DNA, 13 bp, Artificial Sequence
  Oligonucleotide for detection of SNP TSC0064431
gtgggggtttatg

SEQ ID NO: 265902 - DNA, 13 bp, Artificial Sequence
  Oligonucleotide for detection of SNP TSC0064431
cataaacccccac

SEQ ID NO: 265903 - DNA, 13 bp, Artificial Sequence
  Oligonucleotide for detection of SNP TSC0064432
tgtatagataggg

SEQ ID NO: 265904 - DNA, 13 bp, Artificial Sequence
  Oligonucleotide for detection of SNP TSC0064432
ccctatctataca

SEQ ID NO: 265905 - DNA, 13 bp, Artificial Sequence
  Oligonucleotide for detection of SNP TSC0064432
tgtataaataggg

SEQ ID NO: 265906 - DNA, 13 bp, Artificial Sequence
  Oligonucleotide for detection of SNP TSC0064432
ccctatttataca

SEQ ID NO: 265907 - DNA, 13 bp, Artificial Sequence
  Oligonucleotide for detection of SNP TSC0064432
cgtatagataggg

SEQ ID NO: 265908 - DNA, 13 bp, Artificial Sequence
  Oligonucleotide for detection of SNP TSC0064432
ccctatctatacg

SEQ ID NO: 265909 - DNA, 13 bp, Artificial Sequence
  Oligonucleotide for detection of SNP TSC0064432
cgtataaataggg

SEQ ID NO: 265910 - DNA, 13 bp, Artificial Sequence
  Oligonucleotide for detection of SNP TSC0064432
ccctatttatacg

SEQ ID NO: 265911 - DNA, 13 bp, Artificial Sequence
  Oligonucleotide for detection of SNP TSC0064440
agtagaaaagaat

SEQ ID NO: 265912 - DNA, 13 bp, Artificial Sequence
  Oligonucleotide for detection of SNP TSC0064440
attcttttctact

SEQ ID NO: 265913 - DNA, 13 bp, Artificial Sequence
  Oligonucleotide for detection of SNP TSC0064440
agtagataagaat

SEQ ID NO: 265914 - DNA, 13 bp, Artificial Sequence
  Oligonucleotide for detection of SNP TSC0064440
attcttatctact

SEQ ID NO: 265915 - DNA, 13 bp, Artificial Sequence
  Oligonucleotide for detection of SNP TSC0064440
agtagagaagaat

SEQ ID NO: 265916 - DNA, 13 bp, Artificial Sequence
  Oligonucleotide for detection of SNP TSC0064440
attcttctctact

SEQ ID NO: 265917 - DNA, 13 bp, Artificial Sequence
  Oligonucleotide for detection of SNP TSC0064441
gagaggaaagtaa

SEQ ID NO: 265918 - DNA, 13 bp, Artificial Sequence
  Oligonucleotide for detection of SNP TSC0064441
ttactttcctctc

SEQ ID NO: 265919 - DNA, 13 bp, Artificial Sequence
  Oligonucleotide for detection of SNP TSC0064441
gagaggtaagtaa

SEQ ID NO: 265920 - DNA, 13 bp, Artificial Sequence
  Oligonucleotide for detection of SNP TSC0064441
ttacttacctctc

SEQ ID NO: 265921 - DNA, 13 bp, Artificial Sequence
  Oligonucleotide for detection of SNP TSC0064441
gagagggaagtaa

SEQ ID NO: 265922 - DNA, 13 bp, Artificial Sequence
  Oligonucleotide for detection of SNP TSC0064441
ttacttccctctc

SEQ ID NO: 265923 - DNA, 13 bp, Artificial Sequence
  Oligonucleotide for detection of SNP TSC0004784
atttatatgaaaa

SEQ ID NO: 265924 - DNA, 13 bp, Artificial Sequence
  Oligonucleotide for detection of SNP TSC0004784
ttttcatataaat

SEQ ID NO: 265925 - DNA, 13 bp, Artificial Sequence
  Oligonucleotide for detection of SNP TSC0004784
atttatttgaaaa

SEQ ID NO: 265926 - DNA, 13 bp, Artificial Sequence
  Oligonucleotide for detection of SNP TSC0004784
ttttcaaataaat

SEQ ID NO: 265927 - DNA, 13 bp, Artificial Sequence
  Oligonucleotide for detection of SNP TSC0004784
tttttatatgagt

SEQ ID NO: 265928 - DNA, 13 bp, Artificial Sequence
  Oligonucleotide for detection of SNP TSC0004784
actcatataaaaa

SEQ ID NO: 265929 - DNA, 13 bp, Artificial Sequence
  Oligonucleotide for detection of SNP TSC0004784
tttttagatgagt

SEQ ID NO: 265930 - DNA, 13 bp, Artificial Sequence
  Oligonucleotide for detection of SNP TSC0004784
actcatctaaaaa

SEQ ID NO: 265931 - DNA, 13 bp, Artificial Sequence
  Oligonucleotide for detection of SNP TSC0064444
ttgagtttataag

SEQ ID NO: 265932 - DNA, 13 bp, Artificial Sequence
  Oligonucleotide for detection of SNP TSC0064444
cttataaactcaa

SEQ ID NO: 265933 - DNA, 13 bp, Artificial Sequence
  Oligonucleotide for detection of SNP TSC0064444
ttgagtatataag

SEQ ID NO: 265934 - DNA, 13 bp, Artificial Sequence
  Oligonucleotide for detection of SNP TSC0064444
cttatatactcaa

SEQ ID NO: 265935 - DNA, 13 bp, Artificial Sequence
  Oligonucleotide for detection of SNP TSC0064445
gataggtaaataa

SEQ ID NO: 265936 - DNA, 13 bp, Artificial Sequence
  Oligonucleotide for detection of SNP TSC0064445
ttatttacctatc

SEQ ID NO: 265937 - DNA, 13 bp, Artificial Sequence
  Oligonucleotide for detection of SNP TSC0064445
gatagggaaataa

SEQ ID NO: 265938 - DNA, 13 bp, Artificial Sequence
  Oligonucleotide for detection of SNP TSC0064445
ttatttccctatc

SEQ ID NO: 265939 - DNA, 13 bp, Artificial Sequence
  Oligonucleotide for detection of SNP TSC0064446
gagaaagtaagga

SEQ ID NO: 265940 - DNA, 13 bp, Artificial Sequence
  Oligonucleotide for detection of SNP TSC0064446
tccttactttctc

SEQ ID NO: 265941 - DNA, 13 bp, Artificial Sequence
  Oligonucleotide for detection of SNP TSC0064446
gagaaaataagga

SEQ ID NO: 265942 - DNA, 13 bp, Artificial Sequence
  Oligonucleotide for detection of SNP TSC0064446
tccttattttctc

SEQ ID NO: 265943 - DNA, 13 bp, Artificial Sequence
  Oligonucleotide for detection of SNP TSC0064447
aatttattgaagg

SEQ ID NO: 265944 - DNA, 13 bp, Artificial Sequence
  Oligonucleotide for detection of SNP TSC0064447
ccttcaataaatt

SEQ ID NO: 265945 - DNA, 13 bp, Artificial Sequence
  Oligonucleotide for detection of SNP TSC0064447
aatttagtgaagg

SEQ ID NO: 265946 - DNA, 13 bp, Artificial Sequence
  Oligonucleotide for detection of SNP TSC0064447
ccttcactaaatt

SEQ ID NO: 265947 - DNA, 13 bp, Artificial Sequence
  Oligonucleotide for detection of SNP TSC0064447
tttttattgaatt

SEQ ID NO: 265948 - DNA, 13 bp, Artificial Sequence
  Oligonucleotide for detection of SNP TSC0064447
aattcaataaaaa

SEQ ID NO: 265949 - DNA, 13 bp, Artificial Sequence
  Oligonucleotide for detection of SNP TSC0064452
agaaaggaaaatt

SEQ ID NO: 265950 - DNA, 13 bp, Artificial Sequence
  Oligonucleotide for detection of SNP TSC0064452
aattttcctttct

SEQ ID NO: 265951 - DNA, 13 bp, Artificial Sequence
  Oligonucleotide for detection of SNP TSC0064452
agaaagaaaaatt

SEQ ID NO: 265952 - DNA, 13 bp, Artificial Sequence
  Oligonucleotide for detection of SNP TSC0064452
aatttttctttct

SEQ ID NO: 265953 - DNA, 13 bp, Artificial Sequence
  Oligonucleotide for detection of SNP TSC0005931
tgaataatgttgy

SEQ ID NO: 265954 - DNA, 13 bp, Artificial Sequence
  Oligonucleotide for detection of SNP TSC0005931
rcaacattattca

SEQ ID NO: 265955 - DNA, 13 bp, Artificial Sequence
  Oligonucleotide for detection of SNP TSC0005931
tgaatagtgttgy

SEQ ID NO: 265956 - DNA, 13 bp, Artificial Sequence
  Oligonucleotide for detection of SNP TSC0005931
rcaacactattca

SEQ ID NO: 265957 - DNA, 13 bp, Artificial Sequence
  Oligonucleotide for detection of SNP TSC0005931
tgaataatgtcgy

SEQ ID NO: 265958 - DNA, 13 bp, Artificial Sequence
  Oligonucleotide for detection of SNP TSC0005931
rcgacattattca

SEQ ID NO: 265959 - DNA, 13 bp, Artificial Sequence
  Oligonucleotide for detection of SNP TSC0005931
tgaatagtgtcgy

SEQ ID NO: 265960 - DNA, 13 bp, Artificial Sequence
  Oligonucleotide for detection of SNP TSC0005931
rcgacactattca

SEQ ID NO: 265961 - DNA, 13 bp, Artificial Sequence
  Oligonucleotide for detection of SNP TSC0064455
agaggaaaaggag

SEQ ID NO: 265962 - DNA, 13 bp, Artificial Sequence
  Oligonucleotide for detection of SNP TSC0064455
ctccttttcctct

SEQ ID NO: 265963 - DNA, 13 bp, Artificial Sequence
  Oligonucleotide for detection of SNP TSC0064455
agaggataaggag

SEQ ID NO: 265964 - DNA, 13 bp, Artificial Sequence
  Oligonucleotide for detection of SNP TSC0064455
ctccttatcctct

SEQ ID NO: 265965 - DNA, 13 bp, Artificial Sequence
  Oligonucleotide for detection of SNP TSC0064456
tttgaggtgtagg

SEQ ID NO: 265966 - DNA, 13 bp, Artificial Sequence
  Oligonucleotide for detection of SNP TSC0064456
cctacacctcaaa

SEQ ID NO: 265967 - DNA, 13 bp, Artificial Sequence
  Oligonucleotide for detection of SNP TSC0064456
tttgagatgtagg

SEQ ID NO: 265968 - DNA, 13 bp, Artificial Sequence
  Oligonucleotide for detection of SNP TSC0064456
cctacatctcaaa

SEQ ID NO: 265969 - DNA, 13 bp, Artificial Sequence
  Oligonucleotide for detection of SNP TSC0064457
gggaatggttaat

SEQ ID NO: 265970 - DNA, 13 bp, Artificial Sequence
  Oligonucleotide for detection of SNP TSC0064457
attaaccattccc

SEQ ID NO: 265971 - DNA, 13 bp, Artificial Sequence
  Oligonucleotide for detection of SNP TSC0064457
gggaatagttaat

SEQ ID NO: 265972 - DNA, 13 bp, Artificial Sequence
  Oligonucleotide for detection of SNP TSC0064457
attaactattccc

SEQ ID NO: 265973 - DNA, 13 bp, Artificial Sequence
  Oligonucleotide for detection of SNP TSC0064458
ttttttagagaat

SEQ ID NO: 265974 - DNA, 13 bp, Artificial Sequence
  Oligonucleotide for detection of SNP TSC0064458
attctctaaaaaa

SEQ ID NO: 265975 - DNA, 13 bp, Artificial Sequence
  Oligonucleotide for detection of SNP TSC0064458
ttttttggagaat

SEQ ID NO: 265976 - DNA, 13 bp, Artificial Sequence
  Oligonucleotide for detection of SNP TSC0064458
attctccaaaaaa

SEQ ID NO: 265977 - DNA, 13 bp, Artificial Sequence
  Oligonucleotide for detection of SNP TSC0064458
tttttcggagaat

SEQ ID NO: 265978 - DNA, 13 bp, Artificial Sequence
  Oligonucleotide for detection of SNP TSC0064458
attctccgaaaaa

SEQ ID NO: 265979 - DNA, 13 bp, Artificial Sequence
  Oligonucleotide for detection of SNP TSC0064458
attttttgagagg

SEQ ID NO: 265980 - DNA, 13 bp, Artificial Sequence
  Oligonucleotide for detection of SNP TSC0064458
cctctcaaaaaat

SEQ ID NO: 265981 - DNA, 13 bp, Artificial Sequence
  Oligonucleotide for detection of SNP TSC0064458
atttttcgagagg

SEQ ID NO: 265982 - DNA, 13 bp, Artificial Sequence
  Oligonucleotide for detection of SNP TSC0064458
cctctcgaaaaat

SEQ ID NO: 265983 - DNA, 13 bp, Artificial Sequence
  Oligonucleotide for detection of SNP TSC0064459
tgttattgaattg

SEQ ID NO: 265984 - DNA, 13 bp, Artificial Sequence
  Oligonucleotide for detection of SNP TSC0064459
caattcaataaca

SEQ ID NO: 265985 - DNA, 13 bp, Artificial Sequence
  Oligonucleotide for detection of SNP TSC0064459
tgttatcgaattg

SEQ ID NO: 265986 - DNA, 13 bp, Artificial Sequence
  Oligonucleotide for detection of SNP TSC0064459
caattcgataaca

SEQ ID NO: 265987 - DNA, 13 bp, Artificial Sequence
  Oligonucleotide for detection of SNP TSC0064459
taatttagtaata

SEQ ID NO: 265988 - DNA, 13 bp, Artificial Sequence
  Oligonucleotide for detection of SNP TSC0064459
tattactaaatta

SEQ ID NO: 265989 - DNA, 13 bp, Artificial Sequence
  Oligonucleotide for detection of SNP TSC0064459
taattcggtaata

SEQ ID NO: 265990 - DNA, 13 bp, Artificial Sequence
  Oligonucleotide for detection of SNP TSC0064459
tattaccgaatta

SEQ ID NO: 265991 - DNA, 13 bp, Artificial Sequence
  Oligonucleotide for detection of SNP TSC0008185
tggtgtacgtttg

SEQ ID NO: 265992 - DNA, 13 bp, Artificial Sequence
  Oligonucleotide for detection of SNP TSC0008185
caaacgtacacca

SEQ ID NO: 265993 - DNA, 13 bp, Artificial Sequence
  Oligonucleotide for detection of SNP TSC0008185
tggtgtgcgtttg

SEQ ID NO: 265994 - DNA, 13 bp, Artificial Sequence
  Oligonucleotide for detection of SNP TSC0008185
caaacgcacacca

SEQ ID NO: 265995 - DNA, 13 bp, Artificial Sequence
  Oligonucleotide for detection of SNP TSC0008185
tggtgcgcgtttg

SEQ ID NO: 265996 - DNA, 13 bp, Artificial Sequence
  Oligonucleotide for detection of SNP TSC0008185
caaacgcgcacca

SEQ ID NO: 265997 - DNA, 13 bp, Artificial Sequence
  Oligonucleotide for detection of SNP TSC0008185
taaatgtgtatta

SEQ ID NO: 265998 - DNA, 13 bp, Artificial Sequence
  Oligonucleotide for detection of SNP TSC0008185
taatacacattta

SEQ ID NO: 265999 - DNA, 13 bp, Artificial Sequence
  Oligonucleotide for detection of SNP TSC0008185
taaacgtgtatta

SEQ ID NO: 266000 - DNA, 13 bp, Artificial Sequence
  Oligonucleotide for detection of SNP TSC0008185
taatacacgttta

SEQ ID NO: 266001 - DNA, 13 bp, Artificial Sequence
  Oligonucleotide for detection of SNP TSC0008185
taaatgcgtatta

SEQ ID NO: 266002 - DNA, 13 bp, Artificial Sequence
  Oligonucleotide for detection of SNP TSC0008185
taatacgcattta

SEQ ID NO: 266003 - DNA, 13 bp, Artificial Sequence
  Oligonucleotide for detection of SNP TSC0008185
taaacgcgtatta

SEQ ID NO: 266004 - DNA, 13 bp, Artificial Sequence
  Oligonucleotide for detection of SNP TSC0008185
taatacgcgttta

SEQ ID NO: 266005 - DNA, 13 bp, Artificial Sequence
  Oligonucleotide for detection of SNP TSC0064462
tatttagaattta

SEQ ID NO: 266006 - DNA, 13 bp, Artificial Sequence
  Oligonucleotide for detection of SNP TSC0064462
taaattctaaata

SEQ ID NO: 266007 - DNA, 13 bp, Artificial Sequence
  Oligonucleotide for detection of SNP TSC0064463
ttgagtgtttgty

SEQ ID NO: 266008 - DNA, 13 bp, Artificial Sequence
  Oligonucleotide for detection of SNP TSC0064463
racaaacactcaa

SEQ ID NO: 266009 - DNA, 13 bp, Artificial Sequence
  Oligonucleotide for detection of SNP TSC0064463
ttgagtatttgty

SEQ ID NO: 266010 - DNA, 13 bp, Artificial Sequence
  Oligonucleotide for detection of SNP TSC0064463
racaaatactcaa

SEQ ID NO: 266011 - DNA, 13 bp, Artificial Sequence
  Oligonucleotide for detection of SNP TSC0005131
gggaaagagagtg

SEQ ID NO: 266012 - DNA, 13 bp, Artificial Sequence
  Oligonucleotide for detection of SNP TSC0005131
cactctctttccc

SEQ ID NO: 266013 - DNA, 13 bp, Artificial Sequence
  Oligonucleotide for detection of SNP TSC0005131
gggaaaaagagtg

SEQ ID NO: 266014 - DNA, 13 bp, Artificial Sequence
  Oligonucleotide for detection of SNP TSC0005131
cactctttttccc

SEQ ID NO: 266015 - DNA, 13 bp, Artificial Sequence
  Oligonucleotide for detection of SNP TSC0064465
ttttgtgtattgt

SEQ ID NO: 266016 - DNA, 13 bp, Artificial Sequence
  Oligonucleotide for detection of SNP TSC0064465
acaatacacaaaa

SEQ ID NO: 266017 - DNA, 13 bp, Artificial Sequence
  Oligonucleotide for detection of SNP TSC0064465
ttttgtatattgt

SEQ ID NO: 266018 - DNA, 13 bp, Artificial Sequence
  Oligonucleotide for detection of SNP TSC0064465
acaatatacaaaa

SEQ ID NO: 266019 - DNA, 13 bp, Artificial Sequence
  Oligonucleotide for detection of SNP TSC0064466
tatatttatatgt

SEQ ID NO: 266020 - DNA, 13 bp, Artificial Sequence
  Oligonucleotide for detection of SNP TSC0064466
acatataaatata

SEQ ID NO: 266021 - DNA, 13 bp, Artificial Sequence
  Oligonucleotide for detection of SNP TSC0064466
tatattgatatgt

SEQ ID NO: 266022 - DNA, 13 bp, Artificial Sequence
  Oligonucleotide for detection of SNP TSC0064466
acatatcaatata

SEQ ID NO: 266023 - DNA, 13 bp, Artificial Sequence
  Oligonucleotide for detection of SNP TSC0064467
aaggtggataaag

SEQ ID NO: 266024 - DNA, 13 bp, Artificial Sequence
  Oligonucleotide for detection of SNP TSC0064467
ctttatccacctt

SEQ ID NO: 266025 - DNA, 13 bp, Artificial Sequence
  Oligonucleotide for detection of SNP TSC0064467
aaggtgaataaag

SEQ ID NO: 266026 - DNA, 13 bp, Artificial Sequence
  Oligonucleotide for detection of SNP TSC0064467
ctttattcacctt

SEQ ID NO: 266027 - DNA, 13 bp, Artificial Sequence
  Oligonucleotide for detection of SNP TSC0064468
aggaaagtatagg

SEQ ID NO: 266028 - DNA, 13 bp, Artificial Sequence
  Oligonucleotide for detection of SNP TSC0064468
cctatactttcct

SEQ ID NO: 266029 - DNA, 13 bp, Artificial Sequence
  Oligonucleotide for detection of SNP TSC0064468
aggaaaatatagg

SEQ ID NO: 266030 - DNA, 13 bp, Artificial Sequence
  Oligonucleotide for detection of SNP TSC0064468
cctatattttcct

SEQ ID NO: 266031 - DNA, 13 bp, Artificial Sequence
  Oligonucleotide for detection of SNP TSC0064469
gtaagtatttttt

SEQ ID NO: 266032 - DNA, 13 bp, Artificial Sequence
  Oligonucleotide for detection of SNP TSC0064469
aaaaaatacttac

SEQ ID NO: 266033 - DNA, 13 bp, Artificial Sequence
  Oligonucleotide for detection of SNP TSC0064469
gtaagtttttttt

SEQ ID NO: 266034 - DNA, 13 bp, Artificial Sequence
  Oligonucleotide for detection of SNP TSC0064469
aaaaaaaacttac

SEQ ID NO: 266035 - DNA, 13 bp, Artificial Sequence
  Oligonucleotide for detection of SNP TSC0064469
agaagatatttay

SEQ ID NO: 266036 - DNA, 13 bp, Artificial Sequence
  Oligonucleotide for detection of SNP TSC0064469
rtaaatatcttct

SEQ ID NO: 266037 - DNA, 13 bp, Artificial Sequence
  Oligonucleotide for detection of SNP TSC0064469
agaagagatttay

SEQ ID NO: 266038 - DNA, 13 bp, Artificial Sequence
  Oligonucleotide for detection of SNP TSC0064469
rtaaatctcttct

SEQ ID NO: 266039 - DNA, 13 bp, Artificial Sequence
  Oligonucleotide for detection of SNP TSC0064470
tttttcgtaatta

SEQ ID NO: 266040 - DNA, 13 bp, Artificial Sequence
  Oligonucleotide for detection of SNP TSC0064470
taattacgaaaaa

SEQ ID NO: 266041 - DNA, 13 bp, Artificial Sequence
  Oligonucleotide for detection of SNP TSC0064470
tggttatggggaa

SEQ ID NO: 266042 - DNA, 13 bp, Artificial Sequence
  Oligonucleotide for detection of SNP TSC0064470
ttccccataacca

SEQ ID NO: 266043 - DNA, 13 bp, Artificial Sequence
  Oligonucleotide for detection of SNP TSC0064470
tggttacggggaa

SEQ ID NO: 266044 - DNA, 13 bp, Artificial Sequence
  Oligonucleotide for detection of SNP TSC0064470
ttccccgtaacca

SEQ ID NO: 266045 - DNA, 13 bp, Artificial Sequence
  Oligonucleotide for detection of SNP TSC0064471
atgttggttttty

SEQ ID NO: 266046 - DNA, 13 bp, Artificial Sequence
  Oligonucleotide for detection of SNP TSC0064471
raaaaaccaacat

SEQ ID NO: 266047 - DNA, 13 bp, Artificial Sequence
  Oligonucleotide for detection of SNP TSC0064471
atgttgattttty

SEQ ID NO: 266048 - DNA, 13 bp, Artificial Sequence
  Oligonucleotide for detection of SNP TSC0064471
raaaaatcaacat

SEQ ID NO: 266049 - DNA, 13 bp, Artificial Sequence
  Oligonucleotide for detection of SNP TSC0005374
ttaaaatggtttg

SEQ ID NO: 266050 - DNA, 13 bp, Artificial Sequence
  Oligonucleotide for detection of SNP TSC0005374
caaaccattttaa

SEQ ID NO: 266051 - DNA, 13 bp, Artificial Sequence
  Oligonucleotide for detection of SNP TSC0005374
ttaaaacggtttg

SEQ ID NO: 266052 - DNA, 13 bp, Artificial Sequence
  Oligonucleotide for detection of SNP TSC0005374
caaaccgttttaa

SEQ ID NO: 266053 - DNA, 13 bp, Artificial Sequence
  Oligonucleotide for detection of SNP TSC0005374
taggttgttttga

SEQ ID NO: 266054 - DNA, 13 bp, Artificial Sequence
  Oligonucleotide for detection of SNP TSC0005374
tcaaaacaaccta

SEQ ID NO: 266055 - DNA, 13 bp, Artificial Sequence
  Oligonucleotide for detection of SNP TSC0005374
taggttattttga

SEQ ID NO: 266056 - DNA, 13 bp, Artificial Sequence
  Oligonucleotide for detection of SNP TSC0005374
tcaaaataaccta

SEQ ID NO: 266057 - DNA, 13 bp, Artificial Sequence
  Oligonucleotide for detection of SNP TSC0005374
taggtcgttttga

SEQ ID NO: 266058 - DNA, 13 bp, Artificial Sequence
  Oligonucleotide for detection of SNP TSC0005374
tcaaaacgaccta

SEQ ID NO: 266059 - DNA, 13 bp, Artificial Sequence
  Oligonucleotide for detection of SNP TSC0064472
agttaaaaatata

SEQ ID NO: 266060 - DNA, 13 bp, Artificial Sequence
  Oligonucleotide for detection of SNP TSC0064472
tatatttttaact

SEQ ID NO: 266061 - DNA, 13 bp, Artificial Sequence
  Oligonucleotide for detection of SNP TSC0064472
agttaataatata

SEQ ID NO: 266062 - DNA, 13 bp, Artificial Sequence
  Oligonucleotide for detection of SNP TSC0064472
tatattattaact

SEQ ID NO: 266063 - DNA, 13 bp, Artificial Sequence
  Oligonucleotide for detection of SNP TSC0064472
tatgtttttggtt

SEQ ID NO: 266064 - DNA, 13 bp, Artificial Sequence
  Oligonucleotide for detection of SNP TSC0064472
aaccaaaaacata

SEQ ID NO: 266065 - DNA, 13 bp, Artificial Sequence
  Oligonucleotide for detection of SNP TSC0064472
tatgttgttggtt

SEQ ID NO: 266066 - DNA, 13 bp, Artificial Sequence
  Oligonucleotide for detection of SNP TSC0064472
aaccaacaacata

SEQ ID NO: 266067 - DNA, 13 bp, Artificial Sequence
  Oligonucleotide for detection of SNP TSC0004677
gtagtttggtgtt

SEQ ID NO: 266068 - DNA, 13 bp, Artificial Sequence
  Oligonucleotide for detection of SNP TSC0004677
aacaccaaactac

SEQ ID NO: 266069 - DNA, 13 bp, Artificial Sequence
  Oligonucleotide for detection of SNP TSC0004677
gtagttcggtgtt

SEQ ID NO: 266070 - DNA, 13 bp, Artificial Sequence
  Oligonucleotide for detection of SNP TSC0004677
aacaccgaactac

SEQ ID NO: 266071 - DNA, 13 bp, Artificial Sequence
  Oligonucleotide for detection of SNP TSC0064474
ttaaataagtaga

SEQ ID NO: 266072 - DNA, 13 bp, Artificial Sequence
  Oligonucleotide for detection of SNP TSC0064474
tctacttatttaa

SEQ ID NO: 266073 - DNA, 13 bp, Artificial Sequence
  Oligonucleotide for detection of SNP TSC0064474
ttaaatgagtaga

SEQ ID NO: 266074 - DNA, 13 bp, Artificial Sequence
  Oligonucleotide for detection of SNP TSC0064474
tctactcatttaa

SEQ ID NO: 266075 - DNA, 13 bp, Artificial Sequence
  Oligonucleotide for detection of SNP TSC0064475
atagatattgttt

SEQ ID NO: 266076 - DNA, 13 bp, Artificial Sequence
  Oligonucleotide for detection of SNP TSC0064475
aaacaatatctat

SEQ ID NO: 266077 - DNA, 13 bp, Artificial Sequence
  Oligonucleotide for detection of SNP TSC0064475
atagatgttgttt

SEQ ID NO: 266078 - DNA, 13 bp, Artificial Sequence
  Oligonucleotide for detection of SNP TSC0064475
aaacaacatctat

SEQ ID NO: 266079 - DNA, 13 bp, Artificial Sequence
  Oligonucleotide for detection of SNP TSC0064476
tattataaaatgy

SEQ ID NO: 266080 - DNA, 13 bp, Artificial Sequence
  Oligonucleotide for detection of SNP TSC0064476
rcattttataata

SEQ ID NO: 266081 - DNA, 13 bp, Artificial Sequence
  Oligonucleotide for detection of SNP TSC0064476
tattattaaatgy

SEQ ID NO: 266082 - DNA, 13 bp, Artificial Sequence
  Oligonucleotide for detection of SNP TSC0064476
rcatttaataata

SEQ ID NO: 266083 - DNA, 13 bp, Artificial Sequence
  Oligonucleotide for detection of SNP TSC0064476
gtattttgtaata

SEQ ID NO: 266084 - DNA, 13 bp, Artificial Sequence
  Oligonucleotide for detection of SNP TSC0064476
tattacaaaatac

SEQ ID NO: 266085 - DNA, 13 bp, Artificial Sequence
  Oligonucleotide for detection of SNP TSC0064476
gtatttggtaata

SEQ ID NO: 266086 - DNA, 13 bp, Artificial Sequence
  Oligonucleotide for detection of SNP TSC0064476
tattaccaaatac

SEQ ID NO: 266087 - DNA, 13 bp, Artificial Sequence
  Oligonucleotide for detection of SNP TSC0000105
tttgaggtattag

SEQ ID NO: 266088 - DNA, 13 bp, Artificial Sequence
  Oligonucleotide for detection of SNP TSC0000105
ctaatacctcaaa

SEQ ID NO: 266089 - DNA, 13 bp, Artificial Sequence
  Oligonucleotide for detection of SNP TSC0000560
ggggaaattgttg

SEQ ID NO: 266090 - DNA, 13 bp, Artificial Sequence
  Oligonucleotide for detection of SNP TSC0000560
caacaatttcccc

SEQ ID NO: 266091 - DNA, 13 bp, Artificial Sequence
  Oligonucleotide for detection of SNP TSC0000560
ggggaatttgttg

SEQ ID NO: 266092 - DNA, 13 bp, Artificial Sequence
  Oligonucleotide for detection of SNP TSC0000560
caacaaattcccc

SEQ ID NO: 266093 - DNA, 13 bp, Artificial Sequence
  Oligonucleotide for detection of SNP TSC0000561
ttagttttagaty

SEQ ID NO: 266094 - DNA, 13 bp, Artificial Sequence
  Oligonucleotide for detection of SNP TSC0000561
ratctaaaactaa

SEQ ID NO: 266095 - DNA, 13 bp, Artificial Sequence
  Oligonucleotide for detection of SNP TSC0000561
ttagttgtagaty

SEQ ID NO: 266096 - DNA, 13 bp, Artificial Sequence
  Oligonucleotide for detection of SNP TSC0000561
ratctacaactaa

SEQ ID NO: 266097 - DNA, 13 bp, Artificial Sequence
  Oligonucleotide for detection of SNP TSC0000561
ttagtcgtagaty

SEQ ID NO: 266098 - DNA, 13 bp, Artificial Sequence
  Oligonucleotide for detection of SNP TSC0000561
ratctacgactaa

SEQ ID NO: 266099 - DNA, 13 bp, Artificial Sequence
  Oligonucleotide for detection of SNP TSC0000561
ggtttagggttaa

SEQ ID NO: 266100 - DNA, 13 bp, Artificial Sequence
  Oligonucleotide for detection of SNP TSC0000561
ttaaccctaaacc

SEQ ID NO: 266101 - DNA, 13 bp, Artificial Sequence
  Oligonucleotide for detection of SNP TSC0000561
ggtttatggttaa

SEQ ID NO: 266102 - DNA, 13 bp, Artificial Sequence
  Oligonucleotide for detection of SNP TSC0000561
ttaaccataaacc

SEQ ID NO: 266103 - DNA, 13 bp, Artificial Sequence
  Oligonucleotide for detection of SNP TSC0000561
ggtttacggttaa

SEQ ID NO: 266104 - DNA, 13 bp, Artificial Sequence
  Oligonucleotide for detection of SNP TSC0000561
ttaaccgtaaacc

SEQ ID NO: 266105 - DNA, 13 bp, Artificial Sequence
  Oligonucleotide for detection of SNP TSC0064478
gtgatatagtgat

SEQ ID NO: 266106 - DNA, 13 bp, Artificial Sequence
  Oligonucleotide for detection of SNP TSC0064478
atcactatatcac

SEQ ID NO: 266107 - DNA, 13 bp, Artificial Sequence
  Oligonucleotide for detection of SNP TSC0064478
gtgatagagtgat

SEQ ID NO: 266108 - DNA, 13 bp, Artificial Sequence
  Oligonucleotide for detection of SNP TSC0064478
atcactctatcac

SEQ ID NO: 266109 - DNA, 13 bp, Artificial Sequence
  Oligonucleotide for detection of SNP TSC0064478
attattgtgttay

SEQ ID NO: 266110 - DNA, 13 bp, Artificial Sequence
  Oligonucleotide for detection of SNP TSC0064478
rtaacacaataat

SEQ ID NO: 266111 - DNA, 13 bp, Artificial Sequence
  Oligonucleotide for detection of SNP TSC0064478
attattttgttay

SEQ ID NO: 266112 - DNA, 13 bp, Artificial Sequence
  Oligonucleotide for detection of SNP TSC0064478
rtaacaaaataat

SEQ ID NO: 266113 - DNA, 13 bp, Artificial Sequence
  Oligonucleotide for detection of SNP TSC0064479
gagagatagatta

SEQ ID NO: 266114 - DNA, 13 bp, Artificial Sequence
  Oligonucleotide for detection of SNP TSC0064479
taatctatctctc

SEQ ID NO: 266115 - DNA, 13 bp, Artificial Sequence
  Oligonucleotide for detection of SNP TSC0064479
gagagagagatta

SEQ ID NO: 266116 - DNA, 13 bp, Artificial Sequence
  Oligonucleotide for detection of SNP TSC0064479
taatctctctctc

SEQ ID NO: 266117 - DNA, 13 bp, Artificial Sequence
  Oligonucleotide for detection of SNP TSC0064479
gagagaaagatta

SEQ ID NO: 266118 - DNA, 13 bp, Artificial Sequence
  Oligonucleotide for detection of SNP TSC0064479
taatctttctctc

SEQ ID NO: 266119 - DNA, 13 bp, Artificial Sequence
  Oligonucleotide for detection of SNP TSC0064480
agagatggattat

SEQ ID NO: 266120 - DNA, 13 bp, Artificial Sequence
  Oligonucleotide for detection of SNP TSC0064480
ataatccatctct

SEQ ID NO: 266121 - DNA, 13 bp, Artificial Sequence
  Oligonucleotide for detection of SNP TSC0064480
agagatagattat

SEQ ID NO: 266122 - DNA, 13 bp, Artificial Sequence
  Oligonucleotide for detection of SNP TSC0064480
ataatctatctct

SEQ ID NO: 266123 - DNA, 13 bp, Artificial Sequence
  Oligonucleotide for detection of SNP TSC0064480
agagacggattat

SEQ ID NO: 266124 - DNA, 13 bp, Artificial Sequence
  Oligonucleotide for detection of SNP TSC0064480
ataatccgtctct

SEQ ID NO: 266125 - DNA, 13 bp, Artificial Sequence
  Oligonucleotide for detection of SNP TSC0064481
tgtattgagaaay

SEQ ID NO: 266126 - DNA, 13 bp, Artificial Sequence
  Oligonucleotide for detection of SNP TSC0064481
rtttctcaataca

SEQ ID NO: 266127 - DNA, 13 bp, Artificial Sequence
  Oligonucleotide for detection of SNP TSC0064481
tgtattaagaaay

SEQ ID NO: 266128 - DNA, 13 bp, Artificial Sequence
  Oligonucleotide for detection of SNP TSC0064481
rtttcttaataca

SEQ ID NO: 266129 - DNA, 13 bp, Artificial Sequence
  Oligonucleotide for detection of SNP TSC0064482
tgagatggagaty

SEQ ID NO: 266130 - DNA, 13 bp, Artificial Sequence
  Oligonucleotide for detection of SNP TSC0064482
ratctccatctca

SEQ ID NO: 266131 - DNA, 13 bp, Artificial Sequence
  Oligonucleotide for detection of SNP TSC0064482
tgagatagagaty

SEQ ID NO: 266132 - DNA, 13 bp, Artificial Sequence
  Oligonucleotide for detection of SNP TSC0064482
ratctctatctca

SEQ ID NO: 266133 - DNA, 13 bp, Artificial Sequence
  Oligonucleotide for detection of SNP TSC0064482
tgagacggagaty

SEQ ID NO: 266134 - DNA, 13 bp, Artificial Sequence
  Oligonucleotide for detection of SNP TSC0064482
ratctccgtctca

SEQ ID NO: 266135 - DNA, 13 bp, Artificial Sequence
  Oligonucleotide for detection of SNP TSC0064483
aatgttatgtagt

SEQ ID NO: 266136 - DNA, 13 bp, Artificial Sequence
  Oligonucleotide for detection of SNP TSC0064483
actacataacatt

SEQ ID NO: 266137 - DNA, 13 bp, Artificial Sequence
  Oligonucleotide for detection of SNP TSC0064483
aatgttgtgtagt

SEQ ID NO: 266138 - DNA, 13 bp, Artificial Sequence
  Oligonucleotide for detection of SNP TSC0064483
actacacaacatt

SEQ ID NO: 266139 - DNA, 13 bp, Artificial Sequence
  Oligonucleotide for detection of SNP TSC0064484
attttagttgttt

SEQ ID NO: 266140 - DNA, 13 bp, Artificial Sequence
  Oligonucleotide for detection of SNP TSC0064484
aaacaactaaaat

SEQ ID NO: 266141 - DNA, 13 bp, Artificial Sequence
  Oligonucleotide for detection of SNP TSC0064484
aagtagataaaat

SEQ ID NO: 266142 - DNA, 13 bp, Artificial Sequence
  Oligonucleotide for detection of SNP TSC0064484
attttatctactt

SEQ ID NO: 266143 - DNA, 13 bp, Artificial Sequence
  Oligonucleotide for detection of SNP TSC0064484
aagtagttaaaat

SEQ ID NO: 266144 - DNA, 13 bp, Artificial Sequence
  Oligonucleotide for detection of SNP TSC0064484
attttaactactt

SEQ ID NO: 266145 - DNA, 13 bp, Artificial Sequence
  Oligonucleotide for detection of SNP TSC0001014
tgaaataagatag

SEQ ID NO: 266146 - DNA, 13 bp, Artificial Sequence
  Oligonucleotide for detection of SNP TSC0001014
ctatcttatttca

SEQ ID NO: 266147 - DNA, 13 bp, Artificial Sequence
  Oligonucleotide for detection of SNP TSC0001014
tgaaattagatag

SEQ ID NO: 266148 - DNA, 13 bp, Artificial Sequence
  Oligonucleotide for detection of SNP TSC0001014
ctatctaatttca

SEQ ID NO: 266149 - DNA, 13 bp, Artificial Sequence
  Oligonucleotide for detection of SNP TSC0064485
atattgaggaaty

SEQ ID NO: 266150 - DNA, 13 bp, Artificial Sequence
  Oligonucleotide for detection of SNP TSC0064485
rattcctcaatat

SEQ ID NO: 266151 - DNA, 13 bp, Artificial Sequence
  Oligonucleotide for detection of SNP TSC0064485
atattgtggaaty

SEQ ID NO: 266152 - DNA, 13 bp, Artificial Sequence
  Oligonucleotide for detection of SNP TSC0064485
rattccacaatat

SEQ ID NO: 266153 - DNA, 13 bp, Artificial Sequence
  Oligonucleotide for detection of SNP TSC0064485
atatcgaggaaty

SEQ ID NO: 266154 - DNA, 13 bp, Artificial Sequence
  Oligonucleotide for detection of SNP TSC0064485
rattcctcgatat

SEQ ID NO: 266155 - DNA, 13 bp, Artificial Sequence
  Oligonucleotide for detection of SNP TSC0064485
atatcgtggaaty

SEQ ID NO: 266156 - DNA, 13 bp, Artificial Sequence
  Oligonucleotide for detection of SNP TSC0064485
rattccacgatat

SEQ ID NO: 266157 - DNA, 13 bp, Artificial Sequence
  Oligonucleotide for detection of SNP TSC0064485
gattttttggtat

SEQ ID NO: 266158 - DNA, 13 bp, Artificial Sequence
  Oligonucleotide for detection of SNP TSC0064485
ataccaaaaaatc

SEQ ID NO: 266159 - DNA, 13 bp, Artificial Sequence
  Oligonucleotide for detection of SNP TSC0064485
gatttttcggtat

SEQ ID NO: 266160 - DNA, 13 bp, Artificial Sequence
  Oligonucleotide for detection of SNP TSC0064485
ataccgaaaaatc

SEQ ID NO: 266161 - DNA, 13 bp, Artificial Sequence
  Oligonucleotide for detection of SNP TSC0064486
tatagagttttta

SEQ ID NO: 266162 - DNA, 13 bp, Artificial Sequence
  Oligonucleotide for detection of SNP TSC0064486
taaaaactctata

SEQ ID NO: 266163 - DNA, 13 bp, Artificial Sequence
  Oligonucleotide for detection of SNP TSC0064486
tatagaattttta

SEQ ID NO: 266164 - DNA, 13 bp, Artificial Sequence
  Oligonucleotide for detection of SNP TSC0064486
taaaaattctata

SEQ ID NO: 266165 - DNA, 13 bp, Artificial Sequence
  Oligonucleotide for detection of SNP TSC0064487
tattaatgaagaa

SEQ ID NO: 266166 - DNA, 13 bp, Artificial Sequence
  Oligonucleotide for detection of SNP TSC0064487
ttcttcattaata

SEQ ID NO: 266167 - DNA, 13 bp, Artificial Sequence
  Oligonucleotide for detection of SNP TSC0064487
tattaacgaagaa

SEQ ID NO: 266168 - DNA, 13 bp, Artificial Sequence
  Oligonucleotide for detection of SNP TSC0064487
ttcttcgttaata

SEQ ID NO: 266169 - DNA, 13 bp, Artificial Sequence
  Oligonucleotide for detection of SNP TSC0064488
agtttggttgtgt

SEQ ID NO: 266170 - DNA, 13 bp, Artificial Sequence
  Oligonucleotide for detection of SNP TSC0064488
acacaaccaaact

SEQ ID NO: 266171 - DNA, 13 bp, Artificial Sequence
  Oligonucleotide for detection of SNP TSC0064488
agtttgattgtgt

SEQ ID NO: 266172 - DNA, 13 bp, Artificial Sequence
  Oligonucleotide for detection of SNP TSC0064488
acacaatcaaact

SEQ ID NO: 266173 - DNA, 13 bp, Artificial Sequence
  Oligonucleotide for detection of SNP TSC0064489
gttagtgatagga

SEQ ID NO: 266174 - DNA, 13 bp, Artificial Sequence
  Oligonucleotide for detection of SNP TSC0064489
tcctatcactaac

SEQ ID NO: 266175 - DNA, 13 bp, Artificial Sequence
  Oligonucleotide for detection of SNP TSC0064489
gttagtaatagga

SEQ ID NO: 266176 - DNA, 13 bp, Artificial Sequence
  Oligonucleotide for detection of SNP TSC0064489
tcctattactaac

SEQ ID NO: 266177 - DNA, 13 bp, Artificial Sequence
  Oligonucleotide for detection of SNP TSC0064491
gtgattggtaata

SEQ ID NO: 266178 - DNA, 13 bp, Artificial Sequence
  Oligonucleotide for detection of SNP TSC0064491
tattaccaatcac

SEQ ID NO: 266179 - DNA, 13 bp, Artificial Sequence
  Oligonucleotide for detection of SNP TSC0064491
gtgattagtaata

SEQ ID NO: 266180 - DNA, 13 bp, Artificial Sequence
  Oligonucleotide for detection of SNP TSC0064491
tattactaatcac

SEQ ID NO: 266181 - DNA, 13 bp, Artificial Sequence
  Oligonucleotide for detection of SNP TSC0064493
tggtttagagtta

SEQ ID NO: 266182 - DNA, 13 bp, Artificial Sequence
  Oligonucleotide for detection of SNP TSC0064493
taactctaaacca

SEQ ID NO: 266183 - DNA, 13 bp, Artificial Sequence
  Oligonucleotide for detection of SNP TSC0064493
tggttttgagtta

SEQ ID NO: 266184 - DNA, 13 bp, Artificial Sequence
  Oligonucleotide for detection of SNP TSC0064493
taactcaaaacca

SEQ ID NO: 266185 - DNA, 13 bp, Artificial Sequence
  Oligonucleotide for detection of SNP TSC0064493
tggtttcgagtta

SEQ ID NO: 266186 - DNA, 13 bp, Artificial Sequence
  Oligonucleotide for detection of SNP TSC0064493
taactcgaaacca

SEQ ID NO: 266187 - DNA, 13 bp, Artificial Sequence
  Oligonucleotide for detection of SNP TSC0064493
tgattttgagtta

SEQ ID NO: 266188 - DNA, 13 bp, Artificial Sequence
  Oligonucleotide for detection of SNP TSC0064493
taactcaaaatca

SEQ ID NO: 266189 - DNA, 13 bp, Artificial Sequence
  Oligonucleotide for detection of SNP TSC0064493
tgatttggagtta

SEQ ID NO: 266190 - DNA, 13 bp, Artificial Sequence
  Oligonucleotide for detection of SNP TSC0064493
taactccaaatca

SEQ ID NO: 266191 - DNA, 13 bp, Artificial Sequence
  Oligonucleotide for detection of SNP TSC0064493
tgattcggagtta

SEQ ID NO: 266192 - DNA, 13 bp, Artificial Sequence
  Oligonucleotide for detection of SNP TSC0064493
taactccgaatca

SEQ ID NO: 266193 - DNA, 13 bp, Artificial Sequence
  Oligonucleotide for detection of SNP TSC0064494
ttttagagtataa

SEQ ID NO: 266194 - DNA, 13 bp, Artificial Sequence
  Oligonucleotide for detection of SNP TSC0064494
ttatactctaaaa

SEQ ID NO: 266195 - DNA, 13 bp, Artificial Sequence
  Oligonucleotide for detection of SNP TSC0064494
ttgtgttttaaaa

SEQ ID NO: 266196 - DNA, 13 bp, Artificial Sequence
  Oligonucleotide for detection of SNP TSC0064494
ttttaaaacacaa

SEQ ID NO: 266197 - DNA, 13 bp, Artificial Sequence
  Oligonucleotide for detection of SNP TSC0064494
ttgtgtattaaaa

SEQ ID NO: 266198 - DNA, 13 bp, Artificial Sequence
  Oligonucleotide for detection of SNP TSC0064494
ttttaatacacaa

SEQ ID NO: 266199 - DNA, 13 bp, Artificial Sequence
  Oligonucleotide for detection of SNP TSC0064495
ttaatgatagtga

SEQ ID NO: 266200 - DNA, 13 bp, Artificial Sequence
  Oligonucleotide for detection of SNP TSC0064495
tcactatcattaa

SEQ ID NO: 266201 - DNA, 13 bp, Artificial Sequence
  Oligonucleotide for detection of SNP TSC0064495
ttaatggtagtga

SEQ ID NO: 266202 - DNA, 13 bp, Artificial Sequence
  Oligonucleotide for detection of SNP TSC0064495
tcactaccattaa

SEQ ID NO: 266203 - DNA, 13 bp, Artificial Sequence
  Oligonucleotide for detection of SNP TSC0064496
aatggggtagttg

SEQ ID NO: 266204 - DNA, 13 bp, Artificial Sequence
  Oligonucleotide for detection of SNP TSC0064496
caactaccccatt

SEQ ID NO: 266205 - DNA, 13 bp, Artificial Sequence
  Oligonucleotide for detection of SNP TSC0064496
aatgggatagttg

SEQ ID NO: 266206 - DNA, 13 bp, Artificial Sequence
  Oligonucleotide for detection of SNP TSC0064496
caactatcccatt

SEQ ID NO: 266207 - DNA, 13 bp, Artificial Sequence
  Oligonucleotide for detection of SNP TSC0000378
agtttgaagaaaa

SEQ ID NO: 266208 - DNA, 13 bp, Artificial Sequence
  Oligonucleotide for detection of SNP TSC0000378
ttttcttcaaact

SEQ ID NO: 266209 - DNA, 13 bp, Artificial Sequence
  Oligonucleotide for detection of SNP TSC0000378
agtttggagaaaa

SEQ ID NO: 266210 - DNA, 13 bp, Artificial Sequence
  Oligonucleotide for detection of SNP TSC0000378
ttttctccaaact

SEQ ID NO: 266211 - DNA, 13 bp, Artificial Sequence
  Oligonucleotide for detection of SNP TSC0064501
gttatcgtgtttt

SEQ ID NO: 266212 - DNA, 13 bp, Artificial Sequence
  Oligonucleotide for detection of SNP TSC0064501
aaaacacgataac

SEQ ID NO: 266213 - DNA, 13 bp, Artificial Sequence
  Oligonucleotide for detection of SNP TSC0064501
agaatatggtgay

SEQ ID NO: 266214 - DNA, 13 bp, Artificial Sequence
  Oligonucleotide for detection of SNP TSC0064501
rtcaccatattct

SEQ ID NO: 266215 - DNA, 13 bp, Artificial Sequence
  Oligonucleotide for detection of SNP TSC0064501
agaatacggtgay

SEQ ID NO: 266216 - DNA, 13 bp, Artificial Sequence
  Oligonucleotide for detection of SNP TSC0064501
rtcaccgtattct

SEQ ID NO: 266217 - DNA, 13 bp, Artificial Sequence
  Oligonucleotide for detection of SNP TSC0064503
tgtggaatttaga

SEQ ID NO: 266218 - DNA, 13 bp, Artificial Sequence
  Oligonucleotide for detection of SNP TSC0064503
tctaaattccaca

SEQ ID NO: 266219 - DNA, 13 bp, Artificial Sequence
  Oligonucleotide for detection of SNP TSC0064503
tgtggattttaga

SEQ ID NO: 266220 - DNA, 13 bp, Artificial Sequence
  Oligonucleotide for detection of SNP TSC0064503
tctaaaatccaca

SEQ ID NO: 266221 - DNA, 13 bp, Artificial Sequence
  Oligonucleotide for detection of SNP TSC0064503
tttgagttttata

SEQ ID NO: 266222 - DNA, 13 bp, Artificial Sequence
  Oligonucleotide for detection of SNP TSC0064503
tataaaactcaaa

SEQ ID NO: 266223 - DNA, 13 bp, Artificial Sequence
  Oligonucleotide for detection of SNP TSC0064503
tttgagatttata

SEQ ID NO: 266224 - DNA, 13 bp, Artificial Sequence
  Oligonucleotide for detection of SNP TSC0064503
tataaatctcaaa

SEQ ID NO: 266225 - DNA, 13 bp, Artificial Sequence
  Oligonucleotide for detection of SNP TSC0064504
tgtggtaatatga

SEQ ID NO: 266226 - DNA, 13 bp, Artificial Sequence
  Oligonucleotide for detection of SNP TSC0064504
tcatattaccaca

SEQ ID NO: 266227 - DNA, 13 bp, Artificial Sequence
  Oligonucleotide for detection of SNP TSC0064504
tgtggtgatatga

SEQ ID NO: 266228 - DNA, 13 bp, Artificial Sequence
  Oligonucleotide for detection of SNP TSC0064504
tcatatcaccaca

SEQ ID NO: 266229 - DNA, 13 bp, Artificial Sequence
  Oligonucleotide for detection of SNP TSC0064504
tgtggcgatatga

SEQ ID NO: 266230 - DNA, 13 bp, Artificial Sequence
  Oligonucleotide for detection of SNP TSC0064504
tcatatcgccaca

SEQ ID NO: 266231 - DNA, 13 bp, Artificial Sequence
  Oligonucleotide for detection of SNP TSC0064505
agatatgtattat

SEQ ID NO: 266232 - DNA, 13 bp, Artificial Sequence
  Oligonucleotide for detection of SNP TSC0064505
ataatacatatct

SEQ ID NO: 266233 - DNA, 13 bp, Artificial Sequence
  Oligonucleotide for detection of SNP TSC0064505
agatatatattat

SEQ ID NO: 266234 - DNA, 13 bp, Artificial Sequence
  Oligonucleotide for detection of SNP TSC0064505
ataatatatatct

SEQ ID NO: 266235 - DNA, 13 bp, Artificial Sequence
  Oligonucleotide for detection of SNP TSC0064506
ttatttgtttagg

SEQ ID NO: 266236 - DNA, 13 bp, Artificial Sequence
  Oligonucleotide for detection of SNP TSC0064506
cctaaacaaataa

SEQ ID NO: 266237 - DNA, 13 bp, Artificial Sequence
  Oligonucleotide for detection of SNP TSC0064507
aaaagtttaaaty

SEQ ID NO: 266238 - DNA, 13 bp, Artificial Sequence
  Oligonucleotide for detection of SNP TSC0064507
ratttaaactttt

SEQ ID NO: 266239 - DNA, 13 bp, Artificial Sequence
  Oligonucleotide for detection of SNP TSC0064507
aaaagtgtaaaty

SEQ ID NO: 266240 - DNA, 13 bp, Artificial Sequence
  Oligonucleotide for detection of SNP TSC0064507
ratttacactttt

SEQ ID NO: 266241 - DNA, 13 bp, Artificial Sequence
  Oligonucleotide for detection of SNP TSC0064507
aaaagcgtaaaty

SEQ ID NO: 266242 - DNA, 13 bp, Artificial Sequence
  Oligonucleotide for detection of SNP TSC0064507
ratttacgctttt

SEQ ID NO: 266243 - DNA, 13 bp, Artificial Sequence
  Oligonucleotide for detection of SNP TSC0064508
attttagataaag

SEQ ID NO: 266244 - DNA, 13 bp, Artificial Sequence
  Oligonucleotide for detection of SNP TSC0064508
ctttatctaaaat

SEQ ID NO: 266245 - DNA, 13 bp, Artificial Sequence
  Oligonucleotide for detection of SNP TSC0000090
aattggttaatgg

SEQ ID NO: 266246 - DNA, 13 bp, Artificial Sequence
  Oligonucleotide for detection of SNP TSC0000090
ccattaaccaatt

SEQ ID NO: 266247 - DNA, 13 bp, Artificial Sequence
  Oligonucleotide for detection of SNP TSC0000090
aattgggtaatgg

SEQ ID NO: 266248 - DNA, 13 bp, Artificial Sequence
  Oligonucleotide for detection of SNP TSC0000090
ccattacccaatt

SEQ ID NO: 266249 - DNA, 13 bp, Artificial Sequence
  Oligonucleotide for detection of SNP TSC0064512
gggaaatgattgg

SEQ ID NO: 266250 - DNA, 13 bp, Artificial Sequence
  Oligonucleotide for detection of SNP TSC0064512
ccaatcatttccc

SEQ ID NO: 266251 - DNA, 13 bp, Artificial Sequence
  Oligonucleotide for detection of SNP TSC0064512
gggaaacgattgg

SEQ ID NO: 266252 - DNA, 13 bp, Artificial Sequence
  Oligonucleotide for detection of SNP TSC0064512
ccaatcgtttccc

SEQ ID NO: 266253 - DNA, 13 bp, Artificial Sequence
  Oligonucleotide for detection of SNP TSC0064512
ttagtcgttttty

SEQ ID NO: 266254 - DNA, 13 bp, Artificial Sequence
  Oligonucleotide for detection of SNP TSC0064512
raaaaacgactaa

SEQ ID NO: 266255 - DNA, 13 bp, Artificial Sequence
  Oligonucleotide for detection of SNP TSC0064514
ggattaagggtgt

SEQ ID NO: 266256 - DNA, 13 bp, Artificial Sequence
  Oligonucleotide for detection of SNP TSC0064514
acacccttaatcc

SEQ ID NO: 266257 - DNA, 13 bp, Artificial Sequence
  Oligonucleotide for detection of SNP TSC0064514
ggattatgggtgt

SEQ ID NO: 266258 - DNA, 13 bp, Artificial Sequence
  Oligonucleotide for detection of SNP TSC0064514
acacccataatcc

SEQ ID NO: 266259 - DNA, 13 bp, Artificial Sequence
  Oligonucleotide for detection of SNP TSC0064514
atatttttaatty

SEQ ID NO: 266260 - DNA, 13 bp, Artificial Sequence
  Oligonucleotide for detection of SNP TSC0064514
raattaaaaatat

SEQ ID NO: 266261 - DNA, 13 bp, Artificial Sequence
  Oligonucleotide for detection of SNP TSC0064515
agattaggtatgg

SEQ ID NO: 266262 - DNA, 13 bp, Artificial Sequence
  Oligonucleotide for detection of SNP TSC0064515
ccatacctaatct

SEQ ID NO: 266263 - DNA, 13 bp, Artificial Sequence
  Oligonucleotide for detection of SNP TSC0064515
agattaagtatgg

SEQ ID NO: 266264 - DNA, 13 bp, Artificial Sequence
  Oligonucleotide for detection of SNP TSC0064515
ccatacttaatct

SEQ ID NO: 266265 - DNA, 13 bp, Artificial Sequence
  Oligonucleotide for detection of SNP TSC0064515
agattaggtacgg

SEQ ID NO: 266266 - DNA, 13 bp, Artificial Sequence
  Oligonucleotide for detection of SNP TSC0064515
ccgtacctaatct

SEQ ID NO: 266267 - DNA, 13 bp, Artificial Sequence
  Oligonucleotide for detection of SNP TSC0064515
agattaagtacgg

SEQ ID NO: 266268 - DNA, 13 bp, Artificial Sequence
  Oligonucleotide for detection of SNP TSC0064515
ccgtacttaatct

SEQ ID NO: 266269 - DNA, 13 bp, Artificial Sequence
  Oligonucleotide for detection of SNP TSC0064517
agtataatttgaa

SEQ ID NO: 266270 - DNA, 13 bp, Artificial Sequence
  Oligonucleotide for detection of SNP TSC0064517
ttcaaattatact

SEQ ID NO: 266271 - DNA, 13 bp, Artificial Sequence
  Oligonucleotide for detection of SNP TSC0064517
agtatagtttgaa

SEQ ID NO: 266272 - DNA, 13 bp, Artificial Sequence
  Oligonucleotide for detection of SNP TSC0064517
ttcaaactatact

SEQ ID NO: 266273 - DNA, 13 bp, Artificial Sequence
  Oligonucleotide for detection of SNP TSC0064519
gtaatttatttta

SEQ ID NO: 266274 - DNA, 13 bp, Artificial Sequence
  Oligonucleotide for detection of SNP TSC0064519
taaaataaattac

SEQ ID NO: 266275 - DNA, 13 bp, Artificial Sequence
  Oligonucleotide for detection of SNP TSC0064519
taaaattgattay

SEQ ID NO: 266276 - DNA, 13 bp, Artificial Sequence
  Oligonucleotide for detection of SNP TSC0064519
rtaatcaatttta

SEQ ID NO: 266277 - DNA, 13 bp, Artificial Sequence
  Oligonucleotide for detection of SNP TSC0064519
taaaatggattay

SEQ ID NO: 266278 - DNA, 13 bp, Artificial Sequence
  Oligonucleotide for detection of SNP TSC0064519
rtaatccatttta

SEQ ID NO: 266279 - DNA, 13 bp, Artificial Sequence
  Oligonucleotide for detection of SNP TSC0000410
tgaagataaggaa

SEQ ID NO: 266280 - DNA, 13 bp, Artificial Sequence
  Oligonucleotide for detection of SNP TSC0000410
ttccttatcttca

SEQ ID NO: 266281 - DNA, 13 bp, Artificial Sequence
  Oligonucleotide for detection of SNP TSC0000410
tgaagagaaggaa

SEQ ID NO: 266282 - DNA, 13 bp, Artificial Sequence
  Oligonucleotide for detection of SNP TSC0000410
ttccttctcttca

SEQ ID NO: 266283 - DNA, 13 bp, Artificial Sequence
  Oligonucleotide for detection of SNP TSC0000411
attagagtgattt

SEQ ID NO: 266284 - DNA, 13 bp, Artificial Sequence
  Oligonucleotide for detection of SNP TSC0000411
aaatcactctaat

SEQ ID NO: 266285 - DNA, 13 bp, Artificial Sequence
  Oligonucleotide for detection of SNP TSC0000411
attagattgattt

SEQ ID NO: 266286 - DNA, 13 bp, Artificial Sequence
  Oligonucleotide for detection of SNP TSC0000411
aaatcaatctaat

SEQ ID NO: 266287 - DNA, 13 bp, Artificial Sequence
  Oligonucleotide for detection of SNP TSC0001011
tgtgttttaatty

SEQ ID NO: 266288 - DNA, 13 bp, Artificial Sequence
  Oligonucleotide for detection of SNP TSC0001011
raattaaaacaca

SEQ ID NO: 266289 - DNA, 13 bp, Artificial Sequence
  Oligonucleotide for detection of SNP TSC0001011
gggttgtaatata

SEQ ID NO: 266290 - DNA, 13 bp, Artificial Sequence
  Oligonucleotide for detection of SNP TSC0001011
tatattacaaccc

SEQ ID NO: 266291 - DNA, 13 bp, Artificial Sequence
  Oligonucleotide for detection of SNP TSC0001011
gggttggaatata

SEQ ID NO: 266292 - DNA, 13 bp, Artificial Sequence
  Oligonucleotide for detection of SNP TSC0001011
tatattccaaccc

SEQ ID NO: 266293 - DNA, 13 bp, Artificial Sequence
  Oligonucleotide for detection of SNP TSC0064521
tatttgaaagagt

SEQ ID NO: 266294 - DNA, 13 bp, Artificial Sequence
  Oligonucleotide for detection of SNP TSC0064521
actctttcaaata

SEQ ID NO: 266295 - DNA, 13 bp, Artificial Sequence
  Oligonucleotide for detection of SNP TSC0064521
tatttggaagagt

SEQ ID NO: 266296 - DNA, 13 bp, Artificial Sequence
  Oligonucleotide for detection of SNP TSC0064521
actcttccaaata

SEQ ID NO: 266297 - DNA, 13 bp, Artificial Sequence
  Oligonucleotide for detection of SNP TSC0064522
gagattgaaatgg

SEQ ID NO: 266298 - DNA, 13 bp, Artificial Sequence
  Oligonucleotide for detection of SNP TSC0064522
ccatttcaatctc

SEQ ID NO: 266299 - DNA, 13 bp, Artificial Sequence
  Oligonucleotide for detection of SNP TSC0064522
gagattaaaatgg

SEQ ID NO: 266300 - DNA, 13 bp, Artificial Sequence
  Oligonucleotide for detection of SNP TSC0064522
ccattttaatctc

SEQ ID NO: 266301 - DNA, 13 bp, Artificial Sequence
  Oligonucleotide for detection of SNP TSC0064522
gagatcgaaatgg

SEQ ID NO: 266302 - DNA, 13 bp, Artificial Sequence
  Oligonucleotide for detection of SNP TSC0064522
ccatttcgatctc

SEQ ID NO: 266303 - DNA, 13 bp, Artificial Sequence
  Oligonucleotide for detection of SNP TSC0064522
gagattaaaacgg

SEQ ID NO: 266304 - DNA, 13 bp, Artificial Sequence
  Oligonucleotide for detection of SNP TSC0064522
ccgttttaatctc

SEQ ID NO: 266305 - DNA, 13 bp, Artificial Sequence
  Oligonucleotide for detection of SNP TSC0064522
gagattgaaacgg

SEQ ID NO: 266306 - DNA, 13 bp, Artificial Sequence
  Oligonucleotide for detection of SNP TSC0064522
ccgtttcaatctc

SEQ ID NO: 266307 - DNA, 13 bp, Artificial Sequence
  Oligonucleotide for detection of SNP TSC0064522
gagatcgaaacgg

SEQ ID NO: 266308 - DNA, 13 bp, Artificial Sequence
  Oligonucleotide for detection of SNP TSC0064522
ccgtttcgatctc

SEQ ID NO: 266309 - DNA, 13 bp, Artificial Sequence
  Oligonucleotide for detection of SNP TSC0064523
attttgtagttag

SEQ ID NO: 266310 - DNA, 13 bp, Artificial Sequence
  Oligonucleotide for detection of SNP TSC0064523
ctaactacaaaat

SEQ ID NO: 266311 - DNA, 13 bp, Artificial Sequence
  Oligonucleotide for detection of SNP TSC0064523
attttggagttag

SEQ ID NO: 266312 - DNA, 13 bp, Artificial Sequence
  Oligonucleotide for detection of SNP TSC0064523
ctaactccaaaat

SEQ ID NO: 266313 - DNA, 13 bp, Artificial Sequence
  Oligonucleotide for detection of SNP TSC0064523
ttaattgtaaaat

SEQ ID NO: 266314 - DNA, 13 bp, Artificial Sequence
  Oligonucleotide for detection of SNP TSC0064523
attttacaattaa

SEQ ID NO: 266315 - DNA, 13 bp, Artificial Sequence
  Oligonucleotide for detection of SNP TSC0064523
ttaattttaaaat

SEQ ID NO: 266316 - DNA, 13 bp, Artificial Sequence
  Oligonucleotide for detection of SNP TSC0064523
attttaaaattaa

SEQ ID NO: 266317 - DNA, 13 bp, Artificial Sequence
  Oligonucleotide for detection of SNP TSC0064524
taataaatgtaty

SEQ ID NO: 266318 - DNA, 13 bp, Artificial Sequence
  Oligonucleotide for detection of SNP TSC0064524
ratacatttatta

SEQ ID NO: 266319 - DNA, 13 bp, Artificial Sequence
  Oligonucleotide for detection of SNP TSC0064524
taataattgtaty

SEQ ID NO: 266320 - DNA, 13 bp, Artificial Sequence
  Oligonucleotide for detection of SNP TSC0064524
ratacaattatta

SEQ ID NO: 266321 - DNA, 13 bp, Artificial Sequence
  Oligonucleotide for detection of SNP TSC0064524
gatatatttgtta

SEQ ID NO: 266322 - DNA, 13 bp, Artificial Sequence
  Oligonucleotide for detection of SNP TSC0064524
taacaaatatatc

SEQ ID NO: 266323 - DNA, 13 bp, Artificial Sequence
  Oligonucleotide for detection of SNP TSC0064524
gatataattgtta

SEQ ID NO: 266324 - DNA, 13 bp, Artificial Sequence
  Oligonucleotide for detection of SNP TSC0064524
taacaattatatc

SEQ ID NO: 266325 - DNA, 13 bp, Artificial Sequence
  Oligonucleotide for detection of SNP TSC0064525
taaggtgttttag

SEQ ID NO: 266326 - DNA, 13 bp, Artificial Sequence
  Oligonucleotide for detection of SNP TSC0064525
ctaaaacacctta

SEQ ID NO: 266327 - DNA, 13 bp, Artificial Sequence
  Oligonucleotide for detection of SNP TSC0064526
ttaatgtgatata

SEQ ID NO: 266328 - DNA, 13 bp, Artificial Sequence
  Oligonucleotide for detection of SNP TSC0064526
tatatcacattaa

SEQ ID NO: 266329 - DNA, 13 bp, Artificial Sequence
  Oligonucleotide for detection of SNP TSC0064526
ttaatgcgatata

SEQ ID NO: 266330 - DNA, 13 bp, Artificial Sequence
  Oligonucleotide for detection of SNP TSC0064526
tatatcgcattaa

SEQ ID NO: 266331 - DNA, 13 bp, Artificial Sequence
  Oligonucleotide for detection of SNP TSC0064526
tatattgtattga

SEQ ID NO: 266332 - DNA, 13 bp, Artificial Sequence
  Oligonucleotide for detection of SNP TSC0064526
tcaatacaatata

SEQ ID NO: 266333 - DNA, 13 bp, Artificial Sequence
  Oligonucleotide for detection of SNP TSC0064526
tatatcgtattga

SEQ ID NO: 266334 - DNA, 13 bp, Artificial Sequence
  Oligonucleotide for detection of SNP TSC0064526
tcaatacgatata

SEQ ID NO: 266335 - DNA, 13 bp, Artificial Sequence
  Oligonucleotide for detection of SNP TSC0064527
agttttagttaag

SEQ ID NO: 266336 - DNA, 13 bp, Artificial Sequence
  Oligonucleotide for detection of SNP TSC0064527
cttaactaaaact

SEQ ID NO: 266337 - DNA, 13 bp, Artificial Sequence
  Oligonucleotide for detection of SNP TSC0064527
agtttttgttaag

SEQ ID NO: 266338 - DNA, 13 bp, Artificial Sequence
  Oligonucleotide for detection of SNP TSC0064527
cttaacaaaaact

SEQ ID NO: 266339 - DNA, 13 bp, Artificial Sequence
  Oligonucleotide for detection of SNP TSC0064527
tttgattaaggtt

SEQ ID NO: 266340 - DNA, 13 bp, Artificial Sequence
  Oligonucleotide for detection of SNP TSC0064527
aaccttaatcaaa

SEQ ID NO: 266341 - DNA, 13 bp, Artificial Sequence
  Oligonucleotide for detection of SNP TSC0064527
tttgataaaggtt

SEQ ID NO: 266342 - DNA, 13 bp, Artificial Sequence
  Oligonucleotide for detection of SNP TSC0064527
aacctttatcaaa

SEQ ID NO: 266343 - DNA, 13 bp, Artificial Sequence
  Oligonucleotide for detection of SNP TSC0001397
agttttttattgt

SEQ ID NO: 266344 - DNA, 13 bp, Artificial Sequence
  Oligonucleotide for detection of SNP TSC0001397
acaataaaaaact

SEQ ID NO: 266345 - DNA, 13 bp, Artificial Sequence
  Oligonucleotide for detection of SNP TSC0001397
atagtaagaggtt

SEQ ID NO: 266346 - DNA, 13 bp, Artificial Sequence
  Oligonucleotide for detection of SNP TSC0001397
aacctcttactat

SEQ ID NO: 266347 - DNA, 13 bp, Artificial Sequence
  Oligonucleotide for detection of SNP TSC0001397
atagtatgaggtt

SEQ ID NO: 266348 - DNA, 13 bp, Artificial Sequence
  Oligonucleotide for detection of SNP TSC0001397
aacctcatactat

SEQ ID NO: 266349 - DNA, 13 bp, Artificial Sequence
  Oligonucleotide for detection of SNP TSC0001397
atagtacgaggtt

SEQ ID NO: 266350 - DNA, 13 bp, Artificial Sequence
  Oligonucleotide for detection of SNP TSC0001397
aacctcgtactat

SEQ ID NO: 266351 - DNA, 13 bp, Artificial Sequence
  Oligonucleotide for detection of SNP TSC0000152
agaaatatgttay

SEQ ID NO: 266352 - DNA, 13 bp, Artificial Sequence
  Oligonucleotide for detection of SNP TSC0000152
rtaacatatttct

SEQ ID NO: 266353 - DNA, 13 bp, Artificial Sequence
  Oligonucleotide for detection of SNP TSC0000152
agaaatgtgttay

SEQ ID NO: 266354 - DNA, 13 bp, Artificial Sequence
  Oligonucleotide for detection of SNP TSC0000152
rtaacacatttct

SEQ ID NO: 266355 - DNA, 13 bp, Artificial Sequence
  Oligonucleotide for detection of SNP TSC0000152
agaaacgtgttay

SEQ ID NO: 266356 - DNA, 13 bp, Artificial Sequence
  Oligonucleotide for detection of SNP TSC0000152
rtaacacgtttct

SEQ ID NO: 266357 - DNA, 13 bp, Artificial Sequence
  Oligonucleotide for detection of SNP TSC0000152
gtagtatgttttt

SEQ ID NO: 266358 - DNA, 13 bp, Artificial Sequence
  Oligonucleotide for detection of SNP TSC0000152
aaaaacatactac

SEQ ID NO: 266359 - DNA, 13 bp, Artificial Sequence
  Oligonucleotide for detection of SNP TSC0000152
gtagtacgttttt

SEQ ID NO: 266360 - DNA, 13 bp, Artificial Sequence
  Oligonucleotide for detection of SNP TSC0000152
aaaaacgtactac

SEQ ID NO: 266361 - DNA, 13 bp, Artificial Sequence
  Oligonucleotide for detection of SNP TSC0064540
aagatttatttat

SEQ ID NO: 266362 - DNA, 13 bp, Artificial Sequence
  Oligonucleotide for detection of SNP TSC0064540
ataaataaatctt

SEQ ID NO: 266363 - DNA, 13 bp, Artificial Sequence
  Oligonucleotide for detection of SNP TSC0064540
aagattgatttat

SEQ ID NO: 266364 - DNA, 13 bp, Artificial Sequence
  Oligonucleotide for detection of SNP TSC0064540
ataaatcaatctt

SEQ ID NO: 266365 - DNA, 13 bp, Artificial Sequence
  Oligonucleotide for detection of SNP TSC0064540
ataaataaatttt

SEQ ID NO: 266366 - DNA, 13 bp, Artificial Sequence
  Oligonucleotide for detection of SNP TSC0064540
aaaatttatttat

SEQ ID NO: 266367 - DNA, 13 bp, Artificial Sequence
  Oligonucleotide for detection of SNP TSC0064540
ataaattaatttt

SEQ ID NO: 266368 - DNA, 13 bp, Artificial Sequence
  Oligonucleotide for detection of SNP TSC0064540
aaaattaatttat

SEQ ID NO: 266369 - DNA, 13 bp, Artificial Sequence
  Oligonucleotide for detection of SNP TSC0064542
tatggtgttagta

SEQ ID NO: 266370 - DNA, 13 bp, Artificial Sequence
  Oligonucleotide for detection of SNP TSC0064542
tactaacaccata

SEQ ID NO: 266371 - DNA, 13 bp, Artificial Sequence
  Oligonucleotide for detection of SNP TSC0064542
tatggtattagta

SEQ ID NO: 266372 - DNA, 13 bp, Artificial Sequence
  Oligonucleotide for detection of SNP TSC0064542
tactaataccata

SEQ ID NO: 266373 - DNA, 13 bp, Artificial Sequence
  Oligonucleotide for detection of SNP TSC0064543
tttttttaaattg

SEQ ID NO: 266374 - DNA, 13 bp, Artificial Sequence
  Oligonucleotide for detection of SNP TSC0064543
caatttaaaaaaa

SEQ ID NO: 266375 - DNA, 13 bp, Artificial Sequence
  Oligonucleotide for detection of SNP TSC0064543
tagttttggagag

SEQ ID NO: 266376 - DNA, 13 bp, Artificial Sequence
  Oligonucleotide for detection of SNP TSC0064543
ctctccaaaacta

SEQ ID NO: 266377 - DNA, 13 bp, Artificial Sequence
  Oligonucleotide for detection of SNP TSC0064543
tagtttgggagag

SEQ ID NO: 266378 - DNA, 13 bp, Artificial Sequence
  Oligonucleotide for detection of SNP TSC0064543
ctctcccaaacta

SEQ ID NO: 266379 - DNA, 13 bp, Artificial Sequence
  Oligonucleotide for detection of SNP TSC0064544
ttttttgataaga

SEQ ID NO: 266380 - DNA, 13 bp, Artificial Sequence
  Oligonucleotide for detection of SNP TSC0064544
tcttatcaaaaaa

SEQ ID NO: 266381 - DNA, 13 bp, Artificial Sequence
  Oligonucleotide for detection of SNP TSC0064544
ttttttaataaga

SEQ ID NO: 266382 - DNA, 13 bp, Artificial Sequence
  Oligonucleotide for detection of SNP TSC0064544
tcttattaaaaaa

SEQ ID NO: 266383 - DNA, 13 bp, Artificial Sequence
  Oligonucleotide for detection of SNP TSC0064549
tggttagttatag

SEQ ID NO: 266384 - DNA, 13 bp, Artificial Sequence
  Oligonucleotide for detection of SNP TSC0064549
ctataactaacca

SEQ ID NO: 266385 - DNA, 13 bp, Artificial Sequence
  Oligonucleotide for detection of SNP TSC0064550
taggggatgagty

SEQ ID NO: 266386 - DNA, 13 bp, Artificial Sequence
  Oligonucleotide for detection of SNP TSC0064550
ractcatccccta

SEQ ID NO: 266387 - DNA, 13 bp, Artificial Sequence
  Oligonucleotide for detection of SNP TSC0064550
taggggttgagty

SEQ ID NO: 266388 - DNA, 13 bp, Artificial Sequence
  Oligonucleotide for detection of SNP TSC0064550
ractcaaccccta

SEQ ID NO: 266389 - DNA, 13 bp, Artificial Sequence
  Oligonucleotide for detection of SNP TSC0064550
ggtttattttttg

SEQ ID NO: 266390 - DNA, 13 bp, Artificial Sequence
  Oligonucleotide for detection of SNP TSC0064550
caaaaaataaacc

SEQ ID NO: 266391 - DNA, 13 bp, Artificial Sequence
  Oligonucleotide for detection of SNP TSC0064550
ggtttagtttttg

SEQ ID NO: 266392 - DNA, 13 bp, Artificial Sequence
  Oligonucleotide for detection of SNP TSC0064550
caaaaactaaacc

SEQ ID NO: 266393 - DNA, 13 bp, Artificial Sequence
  Oligonucleotide for detection of SNP TSC0064551
agaataaggaaag

SEQ ID NO: 266394 - DNA, 13 bp, Artificial Sequence
  Oligonucleotide for detection of SNP TSC0064551
ctttccttattct

SEQ ID NO: 266395 - DNA, 13 bp, Artificial Sequence
  Oligonucleotide for detection of SNP TSC0064551
agaatagggaaag

SEQ ID NO: 266396 - DNA, 13 bp, Artificial Sequence
  Oligonucleotide for detection of SNP TSC0064551
ctttccctattct

SEQ ID NO: 266397 - DNA, 13 bp, Artificial Sequence
  Oligonucleotide for detection of SNP TSC0064552
ttggagaagttaa

SEQ ID NO: 266398 - DNA, 13 bp, Artificial Sequence
  Oligonucleotide for detection of SNP TSC0064552
ttaacttctccaa

SEQ ID NO: 266399 - DNA, 13 bp, Artificial Sequence
  Oligonucleotide for detection of SNP TSC0064552
ttggagtagttaa

SEQ ID NO: 266400 - DNA, 13 bp, Artificial Sequence
  Oligonucleotide for detection of SNP TSC0064552
ttaactactccaa

SEQ ID NO: 266401 - DNA, 13 bp, Artificial Sequence
  Oligonucleotide for detection of SNP TSC0064553
aaaaatatttaty

SEQ ID NO: 266402 - DNA, 13 bp, Artificial Sequence
  Oligonucleotide for detection of SNP TSC0064553
rataaatattttt

SEQ ID NO: 266403 - DNA, 13 bp, Artificial Sequence
  Oligonucleotide for detection of SNP TSC0064553
aaaaatgtttaty

SEQ ID NO: 266404 - DNA, 13 bp, Artificial Sequence
  Oligonucleotide for detection of SNP TSC0064553
rataaacattttt

SEQ ID NO: 266405 - DNA, 13 bp, Artificial Sequence
  Oligonucleotide for detection of SNP TSC0064553
aaaaacgtttaty

SEQ ID NO: 266406 - DNA, 13 bp, Artificial Sequence
  Oligonucleotide for detection of SNP TSC0064553
rataaacgttttt

SEQ ID NO: 266407 - DNA, 13 bp, Artificial Sequence
  Oligonucleotide for detection of SNP TSC0064553
ggtgagtgttttt

SEQ ID NO: 266408 - DNA, 13 bp, Artificial Sequence
  Oligonucleotide for detection of SNP TSC0064553
aaaaacactcacc

SEQ ID NO: 266409 - DNA, 13 bp, Artificial Sequence
  Oligonucleotide for detection of SNP TSC0064553
ggtgagcgttttt

SEQ ID NO: 266410 - DNA, 13 bp, Artificial Sequence
  Oligonucleotide for detection of SNP TSC0064553
aaaaacgctcacc

SEQ ID NO: 266411 - DNA, 13 bp, Artificial Sequence
  Oligonucleotide for detection of SNP TSC0064554
ataattattttat

SEQ ID NO: 266412 - DNA, 13 bp, Artificial Sequence
  Oligonucleotide for detection of SNP TSC0064554
ataaaataattat

SEQ ID NO: 266413 - DNA, 13 bp, Artificial Sequence
  Oligonucleotide for detection of SNP TSC0064555
tgaaatattgtaa

SEQ ID NO: 266414 - DNA, 13 bp, Artificial Sequence
  Oligonucleotide for detection of SNP TSC0064555
ttacaatatttca

SEQ ID NO: 266415 - DNA, 13 bp, Artificial Sequence
  Oligonucleotide for detection of SNP TSC0064555
tgaaatgttgtaa

SEQ ID NO: 266416 - DNA, 13 bp, Artificial Sequence
  Oligonucleotide for detection of SNP TSC0064555
ttacaacatttca

SEQ ID NO: 266417 - DNA, 13 bp, Artificial Sequence
  Oligonucleotide for detection of SNP TSC0064555
tgaaacgttgtaa

SEQ ID NO: 266418 - DNA, 13 bp, Artificial Sequence
  Oligonucleotide for detection of SNP TSC0064555
ttacaacgtttca

SEQ ID NO: 266419 - DNA, 13 bp, Artificial Sequence
  Oligonucleotide for detection of SNP TSC0064555
ttataatgtttta

SEQ ID NO: 266420 - DNA, 13 bp, Artificial Sequence
  Oligonucleotide for detection of SNP TSC0064555
taaaacattataa

SEQ ID NO: 266421 - DNA, 13 bp, Artificial Sequence
  Oligonucleotide for detection of SNP TSC0064555
ttataacgtttta

SEQ ID NO: 266422 - DNA, 13 bp, Artificial Sequence
  Oligonucleotide for detection of SNP TSC0064555
taaaacgttataa

SEQ ID NO: 266423 - DNA, 13 bp, Artificial Sequence
  Oligonucleotide for detection of SNP TSC0064556
atgtagatgtttt

SEQ ID NO: 266424 - DNA, 13 bp, Artificial Sequence
  Oligonucleotide for detection of SNP TSC0064556
aaaacatctacat

SEQ ID NO: 266425 - DNA, 13 bp, Artificial Sequence
  Oligonucleotide for detection of SNP TSC0064556
atgtagttgtttt

SEQ ID NO: 266426 - DNA, 13 bp, Artificial Sequence
  Oligonucleotide for detection of SNP TSC0064556
aaaacaactacat

SEQ ID NO: 266427 - DNA, 13 bp, Artificial Sequence
  Oligonucleotide for detection of SNP TSC0064556
acgtagatgtttt

SEQ ID NO: 266428 - DNA, 13 bp, Artificial Sequence
  Oligonucleotide for detection of SNP TSC0064556
aaaacatctacgt

SEQ ID NO: 266429 - DNA, 13 bp, Artificial Sequence
  Oligonucleotide for detection of SNP TSC0064556
acgtagttgtttt

SEQ ID NO: 266430 - DNA, 13 bp, Artificial Sequence
  Oligonucleotide for detection of SNP TSC0064556
aaaacaactacgt

SEQ ID NO: 266431 - DNA, 13 bp, Artificial Sequence
  Oligonucleotide for detection of SNP TSC0064556
atgtagacgtttt

SEQ ID NO: 266432 - DNA, 13 bp, Artificial Sequence
  Oligonucleotide for detection of SNP TSC0064556
aaaacgtctacat

SEQ ID NO: 266433 - DNA, 13 bp, Artificial Sequence
  Oligonucleotide for detection of SNP TSC0064556
atgtagtcgtttt

SEQ ID NO: 266434 - DNA, 13 bp, Artificial Sequence
  Oligonucleotide for detection of SNP TSC0064556
aaaacgactacat

SEQ ID NO: 266435 - DNA, 13 bp, Artificial Sequence
  Oligonucleotide for detection of SNP TSC0064556
acgtagacgtttt

SEQ ID NO: 266436 - DNA, 13 bp, Artificial Sequence
  Oligonucleotide for detection of SNP TSC0064556
aaaacgtctacgt

SEQ ID NO: 266437 - DNA, 13 bp, Artificial Sequence
  Oligonucleotide for detection of SNP TSC0064556
acgtagtcgtttt

SEQ ID NO: 266438 - DNA, 13 bp, Artificial Sequence
  Oligonucleotide for detection of SNP TSC0064556
aaaacgactacgt

SEQ ID NO: 266439 - DNA, 13 bp, Artificial Sequence
  Oligonucleotide for detection of SNP TSC0064556
aaaatgtttatgt

SEQ ID NO: 266440 - DNA, 13 bp, Artificial Sequence
  Oligonucleotide for detection of SNP TSC0064556
acataaacatttt

SEQ ID NO: 266441 - DNA, 13 bp, Artificial Sequence
  Oligonucleotide for detection of SNP TSC0064556
aaaatgattatgt

SEQ ID NO: 266442 - DNA, 13 bp, Artificial Sequence
  Oligonucleotide for detection of SNP TSC0064556
acataatcatttt

SEQ ID NO: 266443 - DNA, 13 bp, Artificial Sequence
  Oligonucleotide for detection of SNP TSC0064556
aaaacgtttatgt

SEQ ID NO: 266444 - DNA, 13 bp, Artificial Sequence
  Oligonucleotide for detection of SNP TSC0064556
acataaacgtttt

SEQ ID NO: 266445 - DNA, 13 bp, Artificial Sequence
  Oligonucleotide for detection of SNP TSC0064556
aaaacgattatgt

SEQ ID NO: 266446 - DNA, 13 bp, Artificial Sequence
  Oligonucleotide for detection of SNP TSC0064556
acataatcgtttt

SEQ ID NO: 266447 - DNA, 13 bp, Artificial Sequence
  Oligonucleotide for detection of SNP TSC0064556
aaaatgtttacgt

SEQ ID NO: 266448 - DNA, 13 bp, Artificial Sequence
  Oligonucleotide for detection of SNP TSC0064556
acgtaaacatttt

SEQ ID NO: 266449 - DNA, 13 bp, Artificial Sequence
  Oligonucleotide for detection of SNP TSC0064556
aaaatgattacgt

SEQ ID NO: 266450 - DNA, 13 bp, Artificial Sequence
  Oligonucleotide for detection of SNP TSC0064556
acgtaatcatttt

SEQ ID NO: 266451 - DNA, 13 bp, Artificial Sequence
  Oligonucleotide for detection of SNP TSC0064556
aaaacgtttacgt

SEQ ID NO: 266452 - DNA, 13 bp, Artificial Sequence
  Oligonucleotide for detection of SNP TSC0064556
acgtaaacgtttt

SEQ ID NO: 266453 - DNA, 13 bp, Artificial Sequence
  Oligonucleotide for detection of SNP TSC0064556
aaaacgattacgt

SEQ ID NO: 266454 - DNA, 13 bp, Artificial Sequence
  Oligonucleotide for detection of SNP TSC0064556
acgtaatcgtttt

SEQ ID NO: 266455 - DNA, 13 bp, Artificial Sequence
  Oligonucleotide for detection of SNP TSC0064557
tttgaggtgtaat

SEQ ID NO: 266456 - DNA, 13 bp, Artificial Sequence
  Oligonucleotide for detection of SNP TSC0064557
attacacctcaaa

SEQ ID NO: 266457 - DNA, 13 bp, Artificial Sequence
  Oligonucleotide for detection of SNP TSC0064557
tttgagatgtaat

SEQ ID NO: 266458 - DNA, 13 bp, Artificial Sequence
  Oligonucleotide for detection of SNP TSC0064557
attacatctcaaa

SEQ ID NO: 266459 - DNA, 13 bp, Artificial Sequence
  Oligonucleotide for detection of SNP TSC0064558
ttgttgtagatat

SEQ ID NO: 266460 - DNA, 13 bp, Artificial Sequence
  Oligonucleotide for detection of SNP TSC0064558
atatctacaacaa

SEQ ID NO: 266461 - DNA, 13 bp, Artificial Sequence
  Oligonucleotide for detection of SNP TSC0064558
ttgttggagatat

SEQ ID NO: 266462 - DNA, 13 bp, Artificial Sequence
  Oligonucleotide for detection of SNP TSC0064558
atatctccaacaa

SEQ ID NO: 266463 - DNA, 13 bp, Artificial Sequence
  Oligonucleotide for detection of SNP TSC0064558
atgtttatagtag

SEQ ID NO: 266464 - DNA, 13 bp, Artificial Sequence
  Oligonucleotide for detection of SNP TSC0064558
ctactataaacat

SEQ ID NO: 266465 - DNA, 13 bp, Artificial Sequence
  Oligonucleotide for detection of SNP TSC0064558
atgtttttagtag

SEQ ID NO: 266466 - DNA, 13 bp, Artificial Sequence
  Oligonucleotide for detection of SNP TSC0064558
ctactaaaaacat

SEQ ID NO: 266467 - DNA, 13 bp, Artificial Sequence
  Oligonucleotide for detection of SNP TSC0064559
ttgtttgggattt

SEQ ID NO: 266468 - DNA, 13 bp, Artificial Sequence
  Oligonucleotide for detection of SNP TSC0064559
aaatcccaaacaa

SEQ ID NO: 266469 - DNA, 13 bp, Artificial Sequence
  Oligonucleotide for detection of SNP TSC0064559
ttgtttaggattt

SEQ ID NO: 266470 - DNA, 13 bp, Artificial Sequence
  Oligonucleotide for detection of SNP TSC0064559
aaatcctaaacaa

SEQ ID NO: 266471 - DNA, 13 bp, Artificial Sequence
  Oligonucleotide for detection of SNP TSC0064560
atttattttaggy

SEQ ID NO: 266472 - DNA, 13 bp, Artificial Sequence
  Oligonucleotide for detection of SNP TSC0064560
rcctaaaataaat

SEQ ID NO: 266473 - DNA, 13 bp, Artificial Sequence
  Oligonucleotide for detection of SNP TSC0064560
atttatgttaggy

SEQ ID NO: 266474 - DNA, 13 bp, Artificial Sequence
  Oligonucleotide for detection of SNP TSC0064560
rcctaacataaat

SEQ ID NO: 266475 - DNA, 13 bp, Artificial Sequence
  Oligonucleotide for detection of SNP TSC0064560
gtttgggatgagt

SEQ ID NO: 266476 - DNA, 13 bp, Artificial Sequence
  Oligonucleotide for detection of SNP TSC0064560
actcatcccaaac

SEQ ID NO: 266477 - DNA, 13 bp, Artificial Sequence
  Oligonucleotide for detection of SNP TSC0064560
gtttggtatgagt

SEQ ID NO: 266478 - DNA, 13 bp, Artificial Sequence
  Oligonucleotide for detection of SNP TSC0064560
actcataccaaac

SEQ ID NO: 266479 - DNA, 13 bp, Artificial Sequence
  Oligonucleotide for detection of SNP TSC0064561
gtgttatatgaaa

SEQ ID NO: 266480 - DNA, 13 bp, Artificial Sequence
  Oligonucleotide for detection of SNP TSC0064561
tttcatataacac

SEQ ID NO: 266481 - DNA, 13 bp, Artificial Sequence
  Oligonucleotide for detection of SNP TSC0064561
gtgttagatgaaa

SEQ ID NO: 266482 - DNA, 13 bp, Artificial Sequence
  Oligonucleotide for detection of SNP TSC0064561
tttcatctaacac

SEQ ID NO: 266483 - DNA, 13 bp, Artificial Sequence
  Oligonucleotide for detection of SNP TSC0064561
ttttatataatay

SEQ ID NO: 266484 - DNA, 13 bp, Artificial Sequence
  Oligonucleotide for detection of SNP TSC0064561
rtattatataaaa

SEQ ID NO: 266485 - DNA, 13 bp, Artificial Sequence
  Oligonucleotide for detection of SNP TSC0064563
gagttatatttta

SEQ ID NO: 266486 - DNA, 13 bp, Artificial Sequence
  Oligonucleotide for detection of SNP TSC0064563
taaaatataactc

SEQ ID NO: 266487 - DNA, 13 bp, Artificial Sequence
  Oligonucleotide for detection of SNP TSC0064563
gagttagatttta

SEQ ID NO: 266488 - DNA, 13 bp, Artificial Sequence
  Oligonucleotide for detection of SNP TSC0064563
taaaatctaactc

SEQ ID NO: 266489 - DNA, 13 bp, Artificial Sequence
  Oligonucleotide for detection of SNP TSC0064563
taaagtgtaatty

SEQ ID NO: 266490 - DNA, 13 bp, Artificial Sequence
  Oligonucleotide for detection of SNP TSC0064563
raattacacttta

SEQ ID NO: 266491 - DNA, 13 bp, Artificial Sequence
  Oligonucleotide for detection of SNP TSC0064563
taaagtttaatty

SEQ ID NO: 266492 - DNA, 13 bp, Artificial Sequence
  Oligonucleotide for detection of SNP TSC0064563
raattaaacttta

SEQ ID NO: 266493 - DNA, 13 bp, Artificial Sequence
  Oligonucleotide for detection of SNP TSC0064564
ggtttagaggata

SEQ ID NO: 266494 - DNA, 13 bp, Artificial Sequence
  Oligonucleotide for detection of SNP TSC0064564
tatcctctaaacc

SEQ ID NO: 266495 - DNA, 13 bp, Artificial Sequence
  Oligonucleotide for detection of SNP TSC0064564
ggtttaaaggata

SEQ ID NO: 266496 - DNA, 13 bp, Artificial Sequence
  Oligonucleotide for detection of SNP TSC0064564
tatcctttaaacc

SEQ ID NO: 266497 - DNA, 13 bp, Artificial Sequence
  Oligonucleotide for detection of SNP TSC0064565
atgttttgtaatt

SEQ ID NO: 266498 - DNA, 13 bp, Artificial Sequence
  Oligonucleotide for detection of SNP TSC0064565
aattacaaaacat

SEQ ID NO: 266499 - DNA, 13 bp, Artificial Sequence
  Oligonucleotide for detection of SNP TSC0064565
atgtttcgtaatt

SEQ ID NO: 266500 - DNA, 13 bp, Artificial Sequence
  Oligonucleotide for detection of SNP TSC0064565
aattacgaaacat

SEQ ID NO: 266501 - DNA, 13 bp, Artificial Sequence
  Oligonucleotide for detection of SNP TSC0064565
agttatggagtat

SEQ ID NO: 266502 - DNA, 13 bp, Artificial Sequence
  Oligonucleotide for detection of SNP TSC0064565
atactccataact

SEQ ID NO: 266503 - DNA, 13 bp, Artificial Sequence
  Oligonucleotide for detection of SNP TSC0064565
agttatagagtat

SEQ ID NO: 266504 - DNA, 13 bp, Artificial Sequence
  Oligonucleotide for detection of SNP TSC0064565
atactctataact

SEQ ID NO: 266505 - DNA, 13 bp, Artificial Sequence
  Oligonucleotide for detection of SNP TSC0064565
agttacggagtat

SEQ ID NO: 266506 - DNA, 13 bp, Artificial Sequence
  Oligonucleotide for detection of SNP TSC0064565
atactccgtaact

SEQ ID NO: 266507 - DNA, 13 bp, Artificial Sequence
  Oligonucleotide for detection of SNP TSC0064566
taagttaattttg

SEQ ID NO: 266508 - DNA, 13 bp, Artificial Sequence
  Oligonucleotide for detection of SNP TSC0064566
caaaattaactta

SEQ ID NO: 266509 - DNA, 13 bp, Artificial Sequence
  Oligonucleotide for detection of SNP TSC0064566
taagttgattttg

SEQ ID NO: 266510 - DNA, 13 bp, Artificial Sequence
  Oligonucleotide for detection of SNP TSC0064566
caaaatcaactta

SEQ ID NO: 266511 - DNA, 13 bp, Artificial Sequence
  Oligonucleotide for detection of SNP TSC0064570
gtgatttgttatg

SEQ ID NO: 266512 - DNA, 13 bp, Artificial Sequence
  Oligonucleotide for detection of SNP TSC0064570
cataacaaatcac

SEQ ID NO: 266513 - DNA, 13 bp, Artificial Sequence
  Oligonucleotide for detection of SNP TSC0064570
gtgattcgttatg

SEQ ID NO: 266514 - DNA, 13 bp, Artificial Sequence
  Oligonucleotide for detection of SNP TSC0064570
cataacgaatcac

SEQ ID NO: 266515 - DNA, 13 bp, Artificial Sequence
  Oligonucleotide for detection of SNP TSC0064570
gtgatttgttacg

SEQ ID NO: 266516 - DNA, 13 bp, Artificial Sequence
  Oligonucleotide for detection of SNP TSC0064570
cgtaacaaatcac

SEQ ID NO: 266517 - DNA, 13 bp, Artificial Sequence
  Oligonucleotide for detection of SNP TSC0064570
gtgattcgttacg

SEQ ID NO: 266518 - DNA, 13 bp, Artificial Sequence
  Oligonucleotide for detection of SNP TSC0064570
cgtaacgaatcac

SEQ ID NO: 266519 - DNA, 13 bp, Artificial Sequence
  Oligonucleotide for detection of SNP TSC0064570
tgtggtggattay

SEQ ID NO: 266520 - DNA, 13 bp, Artificial Sequence
  Oligonucleotide for detection of SNP TSC0064570
rtaatccaccaca

SEQ ID NO: 266521 - DNA, 13 bp, Artificial Sequence
  Oligonucleotide for detection of SNP TSC0064570
tgtggtagattay

SEQ ID NO: 266522 - DNA, 13 bp, Artificial Sequence
  Oligonucleotide for detection of SNP TSC0064570
rtaatctaccaca

SEQ ID NO: 266523 - DNA, 13 bp, Artificial Sequence
  Oligonucleotide for detection of SNP TSC0064570
cgtggtggattay

SEQ ID NO: 266524 - DNA, 13 bp, Artificial Sequence
  Oligonucleotide for detection of SNP TSC0064570
rtaatccaccacg

SEQ ID NO: 266525 - DNA, 13 bp, Artificial Sequence
  Oligonucleotide for detection of SNP TSC0064570
cgtggtagattay

SEQ ID NO: 266526 - DNA, 13 bp, Artificial Sequence
  Oligonucleotide for detection of SNP TSC0064570
rtaatctaccacg

SEQ ID NO: 266527 - DNA, 13 bp, Artificial Sequence
  Oligonucleotide for detection of SNP TSC0064570
tgtggcggattay

SEQ ID NO: 266528 - DNA, 13 bp, Artificial Sequence
  Oligonucleotide for detection of SNP TSC0064570
rtaatccgccaca

SEQ ID NO: 266529 - DNA, 13 bp, Artificial Sequence
  Oligonucleotide for detection of SNP TSC0064570
cgtggcggattay

SEQ ID NO: 266530 - DNA, 13 bp, Artificial Sequence
  Oligonucleotide for detection of SNP TSC0064570
rtaatccgccacg

SEQ ID NO: 266531 - DNA, 13 bp, Artificial Sequence
  Oligonucleotide for detection of SNP TSC0064572
ataaagataatag

SEQ ID NO: 266532 - DNA, 13 bp, Artificial Sequence
  Oligonucleotide for detection of SNP TSC0064572
ctattatctttat

SEQ ID NO: 266533 - DNA, 13 bp, Artificial Sequence
  Oligonucleotide for detection of SNP TSC0064573
ttgattgtaatgt

SEQ ID NO: 266534 - DNA, 13 bp, Artificial Sequence
  Oligonucleotide for detection of SNP TSC0064573
acattacaatcaa

SEQ ID NO: 266535 - DNA, 13 bp, Artificial Sequence
  Oligonucleotide for detection of SNP TSC0064573
ttgatcgtaatgt

SEQ ID NO: 266536 - DNA, 13 bp, Artificial Sequence
  Oligonucleotide for detection of SNP TSC0064573
acattacgatcaa

SEQ ID NO: 266537 - DNA, 13 bp, Artificial Sequence
  Oligonucleotide for detection of SNP TSC0064574
gattaaattgaty

SEQ ID NO: 266538 - DNA, 13 bp, Artificial Sequence
  Oligonucleotide for detection of SNP TSC0064574
ratcaatttaatc

SEQ ID NO: 266539 - DNA, 13 bp, Artificial Sequence
  Oligonucleotide for detection of SNP TSC0064574
gattaagttgaty

SEQ ID NO: 266540 - DNA, 13 bp, Artificial Sequence
  Oligonucleotide for detection of SNP TSC0064574
ratcaacttaatc

SEQ ID NO: 266541 - DNA, 13 bp, Artificial Sequence
  Oligonucleotide for detection of SNP TSC0064580
ttttagttgatga

SEQ ID NO: 266542 - DNA, 13 bp, Artificial Sequence
  Oligonucleotide for detection of SNP TSC0064580
tcatcaactaaaa

SEQ ID NO: 266543 - DNA, 13 bp, Artificial Sequence
  Oligonucleotide for detection of SNP TSC0064580
ttttaggtgatga

SEQ ID NO: 266544 - DNA, 13 bp, Artificial Sequence
  Oligonucleotide for detection of SNP TSC0064580
tcatcacctaaaa

SEQ ID NO: 266545 - DNA, 13 bp, Artificial Sequence
  Oligonucleotide for detection of SNP TSC0064580
ttattatttggaa

SEQ ID NO: 266546 - DNA, 13 bp, Artificial Sequence
  Oligonucleotide for detection of SNP TSC0064580
ttccaaataataa

SEQ ID NO: 266547 - DNA, 13 bp, Artificial Sequence
  Oligonucleotide for detection of SNP TSC0064581
tattaaatttata

SEQ ID NO: 266548 - DNA, 13 bp, Artificial Sequence
  Oligonucleotide for detection of SNP TSC0064581
tataaatttaata

SEQ ID NO: 266549 - DNA, 13 bp, Artificial Sequence
  Oligonucleotide for detection of SNP TSC0064581
tattaattttata

SEQ ID NO: 266550 - DNA, 13 bp, Artificial Sequence
  Oligonucleotide for detection of SNP TSC0064581
tataaaattaata

SEQ ID NO: 266551 - DNA, 13 bp, Artificial Sequence
  Oligonucleotide for detection of SNP TSC0064581
tatgagtttggta

SEQ ID NO: 266552 - DNA, 13 bp, Artificial Sequence
  Oligonucleotide for detection of SNP TSC0064581
taccaaactcata

SEQ ID NO: 266553 - DNA, 13 bp, Artificial Sequence
  Oligonucleotide for detection of SNP TSC0064581
tatgaggttggta

SEQ ID NO: 266554 - DNA, 13 bp, Artificial Sequence
  Oligonucleotide for detection of SNP TSC0064581
taccaacctcata

SEQ ID NO: 266555 - DNA, 13 bp, Artificial Sequence
  Oligonucleotide for detection of SNP TSC0064583
taagaggttttaa

SEQ ID NO: 266556 - DNA, 13 bp, Artificial Sequence
  Oligonucleotide for detection of SNP TSC0064583
ttaaaacctctta

SEQ ID NO: 266557 - DNA, 13 bp, Artificial Sequence
  Oligonucleotide for detection of SNP TSC0064583
taagagattttaa

SEQ ID NO: 266558 - DNA, 13 bp, Artificial Sequence
  Oligonucleotide for detection of SNP TSC0064583
ttaaaatctctta

SEQ ID NO: 266559 - DNA, 13 bp, Artificial Sequence
  Oligonucleotide for detection of SNP TSC0064588
aaatagtggaggt

SEQ ID NO: 266560 - DNA, 13 bp, Artificial Sequence
  Oligonucleotide for detection of SNP TSC0064588
acctccactattt

SEQ ID NO: 266561 - DNA, 13 bp, Artificial Sequence
  Oligonucleotide for detection of SNP TSC0064588
aaataggggaggt

SEQ ID NO: 266562 - DNA, 13 bp, Artificial Sequence
  Oligonucleotide for detection of SNP TSC0064588
acctcccctattt

SEQ ID NO: 266563 - DNA, 13 bp, Artificial Sequence
  Oligonucleotide for detection of SNP TSC0064589
tgattgttttggg

SEQ ID NO: 266564 - DNA, 13 bp, Artificial Sequence
  Oligonucleotide for detection of SNP TSC0064589
cccaaaacaatca

SEQ ID NO: 266565 - DNA, 13 bp, Artificial Sequence
  Oligonucleotide for detection of SNP TSC0064589
tgattggtttggg

SEQ ID NO: 266566 - DNA, 13 bp, Artificial Sequence
  Oligonucleotide for detection of SNP TSC0064589
cccaaaccaatca

SEQ ID NO: 266567 - DNA, 13 bp, Artificial Sequence
  Oligonucleotide for detection of SNP TSC0064589
cgattgttttggg

SEQ ID NO: 266568 - DNA, 13 bp, Artificial Sequence
  Oligonucleotide for detection of SNP TSC0064589
cccaaaacaatcg

SEQ ID NO: 266569 - DNA, 13 bp, Artificial Sequence
  Oligonucleotide for detection of SNP TSC0064589
cgattggtttggg

SEQ ID NO: 266570 - DNA, 13 bp, Artificial Sequence
  Oligonucleotide for detection of SNP TSC0064589
cccaaaccaatcg

SEQ ID NO: 266571 - DNA, 13 bp, Artificial Sequence
  Oligonucleotide for detection of SNP TSC0064589
tgattgtttcggg

SEQ ID NO: 266572 - DNA, 13 bp, Artificial Sequence
  Oligonucleotide for detection of SNP TSC0064589
cccgaaacaatca

SEQ ID NO: 266573 - DNA, 13 bp, Artificial Sequence
  Oligonucleotide for detection of SNP TSC0064589
tgattggttcggg

SEQ ID NO: 266574 - DNA, 13 bp, Artificial Sequence
  Oligonucleotide for detection of SNP TSC0064589
cccgaaccaatca

SEQ ID NO: 266575 - DNA, 13 bp, Artificial Sequence
  Oligonucleotide for detection of SNP TSC0064589
cgattgtttcggg

SEQ ID NO: 266576 - DNA, 13 bp, Artificial Sequence
  Oligonucleotide for detection of SNP TSC0064589
cccgaaacaatcg

SEQ ID NO: 266577 - DNA, 13 bp, Artificial Sequence
  Oligonucleotide for detection of SNP TSC0064589
cgattggttcggg

SEQ ID NO: 266578 - DNA, 13 bp, Artificial Sequence
  Oligonucleotide for detection of SNP TSC0064589
cccgaaccaatcg

SEQ ID NO: 266579 - DNA, 13 bp, Artificial Sequence
  Oligonucleotide for detection of SNP TSC0064589
tttgagataattg

SEQ ID NO: 266580 - DNA, 13 bp, Artificial Sequence
  Oligonucleotide for detection of SNP TSC0064589
caattatctcaaa

SEQ ID NO: 266581 - DNA, 13 bp, Artificial Sequence
  Oligonucleotide for detection of SNP TSC0064589
tttgagttaattg

SEQ ID NO: 266582 - DNA, 13 bp, Artificial Sequence
  Oligonucleotide for detection of SNP TSC0064589
caattaactcaaa

SEQ ID NO: 266583 - DNA, 13 bp, Artificial Sequence
  Oligonucleotide for detection of SNP TSC0064589
ttcgagataattg

SEQ ID NO: 266584 - DNA, 13 bp, Artificial Sequence
  Oligonucleotide for detection of SNP TSC0064589
caattatctcgaa

SEQ ID NO: 266585 - DNA, 13 bp, Artificial Sequence
  Oligonucleotide for detection of SNP TSC0064589
ttcgagttaattg

SEQ ID NO: 266586 - DNA, 13 bp, Artificial Sequence
  Oligonucleotide for detection of SNP TSC0064589
caattaactcgaa

SEQ ID NO: 266587 - DNA, 13 bp, Artificial Sequence
  Oligonucleotide for detection of SNP TSC0064589
tttgagataatcg

SEQ ID NO: 266588 - DNA, 13 bp, Artificial Sequence
  Oligonucleotide for detection of SNP TSC0064589
cgattatctcaaa

SEQ ID NO: 266589 - DNA, 13 bp, Artificial Sequence
  Oligonucleotide for detection of SNP TSC0064589
tttgagttaatcg

SEQ ID NO: 266590 - DNA, 13 bp, Artificial Sequence
  Oligonucleotide for detection of SNP TSC0064589
cgattaactcaaa

SEQ ID NO: 266591 - DNA, 13 bp, Artificial Sequence
  Oligonucleotide for detection of SNP TSC0064589
ttcgagataatcg

SEQ ID NO: 266592 - DNA, 13 bp, Artificial Sequence
  Oligonucleotide for detection of SNP TSC0064589
cgattatctcgaa

SEQ ID NO: 266593 - DNA, 13 bp, Artificial Sequence
  Oligonucleotide for detection of SNP TSC0064589
ttcgagttaatcg

SEQ ID NO: 266594 - DNA, 13 bp, Artificial Sequence
  Oligonucleotide for detection of SNP TSC0064589
cgattaactcgaa

SEQ ID NO: 266595 - DNA, 13 bp, Artificial Sequence
  Oligonucleotide for detection of SNP TSC0064591
atttgaagttttt

SEQ ID NO: 266596 - DNA, 13 bp, Artificial Sequence
  Oligonucleotide for detection of SNP TSC0064591
aaaaacttcaaat

SEQ ID NO: 266597 - DNA, 13 bp, Artificial Sequence
  Oligonucleotide for detection of SNP TSC0064591
atttgaggttttt

SEQ ID NO: 266598 - DNA, 13 bp, Artificial Sequence
  Oligonucleotide for detection of SNP TSC0064591
aaaaacctcaaat

SEQ ID NO: 266599 - DNA, 13 bp, Artificial Sequence
  Oligonucleotide for detection of SNP TSC0064597
ttatgtaatagtg

SEQ ID NO: 266600 - DNA, 13 bp, Artificial Sequence
  Oligonucleotide for detection of SNP TSC0064597
cactattacataa

SEQ ID NO: 266601 - DNA, 13 bp, Artificial Sequence
  Oligonucleotide for detection of SNP TSC0064597
ttatgttatagtg

SEQ ID NO: 266602 - DNA, 13 bp, Artificial Sequence
  Oligonucleotide for detection of SNP TSC0064597
cactataacataa

SEQ ID NO: 266603 - DNA, 13 bp, Artificial Sequence
  Oligonucleotide for detection of SNP TSC0064597
tattgttgtatgg

SEQ ID NO: 266604 - DNA, 13 bp, Artificial Sequence
  Oligonucleotide for detection of SNP TSC0064597
ccatacaacaata

SEQ ID NO: 266605 - DNA, 13 bp, Artificial Sequence
  Oligonucleotide for detection of SNP TSC0064597
tattgtagtatgg

SEQ ID NO: 266606 - DNA, 13 bp, Artificial Sequence
  Oligonucleotide for detection of SNP TSC0064597
ccatactacaata

SEQ ID NO: 266607 - DNA, 13 bp, Artificial Sequence
  Oligonucleotide for detection of SNP TSC0064598
tttattgtatgat

SEQ ID NO: 266608 - DNA, 13 bp, Artificial Sequence
  Oligonucleotide for detection of SNP TSC0064598
atcatacaataaa

SEQ ID NO: 266609 - DNA, 13 bp, Artificial Sequence
  Oligonucleotide for detection of SNP TSC0064598
tttattatatgat

SEQ ID NO: 266610 - DNA, 13 bp, Artificial Sequence
  Oligonucleotide for detection of SNP TSC0064598
atcatataataaa

SEQ ID NO: 266611 - DNA, 13 bp, Artificial Sequence
  Oligonucleotide for detection of SNP TSC0064599
atattttggggga

SEQ ID NO: 266612 - DNA, 13 bp, Artificial Sequence
  Oligonucleotide for detection of SNP TSC0064599
tcccccaaaatat

SEQ ID NO: 266613 - DNA, 13 bp, Artificial Sequence
  Oligonucleotide for detection of SNP TSC0064599
atatttaggggga

SEQ ID NO: 266614 - DNA, 13 bp, Artificial Sequence
  Oligonucleotide for detection of SNP TSC0064599
tccccctaaatat

SEQ ID NO: 266615 - DNA, 13 bp, Artificial Sequence
  Oligonucleotide for detection of SNP TSC0064600
atttaggtataaa

SEQ ID NO: 266616 - DNA, 13 bp, Artificial Sequence
  Oligonucleotide for detection of SNP TSC0064600
tttatacctaaat

SEQ ID NO: 266617 - DNA, 13 bp, Artificial Sequence
  Oligonucleotide for detection of SNP TSC0064600
atttagatataaa

SEQ ID NO: 266618 - DNA, 13 bp, Artificial Sequence
  Oligonucleotide for detection of SNP TSC0064600
tttatatctaaat

SEQ ID NO: 266619 - DNA, 13 bp, Artificial Sequence
  Oligonucleotide for detection of SNP TSC0064601
gttttagttaaga

SEQ ID NO: 266620 - DNA, 13 bp, Artificial Sequence
  Oligonucleotide for detection of SNP TSC0064601
tcttaactaaaac

SEQ ID NO: 266621 - DNA, 13 bp, Artificial Sequence
  Oligonucleotide for detection of SNP TSC0064601
ttttgagtagagy

SEQ ID NO: 266622 - DNA, 13 bp, Artificial Sequence
  Oligonucleotide for detection of SNP TSC0064601
rctctactcaaaa

SEQ ID NO: 266623 - DNA, 13 bp, Artificial Sequence
  Oligonucleotide for detection of SNP TSC0064601
ttttgattagagy

SEQ ID NO: 266624 - DNA, 13 bp, Artificial Sequence
  Oligonucleotide for detection of SNP TSC0064601
rctctaatcaaaa

SEQ ID NO: 266625 - DNA, 13 bp, Artificial Sequence
  Oligonucleotide for detection of SNP TSC0064602
gtttgatgaagga

SEQ ID NO: 266626 - DNA, 13 bp, Artificial Sequence
  Oligonucleotide for detection of SNP TSC0064602
tccttcatcaaac

SEQ ID NO: 266627 - DNA, 13 bp, Artificial Sequence
  Oligonucleotide for detection of SNP TSC0064602
gtttgacgaagga

SEQ ID NO: 266628 - DNA, 13 bp, Artificial Sequence
  Oligonucleotide for detection of SNP TSC0064602
tccttcgtcaaac

SEQ ID NO: 266629 - DNA, 13 bp, Artificial Sequence
  Oligonucleotide for detection of SNP TSC0064603
gttgtagggtttt

SEQ ID NO: 266630 - DNA, 13 bp, Artificial Sequence
  Oligonucleotide for detection of SNP TSC0064603
aaaaccctacaac

SEQ ID NO: 266631 - DNA, 13 bp, Artificial Sequence
  Oligonucleotide for detection of SNP TSC0064603
gttgtaaggtttt

SEQ ID NO: 266632 - DNA, 13 bp, Artificial Sequence
  Oligonucleotide for detection of SNP TSC0064603
aaaaccttacaac

SEQ ID NO: 266633 - DNA, 13 bp, Artificial Sequence
  Oligonucleotide for detection of SNP TSC0064604
gtatgagtatagt

SEQ ID NO: 266634 - DNA, 13 bp, Artificial Sequence
  Oligonucleotide for detection of SNP TSC0064604
actatactcatac

SEQ ID NO: 266635 - DNA, 13 bp, Artificial Sequence
  Oligonucleotide for detection of SNP TSC0064604
gtatgaatatagt

SEQ ID NO: 266636 - DNA, 13 bp, Artificial Sequence
  Oligonucleotide for detection of SNP TSC0064604
actatattcatac

SEQ ID NO: 266637 - DNA, 13 bp, Artificial Sequence
  Oligonucleotide for detection of SNP TSC0064606
tttttaatagggt

SEQ ID NO: 266638 - DNA, 13 bp, Artificial Sequence
  Oligonucleotide for detection of SNP TSC0064606
accctattaaaaa

SEQ ID NO: 266639 - DNA, 13 bp, Artificial Sequence
  Oligonucleotide for detection of SNP TSC0064606
tttttagtagggt

SEQ ID NO: 266640 - DNA, 13 bp, Artificial Sequence
  Oligonucleotide for detection of SNP TSC0064606
accctactaaaaa

SEQ ID NO: 266641 - DNA, 13 bp, Artificial Sequence
  Oligonucleotide for detection of SNP TSC0064607
ggaggttggaggy

SEQ ID NO: 266642 - DNA, 13 bp, Artificial Sequence
  Oligonucleotide for detection of SNP TSC0064607
rcctccaacctcc

SEQ ID NO: 266643 - DNA, 13 bp, Artificial Sequence
  Oligonucleotide for detection of SNP TSC0064607
ggaggtcggaggy

SEQ ID NO: 266644 - DNA, 13 bp, Artificial Sequence
  Oligonucleotide for detection of SNP TSC0064607
rcctccgacctcc

SEQ ID NO: 266645 - DNA, 13 bp, Artificial Sequence
  Oligonucleotide for detection of SNP TSC0064610
aaaagtattttay

SEQ ID NO: 266646 - DNA, 13 bp, Artificial Sequence
  Oligonucleotide for detection of SNP TSC0064610
rtaaaatactttt

SEQ ID NO: 266647 - DNA, 13 bp, Artificial Sequence
  Oligonucleotide for detection of SNP TSC0064610
aaaagtgttttay

SEQ ID NO: 266648 - DNA, 13 bp, Artificial Sequence
  Oligonucleotide for detection of SNP TSC0064610
rtaaaacactttt

SEQ ID NO: 266649 - DNA, 13 bp, Artificial Sequence
  Oligonucleotide for detection of SNP TSC0064610
aaaagcgttttay

SEQ ID NO: 266650 - DNA, 13 bp, Artificial Sequence
  Oligonucleotide for detection of SNP TSC0064610
rtaaaacgctttt

SEQ ID NO: 266651 - DNA, 13 bp, Artificial Sequence
  Oligonucleotide for detection of SNP TSC0064610
gtagggtgttttt

SEQ ID NO: 266652 - DNA, 13 bp, Artificial Sequence
  Oligonucleotide for detection of SNP TSC0064610
aaaaacaccctac

SEQ ID NO: 266653 - DNA, 13 bp, Artificial Sequence
  Oligonucleotide for detection of SNP TSC0064610
gtagggcgttttt

SEQ ID NO: 266654 - DNA, 13 bp, Artificial Sequence
  Oligonucleotide for detection of SNP TSC0064610
aaaaacgccctac

SEQ ID NO: 266655 - DNA, 13 bp, Artificial Sequence
  Oligonucleotide for detection of SNP TSC0064613
ttgatgatagggy

SEQ ID NO: 266656 - DNA, 13 bp, Artificial Sequence
  Oligonucleotide for detection of SNP TSC0064613
rccctatcatcaa

SEQ ID NO: 266657 - DNA, 13 bp, Artificial Sequence
  Oligonucleotide for detection of SNP TSC0064613
ttgatgttagggy

SEQ ID NO: 266658 - DNA, 13 bp, Artificial Sequence
  Oligonucleotide for detection of SNP TSC0064613
rccctaacatcaa

SEQ ID NO: 266659 - DNA, 13 bp, Artificial Sequence
  Oligonucleotide for detection of SNP TSC0064613
gttttagtattaa

SEQ ID NO: 266660 - DNA, 13 bp, Artificial Sequence
  Oligonucleotide for detection of SNP TSC0064613
ttaatactaaaac

SEQ ID NO: 266661 - DNA, 13 bp, Artificial Sequence
  Oligonucleotide for detection of SNP TSC0064614
gttataggttata

SEQ ID NO: 266662 - DNA, 13 bp, Artificial Sequence
  Oligonucleotide for detection of SNP TSC0064614
tataacctataac

SEQ ID NO: 266663 - DNA, 13 bp, Artificial Sequence
  Oligonucleotide for detection of SNP TSC0064614
gttataagttata

SEQ ID NO: 266664 - DNA, 13 bp, Artificial Sequence
  Oligonucleotide for detection of SNP TSC0064614
tataacttataac

SEQ ID NO: 266665 - DNA, 13 bp, Artificial Sequence
  Oligonucleotide for detection of SNP TSC0064615
ttaggataaaaat

SEQ ID NO: 266666 - DNA, 13 bp, Artificial Sequence
  Oligonucleotide for detection of SNP TSC0064615
atttttatcctaa

SEQ ID NO: 266667 - DNA, 13 bp, Artificial Sequence
  Oligonucleotide for detection of SNP TSC0064615
ttaggagaaaaat

SEQ ID NO: 266668 - DNA, 13 bp, Artificial Sequence
  Oligonucleotide for detection of SNP TSC0064615
atttttctcctaa

SEQ ID NO: 266669 - DNA, 13 bp, Artificial Sequence
  Oligonucleotide for detection of SNP TSC0064616
taaggtgtaaagt

SEQ ID NO: 266670 - DNA, 13 bp, Artificial Sequence
  Oligonucleotide for detection of SNP TSC0064616
actttacacctta

SEQ ID NO: 266671 - DNA, 13 bp, Artificial Sequence
  Oligonucleotide for detection of SNP TSC0064616
taaggtataaagt

SEQ ID NO: 266672 - DNA, 13 bp, Artificial Sequence
  Oligonucleotide for detection of SNP TSC0064616
actttatacctta

SEQ ID NO: 266673 - DNA, 13 bp, Artificial Sequence
  Oligonucleotide for detection of SNP TSC0064617
atttaatgggagg

SEQ ID NO: 266674 - DNA, 13 bp, Artificial Sequence
  Oligonucleotide for detection of SNP TSC0064617
cctcccattaaat

SEQ ID NO: 266675 - DNA, 13 bp, Artificial Sequence
  Oligonucleotide for detection of SNP TSC0064617
atttaaggggagg

SEQ ID NO: 266676 - DNA, 13 bp, Artificial Sequence
  Oligonucleotide for detection of SNP TSC0064617
cctccccttaaat

SEQ ID NO: 266677 - DNA, 13 bp, Artificial Sequence
  Oligonucleotide for detection of SNP TSC0064617
ttttttattggat

SEQ ID NO: 266678 - DNA, 13 bp, Artificial Sequence
  Oligonucleotide for detection of SNP TSC0064617
atccaataaaaaa

SEQ ID NO: 266679 - DNA, 13 bp, Artificial Sequence
  Oligonucleotide for detection of SNP TSC0064617
tttttttttggat

SEQ ID NO: 266680 - DNA, 13 bp, Artificial Sequence
  Oligonucleotide for detection of SNP TSC0064617
atccaaaaaaaaa

SEQ ID NO: 266681 - DNA, 13 bp, Artificial Sequence
  Oligonucleotide for detection of SNP TSC0064618
taaattagatggt

SEQ ID NO: 266682 - DNA, 13 bp, Artificial Sequence
  Oligonucleotide for detection of SNP TSC0064618
accatctaattta

SEQ ID NO: 266683 - DNA, 13 bp, Artificial Sequence
  Oligonucleotide for detection of SNP TSC0064618
taaattggatggt

SEQ ID NO: 266684 - DNA, 13 bp, Artificial Sequence
  Oligonucleotide for detection of SNP TSC0064618
accatccaattta

SEQ ID NO: 266685 - DNA, 13 bp, Artificial Sequence
  Oligonucleotide for detection of SNP TSC0064618
taaatcggatggt

SEQ ID NO: 266686 - DNA, 13 bp, Artificial Sequence
  Oligonucleotide for detection of SNP TSC0064618
accatccgattta

SEQ ID NO: 266687 - DNA, 13 bp, Artificial Sequence
  Oligonucleotide for detection of SNP TSC0064618
attatttgatttg

SEQ ID NO: 266688 - DNA, 13 bp, Artificial Sequence
  Oligonucleotide for detection of SNP TSC0064618
caaatcaaataat

SEQ ID NO: 266689 - DNA, 13 bp, Artificial Sequence
  Oligonucleotide for detection of SNP TSC0064618
attattcgatttg

SEQ ID NO: 266690 - DNA, 13 bp, Artificial Sequence
  Oligonucleotide for detection of SNP TSC0064618
caaatcgaataat

SEQ ID NO: 266691 - DNA, 13 bp, Artificial Sequence
  Oligonucleotide for detection of SNP TSC0064619
atagtggtatgtg

SEQ ID NO: 266692 - DNA, 13 bp, Artificial Sequence
  Oligonucleotide for detection of SNP TSC0064619
cacataccactat

SEQ ID NO: 266693 - DNA, 13 bp, Artificial Sequence
  Oligonucleotide for detection of SNP TSC0064619
atagtgatatgtg

SEQ ID NO: 266694 - DNA, 13 bp, Artificial Sequence
  Oligonucleotide for detection of SNP TSC0064619
cacatatcactat

SEQ ID NO: 266695 - DNA, 13 bp, Artificial Sequence
  Oligonucleotide for detection of SNP TSC0064619
atagtggtacgtg

SEQ ID NO: 266696 - DNA, 13 bp, Artificial Sequence
  Oligonucleotide for detection of SNP TSC0064619
cacgtaccactat

SEQ ID NO: 266697 - DNA, 13 bp, Artificial Sequence
  Oligonucleotide for detection of SNP TSC0064619
atagtgatacgtg

SEQ ID NO: 266698 - DNA, 13 bp, Artificial Sequence
  Oligonucleotide for detection of SNP TSC0064619
cacgtatcactat

SEQ ID NO: 266699 - DNA, 13 bp, Artificial Sequence
  Oligonucleotide for detection of SNP TSC0064620
atgttgatataag

SEQ ID NO: 266700 - DNA, 13 bp, Artificial Sequence
  Oligonucleotide for detection of SNP TSC0064620
cttatatcaacat

SEQ ID NO: 266701 - DNA, 13 bp, Artificial Sequence
  Oligonucleotide for detection of SNP TSC0064620
atgttgttataag

SEQ ID NO: 266702 - DNA, 13 bp, Artificial Sequence
  Oligonucleotide for detection of SNP TSC0064620
cttataacaacat

SEQ ID NO: 266703 - DNA, 13 bp, Artificial Sequence
  Oligonucleotide for detection of SNP TSC0064620
tttgtattagtat

SEQ ID NO: 266704 - DNA, 13 bp, Artificial Sequence
  Oligonucleotide for detection of SNP TSC0064620
atactaatacaaa

SEQ ID NO: 266705 - DNA, 13 bp, Artificial Sequence
  Oligonucleotide for detection of SNP TSC0064621
agtgaaatagata

SEQ ID NO: 266706 - DNA, 13 bp, Artificial Sequence
  Oligonucleotide for detection of SNP TSC0064621
tatctatttcact

SEQ ID NO: 266707 - DNA, 13 bp, Artificial Sequence
  Oligonucleotide for detection of SNP TSC0064621
agtgaattagata

SEQ ID NO: 266708 - DNA, 13 bp, Artificial Sequence
  Oligonucleotide for detection of SNP TSC0064621
tatctaattcact

SEQ ID NO: 266709 - DNA, 13 bp, Artificial Sequence
  Oligonucleotide for detection of SNP TSC0064624
ttattaatagtaa

SEQ ID NO: 266710 - DNA, 13 bp, Artificial Sequence
  Oligonucleotide for detection of SNP TSC0064624
ttactattaataa

SEQ ID NO: 266711 - DNA, 13 bp, Artificial Sequence
  Oligonucleotide for detection of SNP TSC0064624
ttattagtagtaa

SEQ ID NO: 266712 - DNA, 13 bp, Artificial Sequence
  Oligonucleotide for detection of SNP TSC0064624
ttactactaataa

SEQ ID NO: 266713 - DNA, 13 bp, Artificial Sequence
  Oligonucleotide for detection of SNP TSC0064632
aagtgtaaaggaa

SEQ ID NO: 266714 - DNA, 13 bp, Artificial Sequence
  Oligonucleotide for detection of SNP TSC0064632
ttcctttacactt

SEQ ID NO: 266715 - DNA, 13 bp, Artificial Sequence
  Oligonucleotide for detection of SNP TSC0064632
aagtgtgaaggaa

SEQ ID NO: 266716 - DNA, 13 bp, Artificial Sequence
  Oligonucleotide for detection of SNP TSC0064632
ttccttcacactt

SEQ ID NO: 266717 - DNA, 13 bp, Artificial Sequence
  Oligonucleotide for detection of SNP TSC0064632
aagtgcgaaggaa

SEQ ID NO: 266718 - DNA, 13 bp, Artificial Sequence
  Oligonucleotide for detection of SNP TSC0064632
ttccttcgcactt

SEQ ID NO: 266719 - DNA, 13 bp, Artificial Sequence
  Oligonucleotide for detection of SNP TSC0064633
tgtttgagagttt

SEQ ID NO: 266720 - DNA, 13 bp, Artificial Sequence
  Oligonucleotide for detection of SNP TSC0064633
aaactctcaaaca

SEQ ID NO: 266721 - DNA, 13 bp, Artificial Sequence
  Oligonucleotide for detection of SNP TSC0064633
tgtttgtgagttt

SEQ ID NO: 266722 - DNA, 13 bp, Artificial Sequence
  Oligonucleotide for detection of SNP TSC0064633
aaactcacaaaca

SEQ ID NO: 266723 - DNA, 13 bp, Artificial Sequence
  Oligonucleotide for detection of SNP TSC0064633
aggtttttagata

SEQ ID NO: 266724 - DNA, 13 bp, Artificial Sequence
  Oligonucleotide for detection of SNP TSC0064633
tatctaaaaacct

SEQ ID NO: 266725 - DNA, 13 bp, Artificial Sequence
  Oligonucleotide for detection of SNP TSC0064633
aggtttatagata

SEQ ID NO: 266726 - DNA, 13 bp, Artificial Sequence
  Oligonucleotide for detection of SNP TSC0064633
tatctataaacct

SEQ ID NO: 266727 - DNA, 13 bp, Artificial Sequence
  Oligonucleotide for detection of SNP TSC0064634
tttattaaattgt

SEQ ID NO: 266728 - DNA, 13 bp, Artificial Sequence
  Oligonucleotide for detection of SNP TSC0064634
acaatttaataaa

SEQ ID NO: 266729 - DNA, 13 bp, Artificial Sequence
  Oligonucleotide for detection of SNP TSC0064634
tttattgaattgt

SEQ ID NO: 266730 - DNA, 13 bp, Artificial Sequence
  Oligonucleotide for detection of SNP TSC0064634
acaattcaataaa

SEQ ID NO: 266731 - DNA, 13 bp, Artificial Sequence
  Oligonucleotide for detection of SNP TSC0064636
gtgtaagatagga

SEQ ID NO: 266732 - DNA, 13 bp, Artificial Sequence
  Oligonucleotide for detection of SNP TSC0064636
tcctatcttacac

SEQ ID NO: 266733 - DNA, 13 bp, Artificial Sequence
  Oligonucleotide for detection of SNP TSC0064636
gtgtaaaatagga

SEQ ID NO: 266734 - DNA, 13 bp, Artificial Sequence
  Oligonucleotide for detection of SNP TSC0064636
tcctattttacac

SEQ ID NO: 266735 - DNA, 13 bp, Artificial Sequence
  Oligonucleotide for detection of SNP TSC0064637
tatatttgtgatg

SEQ ID NO: 266736 - DNA, 13 bp, Artificial Sequence
  Oligonucleotide for detection of SNP TSC0064637
catcacaaatata

SEQ ID NO: 266737 - DNA, 13 bp, Artificial Sequence
  Oligonucleotide for detection of SNP TSC0064637
tatattcgtgatg

SEQ ID NO: 266738 - DNA, 13 bp, Artificial Sequence
  Oligonucleotide for detection of SNP TSC0064637
catcacgaatata

SEQ ID NO: 266739 - DNA, 13 bp, Artificial Sequence
  Oligonucleotide for detection of SNP TSC0064637
tattatgagtgtg

SEQ ID NO: 266740 - DNA, 13 bp, Artificial Sequence
  Oligonucleotide for detection of SNP TSC0064637
cacactcataata

SEQ ID NO: 266741 - DNA, 13 bp, Artificial Sequence
  Oligonucleotide for detection of SNP TSC0064637
tattataagtgtg

SEQ ID NO: 266742 - DNA, 13 bp, Artificial Sequence
  Oligonucleotide for detection of SNP TSC0064637
cacacttataata

SEQ ID NO: 266743 - DNA, 13 bp, Artificial Sequence
  Oligonucleotide for detection of SNP TSC0064637
tattacgagtgtg

SEQ ID NO: 266744 - DNA, 13 bp, Artificial Sequence
  Oligonucleotide for detection of SNP TSC0064637
cacactcgtaata

SEQ ID NO: 266745 - DNA, 13 bp, Artificial Sequence
  Oligonucleotide for detection of SNP TSC0064638
tatgaaaaaatgt

SEQ ID NO: 266746 - DNA, 13 bp, Artificial Sequence
  Oligonucleotide for detection of SNP TSC0064638
acattttttcata

SEQ ID NO: 266747 - DNA, 13 bp, Artificial Sequence
  Oligonucleotide for detection of SNP TSC0064638
tatgaagaaatgt

SEQ ID NO: 266748 - DNA, 13 bp, Artificial Sequence
  Oligonucleotide for detection of SNP TSC0064638
acatttcttcata

SEQ ID NO: 266749 - DNA, 13 bp, Artificial Sequence
  Oligonucleotide for detection of SNP TSC0064639
taaaggattttat

SEQ ID NO: 266750 - DNA, 13 bp, Artificial Sequence
  Oligonucleotide for detection of SNP TSC0064639
ataaaatccttta

SEQ ID NO: 266751 - DNA, 13 bp, Artificial Sequence
  Oligonucleotide for detection of SNP TSC0064639
taaaggtttttat

SEQ ID NO: 266752 - DNA, 13 bp, Artificial Sequence
  Oligonucleotide for detection of SNP TSC0064639
ataaaaaccttta

SEQ ID NO: 266753 - DNA, 13 bp, Artificial Sequence
  Oligonucleotide for detection of SNP TSC0064639
atgaagttttttg

SEQ ID NO: 266754 - DNA, 13 bp, Artificial Sequence
  Oligonucleotide for detection of SNP TSC0064639
caaaaaacttcat

SEQ ID NO: 266755 - DNA, 13 bp, Artificial Sequence
  Oligonucleotide for detection of SNP TSC0064643
ttttgaaggttat

SEQ ID NO: 266756 - DNA, 13 bp, Artificial Sequence
  Oligonucleotide for detection of SNP TSC0064643
ataaccttcaaaa

SEQ ID NO: 266757 - DNA, 13 bp, Artificial Sequence
  Oligonucleotide for detection of SNP TSC0064643
ttttgatggttat

SEQ ID NO: 266758 - DNA, 13 bp, Artificial Sequence
  Oligonucleotide for detection of SNP TSC0064643
ataaccatcaaaa

SEQ ID NO: 266759 - DNA, 13 bp, Artificial Sequence
  Oligonucleotide for detection of SNP TSC0064643
atgatttttagga

SEQ ID NO: 266760 - DNA, 13 bp, Artificial Sequence
  Oligonucleotide for detection of SNP TSC0064643
tcctaaaaatcat

SEQ ID NO: 266761 - DNA, 13 bp, Artificial Sequence
  Oligonucleotide for detection of SNP TSC0064643
atgattattagga

SEQ ID NO: 266762 - DNA, 13 bp, Artificial Sequence
  Oligonucleotide for detection of SNP TSC0064643
tcctaataatcat

SEQ ID NO: 266763 - DNA, 13 bp, Artificial Sequence
  Oligonucleotide for detection of SNP TSC0064645
agaaagggaagga

SEQ ID NO: 266764 - DNA, 13 bp, Artificial Sequence
  Oligonucleotide for detection of SNP TSC0064645
tccttccctttct

SEQ ID NO: 266765 - DNA, 13 bp, Artificial Sequence
  Oligonucleotide for detection of SNP TSC0064645
agaaagagaagga

SEQ ID NO: 266766 - DNA, 13 bp, Artificial Sequence
  Oligonucleotide for detection of SNP TSC0064645
tccttctctttct

SEQ ID NO: 266767 - DNA, 13 bp, Artificial Sequence
  Oligonucleotide for detection of SNP TSC0064648
ttatagaaagttt

SEQ ID NO: 266768 - DNA, 13 bp, Artificial Sequence
  Oligonucleotide for detection of SNP TSC0064648
aaactttctataa

SEQ ID NO: 266769 - DNA, 13 bp, Artificial Sequence
  Oligonucleotide for detection of SNP TSC0064648
ttatagtaagttt

SEQ ID NO: 266770 - DNA, 13 bp, Artificial Sequence
  Oligonucleotide for detection of SNP TSC0064648
aaacttactataa

SEQ ID NO: 266771 - DNA, 13 bp, Artificial Sequence
  Oligonucleotide for detection of SNP TSC0064648
aaattttttatga

SEQ ID NO: 266772 - DNA, 13 bp, Artificial Sequence
  Oligonucleotide for detection of SNP TSC0064648
tcataaaaaattt

SEQ ID NO: 266773 - DNA, 13 bp, Artificial Sequence
  Oligonucleotide for detection of SNP TSC0064648
aaatttattatga

SEQ ID NO: 266774 - DNA, 13 bp, Artificial Sequence
  Oligonucleotide for detection of SNP TSC0064648
tcataataaattt

SEQ ID NO: 266775 - DNA, 13 bp, Artificial Sequence
  Oligonucleotide for detection of SNP TSC0064649
gttattcgttgty

SEQ ID NO: 266776 - DNA, 13 bp, Artificial Sequence
  Oligonucleotide for detection of SNP TSC0064649
racaacgaataac

SEQ ID NO: 266777 - DNA, 13 bp, Artificial Sequence
  Oligonucleotide for detection of SNP TSC0064649
ggtaattgatagy

SEQ ID NO: 266778 - DNA, 13 bp, Artificial Sequence
  Oligonucleotide for detection of SNP TSC0064649
rctatcaattacc

SEQ ID NO: 266779 - DNA, 13 bp, Artificial Sequence
  Oligonucleotide for detection of SNP TSC0064649
ggtaatggatagy

SEQ ID NO: 266780 - DNA, 13 bp, Artificial Sequence
  Oligonucleotide for detection of SNP TSC0064649
rctatccattacc

SEQ ID NO: 266781 - DNA, 13 bp, Artificial Sequence
  Oligonucleotide for detection of SNP TSC0064649
ggtaacggatagy

SEQ ID NO: 266782 - DNA, 13 bp, Artificial Sequence
  Oligonucleotide for detection of SNP TSC0064649
rctatccgttacc

SEQ ID NO: 266783 - DNA, 13 bp, Artificial Sequence
  Oligonucleotide for detection of SNP TSC0064650
aaattagttggtt

SEQ ID NO: 266784 - DNA, 13 bp, Artificial Sequence
  Oligonucleotide for detection of SNP TSC0064650
aaccaactaattt

SEQ ID NO: 266785 - DNA, 13 bp, Artificial Sequence
  Oligonucleotide for detection of SNP TSC0064650
aaattaattggtt

SEQ ID NO: 266786 - DNA, 13 bp, Artificial Sequence
  Oligonucleotide for detection of SNP TSC0064650
aaccaattaattt

SEQ ID NO: 266787 - DNA, 13 bp, Artificial Sequence
  Oligonucleotide for detection of SNP TSC0064651
atggtattatttt

SEQ ID NO: 266788 - DNA, 13 bp, Artificial Sequence
  Oligonucleotide for detection of SNP TSC0064651
aaaataataccat

SEQ ID NO: 266789 - DNA, 13 bp, Artificial Sequence
  Oligonucleotide for detection of SNP TSC0064651
atggtagtatttt

SEQ ID NO: 266790 - DNA, 13 bp, Artificial Sequence
  Oligonucleotide for detection of SNP TSC0064651
aaaatactaccat

SEQ ID NO: 266791 - DNA, 13 bp, Artificial Sequence
  Oligonucleotide for detection of SNP TSC0064651
aaaataatattat

SEQ ID NO: 266792 - DNA, 13 bp, Artificial Sequence
  Oligonucleotide for detection of SNP TSC0064651
ataatattatttt

SEQ ID NO: 266793 - DNA, 13 bp, Artificial Sequence
  Oligonucleotide for detection of SNP TSC0005600
taatgtagaatga

SEQ ID NO: 266794 - DNA, 13 bp, Artificial Sequence
  Oligonucleotide for detection of SNP TSC0005600
tcattctacatta

SEQ ID NO: 266795 - DNA, 13 bp, Artificial Sequence
  Oligonucleotide for detection of SNP TSC0005600
taatgttgaatga

SEQ ID NO: 266796 - DNA, 13 bp, Artificial Sequence
  Oligonucleotide for detection of SNP TSC0005600
tcattcaacatta

SEQ ID NO: 266797 - DNA, 13 bp, Artificial Sequence
  Oligonucleotide for detection of SNP TSC0005600
taatgtcgaatga

SEQ ID NO: 266798 - DNA, 13 bp, Artificial Sequence
  Oligonucleotide for detection of SNP TSC0005600
tcattcgacatta

SEQ ID NO: 266799 - DNA, 13 bp, Artificial Sequence
  Oligonucleotide for detection of SNP TSC0005600
ttattttgtattg

SEQ ID NO: 266800 - DNA, 13 bp, Artificial Sequence
  Oligonucleotide for detection of SNP TSC0005600
caatacaaaataa

SEQ ID NO: 266801 - DNA, 13 bp, Artificial Sequence
  Oligonucleotide for detection of SNP TSC0005600
ttatttggtattg

SEQ ID NO: 266802 - DNA, 13 bp, Artificial Sequence
  Oligonucleotide for detection of SNP TSC0005600
caataccaaataa

SEQ ID NO: 266803 - DNA, 13 bp, Artificial Sequence
  Oligonucleotide for detection of SNP TSC0005600
ttattcggtattg

SEQ ID NO: 266804 - DNA, 13 bp, Artificial Sequence
  Oligonucleotide for detection of SNP TSC0005600
caataccgaataa

SEQ ID NO: 266805 - DNA, 13 bp, Artificial Sequence
  Oligonucleotide for detection of SNP TSC0064652
gtattgatagagt

SEQ ID NO: 266806 - DNA, 13 bp, Artificial Sequence
  Oligonucleotide for detection of SNP TSC0064652
actctatcaatac

SEQ ID NO: 266807 - DNA, 13 bp, Artificial Sequence
  Oligonucleotide for detection of SNP TSC0064652
gtattggtagagt

SEQ ID NO: 266808 - DNA, 13 bp, Artificial Sequence
  Oligonucleotide for detection of SNP TSC0064652
actctaccaatac

SEQ ID NO: 266809 - DNA, 13 bp, Artificial Sequence
  Oligonucleotide for detection of SNP TSC0064653
tatggtatggtag

SEQ ID NO: 266810 - DNA, 13 bp, Artificial Sequence
  Oligonucleotide for detection of SNP TSC0064653
ctaccataccata

SEQ ID NO: 266811 - DNA, 13 bp, Artificial Sequence
  Oligonucleotide for detection of SNP TSC0064653
tatggtgtggtag

SEQ ID NO: 266812 - DNA, 13 bp, Artificial Sequence
  Oligonucleotide for detection of SNP TSC0064653
ctaccacaccata

SEQ ID NO: 266813 - DNA, 13 bp, Artificial Sequence
  Oligonucleotide for detection of SNP TSC0064653
tatggcgtggtag

SEQ ID NO: 266814 - DNA, 13 bp, Artificial Sequence
  Oligonucleotide for detection of SNP TSC0064653
ctaccacgccata

SEQ ID NO: 266815 - DNA, 13 bp, Artificial Sequence
  Oligonucleotide for detection of SNP TSC0004779
tgtatgtatagag

SEQ ID NO: 266816 - DNA, 13 bp, Artificial Sequence
  Oligonucleotide for detection of SNP TSC0004779
ctctatacataca

SEQ ID NO: 266817 - DNA, 13 bp, Artificial Sequence
  Oligonucleotide for detection of SNP TSC0004779
tgtatggatagag

SEQ ID NO: 266818 - DNA, 13 bp, Artificial Sequence
  Oligonucleotide for detection of SNP TSC0004779
ctctatccataca

SEQ ID NO: 266819 - DNA, 13 bp, Artificial Sequence
  Oligonucleotide for detection of SNP TSC0064654
agtttagttaaag

SEQ ID NO: 266820 - DNA, 13 bp, Artificial Sequence
  Oligonucleotide for detection of SNP TSC0064654
ctttaactaaact

SEQ ID NO: 266821 - DNA, 13 bp, Artificial Sequence
  Oligonucleotide for detection of SNP TSC0064654
agtttaattaaag

SEQ ID NO: 266822 - DNA, 13 bp, Artificial Sequence
  Oligonucleotide for detection of SNP TSC0064654
ctttaattaaact

SEQ ID NO: 266823 - DNA, 13 bp, Artificial Sequence
  Oligonucleotide for detection of SNP TSC0007249
atgtaagatttay

SEQ ID NO: 266824 - DNA, 13 bp, Artificial Sequence
  Oligonucleotide for detection of SNP TSC0007249
rtaaatcttacat

SEQ ID NO: 266825 - DNA, 13 bp, Artificial Sequence
  Oligonucleotide for detection of SNP TSC0007249
atgtaaaatttay

SEQ ID NO: 266826 - DNA, 13 bp, Artificial Sequence
  Oligonucleotide for detection of SNP TSC0007249
rtaaattttacat

SEQ ID NO: 266827 - DNA, 13 bp, Artificial Sequence
  Oligonucleotide for detection of SNP TSC0064655
gtataggttatta

SEQ ID NO: 266828 - DNA, 13 bp, Artificial Sequence
  Oligonucleotide for detection of SNP TSC0064655
taataacctatac

SEQ ID NO: 266829 - DNA, 13 bp, Artificial Sequence
  Oligonucleotide for detection of SNP TSC0064655
gtatagattatta

SEQ ID NO: 266830 - DNA, 13 bp, Artificial Sequence
  Oligonucleotide for detection of SNP TSC0064655
taataatctatac

SEQ ID NO: 266831 - DNA, 13 bp, Artificial Sequence
  Oligonucleotide for detection of SNP TSC0064656
tttgatagggggg

SEQ ID NO: 266832 - DNA, 13 bp, Artificial Sequence
  Oligonucleotide for detection of SNP TSC0064656
cccccctatcaaa

SEQ ID NO: 266833 - DNA, 13 bp, Artificial Sequence
  Oligonucleotide for detection of SNP TSC0064656
tttgatggggggg

SEQ ID NO: 266834 - DNA, 13 bp, Artificial Sequence
  Oligonucleotide for detection of SNP TSC0064656
cccccccatcaaa

SEQ ID NO: 266835 - DNA, 13 bp, Artificial Sequence
  Oligonucleotide for detection of SNP TSC0064657
attgtgatttata

SEQ ID NO: 266836 - DNA, 13 bp, Artificial Sequence
  Oligonucleotide for detection of SNP TSC0064657
tataaatcacaat

SEQ ID NO: 266837 - DNA, 13 bp, Artificial Sequence
  Oligonucleotide for detection of SNP TSC0064657
attgtggtttata

SEQ ID NO: 266838 - DNA, 13 bp, Artificial Sequence
  Oligonucleotide for detection of SNP TSC0064657
tataaaccacaat

SEQ ID NO: 266839 - DNA, 13 bp, Artificial Sequence
  Oligonucleotide for detection of SNP TSC0064657
atcgtgatttata

SEQ ID NO: 266840 - DNA, 13 bp, Artificial Sequence
  Oligonucleotide for detection of SNP TSC0064657
tataaatcacgat

SEQ ID NO: 266841 - DNA, 13 bp, Artificial Sequence
  Oligonucleotide for detection of SNP TSC0064657
atcgtggtttata

SEQ ID NO: 266842 - DNA, 13 bp, Artificial Sequence
  Oligonucleotide for detection of SNP TSC0064657
tataaaccacgat

SEQ ID NO: 266843 - DNA, 13 bp, Artificial Sequence
  Oligonucleotide for detection of SNP TSC0009384
tagggggttttgg

SEQ ID NO: 266844 - DNA, 13 bp, Artificial Sequence
  Oligonucleotide for detection of SNP TSC0009384
ccaaaacccccta

SEQ ID NO: 266845 - DNA, 13 bp, Artificial Sequence
  Oligonucleotide for detection of SNP TSC0009384
taggggattttgg

SEQ ID NO: 266846 - DNA, 13 bp, Artificial Sequence
  Oligonucleotide for detection of SNP TSC0009384
ccaaaatccccta

SEQ ID NO: 266847 - DNA, 13 bp, Artificial Sequence
  Oligonucleotide for detection of SNP TSC0064658
tttaaaataggtt

SEQ ID NO: 266848 - DNA, 13 bp, Artificial Sequence
  Oligonucleotide for detection of SNP TSC0064658
aacctattttaaa

SEQ ID NO: 266849 - DNA, 13 bp, Artificial Sequence
  Oligonucleotide for detection of SNP TSC0064658
tttaaagtaggtt

SEQ ID NO: 266850 - DNA, 13 bp, Artificial Sequence
  Oligonucleotide for detection of SNP TSC0064658
aacctactttaaa

SEQ ID NO: 266851 - DNA, 13 bp, Artificial Sequence
  Oligonucleotide for detection of SNP TSC0064660
gttagatagtttg

SEQ ID NO: 266852 - DNA, 13 bp, Artificial Sequence
  Oligonucleotide for detection of SNP TSC0064660
caaactatctaac

SEQ ID NO: 266853 - DNA, 13 bp, Artificial Sequence
  Oligonucleotide for detection of SNP TSC0064660
gttagagagtttg

SEQ ID NO: 266854 - DNA, 13 bp, Artificial Sequence
  Oligonucleotide for detection of SNP TSC0064660
caaactctctaac

SEQ ID NO: 266855 - DNA, 13 bp, Artificial Sequence
  Oligonucleotide for detection of SNP TSC0064660
taggttgtttgay

SEQ ID NO: 266856 - DNA, 13 bp, Artificial Sequence
  Oligonucleotide for detection of SNP TSC0064660
rtcaaacaaccta

SEQ ID NO: 266857 - DNA, 13 bp, Artificial Sequence
  Oligonucleotide for detection of SNP TSC0064660
taggttttttgay

SEQ ID NO: 266858 - DNA, 13 bp, Artificial Sequence
  Oligonucleotide for detection of SNP TSC0064660
rtcaaaaaaccta

SEQ ID NO: 266859 - DNA, 13 bp, Artificial Sequence
  Oligonucleotide for detection of SNP TSC0064661
tttatggttagta

SEQ ID NO: 266860 - DNA, 13 bp, Artificial Sequence
  Oligonucleotide for detection of SNP TSC0064661
tactaaccataaa

SEQ ID NO: 266861 - DNA, 13 bp, Artificial Sequence
  Oligonucleotide for detection of SNP TSC0064661
tttatgattagta

SEQ ID NO: 266862 - DNA, 13 bp, Artificial Sequence
  Oligonucleotide for detection of SNP TSC0064661
tactaatcataaa

SEQ ID NO: 266863 - DNA, 13 bp, Artificial Sequence
  Oligonucleotide for detection of SNP TSC0064662
taggatagtattt

SEQ ID NO: 266864 - DNA, 13 bp, Artificial Sequence
  Oligonucleotide for detection of SNP TSC0064662
aaatactatccta

SEQ ID NO: 266865 - DNA, 13 bp, Artificial Sequence
  Oligonucleotide for detection of SNP TSC0064662
taggattgtattt

SEQ ID NO: 266866 - DNA, 13 bp, Artificial Sequence
  Oligonucleotide for detection of SNP TSC0064662
aaatacaatccta

SEQ ID NO: 266867 - DNA, 13 bp, Artificial Sequence
  Oligonucleotide for detection of SNP TSC0064662
taggatcgtattt

SEQ ID NO: 266868 - DNA, 13 bp, Artificial Sequence
  Oligonucleotide for detection of SNP TSC0064662
aaatacgatccta

SEQ ID NO: 266869 - DNA, 13 bp, Artificial Sequence
  Oligonucleotide for detection of SNP TSC0007156
ttttgataattgy

SEQ ID NO: 266870 - DNA, 13 bp, Artificial Sequence
  Oligonucleotide for detection of SNP TSC0007156
rcaattatcaaaa

SEQ ID NO: 266871 - DNA, 13 bp, Artificial Sequence
  Oligonucleotide for detection of SNP TSC0007156
ttttgagaattgy

SEQ ID NO: 266872 - DNA, 13 bp, Artificial Sequence
  Oligonucleotide for detection of SNP TSC0007156
rcaattctcaaaa

SEQ ID NO: 266873 - DNA, 13 bp, Artificial Sequence
  Oligonucleotide for detection of SNP TSC0007156
gtagttgttaggg

SEQ ID NO: 266874 - DNA, 13 bp, Artificial Sequence
  Oligonucleotide for detection of SNP TSC0007156
ccctaacaactac

SEQ ID NO: 266875 - DNA, 13 bp, Artificial Sequence
  Oligonucleotide for detection of SNP TSC0007156
gtagtttttaggg

SEQ ID NO: 266876 - DNA, 13 bp, Artificial Sequence
  Oligonucleotide for detection of SNP TSC0007156
ccctaaaaactac

SEQ ID NO: 266877 - DNA, 13 bp, Artificial Sequence
  Oligonucleotide for detection of SNP TSC0007732
tgttgtggttagg

SEQ ID NO: 266878 - DNA, 13 bp, Artificial Sequence
  Oligonucleotide for detection of SNP TSC0007732
cctaaccacaaca

SEQ ID NO: 266879 - DNA, 13 bp, Artificial Sequence
  Oligonucleotide for detection of SNP TSC0007732
tgttgtagttagg

SEQ ID NO: 266880 - DNA, 13 bp, Artificial Sequence
  Oligonucleotide for detection of SNP TSC0007732
cctaactacaaca

SEQ ID NO: 266881 - DNA, 13 bp, Artificial Sequence
  Oligonucleotide for detection of SNP TSC0064668
agaggttggtgty

SEQ ID NO: 266882 - DNA, 13 bp, Artificial Sequence
  Oligonucleotide for detection of SNP TSC0064668
racaccaacctct

SEQ ID NO: 266883 - DNA, 13 bp, Artificial Sequence
  Oligonucleotide for detection of SNP TSC0064668
agaggtgggtgty

SEQ ID NO: 266884 - DNA, 13 bp, Artificial Sequence
  Oligonucleotide for detection of SNP TSC0064668
racacccacctct

SEQ ID NO: 266885 - DNA, 13 bp, Artificial Sequence
  Oligonucleotide for detection of SNP TSC0064668
agaggcgggtgty

SEQ ID NO: 266886 - DNA, 13 bp, Artificial Sequence
  Oligonucleotide for detection of SNP TSC0064668
racacccgcctct

SEQ ID NO: 266887 - DNA, 13 bp, Artificial Sequence
  Oligonucleotide for detection of SNP TSC0064670
ttataagtagtta

SEQ ID NO: 266888 - DNA, 13 bp, Artificial Sequence
  Oligonucleotide for detection of SNP TSC0064670
taactacttataa

SEQ ID NO: 266889 - DNA, 13 bp, Artificial Sequence
  Oligonucleotide for detection of SNP TSC0064670
ttataaatagtta

SEQ ID NO: 266890 - DNA, 13 bp, Artificial Sequence
  Oligonucleotide for detection of SNP TSC0064670
taactatttataa

SEQ ID NO: 266891 - DNA, 13 bp, Artificial Sequence
  Oligonucleotide for detection of SNP TSC0064671
tttgttgtaatag

SEQ ID NO: 266892 - DNA, 13 bp, Artificial Sequence
  Oligonucleotide for detection of SNP TSC0064671
ctattacaacaaa

SEQ ID NO: 266893 - DNA, 13 bp, Artificial Sequence
  Oligonucleotide for detection of SNP TSC0064671
tttgttataatag

SEQ ID NO: 266894 - DNA, 13 bp, Artificial Sequence
  Oligonucleotide for detection of SNP TSC0064671
ctattataacaaa

SEQ ID NO: 266895 - DNA, 13 bp, Artificial Sequence
  Oligonucleotide for detection of SNP TSC0064672
ttgtattagtgta

SEQ ID NO: 266896 - DNA, 13 bp, Artificial Sequence
  Oligonucleotide for detection of SNP TSC0064672
tacactaatacaa

SEQ ID NO: 266897 - DNA, 13 bp, Artificial Sequence
  Oligonucleotide for detection of SNP TSC0064672
ttgtatgagtgta

SEQ ID NO: 266898 - DNA, 13 bp, Artificial Sequence
  Oligonucleotide for detection of SNP TSC0064672
tacactcatacaa

SEQ ID NO: 266899 - DNA, 13 bp, Artificial Sequence
  Oligonucleotide for detection of SNP TSC0064672
tgtattgatgtaa

SEQ ID NO: 266900 - DNA, 13 bp, Artificial Sequence
  Oligonucleotide for detection of SNP TSC0064672
ttacatcaataca

SEQ ID NO: 266901 - DNA, 13 bp, Artificial Sequence
  Oligonucleotide for detection of SNP TSC0064672
tgtatttatgtaa

SEQ ID NO: 266902 - DNA, 13 bp, Artificial Sequence
  Oligonucleotide for detection of SNP TSC0064672
ttacataaataca

SEQ ID NO: 266903 - DNA, 13 bp, Artificial Sequence
  Oligonucleotide for detection of SNP TSC0064673
tttgttagttagg

SEQ ID NO: 266904 - DNA, 13 bp, Artificial Sequence
  Oligonucleotide for detection of SNP TSC0064673
cctaactaacaaa

SEQ ID NO: 266905 - DNA, 13 bp, Artificial Sequence
  Oligonucleotide for detection of SNP TSC0064673
tttgttggttagg

SEQ ID NO: 266906 - DNA, 13 bp, Artificial Sequence
  Oligonucleotide for detection of SNP TSC0064673
cctaaccaacaaa

SEQ ID NO: 266907 - DNA, 13 bp, Artificial Sequence
  Oligonucleotide for detection of SNP TSC0064673
ttcgttagttagg

SEQ ID NO: 266908 - DNA, 13 bp, Artificial Sequence
  Oligonucleotide for detection of SNP TSC0064673
cctaactaacgaa

SEQ ID NO: 266909 - DNA, 13 bp, Artificial Sequence
  Oligonucleotide for detection of SNP TSC0064673
ttcgttggttagg

SEQ ID NO: 266910 - DNA, 13 bp, Artificial Sequence
  Oligonucleotide for detection of SNP TSC0064673
cctaaccaacgaa

SEQ ID NO: 266911 - DNA, 13 bp, Artificial Sequence
  Oligonucleotide for detection of SNP TSC0064673
tttgtcggttagg

SEQ ID NO: 266912 - DNA, 13 bp, Artificial Sequence
  Oligonucleotide for detection of SNP TSC0064673
cctaaccgacaaa

SEQ ID NO: 266913 - DNA, 13 bp, Artificial Sequence
  Oligonucleotide for detection of SNP TSC0064673
ttcgtcggttagg

SEQ ID NO: 266914 - DNA, 13 bp, Artificial Sequence
  Oligonucleotide for detection of SNP TSC0064673
cctaaccgacgaa

SEQ ID NO: 266915 - DNA, 13 bp, Artificial Sequence
  Oligonucleotide for detection of SNP TSC0064673
tttggttgatggg

SEQ ID NO: 266916 - DNA, 13 bp, Artificial Sequence
  Oligonucleotide for detection of SNP TSC0064673
cccatcaaccaaa

SEQ ID NO: 266917 - DNA, 13 bp, Artificial Sequence
  Oligonucleotide for detection of SNP TSC0064673
tttggttgacggg

SEQ ID NO: 266918 - DNA, 13 bp, Artificial Sequence
  Oligonucleotide for detection of SNP TSC0064673
cccgtcaaccaaa

SEQ ID NO: 266919 - DNA, 13 bp, Artificial Sequence
  Oligonucleotide for detection of SNP TSC0064673
tttggtcgatggg

SEQ ID NO: 266920 - DNA, 13 bp, Artificial Sequence
  Oligonucleotide for detection of SNP TSC0064673
cccatcgaccaaa

SEQ ID NO: 266921 - DNA, 13 bp, Artificial Sequence
  Oligonucleotide for detection of SNP TSC0064673
tttggtcgacggg

SEQ ID NO: 266922 - DNA, 13 bp, Artificial Sequence
  Oligonucleotide for detection of SNP TSC0064673
cccgtcgaccaaa

SEQ ID NO: 266923 - DNA, 13 bp, Artificial Sequence
  Oligonucleotide for detection of SNP TSC0064675
gttagaagtggta

SEQ ID NO: 266924 - DNA, 13 bp, Artificial Sequence
  Oligonucleotide for detection of SNP TSC0064675
taccacttctaac

SEQ ID NO: 266925 - DNA, 13 bp, Artificial Sequence
  Oligonucleotide for detection of SNP TSC0064676
tttaatagtagtg

SEQ ID NO: 266926 - DNA, 13 bp, Artificial Sequence
  Oligonucleotide for detection of SNP TSC0064676
cactactattaaa

SEQ ID NO: 266927 - DNA, 13 bp, Artificial Sequence
  Oligonucleotide for detection of SNP TSC0064676
tttaattgtagtg

SEQ ID NO: 266928 - DNA, 13 bp, Artificial Sequence
  Oligonucleotide for detection of SNP TSC0064676
cactacaattaaa

SEQ ID NO: 266929 - DNA, 13 bp, Artificial Sequence
  Oligonucleotide for detection of SNP TSC0064676
tttaatggtagtg

SEQ ID NO: 266930 - DNA, 13 bp, Artificial Sequence
  Oligonucleotide for detection of SNP TSC0064676
cactaccattaaa

SEQ ID NO: 266931 - DNA, 13 bp, Artificial Sequence
  Oligonucleotide for detection of SNP TSC0064676
tttaatcgtagtg

SEQ ID NO: 266932 - DNA, 13 bp, Artificial Sequence
  Oligonucleotide for detection of SNP TSC0064676
cactacgattaaa

SEQ ID NO: 266933 - DNA, 13 bp, Artificial Sequence
  Oligonucleotide for detection of SNP TSC0064676
tttaacggtagtg

SEQ ID NO: 266934 - DNA, 13 bp, Artificial Sequence
  Oligonucleotide for detection of SNP TSC0064676
cactaccgttaaa

SEQ ID NO: 266935 - DNA, 13 bp, Artificial Sequence
  Oligonucleotide for detection of SNP TSC0064676
tattgttgttaga

SEQ ID NO: 266936 - DNA, 13 bp, Artificial Sequence
  Oligonucleotide for detection of SNP TSC0064676
tctaacaacaata

SEQ ID NO: 266937 - DNA, 13 bp, Artificial Sequence
  Oligonucleotide for detection of SNP TSC0064676
tattgtggttaga

SEQ ID NO: 266938 - DNA, 13 bp, Artificial Sequence
  Oligonucleotide for detection of SNP TSC0064676
tctaaccacaata

SEQ ID NO: 266939 - DNA, 13 bp, Artificial Sequence
  Oligonucleotide for detection of SNP TSC0064676
tattgtagttaga

SEQ ID NO: 266940 - DNA, 13 bp, Artificial Sequence
  Oligonucleotide for detection of SNP TSC0064676
tctaactacaata

SEQ ID NO: 266941 - DNA, 13 bp, Artificial Sequence
  Oligonucleotide for detection of SNP TSC0064676
tattgcggttaga

SEQ ID NO: 266942 - DNA, 13 bp, Artificial Sequence
  Oligonucleotide for detection of SNP TSC0064676
tctaaccgcaata

SEQ ID NO: 266943 - DNA, 13 bp, Artificial Sequence
  Oligonucleotide for detection of SNP TSC0064676
tattgtcgttaga

SEQ ID NO: 266944 - DNA, 13 bp, Artificial Sequence
  Oligonucleotide for detection of SNP TSC0064676
tctaacgacaata

SEQ ID NO: 266945 - DNA, 13 bp, Artificial Sequence
  Oligonucleotide for detection of SNP TSC0009338
taatatatgaaay

SEQ ID NO: 266946 - DNA, 13 bp, Artificial Sequence
  Oligonucleotide for detection of SNP TSC0009338
rtttcatatatta

SEQ ID NO: 266947 - DNA, 13 bp, Artificial Sequence
  Oligonucleotide for detection of SNP TSC0009338
taatatgtgaaay

SEQ ID NO: 266948 - DNA, 13 bp, Artificial Sequence
  Oligonucleotide for detection of SNP TSC0009338
rtttcacatatta

SEQ ID NO: 266949 - DNA, 13 bp, Artificial Sequence
  Oligonucleotide for detection of SNP TSC0009339
agattttggaagt

SEQ ID NO: 266950 - DNA, 13 bp, Artificial Sequence
  Oligonucleotide for detection of SNP TSC0009339
acttccaaaatct

SEQ ID NO: 266951 - DNA, 13 bp, Artificial Sequence
  Oligonucleotide for detection of SNP TSC0009339
agatttcggaagt

SEQ ID NO: 266952 - DNA, 13 bp, Artificial Sequence
  Oligonucleotide for detection of SNP TSC0009339
acttccgaaatct

SEQ ID NO: 266953 - DNA, 13 bp, Artificial Sequence
  Oligonucleotide for detection of SNP TSC0009339
atttttggggttt

SEQ ID NO: 266954 - DNA, 13 bp, Artificial Sequence
  Oligonucleotide for detection of SNP TSC0009339
aaaccccaaaaat

SEQ ID NO: 266955 - DNA, 13 bp, Artificial Sequence
  Oligonucleotide for detection of SNP TSC0009339
atttttagggttt

SEQ ID NO: 266956 - DNA, 13 bp, Artificial Sequence
  Oligonucleotide for detection of SNP TSC0009339
aaaccctaaaaat

SEQ ID NO: 266957 - DNA, 13 bp, Artificial Sequence
  Oligonucleotide for detection of SNP TSC0009339
attttcggggttt

SEQ ID NO: 266958 - DNA, 13 bp, Artificial Sequence
  Oligonucleotide for detection of SNP TSC0009339
aaaccccgaaaat

SEQ ID NO: 266959 - DNA, 13 bp, Artificial Sequence
  Oligonucleotide for detection of SNP TSC0009340
atatgtgtagtgg

SEQ ID NO: 266960 - DNA, 13 bp, Artificial Sequence
  Oligonucleotide for detection of SNP TSC0009340
ccactacacatat

SEQ ID NO: 266961 - DNA, 13 bp, Artificial Sequence
  Oligonucleotide for detection of SNP TSC0009340
atatgtatagtgg

SEQ ID NO: 266962 - DNA, 13 bp, Artificial Sequence
  Oligonucleotide for detection of SNP TSC0009340
ccactatacatat

SEQ ID NO: 266963 - DNA, 13 bp, Artificial Sequence
  Oligonucleotide for detection of SNP TSC0009340
atatgcgtagtgg

SEQ ID NO: 266964 - DNA, 13 bp, Artificial Sequence
  Oligonucleotide for detection of SNP TSC0009340
ccactacgcatat

SEQ ID NO: 266965 - DNA, 13 bp, Artificial Sequence
  Oligonucleotide for detection of SNP TSC0064677
tggagtgtatgty

SEQ ID NO: 266966 - DNA, 13 bp, Artificial Sequence
  Oligonucleotide for detection of SNP TSC0064677
racatacactcca

SEQ ID NO: 266967 - DNA, 13 bp, Artificial Sequence
  Oligonucleotide for detection of SNP TSC0064677
tggagtatatgty

SEQ ID NO: 266968 - DNA, 13 bp, Artificial Sequence
  Oligonucleotide for detection of SNP TSC0064677
racatatactcca

SEQ ID NO: 266969 - DNA, 13 bp, Artificial Sequence
  Oligonucleotide for detection of SNP TSC0064677
tggagcgtatgty

SEQ ID NO: 266970 - DNA, 13 bp, Artificial Sequence
  Oligonucleotide for detection of SNP TSC0064677
racatacgctcca

SEQ ID NO: 266971 - DNA, 13 bp, Artificial Sequence
  Oligonucleotide for detection of SNP TSC0064677
ggtatgtgtttta

SEQ ID NO: 266972 - DNA, 13 bp, Artificial Sequence
  Oligonucleotide for detection of SNP TSC0064677
taaaacacatacc

SEQ ID NO: 266973 - DNA, 13 bp, Artificial Sequence
  Oligonucleotide for detection of SNP TSC0064677
ggtatgcgtttta

SEQ ID NO: 266974 - DNA, 13 bp, Artificial Sequence
  Oligonucleotide for detection of SNP TSC0064677
taaaacgcatacc

SEQ ID NO: 266975 - DNA, 13 bp, Artificial Sequence
  Oligonucleotide for detection of SNP TSC0064678
tatgataaattta

SEQ ID NO: 266976 - DNA, 13 bp, Artificial Sequence
  Oligonucleotide for detection of SNP TSC0064678
taaatttatcata

SEQ ID NO: 266977 - DNA, 13 bp, Artificial Sequence
  Oligonucleotide for detection of SNP TSC0064678
tatgatgaattta

SEQ ID NO: 266978 - DNA, 13 bp, Artificial Sequence
  Oligonucleotide for detection of SNP TSC0064678
taaattcatcata

SEQ ID NO: 266979 - DNA, 13 bp, Artificial Sequence
  Oligonucleotide for detection of SNP TSC0064678
tacgataaattta

SEQ ID NO: 266980 - DNA, 13 bp, Artificial Sequence
  Oligonucleotide for detection of SNP TSC0064678
taaatttatcgta

SEQ ID NO: 266981 - DNA, 13 bp, Artificial Sequence
  Oligonucleotide for detection of SNP TSC0064678
tacgatgaattta

SEQ ID NO: 266982 - DNA, 13 bp, Artificial Sequence
  Oligonucleotide for detection of SNP TSC0064678
taaattcatcgta

SEQ ID NO: 266983 - DNA, 13 bp, Artificial Sequence
  Oligonucleotide for detection of SNP TSC0064678
tatgacgaattta

SEQ ID NO: 266984 - DNA, 13 bp, Artificial Sequence
  Oligonucleotide for detection of SNP TSC0064678
taaattcgtcata

SEQ ID NO: 266985 - DNA, 13 bp, Artificial Sequence
  Oligonucleotide for detection of SNP TSC0064678
tacgacgaattta

SEQ ID NO: 266986 - DNA, 13 bp, Artificial Sequence
  Oligonucleotide for detection of SNP TSC0064678
taaattcgtcgta

SEQ ID NO: 266987 - DNA, 13 bp, Artificial Sequence
  Oligonucleotide for detection of SNP TSC0064678
taaatttgttgtg

SEQ ID NO: 266988 - DNA, 13 bp, Artificial Sequence
  Oligonucleotide for detection of SNP TSC0064678
cacaacaaattta

SEQ ID NO: 266989 - DNA, 13 bp, Artificial Sequence
  Oligonucleotide for detection of SNP TSC0064678
taaatttgtcgtg

SEQ ID NO: 266990 - DNA, 13 bp, Artificial Sequence
  Oligonucleotide for detection of SNP TSC0064678
cacgacaaattta

SEQ ID NO: 266991 - DNA, 13 bp, Artificial Sequence
  Oligonucleotide for detection of SNP TSC0064678
taaattcgttgtg

SEQ ID NO: 266992 - DNA, 13 bp, Artificial Sequence
  Oligonucleotide for detection of SNP TSC0064678
cacaacgaattta

SEQ ID NO: 266993 - DNA, 13 bp, Artificial Sequence
  Oligonucleotide for detection of SNP TSC0064678
taaattcgtcgtg

SEQ ID NO: 266994 - DNA, 13 bp, Artificial Sequence
  Oligonucleotide for detection of SNP TSC0064678
cacgacgaattta

SEQ ID NO: 266995 - DNA, 13 bp, Artificial Sequence
  Oligonucleotide for detection of SNP TSC0064679
attttatagagag

SEQ ID NO: 266996 - DNA, 13 bp, Artificial Sequence
  Oligonucleotide for detection of SNP TSC0064679
ctctctataaaat

SEQ ID NO: 266997 - DNA, 13 bp, Artificial Sequence
  Oligonucleotide for detection of SNP TSC0064679
ttttttatgagat

SEQ ID NO: 266998 - DNA, 13 bp, Artificial Sequence
  Oligonucleotide for detection of SNP TSC0064679
atctcataaaaaa

SEQ ID NO: 266999 - DNA, 13 bp, Artificial Sequence
  Oligonucleotide for detection of SNP TSC0064680
atagtttatttgt

SEQ ID NO: 267000 - DNA, 13 bp, Artificial Sequence
  Oligonucleotide for detection of SNP TSC0064680
acaaataaactat

SEQ ID NO: 267001 - DNA, 13 bp, Artificial Sequence
  Oligonucleotide for detection of SNP TSC0064680
atagttgatttgt

SEQ ID NO: 267002 - DNA, 13 bp, Artificial Sequence
  Oligonucleotide for detection of SNP TSC0064680
acaaatcaactat

SEQ ID NO: 267003 - DNA, 13 bp, Artificial Sequence
  Oligonucleotide for detection of SNP TSC0064680
atagatgaattat

SEQ ID NO: 267004 - DNA, 13 bp, Artificial Sequence
  Oligonucleotide for detection of SNP TSC0064680
ataattcatctat

SEQ ID NO: 267005 - DNA, 13 bp, Artificial Sequence
  Oligonucleotide for detection of SNP TSC0064680
atagattaattat

SEQ ID NO: 267006 - DNA, 13 bp, Artificial Sequence
  Oligonucleotide for detection of SNP TSC0064680
ataattaatctat

SEQ ID NO: 267007 - DNA, 13 bp, Artificial Sequence
  Oligonucleotide for detection of SNP TSC0064682
tggtattatttta

SEQ ID NO: 267008 - DNA, 13 bp, Artificial Sequence
  Oligonucleotide for detection of SNP TSC0064682
taaaataatacca

SEQ ID NO: 267009 - DNA, 13 bp, Artificial Sequence
  Oligonucleotide for detection of SNP TSC0064683
tattaataaggta

SEQ ID NO: 267010 - DNA, 13 bp, Artificial Sequence
  Oligonucleotide for detection of SNP TSC0064683
taccttattaata

SEQ ID NO: 267011 - DNA, 13 bp, Artificial Sequence
  Oligonucleotide for detection of SNP TSC0064683
tattaagaaggta

SEQ ID NO: 267012 - DNA, 13 bp, Artificial Sequence
  Oligonucleotide for detection of SNP TSC0064683
taccttcttaata

SEQ ID NO: 267013 - DNA, 13 bp, Artificial Sequence
  Oligonucleotide for detection of SNP TSC0064686
tttatcggtttat

SEQ ID NO: 267014 - DNA, 13 bp, Artificial Sequence
  Oligonucleotide for detection of SNP TSC0064686
ataaaccgataaa

SEQ ID NO: 267015 - DNA, 13 bp, Artificial Sequence
  Oligonucleotide for detection of SNP TSC0064686
ataaattgatgaa

SEQ ID NO: 267016 - DNA, 13 bp, Artificial Sequence
  Oligonucleotide for detection of SNP TSC0064686
ttcatcaatttat

SEQ ID NO: 267017 - DNA, 13 bp, Artificial Sequence
  Oligonucleotide for detection of SNP TSC0064686
ataaatcgatgaa

SEQ ID NO: 267018 - DNA, 13 bp, Artificial Sequence
  Oligonucleotide for detection of SNP TSC0064686
ttcatcgatttat

SEQ ID NO: 267019 - DNA, 13 bp, Artificial Sequence
  Oligonucleotide for detection of SNP TSC0064688
ttatttgtgatta

SEQ ID NO: 267020 - DNA, 13 bp, Artificial Sequence
  Oligonucleotide for detection of SNP TSC0064688
taatcacaaataa

SEQ ID NO: 267021 - DNA, 13 bp, Artificial Sequence
  Oligonucleotide for detection of SNP TSC0064689
atattatgtttgg

SEQ ID NO: 267022 - DNA, 13 bp, Artificial Sequence
  Oligonucleotide for detection of SNP TSC0064689
ccaaacataatat

SEQ ID NO: 267023 - DNA, 13 bp, Artificial Sequence
  Oligonucleotide for detection of SNP TSC0064689
atattacgtttgg

SEQ ID NO: 267024 - DNA, 13 bp, Artificial Sequence
  Oligonucleotide for detection of SNP TSC0064689
ccaaacgtaatat

SEQ ID NO: 267025 - DNA, 13 bp, Artificial Sequence
  Oligonucleotide for detection of SNP TSC0064689
atattatgttcgg

SEQ ID NO: 267026 - DNA, 13 bp, Artificial Sequence
  Oligonucleotide for detection of SNP TSC0064689
ccgaacataatat

SEQ ID NO: 267027 - DNA, 13 bp, Artificial Sequence
  Oligonucleotide for detection of SNP TSC0064689
atattacgttcgg

SEQ ID NO: 267028 - DNA, 13 bp, Artificial Sequence
  Oligonucleotide for detection of SNP TSC0064689
ccgaacgtaatat

SEQ ID NO: 267029 - DNA, 13 bp, Artificial Sequence
  Oligonucleotide for detection of SNP TSC0064689
ttgggtgtggtgt

SEQ ID NO: 267030 - DNA, 13 bp, Artificial Sequence
  Oligonucleotide for detection of SNP TSC0064689
acaccacacccaa

SEQ ID NO: 267031 - DNA, 13 bp, Artificial Sequence
  Oligonucleotide for detection of SNP TSC0064689
ttgggtatggtgt

SEQ ID NO: 267032 - DNA, 13 bp, Artificial Sequence
  Oligonucleotide for detection of SNP TSC0064689
acaccatacccaa

SEQ ID NO: 267033 - DNA, 13 bp, Artificial Sequence
  Oligonucleotide for detection of SNP TSC0064689
tcgggtgtggtgt

SEQ ID NO: 267034 - DNA, 13 bp, Artificial Sequence
  Oligonucleotide for detection of SNP TSC0064689
acaccacacccga

SEQ ID NO: 267035 - DNA, 13 bp, Artificial Sequence
  Oligonucleotide for detection of SNP TSC0064689
tcgggtatggtgt

SEQ ID NO: 267036 - DNA, 13 bp, Artificial Sequence
  Oligonucleotide for detection of SNP TSC0064689
acaccatacccga

SEQ ID NO: 267037 - DNA, 13 bp, Artificial Sequence
  Oligonucleotide for detection of SNP TSC0064689
ttgggcgtggtgt

SEQ ID NO: 267038 - DNA, 13 bp, Artificial Sequence
  Oligonucleotide for detection of SNP TSC0064689
acaccacgcccaa

SEQ ID NO: 267039 - DNA, 13 bp, Artificial Sequence
  Oligonucleotide for detection of SNP TSC0064689
tcgggcgtggtgt

SEQ ID NO: 267040 - DNA, 13 bp, Artificial Sequence
  Oligonucleotide for detection of SNP TSC0064689
acaccacgcccga

SEQ ID NO: 267041 - DNA, 13 bp, Artificial Sequence
  Oligonucleotide for detection of SNP TSC0064690
tgtatttggtaag

SEQ ID NO: 267042 - DNA, 13 bp, Artificial Sequence
  Oligonucleotide for detection of SNP TSC0064690
cttaccaaataca

SEQ ID NO: 267043 - DNA, 13 bp, Artificial Sequence
  Oligonucleotide for detection of SNP TSC0064690
cgtatttggtaag

SEQ ID NO: 267044 - DNA, 13 bp, Artificial Sequence
  Oligonucleotide for detection of SNP TSC0064690
cttaccaaatacg

SEQ ID NO: 267045 - DNA, 13 bp, Artificial Sequence
  Oligonucleotide for detection of SNP TSC0064690
tgtattcggtaag

SEQ ID NO: 267046 - DNA, 13 bp, Artificial Sequence
  Oligonucleotide for detection of SNP TSC0064690
cttaccgaataca

SEQ ID NO: 267047 - DNA, 13 bp, Artificial Sequence
  Oligonucleotide for detection of SNP TSC0064690
cgtattcggtaag

SEQ ID NO: 267048 - DNA, 13 bp, Artificial Sequence
  Oligonucleotide for detection of SNP TSC0064690
cttaccgaatacg

SEQ ID NO: 267049 - DNA, 13 bp, Artificial Sequence
  Oligonucleotide for detection of SNP TSC0064690
tttgttgggtgtg

SEQ ID NO: 267050 - DNA, 13 bp, Artificial Sequence
  Oligonucleotide for detection of SNP TSC0064690
cacacccaacaaa

SEQ ID NO: 267051 - DNA, 13 bp, Artificial Sequence
  Oligonucleotide for detection of SNP TSC0064690
tttgttaggtgtg

SEQ ID NO: 267052 - DNA, 13 bp, Artificial Sequence
  Oligonucleotide for detection of SNP TSC0064690
cacacctaacaaa

SEQ ID NO: 267053 - DNA, 13 bp, Artificial Sequence
  Oligonucleotide for detection of SNP TSC0064690
tttgtcgggtgtg

SEQ ID NO: 267054 - DNA, 13 bp, Artificial Sequence
  Oligonucleotide for detection of SNP TSC0064690
cacacccgacaaa

SEQ ID NO: 267055 - DNA, 13 bp, Artificial Sequence
  Oligonucleotide for detection of SNP TSC0064690
tttgttaggtgcg

SEQ ID NO: 267056 - DNA, 13 bp, Artificial Sequence
  Oligonucleotide for detection of SNP TSC0064690
cgcacctaacaaa

SEQ ID NO: 267057 - DNA, 13 bp, Artificial Sequence
  Oligonucleotide for detection of SNP TSC0064690
tttgttgggtgcg

SEQ ID NO: 267058 - DNA, 13 bp, Artificial Sequence
  Oligonucleotide for detection of SNP TSC0064690
cgcacccaacaaa

SEQ ID NO: 267059 - DNA, 13 bp, Artificial Sequence
  Oligonucleotide for detection of SNP TSC0064690
tttgtcgggtgcg

SEQ ID NO: 267060 - DNA, 13 bp, Artificial Sequence
  Oligonucleotide for detection of SNP TSC0064690
cgcacccgacaaa

SEQ ID NO: 267061 - DNA, 13 bp, Artificial Sequence
  Oligonucleotide for detection of SNP TSC0064691
attattagtgaay

SEQ ID NO: 267062 - DNA, 13 bp, Artificial Sequence
  Oligonucleotide for detection of SNP TSC0064691
rttcactaataat

SEQ ID NO: 267063 - DNA, 13 bp, Artificial Sequence
  Oligonucleotide for detection of SNP TSC0064691
attattggtgaay

SEQ ID NO: 267064 - DNA, 13 bp, Artificial Sequence
  Oligonucleotide for detection of SNP TSC0064691
rttcaccaataat

SEQ ID NO: 267065 - DNA, 13 bp, Artificial Sequence
  Oligonucleotide for detection of SNP TSC0064692
tggtaagaagaaa

SEQ ID NO: 267066 - DNA, 13 bp, Artificial Sequence
  Oligonucleotide for detection of SNP TSC0064692
tttcttcttacca

SEQ ID NO: 267067 - DNA, 13 bp, Artificial Sequence
  Oligonucleotide for detection of SNP TSC0064692
tggtaaaaagaaa

SEQ ID NO: 267068 - DNA, 13 bp, Artificial Sequence
  Oligonucleotide for detection of SNP TSC0064692
tttctttttacca

SEQ ID NO: 267069 - DNA, 13 bp, Artificial Sequence
  Oligonucleotide for detection of SNP TSC0006675
aattttattggga

SEQ ID NO: 267070 - DNA, 13 bp, Artificial Sequence
  Oligonucleotide for detection of SNP TSC0006675
tcccaataaaatt

SEQ ID NO: 267071 - DNA, 13 bp, Artificial Sequence
  Oligonucleotide for detection of SNP TSC0006675
aatttttttggga

SEQ ID NO: 267072 - DNA, 13 bp, Artificial Sequence
  Oligonucleotide for detection of SNP TSC0006675
tcccaaaaaaatt

SEQ ID NO: 267073 - DNA, 13 bp, Artificial Sequence
  Oligonucleotide for detection of SNP TSC0006675
ttttaatgagatt

SEQ ID NO: 267074 - DNA, 13 bp, Artificial Sequence
  Oligonucleotide for detection of SNP TSC0006675
aatctcattaaaa

SEQ ID NO: 267075 - DNA, 13 bp, Artificial Sequence
  Oligonucleotide for detection of SNP TSC0006675
ttttaaagagatt

SEQ ID NO: 267076 - DNA, 13 bp, Artificial Sequence
  Oligonucleotide for detection of SNP TSC0006675
aatctctttaaaa

SEQ ID NO: 267077 - DNA, 13 bp, Artificial Sequence
  Oligonucleotide for detection of SNP TSC0064693
aatttataaagtt

SEQ ID NO: 267078 - DNA, 13 bp, Artificial Sequence
  Oligonucleotide for detection of SNP TSC0064693
aactttataaatt

SEQ ID NO: 267079 - DNA, 13 bp, Artificial Sequence
  Oligonucleotide for detection of SNP TSC0064693
aatttagaaagtt

SEQ ID NO: 267080 - DNA, 13 bp, Artificial Sequence
  Oligonucleotide for detection of SNP TSC0064693
aactttctaaatt

SEQ ID NO: 267081 - DNA, 13 bp, Artificial Sequence
  Oligonucleotide for detection of SNP TSC0064693
aattttgtaaatt

SEQ ID NO: 267082 - DNA, 13 bp, Artificial Sequence
  Oligonucleotide for detection of SNP TSC0064693
aatttacaaaatt

SEQ ID NO: 267083 - DNA, 13 bp, Artificial Sequence
  Oligonucleotide for detection of SNP TSC0064693
aattttttaaatt

SEQ ID NO: 267084 - DNA, 13 bp, Artificial Sequence
  Oligonucleotide for detection of SNP TSC0064693
aatttaaaaaatt

SEQ ID NO: 267085 - DNA, 12 bp, Artificial Sequence
  Oligonucleotide primer for the detection of SNP TSC0000002
taatccataaac

SEQ ID NO: 267086 - DNA, 12 bp, Artificial Sequence
  Oligonucleotide primer for the detection of SNP TSC0000002
aaaaattattta

SEQ ID NO: 267087 - DNA, 12 bp, Artificial Sequence
  Oligonucleotide primer for the detection of SNP TSC0000003
tacctaccttaa

SEQ ID NO: 267088 - DNA, 12 bp, Artificial Sequence
  Oligonucleotide primer for the detection of SNP TSC0000003
ttttagtatttt

SEQ ID NO: 267089 - DNA, 12 bp, Artificial Sequence
  Oligonucleotide primer for the detection of SNP TSC0000003
tcccaacacttt

SEQ ID NO: 267090 - DNA, 12 bp, Artificial Sequence
  Oligonucleotide primer for the detection of SNP TSC0000003
tgtttgttttgg

SEQ ID NO: 267091 - DNA, 12 bp, Artificial Sequence
  Oligonucleotide primer for the detection of SNP TSC0000004
ttctacttaaaa

SEQ ID NO: 267092 - DNA, 12 bp, Artificial Sequence
  Oligonucleotide primer for the detection of SNP TSC0000004
ataattaaaaaa

SEQ ID NO: 267093 - DNA, 12 bp, Artificial Sequence
  Oligonucleotide primer for the detection of SNP TSC0000004
ttttatttaaaa

SEQ ID NO: 267094 - DNA, 12 bp, Artificial Sequence
  Oligonucleotide primer for the detection of SNP TSC0000005
cattcaaacctt

SEQ ID NO: 267095 - DNA, 12 bp, Artificial Sequence
  Oligonucleotide primer for the detection of SNP TSC0000005
atagttggtata

SEQ ID NO: 267096 - DNA, 12 bp, Artificial Sequence
  Oligonucleotide primer for the detection of SNP TSC0000007
taactaaaacaa

SEQ ID NO: 267097 - DNA, 12 bp, Artificial Sequence
  Oligonucleotide primer for the detection of SNP TSC0000007
atgtgtttaata

SEQ ID NO: 267098 - DNA, 12 bp, Artificial Sequence
  Oligonucleotide primer for the detection of SNP TSC0000007
atatatccaata

SEQ ID NO: 267099 - DNA, 12 bp, Artificial Sequence
  Oligonucleotide primer for the detection of SNP TSC0000007
attgattaagat

SEQ ID NO: 267100 - DNA, 12 bp, Artificial Sequence
  Oligonucleotide primer for the detection of SNP TSC0000010
aaactccccact

SEQ ID NO: 267101 - DNA, 12 bp, Artificial Sequence
  Oligonukleotid-Primer
atttattttata

SEQ ID NO: 267102 - DNA, 12 bp, Artificial Sequence
  Oligonucleotide primer for the detection of SNP TSC0000011
atacaacacact

SEQ ID NO: 267103 - DNA, 12 bp, Artificial Sequence
  Oligonucleotide primer for the detection of SNP TSC0000011
atacaacgcact

SEQ ID NO: 267104 - DNA, 12 bp, Artificial Sequence
  Oligonucleotide primer for the detection of SNP TSC0000011
atacgacacact

SEQ ID NO: 267105 - DNA, 12 bp, Artificial Sequence
  Oligonucleotide primer for the detection of SNP TSC0000011
atacgacgcact

SEQ ID NO: 267106 - DNA, 12 bp, Artificial Sequence
  Oligonucleotide primer for the detection of SNP TSC0000011
ttttaggtttaa

SEQ ID NO: 267107 - DNA, 12 bp, Artificial Sequence
  Oligonucleotide primer for the detection of SNP TSC0000012
aaaaaacaactc

SEQ ID NO: 267108 - DNA, 12 bp, Artificial Sequence
  Oligonucleotide primer for the detection of SNP TSC0000012
tttagtatttta

SEQ ID NO: 267109 - DNA, 12 bp, Artificial Sequence
  Oligonukleotid-Primer
tatatctatatc

SEQ ID NO: 267110 - DNA, 12 bp, Artificial Sequence
  Oligonucleotide primer for the detection of SNP TSC0000014
tattttgattgg

SEQ ID NO: 267111 - DNA, 12 bp, Artificial Sequence
  Oligonucleotide primer for the detection of SNP TSC0000016
aaaaaacattaa

SEQ ID NO: 267112 - DNA, 12 bp, Artificial Sequence
  Oligonucleotide primer for the detection of SNP TSC0000016
attttttttatt

SEQ ID NO: 267113 - DNA, 12 bp, Artificial Sequence
  Oligonucleotide primer for the detection of SNP TSC0000016
acttcttctatt

SEQ ID NO: 267114 - DNA, 12 bp, Artificial Sequence
  Oligonucleotide primer for the detection of SNP TSC0000016
agaagatattag

SEQ ID NO: 267115 - DNA, 12 bp, Artificial Sequence
  Oligonucleotide primer for the detection of SNP TSC0000019
attttctactat

SEQ ID NO: 267116 - DNA, 12 bp, Artificial Sequence
  Oligonucleotide primer for the detection of SNP TSC0000019
aaatgattaaaa

SEQ ID NO: 267117 - DNA, 12 bp, Artificial Sequence
  Oligonucleotide primer for the detection of SNP TSC0000019
aaataactaaaa

SEQ ID NO: 267118 - DNA, 12 bp, Artificial Sequence
  Oligonucleotide primer for the detection of SNP TSC0000019
attttttattat

SEQ ID NO: 267119 - DNA, 12 bp, Artificial Sequence
  Oligonucleotide primer for the detection of SNP TSC0000020
aataaaacttat

SEQ ID NO: 267120 - DNA, 12 bp, Artificial Sequence
  Oligonucleotide primer for the detection of SNP TSC0000020
attttttattaa

SEQ ID NO: 267121 - DNA, 12 bp, Artificial Sequence
  Oligonucleotide primer for the detection of SNP TSC0000021
actaacaaaaac

SEQ ID NO: 267122 - DNA, 12 bp, Artificial Sequence
  Oligonucleotide primer for the detection of SNP TSC0000021
ttaaaaattttt

SEQ ID NO: 267123 - DNA, 12 bp, Artificial Sequence
  Oligonucleotide primer for the detection of SNP TSC0000021
aaaaactcttaa

SEQ ID NO: 267124 - DNA, 12 bp, Artificial Sequence
  Oligonucleotide primer for the detection of SNP TSC0000021
ttagtaaaaatt

SEQ ID NO: 267125 - DNA, 12 bp, Artificial Sequence
  Oligonucleotide primer for the detection of SNP TSC0000022
actatctcataa

SEQ ID NO: 267126 - DNA, 12 bp, Artificial Sequence
  Oligonucleotide primer for the detection of SNP TSC0000022
tgtttttgtttt

SEQ ID NO: 267127 - DNA, 12 bp, Artificial Sequence
  Oligonucleotide primer for the detection of SNP TSC0000022
tattcctaccct

SEQ ID NO: 267128 - DNA, 12 bp, Artificial Sequence
  Oligonucleotide primer for the detection of SNP TSC0000022
attattttatag

SEQ ID NO: 267129 - DNA, 12 bp, Artificial Sequence
  Oligonucleotide primer for the detection of SNP TSC0000023
ccttattcctat

SEQ ID NO: 267130 - DNA, 12 bp, Artificial Sequence
  Oligonucleotide primer for the detection of SNP TSC0000023
gatgatgtaaaa

SEQ ID NO: 267131 - DNA, 12 bp, Artificial Sequence
  Oligonucleotide primer for the detection of SNP TSC0000024
aaactcttttca

SEQ ID NO: 267132 - DNA, 12 bp, Artificial Sequence
  Oligonucleotide primer for the detection of SNP TSC0000024
ataaataataat

SEQ ID NO: 267133 - DNA, 12 bp, Artificial Sequence
  Oligonucleotide primer for the detection of SNP TSC0000024
tataaacaacaa

SEQ ID NO: 267134 - DNA, 12 bp, Artificial Sequence
  Oligonucleotide primer for the detection of SNP TSC0000024
tgagtttttttt

SEQ ID NO: 267135 - DNA, 12 bp, Artificial Sequence
  Oligonucleotide primer for the detection of SNP TSC0000026
aaatatacactt

SEQ ID NO: 267136 - DNA, 12 bp, Artificial Sequence
  Oligonucleotide primer for the detection of SNP TSC0000026
atagtagaatta

SEQ ID NO: 267137 - DNA, 12 bp, Artificial Sequence
  Oligonucleotide primer for the detection of SNP TSC0000027
aaactatcccca

SEQ ID NO: 267138 - DNA, 12 bp, Artificial Sequence
  Oligonucleotide primer for the detection of SNP TSC0000027
aaactatccccg

SEQ ID NO: 267139 - DNA, 12 bp, Artificial Sequence
  Oligonucleotide primer for the detection of SNP TSC0000027
ttataattagtt

SEQ ID NO: 267140 - DNA, 12 bp, Artificial Sequence
  Oligonucleotide primer for the detection of SNP TSC0000027
tcataatcaacc

SEQ ID NO: 267141 - DNA, 12 bp, Artificial Sequence
  Oligonucleotide primer for the detection of SNP TSC0000027
gagttatttttg

SEQ ID NO: 267142 - DNA, 12 bp, Artificial Sequence
  Oligonucleotide primer for the detection of SNP TSC0000027
gagttattttcg

SEQ ID NO: 267143 - DNA, 12 bp, Artificial Sequence
  Oligonucleotide primer for the detection of SNP TSC0000028
ttcaaaacaaaa

SEQ ID NO: 267144 - DNA, 12 bp, Artificial Sequence
  Oligonucleotide primer for the detection of SNP TSC0000028
ttcaaaacgaaa

SEQ ID NO: 267145 - DNA, 12 bp, Artificial Sequence
  Oligonucleotide primer for the detection of SNP TSC0000028
aatttgttgtat

SEQ ID NO: 267146 - DNA, 12 bp, Artificial Sequence
  Oligonucleotide primer for the detection of SNP TSC0000028
taatctattaca

SEQ ID NO: 267147 - DNA, 12 bp, Artificial Sequence
  Oligonucleotide primer for the detection of SNP TSC0000028
tttttagaatga

SEQ ID NO: 267148 - DNA, 12 bp, Artificial Sequence
  Oligonucleotide primer for the detection of SNP TSC0000028
tttttagaacga

SEQ ID NO: 267149 - DNA, 12 bp, Artificial Sequence
  Oligonucleotide primer for the detection of SNP TSC0000030
actccactatct

SEQ ID NO: 267150 - DNA, 12 bp, Artificial Sequence
  Oligonucleotide primer for the detection of SNP TSC0000030
ggtttttggagg

SEQ ID NO: 267151 - DNA, 12 bp, Artificial Sequence
  Oligonucleotide primer for the detection of SNP TSC0000032
aaatattctctc

SEQ ID NO: 267152 - DNA, 12 bp, Artificial Sequence
  Oligonucleotide primer for the detection of SNP TSC0000032
gaagatatatgg

SEQ ID NO: 267153 - DNA, 12 bp, Artificial Sequence
  Oligonucleotide primer for the detection of SNP TSC0000032
aaaaatacataa

SEQ ID NO: 267154 - DNA, 12 bp, Artificial Sequence
  Oligonucleotide primer for the detection of SNP TSC0000032
aaatattttttt

SEQ ID NO: 267155 - DNA, 12 bp, Artificial Sequence
  Oligonucleotide primer for the detection of SNP TSC0000033
tcaacacatttt

SEQ ID NO: 267156 - DNA, 12 bp, Artificial Sequence
  Oligonucleotide primer for the detection of SNP TSC0000033
gttattgatttt

SEQ ID NO: 267157 - DNA, 12 bp, Artificial Sequence
  Oligonucleotide primer for the detection of SNP TSC0000033
acatcattaatc

SEQ ID NO: 267158 - DNA, 12 bp, Artificial Sequence
  Oligonucleotide primer for the detection of SNP TSC0000033
acgtcattaatc

SEQ ID NO: 267159 - DNA, 12 bp, Artificial Sequence
  Oligonucleotide primer for the detection of SNP TSC0000033
ttagtatatttt

SEQ ID NO: 267160 - DNA, 12 bp, Artificial Sequence
  Oligonucleotide primer for the detection of SNP TSC0000034
aaattaattatt

SEQ ID NO: 267161 - DNA, 12 bp, Artificial Sequence
  Oligonucleotide primer for the detection of SNP TSC0000034
tattatttttta

SEQ ID NO: 267162 - DNA, 12 bp, Artificial Sequence
  Oligonucleotide primer for the detection of SNP TSC0000035
ataatcccatat

SEQ ID NO: 267163 - DNA, 12 bp, Artificial Sequence
  Oligonucleotide primer for the detection of SNP TSC0000035
tatggttttttt

SEQ ID NO: 267164 - DNA, 12 bp, Artificial Sequence
  Oligonucleotide primer for the detection of SNP TSC0000035
tataatttcttt

SEQ ID NO: 267165 - DNA, 12 bp, Artificial Sequence
  Oligonucleotide primer for the detection of SNP TSC0000035
atagttttatgt

SEQ ID NO: 267166 - DNA, 12 bp, Artificial Sequence
  Oligonucleotide primer for the detection of SNP TSC0000036
aatatatacaca

SEQ ID NO: 267167 - DNA, 12 bp, Artificial Sequence
  Oligonucleotide primer for the detection of SNP TSC0000036
aatatatacgca

SEQ ID NO: 267168 - DNA, 12 bp, Artificial Sequence
  Oligonucleotide primer for the detection of SNP TSC0000036
ttggttttatat

SEQ ID NO: 267169 - DNA, 12 bp, Artificial Sequence
  Oligonucleotide primer for the detection of SNP TSC0000036
ttaattttatat

SEQ ID NO: 267170 - DNA, 12 bp, Artificial Sequence
  Oligonucleotide primer for the detection of SNP TSC0000036
aatatatatgta

SEQ ID NO: 267171 - DNA, 12 bp, Artificial Sequence
  Oligonucleotide primer for the detection of SNP TSC0000036
aatatatacgta

SEQ ID NO: 267172 - DNA, 12 bp, Artificial Sequence
  Oligonucleotide primer for the detection of SNP TSC0000037
atctaacattac

SEQ ID NO: 267173 - DNA, 12 bp, Artificial Sequence
  Oligonucleotide primer for the detection of SNP TSC0000037
tttatattttta

SEQ ID NO: 267174 - DNA, 12 bp, Artificial Sequence
  Oligonucleotide primer for the detection of SNP TSC0000040
acataataaaac

SEQ ID NO: 267175 - DNA, 12 bp, Artificial Sequence
  Oligonucleotide primer for the detection of SNP TSC0000040
acgtaataaaac

SEQ ID NO: 267176 - DNA, 12 bp, Artificial Sequence
  Oligonucleotide primer for the detection of SNP TSC0000040
tttgtagagatg

SEQ ID NO: 267177 - DNA, 12 bp, Artificial Sequence
  Oligonucleotide primer for the detection of SNP TSC0000040
tttgtagagacg

SEQ ID NO: 267178 - DNA, 12 bp, Artificial Sequence
  Oligonucleotide primer for the detection of SNP TSC0000040
tttataaaaaca

SEQ ID NO: 267179 - DNA, 12 bp, Artificial Sequence
  Oligonucleotide primer for the detection of SNP TSC0000040
tttataaaaacg

SEQ ID NO: 267180 - DNA, 12 bp, Artificial Sequence
  Oligonucleotide primer for the detection of SNP TSC0000040
tgtagtgagatt

SEQ ID NO: 267181 - DNA, 12 bp, Artificial Sequence
  Oligonucleotide primer for the detection of SNP TSC0000040
cgtagtgagatt

SEQ ID NO: 267182 - DNA, 12 bp, Artificial Sequence
  Oligonucleotide primer for the detection of SNP TSC0000041
aaacatctatat

SEQ ID NO: 267183 - DNA, 12 bp, Artificial Sequence
  Oligonucleotide primer for the detection of SNP TSC0000041
gttttgtggtta

SEQ ID NO: 267184 - DNA, 12 bp, Artificial Sequence
  Oligonucleotide primer for the detection of SNP TSC0000042
actcttaaccac

SEQ ID NO: 267185 - DNA, 12 bp, Artificial Sequence
  Oligonucleotide primer for the detection of SNP TSC0000042
aggaaagtgtta

SEQ ID NO: 267186 - DNA, 12 bp, Artificial Sequence
  Oligonucleotide primer for the detection of SNP TSC0000043
attaaattacta

SEQ ID NO: 267187 - DNA, 12 bp, Artificial Sequence
  Oligonucleotide primer for the detection of SNP TSC0000043
ttagtattataa

SEQ ID NO: 267188 - DNA, 12 bp, Artificial Sequence
  Oligonucleotide primer for the detection of SNP TSC0000043
caacaccacaaa

SEQ ID NO: 267189 - DNA, 12 bp, Artificial Sequence
  Oligonucleotide primer for the detection of SNP TSC0000043
tattaagttgtt

SEQ ID NO: 267190 - DNA, 12 bp, Artificial Sequence
  Oligonucleotide primer for the detection of SNP TSC0000046
aaatcaaataat

SEQ ID NO: 267191 - DNA, 12 bp, Artificial Sequence
  Oligonucleotide primer for the detection of SNP TSC0000046
ttatgttgaagt

SEQ ID NO: 267192 - DNA, 12 bp, Artificial Sequence
  Oligonucleotide primer for the detection of SNP TSC0000047
tctaatcaacat

SEQ ID NO: 267193 - DNA, 12 bp, Artificial Sequence
  Oligonucleotide primer for the detection of SNP TSC0000047
ttattttttatg

SEQ ID NO: 267194 - DNA, 12 bp, Artificial Sequence
  Oligonucleotide primer for the detection of SNP TSC0000048
ataatatttcac

SEQ ID NO: 267195 - DNA, 12 bp, Artificial Sequence
  Oligonucleotide primer for the detection of SNP TSC0000048
tattttttttta

SEQ ID NO: 267196 - DNA, 12 bp, Artificial Sequence
  Oligonucleotide primer for the detection of SNP TSC0000049
taaattctactt

SEQ ID NO: 267197 - DNA, 12 bp, Artificial Sequence
  Oligonucleotide primer for the detection of SNP TSC0000049
gtaaatagttag

SEQ ID NO: 267198 - DNA, 12 bp, Artificial Sequence
  Oligonucleotide primer for the detection of SNP TSC0000050
aactttaaacta

SEQ ID NO: 267199 - DNA, 12 bp, Artificial Sequence
  Oligonucleotide primer for the detection of SNP TSC0000050
gaatattttgat

SEQ ID NO: 267200 - DNA, 12 bp, Artificial Sequence
  Oligonucleotide primer for the detection of SNP TSC0000050
aaatatcctaat

SEQ ID NO: 267201 - DNA, 12 bp, Artificial Sequence
  Oligonucleotide primer for the detection of SNP TSC0000050
agttttaaattg

SEQ ID NO: 267202 - DNA, 12 bp, Artificial Sequence
  Oligonukleotid-Primer
tattaacacctc

SEQ ID NO: 267203 - DNA, 12 bp, Artificial Sequence
  Oligonucleotide primer for the detection of SNP TSC0000052
tttaaaaaataa

SEQ ID NO: 267204 - DNA, 12 bp, Artificial Sequence
  Oligonucleotide primer for the detection of SNP TSC0000054
ctcactacatcc

SEQ ID NO: 267205 - DNA, 12 bp, Artificial Sequence
  Oligonucleotide primer for the detection of SNP TSC0000054
tgtgaagagtta

SEQ ID NO: 267206 - DNA, 12 bp, Artificial Sequence
  Oligonucleotide primer for the detection of SNP TSC0000054
tataaaaaacta

SEQ ID NO: 267207 - DNA, 12 bp, Artificial Sequence
  Oligonucleotide primer for the detection of SNP TSC0000054
tttattgtattt

SEQ ID NO: 267208 - DNA, 12 bp, Artificial Sequence
  Oligonucleotide primer for the detection of SNP TSC0000055
ccaaactaaatc

SEQ ID NO: 267209 - DNA, 12 bp, Artificial Sequence
  Oligonucleotide primer for the detection of SNP TSC0000055
agagttagagag

SEQ ID NO: 267210 - DNA, 12 bp, Artificial Sequence
  Oligonucleotide primer for the detection of SNP TSC0000056
aaaacaaataac

SEQ ID NO: 267211 - DNA, 12 bp, Artificial Sequence
  Oligonucleotide primer for the detection of SNP TSC0000056
tttgggtgtttt

SEQ ID NO: 267212 - DNA, 12 bp, Artificial Sequence
  Oligonucleotide primer for the detection of SNP TSC0000056
tttgggtgtttc

SEQ ID NO: 267213 - DNA, 12 bp, Artificial Sequence
  Oligonucleotide primer for the detection of SNP TSC0000056
tttaaatatccc

SEQ ID NO: 267214 - DNA, 12 bp, Artificial Sequence
  Oligonucleotide primer for the detection of SNP TSC0000056
aaagtaggtaat

SEQ ID NO: 267215 - DNA, 12 bp, Artificial Sequence
  Oligonucleotide primer for the detection of SNP TSC0000056
aaagtaggtaac

SEQ ID NO: 267216 - DNA, 12 bp, Artificial Sequence
  Oligonucleotide primer for the detection of SNP TSC0000057
atccacaaccac

SEQ ID NO: 267217 - DNA, 12 bp, Artificial Sequence
  Oligonucleotide primer for the detection of SNP TSC0000057
atccacgaccac

SEQ ID NO: 267218 - DNA, 12 bp, Artificial Sequence
  Oligonucleotide primer for the detection of SNP TSC0000057
atccgcaaccac

SEQ ID NO: 267219 - DNA, 12 bp, Artificial Sequence
  Oligonucleotide primer for the detection of SNP TSC0000057
atccgcgaccac

SEQ ID NO: 267220 - DNA, 12 bp, Artificial Sequence
  Oligonucleotide primer for the detection of SNP TSC0000057
tgtatattaggg

SEQ ID NO: 267221 - DNA, 12 bp, Artificial Sequence
  Oligonucleotide primer for the detection of SNP TSC0000058
tcacctattcaa

SEQ ID NO: 267222 - DNA, 12 bp, Artificial Sequence
  Oligonucleotide primer for the detection of SNP TSC0000058
tcgcctattcaa

SEQ ID NO: 267223 - DNA, 12 bp, Artificial Sequence
  Oligonucleotide primer for the detection of SNP TSC0000058
taaatggttatt

SEQ ID NO: 267224 - DNA, 12 bp, Artificial Sequence
  Oligonucleotide primer for the detection of SNP TSC0000058
taaataattacc

SEQ ID NO: 267225 - DNA, 12 bp, Artificial Sequence
  Oligonucleotide primer for the detection of SNP TSC0000058
ttgtttatttaa

SEQ ID NO: 267226 - DNA, 12 bp, Artificial Sequence
  Oligonucleotide primer for the detection of SNP TSC0000058
tcgtttatttaa

SEQ ID NO: 267227 - DNA, 12 bp, Artificial Sequence
  Oligonucleotide primer for the detection of SNP TSC0000060
aaacaaccacaa

SEQ ID NO: 267228 - DNA, 12 bp, Artificial Sequence
  Oligonucleotide primer for the detection of SNP TSC0000060
ttttaggtaggt

SEQ ID NO: 267229 - DNA, 12 bp, Artificial Sequence
  Oligonucleotide primer for the detection of SNP TSC0000060
ttctaaacaaat

SEQ ID NO: 267230 - DNA, 12 bp, Artificial Sequence
  Oligonucleotide primer for the detection of SNP TSC0000060
gagtagttatag

SEQ ID NO: 267231 - DNA, 12 bp, Artificial Sequence
  Oligonucleotide primer for the detection of SNP TSC0000061
tacaaacttaat

SEQ ID NO: 267232 - DNA, 12 bp, Artificial Sequence
  Oligonucleotide primer for the detection of SNP TSC0000061
taattttagtta

SEQ ID NO: 267233 - DNA, 12 bp, Artificial Sequence
  Oligonucleotide primer for the detection of SNP TSC0000061
taattctaacca

SEQ ID NO: 267234 - DNA, 12 bp, Artificial Sequence
  Oligonucleotide primer for the detection of SNP TSC0000061
tgtagatttagt

SEQ ID NO: 267235 - DNA, 12 bp, Artificial Sequence
  Oligonucleotide primer for the detection of SNP TSC0000062
taaaaccccaaa

SEQ ID NO: 267236 - DNA, 12 bp, Artificial Sequence
  Oligonucleotide primer for the detection of SNP TSC0000062
tttgttggaagt

SEQ ID NO: 267237 - DNA, 12 bp, Artificial Sequence
  Oligonucleotide primer for the detection of SNP TSC0000062
tctattaaaaac

SEQ ID NO: 267238 - DNA, 12 bp, Artificial Sequence
  Oligonucleotide primer for the detection of SNP TSC0000062
taagattttaaa

SEQ ID NO: 267239 - DNA, 12 bp, Artificial Sequence
  Oligonucleotide primer for the detection of SNP TSC0000063
tctccccaaacc

SEQ ID NO: 267240 - DNA, 12 bp, Artificial Sequence
  Oligonucleotide primer for the detection of SNP TSC0000063
gttttttgtttg

SEQ ID NO: 267241 - DNA, 12 bp, Artificial Sequence
  Oligonucleotide primer for the detection of SNP TSC0000063
gttttttgttcg

SEQ ID NO: 267242 - DNA, 12 bp, Artificial Sequence
  Oligonucleotide primer for the detection of SNP TSC0000064
actaattccaat

SEQ ID NO: 267243 - DNA, 12 bp, Artificial Sequence
  Oligonucleotide primer for the detection of SNP TSC0000064
tttataatgtgg

SEQ ID NO: 267244 - DNA, 12 bp, Artificial Sequence
  Oligonucleotide primer for the detection of SNP TSC0000064
tttataatgcgg

SEQ ID NO: 267245 - DNA, 12 bp, Artificial Sequence
  Oligonucleotide primer for the detection of SNP TSC0000065
caacctcaattc

SEQ ID NO: 267246 - DNA, 12 bp, Artificial Sequence
  Oligonucleotide primer for the detection of SNP TSC0000065
agttttttaagg

SEQ ID NO: 267247 - DNA, 12 bp, Artificial Sequence
  Oligonucleotide primer for the detection of SNP TSC0000065
aactccccaaaa

SEQ ID NO: 267248 - DNA, 12 bp, Artificial Sequence
  Oligonucleotide primer for the detection of SNP TSC0000065
tagttttaattt

SEQ ID NO: 267249 - DNA, 12 bp, Artificial Sequence
  Oligonucleotide primer for the detection of SNP TSC0000066
aaaaccccatcc

SEQ ID NO: 267250 - DNA, 12 bp, Artificial Sequence
  Oligonucleotide primer for the detection of SNP TSC0000066
tttgggaagttt

SEQ ID NO: 267251 - DNA, 12 bp, Artificial Sequence
  Oligonucleotide primer for the detection of SNP TSC0000066
ctaaaaaactca

SEQ ID NO: 267252 - DNA, 12 bp, Artificial Sequence
  Oligonucleotide primer for the detection of SNP TSC0000066
gggattttattt

SEQ ID NO: 267253 - DNA, 12 bp, Artificial Sequence
  Oligonucleotide primer for the detection of SNP TSC0000067
taacaacatctc

SEQ ID NO: 267254 - DNA, 12 bp, Artificial Sequence
  Oligonucleotide primer for the detection of SNP TSC0000067
tagaaaaagtta

SEQ ID NO: 267255 - DNA, 12 bp, Artificial Sequence
  Oligonucleotide primer for the detection of SNP TSC0000067
taaaaaaaacta

SEQ ID NO: 267256 - DNA, 12 bp, Artificial Sequence
  Oligonucleotide primer for the detection of SNP TSC0000067
tggtaatatttt

SEQ ID NO: 267257 - DNA, 12 bp, Artificial Sequence
  Oligonucleotide primer for the detection of SNP TSC0000068
aattttaaaatc

SEQ ID NO: 267258 - DNA, 12 bp, Artificial Sequence
  Oligonucleotide primer for the detection of SNP TSC0000068
agttattagttt

SEQ ID NO: 267259 - DNA, 12 bp, Artificial Sequence
  Oligonucleotide primer for the detection of SNP TSC0000068
aatcatcaaccc

SEQ ID NO: 267260 - DNA, 12 bp, Artificial Sequence
  Oligonucleotide primer for the detection of SNP TSC0000068
agttttaaggtt

SEQ ID NO: 267261 - DNA, 12 bp, Artificial Sequence
  Oligonucleotide primer for the detection of SNP TSC0000069
tataaaacccca

SEQ ID NO: 267262 - DNA, 12 bp, Artificial Sequence
  Oligonucleotide primer for the detection of SNP TSC0000069
gttgaaagttat

SEQ ID NO: 267263 - DNA, 12 bp, Artificial Sequence
  Oligonucleotide primer for the detection of SNP TSC0000069
gttgaaagttac

SEQ ID NO: 267264 - DNA, 12 bp, Artificial Sequence
  Oligonucleotide primer for the detection of SNP TSC0000069
aactaaaaacca

SEQ ID NO: 267265 - DNA, 12 bp, Artificial Sequence
  Oligonucleotide primer for the detection of SNP TSC0000069
tgtgagatttta

SEQ ID NO: 267266 - DNA, 12 bp, Artificial Sequence
  Oligonucleotide primer for the detection of SNP TSC0000070
aaaatttacctt

SEQ ID NO: 267267 - DNA, 12 bp, Artificial Sequence
  Oligonukleotid-Primer
atttttaaaaag

SEQ ID NO: 267268 - DNA, 12 bp, Artificial Sequence
  Oligonucleotide primer for the detection of SNP TSC0000071
ttacaaacattc

SEQ ID NO: 267269 - DNA, 12 bp, Artificial Sequence
  Oligonucleotide primer for the detection of SNP TSC0000071
ttacaaacgttc

SEQ ID NO: 267270 - DNA, 12 bp, Artificial Sequence
  Oligonucleotide primer for the detection of SNP TSC0000071
tttttgaattag

SEQ ID NO: 267271 - DNA, 12 bp, Artificial Sequence
  Oligonucleotide primer
aaaaaactaaaa

SEQ ID NO: 267272 - DNA, 12 bp, Artificial Sequence
  Oligonucleotide primer for the detection of SNP TSC0000072
ttttttattatg

SEQ ID NO: 267273 - DNA, 12 bp, Artificial Sequence
  Oligonucleotide primer for the detection of SNP TSC0000072
tttcctatcata

SEQ ID NO: 267274 - DNA, 12 bp, Artificial Sequence
  Oligonucleotide primer for the detection of SNP TSC0000072
aagaggttggag

SEQ ID NO: 267275 - DNA, 12 bp, Artificial Sequence
  Oligonucleotide primer for the detection of SNP TSC0000073
tatatacaaaat

SEQ ID NO: 267276 - DNA, 12 bp, Artificial Sequence
  Oligonucleotide primer for the detection of SNP TSC0000073
gttatggtgggg

SEQ ID NO: 267277 - DNA, 12 bp, Artificial Sequence
  Oligonucleotide primer for the detection of SNP TSC0000073
gttatggcgggg

SEQ ID NO: 267278 - DNA, 12 bp, Artificial Sequence
  Oligonucleotide primer for the detection of SNP TSC0000074
taatataatacc

SEQ ID NO: 267279 - DNA, 12 bp, Artificial Sequence
  Oligonucleotide primer for the detection of SNP TSC0000074
gaataaatttgg

SEQ ID NO: 267280 - DNA, 12 bp, Artificial Sequence
  Oligonucleotide primer for the detection of SNP TSC0000077
atattttaaaca

SEQ ID NO: 267281 - DNA, 12 bp, Artificial Sequence
  Oligonucleotide primer for the detection of SNP TSC0000077
atttattgatat

SEQ ID NO: 267282 - DNA, 12 bp, Artificial Sequence
  Oligonucleotide primer for the detection of SNP TSC0000077
atttattgatac

SEQ ID NO: 267283 - DNA, 12 bp, Artificial Sequence
  Oligonucleotide primer for the detection of SNP TSC0000077
tacccactaata

SEQ ID NO: 267284 - DNA, 12 bp, Artificial Sequence
  Oligonucleotide primer for the detection of SNP TSC0000077
gtgttttaagta

SEQ ID NO: 267285 - DNA, 12 bp, Artificial Sequence
  Oligonucleotide primer for the detection of SNP TSC0000078
cataaataaaaa

SEQ ID NO: 267286 - DNA, 12 bp, Artificial Sequence
  Oligonucleotide primer for the detection of SNP TSC0000078
tttgtgttaagt

SEQ ID NO: 267287 - DNA, 12 bp, Artificial Sequence
  Oligonucleotide primer for the detection of SNP TSC0000078
tttgcgttaagt

SEQ ID NO: 267288 - DNA, 12 bp, Artificial Sequence
  Oligonucleotide primer for the detection of SNP TSC0000078
atctacactaaa

SEQ ID NO: 267289 - DNA, 12 bp, Artificial Sequence
  Oligonucleotide primer for the detection of SNP TSC0000078
atctacgctaaa

SEQ ID NO: 267290 - DNA, 12 bp, Artificial Sequence
  Oligonucleotide primer for the detection of SNP TSC0000078
tataaataaagg

SEQ ID NO: 267291 - DNA, 12 bp, Artificial Sequence
  Oligonucleotide primer for the detection of SNP TSC0000079
aatactattatt

SEQ ID NO: 267292 - DNA, 12 bp, Artificial Sequence
  Oligonucleotide primer for the detection of SNP TSC0000079
ttattattatta

SEQ ID NO: 267293 - DNA, 12 bp, Artificial Sequence
  Oligonucleotide primer for the detection of SNP TSC0000080
taccaacaaaca

SEQ ID NO: 267294 - DNA, 12 bp, Artificial Sequence
  Oligonucleotide primer for the detection of SNP TSC0000080
gattattggaat

SEQ ID NO: 267295 - DNA, 12 bp, Artificial Sequence
  Oligonucleotide primer for the detection of SNP TSC0000080
aatcattaaaat

SEQ ID NO: 267296 - DNA, 12 bp, Artificial Sequence
  Oligonucleotide primer for the detection of SNP TSC0000080
tattaataggta

SEQ ID NO: 267297 - DNA, 12 bp, Artificial Sequence
  Oligonucleotide primer for the detection of SNP TSC0000086
aaatctacctaa

SEQ ID NO: 267298 - DNA, 12 bp, Artificial Sequence
  Oligonucleotide primer for the detection of SNP TSC0000086
ttttagttttgt

SEQ ID NO: 267299 - DNA, 12 bp, Artificial Sequence
  Oligonucleotide primer for the detection of SNP TSC0000086
tcttaactctat

SEQ ID NO: 267300 - DNA, 12 bp, Artificial Sequence
  Oligonucleotide primer for the detection of SNP TSC0000086
aagaatttgttt

SEQ ID NO: 267301 - DNA, 12 bp, Artificial Sequence
  Oligonucleotide primer for the detection of SNP TSC0000088
ccaaaacatccc

SEQ ID NO: 267302 - DNA, 12 bp, Artificial Sequence
  Oligonucleotide primer for the detection of SNP TSC0000088
tttgtgtttttt

SEQ ID NO: 267303 - DNA, 12 bp, Artificial Sequence
  Oligonucleotide primer for the detection of SNP TSC0000088
tctatatctctt

SEQ ID NO: 267304 - DNA, 12 bp, Artificial Sequence
  Oligonucleotide primer for the detection of SNP TSC0000088
ttaaaatatttt

SEQ ID NO: 267305 - DNA, 12 bp, Artificial Sequence
  Oligonucleotide primer for the detection of SNP TSC0000093
aaccataaacac

SEQ ID NO: 267306 - DNA, 12 bp, Artificial Sequence
  Oligonucleotide primer for the detection of SNP TSC0000093
tattgttatttt

SEQ ID NO: 267307 - DNA, 12 bp, Artificial Sequence
  Oligonucleotide primer for the detection of SNP TSC0000093
tattgttatttc

SEQ ID NO: 267308 - DNA, 12 bp, Artificial Sequence
  Oligonucleotide primer for the detection of SNP TSC0000093
ccattactatct

SEQ ID NO: 267309 - DNA, 12 bp, Artificial Sequence
  Oligonucleotide primer for the detection of SNP TSC0000093
aattatgagtat

SEQ ID NO: 267310 - DNA, 12 bp, Artificial Sequence
  Oligonucleotide primer for the detection of SNP TSC0000094
atttaacatata

SEQ ID NO: 267311 - DNA, 12 bp, Artificial Sequence
  Oligonucleotide primer for the detection of SNP TSC0000094
attgattgattt

SEQ ID NO: 267312 - DNA, 12 bp, Artificial Sequence
  Oligonucleotide primer for the detection of SNP TSC0000094
attaattaattt

SEQ ID NO: 267313 - DNA, 12 bp, Artificial Sequence
  Oligonucleotide primer for the detection of SNP TSC0000094
ggtttagtatat

SEQ ID NO: 267314 - DNA, 12 bp, Artificial Sequence
  Oligonucleotide primer for the detection of SNP TSC0000095
aaaaataaaaac

SEQ ID NO: 267315 - DNA, 12 bp, Artificial Sequence
  Oligonucleotide primer for the detection of SNP TSC0000095
gaaatgattata

SEQ ID NO: 267316 - DNA, 12 bp, Artificial Sequence
  Oligonucleotide primer for the detection of SNP TSC0000095
aaaataatcata

SEQ ID NO: 267317 - DNA, 12 bp, Artificial Sequence
  Oligonucleotide primer for the detection of SNP TSC0000095
aaggataaaaat

SEQ ID NO: 267318 - DNA, 12 bp, Artificial Sequence
  Oligonucleotide primer for the detection of SNP TSC0000102
aaaatccaccaa

SEQ ID NO: 267319 - DNA, 12 bp, Artificial Sequence
  Oligonucleotide primer for the detection of SNP TSC0000102
tagatattttat

SEQ ID NO: 267320 - DNA, 12 bp, Artificial Sequence
  Oligonucleotide primer for the detection of SNP TSC0000102
ataaacatccta

SEQ ID NO: 267321 - DNA, 12 bp, Artificial Sequence
  Oligonucleotide primer for the detection of SNP TSC0000102
taggaatttatt

SEQ ID NO: 267322 - DNA, 12 bp, Artificial Sequence
  Oligonucleotide primer for the detection of SNP TSC0000109
tattactataac

SEQ ID NO: 267323 - DNA, 12 bp, Artificial Sequence
  Oligonucleotide primer for the detection of SNP TSC0000109
tagtgaaaagga

SEQ ID NO: 267324 - DNA, 12 bp, Artificial Sequence
  Oligonucleotide primer for the detection of SNP TSC0000109
caataaaaaaaa

SEQ ID NO: 267325 - DNA, 12 bp, Artificial Sequence
  Oligonucleotide primer for the detection of SNP TSC0000109
tattgttgtgat

SEQ ID NO: 267326 - DNA, 12 bp, Artificial Sequence
  Oligonucleotide primer for the detection of SNP TSC0000110
ccaaactcaaac

SEQ ID NO: 267327 - DNA, 12 bp, Artificial Sequence
  Oligonucleotide primer for the detection of SNP TSC0000110
tgtgaatttaaa

SEQ ID NO: 267328 - DNA, 12 bp, Artificial Sequence
  Oligonucleotide primer for the detection of SNP TSC0000111
tatatatcctaa

SEQ ID NO: 267329 - DNA, 12 bp, Artificial Sequence
  Oligonucleotide primer for the detection of SNP TSC0000111
aatattttgtta

SEQ ID NO: 267330 - DNA, 12 bp, Artificial Sequence
  Oligonucleotide primer for the detection of SNP TSC0000112
tcaaaaacaaaa

SEQ ID NO: 267331 - DNA, 12 bp, Artificial Sequence
  Oligonucleotide primer for the detection of SNP TSC0000112
ggggtttttttt

SEQ ID NO: 267332 - DNA, 12 bp, Artificial Sequence
  Oligonucleotide primer for the detection of SNP TSC0000112
aaaccttctcta

SEQ ID NO: 267333 - DNA, 12 bp, Artificial Sequence
  Oligonucleotide primer for the detection of SNP TSC0000112
ttaggagtagaa

SEQ ID NO: 267334 - DNA, 12 bp, Artificial Sequence
  Oligonucleotide primer for the detection of SNP TSC0000114
tctctctctcct

SEQ ID NO: 267335 - DNA, 12 bp, Artificial Sequence
  Oligonucleotide primer for the detection of SNP TSC0000114
atttatatggtg

SEQ ID NO: 267336 - DNA, 12 bp, Artificial Sequence
  Oligonucleotide primer for the detection of SNP TSC0000119
cttattaattta

SEQ ID NO: 267337 - DNA, 12 bp, Artificial Sequence
  Oligonucleotide primer for the detection of SNP TSC0000119
ttttagttatgt

SEQ ID NO: 267338 - DNA, 12 bp, Artificial Sequence
  Oligonucleotide primer for the detection of SNP TSC0000119
cctcaatcatat

SEQ ID NO: 267339 - DNA, 12 bp, Artificial Sequence
  Oligonucleotide primer for the detection of SNP TSC0000119
gtttattggttt

SEQ ID NO: 267340 - DNA, 12 bp, Artificial Sequence
  Oligonucleotide primer for the detection of SNP TSC0000122
atccccctcaac

SEQ ID NO: 267341 - DNA, 12 bp, Artificial Sequence
  Oligonucleotide primer for the detection of SNP TSC0000122
ttagttttgtag

SEQ ID NO: 267342 - DNA, 12 bp, Artificial Sequence
  Oligonucleotide primer for the detection of SNP TSC0000123
taaaccaccata

SEQ ID NO: 267343 - DNA, 12 bp, Artificial Sequence
  Oligonucleotide primer for the detection of SNP TSC0000123
ggtttgggtggg

SEQ ID NO: 267344 - DNA, 12 bp, Artificial Sequence
  Oligonukleotid-Primer
ggtttgggcggg

SEQ ID NO: 267345 - DNA, 12 bp, Artificial Sequence
  Oligonucleotide primer for the detection of SNP TSC0000123
aatctaaacaaa

SEQ ID NO: 267346 - DNA, 12 bp, Artificial Sequence
  Oligonucleotide primer for the detection of SNP TSC0000123
aatctaaacgaa

SEQ ID NO: 267347 - DNA, 12 bp, Artificial Sequence
  Oligonucleotide primer for the detection of SNP TSC0000123
tgagttattatg

SEQ ID NO: 267348 - DNA, 12 bp, Artificial Sequence
  Oligonucleotide primer for the detection of SNP TSC0000124
ccaataaattct

SEQ ID NO: 267349 - DNA, 12 bp, Artificial Sequence
  Oligonucleotide primer for the detection of SNP TSC0000124
tttagatggaga

SEQ ID NO: 267350 - DNA, 12 bp, Artificial Sequence
  Oligonucleotide primer for the detection of SNP TSC0000129
aatatattcccc

SEQ ID NO: 267351 - DNA, 12 bp, Artificial Sequence
  Oligonucleotide primer for the detection of SNP TSC0000129
tttatagttgat

SEQ ID NO: 267352 - DNA, 12 bp, Artificial Sequence
  Oligonucleotide primer for the detection of SNP TSC0000129
tttacaattaat

SEQ ID NO: 267353 - DNA, 12 bp, Artificial Sequence
  Oligonucleotide primer for the detection of SNP TSC0000129
aatatatttttt

SEQ ID NO: 267354 - DNA, 12 bp, Artificial Sequence
  Oligonucleotide primer for the detection of SNP TSC0000134
caaacaataaac

SEQ ID NO: 267355 - DNA, 12 bp, Artificial Sequence
  Oligonucleotide primer for the detection of SNP TSC0000134
ttattttaagta

SEQ ID NO: 267356 - DNA, 12 bp, Artificial Sequence
  Oligonucleotide primer for the detection of SNP TSC0000135
ttatattatacc

SEQ ID NO: 267357 - DNA, 12 bp, Artificial Sequence
  Oligonucleotide primer for the detection of SNP TSC0000135
ttaagtgatttt

SEQ ID NO: 267358 - DNA, 12 bp, Artificial Sequence
  Oligonucleotide primer for the detection of SNP TSC0000135
ccaaataatctt

SEQ ID NO: 267359 - DNA, 12 bp, Artificial Sequence
  Oligonucleotide primer for the detection of SNP TSC0000135
ttgtattgtgtt

SEQ ID NO: 267360 - DNA, 12 bp, Artificial Sequence
  Oligonucleotide primer for the detection of SNP TSC0000140
ctaccaccatat

SEQ ID NO: 267361 - DNA, 12 bp, Artificial Sequence
  Oligonucleotide primer for the detection of SNP TSC0000140
ctaccgccatat

SEQ ID NO: 267362 - DNA, 12 bp, Artificial Sequence
  Oligonucleotide primer for the detection of SNP TSC0000140
gaattaagaata

SEQ ID NO: 267363 - DNA, 12 bp, Artificial Sequence
  Oligonucleotide primer for the detection of SNP TSC0000141
aataaaaaaaat

SEQ ID NO: 267364 - DNA, 12 bp, Artificial Sequence
  Oligonucleotide primer for the detection of SNP TSC0000141
attatttaatga

SEQ ID NO: 267365 - DNA, 12 bp, Artificial Sequence
  Oligonucleotide primer for the detection of SNP TSC0000141
actacttaataa

SEQ ID NO: 267366 - DNA, 12 bp, Artificial Sequence
  Oligonucleotide primer for the detection of SNP TSC0000141
ggtagaggaagt

SEQ ID NO: 267367 - DNA, 12 bp, Artificial Sequence
  Oligonucleotide primer for the detection of SNP TSC0000142
acttaaaatcat

SEQ ID NO: 267368 - DNA, 12 bp, Artificial Sequence
  Oligonucleotide primer for the detection of SNP TSC0000142
ttttttttttgg

SEQ ID NO: 267369 - DNA, 12 bp, Artificial Sequence
  Oligonucleotide primer for the detection of SNP TSC0000142
ctttccctttaa

SEQ ID NO: 267370 - DNA, 12 bp, Artificial Sequence
  Oligonucleotide primer for the detection of SNP TSC0000142
atttaaaattat

SEQ ID NO: 267371 - DNA, 12 bp, Artificial Sequence
  Oligonucleotide primer for the detection of SNP TSC0000143
ctaataataaaa

SEQ ID NO: 267372 - DNA, 12 bp, Artificial Sequence
  Oligonucleotide primer for the detection of SNP TSC0000143
tattaatatttg

SEQ ID NO: 267373 - DNA, 12 bp, Artificial Sequence
  Oligonucleotide primer for the detection of SNP TSC0000143
taccaatattta

SEQ ID NO: 267374 - DNA, 12 bp, Artificial Sequence
  Oligonucleotide primer for the detection of SNP TSC0000143
ttagtgataaaa

SEQ ID NO: 267375 - DNA, 12 bp, Artificial Sequence
  Oligonucleotide primer for the detection of SNP TSC0000148
ctaaaaacttat

SEQ ID NO: 267376 - DNA, 12 bp, Artificial Sequence
  Oligonucleotide primer for the detection of SNP TSC0000148
ttaaagttattt

SEQ ID NO: 267377 - DNA, 12 bp, Artificial Sequence
  Oligonucleotide primer for the detection of SNP TSC0000148
tcaaaaccattc

SEQ ID NO: 267378 - DNA, 12 bp, Artificial Sequence
  Oligonucleotide primer for the detection of SNP TSC0000148
ttagagatttgt

SEQ ID NO: 267379 - DNA, 12 bp, Artificial Sequence
  Oligonucleotide primer for the detection of SNP TSC0000153
tttacatataaa

SEQ ID NO: 267380 - DNA, 12 bp, Artificial Sequence
  Oligonucleotide primer for the detection of SNP TSC0000153
ggaataaatgaa

SEQ ID NO: 267381 - DNA, 12 bp, Artificial Sequence
  Oligonucleotide primer for the detection of SNP TSC0000153
aaaacaaataaa

SEQ ID NO: 267382 - DNA, 12 bp, Artificial Sequence
  Oligonucleotide primer for the detection of SNP TSC0000153
ttgtatgtgaat

SEQ ID NO: 267383 - DNA, 12 bp, Artificial Sequence
  Oligonucleotide primer for the detection of SNP TSC0000153
ttgtatgtgaac

SEQ ID NO: 267384 - DNA, 12 bp, Artificial Sequence
  Oligonucleotide primer for the detection of SNP TSC0000154
attaactatatt

SEQ ID NO: 267385 - DNA, 12 bp, Artificial Sequence
  Oligonucleotide primer for the detection of SNP TSC0000154
aaatagtttata

SEQ ID NO: 267386 - DNA, 12 bp, Artificial Sequence
  Oligonucleotide primer for the detection of SNP TSC0000154
aaataactcaca

SEQ ID NO: 267387 - DNA, 12 bp, Artificial Sequence
  Oligonucleotide primer for the detection of SNP TSC0000154
attgattatatt

SEQ ID NO: 267388 - DNA, 12 bp, Artificial Sequence
  Oligonucleotide primer for the detection of SNP TSC0000155
catttattaata

SEQ ID NO: 267389 - DNA, 12 bp, Artificial Sequence
  Oligonucleotide primer for the detection of SNP TSC0000155
gtaaattatttt

SEQ ID NO: 267390 - DNA, 12 bp, Artificial Sequence
  Oligonucleotide primer for the detection of SNP TSC0000155
caaattacttta

SEQ ID NO: 267391 - DNA, 12 bp, Artificial Sequence
  Oligonucleotide primer for the detection of SNP TSC0000155
ttgttgatattt

SEQ ID NO: 267392 - DNA, 12 bp, Artificial Sequence
  Oligonucleotide primer for the detection of SNP TSC0000155
ttgttgatattc

SEQ ID NO: 267393 - DNA, 12 bp, Artificial Sequence
  Oligonucleotide primer for the detection of SNP TSC0000156
ttataaccttat

SEQ ID NO: 267394 - DNA, 12 bp, Artificial Sequence
  Oligonucleotide primer for the detection of SNP TSC0000156
ttgaagaattag

SEQ ID NO: 267395 - DNA, 12 bp, Artificial Sequence
  Oligonucleotide primer for the detection of SNP TSC0000158
ccattacaatct

SEQ ID NO: 267396 - DNA, 12 bp, Artificial Sequence
  Oligonucleotide primer for the detection of SNP TSC0000158
ttagttttgtta

SEQ ID NO: 267397 - DNA, 12 bp, Artificial Sequence
  Oligonucleotide primer for the detection of SNP TSC0000160
aaatcaaaaact

SEQ ID NO: 267398 - DNA, 12 bp, Artificial Sequence
  Oligonucleotide primer for the detection of SNP TSC0000160
ggataatattta

SEQ ID NO: 267399 - DNA, 12 bp, Artificial Sequence
  Oligonucleotide primer for the detection of SNP TSC0000164
ttccattccatt

SEQ ID NO: 267400 - DNA, 12 bp, Artificial Sequence
  Oligonucleotide primer for the detection of SNP TSC0000164
agaggtataggg

SEQ ID NO: 267401 - DNA, 12 bp, Artificial Sequence
  Oligonucleotide primer for the detection of SNP TSC0000177
tatacctccccc

SEQ ID NO: 267402 - DNA, 12 bp, Artificial Sequence
  Oligonucleotide primer for the detection of SNP TSC0000177
gagagagtaagg

SEQ ID NO: 267403 - DNA, 12 bp, Artificial Sequence
  Oligonucleotide primer for the detection of SNP TSC0000178
attccataaaaa

SEQ ID NO: 267404 - DNA, 12 bp, Artificial Sequence
  Oligonucleotide primer for the detection of SNP TSC0000178
tatttttttttt

SEQ ID NO: 267405 - DNA, 12 bp, Artificial Sequence
  Oligonucleotide primer for the detection of SNP TSC0000178
cactccctcttc

SEQ ID NO: 267406 - DNA, 12 bp, Artificial Sequence
  Oligonucleotide primer for the detection of SNP TSC0000178
attttatggaag

SEQ ID NO: 267407 - DNA, 12 bp, Artificial Sequence
  Oligonucleotide primer for the detection of SNP TSC0000179
aaactctttaaa

SEQ ID NO: 267408 - DNA, 12 bp, Artificial Sequence
  Oligonucleotide primer for the detection of SNP TSC0000179
taattttattag

SEQ ID NO: 267409 - DNA, 12 bp, Artificial Sequence
  Oligonucleotide primer for the detection of SNP TSC0000179
taatcttatcaa

SEQ ID NO: 267410 - DNA, 12 bp, Artificial Sequence
  Oligonucleotide primer for the detection of SNP TSC0000179
aggttttttaaa

SEQ ID NO: 267411 - DNA, 12 bp, Artificial Sequence
  Oligonucleotide primer for the detection of SNP TSC0000186
aaaatctcccct

SEQ ID NO: 267412 - DNA, 12 bp, Artificial Sequence
  Oligonucleotide primer for the detection of SNP TSC0000186
tttattataagg

SEQ ID NO: 267413 - DNA, 12 bp, Artificial Sequence
  Oligonucleotide primer for the detection of SNP TSC0000187
actcattttctt

SEQ ID NO: 267414 - DNA, 12 bp, Artificial Sequence
  Oligonucleotide primer for the detection of SNP TSC0000187
taggttgtatag

SEQ ID NO: 267415 - DNA, 12 bp, Artificial Sequence
  Oligonucleotide primer for the detection of SNP TSC0000187
caaactacacaa

SEQ ID NO: 267416 - DNA, 12 bp, Artificial Sequence
  Oligonucleotide primer for the detection of SNP TSC0000187
atttattttttt

SEQ ID NO: 267417 - DNA, 12 bp, Artificial Sequence
  Oligonucleotide primer for the detection of SNP TSC0000192
ataacttttcac

SEQ ID NO: 267418 - DNA, 12 bp, Artificial Sequence
  Oligonucleotide primer for the detection of SNP TSC0000192
aagttaatttga

SEQ ID NO: 267419 - DNA, 12 bp, Artificial Sequence
  Oligonucleotide primer for the detection of SNP TSC0000192
aaattaacctaa

SEQ ID NO: 267420 - DNA, 12 bp, Artificial Sequence
  Oligonucleotide primer for the detection of SNP TSC0000192
atggttttttat

SEQ ID NO: 267421 - DNA, 12 bp, Artificial Sequence
  Oligonucleotide primer for the detection of SNP TSC0000194
atttttaccatt

SEQ ID NO: 267422 - DNA, 12 bp, Artificial Sequence
  Oligonucleotide primer for the detection of SNP TSC0000194
aaatattagaaa

SEQ ID NO: 267423 - DNA, 12 bp, Artificial Sequence
  Oligonucleotide primer for the detection of SNP TSC0000211
ctaaacattcta

SEQ ID NO: 267424 - DNA, 12 bp, Artificial Sequence
  Oligonucleotide primer for the detection of SNP TSC0000211
gttgtggttgtt

SEQ ID NO: 267425 - DNA, 12 bp, Artificial Sequence
  Oligonukleotid-Primer
attataattatt

SEQ ID NO: 267426 - DNA, 12 bp, Artificial Sequence
  Oligonucleotide primer for the detection of SNP TSC0000211
ttgaatatttta

SEQ ID NO: 267427 - DNA, 12 bp, Artificial Sequence
  Oligonucleotide primer for the detection of SNP TSC0000212
cccttttaaatt

SEQ ID NO: 267428 - DNA, 12 bp, Artificial Sequence
  Oligonucleotide primer for the detection of SNP TSC0000212
ttaagttaataa

SEQ ID NO: 267429 - DNA, 12 bp, Artificial Sequence
  Oligonukleotid-Primer
aaccaacctaac

SEQ ID NO: 267430 - DNA, 12 bp, Artificial Sequence
  Oligonucleotide primer for the detection of SNP TSC0000219
ggtttttttatg

SEQ ID NO: 267431 - DNA, 12 bp, Artificial Sequence
  Oligonucleotide primer for the detection of SNP TSC0000224
ataaaaaattac

SEQ ID NO: 267432 - DNA, 12 bp, Artificial Sequence
  Oligonucleotide primer for the detection of SNP TSC0000224
aattaaaaatcc

SEQ ID NO: 267433 - DNA, 12 bp, Artificial Sequence
  Oligonucleotide primer for the detection of SNP TSC0000224
tgggaagttatt

SEQ ID NO: 267434 - DNA, 12 bp, Artificial Sequence
  Oligonucleotide primer for the detection of SNP TSC0000225
aatatttaataa

SEQ ID NO: 267435 - DNA, 12 bp, Artificial Sequence
  Oligonucleotide primer for the detection of SNP TSC0000225
atgttttttttt

SEQ ID NO: 267436 - DNA, 12 bp, Artificial Sequence
  Oligonucleotide primer for the detection of SNP TSC0000225
taccttcttcca

SEQ ID NO: 267437 - DNA, 12 bp, Artificial Sequence
  Oligonucleotide primer for the detection of SNP TSC0000225
aagtatttaata

SEQ ID NO: 267438 - DNA, 12 bp, Artificial Sequence
  Oligonucleotide primer for the detection of SNP TSC0000229
aaacaatttaac

SEQ ID NO: 267439 - DNA, 12 bp, Artificial Sequence
  Oligonucleotide primer for the detection of SNP TSC0000229
gtatttttgtat

SEQ ID NO: 267440 - DNA, 12 bp, Artificial Sequence
  Oligonucleotide primer for the detection of SNP TSC0000229
tacctctatata

SEQ ID NO: 267441 - DNA, 12 bp, Artificial Sequence
  Oligonucleotide primer for the detection of SNP TSC0000229
gtaatttgattt

SEQ ID NO: 267442 - DNA, 12 bp, Artificial Sequence
  Oligonucleotide primer for the detection of SNP TSC0000230
aacttaaaaaat

SEQ ID NO: 267443 - DNA, 12 bp, Artificial Sequence
  Oligonucleotide primer for the detection of SNP TSC0000230
taataataggat

SEQ ID NO: 267444 - DNA, 12 bp, Artificial Sequence
  Oligonucleotide primer for the detection of SNP TSC0000230
ataacaacaaaa

SEQ ID NO: 267445 - DNA, 12 bp, Artificial Sequence
  Oligonucleotide primer for the detection of SNP TSC0000230
gatttaggaagt

SEQ ID NO: 267446 - DNA, 12 bp, Artificial Sequence
  Oligonucleotide primer for the detection of SNP TSC0000231
tctaatatatac

SEQ ID NO: 267447 - DNA, 12 bp, Artificial Sequence
  Oligonucleotide primer for the detection of SNP TSC0000231
tttgtatataga

SEQ ID NO: 267448 - DNA, 12 bp, Artificial Sequence
  Oligonucleotide primer for the detection of SNP TSC0000246
ttaatcacaacc

SEQ ID NO: 267449 - DNA, 12 bp, Artificial Sequence
  Oligonucleotide primer for the detection of SNP TSC0000246
gaaatttgttga

SEQ ID NO: 267450 - DNA, 12 bp, Artificial Sequence
  Oligonucleotide primer for the detection of SNP TSC0000251
cacttaaaccca

SEQ ID NO: 267451 - DNA, 12 bp, Artificial Sequence
  Oligonucleotide primer for the detection of SNP TSC0000251
attgaagttttg

SEQ ID NO: 267452 - DNA, 12 bp, Artificial Sequence
  Oligonucleotide primer for the detection of SNP TSC0000252
acattttaaaaa

SEQ ID NO: 267453 - DNA, 12 bp, Artificial Sequence
  Oligonucleotide primer for the detection of SNP TSC0000252
atttttttgttt

SEQ ID NO: 267454 - DNA, 12 bp, Artificial Sequence
  Oligonucleotide primer for the detection of SNP TSC0000252
attttttcgttt

SEQ ID NO: 267455 - DNA, 12 bp, Artificial Sequence
  Oligonucleotide primer for the detection of SNP TSC0000252
cctcccacctaa

SEQ ID NO: 267456 - DNA, 12 bp, Artificial Sequence
  Oligonucleotide primer for the detection of SNP TSC0000252
cctcccgcctaa

SEQ ID NO: 267457 - DNA, 12 bp, Artificial Sequence
  Oligonucleotide primer for the detection of SNP TSC0000252
gtattttgagag

SEQ ID NO: 267458 - DNA, 12 bp, Artificial Sequence
  Oligonucleotide primer for the detection of SNP TSC0000264
aaaaactcttac

SEQ ID NO: 267459 - DNA, 12 bp, Artificial Sequence
  Oligonucleotide primer for the detection of SNP TSC0000264
gttttttttgga

SEQ ID NO: 267460 - DNA, 12 bp, Artificial Sequence
  Oligonucleotide primer for the detection of SNP TSC0000265
tcaaacttctaa

SEQ ID NO: 267461 - DNA, 12 bp, Artificial Sequence
  Oligonucleotide primer for the detection of SNP TSC0000265
ttttaaaatttt

SEQ ID NO: 267462 - DNA, 12 bp, Artificial Sequence
  Oligonucleotide primer for the detection of SNP TSC0000265
tcttaaaatctt

SEQ ID NO: 267463 - DNA, 12 bp, Artificial Sequence
  Oligonucleotide primer for the detection of SNP TSC0000265
ttaaatttttaa

SEQ ID NO: 267464 - DNA, 12 bp, Artificial Sequence
  Oligonucleotide primer for the detection of SNP TSC0000266
caaatcaaaacc

SEQ ID NO: 267465 - DNA, 12 bp, Artificial Sequence
  Oligonucleotide primer for the detection of SNP TSC0000266
caaatcgaaacc

SEQ ID NO: 267466 - DNA, 12 bp, Artificial Sequence
  Oligonucleotide primer for the detection of SNP TSC0000266
tatataatgatg

SEQ ID NO: 267467 - DNA, 12 bp, Artificial Sequence
  Oligonucleotide primer for the detection of SNP TSC0000268
cattcatctttt

SEQ ID NO: 267468 - DNA, 12 bp, Artificial Sequence
  Oligonucleotide primer for the detection of SNP TSC0000268
gagattaagtat

SEQ ID NO: 267469 - DNA, 12 bp, Artificial Sequence
  Oligonucleotide primer for the detection of SNP TSC0000268
actaaatataaa

SEQ ID NO: 267470 - DNA, 12 bp, Artificial Sequence
  Oligonucleotide primer for the detection of SNP TSC0000268
tatttatttttt

SEQ ID NO: 267471 - DNA, 12 bp, Artificial Sequence
  Oligonucleotide primer for the detection of SNP TSC0000271
ccatataactac

SEQ ID NO: 267472 - DNA, 12 bp, Artificial Sequence
  Oligonucleotide primer for the detection of SNP TSC0000271
gtaattttaaat

SEQ ID NO: 267473 - DNA, 12 bp, Artificial Sequence
  Oligonucleotide primer for the detection of SNP TSC0000274
taataacaaaaa

SEQ ID NO: 267474 - DNA, 12 bp, Artificial Sequence
  Oligonucleotide primer for the detection of SNP TSC0000274
ttttttttttta

SEQ ID NO: 267475 - DNA, 12 bp, Artificial Sequence
  Oligonucleotide primer for the detection of SNP TSC0000279
cccattctaatt

SEQ ID NO: 267476 - DNA, 12 bp, Artificial Sequence
  Oligonucleotide primer for the detection of SNP TSC0000279
atatatgtattg

SEQ ID NO: 267477 - DNA, 12 bp, Artificial Sequence
  Oligonucleotide primer for the detection of SNP TSC0000282
aaataattattc

SEQ ID NO: 267478 - DNA, 12 bp, Artificial Sequence
  Oligonucleotide primer for the detection of SNP TSC0000282
tatttataaagg

SEQ ID NO: 267479 - DNA, 12 bp, Artificial Sequence
  Oligonucleotide primer for the detection of SNP TSC0000294
acctctcctcca

SEQ ID NO: 267480 - DNA, 12 bp, Artificial Sequence
  Oligonucleotide primer for the detection of SNP TSC0000294
tattgaggaggt

SEQ ID NO: 267481 - DNA, 12 bp, Artificial Sequence
  Oligonucleotide primer for the detection of SNP TSC0000294
ttactaaaaaaa

SEQ ID NO: 267482 - DNA, 12 bp, Artificial Sequence
  Oligonucleotide primer for the detection of SNP TSC0000294
tgtttttttttt

SEQ ID NO: 267483 - DNA, 12 bp, Artificial Sequence
  Oligonucleotide primer for the detection of SNP TSC0000295
tacctttaatac

SEQ ID NO: 267484 - DNA, 12 bp, Artificial Sequence
  Oligonucleotide primer for the detection of SNP TSC0000295
agggttttttat

SEQ ID NO: 267485 - DNA, 12 bp, Artificial Sequence
  Oligonucleotide primer for the detection of SNP TSC0000295
aaaatttcccat

SEQ ID NO: 267486 - DNA, 12 bp, Artificial Sequence
  Oligonucleotide primer for the detection of SNP TSC0000295
tatttttgatat

SEQ ID NO: 267487 - DNA, 12 bp, Artificial Sequence
  Oligonucleotide primer for the detection of SNP TSC0000297
tctcactctttc

SEQ ID NO: 267488 - DNA, 12 bp, Artificial Sequence
  Oligonucleotide primer for the detection of SNP TSC0000297
atattgtttgtg

SEQ ID NO: 267489 - DNA, 12 bp, Artificial Sequence
  Oligonucleotide primer for the detection of SNP TSC0000297
acattatctata

SEQ ID NO: 267490 - DNA, 12 bp, Artificial Sequence
  Oligonucleotide primer for the detection of SNP TSC0000297
ttttattttttt

SEQ ID NO: 267491 - DNA, 12 bp, Artificial Sequence
  Oligonucleotide primer for the detection of SNP TSC0000298
catttattaaac

SEQ ID NO: 267492 - DNA, 12 bp, Artificial Sequence
  Oligonucleotide primer for the detection of SNP TSC0000298
tatggattataa

SEQ ID NO: 267493 - DNA, 12 bp, Artificial Sequence
  Oligonucleotide primer for the detection of SNP TSC0000299
aattccaaccac

SEQ ID NO: 267494 - DNA, 12 bp, Artificial Sequence
  Oligonucleotide primer for the detection of SNP TSC0000299
tgtatatttgag

SEQ ID NO: 267495 - DNA, 12 bp, Artificial Sequence
  Oligonucleotide primer for the detection of SNP TSC0000301
cacttaaacccg

SEQ ID NO: 267496 - DNA, 12 bp, Artificial Sequence
  Oligonucleotide primer for the detection of SNP TSC0000301
cgcttaaaccca

SEQ ID NO: 267497 - DNA, 12 bp, Artificial Sequence
  Oligonucleotide primer for the detection of SNP TSC0000301
cgcttaaacccg

SEQ ID NO: 267498 - DNA, 12 bp, Artificial Sequence
  Oligonucleotide primer for the detection of SNP TSC0000301
agtttatagtaa

SEQ ID NO: 267499 - DNA, 12 bp, Artificial Sequence
  Oligonucleotide primer for the detection of SNP TSC0000301
aactcacaacaa

SEQ ID NO: 267500 - DNA, 12 bp, Artificial Sequence
  Oligonucleotide primer for the detection of SNP TSC0000301
tgtttgaatttg

SEQ ID NO: 267501 - DNA, 12 bp, Artificial Sequence
  Oligonucleotide primer for the detection of SNP TSC0000301
cgtttgaatttg

SEQ ID NO: 267502 - DNA, 12 bp, Artificial Sequence
  Oligonucleotide primer for the detection of SNP TSC0000301
tgtttgaattcg

SEQ ID NO: 267503 - DNA, 12 bp, Artificial Sequence
  Oligonucleotide primer for the detection of SNP TSC0000301
cgtttgaattcg

SEQ ID NO: 267504 - DNA, 12 bp, Artificial Sequence
  Oligonucleotide primer for the detection of SNP TSC0000305
aaaaacttatcc

SEQ ID NO: 267505 - DNA, 12 bp, Artificial Sequence
  Oligonucleotide primer for the detection of SNP TSC0000305
ttatttatatta

SEQ ID NO: 267506 - DNA, 12 bp, Artificial Sequence
  Oligonucleotide primer for the detection of SNP TSC0000306
aaaaattttttc

SEQ ID NO: 267507 - DNA, 12 bp, Artificial Sequence
  Oligonucleotide primer for the detection of SNP TSC0000306
aggtgagaaaga

SEQ ID NO: 267508 - DNA, 12 bp, Artificial Sequence
  Oligonucleotide primer for the detection of SNP TSC0000307
aaaaaataattt

SEQ ID NO: 267509 - DNA, 12 bp, Artificial Sequence
  Oligonucleotide primer for the detection of SNP TSC0000307
atttgtattttt

SEQ ID NO: 267510 - DNA, 12 bp, Artificial Sequence
  Oligonucleotide primer for the detection of SNP TSC0000307
acctacattttt

SEQ ID NO: 267511 - DNA, 12 bp, Artificial Sequence
  Oligonucleotide primer for the detection of SNP TSC0000307
agaaaatggttt

SEQ ID NO: 267512 - DNA, 12 bp, Artificial Sequence
  Oligonucleotide primer for the detection of SNP TSC0000308
ccaataatctac

SEQ ID NO: 267513 - DNA, 12 bp, Artificial Sequence
  Oligonucleotide primer for the detection of SNP TSC0000308
tttattttatta

SEQ ID NO: 267514 - DNA, 12 bp, Artificial Sequence
  Oligonucleotide primer for the detection of SNP TSC0000309
atttcacatcct

SEQ ID NO: 267515 - DNA, 12 bp, Artificial Sequence
  Oligonucleotide primer for the detection of SNP TSC0000309
aaagaaagtttg

SEQ ID NO: 267516 - DNA, 12 bp, Artificial Sequence
  Oligonucleotide primer for the detection of SNP TSC0000309
aaagaaagttcg

SEQ ID NO: 267517 - DNA, 12 bp, Artificial Sequence
  Oligonucleotide primer for the detection of SNP TSC0000310
cctcatttttcc

SEQ ID NO: 267518 - DNA, 12 bp, Artificial Sequence
  Oligonukleotid-Primer
cctcgtttttcc

SEQ ID NO: 267519 - DNA, 12 bp, Artificial Sequence
  Oligonucleotide primer for the detection of SNP TSC0000310
gagattgggtaa

SEQ ID NO: 267520 - DNA, 12 bp, Artificial Sequence
  Oligonucleotide primer for the detection of SNP TSC0000311
ttttcaaaactt

SEQ ID NO: 267521 - DNA, 12 bp, Artificial Sequence
  Oligonucleotide primer for the detection of SNP TSC0000311
tagtttaataga

SEQ ID NO: 267522 - DNA, 12 bp, Artificial Sequence
  Oligonukleotid-Primer
ataataaaacct

SEQ ID NO: 267523 - DNA, 12 bp, Artificial Sequence
  Oligonucleotide primer for the detection of SNP TSC0000312
atagaatagtag

SEQ ID NO: 267524 - DNA, 12 bp, Artificial Sequence
  Oligonucleotide primer for the detection of SNP TSC0000312
ataaaacaataa

SEQ ID NO: 267525 - DNA, 12 bp, Artificial Sequence
  Oligonucleotide primer for the detection of SNP TSC0000312
gtggtgaggttt

SEQ ID NO: 267526 - DNA, 12 bp, Artificial Sequence
  Oligonucleotide primer for the detection of SNP TSC0000313
caccaactaata

SEQ ID NO: 267527 - DNA, 12 bp, Artificial Sequence
  Oligonucleotide primer for the detection of SNP TSC0000313
caccgactaata

SEQ ID NO: 267528 - DNA, 12 bp, Artificial Sequence
  Oligonucleotide primer for the detection of SNP TSC0000313
aataagtattat

SEQ ID NO: 267529 - DNA, 12 bp, Artificial Sequence
  Oligonucleotide primer for the detection of SNP TSC0000313
aataaatattac

SEQ ID NO: 267530 - DNA, 12 bp, Artificial Sequence
  Oligonucleotide primer for the detection of SNP TSC0000313
tattgattagtg

SEQ ID NO: 267531 - DNA, 12 bp, Artificial Sequence
  Oligonucleotide primer for the detection of SNP TSC0000313
tatcgattagtg

SEQ ID NO: 267532 - DNA, 12 bp, Artificial Sequence
  Oligonucleotide primer for the detection of SNP TSC0000316
aaaaaatcaaat

SEQ ID NO: 267533 - DNA, 12 bp, Artificial Sequence
  Oligonucleotide primer for the detection of SNP TSC0000316
aatttattagag

SEQ ID NO: 267534 - DNA, 12 bp, Artificial Sequence
  Oligonucleotide primer for the detection of SNP TSC0000316
aattcactaaaa

SEQ ID NO: 267535 - DNA, 12 bp, Artificial Sequence
  Oligonucleotide primer for the detection of SNP TSC0000316
gagaaattaaat

SEQ ID NO: 267536 - DNA, 12 bp, Artificial Sequence
  Oligonucleotide primer for the detection of SNP TSC0000323
cccaaaacctat

SEQ ID NO: 267537 - DNA, 12 bp, Artificial Sequence
  Oligonucleotide primer for the detection of SNP TSC0000323
cccgaaacctat

SEQ ID NO: 267538 - DNA, 12 bp, Artificial Sequence
  Oligonucleotide primer for the detection of SNP TSC0000323
ttattatatgga

SEQ ID NO: 267539 - DNA, 12 bp, Artificial Sequence
  Oligonucleotide primer for the detection of SNP TSC0000324
aatttcctaaaa

SEQ ID NO: 267540 - DNA, 12 bp, Artificial Sequence
  Oligonucleotide primer for the detection of SNP TSC0000324
gtttttgaagag

SEQ ID NO: 267541 - DNA, 12 bp, Artificial Sequence
  Oligonucleotide primer for the detection of SNP TSC0000324
acttctaaaaaa

SEQ ID NO: 267542 - DNA, 12 bp, Artificial Sequence
  Oligonucleotide primer for the detection of SNP TSC0000324
agttttttgagg

SEQ ID NO: 267543 - DNA, 12 bp, Artificial Sequence
  Oligonucleotide primer for the detection of SNP TSC0000327
ctatcctaaatt

SEQ ID NO: 267544 - DNA, 12 bp, Artificial Sequence
  Oligonucleotide primer for the detection of SNP TSC0000327
tataaaaatatg

SEQ ID NO: 267545 - DNA, 12 bp, Artificial Sequence
  Oligonucleotide primer for the detection of SNP TSC0000327
tacaaaaatata

SEQ ID NO: 267546 - DNA, 12 bp, Artificial Sequence
  Oligonucleotide primer for the detection of SNP TSC0000327
ttgttttagatt

SEQ ID NO: 267547 - DNA, 12 bp, Artificial Sequence
  Oligonucleotide primer for the detection of SNP TSC0000332
caatacacacac

SEQ ID NO: 267548 - DNA, 12 bp, Artificial Sequence
  Oligonucleotide primer for the detection of SNP TSC0000332
tgtgtgtaggtg

SEQ ID NO: 267549 - DNA, 12 bp, Artificial Sequence
  Oligonucleotide primer for the detection of SNP TSC0000332
tatatataaata

SEQ ID NO: 267550 - DNA, 12 bp, Artificial Sequence
  Oligonucleotide primer for the detection of SNP TSC0000332
tagtatatatat

SEQ ID NO: 267551 - DNA, 12 bp, Artificial Sequence
  Oligonucleotide primer for the detection of SNP TSC0000333
tttaaaaacata

SEQ ID NO: 267552 - DNA, 12 bp, Artificial Sequence
  Oligonucleotide primer for the detection of SNP TSC0000333
attttttaaatt

SEQ ID NO: 267553 - DNA, 12 bp, Artificial Sequence
  Oligonucleotide primer for the detection of SNP TSC0000333
attttttaaatc

SEQ ID NO: 267554 - DNA, 12 bp, Artificial Sequence
  Oligonucleotide primer for the detection of SNP TSC0000333
atttttcaaatc

SEQ ID NO: 267555 - DNA, 12 bp, Artificial Sequence
  Oligonucleotide primer for the detection of SNP TSC0000333
ttaaaaatatat

SEQ ID NO: 267556 - DNA, 12 bp, Artificial Sequence
  Oligonucleotide primer for the detection of SNP TSC0000334
aaaatacttaaa

SEQ ID NO: 267557 - DNA, 12 bp, Artificial Sequence
  Oligonucleotide primer for the detection of SNP TSC0000334
tatttaatttta

SEQ ID NO: 267558 - DNA, 12 bp, Artificial Sequence
  Oligonucleotide primer for the detection of SNP TSC0000335
aataaacaaaaa

SEQ ID NO: 267559 - DNA, 12 bp, Artificial Sequence
  Oligonucleotide primer for the detection of SNP TSC0000335
ttgaatagtttt

SEQ ID NO: 267560 - DNA, 12 bp, Artificial Sequence
  Oligonucleotide primer for the detection of SNP TSC0000335
ttaaataacttc

SEQ ID NO: 267561 - DNA, 12 bp, Artificial Sequence
  Oligonucleotide primer for the detection of SNP TSC0000335
aaaaatggatag

SEQ ID NO: 267562 - DNA, 12 bp, Artificial Sequence
  Oligonucleotide primer for the detection of SNP TSC0000336
tatatcactcca

SEQ ID NO: 267563 - DNA, 12 bp, Artificial Sequence
  Oligonucleotide primer for the detection of SNP TSC0000336
ttaaagttgggg

SEQ ID NO: 267564 - DNA, 12 bp, Artificial Sequence
  Oligonucleotide primer for the detection of SNP TSC0000336
ctaaaactaaaa

SEQ ID NO: 267565 - DNA, 12 bp, Artificial Sequence
  Oligonucleotide primer for the detection of SNP TSC0000336
tgtgttatttta

SEQ ID NO: 267566 - DNA, 12 bp, Artificial Sequence
  Oligonucleotide primer for the detection of SNP TSC0000337
actccatataac

SEQ ID NO: 267567 - DNA, 12 bp, Artificial Sequence
  Oligonucleotide primer for the detection of SNP TSC0000337
attattatttta

SEQ ID NO: 267568 - DNA, 12 bp, Artificial Sequence
  Oligonucleotide primer for the detection of SNP TSC0000338
tataaaataaat

SEQ ID NO: 267569 - DNA, 12 bp, Artificial Sequence
  Oligonucleotide primer for the detection of SNP TSC0000338
gtagttgagttg

SEQ ID NO: 267570 - DNA, 12 bp, Artificial Sequence
  Oligonucleotide primer for the detection of SNP TSC0000352
ttttaaaaactt

SEQ ID NO: 267571 - DNA, 12 bp, Artificial Sequence
  Oligonucleotide primer for the detection of SNP TSC0000352
attttggagata

SEQ ID NO: 267572 - DNA, 12 bp, Artificial Sequence
  Oligonucleotide primer for the detection of SNP TSC0000352
atttcggagata

SEQ ID NO: 267573 - DNA, 12 bp, Artificial Sequence
  Oligonucleotide primer for the detection of SNP TSC0000355
aataacatctct

SEQ ID NO: 267574 - DNA, 12 bp, Artificial Sequence
  Oligonucleotide primer for the detection of SNP TSC0000355
gttaagtgatta

SEQ ID NO: 267575 - DNA, 12 bp, Artificial Sequence
  Oligonucleotide primer for the detection of SNP TSC0000355
attaaataatta

SEQ ID NO: 267576 - DNA, 12 bp, Artificial Sequence
  Oligonucleotide primer for the detection of SNP TSC0000355
gatgatattttt

SEQ ID NO: 267577 - DNA, 12 bp, Artificial Sequence
  Oligonucleotide primer for the detection of SNP TSC0000357
tcataccataca

SEQ ID NO: 267578 - DNA, 12 bp, Artificial Sequence
  Oligonucleotide primer for the detection of SNP TSC0000357
agtaaatatttt

SEQ ID NO: 267579 - DNA, 12 bp, Artificial Sequence
  Oligonucleotide primer for the detection of SNP TSC0000357
ttaataaatatc

SEQ ID NO: 267580 - DNA, 12 bp, Artificial Sequence
  Oligonucleotide primer for the detection of SNP TSC0000357
attatattatat

SEQ ID NO: 267581 - DNA, 12 bp, Artificial Sequence
  Oligonucleotide primer for the detection of SNP TSC0000360
taaacttcctat

SEQ ID NO: 267582 - DNA, 12 bp, Artificial Sequence
  Oligonucleotide primer for the detection of SNP TSC0000360
tgtatttggtga

SEQ ID NO: 267583 - DNA, 12 bp, Artificial Sequence
  Oligonucleotide primer for the detection of SNP TSC0000360
tacatttaataa

SEQ ID NO: 267584 - DNA, 12 bp, Artificial Sequence
  Oligonucleotide primer for the detection of SNP TSC0000360
tggattttttgt

SEQ ID NO: 267585 - DNA, 12 bp, Artificial Sequence
  Oligonucleotide primer for the detection of SNP TSC0000361
taaactcctctc

SEQ ID NO: 267586 - DNA, 12 bp, Artificial Sequence
  Oligonucleotide primer for the detection of SNP TSC0000361
tggtggtagtga

SEQ ID NO: 267587 - DNA, 12 bp, Artificial Sequence
  Oligonucleotide primer for the detection of SNP TSC0000361
cggtggtagtga

SEQ ID NO: 267588 - DNA, 12 bp, Artificial Sequence
  Oligonucleotide primer for the detection of SNP TSC0000361
tggtggtagcga

SEQ ID NO: 267589 - DNA, 12 bp, Artificial Sequence
  Oligonucleotide primer for the detection of SNP TSC0000361
cggtggtagcga

SEQ ID NO: 267590 - DNA, 12 bp, Artificial Sequence
  Oligonucleotide primer for the detection of SNP TSC0000365
catatcaattaa

SEQ ID NO: 267591 - DNA, 12 bp, Artificial Sequence
  Oligonukleotid-Primer
tttgttttatat

SEQ ID NO: 267592 - DNA, 12 bp, Artificial Sequence
  Oligonucleotide primer for the detection of SNP TSC0000365
ttatcctacata

SEQ ID NO: 267593 - DNA, 12 bp, Artificial Sequence
  Oligonucleotide primer for the detection of SNP TSC0000365
atgttaattaat

SEQ ID NO: 267594 - DNA, 12 bp, Artificial Sequence
  Oligonucleotide primer for the detection of SNP TSC0000371
aacacctaaaaa

SEQ ID NO: 267595 - DNA, 12 bp, Artificial Sequence
  Oligonukleotid-Primer
tatatatggttt

SEQ ID NO: 267596 - DNA, 12 bp, Artificial Sequence
  Oligonucleotide primer for the detection of SNP TSC0000371
catatataattc

SEQ ID NO: 267597 - DNA, 12 bp, Artificial Sequence
  Oligonucleotide primer for the detection of SNP TSC0000371
aatatttagaaa

SEQ ID NO: 267598 - DNA, 12 bp, Artificial Sequence
  Oligonucleotide primer for the detection of SNP TSC0000375
atttaaaaaaaa

SEQ ID NO: 267599 - DNA, 12 bp, Artificial Sequence
  Oligonucleotide primer for the detection of SNP TSC0000375
ataatatataaa

SEQ ID NO: 267600 - DNA, 12 bp, Artificial Sequence
  Oligonucleotide primer for the detection of SNP TSC0000375
caacacataaaa

SEQ ID NO: 267601 - DNA, 12 bp, Artificial Sequence
  Oligonucleotide primer for the detection of SNP TSC0000376
aaaaaccctaac

SEQ ID NO: 267602 - DNA, 12 bp, Artificial Sequence
  Oligonucleotide primer for the detection of SNP TSC0000376
aatagttttatg

SEQ ID NO: 267603 - DNA, 12 bp, Artificial Sequence
  Oligonucleotide primer for the detection of SNP TSC0000376
aacaactccata

SEQ ID NO: 267604 - DNA, 12 bp, Artificial Sequence
  Oligonucleotide primer for the detection of SNP TSC0000376
agaagttttggt

SEQ ID NO: 267605 - DNA, 12 bp, Artificial Sequence
  Oligonucleotide primer for the detection of SNP TSC0000383
aaactcttaacc

SEQ ID NO: 267606 - DNA, 12 bp, Artificial Sequence
  Oligonucleotide primer for the detection of SNP TSC0000383
tgattaatgtgt

SEQ ID NO: 267607 - DNA, 12 bp, Artificial Sequence
  Oligonucleotide primer for the detection of SNP TSC0000383
tgattaatgtgc

SEQ ID NO: 267608 - DNA, 12 bp, Artificial Sequence
  Oligonucleotide primer for the detection of SNP TSC0000383
ataactaatata

SEQ ID NO: 267609 - DNA, 12 bp, Artificial Sequence
  Oligonucleotide primer for the detection of SNP TSC0000383
ggatttttaatt

SEQ ID NO: 267610 - DNA, 12 bp, Artificial Sequence
  Oligonucleotide primer for the detection of SNP TSC0000388
tctccatcatat

SEQ ID NO: 267611 - DNA, 12 bp, Artificial Sequence
  Oligonucleotide primer for the detection of SNP TSC0000388
gagggagagaaa

SEQ ID NO: 267612 - DNA, 12 bp, Artificial Sequence
  Oligonucleotide primer for the detection of SNP TSC0000397
cctaaattaaaa

SEQ ID NO: 267613 - DNA, 12 bp, Artificial Sequence
  Oligonucleotide primer for the detection of SNP TSC0000397
ttttttttttgt

SEQ ID NO: 267614 - DNA, 12 bp, Artificial Sequence
  Oligonucleotide primer for the detection of SNP TSC0000397
actctttcctta

SEQ ID NO: 267615 - DNA, 12 bp, Artificial Sequence
  Oligonucleotide primer for the detection of SNP TSC0000397
tttaagttaaga

SEQ ID NO: 267616 - DNA, 12 bp, Artificial Sequence
  Oligonucleotide primer for the detection of SNP TSC0000400
ctttacttaaca

SEQ ID NO: 267617 - DNA, 12 bp, Artificial Sequence
  Oligonucleotide primer for the detection of SNP TSC0000400
gtttttttttat

SEQ ID NO: 267618 - DNA, 12 bp, Artificial Sequence
  Oligonucleotide primer for the detection of SNP TSC0000400
atccttcttcac

SEQ ID NO: 267619 - DNA, 12 bp, Artificial Sequence
  Oligonucleotide primer for the detection of SNP TSC0000400
tttttgtttggt

SEQ ID NO: 267620 - DNA, 12 bp, Artificial Sequence
  Oligonucleotide primer for the detection of SNP TSC0000401
ataaaaaaaaac

SEQ ID NO: 267621 - DNA, 12 bp, Artificial Sequence
  Oligonucleotide primer for the detection of SNP TSC0000401
aggagaagtaaa

SEQ ID NO: 267622 - DNA, 12 bp, Artificial Sequence
  Oligonucleotide primer for the detection of SNP TSC0000402
ttccaaatattt

SEQ ID NO: 267623 - DNA, 12 bp, Artificial Sequence
  Oligonucleotide primer for the detection of SNP TSC0000402
tataatgaatta

SEQ ID NO: 267624 - DNA, 12 bp, Artificial Sequence
  Oligonucleotide primer for the detection of SNP TSC0000403
atacaaaactct

SEQ ID NO: 267625 - DNA, 12 bp, Artificial Sequence
  Oligonucleotide primer for the detection of SNP TSC0000403
tagggttattag

SEQ ID NO: 267626 - DNA, 12 bp, Artificial Sequence
  Oligonucleotide primer for the detection of SNP TSC0000403
caaaatcaccaa

SEQ ID NO: 267627 - DNA, 12 bp, Artificial Sequence
  Oligonucleotide primer for the detection of SNP TSC0000403
gtgtagagtttt

SEQ ID NO: 267628 - DNA, 12 bp, Artificial Sequence
  Oligonucleotide primer for the detection of SNP TSC0000404
catttcctcact

SEQ ID NO: 267629 - DNA, 12 bp, Artificial Sequence
  Oligonucleotide primer for the detection of SNP TSC0000404
ttgtgttttgag

SEQ ID NO: 267630 - DNA, 12 bp, Artificial Sequence
  Oligonucleotide primer for the detection of SNP TSC0000405
ctaaaatctaaa

SEQ ID NO: 267631 - DNA, 12 bp, Artificial Sequence
  Oligonucleotide primer for the detection of SNP TSC0000405
gtgagtgatggt

SEQ ID NO: 267632 - DNA, 12 bp, Artificial Sequence
  Oligonucleotide primer for the detection of SNP TSC0000405
ataataataaaa

SEQ ID NO: 267633 - DNA, 12 bp, Artificial Sequence
  Oligonucleotide primer for the detection of SNP TSC0000405
tgaggtttaggt

SEQ ID NO: 267634 - DNA, 12 bp, Artificial Sequence
  Oligonucleotide primer for the detection of SNP TSC0000406
aacttattaaat

SEQ ID NO: 267635 - DNA, 12 bp, Artificial Sequence
  Oligonucleotide primer for the detection of SNP TSC0000406
attttgattaaa

SEQ ID NO: 267636 - DNA, 12 bp, Artificial Sequence
  Oligonucleotide primer for the detection of SNP TSC0000407
ctttaattaaac

SEQ ID NO: 267637 - DNA, 12 bp, Artificial Sequence
  Oligonucleotide primer for the detection of SNP TSC0000407
aaatagataatg

SEQ ID NO: 267638 - DNA, 12 bp, Artificial Sequence
  Oligonucleotide primer for the detection of SNP TSC0000408
caaaattctacc

SEQ ID NO: 267639 - DNA, 12 bp, Artificial Sequence
  Oligonucleotide primer for the detection of SNP TSC0000408
aattttgtttaa

SEQ ID NO: 267640 - DNA, 12 bp, Artificial Sequence
  Oligonucleotide primer for the detection of SNP TSC0000408
aattttatctaa

SEQ ID NO: 267641 - DNA, 12 bp, Artificial Sequence
  Oligonucleotide primer for the detection of SNP TSC0000408
taaagttttgtt

SEQ ID NO: 267642 - DNA, 12 bp, Artificial Sequence
  Oligonucleotide primer for the detection of SNP TSC0000416
aaatcatcaaaa

SEQ ID NO: 267643 - DNA, 12 bp, Artificial Sequence
  Oligonucleotide primer for the detection of SNP TSC0000416
aaatcatcgaaa

SEQ ID NO: 267644 - DNA, 12 bp, Artificial Sequence
  Oligonucleotide primer for the detection of SNP TSC0000416
ttattgaatggt

SEQ ID NO: 267645 - DNA, 12 bp, Artificial Sequence
  Oligonucleotide primer for the detection of SNP TSC0000416
ttattgaatggc

SEQ ID NO: 267646 - DNA, 12 bp, Artificial Sequence
  Oligonucleotide primer for the detection of SNP TSC0000416
ttcactaaataa

SEQ ID NO: 267647 - DNA, 12 bp, Artificial Sequence
  Oligonucleotide primer for the detection of SNP TSC0000416
agttattgaaat

SEQ ID NO: 267648 - DNA, 12 bp, Artificial Sequence
  Oligonucleotide primer for the detection of SNP TSC0000416
agttatcgaaat

SEQ ID NO: 267649 - DNA, 12 bp, Artificial Sequence
  Oligonucleotide primer for the detection of SNP TSC0000417
aaaaaataaaaa

SEQ ID NO: 267650 - DNA, 12 bp, Artificial Sequence
  Oligonucleotide primer for the detection of SNP TSC0000417
gttagttattat

SEQ ID NO: 267651 - DNA, 12 bp, Artificial Sequence
  Oligonucleotide primer for the detection of SNP TSC0000417
tactaaccatca

SEQ ID NO: 267652 - DNA, 12 bp, Artificial Sequence
  Oligonucleotide primer for the detection of SNP TSC0000417
agggggtgaaag

SEQ ID NO: 267653 - DNA, 12 bp, Artificial Sequence
  Oligonucleotide primer for the detection of SNP TSC0000420
tataaacaaata

SEQ ID NO: 267654 - DNA, 12 bp, Artificial Sequence
  Oligonucleotide primer for the detection of SNP TSC0000420
tataaacgaata

SEQ ID NO: 267655 - DNA, 12 bp, Artificial Sequence
  Oligonucleotide primer for the detection of SNP TSC0000420
taaagttaatgg

SEQ ID NO: 267656 - DNA, 12 bp, Artificial Sequence
  Oligonucleotide primer for the detection of SNP TSC0000420
taaaatcaataa

SEQ ID NO: 267657 - DNA, 12 bp, Artificial Sequence
  Oligonucleotide primer for the detection of SNP TSC0000420
atatggatgaat

SEQ ID NO: 267658 - DNA, 12 bp, Artificial Sequence
  Oligonucleotide primer for the detection of SNP TSC0000420
atatggacgaat

SEQ ID NO: 267659 - DNA, 12 bp, Artificial Sequence
  Oligonucleotide primer for the detection of SNP TSC0000421
aaccaatacaaa

SEQ ID NO: 267660 - DNA, 12 bp, Artificial Sequence
  Oligonucleotide primer for the detection of SNP TSC0000421
agttgattagtt

SEQ ID NO: 267661 - DNA, 12 bp, Artificial Sequence
  Oligonucleotide primer for the detection of SNP TSC0000421
aattaatcaacc

SEQ ID NO: 267662 - DNA, 12 bp, Artificial Sequence
  Oligonucleotide primer for the detection of SNP TSC0000421
gattaatataaa

SEQ ID NO: 267663 - DNA, 12 bp, Artificial Sequence
  Oligonucleotide primer for the detection of SNP TSC0000427
cctccccaacta

SEQ ID NO: 267664 - DNA, 12 bp, Artificial Sequence
  Oligonucleotide primer for the detection of SNP TSC0000427
atgtatagtttt

SEQ ID NO: 267665 - DNA, 12 bp, Artificial Sequence
  Oligonucleotide primer for the detection of SNP TSC0000427
acgtatagtttt

SEQ ID NO: 267666 - DNA, 12 bp, Artificial Sequence
  Oligonucleotide primer for the detection of SNP TSC0000427
aaacacacaatt

SEQ ID NO: 267667 - DNA, 12 bp, Artificial Sequence
  Oligonucleotide primer for the detection of SNP TSC0000427
aaacgcacaatt

SEQ ID NO: 267668 - DNA, 12 bp, Artificial Sequence
  Oligonucleotide primer for the detection of SNP TSC0000427
tttttagttatt

SEQ ID NO: 267669 - DNA, 12 bp, Artificial Sequence
  Oligonucleotide primer for the detection of SNP TSC0000429
atctctaactct

SEQ ID NO: 267670 - DNA, 12 bp, Artificial Sequence
  Oligonucleotide primer for the detection of SNP TSC0000429
ttttggttgata

SEQ ID NO: 267671 - DNA, 12 bp, Artificial Sequence
  Oligonucleotide primer for the detection of SNP TSC0000431
cattttattttt

SEQ ID NO: 267672 - DNA, 12 bp, Artificial Sequence
  Oligonucleotide primer for the detection of SNP TSC0000431
tttaaaaataaa

SEQ ID NO: 267673 - DNA, 12 bp, Artificial Sequence
  Oligonucleotide primer for the detection of SNP TSC0000435
aaaataacaaac

SEQ ID NO: 267674 - DNA, 12 bp, Artificial Sequence
  Oligonucleotide primer for the detection of SNP TSC0000435
tttaaaggtaaa

SEQ ID NO: 267675 - DNA, 12 bp, Artificial Sequence
  Oligonucleotide primer for the detection of SNP TSC0000437
taacctctatct

SEQ ID NO: 267676 - DNA, 12 bp, Artificial Sequence
  Oligonucleotide primer for the detection of SNP TSC0000437
tggaattgggta

SEQ ID NO: 267677 - DNA, 12 bp, Artificial Sequence
  Oligonucleotide primer for the detection of SNP TSC0000441
acaaccaaatta

SEQ ID NO: 267678 - DNA, 12 bp, Artificial Sequence
  Oligonucleotide primer for the detection of SNP TSC0000441
aataaaatattt

SEQ ID NO: 267679 - DNA, 12 bp, Artificial Sequence
  Oligonucleotide primer for the detection of SNP TSC0000441
aataaaacattc

SEQ ID NO: 267680 - DNA, 12 bp, Artificial Sequence
  Oligonucleotide primer for the detection of SNP TSC0000441
gtaattaggtta

SEQ ID NO: 267681 - DNA, 12 bp, Artificial Sequence
  Oligonucleotide primer for the detection of SNP TSC0000442
aaaaaacaaaac

SEQ ID NO: 267682 - DNA, 12 bp, Artificial Sequence
  Oligonucleotide primer for the detection of SNP TSC0000442
gtgtattatata

SEQ ID NO: 267683 - DNA, 12 bp, Artificial Sequence
  Oligonucleotide primer for the detection of SNP TSC0000442
atatactataca

SEQ ID NO: 267684 - DNA, 12 bp, Artificial Sequence
  Oligonucleotide primer for the detection of SNP TSC0000442
aagaagtaaagt

SEQ ID NO: 267685 - DNA, 12 bp, Artificial Sequence
  Oligonucleotide primer for the detection of SNP TSC0000443
aaattattataa

SEQ ID NO: 267686 - DNA, 12 bp, Artificial Sequence
  Oligonucleotide primer for the detection of SNP TSC0000443
attttatttaat

SEQ ID NO: 267687 - DNA, 12 bp, Artificial Sequence
  Oligonucleotide primer for the detection of SNP TSC0000443
tctcatttaata

SEQ ID NO: 267688 - DNA, 12 bp, Artificial Sequence
  Oligonucleotide primer for the detection of SNP TSC0000443
gggttgttgtgg

SEQ ID NO: 267689 - DNA, 12 bp, Artificial Sequence
  Oligonucleotide primer for the detection of SNP TSC0000446
tcaaatcatcta

SEQ ID NO: 267690 - DNA, 12 bp, Artificial Sequence
  Oligonucleotide primer for the detection of SNP TSC0000446
tattgtgttttt

SEQ ID NO: 267691 - DNA, 12 bp, Artificial Sequence
  Oligonucleotide primer for the detection of SNP TSC0000446
cactatactctc

SEQ ID NO: 267692 - DNA, 12 bp, Artificial Sequence
  Oligonucleotide primer for the detection of SNP TSC0000446
ttaaattattta

SEQ ID NO: 267693 - DNA, 12 bp, Artificial Sequence
  Oligonucleotide primer for the detection of SNP TSC0000450
tttctaataaaa

SEQ ID NO: 267694 - DNA, 12 bp, Artificial Sequence
  Oligonucleotide primer for the detection of SNP TSC0000450
attattagatta

SEQ ID NO: 267695 - DNA, 12 bp, Artificial Sequence
  Oligonucleotide primer for the detection of SNP TSC0000450
actaccaaacca

SEQ ID NO: 267696 - DNA, 12 bp, Artificial Sequence
  Oligonucleotide primer for the detection of SNP TSC0000450
tatttttaatag

SEQ ID NO: 267697 - DNA, 12 bp, Artificial Sequence
  Oligonucleotide primer for the detection of SNP TSC0000456
aatactcataaa

SEQ ID NO: 267698 - DNA, 12 bp, Artificial Sequence
  Oligonucleotide primer for the detection of SNP TSC0000456
tttgttataaat

SEQ ID NO: 267699 - DNA, 12 bp, Artificial Sequence
  Oligonucleotide primer for the detection of SNP TSC0000456
ctattacaaata

SEQ ID NO: 267700 - DNA, 12 bp, Artificial Sequence
  Oligonucleotide primer for the detection of SNP TSC0000456
ttgatatttata

SEQ ID NO: 267701 - DNA, 12 bp, Artificial Sequence
  Oligonucleotide primer for the detection of SNP TSC0000457
attcccaaactt

SEQ ID NO: 267702 - DNA, 12 bp, Artificial Sequence
  Oligonucleotide primer for the detection of SNP TSC0000457
atagtttatgag

SEQ ID NO: 267703 - DNA, 12 bp, Artificial Sequence
  Oligonucleotide primer for the detection of SNP TSC0000464
aatattttaaat

SEQ ID NO: 267704 - DNA, 12 bp, Artificial Sequence
  Oligonucleotide primer for the detection of SNP TSC0000464
tttttgtatata

SEQ ID NO: 267705 - DNA, 12 bp, Artificial Sequence
  Oligonucleotide primer for the detection of SNP TSC0000464
tccttatataca

SEQ ID NO: 267706 - DNA, 12 bp, Artificial Sequence
  Oligonucleotide primer for the detection of SNP TSC0000464
agtattttagat

SEQ ID NO: 267707 - DNA, 12 bp, Artificial Sequence
  Oligonucleotide primer for the detection of SNP TSC0000473
tttcttaaatat

SEQ ID NO: 267708 - DNA, 12 bp, Artificial Sequence
  Oligonucleotide primer for the detection of SNP TSC0000473
tttttgatataa

SEQ ID NO: 267709 - DNA, 12 bp, Artificial Sequence
  Oligonucleotide primer for the detection of SNP TSC0000474
aaaaaactaaat

SEQ ID NO: 267710 - DNA, 12 bp, Artificial Sequence
  Oligonucleotide primer for the detection of SNP TSC0000474
atttataatttg

SEQ ID NO: 267711 - DNA, 12 bp, Artificial Sequence
  Oligonucleotide primer for the detection of SNP TSC0000475
tttttaaaaaaa

SEQ ID NO: 267712 - DNA, 12 bp, Artificial Sequence
  Oligonucleotide primer for the detection of SNP TSC0000475
ttatattttata

SEQ ID NO: 267713 - DNA, 12 bp, Artificial Sequence
  Oligonucleotide primer for the detection of SNP TSC0000475
ctatatcttaca

SEQ ID NO: 267714 - DNA, 12 bp, Artificial Sequence
  Oligonucleotide primer for the detection of SNP TSC0000475
tttttaagagag

SEQ ID NO: 267715 - DNA, 12 bp, Artificial Sequence
  Oligonucleotide primer for the detection of SNP TSC0000477
tcccacattttc

SEQ ID NO: 267716 - DNA, 12 bp, Artificial Sequence
  Oligonucleotide primer for the detection of SNP TSC0000477
taaaataagata

SEQ ID NO: 267717 - DNA, 12 bp, Artificial Sequence
  Oligonucleotide primer for the detection of SNP TSC0000478
tattctcatact

SEQ ID NO: 267718 - DNA, 12 bp, Artificial Sequence
  Oligonucleotide primer for the detection of SNP TSC0000478
tatttttttata

SEQ ID NO: 267719 - DNA, 12 bp, Artificial Sequence
  Oligonucleotide primer for the detection of SNP TSC0000483
caaaacatcctc

SEQ ID NO: 267720 - DNA, 12 bp, Artificial Sequence
  Oligonucleotide primer for the detection of SNP TSC0000483
ttgtagagttga

SEQ ID NO: 267721 - DNA, 12 bp, Artificial Sequence
  Oligonucleotide primer for the detection of SNP TSC0000484
cattccaacctt

SEQ ID NO: 267722 - DNA, 12 bp, Artificial Sequence
  Oligonucleotide primer for the detection of SNP TSC0000484
ggttattatatt

SEQ ID NO: 267723 - DNA, 12 bp, Artificial Sequence
  Oligonucleotide primer for the detection of SNP TSC0000484
ttatcatattaa

SEQ ID NO: 267724 - DNA, 12 bp, Artificial Sequence
  Oligonucleotide primer for the detection of SNP TSC0000484
tattttagtttt

SEQ ID NO: 267725 - DNA, 12 bp, Artificial Sequence
  Oligonucleotide primer for the detection of SNP TSC0000491
aactctttccta

SEQ ID NO: 267726 - DNA, 12 bp, Artificial Sequence
  Oligonucleotide primer for the detection of SNP TSC0000491
taggatgaaaat

SEQ ID NO: 267727 - DNA, 12 bp, Artificial Sequence
  Oligonucleotide primer for the detection of SNP TSC0000491
taaaataaaaat

SEQ ID NO: 267728 - DNA, 12 bp, Artificial Sequence
  Oligonucleotide primer for the detection of SNP TSC0000491
agttttttttta

SEQ ID NO: 267729 - DNA, 12 bp, Artificial Sequence
  Oligonucleotide primer for the detection of SNP TSC0000492
ctccctaaaacc

SEQ ID NO: 267730 - DNA, 12 bp, Artificial Sequence
  Oligonucleotide primer for the detection of SNP TSC0000492
aagatatgtgta

SEQ ID NO: 267731 - DNA, 12 bp, Artificial Sequence
  Oligonucleotide primer for the detection of SNP TSC0000499
ttcattataatt

SEQ ID NO: 267732 - DNA, 12 bp, Artificial Sequence
  Oligonucleotide primer for the detection of SNP TSC0000499
taaaaattttaa

SEQ ID NO: 267733 - DNA, 12 bp, Artificial Sequence
  Oligonucleotide primer for the detection of SNP TSC0000499
caaaaattttaa

SEQ ID NO: 267734 - DNA, 12 bp, Artificial Sequence
  Oligonucleotide primer for the detection of SNP TSC0000499
tttattgtgatt

SEQ ID NO: 267735 - DNA, 12 bp, Artificial Sequence
  Oligonucleotide primer for the detection of SNP TSC0000500
ccaaaaaatttt

SEQ ID NO: 267736 - DNA, 12 bp, Artificial Sequence
  Oligonucleotide primer for the detection of SNP TSC0000500
agaaagtttttt

SEQ ID NO: 267737 - DNA, 12 bp, Artificial Sequence
  Oligonucleotide primer for the detection of SNP TSC0000500
tttcaaaaaaac

SEQ ID NO: 267738 - DNA, 12 bp, Artificial Sequence
  Oligonucleotide primer for the detection of SNP TSC0000500
ttaaaggatttt

SEQ ID NO: 267739 - DNA, 12 bp, Artificial Sequence
  Oligonucleotide primer for the detection of SNP TSC0000501
taatatttatac

SEQ ID NO: 267740 - DNA, 12 bp, Artificial Sequence
  Oligonucleotide primer for the detection of SNP TSC0000501
gtaaagaattta

SEQ ID NO: 267741 - DNA, 12 bp, Artificial Sequence
  Oligonucleotide primer for the detection of SNP TSC0000501
ataaaaaatcca

SEQ ID NO: 267742 - DNA, 12 bp, Artificial Sequence
  Oligonucleotide primer for the detection of SNP TSC0000501
tgatatttatat

SEQ ID NO: 267743 - DNA, 12 bp, Artificial Sequence
  Oligonucleotide primer for the detection of SNP TSC0000504
aatcacaattaa

SEQ ID NO: 267744 - DNA, 12 bp, Artificial Sequence
  Oligonucleotide primer for the detection of SNP TSC0000504
gtttattagtat

SEQ ID NO: 267745 - DNA, 12 bp, Artificial Sequence
  Oligonucleotide primer for the detection of SNP TSC0000504
aactcatcaata

SEQ ID NO: 267746 - DNA, 12 bp, Artificial Sequence
  Oligonucleotide primer for the detection of SNP TSC0000504
aaaattatagtt

SEQ ID NO: 267747 - DNA, 12 bp, Artificial Sequence
  Oligonucleotide primer for the detection of SNP TSC0000506
ctaatacccact

SEQ ID NO: 267748 - DNA, 12 bp, Artificial Sequence
  Oligonucleotide primer for the detection of SNP TSC0000506
aaaggataagga

SEQ ID NO: 267749 - DNA, 12 bp, Artificial Sequence
  Oligonucleotide primer for the detection of SNP TSC0000506
aaaaaacaaaaa

SEQ ID NO: 267750 - DNA, 12 bp, Artificial Sequence
  Oligonucleotide primer for the detection of SNP TSC0000506
ttggtgtttatt

SEQ ID NO: 267751 - DNA, 12 bp, Artificial Sequence
  Oligonucleotide primer for the detection of SNP TSC0000507
aaaaattcctat

SEQ ID NO: 267752 - DNA, 12 bp, Artificial Sequence
  Oligonucleotide primer for the detection of SNP TSC0000507
tagaaagttttg

SEQ ID NO: 267753 - DNA, 12 bp, Artificial Sequence
  Oligonukleotid-Primer
caaaaaacctta

SEQ ID NO: 267754 - DNA, 12 bp, Artificial Sequence
  Oligonucleotide primer for the detection of SNP TSC0000507
aaagatttttgt

SEQ ID NO: 267755 - DNA, 12 bp, Artificial Sequence
  Oligonucleotide primer for the detection of SNP TSC0000508
attatacaaact

SEQ ID NO: 267756 - DNA, 12 bp, Artificial Sequence
  Oligonucleotide primer for the detection of SNP TSC0000508
ggtggggggtta

SEQ ID NO: 267757 - DNA, 12 bp, Artificial Sequence
  Oligonucleotide primer for the detection of SNP TSC0000508
aataaaaaacta

SEQ ID NO: 267758 - DNA, 12 bp, Artificial Sequence
  Oligonucleotide primer for the detection of SNP TSC0000508
gttatgtaggtt

SEQ ID NO: 267759 - DNA, 12 bp, Artificial Sequence
  Oligonucleotide primer for the detection of SNP TSC0000509
aacttccaatct

SEQ ID NO: 267760 - DNA, 12 bp, Artificial Sequence
  Oligonucleotide primer for the detection of SNP TSC0000509
aacttccgatct

SEQ ID NO: 267761 - DNA, 12 bp, Artificial Sequence
  Oligonucleotide primer for the detection of SNP TSC0000509
ggggaggttgag

SEQ ID NO: 267762 - DNA, 12 bp, Artificial Sequence
  Oligonucleotide primer for the detection of SNP TSC0000509
ggggaggtcgag

SEQ ID NO: 267763 - DNA, 12 bp, Artificial Sequence
  Oligonucleotide primer for the detection of SNP TSC0000509
aaaaaaaccaaa

SEQ ID NO: 267764 - DNA, 12 bp, Artificial Sequence
  Oligonucleotide primer for the detection of SNP TSC0000509
aaaaaaaccgaa

SEQ ID NO: 267765 - DNA, 12 bp, Artificial Sequence
  Oligonucleotide primer for the detection of SNP TSC0000509
agtttttgattt

SEQ ID NO: 267766 - DNA, 12 bp, Artificial Sequence
  Oligonucleotide primer for the detection of SNP TSC0000509
agttttcgattt

SEQ ID NO: 267767 - DNA, 12 bp, Artificial Sequence
  Oligonucleotide primer for the detection of SNP TSC0000512
tctatatattaa

SEQ ID NO: 267768 - DNA, 12 bp, Artificial Sequence
  Oligonucleotide primer for the detection of SNP TSC0000512
aaataaattaat

SEQ ID NO: 267769 - DNA, 12 bp, Artificial Sequence
  Oligonucleotide primer for the detection of SNP TSC0000512
aaaacaaattaa

SEQ ID NO: 267770 - DNA, 12 bp, Artificial Sequence
  Oligonucleotide primer for the detection of SNP TSC0000512
ttatgtattgat

SEQ ID NO: 267771 - DNA, 12 bp, Artificial Sequence
  Oligonucleotide primer for the detection of SNP TSC0000513
taaaaaacacat

SEQ ID NO: 267772 - DNA, 12 bp, Artificial Sequence
  Oligonucleotide primer for the detection of SNP TSC0000513
tatttttatgaa

SEQ ID NO: 267773 - DNA, 12 bp, Artificial Sequence
  Oligonucleotide primer for the detection of SNP TSC0000517
tcaaataccctt

SEQ ID NO: 267774 - DNA, 12 bp, Artificial Sequence
  Oligonucleotide primer for the detection of SNP TSC0000517
gaaaggattata

SEQ ID NO: 267775 - DNA, 12 bp, Artificial Sequence
  Oligonucleotide primer for the detection of SNP TSC0000518
atattttaacaa

SEQ ID NO: 267776 - DNA, 12 bp, Artificial Sequence
  Oligonucleotide primer for the detection of SNP TSC0000518
gggatatttatt

SEQ ID NO: 267777 - DNA, 12 bp, Artificial Sequence
  Oligonucleotide primer for the detection of SNP TSC0000518
aaaatactcatc

SEQ ID NO: 267778 - DNA, 12 bp, Artificial Sequence
  Oligonucleotide primer for the detection of SNP TSC0000518
atattttagtag

SEQ ID NO: 267779 - DNA, 12 bp, Artificial Sequence
  Oligonucleotide primer for the detection of SNP TSC0000519
attatatttacc

SEQ ID NO: 267780 - DNA, 12 bp, Artificial Sequence
  Oligonucleotide primer for the detection of SNP TSC0000519
atttgtgggtag

SEQ ID NO: 267781 - DNA, 12 bp, Artificial Sequence
  Oligonucleotide primer for the detection of SNP TSC0000521
tataaaatacca

SEQ ID NO: 267782 - DNA, 12 bp, Artificial Sequence
  Oligonucleotide primer for the detection of SNP TSC0000521
ggttaggagttt

SEQ ID NO: 267783 - DNA, 12 bp, Artificial Sequence
  Oligonucleotide primer for the detection of SNP TSC0000521
aactaaaaattc

SEQ ID NO: 267784 - DNA, 12 bp, Artificial Sequence
  Oligonucleotide primer for the detection of SNP TSC0000521
tatgaaatgtta

SEQ ID NO: 267785 - DNA, 12 bp, Artificial Sequence
  Oligonucleotide primer for the detection of SNP TSC0000522
aaccacactatt

SEQ ID NO: 267786 - DNA, 12 bp, Artificial Sequence
  Oligonucleotide primer for the detection of SNP TSC0000522
gtatattttgat

SEQ ID NO: 267787 - DNA, 12 bp, Artificial Sequence
  Oligonucleotide primer for the detection of SNP TSC0000529
caaaaaaaaata

SEQ ID NO: 267788 - DNA, 12 bp, Artificial Sequence
  Oligonucleotide primer for the detection of SNP TSC0000529
taaatatgtaat

SEQ ID NO: 267789 - DNA, 12 bp, Artificial Sequence
  Oligonucleotide primer for the detection of SNP TSC0000529
taaatatgtaac

SEQ ID NO: 267790 - DNA, 12 bp, Artificial Sequence
  Oligonucleotide primer for the detection of SNP TSC0000529
taaacatacaac

SEQ ID NO: 267791 - DNA, 12 bp, Artificial Sequence
  Oligonucleotide primer for the detection of SNP TSC0000529
ttagaaaaaaat

SEQ ID NO: 267792 - DNA, 12 bp, Artificial Sequence
  Oligonucleotide primer for the detection of SNP TSC0000530
actattcattat

SEQ ID NO: 267793 - DNA, 12 bp, Artificial Sequence
  Oligonucleotide primer for the detection of SNP TSC0000530
ataattttataa

SEQ ID NO: 267794 - DNA, 12 bp, Artificial Sequence
  Oligonucleotide primer for the detection of SNP TSC0000531
acttctcttttc

SEQ ID NO: 267795 - DNA, 12 bp, Artificial Sequence
  Oligonucleotide primer for the detection of SNP TSC0000531
gttttttgagga

SEQ ID NO: 267796 - DNA, 12 bp, Artificial Sequence
  Oligonucleotide primer for the detection of SNP TSC0000541
actttctaacat

SEQ ID NO: 267797 - DNA, 12 bp, Artificial Sequence
  Oligonucleotide primer for the detection of SNP TSC0000541
tattaagatata

SEQ ID NO: 267798 - DNA, 12 bp, Artificial Sequence
  Oligonucleotide primer for the detection of SNP TSC0000543
ataaaatacaac

SEQ ID NO: 267799 - DNA, 12 bp, Artificial Sequence
  Oligonucleotide primer for the detection of SNP TSC0000543
atgataaatttg

SEQ ID NO: 267800 - DNA, 12 bp, Artificial Sequence
  Oligonucleotide primer for the detection of SNP TSC0000544
aaaaaatttttt

SEQ ID NO: 267801 - DNA, 12 bp, Artificial Sequence
  Oligonucleotide primer for the detection of SNP TSC0000544
tttttaaagaat

SEQ ID NO: 267802 - DNA, 12 bp, Artificial Sequence
  Oligonucleotide primer for the detection of SNP TSC0000544
ttttcaaaaaat

SEQ ID NO: 267803 - DNA, 12 bp, Artificial Sequence
  Oligonucleotide primer for the detection of SNP TSC0000544
aaagaatttttt

SEQ ID NO: 267804 - DNA, 12 bp, Artificial Sequence
  Oligonucleotide primer for the detection of SNP TSC0000556
cttattctcaat

SEQ ID NO: 267805 - DNA, 12 bp, Artificial Sequence
  Oligonucleotide primer for the detection of SNP TSC0000556
aaagataaataa

SEQ ID NO: 267806 - DNA, 12 bp, Artificial Sequence
  Oligonucleotide primer for the detection of SNP TSC0000566
aaaaaaccctac

SEQ ID NO: 267807 - DNA, 12 bp, Artificial Sequence
  Oligonucleotide primer for the detection of SNP TSC0000566
aggtgtgtaggg

SEQ ID NO: 267808 - DNA, 12 bp, Artificial Sequence
  Oligonucleotide primer for the detection of SNP TSC0000567
aatataatattt

SEQ ID NO: 267809 - DNA, 12 bp, Artificial Sequence
  Oligonucleotide primer for the detection of SNP TSC0000567
ttttatttggta

SEQ ID NO: 267810 - DNA, 12 bp, Artificial Sequence
  Oligonucleotide primer for the detection of SNP TSC0000568
acaaactcacat

SEQ ID NO: 267811 - DNA, 12 bp, Artificial Sequence
  Oligonucleotide primer for the detection of SNP TSC0000568
acaaactcacgt

SEQ ID NO: 267812 - DNA, 12 bp, Artificial Sequence
  Oligonucleotide primer for the detection of SNP TSC0000568
taaagatttttg

SEQ ID NO: 267813 - DNA, 12 bp, Artificial Sequence
  Oligonucleotide primer for the detection of SNP TSC0000574
acaaaacaaaat

SEQ ID NO: 267814 - DNA, 12 bp, Artificial Sequence
  Oligonucleotide primer for the detection of SNP TSC0000574
acgaaacaaaat

SEQ ID NO: 267815 - DNA, 12 bp, Artificial Sequence
  Oligonucleotide primer for the detection of SNP TSC0000574
attaataattta

SEQ ID NO: 267816 - DNA, 12 bp, Artificial Sequence
  Oligonucleotide primer for the detection of SNP TSC0000575
caacttttctac

SEQ ID NO: 267817 - DNA, 12 bp, Artificial Sequence
  Oligonucleotide primer for the detection of SNP TSC0000575
tttattttgttt

SEQ ID NO: 267818 - DNA, 12 bp, Artificial Sequence
  Oligonucleotide primer for the detection of SNP TSC0000575
atatccatccta

SEQ ID NO: 267819 - DNA, 12 bp, Artificial Sequence
  Oligonucleotide primer for the detection of SNP TSC0000575
tagtttttttgt

SEQ ID NO: 267820 - DNA, 12 bp, Artificial Sequence
  Oligonucleotide primer for the detection of SNP TSC0000575
tagtttttttgc

SEQ ID NO: 267821 - DNA, 12 bp, Artificial Sequence
  Oligonucleotide primer for the detection of SNP TSC0000576
cacaactcctac

SEQ ID NO: 267822 - DNA, 12 bp, Artificial Sequence
  Oligonucleotide primer for the detection of SNP TSC0000576
tattgggaggtg

SEQ ID NO: 267823 - DNA, 12 bp, Artificial Sequence
  Oligonucleotide primer for the detection of SNP TSC0000579
aatacccccttc

SEQ ID NO: 267824 - DNA, 12 bp, Artificial Sequence
  Oligonucleotide primer for the detection of SNP TSC0000579
aaattggtatta

SEQ ID NO: 267825 - DNA, 12 bp, Artificial Sequence
  Oligonucleotide primer for the detection of SNP TSC0000581
taccactacatt

SEQ ID NO: 267826 - DNA, 12 bp, Artificial Sequence
  Oligonucleotide primer for the detection of SNP TSC0000581
gtttaggttttg

SEQ ID NO: 267827 - DNA, 12 bp, Artificial Sequence
  Oligonucleotide primer for the detection of SNP TSC0000584
aatcacataaaa

SEQ ID NO: 267828 - DNA, 12 bp, Artificial Sequence
  Oligonucleotide primer for the detection of SNP TSC0000584
ttagatttttat

SEQ ID NO: 267829 - DNA, 12 bp, Artificial Sequence
  Oligonucleotide primer for the detection of SNP TSC0000584
tcaaatttttat

SEQ ID NO: 267830 - DNA, 12 bp, Artificial Sequence
  Oligonucleotide primer for the detection of SNP TSC0000584
aggttatatgaa

SEQ ID NO: 267831 - DNA, 12 bp, Artificial Sequence
  Oligonucleotide primer for the detection of SNP TSC0000585
ttactatctcct

SEQ ID NO: 267832 - DNA, 12 bp, Artificial Sequence
  Oligonucleotide primer for the detection of SNP TSC0000585
taaaaatgttaa

SEQ ID NO: 267833 - DNA, 12 bp, Artificial Sequence
  unsure (1): Oligonucleotide primer for the detection of SNP TSC0000588
nactactaccct

SEQ ID NO: 267834 - DNA, 12 bp, Artificial Sequence
  Oligonucleotide primer for the detection of SNP TSC0000588
ggggaaggagaa

SEQ ID NO: 267835 - DNA, 12 bp, Artificial Sequence
  Oligonucleotide primer for the detection of SNP TSC0000588
aaaaaaaaaaaa

SEQ ID NO: 267836 - DNA, 12 bp, Artificial Sequence
  unsure (1): Oligonucleotide primer for the detection of SNP TSC0000588
ngttgttgtttt

SEQ ID NO: 267837 - DNA, 12 bp, Artificial Sequence
  Oligonucleotide primer for the detection of SNP TSC0000590
caacaaattcta

SEQ ID NO: 267838 - DNA, 12 bp, Artificial Sequence
  Oligonucleotide primer for the detection of SNP TSC0000590
gtggttttagtt

SEQ ID NO: 267839 - DNA, 12 bp, Artificial Sequence
  Oligonucleotide primer for the detection of SNP TSC0000590
ataatctcaact

SEQ ID NO: 267840 - DNA, 12 bp, Artificial Sequence
  Oligonucleotide primer for the detection of SNP TSC0000590
taataagttttg

SEQ ID NO: 267841 - DNA, 12 bp, Artificial Sequence
  Oligonucleotide primer for the detection of SNP TSC0000591
ttttctatatta

SEQ ID NO: 267842 - DNA, 12 bp, Artificial Sequence
  Oligonucleotide primer for the detection of SNP TSC0000591
tggtagtgtgat

SEQ ID NO: 267843 - DNA, 12 bp, Artificial Sequence
  Oligonucleotide primer for the detection of SNP TSC0000591
taacaatataac

SEQ ID NO: 267844 - DNA, 12 bp, Artificial Sequence
  Oligonucleotide primer for the detection of SNP TSC0000591
ttttttgtatta

SEQ ID NO: 267845 - DNA, 12 bp, Artificial Sequence
  Oligonucleotide primer for the detection of SNP TSC0000595
attctaaaaaat

SEQ ID NO: 267846 - DNA, 12 bp, Artificial Sequence
  Oligonukleotid-Primer
attaatttagag

SEQ ID NO: 267847 - DNA, 12 bp, Artificial Sequence
  Oligonucleotide primer for the detection of SNP TSC0000596
ataccttaaatt

SEQ ID NO: 267848 - DNA, 12 bp, Artificial Sequence
  Oligonucleotide primer for the detection of SNP TSC0000596
tagatatggtgg

SEQ ID NO: 267849 - DNA, 12 bp, Artificial Sequence
  Oligonucleotide primer for the detection of SNP TSC0000599
aacatccttttt

SEQ ID NO: 267850 - DNA, 12 bp, Artificial Sequence
  Oligonukleotid-Primer
aagaaattttta

SEQ ID NO: 267851 - DNA, 12 bp, Artificial Sequence
  Oligonucleotide primer for the detection of SNP TSC0000600
taaaattaccac

SEQ ID NO: 267852 - DNA, 12 bp, Artificial Sequence
  Oligonucleotide primer for the detection of SNP TSC0000600
taaaattaccgc

SEQ ID NO: 267853 - DNA, 12 bp, Artificial Sequence
  Oligonucleotide primer for the detection of SNP TSC0000600
atatttaggaga

SEQ ID NO: 267854 - DNA, 12 bp, Artificial Sequence
  Oligonukleotid-Primer
ccaactcttaaa

SEQ ID NO: 267855 - DNA, 12 bp, Artificial Sequence
  Oligonucleotide primer for the detection of SNP TSC0000601
aaaaatttagtt

SEQ ID NO: 267856 - DNA, 12 bp, Artificial Sequence
  Oligonucleotide primer for the detection of SNP TSC0000601
aaatctaattaa

SEQ ID NO: 267857 - DNA, 12 bp, Artificial Sequence
  Oligonucleotide primer for the detection of SNP TSC0000601
ttaatttttgag

SEQ ID NO: 267858 - DNA, 12 bp, Artificial Sequence
  Oligonucleotide primer for the detection of SNP TSC0000602
ttacaataatat

SEQ ID NO: 267859 - DNA, 12 bp, Artificial Sequence
  Oligonucleotide primer for the detection of SNP TSC0000602
ttacgataatat

SEQ ID NO: 267860 - DNA, 12 bp, Artificial Sequence
  Oligonucleotide primer for the detection of SNP TSC0000602
ttagagagatat

SEQ ID NO: 267861 - DNA, 12 bp, Artificial Sequence
  Oligonucleotide primer for the detection of SNP TSC0000602
ttcaaaaaaaca

SEQ ID NO: 267862 - DNA, 12 bp, Artificial Sequence
  Oligonucleotide primer for the detection of SNP TSC0000602
tgtgatggtgtt

SEQ ID NO: 267863 - DNA, 12 bp, Artificial Sequence
  Oligonucleotide primer for the detection of SNP TSC0000602
tgcgatggtgtt

SEQ ID NO: 267864 - DNA, 12 bp, Artificial Sequence
  Oligonucleotide primer for the detection of SNP TSC0000603
aaaccaatatta

SEQ ID NO: 267865 - DNA, 12 bp, Artificial Sequence
  Oligonucleotide primer for the detection of SNP TSC0000603
attttttagaat

SEQ ID NO: 267866 - DNA, 12 bp, Artificial Sequence
  Oligonucleotide primer for the detection of SNP TSC0000603
atctcttaaaat

SEQ ID NO: 267867 - DNA, 12 bp, Artificial Sequence
  Oligonucleotide primer for the detection of SNP TSC0000603
gagttaatgtta

SEQ ID NO: 267868 - DNA, 12 bp, Artificial Sequence
  Oligonucleotide primer for the detection of SNP TSC0000618
ctacaaaacaac

SEQ ID NO: 267869 - DNA, 12 bp, Artificial Sequence
  Oligonucleotide primer for the detection of SNP TSC0000618
ctacgaaacaac

SEQ ID NO: 267870 - DNA, 12 bp, Artificial Sequence
  Oligonucleotide primer for the detection of SNP TSC0000618
gaagatgtgtgg

SEQ ID NO: 267871 - DNA, 12 bp, Artificial Sequence
  Oligonucleotide primer for the detection of SNP TSC0000618
gaagacgtgtgg

SEQ ID NO: 267872 - DNA, 12 bp, Artificial Sequence
  Oligonucleotide primer for the detection of SNP TSC0000618
aaaaacatataa

SEQ ID NO: 267873 - DNA, 12 bp, Artificial Sequence
  Oligonucleotide primer for the detection of SNP TSC0000618
aaaaacgtataa

SEQ ID NO: 267874 - DNA, 12 bp, Artificial Sequence
  Oligonucleotide primer for the detection of SNP TSC0000618
ttgtgaggtagt

SEQ ID NO: 267875 - DNA, 12 bp, Artificial Sequence
  Oligonucleotide primer for the detection of SNP TSC0000618
ttgcgaggtagt

SEQ ID NO: 267876 - DNA, 12 bp, Artificial Sequence
  Oligonucleotide primer for the detection of SNP TSC0000625
aacaaatataac

SEQ ID NO: 267877 - DNA, 12 bp, Artificial Sequence
  Oligonucleotide primer for the detection of SNP TSC0000625
tttgagggtagg

SEQ ID NO: 267878 - DNA, 12 bp, Artificial Sequence
  Oligonucleotide primer for the detection of SNP TSC0000627
acacaacttctc

SEQ ID NO: 267879 - DNA, 12 bp, Artificial Sequence
  Oligonucleotide primer for the detection of SNP TSC0000627
gattgggtaagg

SEQ ID NO: 267880 - DNA, 12 bp, Artificial Sequence
  Oligonucleotide primer for the detection of SNP TSC0000629
taataataaata

SEQ ID NO: 267881 - DNA, 12 bp, Artificial Sequence
  Oligonucleotide primer for the detection of SNP TSC0000629
taggtatttttt

SEQ ID NO: 267882 - DNA, 12 bp, Artificial Sequence
  Oligonucleotide primer for the detection of SNP TSC0000629
caaacattttct

SEQ ID NO: 267883 - DNA, 12 bp, Artificial Sequence
  Oligonucleotide primer for the detection of SNP TSC0000629
tagtggtgaatg

SEQ ID NO: 267884 - DNA, 12 bp, Artificial Sequence
  Oligonucleotide primer for the detection of SNP TSC0000632
aaacaattcttt

SEQ ID NO: 267885 - DNA, 12 bp, Artificial Sequence
  Oligonucleotide primer for the detection of SNP TSC0000632
gtttttatgttg

SEQ ID NO: 267886 - DNA, 12 bp, Artificial Sequence
  Oligonucleotide primer for the detection of SNP TSC0000634
taactaattttt

SEQ ID NO: 267887 - DNA, 12 bp, Artificial Sequence
  Oligonucleotide primer for the detection of SNP TSC0000634
tggttaattttt

SEQ ID NO: 267888 - DNA, 12 bp, Artificial Sequence
  Oligonucleotide primer for the detection of SNP TSC0000635
taccaccatacc

SEQ ID NO: 267889 - DNA, 12 bp, Artificial Sequence
  Oligonucleotide primer for the detection of SNP TSC0000635
aaaaaaaattag

SEQ ID NO: 267890 - DNA, 12 bp, Artificial Sequence
  Oligonucleotide primer for the detection of SNP TSC0000635
aaaaaaaattaa

SEQ ID NO: 267891 - DNA, 12 bp, Artificial Sequence
  Oligonucleotide primer for the detection of SNP TSC0000635
tgttattatgtt

SEQ ID NO: 267892 - DNA, 12 bp, Artificial Sequence
  Oligonucleotide primer for the detection of SNP TSC0000636
ataattctccta

SEQ ID NO: 267893 - DNA, 12 bp, Artificial Sequence
  Oligonucleotide primer for the detection of SNP TSC0000636
atttaagaggtt

SEQ ID NO: 267894 - DNA, 12 bp, Artificial Sequence
  Oligonucleotide primer for the detection of SNP TSC0000636
ctcaaaaaacta

SEQ ID NO: 267895 - DNA, 12 bp, Artificial Sequence
  Oligonucleotide primer for the detection of SNP TSC0000636
gatttttttgtt

SEQ ID NO: 267896 - DNA, 12 bp, Artificial Sequence
  Oligonucleotide primer for the detection of SNP TSC0000643
aaatatttatcc

SEQ ID NO: 267897 - DNA, 12 bp, Artificial Sequence
  Oligonucleotide primer for the detection of SNP TSC0000643
aggtaaaagatg

SEQ ID NO: 267898 - DNA, 12 bp, Artificial Sequence
  Oligonucleotide primer for the detection of SNP TSC0000644
cactttacaatt

SEQ ID NO: 267899 - DNA, 12 bp, Artificial Sequence
  Oligonucleotide primer for the detection of SNP TSC0000644
attatgttataa

SEQ ID NO: 267900 - DNA, 12 bp, Artificial Sequence
  Oligonucleotide primer for the detection of SNP TSC0000645
ttatatctacta

SEQ ID NO: 267901 - DNA, 12 bp, Artificial Sequence
  Oligonucleotide primer for the detection of SNP TSC0000645
aatagaggatat

SEQ ID NO: 267902 - DNA, 12 bp, Artificial Sequence
  Oligonucleotide primer for the detection of SNP TSC0000645
aaaaaatacaaa

SEQ ID NO: 267903 - DNA, 12 bp, Artificial Sequence
  Oligonucleotide primer for the detection of SNP TSC0000645
tttatatttgtt

SEQ ID NO: 267904 - DNA, 12 bp, Artificial Sequence
  Oligonucleotide primer for the detection of SNP TSC0000655
atatataaatat

SEQ ID NO: 267905 - DNA, 12 bp, Artificial Sequence
  Oligonucleotide primer for the detection of SNP TSC0000655
gtttttttttag

SEQ ID NO: 267906 - DNA, 12 bp, Artificial Sequence
  Oligonucleotide primer for the detection of SNP TSC0000655
acttttctctaa

SEQ ID NO: 267907 - DNA, 12 bp, Artificial Sequence
  Oligonucleotide primer for the detection of SNP TSC0000655
atatgtaaatat

SEQ ID NO: 267908 - DNA, 12 bp, Artificial Sequence
  Oligonucleotide primer for the detection of SNP TSC0000674
ggaagttgtgtt

SEQ ID NO: 267909 - DNA, 12 bp, Artificial Sequence
  Oligonucleotide primer for the detection of SNP TSC0000674
aaaaaattatac

SEQ ID NO: 267910 - DNA, 12 bp, Artificial Sequence
  Oligonucleotide primer for the detection of SNP TSC0000674
aagaaagaaaag

SEQ ID NO: 267911 - DNA, 12 bp, Artificial Sequence
  Oligonucleotide primer for the detection of SNP TSC0000675
ataaccataacc

SEQ ID NO: 267912 - DNA, 12 bp, Artificial Sequence
  Oligonucleotide primer for the detection of SNP TSC0000675
ttttttatgaaa

SEQ ID NO: 267913 - DNA, 12 bp, Artificial Sequence
  Oligonucleotide primer for the detection of SNP TSC0000675
tccctcataaaa

SEQ ID NO: 267914 - DNA, 12 bp, Artificial Sequence
  Oligonucleotide primer for the detection of SNP TSC0000675
atagttatggtt

SEQ ID NO: 267915 - DNA, 12 bp, Artificial Sequence
  Oligonucleotide primer for the detection of SNP TSC0000689
ataaaaaattaa

SEQ ID NO: 267916 - DNA, 12 bp, Artificial Sequence
  Oligonucleotide primer for the detection of SNP TSC0000689
ttattttttatt

SEQ ID NO: 267917 - DNA, 12 bp, Artificial Sequence
  Oligonucleotide primer for the detection of SNP TSC0000689
tacctctcatta

SEQ ID NO: 267918 - DNA, 12 bp, Artificial Sequence
  Oligonucleotide primer for the detection of SNP TSC0000689
gtggaggattaa

SEQ ID NO: 267919 - DNA, 12 bp, Artificial Sequence
  Oligonucleotide primer for the detection of SNP TSC0000690
tctaaatttaat

SEQ ID NO: 267920 - DNA, 12 bp, Artificial Sequence
  Oligonucleotide primer for the detection of SNP TSC0000690
tattggtttagg

SEQ ID NO: 267921 - DNA, 12 bp, Artificial Sequence
  Oligonucleotide primer for the detection of SNP TSC0000700
aaatcattaaat

SEQ ID NO: 267922 - DNA, 12 bp, Artificial Sequence
  Oligonucleotide primer for the detection of SNP TSC0000700
gattaagttttt

SEQ ID NO: 267923 - DNA, 12 bp, Artificial Sequence
  Oligonucleotide primer for the detection of SNP TSC0000700
ttaaatttctaa

SEQ ID NO: 267924 - DNA, 12 bp, Artificial Sequence
  Oligonucleotide primer for the detection of SNP TSC0000700
aaattattaagt

SEQ ID NO: 267925 - DNA, 12 bp, Artificial Sequence
  Oligonucleotide primer for the detection of SNP TSC0000701
ttaaatattaac

SEQ ID NO: 267926 - DNA, 12 bp, Artificial Sequence
  Oligonucleotide primer for the detection of SNP TSC0000701
ttttttttgtaa

SEQ ID NO: 267927 - DNA, 12 bp, Artificial Sequence
  Oligonucleotide primer for the detection of SNP TSC0000703
tttttctttctt

SEQ ID NO: 267928 - DNA, 12 bp, Artificial Sequence
  Oligonucleotide primer for the detection of SNP TSC0000703
ttttaaagtatt

SEQ ID NO: 267929 - DNA, 12 bp, Artificial Sequence
  Oligonucleotide primer for the detection of SNP TSC0000703
tttaaaatacta

SEQ ID NO: 267930 - DNA, 12 bp, Artificial Sequence
  Oligonucleotide primer for the detection of SNP TSC0000703
tttttttttttt

SEQ ID NO: 267931 - DNA, 12 bp, Artificial Sequence
  Oligonukleotid-Primer
atatcttccaac

SEQ ID NO: 267932 - DNA, 12 bp, Artificial Sequence
  Oligonucleotide primer for the detection of SNP TSC0000704
atggtaagagaa

SEQ ID NO: 267933 - DNA, 12 bp, Artificial Sequence
  Oligonucleotide primer for the detection of SNP TSC0000710
ccactcccattc

SEQ ID NO: 267934 - DNA, 12 bp, Artificial Sequence
  Oligonucleotide primer for the detection of SNP TSC0000710
tatattatatgg

SEQ ID NO: 267935 - DNA, 12 bp, Artificial Sequence
  Oligonucleotide primer for the detection of SNP TSC0000710
cacatcacataa

SEQ ID NO: 267936 - DNA, 12 bp, Artificial Sequence
  Oligonucleotide primer for the detection of SNP TSC0000710
ttatttttattt

SEQ ID NO: 267937 - DNA, 12 bp, Artificial Sequence
  Oligonucleotide primer for the detection of SNP TSC0000711
caaataccatca

SEQ ID NO: 267938 - DNA, 12 bp, Artificial Sequence
  Oligonucleotide primer for the detection of SNP TSC0000711
caaataccgtca

SEQ ID NO: 267939 - DNA, 12 bp, Artificial Sequence
  Oligonucleotide primer for the detection of SNP TSC0000711
atagttttgtag

SEQ ID NO: 267940 - DNA, 12 bp, Artificial Sequence
  Oligonucleotide primer for the detection of SNP TSC0000711
ataactctacaa

SEQ ID NO: 267941 - DNA, 12 bp, Artificial Sequence
  Oligonucleotide primer for the detection of SNP TSC0000711
tagatgttgtta

SEQ ID NO: 267942 - DNA, 12 bp, Artificial Sequence
  Oligonucleotide primer for the detection of SNP TSC0000711
tagatgtcgtta

SEQ ID NO: 267943 - DNA, 12 bp, Artificial Sequence
  Oligonucleotide primer for the detection of SNP TSC0000712
attaacttaaaa

SEQ ID NO: 267944 - DNA, 12 bp, Artificial Sequence
  Oligonucleotide primer for the detection of SNP TSC0000712
aaatagaattat

SEQ ID NO: 267945 - DNA, 12 bp, Artificial Sequence
  Oligonucleotide primer for the detection of SNP TSC0000712
aaatagaattac

SEQ ID NO: 267946 - DNA, 12 bp, Artificial Sequence
  Oligonucleotide primer for the detection of SNP TSC0000712
aaataaaattac

SEQ ID NO: 267947 - DNA, 12 bp, Artificial Sequence
  Oligonucleotide primer for the detection of SNP TSC0000712
attgttggtttg

SEQ ID NO: 267948 - DNA, 12 bp, Artificial Sequence
  Oligonucleotide primer for the detection of SNP TSC0000713
tataaaatctcc

SEQ ID NO: 267949 - DNA, 12 bp, Artificial Sequence
  Oligonucleotide primer for the detection of SNP TSC0000713
agattttataga

SEQ ID NO: 267950 - DNA, 12 bp, Artificial Sequence
  Oligonucleotide primer for the detection of SNP TSC0000714
ttaatccaatcc

SEQ ID NO: 267951 - DNA, 12 bp, Artificial Sequence
  Oligonucleotide primer for the detection of SNP TSC0000714
tgtttattaata

SEQ ID NO: 267952 - DNA, 12 bp, Artificial Sequence
  Oligonucleotide primer for the detection of SNP TSC0000715
aataaaataact

SEQ ID NO: 267953 - DNA, 12 bp, Artificial Sequence
  Oligonucleotide primer for the detection of SNP TSC0000715
gatttaaagaaa

SEQ ID NO: 267954 - DNA, 12 bp, Artificial Sequence
  Oligonucleotide primer for the detection of SNP TSC0000725
atacctaaaaca

SEQ ID NO: 267955 - DNA, 12 bp, Artificial Sequence
  Oligonucleotide primer for the detection of SNP TSC0000725
gtttgggttagt

SEQ ID NO: 267956 - DNA, 12 bp, Artificial Sequence
  Oligonucleotide primer for the detection of SNP TSC0000725
acctaaaccaac

SEQ ID NO: 267957 - DNA, 12 bp, Artificial Sequence
  Oligonucleotide primer for the detection of SNP TSC0000725
atgtttgaaata

SEQ ID NO: 267958 - DNA, 12 bp, Artificial Sequence
  Oligonucleotide primer for the detection of SNP TSC0000732
atacttaacctc

SEQ ID NO: 267959 - DNA, 12 bp, Artificial Sequence
  Oligonucleotide primer for the detection of SNP TSC0000732
ttattagaattt

SEQ ID NO: 267960 - DNA, 12 bp, Artificial Sequence
  Oligonucleotide primer for the detection of SNP TSC0000732
actaaaacttaa

SEQ ID NO: 267961 - DNA, 12 bp, Artificial Sequence
  Oligonucleotide primer for the detection of SNP TSC0000732
atatttaatttt

SEQ ID NO: 267962 - DNA, 12 bp, Artificial Sequence
  Oligonucleotide primer for the detection of SNP TSC0000736
ttttatattatt

SEQ ID NO: 267963 - DNA, 12 bp, Artificial Sequence
  Oligonucleotide primer for the detection of SNP TSC0000736
tatataaagaga

SEQ ID NO: 267964 - DNA, 12 bp, Artificial Sequence
  Oligonucleotide primer for the detection of SNP TSC0000736
cacaaaaaaaaa

SEQ ID NO: 267965 - DNA, 12 bp, Artificial Sequence
  Oligonucleotide primer for the detection of SNP TSC0000736
ttttgtgttgtt

SEQ ID NO: 267966 - DNA, 12 bp, Artificial Sequence
  Oligonucleotide primer for the detection of SNP TSC0000738
tacactcattac

SEQ ID NO: 267967 - DNA, 12 bp, Artificial Sequence
  Oligonucleotide primer for the detection of SNP TSC0000738
tgatttgttgag

SEQ ID NO: 267968 - DNA, 12 bp, Artificial Sequence
  Oligonucleotide primer for the detection of SNP TSC0000738
taatttattaaa

SEQ ID NO: 267969 - DNA, 12 bp, Artificial Sequence
  Oligonucleotide primer for the detection of SNP TSC0000738
tgtatttattgt

SEQ ID NO: 267970 - DNA, 12 bp, Artificial Sequence
  Oligonucleotide primer for the detection of SNP TSC0000747
atatttcttttc

SEQ ID NO: 267971 - DNA, 12 bp, Artificial Sequence
  Oligonucleotide primer for the detection of SNP TSC0000747
tagtaaaaagaa

SEQ ID NO: 267972 - DNA, 12 bp, Artificial Sequence
  Oligonucleotide primer for the detection of SNP TSC0000749
aaaaaactcaaa

SEQ ID NO: 267973 - DNA, 12 bp, Artificial Sequence
  Oligonucleotide primer for the detection of SNP TSC0000749
atattatattta

SEQ ID NO: 267974 - DNA, 12 bp, Artificial Sequence
  Oligonucleotide primer for the detection of SNP TSC0000749
atattacaccta

SEQ ID NO: 267975 - DNA, 12 bp, Artificial Sequence
  Oligonucleotide primer for the detection of SNP TSC0000749
aaagatttaaat

SEQ ID NO: 267976 - DNA, 12 bp, Artificial Sequence
  Oligonucleotide primer for the detection of SNP TSC0000750
ttacaataaatc

SEQ ID NO: 267977 - DNA, 12 bp, Artificial Sequence
  Oligonucleotide primer for the detection of SNP TSC0000750
gggtttattttg

SEQ ID NO: 267978 - DNA, 12 bp, Artificial Sequence
  Oligonucleotide primer for the detection of SNP TSC0000750
gggtttatttcg

SEQ ID NO: 267979 - DNA, 12 bp, Artificial Sequence
  Oligonucleotide primer for the detection of SNP TSC0000755
aacctctttcct

SEQ ID NO: 267980 - DNA, 12 bp, Artificial Sequence
  Oligonucleotide primer for the detection of SNP TSC0000755
gggtaatttata

SEQ ID NO: 267981 - DNA, 12 bp, Artificial Sequence
  Oligonucleotide primer for the detection of SNP TSC0000755
aaataatttata

SEQ ID NO: 267982 - DNA, 12 bp, Artificial Sequence
  Oligonucleotide primer for the detection of SNP TSC0000755
aatttttttttt

SEQ ID NO: 267983 - DNA, 12 bp, Artificial Sequence
  Oligonucleotide primer for the detection of SNP TSC0000757
aaaacaatccct

SEQ ID NO: 267984 - DNA, 12 bp, Artificial Sequence
  Oligonucleotide primer for the detection of SNP TSC0000757
ttttagagagaa

SEQ ID NO: 267985 - DNA, 12 bp, Artificial Sequence
  Oligonucleotide primer for the detection of SNP TSC0000760
tacaattacaat

SEQ ID NO: 267986 - DNA, 12 bp, Artificial Sequence
  Oligonucleotide primer for the detection of SNP TSC0000760
tacgattacaat

SEQ ID NO: 267987 - DNA, 12 bp, Artificial Sequence
  Oligonucleotide primer for the detection of SNP TSC0000760
atgtggttgaaa

SEQ ID NO: 267988 - DNA, 12 bp, Artificial Sequence
  Oligonucleotide primer for the detection of SNP TSC0000762
accctaatatat

SEQ ID NO: 267989 - DNA, 12 bp, Artificial Sequence
  Oligonucleotide primer for the detection of SNP TSC0000762
atatataaaggg

SEQ ID NO: 267990 - DNA, 12 bp, Artificial Sequence
  Oligonucleotide primer for the detection of SNP TSC0000769
aaaaattaaacc

SEQ ID NO: 267991 - DNA, 12 bp, Artificial Sequence
  Oligonucleotide primer for the detection of SNP TSC0000769
ttttttggattt

SEQ ID NO: 267992 - DNA, 12 bp, Artificial Sequence
  Oligonucleotide primer for the detection of SNP TSC0000769
atctttctaaac

SEQ ID NO: 267993 - DNA, 12 bp, Artificial Sequence
  Oligonucleotide primer for the detection of SNP TSC0000769
aaaattagattt

SEQ ID NO: 267994 - DNA, 12 bp, Artificial Sequence
  Oligonucleotide primer for the detection of SNP TSC0000772
atactaactatt

SEQ ID NO: 267995 - DNA, 12 bp, Artificial Sequence
  Oligonucleotide primer for the detection of SNP TSC0000772
atatagtaaaag

SEQ ID NO: 267996 - DNA, 12 bp, Artificial Sequence
  Oligonucleotide primer for the detection of SNP TSC0000778
cattattatact

SEQ ID NO: 267997 - DNA, 12 bp, Artificial Sequence
  Oligonucleotide primer for the detection of SNP TSC0000778
agtatttttata

SEQ ID NO: 267998 - DNA, 12 bp, Artificial Sequence
  Oligonucleotide primer for the detection of SNP TSC0000784
cctctcaaaaac

SEQ ID NO: 267999 - DNA, 12 bp, Artificial Sequence
  Oligonucleotide primer for the detection of SNP TSC0000784
attggtttatta

SEQ ID NO: 268000 - DNA, 12 bp, Artificial Sequence
  Oligonucleotide primer for the detection of SNP TSC0000784
atcggtttatta

SEQ ID NO: 268001 - DNA, 12 bp, Artificial Sequence
  Oligonucleotide primer for the detection of SNP TSC0000785
aacttacctaac

SEQ ID NO: 268002 - DNA, 12 bp, Artificial Sequence
  Oligonucleotide primer for the detection of SNP TSC0000785
ttgatttgatag

SEQ ID NO: 268003 - DNA, 12 bp, Artificial Sequence
  Oligonucleotide primer for the detection of SNP TSC0000794
ttataatttctc

SEQ ID NO: 268004 - DNA, 12 bp, Artificial Sequence
  Oligonucleotide primer for the detection of SNP TSC0000794
ttaataaataaa

SEQ ID NO: 268005 - DNA, 12 bp, Artificial Sequence
  Oligonucleotide primer for the detection of SNP TSC0000794
ccaacaaataaa

SEQ ID NO: 268006 - DNA, 12 bp, Artificial Sequence
  Oligonucleotide primer for the detection of SNP TSC0000794
ttgtgatttttt

SEQ ID NO: 268007 - DNA, 12 bp, Artificial Sequence
  Oligonucleotide primer for the detection of SNP TSC0000795
tacatatacctt

SEQ ID NO: 268008 - DNA, 12 bp, Artificial Sequence
  Oligonucleotide primer for the detection of SNP TSC0000795
tacgtatacctt

SEQ ID NO: 268009 - DNA, 12 bp, Artificial Sequence
  Oligonucleotide primer for the detection of SNP TSC0000795
attgagtattta

SEQ ID NO: 268010 - DNA, 12 bp, Artificial Sequence
  Oligonucleotide primer for the detection of SNP TSC0000795
atcgagtattta

SEQ ID NO: 268011 - DNA, 12 bp, Artificial Sequence
  Oligonucleotide primer for the detection of SNP TSC0000796
aacaaaaacaac

SEQ ID NO: 268012 - DNA, 12 bp, Artificial Sequence
  Oligonucleotide primer for the detection of SNP TSC0000796
gtaggggaggga

SEQ ID NO: 268013 - DNA, 12 bp, Artificial Sequence
  Oligonucleotide primer for the detection of SNP TSC0000799
caaaaaaaacat

SEQ ID NO: 268014 - DNA, 12 bp, Artificial Sequence
  Oligonucleotide primer for the detection of SNP TSC0000799
tttaatttataa

SEQ ID NO: 268015 - DNA, 12 bp, Artificial Sequence
  Oligonucleotide primer for the detection of SNP TSC0000800
atatttataaac

SEQ ID NO: 268016 - DNA, 12 bp, Artificial Sequence
  Oligonucleotide primer for the detection of SNP TSC0000800
tatgaagaaaaa

SEQ ID NO: 268017 - DNA, 12 bp, Artificial Sequence
  Oligonucleotide primer for the detection of SNP TSC0000809
acattcatatct

SEQ ID NO: 268018 - DNA, 12 bp, Artificial Sequence
  Oligonucleotide primer for the detection of SNP TSC0000809
acgttcatatct

SEQ ID NO: 268019 - DNA, 12 bp, Artificial Sequence
  Oligonucleotide primer for the detection of SNP TSC0000809
tatgtttaaata

SEQ ID NO: 268020 - DNA, 12 bp, Artificial Sequence
  Oligonucleotide primer for the detection of SNP TSC0000810
aacaaatataaa

SEQ ID NO: 268021 - DNA, 12 bp, Artificial Sequence
  Oligonucleotide primer for the detection of SNP TSC0000810
atggtatatgat

SEQ ID NO: 268022 - DNA, 12 bp, Artificial Sequence
  Oligonucleotide primer for the detection of SNP TSC0000810
ataatacataat

SEQ ID NO: 268023 - DNA, 12 bp, Artificial Sequence
  Oligonucleotide primer for the detection of SNP TSC0000810
agtagatatgaa

SEQ ID NO: 268024 - DNA, 12 bp, Artificial Sequence
  Oligonukleotid-Primer
tctctacacatt

SEQ ID NO: 268025 - DNA, 12 bp, Artificial Sequence
  Oligonucleotide primer for the detection of SNP TSC0000811
gaattatttgga

SEQ ID NO: 268026 - DNA, 12 bp, Artificial Sequence
  Oligonucleotide primer for the detection of SNP TSC0000815
acacctcaaatt

SEQ ID NO: 268027 - DNA, 12 bp, Artificial Sequence
  Oligonucleotide primer for the detection of SNP TSC0000815
acacctcgaatt

SEQ ID NO: 268028 - DNA, 12 bp, Artificial Sequence
  Oligonucleotide primer for the detection of SNP TSC0000815
tttattattaga

SEQ ID NO: 268029 - DNA, 12 bp, Artificial Sequence
  Oligonucleotide primer for the detection of SNP TSC0000815
tttatcattaaa

SEQ ID NO: 268030 - DNA, 12 bp, Artificial Sequence
  Oligonucleotide primer for the detection of SNP TSC0000815
gtattttgggtt

SEQ ID NO: 268031 - DNA, 12 bp, Artificial Sequence
  Oligonucleotide primer for the detection of SNP TSC0000815
gtatttcgggtt

SEQ ID NO: 268032 - DNA, 12 bp, Artificial Sequence
  Oligonucleotide primer for the detection of SNP TSC0000816
atacccttattc

SEQ ID NO: 268033 - DNA, 12 bp, Artificial Sequence
  Oligonucleotide primer for the detection of SNP TSC0000816
tttttgatttta

SEQ ID NO: 268034 - DNA, 12 bp, Artificial Sequence
  Oligonucleotide primer for the detection of SNP TSC0000817
aaacaactatct

SEQ ID NO: 268035 - DNA, 12 bp, Artificial Sequence
  Oligonucleotide primer for the detection of SNP TSC0000817
aaacgactatct

SEQ ID NO: 268036 - DNA, 12 bp, Artificial Sequence
  Oligonucleotide primer for the detection of SNP TSC0000817
gggaaatgtagt

SEQ ID NO: 268037 - DNA, 12 bp, Artificial Sequence
  Oligonucleotide primer for the detection of SNP TSC0000818
ataacaaaatcc

SEQ ID NO: 268038 - DNA, 12 bp, Artificial Sequence
  Oligonucleotide primer for the detection of SNP TSC0000818
tttttgttaaaa

SEQ ID NO: 268039 - DNA, 12 bp, Artificial Sequence
  Oligonucleotide primer for the detection of SNP TSC0000818
tttttatcaaaa

SEQ ID NO: 268040 - DNA, 12 bp, Artificial Sequence
  Oligonucleotide primer for the detection of SNP TSC0000818
atagtaagattt

SEQ ID NO: 268041 - DNA, 12 bp, Artificial Sequence
  Oligonucleotide primer for the detection of SNP TSC0000825
aataaatcaata

SEQ ID NO: 268042 - DNA, 12 bp, Artificial Sequence
  Oligonucleotide primer for the detection of SNP TSC0000825
ttgtagatgttt

SEQ ID NO: 268043 - DNA, 12 bp, Artificial Sequence
  Oligonucleotide primer for the detection of SNP TSC0000825
atctataaatat

SEQ ID NO: 268044 - DNA, 12 bp, Artificial Sequence
  Oligonucleotide primer for the detection of SNP TSC0000825
gtctataaatat

SEQ ID NO: 268045 - DNA, 12 bp, Artificial Sequence
  Oligonucleotide primer for the detection of SNP TSC0000825
atgaattagtat

SEQ ID NO: 268046 - DNA, 12 bp, Artificial Sequence
  Oligonucleotide primer for the detection of SNP TSC0000828
aaatatatacac

SEQ ID NO: 268047 - DNA, 12 bp, Artificial Sequence
  Oligonucleotide primer for the detection of SNP TSC0000828
ttttatggtata

SEQ ID NO: 268048 - DNA, 12 bp, Artificial Sequence
  Oligonucleotide primer for the detection of SNP TSC0000832
tttaatttattt

SEQ ID NO: 268049 - DNA, 12 bp, Artificial Sequence
  Oligonucleotide primer for the detection of SNP TSC0000832
tagttaaatatg

SEQ ID NO: 268050 - DNA, 12 bp, Artificial Sequence
  Oligonucleotide primer for the detection of SNP TSC0000834
caaaaccaacta

SEQ ID NO: 268051 - DNA, 12 bp, Artificial Sequence
  Oligonucleotide primer for the detection of SNP TSC0000834
ttttattttgtt

SEQ ID NO: 268052 - DNA, 12 bp, Artificial Sequence
  Oligonucleotide primer for the detection of SNP TSC0000834
tccccatcttac

SEQ ID NO: 268053 - DNA, 12 bp, Artificial Sequence
  Oligonucleotide primer for the detection of SNP TSC0000834
tagagttagttg

SEQ ID NO: 268054 - DNA, 12 bp, Artificial Sequence
  Oligonucleotide primer for the detection of SNP TSC0000840
tacctacccctt

SEQ ID NO: 268055 - DNA, 12 bp, Artificial Sequence
  Oligonucleotide primer for the detection of SNP TSC0000840
ttttgtgggggg

SEQ ID NO: 268056 - DNA, 12 bp, Artificial Sequence
  Oligonucleotide primer for the detection of SNP TSC0000850
tttctcataata

SEQ ID NO: 268057 - DNA, 12 bp, Artificial Sequence
  Oligonucleotide primer for the detection of SNP TSC0000850
aagaaattattt

SEQ ID NO: 268058 - DNA, 12 bp, Artificial Sequence
  Oligonucleotide primer for the detection of SNP TSC0000850
aaaaaattactt

SEQ ID NO: 268059 - DNA, 12 bp, Artificial Sequence
  Oligonucleotide primer for the detection of SNP TSC0000850
ttttttatgatg

SEQ ID NO: 268060 - DNA, 12 bp, Artificial Sequence
  Oligonucleotide primer for the detection of SNP TSC0000853
acacctaaatat

SEQ ID NO: 268061 - DNA, 12 bp, Artificial Sequence
  Oligonucleotide primer for the detection of SNP TSC0000853
tttttatttttg

SEQ ID NO: 268062 - DNA, 12 bp, Artificial Sequence
  Oligonucleotide primer for the detection of SNP TSC0000854
acctaaatatct

SEQ ID NO: 268063 - DNA, 12 bp, Artificial Sequence
  Oligonucleotide primer for the detection of SNP TSC0000854
ttttatggatat

SEQ ID NO: 268064 - DNA, 12 bp, Artificial Sequence
  Oligonucleotide primer for the detection of SNP TSC0000854
ttctataaacat

SEQ ID NO: 268065 - DNA, 12 bp, Artificial Sequence
  Oligonucleotide primer for the detection of SNP TSC0000854
gtttagatgttt

SEQ ID NO: 268066 - DNA, 12 bp, Artificial Sequence
  Oligonucleotide primer for the detection of SNP TSC0000855
taaatttttcac

SEQ ID NO: 268067 - DNA, 12 bp, Artificial Sequence
  Oligonucleotide primer for the detection of SNP TSC0000855
gtttttttttaa

SEQ ID NO: 268068 - DNA, 12 bp, Artificial Sequence
  Oligonucleotide primer for the detection of SNP TSC0000855
atctttttccaa

SEQ ID NO: 268069 - DNA, 12 bp, Artificial Sequence
  Oligonucleotide primer for the detection of SNP TSC0000855
taaattttttat

SEQ ID NO: 268070 - DNA, 12 bp, Artificial Sequence
  Oligonucleotide primer for the detection of SNP TSC0000857
acacataaactc

SEQ ID NO: 268071 - DNA, 12 bp, Artificial Sequence
  Oligonucleotide primer for the detection of SNP TSC0000857
tggttgaatata

SEQ ID NO: 268072 - DNA, 12 bp, Artificial Sequence
  Oligonucleotide primer for the detection of SNP TSC0000857
cggttgaatata

SEQ ID NO: 268073 - DNA, 12 bp, Artificial Sequence
  Oligonucleotide primer for the detection of SNP TSC0000858
aaaaaactaaca

SEQ ID NO: 268074 - DNA, 12 bp, Artificial Sequence
  Oligonucleotide primer for the detection of SNP TSC0000858
ttggagataaat

SEQ ID NO: 268075 - DNA, 12 bp, Artificial Sequence
  Oligonucleotide primer for the detection of SNP TSC0000858
ttggagataaac

SEQ ID NO: 268076 - DNA, 12 bp, Artificial Sequence
  Oligonucleotide primer for the detection of SNP TSC0000858
ttaaaaacaaac

SEQ ID NO: 268077 - DNA, 12 bp, Artificial Sequence
  Oligonucleotide primer for the detection of SNP TSC0000858
tagaaaattaat

SEQ ID NO: 268078 - DNA, 12 bp, Artificial Sequence
  Oligonucleotide primer for the detection of SNP TSC0000859
tacctcaaaact

SEQ ID NO: 268079 - DNA, 12 bp, Artificial Sequence
  Oligonucleotide primer for the detection of SNP TSC0000859
gtattttttggg

SEQ ID NO: 268080 - DNA, 12 bp, Artificial Sequence
  Oligonucleotide primer for the detection of SNP TSC0000859
acactttttaaa

SEQ ID NO: 268081 - DNA, 12 bp, Artificial Sequence
  Oligonucleotide primer for the detection of SNP TSC0000859
tattttaaaatt

SEQ ID NO: 268082 - DNA, 12 bp, Artificial Sequence
  Oligonucleotide primer for the detection of SNP TSC0000860
atttatacctat

SEQ ID NO: 268083 - DNA, 12 bp, Artificial Sequence
  Oligonucleotide primer for the detection of SNP TSC0000860
ggtgaagaaaag

SEQ ID NO: 268084 - DNA, 12 bp, Artificial Sequence
  Oligonucleotide primer for the detection of SNP TSC0000863
taaattaaactt

SEQ ID NO: 268085 - DNA, 12 bp, Artificial Sequence
  Oligonucleotide primer for the detection of SNP TSC0000863
gggaaagtatta

SEQ ID NO: 268086 - DNA, 12 bp, Artificial Sequence
  Oligonucleotide primer for the detection of SNP TSC0000863
aaaaaaacatta

SEQ ID NO: 268087 - DNA, 12 bp, Artificial Sequence
  Oligonucleotide primer for the detection of SNP TSC0000863
taaattaaattt

SEQ ID NO: 268088 - DNA, 12 bp, Artificial Sequence
  Oligonucleotide primer for the detection of SNP TSC0000864
cttcaataataa

SEQ ID NO: 268089 - DNA, 12 bp, Artificial Sequence
  Oligonucleotide primer for the detection of SNP TSC0000864
tttggtttattt

SEQ ID NO: 268090 - DNA, 12 bp, Artificial Sequence
  Oligonucleotide primer for the detection of SNP TSC0000864
tttaattcactt

SEQ ID NO: 268091 - DNA, 12 bp, Artificial Sequence
  Oligonucleotide primer for the detection of SNP TSC0000864
ttttagtagtag

SEQ ID NO: 268092 - DNA, 12 bp, Artificial Sequence
  Oligonucleotide primer for the detection of SNP TSC0000865
ctttataatact

SEQ ID NO: 268093 - DNA, 12 bp, Artificial Sequence
  Oligonucleotide primer for the detection of SNP TSC0000865
ttttttttggga

SEQ ID NO: 268094 - DNA, 12 bp, Artificial Sequence
  Oligonucleotide primer for the detection of SNP TSC0000870
caaaatttatat

SEQ ID NO: 268095 - DNA, 12 bp, Artificial Sequence
  Oligonucleotide primer for the detection of SNP TSC0000870
taaaatatttaa

SEQ ID NO: 268096 - DNA, 12 bp, Artificial Sequence
  Oligonucleotide primer for the detection of SNP TSC0000872
aaaactaaatat

SEQ ID NO: 268097 - DNA, 12 bp, Artificial Sequence
  Oligonucleotide primer for the detection of SNP TSC0000872
tttttaagtgaa

SEQ ID NO: 268098 - DNA, 12 bp, Artificial Sequence
  Oligonucleotide primer for the detection of SNP TSC0000872
tttctaaataaa

SEQ ID NO: 268099 - DNA, 12 bp, Artificial Sequence
  Oligonucleotide primer for the detection of SNP TSC0000872
aaaattaagtat

SEQ ID NO: 268100 - DNA, 12 bp, Artificial Sequence
  Oligonucleotide primer for the detection of SNP TSC0000873
tactctaccttt

SEQ ID NO: 268101 - DNA, 12 bp, Artificial Sequence
  Oligonucleotide primer for the detection of SNP TSC0000873
gtttttttatta

SEQ ID NO: 268102 - DNA, 12 bp, Artificial Sequence
  Oligonucleotide primer for the detection of SNP TSC0000874
aacaaaaaaata

SEQ ID NO: 268103 - DNA, 12 bp, Artificial Sequence
  Oligonucleotide primer for the detection of SNP TSC0000874
atttttttattt

SEQ ID NO: 268104 - DNA, 12 bp, Artificial Sequence
  Oligonucleotide primer for the detection of SNP TSC0000874
atttttttattc

SEQ ID NO: 268105 - DNA, 12 bp, Artificial Sequence
  Oligonukleotid-Primer
aattctctcatt

SEQ ID NO: 268106 - DNA, 12 bp, Artificial Sequence
  Oligonucleotide primer for the detection of SNP TSC0000874
aatagagaggta

SEQ ID NO: 268107 - DNA, 12 bp, Artificial Sequence
  Oligonucleotide primer for the detection of SNP TSC0000879
tctactcaatct

SEQ ID NO: 268108 - DNA, 12 bp, Artificial Sequence
  Oligonucleotide primer for the detection of SNP TSC0000879
gtattttatggg

SEQ ID NO: 268109 - DNA, 12 bp, Artificial Sequence
  Oligonukleotid-Primer
atttcacaaaat

SEQ ID NO: 268110 - DNA, 12 bp, Artificial Sequence
  Oligonucleotide primer for the detection of SNP TSC0000882
gtagaatagtta

SEQ ID NO: 268111 - DNA, 12 bp, Artificial Sequence
  Oligonucleotide primer for the detection of SNP TSC0000890
ataaatatcttc

SEQ ID NO: 268112 - DNA, 12 bp, Artificial Sequence
  Oligonucleotide primer for the detection of SNP TSC0000890
agtattgtagaa

SEQ ID NO: 268113 - DNA, 12 bp, Artificial Sequence
  Oligonukleotid-Primer
attaaattcaat

SEQ ID NO: 268114 - DNA, 12 bp, Artificial Sequence
  Oligonucleotide primer for the detection of SNP TSC0000891
attgtgtttgtg

SEQ ID NO: 268115 - DNA, 12 bp, Artificial Sequence
  Oligonucleotide primer for the detection of SNP TSC0000891
atcgtgtttgtg

SEQ ID NO: 268116 - DNA, 12 bp, Artificial Sequence
  Oligonucleotide primer for the detection of SNP TSC0000891
attgtgtttgcg

SEQ ID NO: 268117 - DNA, 12 bp, Artificial Sequence
  Oligonucleotide primer for the detection of SNP TSC0000891
atcgtgtttgcg

SEQ ID NO: 268118 - DNA, 12 bp, Artificial Sequence
  Oligonucleotide primer for the detection of SNP TSC0000895
ataaaaatttac

SEQ ID NO: 268119 - DNA, 12 bp, Artificial Sequence
  Oligonucleotide primer for the detection of SNP TSC0000895
ttttgttgaaaa

SEQ ID NO: 268120 - DNA, 12 bp, Artificial Sequence
  Oligonucleotide primer for the detection of SNP TSC0000895
tttcgttgaaaa

SEQ ID NO: 268121 - DNA, 12 bp, Artificial Sequence
  Oligonucleotide primer for the detection of SNP TSC0000896
taatttaaatat

SEQ ID NO: 268122 - DNA, 12 bp, Artificial Sequence
  Oligonucleotide primer for the detection of SNP TSC0000896
ggtttggagagg

SEQ ID NO: 268123 - DNA, 12 bp, Artificial Sequence
  Oligonucleotide primer for the detection of SNP TSC0000897
tcttatttcttc

SEQ ID NO: 268124 - DNA, 12 bp, Artificial Sequence
  Oligonucleotide primer for the detection of SNP TSC0000897
gtggtaagtata

SEQ ID NO: 268125 - DNA, 12 bp, Artificial Sequence
  Oligonucleotide primer for the detection of SNP TSC0000901
tctaacaccttc

SEQ ID NO: 268126 - DNA, 12 bp, Artificial Sequence
  Oligonucleotide primer for the detection of SNP TSC0000901
taaatttgttta

SEQ ID NO: 268127 - DNA, 12 bp, Artificial Sequence
  Oligonucleotide primer for the detection of SNP TSC0000905
aaaaataccccc

SEQ ID NO: 268128 - DNA, 12 bp, Artificial Sequence
  Oligonucleotide primer for the detection of SNP TSC0000905
ttttgttagagg

SEQ ID NO: 268129 - DNA, 12 bp, Artificial Sequence
  Oligonucleotide primer for the detection of SNP TSC0000905
ccctactaaaaa

SEQ ID NO: 268130 - DNA, 12 bp, Artificial Sequence
  Oligonucleotide primer for the detection of SNP TSC0000905
aaaagtgttttt

SEQ ID NO: 268131 - DNA, 12 bp, Artificial Sequence
  Oligonucleotide primer for the detection of SNP TSC0000905
aaaagtgttttc

SEQ ID NO: 268132 - DNA, 12 bp, Artificial Sequence
  Oligonucleotide primer for the detection of SNP TSC0000906
cttaatcaaaat

SEQ ID NO: 268133 - DNA, 12 bp, Artificial Sequence
  Oligonucleotide primer for the detection of SNP TSC0000906
tttttatagggg

SEQ ID NO: 268134 - DNA, 12 bp, Artificial Sequence
  Oligonucleotide primer for the detection of SNP TSC0000907
aaaaatcatacc

SEQ ID NO: 268135 - DNA, 12 bp, Artificial Sequence
  Oligonucleotide primer for the detection of SNP TSC0000907
tttaggttgaag

SEQ ID NO: 268136 - DNA, 12 bp, Artificial Sequence
  Oligonucleotide primer for the detection of SNP TSC0000908
aaaaaaacaact

SEQ ID NO: 268137 - DNA, 12 bp, Artificial Sequence
  Oligonucleotide primer for the detection of SNP TSC0000908
ttttatgggaga

SEQ ID NO: 268138 - DNA, 12 bp, Artificial Sequence
  Oligonucleotide primer for the detection of SNP TSC0000913
tatactaactct

SEQ ID NO: 268139 - DNA, 12 bp, Artificial Sequence
  Oligonucleotide primer for the detection of SNP TSC0000913
tttatttagtga

SEQ ID NO: 268140 - DNA, 12 bp, Artificial Sequence
  Oligonucleotide primer for the detection of SNP TSC0000914
cctattaaaaat

SEQ ID NO: 268141 - DNA, 12 bp, Artificial Sequence
  Oligonucleotide primer for the detection of SNP TSC0000914
aattaaaattta

SEQ ID NO: 268142 - DNA, 12 bp, Artificial Sequence
  Oligonucleotide primer for the detection of SNP TSC0000914
aattaaaatcta

SEQ ID NO: 268143 - DNA, 12 bp, Artificial Sequence
  Oligonucleotide primer for the detection of SNP TSC0000914
tttgttagaaat

SEQ ID NO: 268144 - DNA, 12 bp, Artificial Sequence
  Oligonucleotide primer for the detection of SNP TSC0000918
aaaataataaaa

SEQ ID NO: 268145 - DNA, 12 bp, Artificial Sequence
  Oligonucleotide primer for the detection of SNP TSC0000918
ataaggattttt

SEQ ID NO: 268146 - DNA, 12 bp, Artificial Sequence
  Oligonucleotide primer for the detection of SNP TSC0000918
caaaaatctcca

SEQ ID NO: 268147 - DNA, 12 bp, Artificial Sequence
  Oligonucleotide primer for the detection of SNP TSC0000918
aggagtggtgag

SEQ ID NO: 268148 - DNA, 12 bp, Artificial Sequence
  Oligonucleotide primer for the detection of SNP TSC0000928
aatctcatctac

SEQ ID NO: 268149 - DNA, 12 bp, Artificial Sequence
  Oligonucleotide primer for the detection of SNP TSC0000928
atttattttttg

SEQ ID NO: 268150 - DNA, 12 bp, Artificial Sequence
  Oligonucleotide primer for the detection of SNP TSC0000930
ttatatatttca

SEQ ID NO: 268151 - DNA, 12 bp, Artificial Sequence
  Oligonucleotide primer for the detection of SNP TSC0000930
gaaagaaattat

SEQ ID NO: 268152 - DNA, 12 bp, Artificial Sequence
  Oligonucleotide primer for the detection of SNP TSC0000930
aaaaaaaatcac

SEQ ID NO: 268153 - DNA, 12 bp, Artificial Sequence
  Oligonucleotide primer for the detection of SNP TSC0000930
ttgtgtgtttta

SEQ ID NO: 268154 - DNA, 12 bp, Artificial Sequence
  Oligonucleotide primer for the detection of SNP TSC0000931
ttcaacaataat

SEQ ID NO: 268155 - DNA, 12 bp, Artificial Sequence
  Oligonucleotide primer for the detection of SNP TSC0000931
aggagaattata

SEQ ID NO: 268156 - DNA, 12 bp, Artificial Sequence
  Oligonucleotide primer for the detection of SNP TSC0000931
aaaaaaactaca

SEQ ID NO: 268157 - DNA, 12 bp, Artificial Sequence
  Oligonucleotide primer for the detection of SNP TSC0000931
tttagtagtggt

SEQ ID NO: 268158 - DNA, 12 bp, Artificial Sequence
  Oligonucleotide primer for the detection of SNP TSC0000932
acataaaatatt

SEQ ID NO: 268159 - DNA, 12 bp, Artificial Sequence
  Oligonucleotide primer for the detection of SNP TSC0000932
taaaaaaggaaa

SEQ ID NO: 268160 - DNA, 12 bp, Artificial Sequence
  Oligonucleotide primer for the detection of SNP TSC0000932
caaaaaaaaaaa

SEQ ID NO: 268161 - DNA, 12 bp, Artificial Sequence
  Oligonucleotide primer for the detection of SNP TSC0000932
gtatgggatgtt

SEQ ID NO: 268162 - DNA, 12 bp, Artificial Sequence
  Oligonucleotide primer for the detection of SNP TSC0000933
ttttcacaataa

SEQ ID NO: 268163 - DNA, 12 bp, Artificial Sequence
  Oligonucleotide primer for the detection of SNP TSC0000933
tttatgaattgg

SEQ ID NO: 268164 - DNA, 12 bp, Artificial Sequence
  Oligonucleotide primer for the detection of SNP TSC0000933
cataaattaaaa

SEQ ID NO: 268165 - DNA, 12 bp, Artificial Sequence
  Oligonucleotide primer for the detection of SNP TSC0000933
tttataatgatt

SEQ ID NO: 268166 - DNA, 12 bp, Artificial Sequence
  Oligonucleotide primer for the detection of SNP TSC0000934
atataattacta

SEQ ID NO: 268167 - DNA, 12 bp, Artificial Sequence
  Oligonucleotide primer for the detection of SNP TSC0000934
agttatattgtt

SEQ ID NO: 268168 - DNA, 12 bp, Artificial Sequence
  Oligonucleotide primer for the detection of SNP TSC0000934
aatcacattatt

SEQ ID NO: 268169 - DNA, 12 bp, Artificial Sequence
  Oligonucleotide primer for the detection of SNP TSC0000934
atatggttgtta

SEQ ID NO: 268170 - DNA, 12 bp, Artificial Sequence
  Oligonucleotide primer for the detection of SNP TSC0000935
aaactatataac

SEQ ID NO: 268171 - DNA, 12 bp, Artificial Sequence
  Oligonucleotide primer for the detection of SNP TSC0000935
ttatttgtttaa

SEQ ID NO: 268172 - DNA, 12 bp, Artificial Sequence
  Oligonucleotide primer for the detection of SNP TSC0000936
aaaaaaaacaaa

SEQ ID NO: 268173 - DNA, 12 bp, Artificial Sequence
  Oligonucleotide primer for the detection of SNP TSC0000936
tttgtttttttt

SEQ ID NO: 268174 - DNA, 12 bp, Artificial Sequence
  Oligonucleotide primer for the detection of SNP TSC0000936
cctactccctct

SEQ ID NO: 268175 - DNA, 12 bp, Artificial Sequence
  Oligonucleotide primer for the detection of SNP TSC0000936
ggagagaataaa

SEQ ID NO: 268176 - DNA, 12 bp, Artificial Sequence
  Oligonucleotide primer for the detection of SNP TSC0000937
aaaatttatttt

SEQ ID NO: 268177 - DNA, 12 bp, Artificial Sequence
  Oligonucleotide primer for the detection of SNP TSC0000937
tatgttgtatat

SEQ ID NO: 268178 - DNA, 12 bp, Artificial Sequence
  Oligonucleotide primer for the detection of SNP TSC0000937
ccatattacata

SEQ ID NO: 268179 - DNA, 12 bp, Artificial Sequence
  Oligonucleotide primer for the detection of SNP TSC0000937
ggagtttgtttt

SEQ ID NO: 268180 - DNA, 12 bp, Artificial Sequence
  Oligonucleotide primer for the detection of SNP TSC0000938
tatcactctaat

SEQ ID NO: 268181 - DNA, 12 bp, Artificial Sequence
  Oligonucleotide primer for the detection of SNP TSC0000938
aatatatttaaa

SEQ ID NO: 268182 - DNA, 12 bp, Artificial Sequence
  Oligonucleotide primer for the detection of SNP TSC0000938
aacatatctaaa

SEQ ID NO: 268183 - DNA, 12 bp, Artificial Sequence
  Oligonucleotide primer for the detection of SNP TSC0000938
attattttgatt

SEQ ID NO: 268184 - DNA, 12 bp, Artificial Sequence
  Oligonucleotide primer for the detection of SNP TSC0000938
attattttgatc

SEQ ID NO: 268185 - DNA, 12 bp, Artificial Sequence
  Oligonucleotide primer for the detection of SNP TSC0000940
aaataaaaccac

SEQ ID NO: 268186 - DNA, 12 bp, Artificial Sequence
  Oligonucleotide primer for the detection of SNP TSC0000940
tagaatttttta

SEQ ID NO: 268187 - DNA, 12 bp, Artificial Sequence
  Oligonucleotide primer for the detection of SNP TSC0000940
caaaaccctcta

SEQ ID NO: 268188 - DNA, 12 bp, Artificial Sequence
  Oligonucleotide primer for the detection of SNP TSC0000940
gaatgaagttat

SEQ ID NO: 268189 - DNA, 12 bp, Artificial Sequence
  Oligonucleotide primer for the detection of SNP TSC0000941
ttaattaaattt

SEQ ID NO: 268190 - DNA, 12 bp, Artificial Sequence
  Oligonucleotide primer for the detection of SNP TSC0000941
agagtttttata

SEQ ID NO: 268191 - DNA, 12 bp, Artificial Sequence
  Oligonucleotide primer for the detection of SNP TSC0000941
aaatctctacaa

SEQ ID NO: 268192 - DNA, 12 bp, Artificial Sequence
  Oligonucleotide primer for the detection of SNP TSC0000941
ttgattagattt

SEQ ID NO: 268193 - DNA, 12 bp, Artificial Sequence
  Oligonucleotide primer for the detection of SNP TSC0000959
caacaaaaaaaa

SEQ ID NO: 268194 - DNA, 12 bp, Artificial Sequence
  Oligonukleotid-Primer
tatatttttttt

SEQ ID NO: 268195 - DNA, 12 bp, Artificial Sequence
  Oligonucleotide primer for the detection of SNP TSC0000959
atatttctccca

SEQ ID NO: 268196 - DNA, 12 bp, Artificial Sequence
  Oligonucleotide primer for the detection of SNP TSC0000959
tagtaagagagg

SEQ ID NO: 268197 - DNA, 12 bp, Artificial Sequence
  Oligonucleotide primer for the detection of SNP TSC0000960
actcaaattttc

SEQ ID NO: 268198 - DNA, 12 bp, Artificial Sequence
  Oligonucleotide primer for the detection of SNP TSC0000960
aatttgagattg

SEQ ID NO: 268199 - DNA, 12 bp, Artificial Sequence
  Oligonucleotide primer for the detection of SNP TSC0000964
ctcctacaaaac

SEQ ID NO: 268200 - DNA, 12 bp, Artificial Sequence
  Oligonucleotide primer for the detection of SNP TSC0000964
ggtgtatttata

SEQ ID NO: 268201 - DNA, 12 bp, Artificial Sequence
  Oligonucleotide primer for the detection of SNP TSC0000965
actttcactaat

SEQ ID NO: 268202 - DNA, 12 bp, Artificial Sequence
  Oligonucleotide primer for the detection of SNP TSC0000965
atgaagaaggtt

SEQ ID NO: 268203 - DNA, 12 bp, Artificial Sequence
  Oligonucleotide primer for the detection of SNP TSC0000965
atttttattgat

SEQ ID NO: 268204 - DNA, 12 bp, Artificial Sequence
  Oligonucleotide primer for the detection of SNP TSC0000969
atttataaacat

SEQ ID NO: 268205 - DNA, 12 bp, Artificial Sequence
  Oligonucleotide primer for the detection of SNP TSC0000969
tttagtatgtag

SEQ ID NO: 268206 - DNA, 12 bp, Artificial Sequence
  Oligonucleotide primer for the detection of SNP TSC0000980
aaaaaaattacc

SEQ ID NO: 268207 - DNA, 12 bp, Artificial Sequence
  Oligonucleotide primer for the detection of SNP TSC0000980
tattttttaata

SEQ ID NO: 268208 - DNA, 12 bp, Artificial Sequence
  Oligonucleotide primer for the detection of SNP TSC0000981
taaaataaaaaa

SEQ ID NO: 268209 - DNA, 12 bp, Artificial Sequence
  Oligonucleotide primer for the detection of SNP TSC0000981
tttttaaaaatt

SEQ ID NO: 268210 - DNA, 12 bp, Artificial Sequence
  Oligonucleotide primer for the detection of SNP TSC0000981
tgtgaagtaaaa

SEQ ID NO: 268211 - DNA, 12 bp, Artificial Sequence
  Oligonucleotide primer for the detection of SNP TSC0000985
acaaactaaatc

SEQ ID NO: 268212 - DNA, 12 bp, Artificial Sequence
  Oligonucleotide primer for the detection of SNP TSC0000985
tgtttttaatta

SEQ ID NO: 268213 - DNA, 12 bp, Artificial Sequence
  Oligonucleotide primer for the detection of SNP TSC0000986
caacaaactaaa

SEQ ID NO: 268214 - DNA, 12 bp, Artificial Sequence
  Oligonucleotide primer for the detection of SNP TSC0000986
tttttaattaat

SEQ ID NO: 268215 - DNA, 12 bp, Artificial Sequence
  Oligonucleotide primer for the detection of SNP TSC0000986
agtaagttgaat

SEQ ID NO: 268216 - DNA, 12 bp, Artificial Sequence
  Oligonucleotide primer for the detection of SNP TSC0000987
taaaaattacaa

SEQ ID NO: 268217 - DNA, 12 bp, Artificial Sequence
  Oligonucleotide primer for the detection of SNP TSC0000987
tttagtttgttg

SEQ ID NO: 268218 - DNA, 12 bp, Artificial Sequence
  Oligonucleotide primer for the detection of SNP TSC0000987
ttcaacttacta

SEQ ID NO: 268219 - DNA, 12 bp, Artificial Sequence
  Oligonucleotide primer for the detection of SNP TSC0000987
tggaaattatag

SEQ ID NO: 268220 - DNA, 12 bp, Artificial Sequence
  Oligonucleotide primer for the detection of SNP TSC0000988
ctatttttcttt

SEQ ID NO: 268221 - DNA, 12 bp, Artificial Sequence
  Oligonucleotide primer for the detection of SNP TSC0000988
aaggtaatgtaa

SEQ ID NO: 268222 - DNA, 12 bp, Artificial Sequence
  Oligonucleotide primer for the detection of SNP TSC0000988
aaaataatataa

SEQ ID NO: 268223 - DNA, 12 bp, Artificial Sequence
  Oligonucleotide primer for the detection of SNP TSC0000988
ttattttttttt

SEQ ID NO: 268224 - DNA, 12 bp, Artificial Sequence
  Oligonucleotide primer for the detection of SNP TSC0000989
taaaaaaattaa

SEQ ID NO: 268225 - DNA, 12 bp, Artificial Sequence
  Oligonucleotide primer for the detection of SNP TSC0000989
atattttaaaaa

SEQ ID NO: 268226 - DNA, 12 bp, Artificial Sequence
  Oligonucleotide primer for the detection of SNP TSC0000989
tttaaaaaaatt

SEQ ID NO: 268227 - DNA, 12 bp, Artificial Sequence
  Oligonucleotide primer for the detection of SNP TSC0000991
ttaacacttcct

SEQ ID NO: 268228 - DNA, 12 bp, Artificial Sequence
  Oligonucleotide primer for the detection of SNP TSC0000991
gattatttggaa

SEQ ID NO: 268229 - DNA, 12 bp, Artificial Sequence
  Oligonucleotide primer for the detection of SNP TSC0000992
aataaaaacata

SEQ ID NO: 268230 - DNA, 12 bp, Artificial Sequence
  Oligonucleotide primer for the detection of SNP TSC0000992
attatttagttt

SEQ ID NO: 268231 - DNA, 12 bp, Artificial Sequence
  Oligonucleotide primer for the detection of SNP TSC0000992
attacccaatct

SEQ ID NO: 268232 - DNA, 12 bp, Artificial Sequence
  Oligonucleotide primer for the detection of SNP TSC0000992
agtaaagatata

SEQ ID NO: 268233 - DNA, 12 bp, Artificial Sequence
  Oligonucleotide primer for the detection of SNP TSC0000994
tataatcacatt

SEQ ID NO: 268234 - DNA, 12 bp, Artificial Sequence
  Oligonucleotide primer for the detection of SNP TSC0000994
tatttttatagg

SEQ ID NO: 268235 - DNA, 12 bp, Artificial Sequence
  Oligonucleotide primer for the detection of SNP TSC0000996
tatcaaatataa

SEQ ID NO: 268236 - DNA, 12 bp, Artificial Sequence
  Oligonucleotide primer for the detection of SNP TSC0000996
aaaatttggaag

SEQ ID NO: 268237 - DNA, 12 bp, Artificial Sequence
  Oligonucleotide primer for the detection of SNP TSC0000996
aaaatctaaaaa

SEQ ID NO: 268238 - DNA, 12 bp, Artificial Sequence
  Oligonucleotide primer for the detection of SNP TSC0000996
attaagtataat

SEQ ID NO: 268239 - DNA, 12 bp, Artificial Sequence
  Oligonucleotide primer for the detection of SNP TSC0000997
tcattatatatc

SEQ ID NO: 268240 - DNA, 12 bp, Artificial Sequence
  Oligonucleotide primer for the detection of SNP TSC0000997
tgggaggtatta

SEQ ID NO: 268241 - DNA, 12 bp, Artificial Sequence
  Oligonucleotide primer for the detection of SNP TSC0000998
ttaattaattct

SEQ ID NO: 268242 - DNA, 12 bp, Artificial Sequence
  Oligonucleotide primer for the detection of SNP TSC0000998
tttatagtagtg

SEQ ID NO: 268243 - DNA, 12 bp, Artificial Sequence
  Oligonucleotide primer for the detection of SNP TSC0001000
accaaatatata

SEQ ID NO: 268244 - DNA, 12 bp, Artificial Sequence
  Oligonucleotide primer for the detection of SNP TSC0001000
taaaaaaggtaa

SEQ ID NO: 268245 - DNA, 12 bp, Artificial Sequence
  Oligonucleotide primer for the detection of SNP TSC0001000
taaaaaaaataa

SEQ ID NO: 268246 - DNA, 12 bp, Artificial Sequence
  Oligonucleotide primer for the detection of SNP TSC0001000
taggtatgtgtt

SEQ ID NO: 268247 - DNA, 12 bp, Artificial Sequence
  Oligonucleotide primer for the detection of SNP TSC0001013
aaataaataaaa

SEQ ID NO: 268248 - DNA, 12 bp, Artificial Sequence
  Oligonucleotide primer for the detection of SNP TSC0001013
gttagtttttaa

SEQ ID NO: 268249 - DNA, 12 bp, Artificial Sequence
  Oligonucleotide primer for the detection of SNP TSC0001013
taatttctaaaa

SEQ ID NO: 268250 - DNA, 12 bp, Artificial Sequence
  Oligonucleotide primer for the detection of SNP TSC0001013
agagtgagtaag

SEQ ID NO: 268251 - DNA, 12 bp, Artificial Sequence
  Oligonucleotide primer for the detection of SNP TSC0001016
ataaaatttttc

SEQ ID NO: 268252 - DNA, 12 bp, Artificial Sequence
  Oligonucleotide primer for the detection of SNP TSC0001016
tttatttttaga

SEQ ID NO: 268253 - DNA, 12 bp, Artificial Sequence
  Oligonucleotide primer for the detection of SNP TSC0001017
ctataataatct

SEQ ID NO: 268254 - DNA, 12 bp, Artificial Sequence
  Oligonucleotide primer for the detection of SNP TSC0001017
ttaaggtgggtg

SEQ ID NO: 268255 - DNA, 12 bp, Artificial Sequence
  Oligonucleotide primer for the detection of SNP TSC0001018
aaaaaaatcatt

SEQ ID NO: 268256 - DNA, 12 bp, Artificial Sequence
  Oligonucleotide primer for the detection of SNP TSC0001018
gattttgttatt

SEQ ID NO: 268257 - DNA, 12 bp, Artificial Sequence
  Oligonucleotide primer for the detection of SNP TSC0001018
aatcctatcact

SEQ ID NO: 268258 - DNA, 12 bp, Artificial Sequence
  Oligonucleotide primer for the detection of SNP TSC0001018
agaggattattt

SEQ ID NO: 268259 - DNA, 12 bp, Artificial Sequence
  Oligonucleotide primer for the detection of SNP TSC0001019
acaatttcatcc

SEQ ID NO: 268260 - DNA, 12 bp, Artificial Sequence
  Oligonucleotide primer for the detection of SNP TSC0001019
acgatttcatcc

SEQ ID NO: 268261 - DNA, 12 bp, Artificial Sequence
  Oligonucleotide primer for the detection of SNP TSC0001019
ttgaaattatgg

SEQ ID NO: 268262 - DNA, 12 bp, Artificial Sequence
  Oligonucleotide primer for the detection of SNP TSC0001019
ttgaaattacgg

SEQ ID NO: 268263 - DNA, 12 bp, Artificial Sequence
  Oligonucleotide primer for the detection of SNP TSC0001019
ctaaaaccacaa

SEQ ID NO: 268264 - DNA, 12 bp, Artificial Sequence
  Oligonucleotide primer for the detection of SNP TSC0001019
ctaaaaccacga

SEQ ID NO: 268265 - DNA, 12 bp, Artificial Sequence
  Oligonucleotide primer for the detection of SNP TSC0001019
gtgattttattt

SEQ ID NO: 268266 - DNA, 12 bp, Artificial Sequence
  Oligonucleotide primer for the detection of SNP TSC0001019
gcgattttattt

SEQ ID NO: 268267 - DNA, 12 bp, Artificial Sequence
  Oligonucleotide primer for the detection of SNP TSC0001028
aaaaaaaaacta

SEQ ID NO: 268268 - DNA, 12 bp, Artificial Sequence
  Oligonucleotide primer for the detection of SNP TSC0001028
aattaatatttt

SEQ ID NO: 268269 - DNA, 12 bp, Artificial Sequence
  Oligonucleotide primer for the detection of SNP TSC0001028
aatcaacatttt

SEQ ID NO: 268270 - DNA, 12 bp, Artificial Sequence
  Oligonucleotide primer for the detection of SNP TSC0001028
ggggaaaagtta

SEQ ID NO: 268271 - DNA, 12 bp, Artificial Sequence
  Oligonucleotide primer for the detection of SNP TSC0001029
ttaaaaatttct

SEQ ID NO: 268272 - DNA, 12 bp, Artificial Sequence
  Oligonucleotide primer for the detection of SNP TSC0001029
ttattttaaatg

SEQ ID NO: 268273 - DNA, 12 bp, Artificial Sequence
  Oligonucleotide primer for the detection of SNP TSC0001030
atacttcctata

SEQ ID NO: 268274 - DNA, 12 bp, Artificial Sequence
  Oligonucleotide primer for the detection of SNP TSC0001030
tttttgtaggtt

SEQ ID NO: 268275 - DNA, 12 bp, Artificial Sequence
  Oligonucleotide primer for the detection of SNP TSC0001030
tctctacaaact

SEQ ID NO: 268276 - DNA, 12 bp, Artificial Sequence
  Oligonucleotide primer for the detection of SNP TSC0001030
atgttttttgta

SEQ ID NO: 268277 - DNA, 12 bp, Artificial Sequence
  Oligonucleotide primer for the detection of SNP TSC0001035
cctaaatatctc

SEQ ID NO: 268278 - DNA, 12 bp, Artificial Sequence
  Oligonucleotide primer for the detection of SNP TSC0001035
taaaaattaata

SEQ ID NO: 268279 - DNA, 12 bp, Artificial Sequence
  Oligonucleotide primer for the detection of SNP TSC0001036
ttaaaaatttat

SEQ ID NO: 268280 - DNA, 12 bp, Artificial Sequence
  Oligonucleotide primer for the detection of SNP TSC0001036
tgatatttaaga

SEQ ID NO: 268281 - DNA, 12 bp, Artificial Sequence
  Oligonucleotide primer for the detection of SNP TSC0001036
taatatttaaaa

SEQ ID NO: 268282 - DNA, 12 bp, Artificial Sequence
  Oligonucleotide primer for the detection of SNP TSC0001036
ttaagaatttgt

SEQ ID NO: 268283 - DNA, 12 bp, Artificial Sequence
  Oligonucleotide primer for the detection of SNP TSC0001037
ttccttaattac

SEQ ID NO: 268284 - DNA, 12 bp, Artificial Sequence
  Oligonucleotide primer for the detection of SNP TSC0001037
tatgtaatttta

SEQ ID NO: 268285 - DNA, 12 bp, Artificial Sequence
  Oligonucleotide primer for the detection of SNP TSC0001040
tcccaacaaatt

SEQ ID NO: 268286 - DNA, 12 bp, Artificial Sequence
  Oligonucleotide primer for the detection of SNP TSC0001040
gatggagaggag

SEQ ID NO: 268287 - DNA, 12 bp, Artificial Sequence
  Oligonucleotide primer for the detection of SNP TSC0001041
ataaaaacaaaa

SEQ ID NO: 268288 - DNA, 12 bp, Artificial Sequence
  Oligonucleotide primer for the detection of SNP TSC0001041
tgtttatgttat

SEQ ID NO: 268289 - DNA, 12 bp, Artificial Sequence
  Oligonucleotide primer for the detection of SNP TSC0001041
atacctatatta

SEQ ID NO: 268290 - DNA, 12 bp, Artificial Sequence
  Oligonucleotide primer for the detection of SNP TSC0001041
gtggaaatagag

SEQ ID NO: 268291 - DNA, 12 bp, Artificial Sequence
  Oligonukleotid-Primer
aaaaatctttct

SEQ ID NO: 268292 - DNA, 12 bp, Artificial Sequence
  Oligonucleotide primer for the detection of SNP TSC0001045
gttatatttggg

SEQ ID NO: 268293 - DNA, 12 bp, Artificial Sequence
  Oligonucleotide primer for the detection of SNP TSC0001045
atcatatctaaa

SEQ ID NO: 268294 - DNA, 12 bp, Artificial Sequence
  Oligonucleotide primer for the detection of SNP TSC0001045
ggggattttttt

SEQ ID NO: 268295 - DNA, 12 bp, Artificial Sequence
  Oligonucleotide primer for the detection of SNP TSC0001049
ataaaaacctaa

SEQ ID NO: 268296 - DNA, 12 bp, Artificial Sequence
  Oligonucleotide primer for the detection of SNP TSC0001049
gtaaaaacctaa

SEQ ID NO: 268297 - DNA, 12 bp, Artificial Sequence
  Oligonucleotide primer for the detection of SNP TSC0001049
ttaagatttatg

SEQ ID NO: 268298 - DNA, 12 bp, Artificial Sequence
  Oligonucleotide primer for the detection of SNP TSC0001049
ttaaaacctata

SEQ ID NO: 268299 - DNA, 12 bp, Artificial Sequence
  Oligonucleotide primer for the detection of SNP TSC0001049
gtgaaggtttag

SEQ ID NO: 268300 - DNA, 12 bp, Artificial Sequence
  Oligonucleotide primer for the detection of SNP TSC0001050
cctccatctaac

SEQ ID NO: 268301 - DNA, 12 bp, Artificial Sequence
  Oligonucleotide primer for the detection of SNP TSC0001050
tatatatttgtt

SEQ ID NO: 268302 - DNA, 12 bp, Artificial Sequence
  Oligonucleotide primer for the detection of SNP TSC0001050
tatatatctatt

SEQ ID NO: 268303 - DNA, 12 bp, Artificial Sequence
  Oligonucleotide primer for the detection of SNP TSC0001050
tttttatttaat

SEQ ID NO: 268304 - DNA, 12 bp, Artificial Sequence
  Oligonucleotide primer for the detection of SNP TSC0001051
tttcttaacaaa

SEQ ID NO: 268305 - DNA, 12 bp, Artificial Sequence
  Oligonucleotide primer for the detection of SNP TSC0001051
taatttgtttag

SEQ ID NO: 268306 - DNA, 12 bp, Artificial Sequence
  Oligonucleotide primer for the detection of SNP TSC0001051
taatttacctaa

SEQ ID NO: 268307 - DNA, 12 bp, Artificial Sequence
  Oligonucleotide primer for the detection of SNP TSC0001051
tttttggtaaat

SEQ ID NO: 268308 - DNA, 12 bp, Artificial Sequence
  Oligonucleotide primer for the detection of SNP TSC0001055
tttctcactaat

SEQ ID NO: 268309 - DNA, 12 bp, Artificial Sequence
  Oligonucleotide primer for the detection of SNP TSC0001055
tgaataagttgt

SEQ ID NO: 268310 - DNA, 12 bp, Artificial Sequence
  Oligonucleotide primer for the detection of SNP TSC0001056
ttcataacctcc

SEQ ID NO: 268311 - DNA, 12 bp, Artificial Sequence
  Oligonucleotide primer for the detection of SNP TSC0001056
atggtaaaaggg

SEQ ID NO: 268312 - DNA, 12 bp, Artificial Sequence
  Oligonucleotide primer for the detection of SNP TSC0001056
taacaaaaaaaa

SEQ ID NO: 268313 - DNA, 12 bp, Artificial Sequence
  Oligonucleotide primer for the detection of SNP TSC0001056
tttataattttt

SEQ ID NO: 268314 - DNA, 12 bp, Artificial Sequence
  Oligonucleotide primer for the detection of SNP TSC0001056
tttataattttc

SEQ ID NO: 268315 - DNA, 12 bp, Artificial Sequence
  Oligonucleotide primer for the detection of SNP TSC0001057
caaaactctcca

SEQ ID NO: 268316 - DNA, 12 bp, Artificial Sequence
  Oligonucleotide primer for the detection of SNP TSC0001057
gaagaatttttt

SEQ ID NO: 268317 - DNA, 12 bp, Artificial Sequence
  Oligonucleotide primer for the detection of SNP TSC0001057
aaaaaacttcct

SEQ ID NO: 268318 - DNA, 12 bp, Artificial Sequence
  Oligonucleotide primer for the detection of SNP TSC0001057
tagagtttttta

SEQ ID NO: 268319 - DNA, 12 bp, Artificial Sequence
  Oligonucleotide primer for the detection of SNP TSC0001058
ctcttcacatac

SEQ ID NO: 268320 - DNA, 12 bp, Artificial Sequence
  Oligonucleotide primer for the detection of SNP TSC0001058
tggtgtgaagag

SEQ ID NO: 268321 - DNA, 12 bp, Artificial Sequence
  Oligonucleotide primer for the detection of SNP TSC0001058
taatataaaaaa

SEQ ID NO: 268322 - DNA, 12 bp, Artificial Sequence
  Oligonucleotide primer for the detection of SNP TSC0001058
ttttttatatat

SEQ ID NO: 268323 - DNA, 12 bp, Artificial Sequence
  Oligonucleotide primer for the detection of SNP TSC0001059
taaaaaaaaaac

SEQ ID NO: 268324 - DNA, 12 bp, Artificial Sequence
  Oligonucleotide primer for the detection of SNP TSC0001059
ttatgtaaggtg

SEQ ID NO: 268325 - DNA, 12 bp, Artificial Sequence
  Oligonucleotide primer for the detection of SNP TSC0001059
ttatgtaaggcg

SEQ ID NO: 268326 - DNA, 12 bp, Artificial Sequence
  Oligonucleotide primer for the detection of SNP TSC0001063
aaacaatacccc

SEQ ID NO: 268327 - DNA, 12 bp, Artificial Sequence
  Oligonucleotide primer for the detection of SNP TSC0001063
tggtattaggag

SEQ ID NO: 268328 - DNA, 12 bp, Artificial Sequence
  Oligonucleotide primer for the detection of SNP TSC0001063
taatatcaaaaa

SEQ ID NO: 268329 - DNA, 12 bp, Artificial Sequence
  Oligonucleotide primer for the detection of SNP TSC0001063
aagtagtgtttt

SEQ ID NO: 268330 - DNA, 12 bp, Artificial Sequence
  Oligonucleotide primer for the detection of SNP TSC0001064
attctcatacta

SEQ ID NO: 268331 - DNA, 12 bp, Artificial Sequence
  Oligonucleotide primer for the detection of SNP TSC0001064
gtagtttttatt

SEQ ID NO: 268332 - DNA, 12 bp, Artificial Sequence
  Oligonucleotide primer for the detection of SNP TSC0001064
ataattcttatt

SEQ ID NO: 268333 - DNA, 12 bp, Artificial Sequence
  Oligonucleotide primer for the detection of SNP TSC0001064
tgtttttatatt

SEQ ID NO: 268334 - DNA, 12 bp, Artificial Sequence
  Oligonucleotide primer for the detection of SNP TSC0001067
aaaaataaatca

SEQ ID NO: 268335 - DNA, 12 bp, Artificial Sequence
  Oligonucleotide primer for the detection of SNP TSC0001067
gtttggggttgt

SEQ ID NO: 268336 - DNA, 12 bp, Artificial Sequence
  Oligonucleotide primer for the detection of SNP TSC0001067
atttaaaactat

SEQ ID NO: 268337 - DNA, 12 bp, Artificial Sequence
  Oligonucleotide primer for the detection of SNP TSC0001067
aaaaatgagtta

SEQ ID NO: 268338 - DNA, 12 bp, Artificial Sequence
  Oligonucleotide primer for the detection of SNP TSC0001071
aaacaaacaaaa

SEQ ID NO: 268339 - DNA, 12 bp, Artificial Sequence
  Oligonucleotide primer for the detection of SNP TSC0001071
ttttgtgatttt

SEQ ID NO: 268340 - DNA, 12 bp, Artificial Sequence
  Oligonucleotide primer for the detection of SNP TSC0001071
aaccttataatc

SEQ ID NO: 268341 - DNA, 12 bp, Artificial Sequence
  Oligonucleotide primer for the detection of SNP TSC0001071
agataggtagag

SEQ ID NO: 268342 - DNA, 12 bp, Artificial Sequence
  Oligonucleotide primer for the detection of SNP TSC0001072
caactctcaaac

SEQ ID NO: 268343 - DNA, 12 bp, Artificial Sequence
  Oligonucleotide primer for the detection of SNP TSC0001072
caactctcgaac

SEQ ID NO: 268344 - DNA, 12 bp, Artificial Sequence
  Oligonucleotide primer for the detection of SNP TSC0001072
aataggaaatag

SEQ ID NO: 268345 - DNA, 12 bp, Artificial Sequence
  Oligonucleotide primer for the detection of SNP TSC0001073
aacatcacatat

SEQ ID NO: 268346 - DNA, 12 bp, Artificial Sequence
  Oligonucleotide primer for the detection of SNP TSC0001073
ttatggaatttg

SEQ ID NO: 268347 - DNA, 12 bp, Artificial Sequence
  Oligonucleotide primer for the detection of SNP TSC0001073
ttacggaatttg

SEQ ID NO: 268348 - DNA, 12 bp, Artificial Sequence
  Oligonucleotide primer for the detection of SNP TSC0001073
tcacaaaaccta

SEQ ID NO: 268349 - DNA, 12 bp, Artificial Sequence
  Oligonucleotide primer for the detection of SNP TSC0001073
tcacgaaaccta

SEQ ID NO: 268350 - DNA, 12 bp, Artificial Sequence
  Oligonucleotide primer for the detection of SNP TSC0001073
gatattatatgt

SEQ ID NO: 268351 - DNA, 12 bp, Artificial Sequence
  Oligonucleotide primer for the detection of SNP TSC0001078
caacaatactta

SEQ ID NO: 268352 - DNA, 12 bp, Artificial Sequence
  Oligonucleotide primer for the detection of SNP TSC0001078
atggaagggaat

SEQ ID NO: 268353 - DNA, 12 bp, Artificial Sequence
  Oligonucleotide primer for the detection of SNP TSC0001078
tagtaatgtttg

SEQ ID NO: 268354 - DNA, 12 bp, Artificial Sequence
  Oligonucleotide primer for the detection of SNP TSC0001082
ttttttaataaa

SEQ ID NO: 268355 - DNA, 12 bp, Artificial Sequence
  Oligonucleotide primer for the detection of SNP TSC0001082
tttaatttatat

SEQ ID NO: 268356 - DNA, 12 bp, Artificial Sequence
  Oligonukleotid-Primer
acctaattcata

SEQ ID NO: 268357 - DNA, 12 bp, Artificial Sequence
  Oligonucleotide primer for the detection of SNP TSC0001083
acttctcacaat

SEQ ID NO: 268358 - DNA, 12 bp, Artificial Sequence
  Oligonucleotide primer for the detection of SNP TSC0001083
ttttagttttta

SEQ ID NO: 268359 - DNA, 12 bp, Artificial Sequence
  Oligonucleotide primer for the detection of SNP TSC0001083
ttcaacctccaa

SEQ ID NO: 268360 - DNA, 12 bp, Artificial Sequence
  Oligonucleotide primer for the detection of SNP TSC0001083
attttttatagt

SEQ ID NO: 268361 - DNA, 12 bp, Artificial Sequence
  Oligonucleotide primer for the detection of SNP TSC0001086
tttacaaaaaca

SEQ ID NO: 268362 - DNA, 12 bp, Artificial Sequence
  Oligonucleotide primer for the detection of SNP TSC0001086
tgtatttgggat

SEQ ID NO: 268363 - DNA, 12 bp, Artificial Sequence
  Oligonucleotide primer for the detection of SNP TSC0001086
tgtattcgggat

SEQ ID NO: 268364 - DNA, 12 bp, Artificial Sequence
  Oligonucleotide primer for the detection of SNP TSC0001086
tacatccaaaac

SEQ ID NO: 268365 - DNA, 12 bp, Artificial Sequence
  Oligonucleotide primer for the detection of SNP TSC0001086
tacatccgaaac

SEQ ID NO: 268366 - DNA, 12 bp, Artificial Sequence
  Oligonucleotide primer for the detection of SNP TSC0001086
tttatagaagta

SEQ ID NO: 268367 - DNA, 12 bp, Artificial Sequence
  Oligonucleotide primer for the detection of SNP TSC0001087
taaaaaacatta

SEQ ID NO: 268368 - DNA, 12 bp, Artificial Sequence
  Oligonucleotide primer for the detection of SNP TSC0001087
tgtatttttata

SEQ ID NO: 268369 - DNA, 12 bp, Artificial Sequence
  Oligonucleotide primer for the detection of SNP TSC0001087
cgtatttttata

SEQ ID NO: 268370 - DNA, 12 bp, Artificial Sequence
  Oligonucleotide primer for the detection of SNP TSC0001087
catacttctaca

SEQ ID NO: 268371 - DNA, 12 bp, Artificial Sequence
  Oligonucleotide primer for the detection of SNP TSC0001087
cgtacttctaca

SEQ ID NO: 268372 - DNA, 12 bp, Artificial Sequence
  Oligonucleotide primer for the detection of SNP TSC0001087
agaaagtattat

SEQ ID NO: 268373 - DNA, 12 bp, Artificial Sequence
  Oligonucleotide primer for the detection of SNP TSC0001088
acctatatatat

SEQ ID NO: 268374 - DNA, 12 bp, Artificial Sequence
  Oligonucleotide primer for the detection of SNP TSC0001088
attatatttata

SEQ ID NO: 268375 - DNA, 12 bp, Artificial Sequence
  Oligonucleotide primer for the detection of SNP TSC0001088
accacactcaca

SEQ ID NO: 268376 - DNA, 12 bp, Artificial Sequence
  Oligonucleotide primer for the detection of SNP TSC0001088
atttgtgtgtgt

SEQ ID NO: 268377 - DNA, 12 bp, Artificial Sequence
  Oligonucleotide primer for the detection of SNP TSC0001089
aaaacacaatat

SEQ ID NO: 268378 - DNA, 12 bp, Artificial Sequence
  Oligonucleotide primer for the detection of SNP TSC0001089
ttagatagtgaa

SEQ ID NO: 268379 - DNA, 12 bp, Artificial Sequence
  Oligonucleotide primer for the detection of SNP TSC0001093
ctatctcatttt

SEQ ID NO: 268380 - DNA, 12 bp, Artificial Sequence
  Oligonucleotide primer for the detection of SNP TSC0001093
tggtggagggaa

SEQ ID NO: 268381 - DNA, 12 bp, Artificial Sequence
  Oligonucleotide primer for the detection of SNP TSC0001094
ctatataaattc

SEQ ID NO: 268382 - DNA, 12 bp, Artificial Sequence
  Oligonucleotide primer for the detection of SNP TSC0001094
gtgattagatta

SEQ ID NO: 268383 - DNA, 12 bp, Artificial Sequence
  Oligonucleotide primer for the detection of SNP TSC0001095
aaactaataaca

SEQ ID NO: 268384 - DNA, 12 bp, Artificial Sequence
  Oligonucleotide primer for the detection of SNP TSC0001095
gggtagaaagtt

SEQ ID NO: 268385 - DNA, 12 bp, Artificial Sequence
  Oligonucleotide primer for the detection of SNP TSC0001095
aaacaaaaaatt

SEQ ID NO: 268386 - DNA, 12 bp, Artificial Sequence
  Oligonucleotide primer for the detection of SNP TSC0001095
aagttgatgata

SEQ ID NO: 268387 - DNA, 12 bp, Artificial Sequence
  Oligonucleotide primer for the detection of SNP TSC0001097
aaacatctaaca

SEQ ID NO: 268388 - DNA, 12 bp, Artificial Sequence
  Oligonucleotide primer for the detection of SNP TSC0001097
tttaagatattt

SEQ ID NO: 268389 - DNA, 12 bp, Artificial Sequence
  Oligonucleotide primer for the detection of SNP TSC0001097
ctcaaaacaccc

SEQ ID NO: 268390 - DNA, 12 bp, Artificial Sequence
  Oligonucleotide primer for the detection of SNP TSC0001097
aggtatttaata

SEQ ID NO: 268391 - DNA, 12 bp, Artificial Sequence
  Oligonucleotide primer for the detection of SNP TSC0001098
aaaaacctaaaa

SEQ ID NO: 268392 - DNA, 12 bp, Artificial Sequence
  Oligonucleotide primer for the detection of SNP TSC0001098
tttgtgtatttt

SEQ ID NO: 268393 - DNA, 12 bp, Artificial Sequence
  Oligonucleotide primer for the detection of SNP TSC0001098
cctatacactct

SEQ ID NO: 268394 - DNA, 12 bp, Artificial Sequence
  Oligonucleotide primer for the detection of SNP TSC0001098
aggggtttggga

SEQ ID NO: 268395 - DNA, 12 bp, Artificial Sequence
  Oligonucleotide primer for the detection of SNP TSC0001099
aaactattaata

SEQ ID NO: 268396 - DNA, 12 bp, Artificial Sequence
  Oligonucleotide primer for the detection of SNP TSC0001099
atttagattttg

SEQ ID NO: 268397 - DNA, 12 bp, Artificial Sequence
  Oligonucleotide primer for the detection of SNP TSC0001099
ctaaaccctaaa

SEQ ID NO: 268398 - DNA, 12 bp, Artificial Sequence
  Oligonucleotide primer for the detection of SNP TSC0001099
agttgttaatat

SEQ ID NO: 268399 - DNA, 12 bp, Artificial Sequence
  Oligonucleotide primer for the detection of SNP TSC0001100
catcatctctat

SEQ ID NO: 268400 - DNA, 12 bp, Artificial Sequence
  Oligonucleotide primer for the detection of SNP TSC0001100
tagtaggtttag

SEQ ID NO: 268401 - DNA, 12 bp, Artificial Sequence
  Oligonucleotide primer for the detection of SNP TSC0001101
atttaattattt

SEQ ID NO: 268402 - DNA, 12 bp, Artificial Sequence
  Oligonucleotide primer for the detection of SNP TSC0001101
attaaataaatg

SEQ ID NO: 268403 - DNA, 12 bp, Artificial Sequence
  Oligonucleotide primer for the detection of SNP TSC0001101
attaaacaaata

SEQ ID NO: 268404 - DNA, 12 bp, Artificial Sequence
  Oligonucleotide primer for the detection of SNP TSC0001102
ctattctctttc

SEQ ID NO: 268405 - DNA, 12 bp, Artificial Sequence
  Oligonucleotide primer for the detection of SNP TSC0001102
aaattatataag

SEQ ID NO: 268406 - DNA, 12 bp, Artificial Sequence
  Oligonucleotide primer for the detection of SNP TSC0001102
aactacacaaaa

SEQ ID NO: 268407 - DNA, 12 bp, Artificial Sequence
  Oligonucleotide primer for the detection of SNP TSC0001102
ttattttttttc

SEQ ID NO: 268408 - DNA, 12 bp, Artificial Sequence
  Oligonucleotide primer for the detection of SNP TSC0001110
atttaataattt

SEQ ID NO: 268409 - DNA, 12 bp, Artificial Sequence
  Oligonucleotide primer for the detection of SNP TSC0001110
ttgttattttgg

SEQ ID NO: 268410 - DNA, 12 bp, Artificial Sequence
  Oligonucleotide primer for the detection of SNP TSC0001122
ttttaacaacat

SEQ ID NO: 268411 - DNA, 12 bp, Artificial Sequence
  Oligonucleotide primer for the detection of SNP TSC0001122
ttttaacgacat

SEQ ID NO: 268412 - DNA, 12 bp, Artificial Sequence
  Oligonucleotide primer for the detection of SNP TSC0001122
ttagttatttta

SEQ ID NO: 268413 - DNA, 12 bp, Artificial Sequence
  Oligonucleotide primer for the detection of SNP TSC0001123
taacaaatccat

SEQ ID NO: 268414 - DNA, 12 bp, Artificial Sequence
  Oligonucleotide primer for the detection of SNP TSC0001123
aaagaatttttg

SEQ ID NO: 268415 - DNA, 12 bp, Artificial Sequence
  Oligonucleotide primer for the detection of SNP TSC0001123
aaaaaacctcta

SEQ ID NO: 268416 - DNA, 12 bp, Artificial Sequence
  Oligonucleotide primer for the detection of SNP TSC0001123
taataagtttat

SEQ ID NO: 268417 - DNA, 12 bp, Artificial Sequence
  Oligonucleotide primer for the detection of SNP TSC0001127
ccataaaaaaaa

SEQ ID NO: 268418 - DNA, 12 bp, Artificial Sequence
  Oligonucleotide primer for the detection of SNP TSC0001127
tttttgtaattt

SEQ ID NO: 268419 - DNA, 12 bp, Artificial Sequence
  Oligonucleotide primer for the detection of SNP TSC0001127
ctttacaactca

SEQ ID NO: 268420 - DNA, 12 bp, Artificial Sequence
  Oligonucleotide primer for the detection of SNP TSC0001127
ttataaaggaga

SEQ ID NO: 268421 - DNA, 12 bp, Artificial Sequence
  Oligonucleotide primer for the detection of SNP TSC0001128
aaacaaaatttt

SEQ ID NO: 268422 - DNA, 12 bp, Artificial Sequence
  Oligonucleotide primer for the detection of SNP TSC0001128
agtgtgtggagg

SEQ ID NO: 268423 - DNA, 12 bp, Artificial Sequence
  Oligonucleotide primer for the detection of SNP TSC0001129
taaacatctcca

SEQ ID NO: 268424 - DNA, 12 bp, Artificial Sequence
  Oligonucleotide primer for the detection of SNP TSC0001129
taaacatctccg

SEQ ID NO: 268425 - DNA, 12 bp, Artificial Sequence
  Oligonucleotide primer for the detection of SNP TSC0001129
gggttttttatt

SEQ ID NO: 268426 - DNA, 12 bp, Artificial Sequence
  Oligonucleotide primer for the detection of SNP TSC0001129
aaatctttcact

SEQ ID NO: 268427 - DNA, 12 bp, Artificial Sequence
  Oligonucleotide primer for the detection of SNP TSC0001129
taagtatttttg

SEQ ID NO: 268428 - DNA, 12 bp, Artificial Sequence
  Oligonucleotide primer for the detection of SNP TSC0001129
taagtattttcg

SEQ ID NO: 268429 - DNA, 12 bp, Artificial Sequence
  Oligonucleotide primer for the detection of SNP TSC0001133
tacatttttttt

SEQ ID NO: 268430 - DNA, 12 bp, Artificial Sequence
  Oligonucleotide primer for the detection of SNP TSC0001133
gttagatttttt

SEQ ID NO: 268431 - DNA, 12 bp, Artificial Sequence
  Oligonucleotide primer for the detection of SNP TSC0001133
accaaacttttt

SEQ ID NO: 268432 - DNA, 12 bp, Artificial Sequence
  Oligonucleotide primer for the detection of SNP TSC0001133
tgtatttttttt

SEQ ID NO: 268433 - DNA, 12 bp, Artificial Sequence
  Oligonukleotid-Primer
aaaacaatctca

SEQ ID NO: 268434 - DNA, 12 bp, Artificial Sequence
  Oligonucleotide primer for the detection of SNP TSC0001134
gtttttgggttt

SEQ ID NO: 268435 - DNA, 12 bp, Artificial Sequence
  Oligonucleotide primer for the detection of SNP TSC0001134
atctctaaactt

SEQ ID NO: 268436 - DNA, 12 bp, Artificial Sequence
  Oligonucleotide primer for the detection of SNP TSC0001134
aggatagtttta

SEQ ID NO: 268437 - DNA, 12 bp, Artificial Sequence
  Oligonucleotide primer for the detection of SNP TSC0001136
tttacaaaattt

SEQ ID NO: 268438 - DNA, 12 bp, Artificial Sequence
  Oligonucleotide primer for the detection of SNP TSC0001136
agtagtaattgg

SEQ ID NO: 268439 - DNA, 12 bp, Artificial Sequence
  Oligonucleotide primer for the detection of SNP TSC0001141
acaaacctaaac

SEQ ID NO: 268440 - DNA, 12 bp, Artificial Sequence
  Oligonucleotide primer for the detection of SNP TSC0001141
agggttttgtta

SEQ ID NO: 268441 - DNA, 12 bp, Artificial Sequence
  Oligonucleotide primer for the detection of SNP TSC0001142
aacaaactaaat

SEQ ID NO: 268442 - DNA, 12 bp, Artificial Sequence
  Oligonucleotide primer for the detection of SNP TSC0001142
aggtgttagtta

SEQ ID NO: 268443 - DNA, 12 bp, Artificial Sequence
  Oligonucleotide primer for the detection of SNP TSC0001142
aaatattaacca

SEQ ID NO: 268444 - DNA, 12 bp, Artificial Sequence
  Oligonucleotide primer for the detection of SNP TSC0001142
gataggttggat

SEQ ID NO: 268445 - DNA, 12 bp, Artificial Sequence
  Oligonucleotide primer for the detection of SNP TSC0001146
caaccacacaat

SEQ ID NO: 268446 - DNA, 12 bp, Artificial Sequence
  Oligonucleotide primer for the detection of SNP TSC0001146
taaagtttttta

SEQ ID NO: 268447 - DNA, 12 bp, Artificial Sequence
  Oligonucleotide primer for the detection of SNP TSC0001147
ttaatataattt

SEQ ID NO: 268448 - DNA, 12 bp, Artificial Sequence
  Oligonucleotide primer for the detection of SNP TSC0001147
aaaaagttttaa

SEQ ID NO: 268449 - DNA, 12 bp, Artificial Sequence
  Oligonucleotide primer for the detection of SNP TSC0001147
aaaaaatctcaa

SEQ ID NO: 268450 - DNA, 12 bp, Artificial Sequence
  Oligonucleotide primer for the detection of SNP TSC0001147
ttggtatgattt

SEQ ID NO: 268451 - DNA, 12 bp, Artificial Sequence
  Oligonucleotide primer for the detection of SNP TSC0001154
atatattaaacc

SEQ ID NO: 268452 - DNA, 12 bp, Artificial Sequence
  Oligonucleotide primer for the detection of SNP TSC0001154
agtaatgtaaaa

SEQ ID NO: 268453 - DNA, 12 bp, Artificial Sequence
  Oligonucleotide primer for the detection of SNP TSC0001155
ataattaccaat

SEQ ID NO: 268454 - DNA, 12 bp, Artificial Sequence
  Oligonucleotide primer for the detection of SNP TSC0001155
ttttatttgtta

SEQ ID NO: 268455 - DNA, 12 bp, Artificial Sequence
  Oligonucleotide primer for the detection of SNP TSC0001156
tcttcaaactat

SEQ ID NO: 268456 - DNA, 12 bp, Artificial Sequence
  Oligonucleotide primer for the detection of SNP TSC0001156
ttagtattatgt

SEQ ID NO: 268457 - DNA, 12 bp, Artificial Sequence
  Oligonucleotide primer for the detection of SNP TSC0001157
atattcctaatt

SEQ ID NO: 268458 - DNA, 12 bp, Artificial Sequence
  Oligonucleotide primer for the detection of SNP TSC0001157
ttaaattggtaa

SEQ ID NO: 268459 - DNA, 12 bp, Artificial Sequence
  Oligonucleotide primer for the detection of SNP TSC0001157
ctaaactaacaa

SEQ ID NO: 268460 - DNA, 12 bp, Artificial Sequence
  Oligonucleotide primer for the detection of SNP TSC0001157
gtgtttttagtt

SEQ ID NO: 268461 - DNA, 12 bp, Artificial Sequence
  Oligonucleotide primer for the detection of SNP TSC0001158
accaacaccata

SEQ ID NO: 268462 - DNA, 12 bp, Artificial Sequence
  Oligonucleotide primer for the detection of SNP TSC0001158
ggttatatagga

SEQ ID NO: 268463 - DNA, 12 bp, Artificial Sequence
  Oligonucleotide primer for the detection of SNP TSC0001158
aactatacaaaa

SEQ ID NO: 268464 - DNA, 12 bp, Artificial Sequence
  Oligonucleotide primer for the detection of SNP TSC0001160
ttatttaatttt

SEQ ID NO: 268465 - DNA, 12 bp, Artificial Sequence
  Oligonucleotide primer for the detection of SNP TSC0001160
ccatctaatcct

SEQ ID NO: 268466 - DNA, 12 bp, Artificial Sequence
  Oligonucleotide primer for the detection of SNP TSC0001160
aatatttggaag

SEQ ID NO: 268467 - DNA, 12 bp, Artificial Sequence
  Oligonucleotide primer for the detection of SNP TSC0001161
ataaaaaaaaat

SEQ ID NO: 268468 - DNA, 12 bp, Artificial Sequence
  Oligonucleotide primer for the detection of SNP TSC0001161
tttaagagtgta

SEQ ID NO: 268469 - DNA, 12 bp, Artificial Sequence
  Oligonucleotide primer for the detection of SNP TSC0001166
ataatctcaaat

SEQ ID NO: 268470 - DNA, 12 bp, Artificial Sequence
  Oligonucleotide primer for the detection of SNP TSC0001166
tttttaataagt

SEQ ID NO: 268471 - DNA, 12 bp, Artificial Sequence
  Oligonucleotide primer for the detection of SNP TSC0001166
ttcccaataaat

SEQ ID NO: 268472 - DNA, 12 bp, Artificial Sequence
  Oligonucleotide primer for the detection of SNP TSC0001166
gtggttttagat

SEQ ID NO: 268473 - DNA, 12 bp, Artificial Sequence
  Oligonucleotide primer for the detection of SNP TSC0001167
tatggtaagata

SEQ ID NO: 268474 - DNA, 12 bp, Artificial Sequence
  Oligonucleotide primer for the detection of SNP TSC0001168
cccccctccact

SEQ ID NO: 268475 - DNA, 12 bp, Artificial Sequence
  Oligonucleotide primer for the detection of SNP TSC0001168
gtttgttgagag

SEQ ID NO: 268476 - DNA, 12 bp, Artificial Sequence
  Oligonucleotide primer for the detection of SNP TSC0001169
atcctaactaat

SEQ ID NO: 268477 - DNA, 12 bp, Artificial Sequence
  Oligonucleotide primer for the detection of SNP TSC0001169
gaaatattatga

SEQ ID NO: 268478 - DNA, 12 bp, Artificial Sequence
  Oligonucleotide primer for the detection of SNP TSC0001169
gaaatattacga

SEQ ID NO: 268479 - DNA, 12 bp, Artificial Sequence
  Oligonucleotide primer for the detection of SNP TSC0001170
aactctcttttc

SEQ ID NO: 268480 - DNA, 12 bp, Artificial Sequence
  Oligonucleotide primer for the detection of SNP TSC0001170
attttgttatat

SEQ ID NO: 268481 - DNA, 12 bp, Artificial Sequence
  Oligonucleotide primer for the detection of SNP TSC0001170
ttctaccacaca

SEQ ID NO: 268482 - DNA, 12 bp, Artificial Sequence
  Oligonucleotide primer for the detection of SNP TSC0001170
agtttttttttt

SEQ ID NO: 268483 - DNA, 12 bp, Artificial Sequence
  Oligonucleotide primer for the detection of SNP TSC0001171
aaaatctaaccc

SEQ ID NO: 268484 - DNA, 12 bp, Artificial Sequence
  Oligonucleotide primer for the detection of SNP TSC0001171
agagagttgaga

SEQ ID NO: 268485 - DNA, 12 bp, Artificial Sequence
  Oligonucleotide primer for the detection of SNP TSC0001172
ccactaccccaa

SEQ ID NO: 268486 - DNA, 12 bp, Artificial Sequence
  Oligonucleotide primer for the detection of SNP TSC0001172
gggtatattaaa

SEQ ID NO: 268487 - DNA, 12 bp, Artificial Sequence
  Oligonucleotide primer for the detection of SNP TSC0001173
ataaaatcttta

SEQ ID NO: 268488 - DNA, 12 bp, Artificial Sequence
  Oligonucleotide primer for the detection of SNP TSC0001173
tatttaagtatt

SEQ ID NO: 268489 - DNA, 12 bp, Artificial Sequence
  Oligonucleotide primer for the detection of SNP TSC0001173
tacttaaatatt

SEQ ID NO: 268490 - DNA, 12 bp, Artificial Sequence
  Oligonucleotide primer for the detection of SNP TSC0001173
tagagtttttgt

SEQ ID NO: 268491 - DNA, 12 bp, Artificial Sequence
  Oligonucleotide primer for the detection of SNP TSC0001174
aaaataaacctc

SEQ ID NO: 268492 - DNA, 12 bp, Artificial Sequence
  Oligonucleotide primer for the detection of SNP TSC0001174
gtattatagata

SEQ ID NO: 268493 - DNA, 12 bp, Artificial Sequence
  Oligonucleotide primer for the detection of SNP TSC0001174
atattacaaaca

SEQ ID NO: 268494 - DNA, 12 bp, Artificial Sequence
  Oligonucleotide primer for the detection of SNP TSC0001174
ggagtggatttt

SEQ ID NO: 268495 - DNA, 12 bp, Artificial Sequence
  Oligonucleotide primer for the detection of SNP TSC0001176
caatttcatcca

SEQ ID NO: 268496 - DNA, 12 bp, Artificial Sequence
  Oligonucleotide primer for the detection of SNP TSC0001176
tgtttgtggaat

SEQ ID NO: 268497 - DNA, 12 bp, Artificial Sequence
  Oligonucleotide primer for the detection of SNP TSC0001176
tacctataaaac

SEQ ID NO: 268498 - DNA, 12 bp, Artificial Sequence
  Oligonucleotide primer for the detection of SNP TSC0001176
tagttttattta

SEQ ID NO: 268499 - DNA, 12 bp, Artificial Sequence
  Oligonucleotide primer for the detection of SNP TSC0001181
aaaaaaacctca

SEQ ID NO: 268500 - DNA, 12 bp, Artificial Sequence
  Oligonucleotide primer for the detection of SNP TSC0001181
aaaaaaacctcg

SEQ ID NO: 268501 - DNA, 12 bp, Artificial Sequence
  Oligonucleotide primer for the detection of SNP TSC0001181
ttttatatttag

SEQ ID NO: 268502 - DNA, 12 bp, Artificial Sequence
  Oligonucleotide primer for the detection of SNP TSC0001181
tctcatacccaa

SEQ ID NO: 268503 - DNA, 12 bp, Artificial Sequence
  Oligonucleotide primer for the detection of SNP TSC0001181
gagaaagttttg

SEQ ID NO: 268504 - DNA, 12 bp, Artificial Sequence
  Oligonucleotide primer for the detection of SNP TSC0001181
gagaaagtttcg

SEQ ID NO: 268505 - DNA, 12 bp, Artificial Sequence
  Oligonucleotide primer for the detection of SNP TSC0001183
gatggagaagag

SEQ ID NO: 268506 - DNA, 12 bp, Artificial Sequence
  Oligonucleotide primer for the detection of SNP TSC0001185
ttttttcttcct

SEQ ID NO: 268507 - DNA, 12 bp, Artificial Sequence
  Oligonucleotide primer for the detection of SNP TSC0001185
tgtgagaaagta

SEQ ID NO: 268508 - DNA, 12 bp, Artificial Sequence
  Oligonucleotide primer for the detection of SNP TSC0001186
ataaaaaaaaaa

SEQ ID NO: 268509 - DNA, 12 bp, Artificial Sequence
  Oligonucleotide primer for the detection of SNP TSC0001186
ttttgaaaggtt

SEQ ID NO: 268510 - DNA, 12 bp, Artificial Sequence
  Oligonucleotide primer for the detection of SNP TSC0001186
ttttgaaaggtc

SEQ ID NO: 268511 - DNA, 12 bp, Artificial Sequence
  Oligonucleotide primer for the detection of SNP TSC0001186
cctctaaaaaat

SEQ ID NO: 268512 - DNA, 12 bp, Artificial Sequence
  Oligonucleotide primer for the detection of SNP TSC0001186
atggagaagaaa

SEQ ID NO: 268513 - DNA, 12 bp, Artificial Sequence
  Oligonucleotide primer for the detection of SNP TSC0001187
ataaaatatctc

SEQ ID NO: 268514 - DNA, 12 bp, Artificial Sequence
  Oligonucleotide primer for the detection of SNP TSC0001187
tttaaatgattt

SEQ ID NO: 268515 - DNA, 12 bp, Artificial Sequence
  Oligonucleotide primer for the detection of SNP TSC0001187
ccaaataattta

SEQ ID NO: 268516 - DNA, 12 bp, Artificial Sequence
  Oligonucleotide primer for the detection of SNP TSC0001187
atgaagtatttt

SEQ ID NO: 268517 - DNA, 12 bp, Artificial Sequence
  Oligonucleotide primer for the detection of SNP TSC0001193
catcataaattc

SEQ ID NO: 268518 - DNA, 12 bp, Artificial Sequence
  Oligonucleotide primer for the detection of SNP TSC0001193
cgtcataaattc

SEQ ID NO: 268519 - DNA, 12 bp, Artificial Sequence
  Oligonucleotide primer for the detection of SNP TSC0001193
aattgatatttt

SEQ ID NO: 268520 - DNA, 12 bp, Artificial Sequence
  Oligonucleotide primer for the detection of SNP TSC0001197
atatatataaat

SEQ ID NO: 268521 - DNA, 12 bp, Artificial Sequence
  Oligonucleotide primer for the detection of SNP TSC0001197
aataaatatata

SEQ ID NO: 268522 - DNA, 12 bp, Artificial Sequence
  Oligonucleotide primer for the detection of SNP TSC0001197
atatatgtagat

SEQ ID NO: 268523 - DNA, 12 bp, Artificial Sequence
  Oligonucleotide primer for the detection of SNP TSC0001198
tctttttatccc

SEQ ID NO: 268524 - DNA, 12 bp, Artificial Sequence
  Oligonucleotide primer for the detection of SNP TSC0001198
ttatatgttaag

SEQ ID NO: 268525 - DNA, 12 bp, Artificial Sequence
  Oligonucleotide primer for the detection of SNP TSC0001198
ttatacgttaag

SEQ ID NO: 268526 - DNA, 12 bp, Artificial Sequence
  Oligonucleotide primer for the detection of SNP TSC0001202
aaatacttacac

SEQ ID NO: 268527 - DNA, 12 bp, Artificial Sequence
  Oligonucleotide primer for the detection of SNP TSC0001202
tgagtaagaagt

SEQ ID NO: 268528 - DNA, 12 bp, Artificial Sequence
  Oligonucleotide primer for the detection of SNP TSC0001202
aatgtttatatt

SEQ ID NO: 268529 - DNA, 12 bp, Artificial Sequence
  Oligonucleotide primer for the detection of SNP TSC0001203
tcacctttatcc

SEQ ID NO: 268530 - DNA, 12 bp, Artificial Sequence
  Oligonukleotid-Primer
ataaattggtga

SEQ ID NO: 268531 - DNA, 12 bp, Artificial Sequence
  Oligonucleotide primer for the detection of SNP TSC0001204
caaaaataaaac

SEQ ID NO: 268532 - DNA, 12 bp, Artificial Sequence
  Oligonucleotide primer for the detection of SNP TSC0001204
atttttgtagta

SEQ ID NO: 268533 - DNA, 12 bp, Artificial Sequence
  Oligonucleotide primer for the detection of SNP TSC0001205
ctaaaaaaaaaa

SEQ ID NO: 268534 - DNA, 12 bp, Artificial Sequence
  Oligonukleotid-Primer
ttttgttttttg

SEQ ID NO: 268535 - DNA, 12 bp, Artificial Sequence
  Oligonucleotide primer for the detection of SNP TSC0001205
ttttatttttta

SEQ ID NO: 268536 - DNA, 12 bp, Artificial Sequence
  Oligonucleotide primer for the detection of SNP TSC0001205
ttgagaaaaaaa

SEQ ID NO: 268537 - DNA, 12 bp, Artificial Sequence
  Oligonucleotide primer for the detection of SNP TSC0001211
aaaaatacaaac

SEQ ID NO: 268538 - DNA, 12 bp, Artificial Sequence
  Oligonucleotide primer for the detection of SNP TSC0001211
tgtatttattta

SEQ ID NO: 268539 - DNA, 12 bp, Artificial Sequence
  Oligonucleotide primer for the detection of SNP TSC0001212
acaaaaaaacta

SEQ ID NO: 268540 - DNA, 12 bp, Artificial Sequence
  Oligonucleotide primer for the detection of SNP TSC0001212
ttgtatgggttt

SEQ ID NO: 268541 - DNA, 12 bp, Artificial Sequence
  Oligonucleotide primer for the detection of SNP TSC0001212
ttacataaaccc

SEQ ID NO: 268542 - DNA, 12 bp, Artificial Sequence
  Oligonucleotide primer for the detection of SNP TSC0001212
ataaagaggtta

SEQ ID NO: 268543 - DNA, 12 bp, Artificial Sequence
  Oligonucleotide primer for the detection of SNP TSC0001213
tcttataactac

SEQ ID NO: 268544 - DNA, 12 bp, Artificial Sequence
  Oligonucleotide primer for the detection of SNP TSC0001213
tataatggaata

SEQ ID NO: 268545 - DNA, 12 bp, Artificial Sequence
  Oligonucleotide primer for the detection of SNP TSC0001214
tatccactccat

SEQ ID NO: 268546 - DNA, 12 bp, Artificial Sequence
  Oligonucleotide primer for the detection of SNP TSC0001214
aaatgtttatta

SEQ ID NO: 268547 - DNA, 12 bp, Artificial Sequence
  Oligonucleotide primer for the detection of SNP TSC0001218
accttccctaca

SEQ ID NO: 268548 - DNA, 12 bp, Artificial Sequence
  Oligonucleotide primer for the detection of SNP TSC0001218
accttccctacg

SEQ ID NO: 268549 - DNA, 12 bp, Artificial Sequence
  Oligonucleotide primer for the detection of SNP TSC0001218
ttaggatagttt

SEQ ID NO: 268550 - DNA, 12 bp, Artificial Sequence
  Oligonucleotide primer for the detection of SNP TSC0001218
ccaaaacaaccc

SEQ ID NO: 268551 - DNA, 12 bp, Artificial Sequence
  Oligonucleotide primer for the detection of SNP TSC0001218
gttttttttgtg

SEQ ID NO: 268552 - DNA, 12 bp, Artificial Sequence
  Oligonucleotide primer for the detection of SNP TSC0001218
gttttttttgcg

SEQ ID NO: 268553 - DNA, 12 bp, Artificial Sequence
  Oligonucleotide primer for the detection of SNP TSC0001219
aaataaaattat

SEQ ID NO: 268554 - DNA, 12 bp, Artificial Sequence
  Oligonucleotide primer for the detection of SNP TSC0001219
aaagagtgaggg

SEQ ID NO: 268555 - DNA, 12 bp, Artificial Sequence
  Oligonucleotide primer for the detection of SNP TSC0001223
caaaattaaact

SEQ ID NO: 268556 - DNA, 12 bp, Artificial Sequence
  Oligonucleotide primer for the detection of SNP TSC0001223
attgtaaggtgg

SEQ ID NO: 268557 - DNA, 12 bp, Artificial Sequence
  Oligonucleotide primer for the detection of SNP TSC0001223
attacaaaataa

SEQ ID NO: 268558 - DNA, 12 bp, Artificial Sequence
  Oligonucleotide primer for the detection of SNP TSC0001223
taagattaaatt

SEQ ID NO: 268559 - DNA, 12 bp, Artificial Sequence
  Oligonucleotide primer for the detection of SNP TSC0001224
taaaaaaaaaaa

SEQ ID NO: 268560 - DNA, 12 bp, Artificial Sequence
  Oligonucleotide primer for the detection of SNP TSC0001224
tttaaagtgtgt

SEQ ID NO: 268561 - DNA, 12 bp, Artificial Sequence
  Oligonucleotide primer for the detection of SNP TSC0001224
tccaaaatatat

SEQ ID NO: 268562 - DNA, 12 bp, Artificial Sequence
  Oligonucleotide primer for the detection of SNP TSC0001230
ctcatcttattc

SEQ ID NO: 268563 - DNA, 12 bp, Artificial Sequence
  Oligonucleotide primer for the detection of SNP TSC0001230
aagatatgtaat

SEQ ID NO: 268564 - DNA, 12 bp, Artificial Sequence
  Oligonucleotide primer for the detection of SNP TSC0001230
aaaaatatataa

SEQ ID NO: 268565 - DNA, 12 bp, Artificial Sequence
  Oligonucleotide primer for the detection of SNP TSC0001230
tttattttattt

SEQ ID NO: 268566 - DNA, 12 bp, Artificial Sequence
  Oligonucleotide primer for the detection of SNP TSC0001230
tttattttattc

SEQ ID NO: 268567 - DNA, 12 bp, Artificial Sequence
  Oligonucleotide primer for the detection of SNP TSC0001231
acaatcctttaa

SEQ ID NO: 268568 - DNA, 12 bp, Artificial Sequence
  Oligonucleotide primer for the detection of SNP TSC0001231
tgttaagttttt

SEQ ID NO: 268569 - DNA, 12 bp, Artificial Sequence
  Oligonucleotide primer for the detection of SNP TSC0001231
taccaaattttt

SEQ ID NO: 268570 - DNA, 12 bp, Artificial Sequence
  Oligonucleotide primer for the detection of SNP TSC0001231
atagttttttaa

SEQ ID NO: 268571 - DNA, 12 bp, Artificial Sequence
  Oligonucleotide primer for the detection of SNP TSC0001232
aactataattat

SEQ ID NO: 268572 - DNA, 12 bp, Artificial Sequence
  Oligonucleotide primer for the detection of SNP TSC0001232
aatgtttgttga

SEQ ID NO: 268573 - DNA, 12 bp, Artificial Sequence
  Oligonucleotide primer for the detection of SNP TSC0001232
aacgtttgttga

SEQ ID NO: 268574 - DNA, 12 bp, Artificial Sequence
  Oligonucleotide primer for the detection of SNP TSC0001233
ataaaataaccc

SEQ ID NO: 268575 - DNA, 12 bp, Artificial Sequence
  Oligonucleotide primer for the detection of SNP TSC0001233
tggtattgttta

SEQ ID NO: 268576 - DNA, 12 bp, Artificial Sequence
  Oligonucleotide primer for the detection of SNP TSC0001234
taaaaactttat

SEQ ID NO: 268577 - DNA, 12 bp, Artificial Sequence
  Oligonucleotide primer for the detection of SNP TSC0001234
gagttaggggtg

SEQ ID NO: 268578 - DNA, 12 bp, Artificial Sequence
  Oligonucleotide primer for the detection of SNP TSC0001235
taacccttaaac

SEQ ID NO: 268579 - DNA, 12 bp, Artificial Sequence
  Oligonucleotide primer for the detection of SNP TSC0001235
tccttcctctaa

SEQ ID NO: 268580 - DNA, 12 bp, Artificial Sequence
  Oligonucleotide primer for the detection of SNP TSC0001235
taatttttagat

SEQ ID NO: 268581 - DNA, 12 bp, Artificial Sequence
  Oligonucleotide primer for the detection of SNP TSC0001236
ttactctttaaa

SEQ ID NO: 268582 - DNA, 12 bp, Artificial Sequence
  Oligonucleotide primer for the detection of SNP TSC0001236
attgttattaat

SEQ ID NO: 268583 - DNA, 12 bp, Artificial Sequence
  Oligonucleotide primer for the detection of SNP TSC0001236
attatcatcaac

SEQ ID NO: 268584 - DNA, 12 bp, Artificial Sequence
  Oligonucleotide primer for the detection of SNP TSC0001236
ttgttttttgaa

SEQ ID NO: 268585 - DNA, 12 bp, Artificial Sequence
  Oligonucleotide primer for the detection of SNP TSC0001237
aactaaataaaa

SEQ ID NO: 268586 - DNA, 12 bp, Artificial Sequence
  Oligonucleotide primer for the detection of SNP TSC0001237
ttttccctcaca

SEQ ID NO: 268587 - DNA, 12 bp, Artificial Sequence
  Oligonucleotide primer for the detection of SNP TSC0001237
aattgagtaaaa

SEQ ID NO: 268588 - DNA, 12 bp, Artificial Sequence
  Oligonucleotide primer for the detection of SNP TSC0001238
tacaaaaaaaaa

SEQ ID NO: 268589 - DNA, 12 bp, Artificial Sequence
  Oligonucleotide primer for the detection of SNP TSC0001238
tatataagtgta

SEQ ID NO: 268590 - DNA, 12 bp, Artificial Sequence
  Oligonucleotide primer for the detection of SNP TSC0001238
tatataaataca

SEQ ID NO: 268591 - DNA, 12 bp, Artificial Sequence
  Oligonucleotide primer for the detection of SNP TSC0001238
tgtaaggagaaa

SEQ ID NO: 268592 - DNA, 12 bp, Artificial Sequence
  Oligonucleotide primer for the detection of SNP TSC0001240
ctaatcattaac

SEQ ID NO: 268593 - DNA, 12 bp, Artificial Sequence
  Oligonucleotide primer for the detection of SNP TSC0001240
ctaatcgttaac

SEQ ID NO: 268594 - DNA, 12 bp, Artificial Sequence
  Oligonucleotide primer for the detection of SNP TSC0001240
gaattttggaag

SEQ ID NO: 268595 - DNA, 12 bp, Artificial Sequence
  Oligonucleotide primer for the detection of SNP TSC0001242
ccctaaacacct

SEQ ID NO: 268596 - DNA, 12 bp, Artificial Sequence
  Oligonucleotide primer for the detection of SNP TSC0001242
ttgtgtgtttgg

SEQ ID NO: 268597 - DNA, 12 bp, Artificial Sequence
  Oligonucleotide primer for the detection of SNP TSC0001243
caaaaacacaac

SEQ ID NO: 268598 - DNA, 12 bp, Artificial Sequence
  Oligonucleotide primer for the detection of SNP TSC0001243
tatagattttgg

SEQ ID NO: 268599 - DNA, 12 bp, Artificial Sequence
  Oligonucleotide primer for the detection of SNP TSC0001245
aaaaaatattcc

SEQ ID NO: 268600 - DNA, 12 bp, Artificial Sequence
  Oligonucleotide primer for the detection of SNP TSC0001245
gtgtttaggtta

SEQ ID NO: 268601 - DNA, 12 bp, Artificial Sequence
  Oligonucleotide primer for the detection of SNP TSC0001245
gcgtttaggtta

SEQ ID NO: 268602 - DNA, 12 bp, Artificial Sequence
  Oligonucleotide primer for the detection of SNP TSC0001245
acactcaaacta

SEQ ID NO: 268603 - DNA, 12 bp, Artificial Sequence
  Oligonucleotide primer for the detection of SNP TSC0001245
acgctcaaacta

SEQ ID NO: 268604 - DNA, 12 bp, Artificial Sequence
  Oligonucleotide primer for the detection of SNP TSC0001245
gcactcaaacta

SEQ ID NO: 268605 - DNA, 12 bp, Artificial Sequence
  Oligonucleotide primer for the detection of SNP TSC0001245
gcgctcaaacta

SEQ ID NO: 268606 - DNA, 12 bp, Artificial Sequence
  Oligonucleotide primer for the detection of SNP TSC0001245
ggggaatgtttt

SEQ ID NO: 268607 - DNA, 12 bp, Artificial Sequence
  Oligonucleotide primer for the detection of SNP TSC0001246
aatacctataat

SEQ ID NO: 268608 - DNA, 12 bp, Artificial Sequence
  Oligonucleotide primer for the detection of SNP TSC0001246
ttgagtagttgg

SEQ ID NO: 268609 - DNA, 12 bp, Artificial Sequence
  Oligonucleotide primer for the detection of SNP TSC0001247
aaaactccctaa

SEQ ID NO: 268610 - DNA, 12 bp, Artificial Sequence
  Oligonucleotide primer for the detection of SNP TSC0001247
gtttgagtagag

SEQ ID NO: 268611 - DNA, 12 bp, Artificial Sequence
  Oligonucleotide primer for the detection of SNP TSC0001247
cttaaacaaaaa

SEQ ID NO: 268612 - DNA, 12 bp, Artificial Sequence
  Oligonucleotide primer for the detection of SNP TSC0001247
agagttttttga

SEQ ID NO: 268613 - DNA, 12 bp, Artificial Sequence
  Oligonucleotide primer for the detection of SNP TSC0001252
ttcattaaaact

SEQ ID NO: 268614 - DNA, 12 bp, Artificial Sequence
  Oligonucleotide primer for the detection of SNP TSC0001252
atttgattttag

SEQ ID NO: 268615 - DNA, 12 bp, Artificial Sequence
  Oligonucleotide primer for the detection of SNP TSC0001253
ttataaattatc

SEQ ID NO: 268616 - DNA, 12 bp, Artificial Sequence
  Oligonucleotide primer for the detection of SNP TSC0001253
aaatatttgaga

SEQ ID NO: 268617 - DNA, 12 bp, Artificial Sequence
  Oligonucleotide primer for the detection of SNP TSC0001253
aaatattcgaga

SEQ ID NO: 268618 - DNA, 12 bp, Artificial Sequence
  Oligonucleotide primer for the detection of SNP TSC0001260
tatacatataat

SEQ ID NO: 268619 - DNA, 12 bp, Artificial Sequence
  Oligonukleotid-Primer
tattaattgtta

SEQ ID NO: 268620 - DNA, 12 bp, Artificial Sequence
  Oligonucleotide primer for the detection of SNP TSC0001261
taataagtttta

SEQ ID NO: 268621 - DNA, 12 bp, Artificial Sequence
  Oligonucleotide primer for the detection of SNP TSC0001261
caacaaattcca

SEQ ID NO: 268622 - DNA, 12 bp, Artificial Sequence
  Oligonucleotide primer for the detection of SNP TSC0001261
ttatataaattt

SEQ ID NO: 268623 - DNA, 12 bp, Artificial Sequence
  Oligonukleotid-Primer
aattaaaaataa

SEQ ID NO: 268624 - DNA, 12 bp, Artificial Sequence
  Oligonucleotide primer for the detection of SNP TSC0001262
tattttaaggat

SEQ ID NO: 268625 - DNA, 12 bp, Artificial Sequence
  Oligonucleotide primer for the detection of SNP TSC0001262
cactttaaaaac

SEQ ID NO: 268626 - DNA, 12 bp, Artificial Sequence
  Oligonucleotide primer for the detection of SNP TSC0001262
aattgagagtaa

SEQ ID NO: 268627 - DNA, 12 bp, Artificial Sequence
  Oligonucleotide primer for the detection of SNP TSC0001263
aattcttatata

SEQ ID NO: 268628 - DNA, 12 bp, Artificial Sequence
  Oligonucleotide primer for the detection of SNP TSC0001263
atatagtggaag

SEQ ID NO: 268629 - DNA, 12 bp, Artificial Sequence
  Oligonucleotide primer for the detection of SNP TSC0001263
acacaataaaaa

SEQ ID NO: 268630 - DNA, 12 bp, Artificial Sequence
  Oligonucleotide primer for the detection of SNP TSC0001263
gagtttttgtgt

SEQ ID NO: 268631 - DNA, 12 bp, Artificial Sequence
  Oligonucleotide primer for the detection of SNP TSC0001264
aatacacttaca

SEQ ID NO: 268632 - DNA, 12 bp, Artificial Sequence
  Oligonucleotide primer for the detection of SNP TSC0001264
ttatttgtattt

SEQ ID NO: 268633 - DNA, 12 bp, Artificial Sequence
  Oligonucleotide primer for the detection of SNP TSC0001264
ctatttacatct

SEQ ID NO: 268634 - DNA, 12 bp, Artificial Sequence
  Oligonucleotide primer for the detection of SNP TSC0001264
gatgtatttata

SEQ ID NO: 268635 - DNA, 12 bp, Artificial Sequence
  Oligonucleotide primer for the detection of SNP TSC0001265
atttgtatttgt

SEQ ID NO: 268636 - DNA, 12 bp, Artificial Sequence
  Oligonucleotide primer for the detection of SNP TSC0001265
atttgtatttgc

SEQ ID NO: 268637 - DNA, 12 bp, Artificial Sequence
  Oligonucleotide primer for the detection of SNP TSC0001265
tttacatctaca

SEQ ID NO: 268638 - DNA, 12 bp, Artificial Sequence
  Oligonucleotide primer for the detection of SNP TSC0001265
tttacatctacg

SEQ ID NO: 268639 - DNA, 12 bp, Artificial Sequence
  Oligonucleotide primer for the detection of SNP TSC0001265
agatgtatttat

SEQ ID NO: 268640 - DNA, 12 bp, Artificial Sequence
  Oligonucleotide primer for the detection of SNP TSC0001272
aataacaaaacc

SEQ ID NO: 268641 - DNA, 12 bp, Artificial Sequence
  Oligonucleotide primer for the detection of SNP TSC0001272
tttttttgttgg

SEQ ID NO: 268642 - DNA, 12 bp, Artificial Sequence
  Oligonucleotide primer for the detection of SNP TSC0001273
aaaaaaaatata

SEQ ID NO: 268643 - DNA, 12 bp, Artificial Sequence
  Oligonucleotide primer for the detection of SNP TSC0001273
tgttggttattt

SEQ ID NO: 268644 - DNA, 12 bp, Artificial Sequence
  Oligonucleotide primer for the detection of SNP TSC0001273
atttattaacca

SEQ ID NO: 268645 - DNA, 12 bp, Artificial Sequence
  Oligonucleotide primer for the detection of SNP TSC0001273
aaaagaagatat

SEQ ID NO: 268646 - DNA, 12 bp, Artificial Sequence
  Oligonucleotide primer for the detection of SNP TSC0001275
cactattacaat

SEQ ID NO: 268647 - DNA, 12 bp, Artificial Sequence
  Oligonucleotide primer for the detection of SNP TSC0001275
gttgattttatg

SEQ ID NO: 268648 - DNA, 12 bp, Artificial Sequence
  Oligonucleotide primer for the detection of SNP TSC0001276
aaaaaacattta

SEQ ID NO: 268649 - DNA, 12 bp, Artificial Sequence
  Oligonucleotide primer for the detection of SNP TSC0001276
ttaaatgttttt

SEQ ID NO: 268650 - DNA, 12 bp, Artificial Sequence
  Oligonucleotide primer for the detection of SNP TSC0001276
ttaaatgttttc

SEQ ID NO: 268651 - DNA, 12 bp, Artificial Sequence
  Oligonucleotide primer for the detection of SNP TSC0001276
tatttaaatatt

SEQ ID NO: 268652 - DNA, 12 bp, Artificial Sequence
  Oligonucleotide primer for the detection of SNP TSC0001276
agggaatattta

SEQ ID NO: 268653 - DNA, 12 bp, Artificial Sequence
  Oligonucleotide primer for the detection of SNP TSC0001277
taaaaaataatt

SEQ ID NO: 268654 - DNA, 12 bp, Artificial Sequence
  Oligonucleotide primer for the detection of SNP TSC0001277
gaatttaaaata

SEQ ID NO: 268655 - DNA, 12 bp, Artificial Sequence
  Oligonucleotide primer for the detection of SNP TSC0001279
attctcaacaac

SEQ ID NO: 268656 - DNA, 12 bp, Artificial Sequence
  Oligonucleotide primer for the detection of SNP TSC0001279
taagagatgaga

SEQ ID NO: 268657 - DNA, 12 bp, Artificial Sequence
  Oligonucleotide primer for the detection of SNP TSC0001282
tacatttttatt

SEQ ID NO: 268658 - DNA, 12 bp, Artificial Sequence
  Oligonucleotide primer for the detection of SNP TSC0001282
tagatgttaaag

SEQ ID NO: 268659 - DNA, 12 bp, Artificial Sequence
  Oligonucleotide primer for the detection of SNP TSC0001285
aaatatatttac

SEQ ID NO: 268660 - DNA, 12 bp, Artificial Sequence
  Oligonucleotide primer for the detection of SNP TSC0001285
agggttaggaag

SEQ ID NO: 268661 - DNA, 12 bp, Artificial Sequence
  Oligonucleotide primer for the detection of SNP TSC0001286
aacacaacaaca

SEQ ID NO: 268662 - DNA, 12 bp, Artificial Sequence
  Oligonucleotide primer for the detection of SNP TSC0001286
ataagatatatt

SEQ ID NO: 268663 - DNA, 12 bp, Artificial Sequence
  Oligonucleotide primer for the detection of SNP TSC0001286
ataaaatatatt

SEQ ID NO: 268664 - DNA, 12 bp, Artificial Sequence
  Oligonucleotide primer for the detection of SNP TSC0001286
agtatagtaata

SEQ ID NO: 268665 - DNA, 12 bp, Artificial Sequence
  Oligonucleotide primer for the detection of SNP TSC0001287
aaccctaccttc

SEQ ID NO: 268666 - DNA, 12 bp, Artificial Sequence
  Oligonucleotide primer for the detection of SNP TSC0001287
aggagattatta

SEQ ID NO: 268667 - DNA, 12 bp, Artificial Sequence
  Oligonucleotide primer for the detection of SNP TSC0001288
tccaaaaaaaat

SEQ ID NO: 268668 - DNA, 12 bp, Artificial Sequence
  Oligonucleotide primer for the detection of SNP TSC0001289
accaccttattt

SEQ ID NO: 268669 - DNA, 12 bp, Artificial Sequence
  Oligonucleotide primer for the detection of SNP TSC0001289
ggttatatttgt

SEQ ID NO: 268670 - DNA, 12 bp, Artificial Sequence
  Oligonucleotide primer for the detection of SNP TSC0001289
aaccatacttac

SEQ ID NO: 268671 - DNA, 12 bp, Artificial Sequence
  Oligonucleotide primer for the detection of SNP TSC0001289
ttattttatttt

SEQ ID NO: 268672 - DNA, 12 bp, Artificial Sequence
  Oligonucleotide primer for the detection of SNP TSC0001289
ttattttatttc

SEQ ID NO: 268673 - DNA, 12 bp, Artificial Sequence
  Oligonucleotide primer for the detection of SNP TSC0001290
tcactccatact

SEQ ID NO: 268674 - DNA, 12 bp, Artificial Sequence
  Oligonucleotide primer for the detection of SNP TSC0001290
attggttatata

SEQ ID NO: 268675 - DNA, 12 bp, Artificial Sequence
  Oligonucleotide primer for the detection of SNP TSC0001291
catacaaaaaat

SEQ ID NO: 268676 - DNA, 12 bp, Artificial Sequence
  Oligonucleotide primer for the detection of SNP TSC0001291
attgttataatg

SEQ ID NO: 268677 - DNA, 12 bp, Artificial Sequence
  Oligonucleotide primer for the detection of SNP TSC0001291
attgttataacg

SEQ ID NO: 268678 - DNA, 12 bp, Artificial Sequence
  Oligonucleotide primer for the detection of SNP TSC0001294
aaaaaaacaaaa

SEQ ID NO: 268679 - DNA, 12 bp, Artificial Sequence
  Oligonucleotide primer for the detection of SNP TSC0001294
gaaaaaacaaaa

SEQ ID NO: 268680 - DNA, 12 bp, Artificial Sequence
  Oligonucleotide primer for the detection of SNP TSC0001294
taaaagtgtttt

SEQ ID NO: 268681 - DNA, 12 bp, Artificial Sequence
  Oligonucleotide primer for the detection of SNP TSC0001294
taaaagcgtttt

SEQ ID NO: 268682 - DNA, 12 bp, Artificial Sequence
  Oligonucleotide primer for the detection of SNP TSC0001294
tatacaaaaaca

SEQ ID NO: 268683 - DNA, 12 bp, Artificial Sequence
  Oligonucleotide primer for the detection of SNP TSC0001294
tatacaaaaacg

SEQ ID NO: 268684 - DNA, 12 bp, Artificial Sequence
  Oligonucleotide primer for the detection of SNP TSC0001294
ttttgaggaaat

SEQ ID NO: 268685 - DNA, 12 bp, Artificial Sequence
  Oligonucleotide primer for the detection of SNP TSC0001294
tttcgaggaaat

SEQ ID NO: 268686 - DNA, 12 bp, Artificial Sequence
  Oligonucleotide primer for the detection of SNP TSC0001295
aaaaaacaataa

SEQ ID NO: 268687 - DNA, 12 bp, Artificial Sequence
  Oligonucleotide primer for the detection of SNP TSC0001295
ggtttttggtgt

SEQ ID NO: 268688 - DNA, 12 bp, Artificial Sequence
  Oligonucleotide primer for the detection of SNP TSC0001295
aactcttaatac

SEQ ID NO: 268689 - DNA, 12 bp, Artificial Sequence
  Oligonucleotide primer for the detection of SNP TSC0001295
ggaagatagtgg

SEQ ID NO: 268690 - DNA, 12 bp, Artificial Sequence
  Oligonucleotide primer for the detection of SNP TSC0001298
caaaaattcttc

SEQ ID NO: 268691 - DNA, 12 bp, Artificial Sequence
  Oligonucleotide primer for the detection of SNP TSC0001298
gggtagagattg

SEQ ID NO: 268692 - DNA, 12 bp, Artificial Sequence
  Oligonucleotide primer for the detection of SNP TSC0001298
gggtagagatcg

SEQ ID NO: 268693 - DNA, 12 bp, Artificial Sequence
  Oligonucleotide primer for the detection of SNP TSC0001299
taaaccctaaac

SEQ ID NO: 268694 - DNA, 12 bp, Artificial Sequence
  Oligonucleotide primer for the detection of SNP TSC0001299
tagttaagtata

SEQ ID NO: 268695 - DNA, 12 bp, Artificial Sequence
  Oligonucleotide primer for the detection of SNP TSC0001308
ccaaactaaact

SEQ ID NO: 268696 - DNA, 12 bp, Artificial Sequence
  Oligonucleotide primer for the detection of SNP TSC0001308
ggtagaaagtaa

SEQ ID NO: 268697 - DNA, 12 bp, Artificial Sequence
  Oligonucleotide primer for the detection of SNP TSC0001311
attaatccttac

SEQ ID NO: 268698 - DNA, 12 bp, Artificial Sequence
  Oligonucleotide primer for the detection of SNP TSC0001311
tatgatatttgg

SEQ ID NO: 268699 - DNA, 12 bp, Artificial Sequence
  Oligonucleotide primer for the detection of SNP TSC0001317
ataaaaaaacaa

SEQ ID NO: 268700 - DNA, 12 bp, Artificial Sequence
  Oligonucleotide primer for the detection of SNP TSC0001317
tttttgtttttt

SEQ ID NO: 268701 - DNA, 12 bp, Artificial Sequence
  Oligonucleotide primer for the detection of SNP TSC0001317
ttcctatctttt

SEQ ID NO: 268702 - DNA, 12 bp, Artificial Sequence
  Oligonucleotide primer for the detection of SNP TSC0001317
ataaaagggtaa

SEQ ID NO: 268703 - DNA, 12 bp, Artificial Sequence
  Oligonucleotide primer for the detection of SNP TSC0001319
atataaacattc

SEQ ID NO: 268704 - DNA, 12 bp, Artificial Sequence
  Oligonucleotide primer for the detection of SNP TSC0001319
atataaacgttc

SEQ ID NO: 268705 - DNA, 12 bp, Artificial Sequence
  Oligonucleotide primer for the detection of SNP TSC0001319
ttaattttttga

SEQ ID NO: 268706 - DNA, 12 bp, Artificial Sequence
  Oligonucleotide primer for the detection of SNP TSC0001326
aacttcttcctt

SEQ ID NO: 268707 - DNA, 12 bp, Artificial Sequence
  Oligonucleotide primer for the detection of SNP TSC0001326
ggtgagagagag

SEQ ID NO: 268708 - DNA, 12 bp, Artificial Sequence
  Oligonucleotide primer for the detection of SNP TSC0001331
cttctatatata

SEQ ID NO: 268709 - DNA, 12 bp, Artificial Sequence
  Oligonucleotide primer for the detection of SNP TSC0001331
taaaagaaaaat

SEQ ID NO: 268710 - DNA, 12 bp, Artificial Sequence
  Oligonucleotide primer for the detection of SNP TSC0001331
taaaaaaaaaat

SEQ ID NO: 268711 - DNA, 12 bp, Artificial Sequence
  Oligonucleotide primer for the detection of SNP TSC0001341
aaacataataac

SEQ ID NO: 268712 - DNA, 12 bp, Artificial Sequence
  Oligonukleotid-Primer
aaacgtaataac

SEQ ID NO: 268713 - DNA, 12 bp, Artificial Sequence
  Oligonucleotide primer for the detection of SNP TSC0001341
gaacataataac

SEQ ID NO: 268714 - DNA, 12 bp, Artificial Sequence
  Oligonucleotide primer for the detection of SNP TSC0001341
gaacgtaataac

SEQ ID NO: 268715 - DNA, 12 bp, Artificial Sequence
  Oligonucleotide primer for the detection of SNP TSC0001341
ggattataggaa

SEQ ID NO: 268716 - DNA, 12 bp, Artificial Sequence
  Oligonucleotide primer for the detection of SNP TSC0001342
tccttttaccat

SEQ ID NO: 268717 - DNA, 12 bp, Artificial Sequence
  Oligonucleotide primer for the detection of SNP TSC0001342
aaatatgtatat

SEQ ID NO: 268718 - DNA, 12 bp, Artificial Sequence
  Oligonucleotide primer for the detection of SNP TSC0001342
aaatatatatat

SEQ ID NO: 268719 - DNA, 12 bp, Artificial Sequence
  Oligonucleotide primer for the detection of SNP TSC0001342
tttttttgttat

SEQ ID NO: 268720 - DNA, 12 bp, Artificial Sequence
  Oligonucleotide primer for the detection of SNP TSC0001361
caaaaataaaaa

SEQ ID NO: 268721 - DNA, 12 bp, Artificial Sequence
  Oligonucleotide primer for the detection of SNP TSC0001361
tttagtgtttta

SEQ ID NO: 268722 - DNA, 12 bp, Artificial Sequence
  Oligonucleotide primer for the detection of SNP TSC0001361
cccaatacccca

SEQ ID NO: 268723 - DNA, 12 bp, Artificial Sequence
  Oligonucleotide primer for the detection of SNP TSC0001361
agaggtaggggt

SEQ ID NO: 268724 - DNA, 12 bp, Artificial Sequence
  Oligonucleotide primer for the detection of SNP TSC0001362
accaaaaccttc

SEQ ID NO: 268725 - DNA, 12 bp, Artificial Sequence
  Oligonucleotide primer for the detection of SNP TSC0001362
tgttagattgaa

SEQ ID NO: 268726 - DNA, 12 bp, Artificial Sequence
  Oligonucleotide primer for the detection of SNP TSC0001363
ttaaattatttt

SEQ ID NO: 268727 - DNA, 12 bp, Artificial Sequence
  Oligonucleotide primer for the detection of SNP TSC0001363
aaataaagtaaa

SEQ ID NO: 268728 - DNA, 12 bp, Artificial Sequence
  Oligonucleotide primer for the detection of SNP TSC0001376
ctaaaaaaaact

SEQ ID NO: 268729 - DNA, 12 bp, Artificial Sequence
  Oligonucleotide primer for the detection of SNP TSC0001376
aagtttttttaa

SEQ ID NO: 268730 - DNA, 12 bp, Artificial Sequence
  Oligonucleotide primer for the detection of SNP TSC0001377
tttttttatgtt

SEQ ID NO: 268731 - DNA, 12 bp, Artificial Sequence
  Oligonucleotide primer for the detection of SNP TSC0001377
ttctcttatatt

SEQ ID NO: 268732 - DNA, 12 bp, Artificial Sequence
  Oligonucleotide primer for the detection of SNP TSC0001377
ggagaagataga

SEQ ID NO: 268733 - DNA, 12 bp, Artificial Sequence
  Oligonucleotide primer for the detection of SNP TSC0001378
acaaacctataa

SEQ ID NO: 268734 - DNA, 12 bp, Artificial Sequence
  Oligonucleotide primer for the detection of SNP TSC0001378
tagagtagttgg

SEQ ID NO: 268735 - DNA, 12 bp, Artificial Sequence
  Oligonucleotide primer for the detection of SNP TSC0001378
caaaataactaa

SEQ ID NO: 268736 - DNA, 12 bp, Artificial Sequence
  Oligonucleotide primer for the detection of SNP TSC0001378
taagtttgtagt

SEQ ID NO: 268737 - DNA, 12 bp, Artificial Sequence
  Oligonucleotide primer for the detection of SNP TSC0001379
ttaacaaaaaat

SEQ ID NO: 268738 - DNA, 12 bp, Artificial Sequence
  Oligonucleotide primer for the detection of SNP TSC0001379
aggggtagttga

SEQ ID NO: 268739 - DNA, 12 bp, Artificial Sequence
  Oligonucleotide primer for the detection of SNP TSC0001380
caaaacaccaac

SEQ ID NO: 268740 - DNA, 12 bp, Artificial Sequence
  Oligonucleotide primer for the detection of SNP TSC0001380
aggttttaaggt

SEQ ID NO: 268741 - DNA, 12 bp, Artificial Sequence
  Oligonucleotide primer for the detection of SNP TSC0001380
aaattttaaaat

SEQ ID NO: 268742 - DNA, 12 bp, Artificial Sequence
  Oligonucleotide primer for the detection of SNP TSC0001380
taggatattagt

SEQ ID NO: 268743 - DNA, 12 bp, Artificial Sequence
  Oligonucleotide primer for the detection of SNP TSC0001382
tacttactaaat

SEQ ID NO: 268744 - DNA, 12 bp, Artificial Sequence
  Oligonucleotide primer for the detection of SNP TSC0001382
tatgttatattg

SEQ ID NO: 268745 - DNA, 12 bp, Artificial Sequence
  Oligonucleotide primer for the detection of SNP TSC0001383
tattctaccaat

SEQ ID NO: 268746 - DNA, 12 bp, Artificial Sequence
  Oligonucleotide primer for the detection of SNP TSC0001383
gtttggtaaaga

SEQ ID NO: 268747 - DNA, 12 bp, Artificial Sequence
  Oligonucleotide primer for the detection of SNP TSC0001383
tttaacaaaaaa

SEQ ID NO: 268748 - DNA, 12 bp, Artificial Sequence
  Oligonucleotide primer for the detection of SNP TSC0001383
tattttgttaat

SEQ ID NO: 268749 - DNA, 12 bp, Artificial Sequence
  Oligonucleotide primer for the detection of SNP TSC0001384
ataatattatat

SEQ ID NO: 268750 - DNA, 12 bp, Artificial Sequence
  Oligonucleotide primer for the detection of SNP TSC0001384
ttatagttgtta

SEQ ID NO: 268751 - DNA, 12 bp, Artificial Sequence
  Oligonucleotide primer for the detection of SNP TSC0001384
tcacaattatca

SEQ ID NO: 268752 - DNA, 12 bp, Artificial Sequence
  Oligonucleotide primer for the detection of SNP TSC0001384
gtaatgttatat

SEQ ID NO: 268753 - DNA, 12 bp, Artificial Sequence
  Oligonucleotide primer for the detection of SNP TSC0001385
actaaaaattca

SEQ ID NO: 268754 - DNA, 12 bp, Artificial Sequence
  Oligonucleotide primer for the detection of SNP TSC0001385
agaagttttaat

SEQ ID NO: 268755 - DNA, 12 bp, Artificial Sequence
  Oligonucleotide primer for the detection of SNP TSC0001385
aaaaatttcaat

SEQ ID NO: 268756 - DNA, 12 bp, Artificial Sequence
  Oligonucleotide primer for the detection of SNP TSC0001385
gttgaagattta

SEQ ID NO: 268757 - DNA, 12 bp, Artificial Sequence
  Oligonucleotide primer for the detection of SNP TSC0001386
ttaaaatcttct

SEQ ID NO: 268758 - DNA, 12 bp, Artificial Sequence
  Oligonucleotide primer for the detection of SNP TSC0001386
taattttgaaag

SEQ ID NO: 268759 - DNA, 12 bp, Artificial Sequence
  Oligonucleotide primer for the detection of SNP TSC0001391
accaaacttcct

SEQ ID NO: 268760 - DNA, 12 bp, Artificial Sequence
  Oligonucleotide primer for the detection of SNP TSC0001391
gtgtgtttttta

SEQ ID NO: 268761 - DNA, 12 bp, Artificial Sequence
  Oligonucleotide primer for the detection of SNP TSC0001392
ttaaacatacac

SEQ ID NO: 268762 - DNA, 12 bp, Artificial Sequence
  Oligonucleotide primer for the detection of SNP TSC0001392
aatatgtaggtg

SEQ ID NO: 268763 - DNA, 12 bp, Artificial Sequence
  Oligonucleotide primer for the detection of SNP TSC0001395
tataacaaaaaa

SEQ ID NO: 268764 - DNA, 12 bp, Artificial Sequence
  Oligonucleotide primer for the detection of SNP TSC0001395
atatagaatatt

SEQ ID NO: 268765 - DNA, 12 bp, Artificial Sequence
  Oligonucleotide primer for the detection of SNP TSC0001395
ttatataaaata

SEQ ID NO: 268766 - DNA, 12 bp, Artificial Sequence
  Oligonucleotide primer for the detection of SNP TSC0001395
agtatagtaaag

SEQ ID NO: 268767 - DNA, 12 bp, Artificial Sequence
  Oligonucleotide primer for the detection of SNP TSC0001396
ataaaaacatac

SEQ ID NO: 268768 - DNA, 12 bp, Artificial Sequence
  Oligonucleotide primer for the detection of SNP TSC0001396
tatttaattttg

SEQ ID NO: 268769 - DNA, 12 bp, Artificial Sequence
  Oligonucleotide primer for the detection of SNP TSC0001400
aaaaaaaaatat

SEQ ID NO: 268770 - DNA, 12 bp, Artificial Sequence
  Oligonucleotide primer for the detection of SNP TSC0001400
ttattgtattaa

SEQ ID NO: 268771 - DNA, 12 bp, Artificial Sequence
  Oligonucleotide primer for the detection of SNP TSC0001402
aaaaattatatt

SEQ ID NO: 268772 - DNA, 12 bp, Artificial Sequence
  Oligonucleotide primer for the detection of SNP TSC0001402
agaaattgttga

SEQ ID NO: 268773 - DNA, 12 bp, Artificial Sequence
  Oligonucleotide primer for the detection of SNP TSC0001402
agaaatcgttga

SEQ ID NO: 268774 - DNA, 12 bp, Artificial Sequence
  Oligonucleotide primer for the detection of SNP TSC0001403
ccacataactaa

SEQ ID NO: 268775 - DNA, 12 bp, Artificial Sequence
  Oligonucleotide primer for the detection of SNP TSC0001403
aagttttttgag

SEQ ID NO: 268776 - DNA, 12 bp, Artificial Sequence
  Oligonucleotide primer for the detection of SNP TSC0001404
tcaattaaacct

SEQ ID NO: 268777 - DNA, 12 bp, Artificial Sequence
  Oligonucleotide primer for the detection of SNP TSC0001404
taataaagaaaa

SEQ ID NO: 268778 - DNA, 12 bp, Artificial Sequence
  Oligonucleotide primer for the detection of SNP TSC0001405
aatccaaaccat

SEQ ID NO: 268779 - DNA, 12 bp, Artificial Sequence
  Oligonucleotide primer for the detection of SNP TSC0001405
ataaattaaggt

SEQ ID NO: 268780 - DNA, 12 bp, Artificial Sequence
  Oligonucleotide primer for the detection of SNP TSC0001405
tataaatcaaaa

SEQ ID NO: 268781 - DNA, 12 bp, Artificial Sequence
  Oligonucleotide primer for the detection of SNP TSC0001405
ggtttaagttat

SEQ ID NO: 268782 - DNA, 12 bp, Artificial Sequence
  Oligonucleotide primer for the detection of SNP TSC0001406
atcaaatacaaa

SEQ ID NO: 268783 - DNA, 12 bp, Artificial Sequence
  Oligonucleotide primer for the detection of SNP TSC0001406
ttaattgttaaa

SEQ ID NO: 268784 - DNA, 12 bp, Artificial Sequence
  Oligonucleotide primer for the detection of SNP TSC0001406
ttaactattaaa

SEQ ID NO: 268785 - DNA, 12 bp, Artificial Sequence
  Oligonucleotide primer for the detection of SNP TSC0001406
attagatgtaga

SEQ ID NO: 268786 - DNA, 12 bp, Artificial Sequence
  Oligonucleotide primer for the detection of SNP TSC0001407
ccttattaaaaa

SEQ ID NO: 268787 - DNA, 12 bp, Artificial Sequence
  Oligonucleotide primer for the detection of SNP TSC0001407
ataaccttactc

SEQ ID NO: 268788 - DNA, 12 bp, Artificial Sequence
  Oligonucleotide primer for the detection of SNP TSC0001407
ttttattgggaa

SEQ ID NO: 268789 - DNA, 12 bp, Artificial Sequence
  Oligonucleotide primer for the detection of SNP TSC0001409
taattctatttt

SEQ ID NO: 268790 - DNA, 12 bp, Artificial Sequence
  Oligonucleotide primer for the detection of SNP TSC0001409
attttataaaga

SEQ ID NO: 268791 - DNA, 12 bp, Artificial Sequence
  Oligonucleotide primer for the detection of SNP TSC0001410
taaattctttat

SEQ ID NO: 268792 - DNA, 12 bp, Artificial Sequence
  Oligonucleotide primer for the detection of SNP TSC0001410
agttgtttggaa

SEQ ID NO: 268793 - DNA, 12 bp, Artificial Sequence
  Oligonucleotide primer for the detection of SNP TSC0001411
aaccatataata

SEQ ID NO: 268794 - DNA, 12 bp, Artificial Sequence
  Oligonucleotide primer for the detection of SNP TSC0001411
gagggagtaggt

SEQ ID NO: 268795 - DNA, 12 bp, Artificial Sequence
  Oligonucleotide primer for the detection of SNP TSC0001411
aaaaaaataaac

SEQ ID NO: 268796 - DNA, 12 bp, Artificial Sequence
  Oligonucleotide primer for the detection of SNP TSC0001411
ggttatgtgatg

SEQ ID NO: 268797 - DNA, 12 bp, Artificial Sequence
  Oligonucleotide primer for the detection of SNP TSC0001412
acaacctacaaa

SEQ ID NO: 268798 - DNA, 12 bp, Artificial Sequence
  Oligonucleotide primer for the detection of SNP TSC0001412
attggtttatag

SEQ ID NO: 268799 - DNA, 12 bp, Artificial Sequence
  Oligonucleotide primer for the detection of SNP TSC0001412
attaactcacaa

SEQ ID NO: 268800 - DNA, 12 bp, Artificial Sequence
  Oligonucleotide primer for the detection of SNP TSC0001412
tatagtttgtag

SEQ ID NO: 268801 - DNA, 12 bp, Artificial Sequence
  Oligonucleotide primer for the detection of SNP TSC0001413
aaacataaaatc

SEQ ID NO: 268802 - DNA, 12 bp, Artificial Sequence
  Oligonucleotide primer for the detection of SNP TSC0001413
atgggtatttag

SEQ ID NO: 268803 - DNA, 12 bp, Artificial Sequence
  Oligonucleotide primer for the detection of SNP TSC0001414
tacattcacacc

SEQ ID NO: 268804 - DNA, 12 bp, Artificial Sequence
  Oligonucleotide primer for the detection of SNP TSC0001414
tattaatatata

SEQ ID NO: 268805 - DNA, 12 bp, Artificial Sequence
  Oligonucleotide primer for the detection of SNP TSC0001416
aaaaacaaaaaa

SEQ ID NO: 268806 - DNA, 12 bp, Artificial Sequence
  Oligonucleotide primer for the detection of SNP TSC0001416
atgtgtttgttt

SEQ ID NO: 268807 - DNA, 12 bp, Artificial Sequence
  Oligonucleotide primer for the detection of SNP TSC0001416
aaatatacctac

SEQ ID NO: 268808 - DNA, 12 bp, Artificial Sequence
  Oligonucleotide primer for the detection of SNP TSC0001416
gaaggtaaaggg

SEQ ID NO: 268809 - DNA, 12 bp, Artificial Sequence
  Oligonucleotide primer for the detection of SNP TSC0001420
aaaattctttat

SEQ ID NO: 268810 - DNA, 12 bp, Artificial Sequence
  Oligonucleotide primer for the detection of SNP TSC0001420
ttaaataagtag

SEQ ID NO: 268811 - DNA, 12 bp, Artificial Sequence
  Oligonucleotide primer for the detection of SNP TSC0001429
aactaaaataat

SEQ ID NO: 268812 - DNA, 12 bp, Artificial Sequence
  Oligonucleotide primer for the detection of SNP TSC0001429
gttatatttgaa

SEQ ID NO: 268813 - DNA, 12 bp, Artificial Sequence
  Oligonucleotide primer for the detection of SNP TSC0001430
acaacctctatt

SEQ ID NO: 268814 - DNA, 12 bp, Artificial Sequence
  Oligonucleotide primer for the detection of SNP TSC0001430
tttttagaagtg

SEQ ID NO: 268815 - DNA, 12 bp, Artificial Sequence
  Oligonucleotide primer for the detection of SNP TSC0001431
aaattaaaacaa

SEQ ID NO: 268816 - DNA, 12 bp, Artificial Sequence
  Oligonucleotide primer for the detection of SNP TSC0001431
gtgatatttttt

SEQ ID NO: 268817 - DNA, 12 bp, Artificial Sequence
  Oligonucleotide primer for the detection of SNP TSC0001432
taaaccaataaa

SEQ ID NO: 268818 - DNA, 12 bp, Artificial Sequence
  Oligonucleotide primer for the detection of SNP TSC0001432
ttataattgtat

SEQ ID NO: 268819 - DNA, 12 bp, Artificial Sequence
  Oligonucleotide primer for the detection of SNP TSC0001432
attataattaca

SEQ ID NO: 268820 - DNA, 12 bp, Artificial Sequence
  Oligonucleotide primer for the detection of SNP TSC0001432
ataaattaatgg

SEQ ID NO: 268821 - DNA, 12 bp, Artificial Sequence
  Oligonukleotid-Primer
taaaccaatcac

SEQ ID NO: 268822 - DNA, 12 bp, Artificial Sequence
  Oligonucleotide primer for the detection of SNP TSC0001437
gatttggtggga

SEQ ID NO: 268823 - DNA, 12 bp, Artificial Sequence
  Oligonucleotide primer for the detection of SNP TSC0001440
aaaatatattcc

SEQ ID NO: 268824 - DNA, 12 bp, Artificial Sequence
  Oligonucleotide primer for the detection of SNP TSC0001440
aagggttgtttg

SEQ ID NO: 268825 - DNA, 12 bp, Artificial Sequence
  Oligonukleotid-Primer
aaaacaacaaac

SEQ ID NO: 268826 - DNA, 12 bp, Artificial Sequence
  Oligonucleotide primer for the detection of SNP TSC0001444
tttatgaagaag

SEQ ID NO: 268827 - DNA, 12 bp, Artificial Sequence
  Oligonucleotide primer for the detection of SNP TSC0001445
taaaatctaaac

SEQ ID NO: 268828 - DNA, 12 bp, Artificial Sequence
  Oligonucleotide primer for the detection of SNP TSC0001445
tttttggtgtta

SEQ ID NO: 268829 - DNA, 12 bp, Artificial Sequence
  Oligonukleotid-Primer
cccacactaaac

SEQ ID NO: 268830 - DNA, 12 bp, Artificial Sequence
  Oligonucleotide primer for the detection of SNP TSC0001446
cccacgctaaac

SEQ ID NO: 268831 - DNA, 12 bp, Artificial Sequence
  Oligonucleotide primer for the detection of SNP TSC0001446
aaaaaaaagagg

SEQ ID NO: 268832 - DNA, 12 bp, Artificial Sequence
  Oligonucleotide primer for the detection of SNP TSC0001447
cattttctataa

SEQ ID NO: 268833 - DNA, 12 bp, Artificial Sequence
  Oligonucleotide primer for the detection of SNP TSC0001447
tttttaagggtt

SEQ ID NO: 268834 - DNA, 12 bp, Artificial Sequence
  Oligonucleotide primer for the detection of SNP TSC0001447
attcccaaaaac

SEQ ID NO: 268835 - DNA, 12 bp, Artificial Sequence
  Oligonucleotide primer for the detection of SNP TSC0001447
ttattttttgtg

SEQ ID NO: 268836 - DNA, 12 bp, Artificial Sequence
  Oligonucleotide primer for the detection of SNP TSC0001449
aaaattctttac

SEQ ID NO: 268837 - DNA, 12 bp, Artificial Sequence
  Oligonucleotide primer for the detection of SNP TSC0001449
gggaaaaagaga

SEQ ID NO: 268838 - DNA, 12 bp, Artificial Sequence
  Oligonucleotide primer for the detection of SNP TSC0001453
tttgtatatgga

SEQ ID NO: 268839 - DNA, 12 bp, Artificial Sequence
  Oligonucleotide primer for the detection of SNP TSC0001453
tctacatataaa

SEQ ID NO: 268840 - DNA, 12 bp, Artificial Sequence
  Oligonucleotide primer for the detection of SNP TSC0001453
ggaaaattgaat

SEQ ID NO: 268841 - DNA, 12 bp, Artificial Sequence
  Oligonucleotide primer for the detection of SNP TSC0001456
taaaactaaact

SEQ ID NO: 268842 - DNA, 12 bp, Artificial Sequence
  Oligonucleotide primer for the detection of SNP TSC0001456
atttaggagata

SEQ ID NO: 268843 - DNA, 12 bp, Artificial Sequence
  Oligonucleotide primer for the detection of SNP TSC0001457
atataaccttaa

SEQ ID NO: 268844 - DNA, 12 bp, Artificial Sequence
  Oligonucleotide primer for the detection of SNP TSC0001457
agagattggttt

SEQ ID NO: 268845 - DNA, 12 bp, Artificial Sequence
  Oligonucleotide primer for the detection of SNP TSC0001457
aacaaaaactaa

SEQ ID NO: 268846 - DNA, 12 bp, Artificial Sequence
  Oligonucleotide primer for the detection of SNP TSC0001457
tataattttgat

SEQ ID NO: 268847 - DNA, 12 bp, Artificial Sequence
  Oligonucleotide primer for the detection of SNP TSC0001458
ctaacaataaac

SEQ ID NO: 268848 - DNA, 12 bp, Artificial Sequence
  Oligonucleotide primer for the detection of SNP TSC0001458
ctaacgataaac

SEQ ID NO: 268849 - DNA, 12 bp, Artificial Sequence
  Oligonucleotide primer for the detection of SNP TSC0001458
ttattgtaaagg

SEQ ID NO: 268850 - DNA, 12 bp, Artificial Sequence
  Oligonucleotide primer for the detection of SNP TSC0001458
ttatcgtaaagg

SEQ ID NO: 268851 - DNA, 12 bp, Artificial Sequence
  Oligonucleotide primer for the detection of SNP TSC0001459
taaatcccctta

SEQ ID NO: 268852 - DNA, 12 bp, Artificial Sequence
  Oligonucleotide primer for the detection of SNP TSC0001459
tattatagttta

SEQ ID NO: 268853 - DNA, 12 bp, Artificial Sequence
  Oligonucleotide primer for the detection of SNP TSC0001459
attataacccaa

SEQ ID NO: 268854 - DNA, 12 bp, Artificial Sequence
  Oligonucleotide primer for the detection of SNP TSC0001459
ttagattttttt

SEQ ID NO: 268855 - DNA, 12 bp, Artificial Sequence
  Oligonucleotide primer for the detection of SNP TSC0001460
tatataaaaaaa

SEQ ID NO: 268856 - DNA, 12 bp, Artificial Sequence
  Oligonucleotide primer for the detection of SNP TSC0001460
gttaaaattttt

SEQ ID NO: 268857 - DNA, 12 bp, Artificial Sequence
  Oligonucleotide primer for the detection of SNP TSC0001460
attaaaaccttt

SEQ ID NO: 268858 - DNA, 12 bp, Artificial Sequence
  Oligonucleotide primer for the detection of SNP TSC0001460
gtataaaaaaat

SEQ ID NO: 268859 - DNA, 12 bp, Artificial Sequence
  Oligonucleotide primer for the detection of SNP TSC0001461
tataaaaaaaaa

SEQ ID NO: 268860 - DNA, 12 bp, Artificial Sequence
  Oligonucleotide primer for the detection of SNP TSC0001461
tgaatattttgt

SEQ ID NO: 268861 - DNA, 12 bp, Artificial Sequence
  Oligonucleotide primer for the detection of SNP TSC0001461
ataccttacaaa

SEQ ID NO: 268862 - DNA, 12 bp, Artificial Sequence
  Oligonucleotide primer for the detection of SNP TSC0001461
ttgtgggagagg

SEQ ID NO: 268863 - DNA, 12 bp, Artificial Sequence
  Oligonucleotide primer for the detection of SNP TSC0001471
cctttaataacc

SEQ ID NO: 268864 - DNA, 12 bp, Artificial Sequence
  Oligonucleotide primer for the detection of SNP TSC0001471
acccctttccta

SEQ ID NO: 268865 - DNA, 12 bp, Artificial Sequence
  Oligonucleotide primer for the detection of SNP TSC0001471
tttttggtgatt

SEQ ID NO: 268866 - DNA, 12 bp, Artificial Sequence
  Oligonucleotide primer for the detection of SNP TSC0001471
tttttggtgatc

SEQ ID NO: 268867 - DNA, 12 bp, Artificial Sequence
  Oligonucleotide primer for the detection of SNP TSC0001472
caaattaaaaat

SEQ ID NO: 268868 - DNA, 12 bp, Artificial Sequence
  Oligonucleotide primer for the detection of SNP TSC0001472
gaaattttgttt

SEQ ID NO: 268869 - DNA, 12 bp, Artificial Sequence
  Oligonucleotide primer for the detection of SNP TSC0001472
taaaaactctac

SEQ ID NO: 268870 - DNA, 12 bp, Artificial Sequence
  Oligonucleotide primer for the detection of SNP TSC0001472
taggttggaaat

SEQ ID NO: 268871 - DNA, 12 bp, Artificial Sequence
  Oligonucleotide primer for the detection of SNP TSC0001473
taataacataaa

SEQ ID NO: 268872 - DNA, 12 bp, Artificial Sequence
  Oligonucleotide primer for the detection of SNP TSC0001473
tttgattttatt

SEQ ID NO: 268873 - DNA, 12 bp, Artificial Sequence
  Oligonucleotide primer for the detection of SNP TSC0001473
accttaacttca

SEQ ID NO: 268874 - DNA, 12 bp, Artificial Sequence
  Oligonucleotide primer for the detection of SNP TSC0001473
atagtgatatgg

SEQ ID NO: 268875 - DNA, 12 bp, Artificial Sequence
  Oligonucleotide primer for the detection of SNP TSC0001492
cttatctccaat

SEQ ID NO: 268876 - DNA, 12 bp, Artificial Sequence
  Oligonucleotide primer for the detection of SNP TSC0001492
tatttttttaat

SEQ ID NO: 268877 - DNA, 12 bp, Artificial Sequence
  Oligonucleotide primer for the detection of SNP TSC0001492
ttattttcctaa

SEQ ID NO: 268878 - DNA, 12 bp, Artificial Sequence
  Oligonucleotide primer for the detection of SNP TSC0001492
tttatttttaat

SEQ ID NO: 268879 - DNA, 12 bp, Artificial Sequence
  Oligonucleotide primer for the detection of SNP TSC0001493
attttctaaaat

SEQ ID NO: 268880 - DNA, 12 bp, Artificial Sequence
  Oligonucleotide primer for the detection of SNP TSC0001493
tgtaagaagagg

SEQ ID NO: 268881 - DNA, 12 bp, Artificial Sequence
  Oligonucleotide primer for the detection of SNP TSC0001494
catttatttctt

SEQ ID NO: 268882 - DNA, 12 bp, Artificial Sequence
  Oligonucleotide primer for the detection of SNP TSC0001494
agtaattttaga

SEQ ID NO: 268883 - DNA, 12 bp, Artificial Sequence
  Oligonucleotide primer for the detection of SNP TSC0001494
aataatttcaaa

SEQ ID NO: 268884 - DNA, 12 bp, Artificial Sequence
  Oligonucleotide primer for the detection of SNP TSC0001494
tatttgtttttt

SEQ ID NO: 268885 - DNA, 12 bp, Artificial Sequence
  Oligonucleotide primer for the detection of SNP TSC0001495
aaaccaccatac

SEQ ID NO: 268886 - DNA, 12 bp, Artificial Sequence
  Oligonucleotide primer for the detection of SNP TSC0001495
taagaatttaga

SEQ ID NO: 268887 - DNA, 12 bp, Artificial Sequence
  Oligonucleotide primer for the detection of SNP TSC0001496
ctataataattt

SEQ ID NO: 268888 - DNA, 12 bp, Artificial Sequence
  Oligonucleotide primer for the detection of SNP TSC0001496
gattttttttga

SEQ ID NO: 268889 - DNA, 12 bp, Artificial Sequence
  Oligonucleotide primer for the detection of SNP TSC0001496
atctcttctaaa

SEQ ID NO: 268890 - DNA, 12 bp, Artificial Sequence
  Oligonucleotide primer for the detection of SNP TSC0001496
ttgtgatggttt

SEQ ID NO: 268891 - DNA, 12 bp, Artificial Sequence
  Oligonucleotide primer for the detection of SNP TSC0001497
taaaataatgtt

SEQ ID NO: 268892 - DNA, 12 bp, Artificial Sequence
  Oligonucleotide primer for the detection of SNP TSC0001497
caaaataatact

SEQ ID NO: 268893 - DNA, 12 bp, Artificial Sequence
  Oligonucleotide primer for the detection of SNP TSC0001497
ggaaagttggga

SEQ ID NO: 268894 - DNA, 12 bp, Artificial Sequence
  Oligonucleotide primer for the detection of SNP TSC0001498
acctaaaaataa

SEQ ID NO: 268895 - DNA, 12 bp, Artificial Sequence
  Oligonucleotide primer for the detection of SNP TSC0001498
agtagggatgat

SEQ ID NO: 268896 - DNA, 12 bp, Artificial Sequence
  Oligonucleotide primer for the detection of SNP TSC0001498
agtagggacgat

SEQ ID NO: 268897 - DNA, 12 bp, Artificial Sequence
  Oligonucleotide primer for the detection of SNP TSC0001498
aacaaaaacaat

SEQ ID NO: 268898 - DNA, 12 bp, Artificial Sequence
  Oligonucleotide primer for the detection of SNP TSC0001498
aacaaaaacgat

SEQ ID NO: 268899 - DNA, 12 bp, Artificial Sequence
  Oligonucleotide primer for the detection of SNP TSC0001498
atttagaagtaa

SEQ ID NO: 268900 - DNA, 12 bp, Artificial Sequence
  Oligonucleotide primer for the detection of SNP TSC0001499
aaaaatatattc

SEQ ID NO: 268901 - DNA, 12 bp, Artificial Sequence
  Oligonucleotide primer for the detection of SNP TSC0001499
gtagttttttgt

SEQ ID NO: 268902 - DNA, 12 bp, Artificial Sequence
  Oligonukleotid-Primer
acaattccctat

SEQ ID NO: 268903 - DNA, 12 bp, Artificial Sequence
  Oligonucleotide primer for the detection of SNP TSC0001499
gggatgtatttt

SEQ ID NO: 268904 - DNA, 12 bp, Artificial Sequence
  Oligonucleotide primer for the detection of SNP TSC0001500
cataaacctaat

SEQ ID NO: 268905 - DNA, 12 bp, Artificial Sequence
  Oligonucleotide primer for the detection of SNP TSC0001500
ttaattagtatg

SEQ ID NO: 268906 - DNA, 12 bp, Artificial Sequence
  Oligonukleotid-Primer
ctacaacactac

SEQ ID NO: 268907 - DNA, 12 bp, Artificial Sequence
  Oligonucleotide primer for the detection of SNP TSC0001501
tttttattatag

SEQ ID NO: 268908 - DNA, 12 bp, Artificial Sequence
  Oligonucleotide primer for the detection of SNP TSC0001501
cccccaccacaa

SEQ ID NO: 268909 - DNA, 12 bp, Artificial Sequence
  Oligonucleotide primer for the detection of SNP TSC0001501
ttgtagtattat

SEQ ID NO: 268910 - DNA, 12 bp, Artificial Sequence
  Oligonucleotide primer for the detection of SNP TSC0001502
aaatttaataaa

SEQ ID NO: 268911 - DNA, 12 bp, Artificial Sequence
  Oligonucleotide primer for the detection of SNP TSC0001502
tttgaaattgtg

SEQ ID NO: 268912 - DNA, 12 bp, Artificial Sequence
  Oligonucleotide primer for the detection of SNP TSC0001502
ttaaaattataa

SEQ ID NO: 268913 - DNA, 12 bp, Artificial Sequence
  Oligonucleotide primer for the detection of SNP TSC0001502
gaagtttaatgg

SEQ ID NO: 268914 - DNA, 12 bp, Artificial Sequence
  Oligonucleotide primer for the detection of SNP TSC0001503
atacacactctt

SEQ ID NO: 268915 - DNA, 12 bp, Artificial Sequence
  Oligonucleotide primer for the detection of SNP TSC0001503
tggtagtaggta

SEQ ID NO: 268916 - DNA, 12 bp, Artificial Sequence
  Oligonucleotide primer for the detection of SNP TSC0001504
attctcctatac

SEQ ID NO: 268917 - DNA, 12 bp, Artificial Sequence
  Oligonucleotide primer for the detection of SNP TSC0001504
taggtagaagag

SEQ ID NO: 268918 - DNA, 12 bp, Artificial Sequence
  Oligonucleotide primer for the detection of SNP TSC0001505
atcaatattttc

SEQ ID NO: 268919 - DNA, 12 bp, Artificial Sequence
  Oligonucleotide primer for the detection of SNP TSC0001505
tgtattagtaga

SEQ ID NO: 268920 - DNA, 12 bp, Artificial Sequence
  Oligonucleotide primer for the detection of SNP TSC0001505
tatattaacaaa

SEQ ID NO: 268921 - DNA, 12 bp, Artificial Sequence
  Oligonucleotide primer for the detection of SNP TSC0001505
attaatgttttt

SEQ ID NO: 268922 - DNA, 12 bp, Artificial Sequence
  Oligonucleotide primer for the detection of SNP TSC0001506
ctccacaaatca

SEQ ID NO: 268923 - DNA, 12 bp, Artificial Sequence
  Oligonucleotide primer for the detection of SNP TSC0001506
ctccacgaatca

SEQ ID NO: 268924 - DNA, 12 bp, Artificial Sequence
  Oligonucleotide primer for the detection of SNP TSC0001506
tgtaagttaaaa

SEQ ID NO: 268925 - DNA, 12 bp, Artificial Sequence
  Oligonucleotide primer for the detection of SNP TSC0001507
aacaacacaacc

SEQ ID NO: 268926 - DNA, 12 bp, Artificial Sequence
  Oligonucleotide primer for the detection of SNP TSC0001507
tttttttaatag

SEQ ID NO: 268927 - DNA, 12 bp, Artificial Sequence
  Oligonucleotide primer for the detection of SNP TSC0001507
tcttccaataaa

SEQ ID NO: 268928 - DNA, 12 bp, Artificial Sequence
  Oligonucleotide primer for the detection of SNP TSC0001507
gataatatagtt

SEQ ID NO: 268929 - DNA, 12 bp, Artificial Sequence
  Oligonucleotide primer for the detection of SNP TSC0001507
gataatatagtc

SEQ ID NO: 268930 - DNA, 12 bp, Artificial Sequence
  Oligonucleotide primer for the detection of SNP TSC0001508
taataaaaatat

SEQ ID NO: 268931 - DNA, 12 bp, Artificial Sequence
  Oligonucleotide primer for the detection of SNP TSC0001508
aatattgatttt

SEQ ID NO: 268932 - DNA, 12 bp, Artificial Sequence
  Oligonucleotide primer for the detection of SNP TSC0001508
acattaatctta

SEQ ID NO: 268933 - DNA, 12 bp, Artificial Sequence
  Oligonucleotide primer for the detection of SNP TSC0001508
tgatgaagatgt

SEQ ID NO: 268934 - DNA, 12 bp, Artificial Sequence
  Oligonucleotide primer for the detection of SNP TSC0001509
ttaaattaaaac

SEQ ID NO: 268935 - DNA, 12 bp, Artificial Sequence
  Oligonucleotide primer for the detection of SNP TSC0001509
taaatgagtatt

SEQ ID NO: 268936 - DNA, 12 bp, Artificial Sequence
  Oligonucleotide primer for the detection of SNP TSC0001509
taaataaacatt

SEQ ID NO: 268937 - DNA, 12 bp, Artificial Sequence
  Oligonucleotide primer for the detection of SNP TSC0001509
ttaagttgaaat

SEQ ID NO: 268938 - DNA, 12 bp, Artificial Sequence
  Oligonucleotide primer for the detection of SNP TSC0001511
cctctactacct

SEQ ID NO: 268939 - DNA, 12 bp, Artificial Sequence
  Oligonucleotide primer for the detection of SNP TSC0001511
taaggagaggtt

SEQ ID NO: 268940 - DNA, 12 bp, Artificial Sequence
  Oligonucleotide primer for the detection of SNP TSC0001511
ccaaaaaaaaac

SEQ ID NO: 268941 - DNA, 12 bp, Artificial Sequence
  Oligonucleotide primer for the detection of SNP TSC0001511
ttttgttgtttt

SEQ ID NO: 268942 - DNA, 12 bp, Artificial Sequence
  Oligonucleotide primer for the detection of SNP TSC0001511
ttttgttgtttc

SEQ ID NO: 268943 - DNA, 12 bp, Artificial Sequence
  Oligonucleotide primer for the detection of SNP TSC0001512
acaaaaaaaaaa

SEQ ID NO: 268944 - DNA, 12 bp, Artificial Sequence
  Oligonucleotide primer for the detection of SNP TSC0001512
agtttattaaat

SEQ ID NO: 268945 - DNA, 12 bp, Artificial Sequence
  Oligonucleotide primer for the detection of SNP TSC0001512
aaatctattaaa

SEQ ID NO: 268946 - DNA, 12 bp, Artificial Sequence
  Oligonucleotide primer for the detection of SNP TSC0001512
tataaaggaaag

SEQ ID NO: 268947 - DNA, 12 bp, Artificial Sequence
  Oligonucleotide primer for the detection of SNP TSC0001513
aaatattatatt

SEQ ID NO: 268948 - DNA, 12 bp, Artificial Sequence
  Oligonucleotide primer for the detection of SNP TSC0001513
tttagatttttg

SEQ ID NO: 268949 - DNA, 12 bp, Artificial Sequence
  Oligonucleotide primer for the detection of SNP TSC0001514
ttttctttaaaa

SEQ ID NO: 268950 - DNA, 12 bp, Artificial Sequence
  Oligonucleotide primer for the detection of SNP TSC0001514
tttgttagtttt

SEQ ID NO: 268951 - DNA, 12 bp, Artificial Sequence
  Oligonucleotide primer for the detection of SNP TSC0001514
tttattaatctt

SEQ ID NO: 268952 - DNA, 12 bp, Artificial Sequence
  Oligonucleotide primer for the detection of SNP TSC0001514
ttttttttgagg

SEQ ID NO: 268953 - DNA, 12 bp, Artificial Sequence
  Oligonucleotide primer for the detection of SNP TSC0001515
actttttttcct

SEQ ID NO: 268954 - DNA, 12 bp, Artificial Sequence
  Oligonucleotide primer for the detection of SNP TSC0001515
ggattaggtgag

SEQ ID NO: 268955 - DNA, 12 bp, Artificial Sequence
  Oligonucleotide primer for the detection of SNP TSC0001516
attaattatatt

SEQ ID NO: 268956 - DNA, 12 bp, Artificial Sequence
  Oligonucleotide primer for the detection of SNP TSC0001516
ataatatttttg

SEQ ID NO: 268957 - DNA, 12 bp, Artificial Sequence
  Oligonucleotide primer for the detection of SNP TSC0001517
caaccaaatata

SEQ ID NO: 268958 - DNA, 12 bp, Artificial Sequence
  Oligonucleotide primer for the detection of SNP TSC0001517
caaccgaatata

SEQ ID NO: 268959 - DNA, 12 bp, Artificial Sequence
  Oligonucleotide primer for the detection of SNP TSC0001517
agaggttttaat

SEQ ID NO: 268960 - DNA, 12 bp, Artificial Sequence
  Oligonucleotide primer for the detection of SNP TSC0001517
taattgagtgta

SEQ ID NO: 268961 - DNA, 12 bp, Artificial Sequence
  Oligonucleotide primer for the detection of SNP TSC0001517
taatcgagtgta

SEQ ID NO: 268962 - DNA, 12 bp, Artificial Sequence
  Oligonucleotide primer for the detection of SNP TSC0001523
cttcttaaaatt

SEQ ID NO: 268963 - DNA, 12 bp, Artificial Sequence
  Oligonucleotide primer for the detection of SNP TSC0001523
gttggaatggag

SEQ ID NO: 268964 - DNA, 12 bp, Artificial Sequence
  Oligonucleotide primer for the detection of SNP TSC0001524
aaaaaacccata

SEQ ID NO: 268965 - DNA, 12 bp, Artificial Sequence
  Oligonucleotide primer for the detection of SNP TSC0001524
agaatatgtatt

SEQ ID NO: 268966 - DNA, 12 bp, Artificial Sequence
  Oligonucleotide primer for the detection of SNP TSC0001524
taaaatatacac

SEQ ID NO: 268967 - DNA, 12 bp, Artificial Sequence
  Oligonucleotide primer for the detection of SNP TSC0001524
tgaaaggtttat

SEQ ID NO: 268968 - DNA, 12 bp, Artificial Sequence
  Oligonucleotide primer for the detection of SNP TSC0001525
ataataacaatt

SEQ ID NO: 268969 - DNA, 12 bp, Artificial Sequence
  Oligonucleotide primer for the detection of SNP TSC0001525
tttaagttgaaa

SEQ ID NO: 268970 - DNA, 12 bp, Artificial Sequence
  Oligonucleotide primer for the detection of SNP TSC0001536
aataaaaaaact

SEQ ID NO: 268971 - DNA, 12 bp, Artificial Sequence
  Oligonucleotide primer for the detection of SNP TSC0001536
tttgattattta

SEQ ID NO: 268972 - DNA, 12 bp, Artificial Sequence
  Oligonucleotide primer for the detection of SNP TSC0001536
ttcgattattta

SEQ ID NO: 268973 - DNA, 12 bp, Artificial Sequence
  Oligonucleotide primer for the detection of SNP TSC0001537
atatcctacaac

SEQ ID NO: 268974 - DNA, 12 bp, Artificial Sequence
  Oligonucleotide primer for the detection of SNP TSC0001537
agtggtatttat

SEQ ID NO: 268975 - DNA, 12 bp, Artificial Sequence
  Oligonucleotide primer for the detection of SNP TSC0001537
aataatacccat

SEQ ID NO: 268976 - DNA, 12 bp, Artificial Sequence
  Oligonucleotide primer for the detection of SNP TSC0001537
atattttataat

SEQ ID NO: 268977 - DNA, 12 bp, Artificial Sequence
  Oligonucleotide primer for the detection of SNP TSC0001538
cttcttacccca

SEQ ID NO: 268978 - DNA, 12 bp, Artificial Sequence
  Oligonucleotide primer for the detection of SNP TSC0001538
ttttttaagaag

SEQ ID NO: 268979 - DNA, 12 bp, Artificial Sequence
  Oligonucleotide primer for the detection of SNP TSC0001538
cttcctaaaaaa

SEQ ID NO: 268980 - DNA, 12 bp, Artificial Sequence
  Oligonucleotide primer for the detection of SNP TSC0001538
ttttttgtttta

SEQ ID NO: 268981 - DNA, 12 bp, Artificial Sequence
  Oligonucleotide primer for the detection of SNP TSC0001539
tataatatcatc

SEQ ID NO: 268982 - DNA, 12 bp, Artificial Sequence
  Oligonucleotide primer for the detection of SNP TSC0001539
tataatatcgtc

SEQ ID NO: 268983 - DNA, 12 bp, Artificial Sequence
  Oligonukleotid-Primer
ttattttttgga

SEQ ID NO: 268984 - DNA, 12 bp, Artificial Sequence
  Oligonucleotide primer for the detection of SNP TSC0001540
atacaataaatc

SEQ ID NO: 268985 - DNA, 12 bp, Artificial Sequence
  Oligonucleotide primer for the detection of SNP TSC0001540
tggaattatagg

SEQ ID NO: 268986 - DNA, 12 bp, Artificial Sequence
  Oligonucleotide primer for the detection of SNP TSC0001540
taaaattacaaa

SEQ ID NO: 268987 - DNA, 12 bp, Artificial Sequence
  Oligonucleotide primer for the detection of SNP TSC0001540
atgtagtgggtt

SEQ ID NO: 268988 - DNA, 12 bp, Artificial Sequence
  Oligonucleotide primer for the detection of SNP TSC0001541
aacataaaaaac

SEQ ID NO: 268989 - DNA, 12 bp, Artificial Sequence
  Oligonucleotide primer for the detection of SNP TSC0001541
gttttgttttaa

SEQ ID NO: 268990 - DNA, 12 bp, Artificial Sequence
  Oligonucleotide primer for the detection of SNP TSC0001541
attttatttcaa

SEQ ID NO: 268991 - DNA, 12 bp, Artificial Sequence
  Oligonucleotide primer for the detection of SNP TSC0001541
aatatgaagagt

SEQ ID NO: 268992 - DNA, 12 bp, Artificial Sequence
  Oligonucleotide primer for the detection of SNP TSC0001542
taaaccatcatc

SEQ ID NO: 268993 - DNA, 12 bp, Artificial Sequence
  Oligonucleotide primer for the detection of SNP TSC0001542
ggggtgtagtag

SEQ ID NO: 268994 - DNA, 12 bp, Artificial Sequence
  Oligonucleotide primer for the detection of SNP TSC0001542
aaaatacaataa

SEQ ID NO: 268995 - DNA, 12 bp, Artificial Sequence
  Oligonucleotide primer for the detection of SNP TSC0001542
tgagttattatt

SEQ ID NO: 268996 - DNA, 12 bp, Artificial Sequence
  Oligonucleotide primer for the detection of SNP TSC0001543
catatcatcatt

SEQ ID NO: 268997 - DNA, 12 bp, Artificial Sequence
  Oligonucleotide primer for the detection of SNP TSC0001543
tattaaatatta

SEQ ID NO: 268998 - DNA, 12 bp, Artificial Sequence
  Oligonucleotide primer for the detection of SNP TSC0001544
attaacaaattc

SEQ ID NO: 268999 - DNA, 12 bp, Artificial Sequence
  Oligonucleotide primer for the detection of SNP TSC0001544
taattatttttt

SEQ ID NO: 269000 - DNA, 12 bp, Artificial Sequence
  Oligonucleotide primer for the detection of SNP TSC0001544
aattatttttca

SEQ ID NO: 269001 - DNA, 12 bp, Artificial Sequence
  Oligonucleotide primer for the detection of SNP TSC0001544
aataagtttttt

SEQ ID NO: 269002 - DNA, 12 bp, Artificial Sequence
  Oligonucleotide primer for the detection of SNP TSC0001545
aaaccaatcatt

SEQ ID NO: 269003 - DNA, 12 bp, Artificial Sequence
  Oligonucleotide primer for the detection of SNP TSC0001545
gttgaagtatta

SEQ ID NO: 269004 - DNA, 12 bp, Artificial Sequence
  Oligonucleotide primer for the detection of SNP TSC0001545
ttaaaataccaa

SEQ ID NO: 269005 - DNA, 12 bp, Artificial Sequence
  Oligonucleotide primer for the detection of SNP TSC0001545
aagttagttatt

SEQ ID NO: 269006 - DNA, 12 bp, Artificial Sequence
  Oligonucleotide primer for the detection of SNP TSC0001546
ttataaaaatac

SEQ ID NO: 269007 - DNA, 12 bp, Artificial Sequence
  Oligonucleotide primer for the detection of SNP TSC0001546
ataagatatttt

SEQ ID NO: 269008 - DNA, 12 bp, Artificial Sequence
  Oligonucleotide primer for the detection of SNP TSC0001546
acaaaacaccct

SEQ ID NO: 269009 - DNA, 12 bp, Artificial Sequence
  Oligonucleotide primer for the detection of SNP TSC0001546
ttataaagatgt

SEQ ID NO: 269010 - DNA, 12 bp, Artificial Sequence
  Oligonucleotide primer for the detection of SNP TSC0001548
aataataacccc

SEQ ID NO: 269011 - DNA, 12 bp, Artificial Sequence
  Oligonucleotide primer for the detection of SNP TSC0001548
ggggaagtggtg

SEQ ID NO: 269012 - DNA, 12 bp, Artificial Sequence
  Oligonucleotide primer for the detection of SNP TSC0001552
tataaacaaatc

SEQ ID NO: 269013 - DNA, 12 bp, Artificial Sequence
  Oligonucleotide primer for the detection of SNP TSC0001552
gtaatttagagg

SEQ ID NO: 269014 - DNA, 12 bp, Artificial Sequence
  Oligonucleotide primer for the detection of SNP TSC0001553
ttaatatttata

SEQ ID NO: 269015 - DNA, 12 bp, Artificial Sequence
  Oligonucleotide primer for the detection of SNP TSC0001553
ttatattagggt

SEQ ID NO: 269016 - DNA, 12 bp, Artificial Sequence
  Oligonucleotide primer for the detection of SNP TSC0001553
ctataccaaaat

SEQ ID NO: 269017 - DNA, 12 bp, Artificial Sequence
  Oligonucleotide primer for the detection of SNP TSC0001555
attaacaatatt

SEQ ID NO: 269018 - DNA, 12 bp, Artificial Sequence
  Oligonucleotide primer for the detection of SNP TSC0001555
tgaaaatattga

SEQ ID NO: 269019 - DNA, 12 bp, Artificial Sequence
  Oligonucleotide primer for the detection of SNP TSC0001555
taaaaatattaa

SEQ ID NO: 269020 - DNA, 12 bp, Artificial Sequence
  Oligonucleotide primer for the detection of SNP TSC0001555
attggtaatgtt

SEQ ID NO: 269021 - DNA, 12 bp, Artificial Sequence
  Oligonucleotide primer for the detection of SNP TSC0001556
attctaaacaaa

SEQ ID NO: 269022 - DNA, 12 bp, Artificial Sequence
  Oligonucleotide primer for the detection of SNP TSC0001556
attttttttttt

SEQ ID NO: 269023 - DNA, 12 bp, Artificial Sequence
  Oligonucleotide primer for the detection of SNP TSC0001556
aaactttttttc

SEQ ID NO: 269024 - DNA, 12 bp, Artificial Sequence
  Oligonucleotide primer for the detection of SNP TSC0001556
gttattttgggt

SEQ ID NO: 269025 - DNA, 12 bp, Artificial Sequence
  Oligonucleotide primer for the detection of SNP TSC0001564
atatattttatt

SEQ ID NO: 269026 - DNA, 12 bp, Artificial Sequence
  Oligonucleotide primer for the detection of SNP TSC0001564
gtatttaattta

SEQ ID NO: 269027 - DNA, 12 bp, Artificial Sequence
  Oligonucleotide primer for the detection of SNP TSC0001570
aaaaaatatttc

SEQ ID NO: 269028 - DNA, 12 bp, Artificial Sequence
  Oligonucleotide primer for the detection of SNP TSC0001570
taaggaagaggg

SEQ ID NO: 269029 - DNA, 12 bp, Artificial Sequence
  Oligonucleotide primer for the detection of SNP TSC0001570
gaagggtatttt

SEQ ID NO: 269030 - DNA, 12 bp, Artificial Sequence
  Oligonucleotide primer for the detection of SNP TSC0001570
gaagggtatttc

SEQ ID NO: 269031 - DNA, 12 bp, Artificial Sequence
  Oligonucleotide primer for the detection of SNP TSC0001571
caaaaatacaaa

SEQ ID NO: 269032 - DNA, 12 bp, Artificial Sequence
  Oligonucleotide primer for the detection of SNP TSC0001571
tattgtaatttt

SEQ ID NO: 269033 - DNA, 12 bp, Artificial Sequence
  Oligonucleotide primer for the detection of SNP TSC0001571
cacactacaatc

SEQ ID NO: 269034 - DNA, 12 bp, Artificial Sequence
  Oligonucleotide primer for the detection of SNP TSC0001571
ttagagatatag

SEQ ID NO: 269035 - DNA, 12 bp, Artificial Sequence
  Oligonucleotide primer for the detection of SNP TSC0001575
catatcctatta

SEQ ID NO: 269036 - DNA, 12 bp, Artificial Sequence
  Oligonucleotide primer for the detection of SNP TSC0001575
ttataggaagta

SEQ ID NO: 269037 - DNA, 12 bp, Artificial Sequence
  Oligonucleotide primer for the detection of SNP TSC0001576
atcatcaaatat

SEQ ID NO: 269038 - DNA, 12 bp, Artificial Sequence
  Oligonucleotide primer for the detection of SNP TSC0001576
atatttttgttt

SEQ ID NO: 269039 - DNA, 12 bp, Artificial Sequence
  Oligonucleotide primer for the detection of SNP TSC0001577
aattcaccttaa

SEQ ID NO: 269040 - DNA, 12 bp, Artificial Sequence
  Oligonucleotide primer for the detection of SNP TSC0001577
ttatttttaaaa

SEQ ID NO: 269041 - DNA, 12 bp, Artificial Sequence
  Oligonucleotide primer for the detection of SNP TSC0001577
ttacctttaaaa

SEQ ID NO: 269042 - DNA, 12 bp, Artificial Sequence
  Oligonucleotide primer for the detection of SNP TSC0001577
atttattttgat

SEQ ID NO: 269043 - DNA, 12 bp, Artificial Sequence
  Oligonucleotide primer for the detection of SNP TSC0001578
ataccatcacac

SEQ ID NO: 269044 - DNA, 12 bp, Artificial Sequence
  Oligonucleotide primer for the detection of SNP TSC0001578
aaaaaatagtta

SEQ ID NO: 269045 - DNA, 12 bp, Artificial Sequence
  Oligonucleotide primer for the detection of SNP TSC0001579
aaaaatcctcct

SEQ ID NO: 269046 - DNA, 12 bp, Artificial Sequence
  Oligonucleotide primer for the detection of SNP TSC0001579
tgggaggttgag

SEQ ID NO: 269047 - DNA, 12 bp, Artificial Sequence
  Oligonucleotide primer for the detection of SNP TSC0001579
cgggaggttgag

SEQ ID NO: 269048 - DNA, 12 bp, Artificial Sequence
  Oligonucleotide primer for the detection of SNP TSC0001580
ttaaaactacaa

SEQ ID NO: 269049 - DNA, 12 bp, Artificial Sequence
  Oligonucleotide primer for the detection of SNP TSC0001580
tgatggtatatg

SEQ ID NO: 269050 - DNA, 12 bp, Artificial Sequence
  Oligonucleotide primer for the detection of SNP TSC0001580
taataacacata

SEQ ID NO: 269051 - DNA, 12 bp, Artificial Sequence
  Oligonucleotide primer for the detection of SNP TSC0001580
ttaggattgtag

SEQ ID NO: 269052 - DNA, 12 bp, Artificial Sequence
  Oligonucleotide primer for the detection of SNP TSC0001581
aaaataaaccca

SEQ ID NO: 269053 - DNA, 12 bp, Artificial Sequence
  Oligonucleotide primer for the detection of SNP TSC0001581
tattgtagatgt

SEQ ID NO: 269054 - DNA, 12 bp, Artificial Sequence
  Oligonucleotide primer for the detection of SNP TSC0001581
tactataaatat

SEQ ID NO: 269055 - DNA, 12 bp, Artificial Sequence
  Oligonucleotide primer for the detection of SNP TSC0001581
aagataaattta

SEQ ID NO: 269056 - DNA, 12 bp, Artificial Sequence
  Oligonucleotide primer for the detection of SNP TSC0001582
caaccctaaaat

SEQ ID NO: 269057 - DNA, 12 bp, Artificial Sequence
  Oligonucleotide primer for the detection of SNP TSC0001582
tggttttatata

SEQ ID NO: 269058 - DNA, 12 bp, Artificial Sequence
  Oligonucleotide primer for the detection of SNP TSC0001582
taatttcacata

SEQ ID NO: 269059 - DNA, 12 bp, Artificial Sequence
  Oligonucleotide primer for the detection of SNP TSC0001582
taattttaaaat

SEQ ID NO: 269060 - DNA, 12 bp, Artificial Sequence
  Oligonucleotide primer for the detection of SNP TSC0001584
actataattaat

SEQ ID NO: 269061 - DNA, 12 bp, Artificial Sequence
  Oligonucleotide primer for the detection of SNP TSC0001584
gtttatttagaa

SEQ ID NO: 269062 - DNA, 12 bp, Artificial Sequence
  Oligonucleotide primer for the detection of SNP TSC0001585
actccaaaaaaa

SEQ ID NO: 269063 - DNA, 12 bp, Artificial Sequence
  Oligonucleotide primer for the detection of SNP TSC0001585
tgtgtagaattt

SEQ ID NO: 269064 - DNA, 12 bp, Artificial Sequence
  Oligonucleotide primer for the detection of SNP TSC0001585
tatacaaaaccc

SEQ ID NO: 269065 - DNA, 12 bp, Artificial Sequence
  Oligonucleotide primer for the detection of SNP TSC0001585
attttagaagag

SEQ ID NO: 269066 - DNA, 12 bp, Artificial Sequence
  Oligonucleotide primer for the detection of SNP TSC0001587
aaaaattaatat

SEQ ID NO: 269067 - DNA, 12 bp, Artificial Sequence
  Oligonucleotide primer for the detection of SNP TSC0001587
tttgttgttttt

SEQ ID NO: 269068 - DNA, 12 bp, Artificial Sequence
  Oligonukleotid-Primer
ttcgttgttttt

SEQ ID NO: 269069 - DNA, 12 bp, Artificial Sequence
  Oligonucleotide primer for the detection of SNP TSC0001588
tcctaaaaaaat

SEQ ID NO: 269070 - DNA, 12 bp, Artificial Sequence
  Oligonucleotide primer for the detection of SNP TSC0001588
gaaatattagag

SEQ ID NO: 269071 - DNA, 12 bp, Artificial Sequence
  Oligonucleotide primer for the detection of SNP TSC0001588
aaaatattaaaa

SEQ ID NO: 269072 - DNA, 12 bp, Artificial Sequence
  Oligonucleotide primer for the detection of SNP TSC0001588
ttttagagaaat

SEQ ID NO: 269073 - DNA, 12 bp, Artificial Sequence
  Oligonucleotide primer for the detection of SNP TSC0001591
ataatcaactct

SEQ ID NO: 269074 - DNA, 12 bp, Artificial Sequence
  Oligonucleotide primer for the detection of SNP TSC0001591
tttaaggtgttt

SEQ ID NO: 269075 - DNA, 12 bp, Artificial Sequence
  Oligonucleotide primer for the detection of SNP TSC0001591
cccaaaatattc

SEQ ID NO: 269076 - DNA, 12 bp, Artificial Sequence
  Oligonucleotide primer for the detection of SNP TSC0001591
ttaatttttttt

SEQ ID NO: 269077 - DNA, 12 bp, Artificial Sequence
  Oligonucleotide primer for the detection of SNP TSC0001591
ttaatttttttc

SEQ ID NO: 269078 - DNA, 12 bp, Artificial Sequence
  Oligonucleotide primer for the detection of SNP TSC0001592
cattatttaaaa

SEQ ID NO: 269079 - DNA, 12 bp, Artificial Sequence
  Oligonucleotide primer for the detection of SNP TSC0001592
ggtatttgggat

SEQ ID NO: 269080 - DNA, 12 bp, Artificial Sequence
  Oligonucleotide primer for the detection of SNP TSC0001592
ggtatttgggac

SEQ ID NO: 269081 - DNA, 12 bp, Artificial Sequence
  Oligonucleotide primer for the detection of SNP TSC0001592
aaatatctaaaa

SEQ ID NO: 269082 - DNA, 12 bp, Artificial Sequence
  Oligonucleotide primer for the detection of SNP TSC0001592
tattatttgaaa

SEQ ID NO: 269083 - DNA, 12 bp, Artificial Sequence
  Oligonucleotide primer for the detection of SNP TSC0001594
ccttataatcta

SEQ ID NO: 269084 - DNA, 12 bp, Artificial Sequence
  Oligonucleotide primer for the detection of SNP TSC0001594
ttttgagaggtt

SEQ ID NO: 269085 - DNA, 12 bp, Artificial Sequence
  Oligonucleotide primer for the detection of SNP TSC0001594
ctttaaaaaacc

SEQ ID NO: 269086 - DNA, 12 bp, Artificial Sequence
  Oligonucleotide primer for the detection of SNP TSC0001594
ttttgtgatttg

SEQ ID NO: 269087 - DNA, 12 bp, Artificial Sequence
  Oligonucleotide primer for the detection of SNP TSC0001595
caatctttaaac

SEQ ID NO: 269088 - DNA, 12 bp, Artificial Sequence
  Oligonucleotide primer for the detection of SNP TSC0001595
aagatttataaa

SEQ ID NO: 269089 - DNA, 12 bp, Artificial Sequence
  Oligonucleotide primer for the detection of SNP TSC0001596
aattaaacctaa

SEQ ID NO: 269090 - DNA, 12 bp, Artificial Sequence
  Oligonucleotide primer for the detection of SNP TSC0001596
gtgtgttatttt

SEQ ID NO: 269091 - DNA, 12 bp, Artificial Sequence
  Oligonucleotide primer for the detection of SNP TSC0001596
gtgtgttatttc

SEQ ID NO: 269092 - DNA, 12 bp, Artificial Sequence
  Oligonucleotide primer for the detection of SNP TSC0001596
atatatcacctc

SEQ ID NO: 269093 - DNA, 12 bp, Artificial Sequence
  Oligonucleotide primer for the detection of SNP TSC0001596
ataattgaattt

SEQ ID NO: 269094 - DNA, 12 bp, Artificial Sequence
  Oligonucleotide primer for the detection of SNP TSC0001597
taaaacaatctt

SEQ ID NO: 269095 - DNA, 12 bp, Artificial Sequence
  Oligonucleotide primer for the detection of SNP TSC0001597
tttgggtgatag

SEQ ID NO: 269096 - DNA, 12 bp, Artificial Sequence
  Oligonucleotide primer for the detection of SNP TSC0001597
cctaaataacaa

SEQ ID NO: 269097 - DNA, 12 bp, Artificial Sequence
  Oligonucleotide primer for the detection of SNP TSC0001597
tgagatagtttt

SEQ ID NO: 269098 - DNA, 12 bp, Artificial Sequence
  Oligonucleotide primer for the detection of SNP TSC0001599
cctaattatctt

SEQ ID NO: 269099 - DNA, 12 bp, Artificial Sequence
  Oligonucleotide primer for the detection of SNP TSC0001599
agagaaagagtt

SEQ ID NO: 269100 - DNA, 12 bp, Artificial Sequence
  Oligonucleotide primer for the detection of SNP TSC0001599
tttaattgtttt

SEQ ID NO: 269101 - DNA, 12 bp, Artificial Sequence
  Oligonucleotide primer for the detection of SNP TSC0001608
aaaccactccac

SEQ ID NO: 269102 - DNA, 12 bp, Artificial Sequence
  Oligonucleotide primer for the detection of SNP TSC0001608
aaaccgctccac

SEQ ID NO: 269103 - DNA, 12 bp, Artificial Sequence
  Oligonucleotide primer for the detection of SNP TSC0001608
gagagtaggaat

SEQ ID NO: 269104 - DNA, 12 bp, Artificial Sequence
  Oligonucleotide primer for the detection of SNP TSC0001608
aaaaacaaaaat

SEQ ID NO: 269105 - DNA, 12 bp, Artificial Sequence
  Oligonucleotide primer for the detection of SNP TSC0001608
aaattgttttat

SEQ ID NO: 269106 - DNA, 12 bp, Artificial Sequence
  Oligonucleotide primer for the detection of SNP TSC0001608
aaatcgttttat

SEQ ID NO: 269107 - DNA, 12 bp, Artificial Sequence
  Oligonucleotide primer for the detection of SNP TSC0001613
ctctaatctaat

SEQ ID NO: 269108 - DNA, 12 bp, Artificial Sequence
  Oligonucleotide primer for the detection of SNP TSC0001613
agagaaatgtta

SEQ ID NO: 269109 - DNA, 12 bp, Artificial Sequence
  Oligonucleotide primer for the detection of SNP TSC0001613
aaaaaaatacca

SEQ ID NO: 269110 - DNA, 12 bp, Artificial Sequence
  Oligonucleotide primer for the detection of SNP TSC0001613
ttttgatttaat

SEQ ID NO: 269111 - DNA, 12 bp, Artificial Sequence
  Oligonucleotide primer for the detection of SNP TSC0001614
aattcactactt

SEQ ID NO: 269112 - DNA, 12 bp, Artificial Sequence
  Oligonucleotide primer for the detection of SNP TSC0001614
ttgtggtatgga

SEQ ID NO: 269113 - DNA, 12 bp, Artificial Sequence
  Oligonucleotide primer for the detection of SNP TSC0001614
ttataacataaa

SEQ ID NO: 269114 - DNA, 12 bp, Artificial Sequence
  Oligonucleotide primer for the detection of SNP TSC0001614
aatttattgttt

SEQ ID NO: 269115 - DNA, 12 bp, Artificial Sequence
  Oligonucleotide primer for the detection of SNP TSC0001615
aaaaccaaataa

SEQ ID NO: 269116 - DNA, 12 bp, Artificial Sequence
  Oligonucleotide primer for the detection of SNP TSC0001615
ttgtaagagagt

SEQ ID NO: 269117 - DNA, 12 bp, Artificial Sequence
  Oligonucleotide primer for the detection of SNP TSC0001615
ttataaaaaaat

SEQ ID NO: 269118 - DNA, 12 bp, Artificial Sequence
  Oligonucleotide primer for the detection of SNP TSC0001615
aggattaaataa

SEQ ID NO: 269119 - DNA, 12 bp, Artificial Sequence
  Oligonucleotide primer for the detection of SNP TSC0001616
taaaaacaacac

SEQ ID NO: 269120 - DNA, 12 bp, Artificial Sequence
  Oligonucleotide primer for the detection of SNP TSC0001616
ttgggttttttt

SEQ ID NO: 269121 - DNA, 12 bp, Artificial Sequence
  Oligonucleotide primer for the detection of SNP TSC0001616
tcgggttttttt

SEQ ID NO: 269122 - DNA, 12 bp, Artificial Sequence
  Oligonucleotide primer for the detection of SNP TSC0001616
ttgggttttttc

SEQ ID NO: 269123 - DNA, 12 bp, Artificial Sequence
  Oligonucleotide primer for the detection of SNP TSC0001616
tcgggttttttc

SEQ ID NO: 269124 - DNA, 12 bp, Artificial Sequence
  Oligonucleotide primer for the detection of SNP TSC0001616
aatcaaatcttt

SEQ ID NO: 269125 - DNA, 12 bp, Artificial Sequence
  Oligonucleotide primer for the detection of SNP TSC0001616
aatcgaatcttt

SEQ ID NO: 269126 - DNA, 12 bp, Artificial Sequence
  Oligonucleotide primer for the detection of SNP TSC0001616
tgagaatagtat

SEQ ID NO: 269127 - DNA, 12 bp, Artificial Sequence
  Oligonucleotide primer for the detection of SNP TSC0001617
acaccaaaaaaa

SEQ ID NO: 269128 - DNA, 12 bp, Artificial Sequence
  Oligonucleotide primer for the detection of SNP TSC0001617
acaccgaaaaaa

SEQ ID NO: 269129 - DNA, 12 bp, Artificial Sequence
  Oligonukleotid-Primer
aattataggggt

SEQ ID NO: 269130 - DNA, 12 bp, Artificial Sequence
  Oligonucleotide primer for the detection of SNP TSC0001617
aatcataaaaat

SEQ ID NO: 269131 - DNA, 12 bp, Artificial Sequence
  Oligonucleotide primer for the detection of SNP TSC0001617
gtattggaaaga

SEQ ID NO: 269132 - DNA, 12 bp, Artificial Sequence
  Oligonucleotide primer for the detection of SNP TSC0001617
gtatcggaaaga

SEQ ID NO: 269133 - DNA, 12 bp, Artificial Sequence
  Oligonucleotide primer for the detection of SNP TSC0001621
tatacccttaat

SEQ ID NO: 269134 - DNA, 12 bp, Artificial Sequence
  Oligonucleotide primer for the detection of SNP TSC0001621
gatatagttaaa

SEQ ID NO: 269135 - DNA, 12 bp, Artificial Sequence
  Oligonucleotide primer for the detection of SNP TSC0001622
ttaaacaataaa

SEQ ID NO: 269136 - DNA, 12 bp, Artificial Sequence
  Oligonucleotide primer for the detection of SNP TSC0001622
tttgttttttaa

SEQ ID NO: 269137 - DNA, 12 bp, Artificial Sequence
  Oligonucleotide primer for the detection of SNP TSC0001622
ctaccttctaaa

SEQ ID NO: 269138 - DNA, 12 bp, Artificial Sequence
  Oligonucleotide primer for the detection of SNP TSC0001622
gtttaagtaatg

SEQ ID NO: 269139 - DNA, 12 bp, Artificial Sequence
  Oligonucleotide primer for the detection of SNP TSC0001623
ctaataaaaaat

SEQ ID NO: 269140 - DNA, 12 bp, Artificial Sequence
  Oligonucleotide primer for the detection of SNP TSC0001623
ttttgtgattta

SEQ ID NO: 269141 - DNA, 12 bp, Artificial Sequence
  Oligonucleotide primer for the detection of SNP TSC0001627
cacaaataacta

SEQ ID NO: 269142 - DNA, 12 bp, Artificial Sequence
  Oligonucleotide primer for the detection of SNP TSC0001627
ttagaaataaat

SEQ ID NO: 269143 - DNA, 12 bp, Artificial Sequence
  Oligonucleotide primer for the detection of SNP TSC0001627
cccaaaaataaa

SEQ ID NO: 269144 - DNA, 12 bp, Artificial Sequence
  Oligonucleotide primer for the detection of SNP TSC0001627
ttataaatgatt

SEQ ID NO: 269145 - DNA, 12 bp, Artificial Sequence
  Oligonucleotide primer for the detection of SNP TSC0001634
ctcccaaattta

SEQ ID NO: 269146 - DNA, 12 bp, Artificial Sequence
  Oligonucleotide primer for the detection of SNP TSC0001634
ggtatgttataa

SEQ ID NO: 269147 - DNA, 12 bp, Artificial Sequence
  Oligonucleotide primer for the detection of SNP TSC0001635
caaactacaatt

SEQ ID NO: 269148 - DNA, 12 bp, Artificial Sequence
  Oligonucleotide primer for the detection of SNP TSC0001635
tgatagtattat

SEQ ID NO: 269149 - DNA, 12 bp, Artificial Sequence
  Oligonucleotide primer for the detection of SNP TSC0001635
ataataacacca

SEQ ID NO: 269150 - DNA, 12 bp, Artificial Sequence
  Oligonucleotide primer for the detection of SNP TSC0001635
aggttgtagttt

SEQ ID NO: 269151 - DNA, 12 bp, Artificial Sequence
  Oligonucleotide primer for the detection of SNP TSC0001636
aaaaaaataaaa

SEQ ID NO: 269152 - DNA, 12 bp, Artificial Sequence
  Oligonucleotide primer for the detection of SNP TSC0001636
ttttttaaaagg

SEQ ID NO: 269153 - DNA, 12 bp, Artificial Sequence
  Oligonucleotide primer for the detection of SNP TSC0001637
acttaaaaaaaa

SEQ ID NO: 269154 - DNA, 12 bp, Artificial Sequence
  Oligonucleotide primer for the detection of SNP TSC0001637
ggattttttttt

SEQ ID NO: 269155 - DNA, 12 bp, Artificial Sequence
  Oligonucleotide primer for the detection of SNP TSC0001637
aaccttttctta

SEQ ID NO: 269156 - DNA, 12 bp, Artificial Sequence
  Oligonucleotide primer for the detection of SNP TSC0001637
atttaagaaaag

SEQ ID NO: 269157 - DNA, 12 bp, Artificial Sequence
  Oligonucleotide primer for the detection of SNP TSC0001638
ataaaacaaata

SEQ ID NO: 269158 - DNA, 12 bp, Artificial Sequence
  Oligonucleotide primer for the detection of SNP TSC0001638
ttgttaggaagt

SEQ ID NO: 269159 - DNA, 12 bp, Artificial Sequence
  Oligonucleotide primer for the detection of SNP TSC0001638
ctatcaaaaaac

SEQ ID NO: 269160 - DNA, 12 bp, Artificial Sequence
  Oligonucleotide primer for the detection of SNP TSC0001638
atggggtagatg

SEQ ID NO: 269161 - DNA, 12 bp, Artificial Sequence
  Oligonucleotide primer for the detection of SNP TSC0001639
ccctaaccaaca

SEQ ID NO: 269162 - DNA, 12 bp, Artificial Sequence
  Oligonucleotide primer for the detection of SNP TSC0001639
tgataataaaga

SEQ ID NO: 269163 - DNA, 12 bp, Artificial Sequence
  Oligonucleotide primer for the detection of SNP TSC0001643
aataaactaata

SEQ ID NO: 269164 - DNA, 12 bp, Artificial Sequence
  Oligonucleotide primer for the detection of SNP TSC0001643
tttttgaagatt

SEQ ID NO: 269165 - DNA, 12 bp, Artificial Sequence
  Oligonucleotide primer for the detection of SNP TSC0001643
cccttaaaaatt

SEQ ID NO: 269166 - DNA, 12 bp, Artificial Sequence
  Oligonucleotide primer for the detection of SNP TSC0001643
aatggattaata

SEQ ID NO: 269167 - DNA, 12 bp, Artificial Sequence
  Oligonucleotide primer for the detection of SNP TSC0001644
tctccaaaaaaa

SEQ ID NO: 269168 - DNA, 12 bp, Artificial Sequence
  Oligonucleotide primer for the detection of SNP TSC0001644
tctccgaaaaaa

SEQ ID NO: 269169 - DNA, 12 bp, Artificial Sequence
  Oligonucleotide primer for the detection of SNP TSC0001644
tttagggtgttt

SEQ ID NO: 269170 - DNA, 12 bp, Artificial Sequence
  Oligonucleotide primer for the detection of SNP TSC0001644
tttagggtgttc

SEQ ID NO: 269171 - DNA, 12 bp, Artificial Sequence
  Oligonucleotide primer for the detection of SNP TSC0001644
cctcaaaatact

SEQ ID NO: 269172 - DNA, 12 bp, Artificial Sequence
  Oligonucleotide primer for the detection of SNP TSC0001644
ttttgagagggt

SEQ ID NO: 269173 - DNA, 12 bp, Artificial Sequence
  Oligonucleotide primer for the detection of SNP TSC0001644
tttcgagagggt

SEQ ID NO: 269174 - DNA, 12 bp, Artificial Sequence
  Oligonucleotide primer for the detection of SNP TSC0001645
cctaatacacca

SEQ ID NO: 269175 - DNA, 12 bp, Artificial Sequence
  Oligonucleotide primer for the detection of SNP TSC0001645
aggaaatgttgg

SEQ ID NO: 269176 - DNA, 12 bp, Artificial Sequence
  Oligonucleotide primer for the detection of SNP TSC0001645
aaaaaatactaa

SEQ ID NO: 269177 - DNA, 12 bp, Artificial Sequence
  Oligonucleotide primer for the detection of SNP TSC0001645
gtttggtatatt

SEQ ID NO: 269178 - DNA, 12 bp, Artificial Sequence
  Oligonucleotide primer for the detection of SNP TSC0001646
actcctataatc

SEQ ID NO: 269179 - DNA, 12 bp, Artificial Sequence
  Oligonucleotide primer for the detection of SNP TSC0001646
tttgagtagttg

SEQ ID NO: 269180 - DNA, 12 bp, Artificial Sequence
  Oligonucleotide primer for the detection of SNP TSC0001646
ttcgagtagttg

SEQ ID NO: 269181 - DNA, 12 bp, Artificial Sequence
  Oligonucleotide primer for the detection of SNP TSC0001647
ataaattaatac

SEQ ID NO: 269182 - DNA, 12 bp, Artificial Sequence
  Oligonucleotide primer for the detection of SNP TSC0001647
tgttttattttt

SEQ ID NO: 269183 - DNA, 12 bp, Artificial Sequence
  Oligonucleotide primer for the detection of SNP TSC0001647
aataccccactc

SEQ ID NO: 269184 - DNA, 12 bp, Artificial Sequence
  Oligonucleotide primer for the detection of SNP TSC0001647
ataaattggtat

SEQ ID NO: 269185 - DNA, 12 bp, Artificial Sequence
  Oligonucleotide primer for the detection of SNP TSC0001647
ataaattggtac

SEQ ID NO: 269186 - DNA, 12 bp, Artificial Sequence
  Oligonucleotide primer for the detection of SNP TSC0001650
cactcaaaaaac

SEQ ID NO: 269187 - DNA, 12 bp, Artificial Sequence
  Oligonucleotide primer for the detection of SNP TSC0001650
gtttgtttttga

SEQ ID NO: 269188 - DNA, 12 bp, Artificial Sequence
  Oligonucleotide primer for the detection of SNP TSC0001651
tctaaataatat

SEQ ID NO: 269189 - DNA, 12 bp, Artificial Sequence
  Oligonucleotide primer for the detection of SNP TSC0001651
tttttgttttta

SEQ ID NO: 269190 - DNA, 12 bp, Artificial Sequence
  Oligonucleotide primer for the detection of SNP TSC0001652
actatctacttc

SEQ ID NO: 269191 - DNA, 12 bp, Artificial Sequence
  Oligonucleotide primer for the detection of SNP TSC0001652
atgaggtaggag

SEQ ID NO: 269192 - DNA, 12 bp, Artificial Sequence
  Oligonucleotide primer for the detection of SNP TSC0001654
aaaaataaaaaa

SEQ ID NO: 269193 - DNA, 12 bp, Artificial Sequence
  Oligonucleotide primer for the detection of SNP TSC0001654
tggaatggagat

SEQ ID NO: 269194 - DNA, 12 bp, Artificial Sequence
  Oligonucleotide primer for the detection of SNP TSC0001654
taaaataaaaac

SEQ ID NO: 269195 - DNA, 12 bp, Artificial Sequence
  Oligonucleotide primer for the detection of SNP TSC0001654
gagagtgaggag

SEQ ID NO: 269196 - DNA, 12 bp, Artificial Sequence
  Oligonucleotide primer for the detection of SNP TSC0001655
taaaaataatcc

SEQ ID NO: 269197 - DNA, 12 bp, Artificial Sequence
  Oligonucleotide primer for the detection of SNP TSC0001655
tggttgagttag

SEQ ID NO: 269198 - DNA, 12 bp, Artificial Sequence
  Oligonucleotide primer for the detection of SNP TSC0001655
taactaaatcaa

SEQ ID NO: 269199 - DNA, 12 bp, Artificial Sequence
  Oligonucleotide primer for the detection of SNP TSC0001655
taggaatggttt

SEQ ID NO: 269200 - DNA, 12 bp, Artificial Sequence
  Oligonucleotide primer for the detection of SNP TSC0001655
taggaatggttc

SEQ ID NO: 269201 - DNA, 12 bp, Artificial Sequence
  Oligonucleotide primer for the detection of SNP TSC0001656
aacctaaacccc

SEQ ID NO: 269202 - DNA, 12 bp, Artificial Sequence
  Oligonucleotide primer for the detection of SNP TSC0001656
aaaagggtggga

SEQ ID NO: 269203 - DNA, 12 bp, Artificial Sequence
  Oligonucleotide primer for the detection of SNP TSC0001656
aaaagggcggga

SEQ ID NO: 269204 - DNA, 12 bp, Artificial Sequence
  Oligonucleotide primer for the detection of SNP TSC0001657
aaccccacccct

SEQ ID NO: 269205 - DNA, 12 bp, Artificial Sequence
  Oligonucleotide primer for the detection of SNP TSC0001657
gtggtagtgggg

SEQ ID NO: 269206 - DNA, 12 bp, Artificial Sequence
  Oligonukleotid-Primer
ataacaataaaa

SEQ ID NO: 269207 - DNA, 12 bp, Artificial Sequence
  Oligonucleotide primer for the detection of SNP TSC0001657
aattttattttt

SEQ ID NO: 269208 - DNA, 12 bp, Artificial Sequence
  Oligonucleotide primer for the detection of SNP TSC0001658
aaaaataaatct

SEQ ID NO: 269209 - DNA, 12 bp, Artificial Sequence
  Oligonucleotide primer for the detection of SNP TSC0001658
gatttattttta

SEQ ID NO: 269210 - DNA, 12 bp, Artificial Sequence
  Oligonukleotid-Primer
caaaaacataaa

SEQ ID NO: 269211 - DNA, 12 bp, Artificial Sequence
  Oligonucleotide primer for the detection of SNP TSC0001664
tttttgttattg

SEQ ID NO: 269212 - DNA, 12 bp, Artificial Sequence
  Oligonucleotide primer for the detection of SNP TSC0001664
tctttactatta

SEQ ID NO: 269213 - DNA, 12 bp, Artificial Sequence
  Oligonucleotide primer for the detection of SNP TSC0001664
gtaaagatatgg

SEQ ID NO: 269214 - DNA, 12 bp, Artificial Sequence
  Oligonucleotide primer for the detection of SNP TSC0001665
aaaataaaaata

SEQ ID NO: 269215 - DNA, 12 bp, Artificial Sequence
  Oligonucleotide primer for the detection of SNP TSC0001665
tgttgtttattt

SEQ ID NO: 269216 - DNA, 12 bp, Artificial Sequence
  Oligonucleotide primer for the detection of SNP TSC0001665
tgttgtttattc

SEQ ID NO: 269217 - DNA, 12 bp, Artificial Sequence
  Oligonucleotide primer for the detection of SNP TSC0001665
tactacttaccc

SEQ ID NO: 269218 - DNA, 12 bp, Artificial Sequence
  Oligonucleotide primer for the detection of SNP TSC0001665
agaatgggagtg

SEQ ID NO: 269219 - DNA, 12 bp, Artificial Sequence
  Oligonucleotide primer for the detection of SNP TSC0001666
ttataaaaaaaa

SEQ ID NO: 269220 - DNA, 12 bp, Artificial Sequence
  Oligonucleotide primer for the detection of SNP TSC0001666
ttgtttgtagag

SEQ ID NO: 269221 - DNA, 12 bp, Artificial Sequence
  Oligonucleotide primer for the detection of SNP TSC0001666
ctacctacaaaa

SEQ ID NO: 269222 - DNA, 12 bp, Artificial Sequence
  Oligonucleotide primer for the detection of SNP TSC0001666
taatttataagg

SEQ ID NO: 269223 - DNA, 12 bp, Artificial Sequence
  Oligonucleotide primer for the detection of SNP TSC0001667
aataaacttatc

SEQ ID NO: 269224 - DNA, 12 bp, Artificial Sequence
  Oligonucleotide primer for the detection of SNP TSC0001667
ttgttttggtta

SEQ ID NO: 269225 - DNA, 12 bp, Artificial Sequence
  Oligonucleotide primer for the detection of SNP TSC0001668
atacaatcaaat

SEQ ID NO: 269226 - DNA, 12 bp, Artificial Sequence
  Oligonucleotide primer for the detection of SNP TSC0001668
agtatggtgatg

SEQ ID NO: 269227 - DNA, 12 bp, Artificial Sequence
  Oligonucleotide primer for the detection of SNP TSC0001668
agtatggtgacg

SEQ ID NO: 269228 - DNA, 12 bp, Artificial Sequence
  Oligonucleotide primer for the detection of SNP TSC0001671
ctcatctaccct

SEQ ID NO: 269229 - DNA, 12 bp, Artificial Sequence
  Oligonucleotide primer for the detection of SNP TSC0001671
atattttggggt

SEQ ID NO: 269230 - DNA, 12 bp, Artificial Sequence
  Oligonucleotide primer for the detection of SNP TSC0001671
aatattctaaaa

SEQ ID NO: 269231 - DNA, 12 bp, Artificial Sequence
  Oligonucleotide primer for the detection of SNP TSC0001671
tttatttatttt

SEQ ID NO: 269232 - DNA, 12 bp, Artificial Sequence
  Oligonucleotide primer for the detection of SNP TSC0001672
tcatataaaaac

SEQ ID NO: 269233 - DNA, 12 bp, Artificial Sequence
  Oligonucleotide primer for the detection of SNP TSC0001672
gtagatgagaag

SEQ ID NO: 269234 - DNA, 12 bp, Artificial Sequence
  Oligonucleotide primer for the detection of SNP TSC0001672
ataaataaaaaa

SEQ ID NO: 269235 - DNA, 12 bp, Artificial Sequence
  Oligonucleotide primer for the detection of SNP TSC0001672
tatatggagatt

SEQ ID NO: 269236 - DNA, 12 bp, Artificial Sequence
  Oligonucleotide primer for the detection of SNP TSC0001673
actcacaatcat

SEQ ID NO: 269237 - DNA, 12 bp, Artificial Sequence
  Oligonucleotide primer for the detection of SNP TSC0001673
gtgttttgtttt

SEQ ID NO: 269238 - DNA, 12 bp, Artificial Sequence
  Oligonucleotide primer for the detection of SNP TSC0001674
taattattataa

SEQ ID NO: 269239 - DNA, 12 bp, Artificial Sequence
  Oligonucleotide primer for the detection of SNP TSC0001674
aatttataaaat

SEQ ID NO: 269240 - DNA, 12 bp, Artificial Sequence
  Oligonucleotide primer for the detection of SNP TSC0001674
ttcataaaataa

SEQ ID NO: 269241 - DNA, 12 bp, Artificial Sequence
  Oligonucleotide primer for the detection of SNP TSC0001674
tgattgttatag

SEQ ID NO: 269242 - DNA, 12 bp, Artificial Sequence
  Oligonucleotide primer for the detection of SNP TSC0001675
atatccaataaa

SEQ ID NO: 269243 - DNA, 12 bp, Artificial Sequence
  Oligonucleotide primer for the detection of SNP TSC0001675
tataaaagaaaa

SEQ ID NO: 269244 - DNA, 12 bp, Artificial Sequence
  Oligonucleotide primer for the detection of SNP TSC0001675
gtttaataaatt

SEQ ID NO: 269245 - DNA, 12 bp, Artificial Sequence
  Oligonucleotide primer for the detection of SNP TSC0001676
taaattatccaa

SEQ ID NO: 269246 - DNA, 12 bp, Artificial Sequence
  Oligonucleotide primer for the detection of SNP TSC0001676
taaagatatatt

SEQ ID NO: 269247 - DNA, 12 bp, Artificial Sequence
  Oligonucleotide primer for the detection of SNP TSC0001676
taaaaacatacc

SEQ ID NO: 269248 - DNA, 12 bp, Artificial Sequence
  Oligonucleotide primer for the detection of SNP TSC0001676
taagttgtttag

SEQ ID NO: 269249 - DNA, 12 bp, Artificial Sequence
  Oligonucleotide primer for the detection of SNP TSC0001677
cccaataaattt

SEQ ID NO: 269250 - DNA, 12 bp, Artificial Sequence
  Oligonucleotide primer for the detection of SNP TSC0001677
agatagagatga

SEQ ID NO: 269251 - DNA, 12 bp, Artificial Sequence
  Oligonucleotide primer for the detection of SNP TSC0001680
caactcatttac

SEQ ID NO: 269252 - DNA, 12 bp, Artificial Sequence
  Oligonucleotide primer for the detection of SNP TSC0001680
aaatgggagtta

SEQ ID NO: 269253 - DNA, 12 bp, Artificial Sequence
  Oligonucleotide primer for the detection of SNP TSC0001681
caaaaaccattc

SEQ ID NO: 269254 - DNA, 12 bp, Artificial Sequence
  Oligonucleotide primer for the detection of SNP TSC0001681
tttgtttatgaa

SEQ ID NO: 269255 - DNA, 12 bp, Artificial Sequence
  Oligonucleotide primer for the detection of SNP TSC0001682
actcaacctata

SEQ ID NO: 269256 - DNA, 12 bp, Artificial Sequence
  Oligonucleotide primer for the detection of SNP TSC0001682
ttgttttagtgt

SEQ ID NO: 269257 - DNA, 12 bp, Artificial Sequence
  Oligonucleotide primer for the detection of SNP TSC0001682
ttgttttagcgt

SEQ ID NO: 269258 - DNA, 12 bp, Artificial Sequence
  Oligonucleotide primer for the detection of SNP TSC0001682
ttgttttagtgc

SEQ ID NO: 269259 - DNA, 12 bp, Artificial Sequence
  Oligonucleotide primer for the detection of SNP TSC0001682
ttgttttagcgc

SEQ ID NO: 269260 - DNA, 12 bp, Artificial Sequence
  Oligonucleotide primer for the detection of SNP TSC0001682
attacctcaaca

SEQ ID NO: 269261 - DNA, 12 bp, Artificial Sequence
  Oligonucleotide primer for the detection of SNP TSC0001682
attacctcaacg

SEQ ID NO: 269262 - DNA, 12 bp, Artificial Sequence
  Oligonucleotide primer for the detection of SNP TSC0001682
gttacctcaaca

SEQ ID NO: 269263 - DNA, 12 bp, Artificial Sequence
  Oligonucleotide primer for the detection of SNP TSC0001682
gttacctcaacg

SEQ ID NO: 269264 - DNA, 12 bp, Artificial Sequence
  Oligonucleotide primer for the detection of SNP TSC0001682
tgtttagtttgt

SEQ ID NO: 269265 - DNA, 12 bp, Artificial Sequence
  Oligonucleotide primer for the detection of SNP TSC0001683
ttaccttttact

SEQ ID NO: 269266 - DNA, 12 bp, Artificial Sequence
  Oligonucleotide primer for the detection of SNP TSC0001683
agaaaaaagtaa

SEQ ID NO: 269267 - DNA, 12 bp, Artificial Sequence
  Oligonucleotide primer for the detection of SNP TSC0001684
tactatattact

SEQ ID NO: 269268 - DNA, 12 bp, Artificial Sequence
  Oligonucleotide primer for the detection of SNP TSC0001684
ggtagaagaaaa

SEQ ID NO: 269269 - DNA, 12 bp, Artificial Sequence
  Oligonucleotide primer for the detection of SNP TSC0001685
tcaatactaact

SEQ ID NO: 269270 - DNA, 12 bp, Artificial Sequence
  Oligonucleotide primer for the detection of SNP TSC0001685
ttgtgattttta

SEQ ID NO: 269271 - DNA, 12 bp, Artificial Sequence
  Oligonucleotide primer for the detection of SNP TSC0001689
taaaataattat

SEQ ID NO: 269272 - DNA, 12 bp, Artificial Sequence
  Oligonucleotide primer for the detection of SNP TSC0001689
agataattaata

SEQ ID NO: 269273 - DNA, 12 bp, Artificial Sequence
  Oligonucleotide primer for the detection of SNP TSC0001693
ataaatctctat

SEQ ID NO: 269274 - DNA, 12 bp, Artificial Sequence
  Oligonucleotide primer for the detection of SNP TSC0001693
ttgagtgtttga

SEQ ID NO: 269275 - DNA, 12 bp, Artificial Sequence
  Oligonucleotide primer for the detection of SNP TSC0001694
ctccttactctt

SEQ ID NO: 269276 - DNA, 12 bp, Artificial Sequence
  Oligonucleotide primer for the detection of SNP TSC0001694
ggtaagagagaa

SEQ ID NO: 269277 - DNA, 12 bp, Artificial Sequence
  Oligonucleotide primer for the detection of SNP TSC0001695
caataacaaaat

SEQ ID NO: 269278 - DNA, 12 bp, Artificial Sequence
  Oligonucleotide primer for the detection of SNP TSC0001695
agttatggtagt

SEQ ID NO: 269279 - DNA, 12 bp, Artificial Sequence
  Oligonucleotide primer for the detection of SNP TSC0001695
accataataata

SEQ ID NO: 269280 - DNA, 12 bp, Artificial Sequence
  Oligonucleotide primer for the detection of SNP TSC0001695
aatgatagggtt

SEQ ID NO: 269281 - DNA, 12 bp, Artificial Sequence
  Oligonucleotide primer for the detection of SNP TSC0001698
aaataaaaactc

SEQ ID NO: 269282 - DNA, 12 bp, Artificial Sequence
  Oligonucleotide primer for the detection of SNP TSC0001698
taaggtttggga

SEQ ID NO: 269283 - DNA, 12 bp, Artificial Sequence
  Oligonucleotide primer for the detection of SNP TSC0001699
ataatttaccta

SEQ ID NO: 269284 - DNA, 12 bp, Artificial Sequence
  Oligonucleotide primer for the detection of SNP TSC0001699
agtggtttattt

SEQ ID NO: 269285 - DNA, 12 bp, Artificial Sequence
  Oligonucleotide primer for the detection of SNP TSC0001699
aataatccactt

SEQ ID NO: 269286 - DNA, 12 bp, Artificial Sequence
  Oligonucleotide primer for the detection of SNP TSC0001699
atgatttgtttg

SEQ ID NO: 269287 - DNA, 12 bp, Artificial Sequence
  Oligonucleotide primer for the detection of SNP TSC0001700
cccttaaaaaac

SEQ ID NO: 269288 - DNA, 12 bp, Artificial Sequence
  Oligonucleotide primer for the detection of SNP TSC0001700
ttttagtataaa

SEQ ID NO: 269289 - DNA, 12 bp, Artificial Sequence
  Oligonucleotide primer for the detection of SNP TSC0001701
tatactaattac

SEQ ID NO: 269290 - DNA, 12 bp, Artificial Sequence
  Oligonucleotide primer for the detection of SNP TSC0001701
tattttatttta

SEQ ID NO: 269291 - DNA, 12 bp, Artificial Sequence
  Oligonucleotide primer for the detection of SNP TSC0001701
tatcttacctta

SEQ ID NO: 269292 - DNA, 12 bp, Artificial Sequence
  Oligonucleotide primer for the detection of SNP TSC0001701
tatgttaattat

SEQ ID NO: 269293 - DNA, 12 bp, Artificial Sequence
  Oligonucleotide primer for the detection of SNP TSC0001702
aaaaacctatct

SEQ ID NO: 269294 - DNA, 12 bp, Artificial Sequence
  Oligonucleotide primer for the detection of SNP TSC0001702
ttattgtttaag

SEQ ID NO: 269295 - DNA, 12 bp, Artificial Sequence
  Oligonucleotide primer for the detection of SNP TSC0001704
cttttattcctc

SEQ ID NO: 269296 - DNA, 12 bp, Artificial Sequence
  Oligonucleotide primer for the detection of SNP TSC0001704
aagatataggtg

SEQ ID NO: 269297 - DNA, 12 bp, Artificial Sequence
  Oligonucleotide primer for the detection of SNP TSC0001705
tctaccatctac

SEQ ID NO: 269298 - DNA, 12 bp, Artificial Sequence
  Oligonucleotide primer for the detection of SNP TSC0001705
tctaccgtctac

SEQ ID NO: 269299 - DNA, 12 bp, Artificial Sequence
  Oligonukleotid-Primer
ttaattggtatt

SEQ ID NO: 269300 - DNA, 12 bp, Artificial Sequence
  Oligonucleotide primer for the detection of SNP TSC0001705
ttaattggtatc

SEQ ID NO: 269301 - DNA, 12 bp, Artificial Sequence
  Oligonucleotide primer for the detection of SNP TSC0001705
aatcaactaata

SEQ ID NO: 269302 - DNA, 12 bp, Artificial Sequence
  Oligonucleotide primer for the detection of SNP TSC0001705
tttattgtttat

SEQ ID NO: 269303 - DNA, 12 bp, Artificial Sequence
  Oligonucleotide primer for the detection of SNP TSC0001705
tttatcgtttat

SEQ ID NO: 269304 - DNA, 12 bp, Artificial Sequence
  Oligonucleotide primer for the detection of SNP TSC0001706
cctaacccctcc

SEQ ID NO: 269305 - DNA, 12 bp, Artificial Sequence
  Oligonucleotide primer for the detection of SNP TSC0001706
gatatgagattt

SEQ ID NO: 269306 - DNA, 12 bp, Artificial Sequence
  Oligonucleotide primer for the detection of SNP TSC0001706
aaaaacataaaa

SEQ ID NO: 269307 - DNA, 12 bp, Artificial Sequence
  Oligonucleotide primer for the detection of SNP TSC0001706
tttggttttttt

SEQ ID NO: 269308 - DNA, 12 bp, Artificial Sequence
  Oligonucleotide primer for the detection of SNP TSC0001706
tttggttttttc

SEQ ID NO: 269309 - DNA, 12 bp, Artificial Sequence
  Oligonucleotide primer for the detection of SNP TSC0001707
tccatattttta

SEQ ID NO: 269310 - DNA, 12 bp, Artificial Sequence
  Oligonucleotide primer for the detection of SNP TSC0001707
ttgaaaagatat

SEQ ID NO: 269311 - DNA, 12 bp, Artificial Sequence
  Oligonucleotide primer for the detection of SNP TSC0001707
ttgaaaagatac

SEQ ID NO: 269312 - DNA, 12 bp, Artificial Sequence
  Oligonucleotide primer for the detection of SNP TSC0001707
ctaaaaaaatac

SEQ ID NO: 269313 - DNA, 12 bp, Artificial Sequence
  Oligonucleotide primer for the detection of SNP TSC0001707
tttatgtttttg

SEQ ID NO: 269314 - DNA, 12 bp, Artificial Sequence
  Oligonucleotide primer for the detection of SNP TSC0001708
tatcttttcaac

SEQ ID NO: 269315 - DNA, 12 bp, Artificial Sequence
  Oligonucleotide primer for the detection of SNP TSC0001708
ggtagagtgggg

SEQ ID NO: 269316 - DNA, 12 bp, Artificial Sequence
  Oligonucleotide primer for the detection of SNP TSC0001708
aataaaataaaa

SEQ ID NO: 269317 - DNA, 12 bp, Artificial Sequence
  Oligonucleotide primer for the detection of SNP TSC0001708
gataaaataaaa

SEQ ID NO: 269318 - DNA, 12 bp, Artificial Sequence
  Oligonucleotide primer for the detection of SNP TSC0001708
tatttttttagt

SEQ ID NO: 269319 - DNA, 12 bp, Artificial Sequence
  Oligonucleotide primer for the detection of SNP TSC0001709
taccccactcta

SEQ ID NO: 269320 - DNA, 12 bp, Artificial Sequence
  Oligonucleotide primer for the detection of SNP TSC0001709
attggtattggt

SEQ ID NO: 269321 - DNA, 12 bp, Artificial Sequence
  Oligonucleotide primer for the detection of SNP TSC0001709
attggtatcggt

SEQ ID NO: 269322 - DNA, 12 bp, Artificial Sequence
  Oligonucleotide primer for the detection of SNP TSC0001709
actaataccaat

SEQ ID NO: 269323 - DNA, 12 bp, Artificial Sequence
  Oligonucleotide primer for the detection of SNP TSC0001709
actaataccgat

SEQ ID NO: 269324 - DNA, 12 bp, Artificial Sequence
  Oligonucleotide primer for the detection of SNP TSC0001709
tgttttatttta

SEQ ID NO: 269325 - DNA, 12 bp, Artificial Sequence
  Oligonucleotide primer for the detection of SNP TSC0001710
tcataaaactca

SEQ ID NO: 269326 - DNA, 12 bp, Artificial Sequence
  Oligonucleotide primer for the detection of SNP TSC0001710
tgtttttatgat

SEQ ID NO: 269327 - DNA, 12 bp, Artificial Sequence
  Oligonucleotide primer for the detection of SNP TSC0001710
tattctcataat

SEQ ID NO: 269328 - DNA, 12 bp, Artificial Sequence
  Oligonucleotide primer for the detection of SNP TSC0001710
ttatgagattta

SEQ ID NO: 269329 - DNA, 12 bp, Artificial Sequence
  Oligonucleotide primer for the detection of SNP TSC0001711
taaataaaaaca

SEQ ID NO: 269330 - DNA, 12 bp, Artificial Sequence
  Oligonucleotide primer for the detection of SNP TSC0001711
tgaatgatatgg

SEQ ID NO: 269331 - DNA, 12 bp, Artificial Sequence
  Oligonucleotide primer for the detection of SNP TSC0001711
taaataatataa

SEQ ID NO: 269332 - DNA, 12 bp, Artificial Sequence
  Oligonucleotide primer for the detection of SNP TSC0001711
tgggtggggata

SEQ ID NO: 269333 - DNA, 12 bp, Artificial Sequence
  Oligonucleotide primer for the detection of SNP TSC0001712
aactcaacctcc

SEQ ID NO: 269334 - DNA, 12 bp, Artificial Sequence
  Oligonucleotide primer for the detection of SNP TSC0001712
tgattttagtta

SEQ ID NO: 269335 - DNA, 12 bp, Artificial Sequence
  Oligonucleotide primer for the detection of SNP TSC0001712
taatcctaacta

SEQ ID NO: 269336 - DNA, 12 bp, Artificial Sequence
  Oligonucleotide primer for the detection of SNP TSC0001712
ggtttagttttt

SEQ ID NO: 269337 - DNA, 12 bp, Artificial Sequence
  Oligonucleotide primer for the detection of SNP TSC0001713
accttaaaataa

SEQ ID NO: 269338 - DNA, 12 bp, Artificial Sequence
  Oligonucleotide primer for the detection of SNP TSC0001713
ttttgagatttt

SEQ ID NO: 269339 - DNA, 12 bp, Artificial Sequence
  Oligonucleotide primer for the detection of SNP TSC0001713
ttttaaaactct

SEQ ID NO: 269340 - DNA, 12 bp, Artificial Sequence
  Oligonucleotide primer for the detection of SNP TSC0001713
gttttgaaatga

SEQ ID NO: 269341 - DNA, 12 bp, Artificial Sequence
  Oligonucleotide primer for the detection of SNP TSC0001714
aatacaataaca

SEQ ID NO: 269342 - DNA, 12 bp, Artificial Sequence
  Oligonucleotide primer for the detection of SNP TSC0001714
aatacaataacg

SEQ ID NO: 269343 - DNA, 12 bp, Artificial Sequence
  Oligonucleotide primer for the detection of SNP TSC0001714
tgagtttagatt

SEQ ID NO: 269344 - DNA, 12 bp, Artificial Sequence
  Oligonucleotide primer for the detection of SNP TSC0001714
taaacccaaatc

SEQ ID NO: 269345 - DNA, 12 bp, Artificial Sequence
  Oligonucleotide primer for the detection of SNP TSC0001714
agtgtagtggtg

SEQ ID NO: 269346 - DNA, 12 bp, Artificial Sequence
  Oligonucleotide primer for the detection of SNP TSC0001714
agtgtagtggcg

SEQ ID NO: 269347 - DNA, 12 bp, Artificial Sequence
  Oligonucleotide primer for the detection of SNP TSC0001715
ctttctttctat

SEQ ID NO: 269348 - DNA, 12 bp, Artificial Sequence
  Oligonucleotide primer for the detection of SNP TSC0001715
tttgagtttttg

SEQ ID NO: 269349 - DNA, 12 bp, Artificial Sequence
  Oligonucleotide primer for the detection of SNP TSC0001715
cctaaattccta

SEQ ID NO: 269350 - DNA, 12 bp, Artificial Sequence
  Oligonucleotide primer for the detection of SNP TSC0001716
attacttaaccc

SEQ ID NO: 269351 - DNA, 12 bp, Artificial Sequence
  Oligonucleotide primer for the detection of SNP TSC0001716
attatatatttg

SEQ ID NO: 269352 - DNA, 12 bp, Artificial Sequence
  Oligonucleotide primer for the detection of SNP TSC0001716
attatatattcg

SEQ ID NO: 269353 - DNA, 12 bp, Artificial Sequence
  Oligonucleotide primer for the detection of SNP TSC0001717
tccactaatatc

SEQ ID NO: 269354 - DNA, 12 bp, Artificial Sequence
  Oligonucleotide primer for the detection of SNP TSC0001717
taaaattaagag

SEQ ID NO: 269355 - DNA, 12 bp, Artificial Sequence
  Oligonucleotide primer for the detection of SNP TSC0001718
caaatattaaaa

SEQ ID NO: 269356 - DNA, 12 bp, Artificial Sequence
  Oligonucleotide primer for the detection of SNP TSC0001718
aaatattaaggt

SEQ ID NO: 269357 - DNA, 12 bp, Artificial Sequence
  Oligonucleotide primer for the detection of SNP TSC0001720
tcaacattattt

SEQ ID NO: 269358 - DNA, 12 bp, Artificial Sequence
  Oligonucleotide primer for the detection of SNP TSC0001720
tcaacgttattt

SEQ ID NO: 269359 - DNA, 12 bp, Artificial Sequence
  Oligonucleotide primer for the detection of SNP TSC0001720
tttaattttgtg

SEQ ID NO: 269360 - DNA, 12 bp, Artificial Sequence
  Oligonucleotide primer for the detection of SNP TSC0001721
ccaaaaaaaaat

SEQ ID NO: 269361 - DNA, 12 bp, Artificial Sequence
  Oligonucleotide primer for the detection of SNP TSC0001721
gttttggttatt

SEQ ID NO: 269362 - DNA, 12 bp, Artificial Sequence
  Oligonucleotide primer for the detection of SNP TSC0001721
actttaactatt

SEQ ID NO: 269363 - DNA, 12 bp, Artificial Sequence
  Oligonucleotide primer for the detection of SNP TSC0001721
aaaaaagatttt

SEQ ID NO: 269364 - DNA, 12 bp, Artificial Sequence
  Oligonukleotid-Primer
tcccatcaaatt

SEQ ID NO: 269365 - DNA, 12 bp, Artificial Sequence
  Oligonucleotide primer for the detection of SNP TSC0001722
aaaataatgttg

SEQ ID NO: 269366 - DNA, 12 bp, Artificial Sequence
  Oligonucleotide primer for the detection of SNP TSC0001722
aaaataacgttg

SEQ ID NO: 269367 - DNA, 12 bp, Artificial Sequence
  Oligonucleotide primer for the detection of SNP TSC0001723
catcccatactc

SEQ ID NO: 269368 - DNA, 12 bp, Artificial Sequence
  Oligonucleotide primer for the detection of SNP TSC0001723
tgatttttttaa

SEQ ID NO: 269369 - DNA, 12 bp, Artificial Sequence
  Oligonucleotide primer for the detection of SNP TSC0001724
ccaatttttaac

SEQ ID NO: 269370 - DNA, 12 bp, Artificial Sequence
  Oligonucleotide primer for the detection of SNP TSC0001724
tattgtttgtaa

SEQ ID NO: 269371 - DNA, 12 bp, Artificial Sequence
  Oligonucleotide primer for the detection of SNP TSC0001725
ctaccaatttac

SEQ ID NO: 269372 - DNA, 12 bp, Artificial Sequence
  Oligonucleotide primer for the detection of SNP TSC0001725
gtggtagaagtg

SEQ ID NO: 269373 - DNA, 12 bp, Artificial Sequence
  Oligonucleotide primer for the detection of SNP TSC0001726
aacaaaataaaa

SEQ ID NO: 269374 - DNA, 12 bp, Artificial Sequence
  Oligonucleotide primer for the detection of SNP TSC0001726
ttttgagatagg

SEQ ID NO: 269375 - DNA, 12 bp, Artificial Sequence
  Oligonucleotide primer for the detection of SNP TSC0001726
ctttaaaacaaa

SEQ ID NO: 269376 - DNA, 12 bp, Artificial Sequence
  Oligonucleotide primer for the detection of SNP TSC0001726
gatagagtgaga

SEQ ID NO: 269377 - DNA, 12 bp, Artificial Sequence
  Oligonucleotide primer for the detection of SNP TSC0001727
tccctcatcttc

SEQ ID NO: 269378 - DNA, 12 bp, Artificial Sequence
  Oligonucleotide primer for the detection of SNP TSC0001727
tagaggaagata

SEQ ID NO: 269379 - DNA, 12 bp, Artificial Sequence
  Oligonucleotide primer for the detection of SNP TSC0001729
ttaccttaaaac

SEQ ID NO: 269380 - DNA, 12 bp, Artificial Sequence
  Oligonucleotide primer for the detection of SNP TSC0001729
gggtttttttta

SEQ ID NO: 269381 - DNA, 12 bp, Artificial Sequence
  Oligonucleotide primer for the detection of SNP TSC0001730
acaattcactac

SEQ ID NO: 269382 - DNA, 12 bp, Artificial Sequence
  Oligonucleotide primer for the detection of SNP TSC0001730
attgaggttgta

SEQ ID NO: 269383 - DNA, 12 bp, Artificial Sequence
  Oligonucleotide primer for the detection of SNP TSC0001731
acacatatcata

SEQ ID NO: 269384 - DNA, 12 bp, Artificial Sequence
  Oligonucleotide primer for the detection of SNP TSC0001731
gggaaataattt

SEQ ID NO: 269385 - DNA, 12 bp, Artificial Sequence
  Oligonucleotide primer for the detection of SNP TSC0001731
atatatattata

SEQ ID NO: 269386 - DNA, 12 bp, Artificial Sequence
  Oligonucleotide primer for the detection of SNP TSC0001732
cccaaaaaaaca

SEQ ID NO: 269387 - DNA, 12 bp, Artificial Sequence
  Oligonucleotide primer for the detection of SNP TSC0001732
tttagaatggtt

SEQ ID NO: 269388 - DNA, 12 bp, Artificial Sequence
  Oligonucleotide primer for the detection of SNP TSC0001732
tcctaaaataac

SEQ ID NO: 269389 - DNA, 12 bp, Artificial Sequence
  Oligonucleotide primer for the detection of SNP TSC0001732
ttttagggaagt

SEQ ID NO: 269390 - DNA, 12 bp, Artificial Sequence
  Oligonucleotide primer for the detection of SNP TSC0001733
attcaaaatacc

SEQ ID NO: 269391 - DNA, 12 bp, Artificial Sequence
  Oligonucleotide primer for the detection of SNP TSC0001733
tttgattttaag

SEQ ID NO: 269392 - DNA, 12 bp, Artificial Sequence
  Oligonucleotide primer for the detection of SNP TSC0001734
accctataaaaa

SEQ ID NO: 269393 - DNA, 12 bp, Artificial Sequence
  Oligonucleotide primer for the detection of SNP TSC0001734
aattttgttttt

SEQ ID NO: 269394 - DNA, 12 bp, Artificial Sequence
  Oligonucleotide primer for the detection of SNP TSC0001734
aaccttatcctc

SEQ ID NO: 269395 - DNA, 12 bp, Artificial Sequence
  Oligonucleotide primer for the detection of SNP TSC0001734
gttttgtaagag

SEQ ID NO: 269396 - DNA, 12 bp, Artificial Sequence
  Oligonucleotide primer for the detection of SNP TSC0001735
ttttaaaatata

SEQ ID NO: 269397 - DNA, 12 bp, Artificial Sequence
  Oligonucleotide primer for the detection of SNP TSC0001735
gttataattatt

SEQ ID NO: 269398 - DNA, 12 bp, Artificial Sequence
  Oligonucleotide primer for the detection of SNP TSC0001735
tcataaccatta

SEQ ID NO: 269399 - DNA, 12 bp, Artificial Sequence
  Oligonucleotide primer for the detection of SNP TSC0001735
ttttaaagtata

SEQ ID NO: 269400 - DNA, 12 bp, Artificial Sequence
  Oligonucleotide primer for the detection of SNP TSC0001736
aaaactaaaata

SEQ ID NO: 269401 - DNA, 12 bp, Artificial Sequence
  Oligonucleotide primer for the detection of SNP TSC0001736
atttttaatttt

SEQ ID NO: 269402 - DNA, 12 bp, Artificial Sequence
  Oligonucleotide primer for the detection of SNP TSC0001736
tcctcaatctta

SEQ ID NO: 269403 - DNA, 12 bp, Artificial Sequence
  Oligonucleotide primer for the detection of SNP TSC0001736
aggttgggatgt

SEQ ID NO: 269404 - DNA, 12 bp, Artificial Sequence
  Oligonucleotide primer for the detection of SNP TSC0001737
tcccctacaatt

SEQ ID NO: 269405 - DNA, 12 bp, Artificial Sequence
  Oligonucleotide primer for the detection of SNP TSC0001737
tcccctacgatt

SEQ ID NO: 269406 - DNA, 12 bp, Artificial Sequence
  Oligonucleotide primer for the detection of SNP TSC0001737
ggttgtaataaa

SEQ ID NO: 269407 - DNA, 12 bp, Artificial Sequence
  Oligonucleotide primer for the detection of SNP TSC0001738
acaataaaataa

SEQ ID NO: 269408 - DNA, 12 bp, Artificial Sequence
  Oligonucleotide primer for the detection of SNP TSC0001738
ttgatgtttttt

SEQ ID NO: 269409 - DNA, 12 bp, Artificial Sequence
  Oligonucleotide primer for the detection of SNP TSC0001738
ttaatatcccct

SEQ ID NO: 269410 - DNA, 12 bp, Artificial Sequence
  Oligonucleotide primer for the detection of SNP TSC0001738
gtaataaagtaa

SEQ ID NO: 269411 - DNA, 12 bp, Artificial Sequence
  Oligonucleotide primer for the detection of SNP TSC0001740
cctctatacaca

SEQ ID NO: 269412 - DNA, 12 bp, Artificial Sequence
  Oligonucleotide primer for the detection of SNP TSC0001740
taaaataataaa

SEQ ID NO: 269413 - DNA, 12 bp, Artificial Sequence
  Oligonucleotide primer for the detection of SNP TSC0001740
taaaataacaaa

SEQ ID NO: 269414 - DNA, 12 bp, Artificial Sequence
  Oligonucleotide primer for the detection of SNP TSC0001741
tattactcaata

SEQ ID NO: 269415 - DNA, 12 bp, Artificial Sequence
  Oligonucleotide primer for the detection of SNP TSC0001741
gtgaagaggtag

SEQ ID NO: 269416 - DNA, 12 bp, Artificial Sequence
  Oligonucleotide primer for the detection of SNP TSC0001741
tgttgtttagtg

SEQ ID NO: 269417 - DNA, 12 bp, Artificial Sequence
  Oligonucleotide primer for the detection of SNP TSC0001742
atatactaacct

SEQ ID NO: 269418 - DNA, 12 bp, Artificial Sequence
  Oligonucleotide primer for the detection of SNP TSC0001742
tagtaatattta

SEQ ID NO: 269419 - DNA, 12 bp, Artificial Sequence
  Oligonucleotide primer for the detection of SNP TSC0001742
ataatatctaaa

SEQ ID NO: 269420 - DNA, 12 bp, Artificial Sequence
  Oligonucleotide primer for the detection of SNP TSC0001742
gtatgttaattt

SEQ ID NO: 269421 - DNA, 12 bp, Artificial Sequence
  Oligonucleotide primer for the detection of SNP TSC0001758
taataataacca

SEQ ID NO: 269422 - DNA, 12 bp, Artificial Sequence
  Oligonucleotide primer for the detection of SNP TSC0001758
gtttttgatatt

SEQ ID NO: 269423 - DNA, 12 bp, Artificial Sequence
  Oligonucleotide primer for the detection of SNP TSC0001758
ctctaacactaa

SEQ ID NO: 269424 - DNA, 12 bp, Artificial Sequence
  Oligonucleotide primer for the detection of SNP TSC0001758
ggtggtggttat

SEQ ID NO: 269425 - DNA, 12 bp, Artificial Sequence
  Oligonucleotide primer for the detection of SNP TSC0001759
ttactaactttt

SEQ ID NO: 269426 - DNA, 12 bp, Artificial Sequence
  Oligonucleotide primer for the detection of SNP TSC0001759
gatttatggtta

SEQ ID NO: 269427 - DNA, 12 bp, Artificial Sequence
  Oligonucleotide primer for the detection of SNP TSC0001759
atccataatcaa

SEQ ID NO: 269428 - DNA, 12 bp, Artificial Sequence
  Oligonucleotide primer for the detection of SNP TSC0001759
ttattggttttt

SEQ ID NO: 269429 - DNA, 12 bp, Artificial Sequence
  Oligonucleotide primer for the detection of SNP TSC0001760
tataaatatact

SEQ ID NO: 269430 - DNA, 12 bp, Artificial Sequence
  Oligonucleotide primer for the detection of SNP TSC0001760
atatttatatta

SEQ ID NO: 269431 - DNA, 12 bp, Artificial Sequence
  Oligonucleotide primer for the detection of SNP TSC0001761
ctaattcttatt

SEQ ID NO: 269432 - DNA, 12 bp, Artificial Sequence
  Oligonucleotide primer for the detection of SNP TSC0001761
tttaatattaaa

SEQ ID NO: 269433 - DNA, 12 bp, Artificial Sequence
  Oligonucleotide primer for the detection of SNP TSC0001761
cccaacatcaaa

SEQ ID NO: 269434 - DNA, 12 bp, Artificial Sequence
  Oligonucleotide primer for the detection of SNP TSC0001761
ttaatttttgtt

SEQ ID NO: 269435 - DNA, 12 bp, Artificial Sequence
  Oligonucleotide primer for the detection of SNP TSC0001762
cccaacttactt

SEQ ID NO: 269436 - DNA, 12 bp, Artificial Sequence
  Oligonucleotide primer for the detection of SNP TSC0001762
ttttttttatga

SEQ ID NO: 269437 - DNA, 12 bp, Artificial Sequence
  Oligonucleotide primer for the detection of SNP TSC0001763
caacaaatatcc

SEQ ID NO: 269438 - DNA, 12 bp, Artificial Sequence
  Oligonucleotide primer for the detection of SNP TSC0001763
attaagggttta

SEQ ID NO: 269439 - DNA, 12 bp, Artificial Sequence
  Oligonucleotide primer for the detection of SNP TSC0001764
aattaaaaaaaa

SEQ ID NO: 269440 - DNA, 12 bp, Artificial Sequence
  Oligonucleotide primer for the detection of SNP TSC0001764
atttaattatga

SEQ ID NO: 269441 - DNA, 12 bp, Artificial Sequence
  Oligonucleotide primer for the detection of SNP TSC0001767
acattttcctta

SEQ ID NO: 269442 - DNA, 12 bp, Artificial Sequence
  Oligonucleotide primer for the detection of SNP TSC0001767
aagttgtttaat

SEQ ID NO: 269443 - DNA, 12 bp, Artificial Sequence
  Oligonucleotide primer for the detection of SNP TSC0001767
aaattatttaat

SEQ ID NO: 269444 - DNA, 12 bp, Artificial Sequence
  Oligonucleotide primer for the detection of SNP TSC0001767
gtatttttttta

SEQ ID NO: 269445 - DNA, 12 bp, Artificial Sequence
  Oligonucleotide primer for the detection of SNP TSC0001768
aatcatcactct

SEQ ID NO: 269446 - DNA, 12 bp, Artificial Sequence
  Oligonucleotide primer for the detection of SNP TSC0001768
ttgttgtgagga

SEQ ID NO: 269447 - DNA, 12 bp, Artificial Sequence
  Oligonucleotide primer for the detection of SNP TSC0001768
ttattataaaaa

SEQ ID NO: 269448 - DNA, 12 bp, Artificial Sequence
  Oligonucleotide primer for the detection of SNP TSC0001768
agttattatttt

SEQ ID NO: 269449 - DNA, 12 bp, Artificial Sequence
  Oligonucleotide primer for the detection of SNP TSC0001769
accaactacaat

SEQ ID NO: 269450 - DNA, 12 bp, Artificial Sequence
  Oligonucleotide primer for the detection of SNP TSC0001769
gtttttagttta

SEQ ID NO: 269451 - DNA, 12 bp, Artificial Sequence
  Oligonucleotide primer for the detection of SNP TSC0001769
actcccaaccca

SEQ ID NO: 269452 - DNA, 12 bp, Artificial Sequence
  Oligonucleotide primer for the detection of SNP TSC0001769
attaattatagt

SEQ ID NO: 269453 - DNA, 12 bp, Artificial Sequence
  Oligonucleotide primer for the detection of SNP TSC0001770
aatccaaaaact

SEQ ID NO: 269454 - DNA, 12 bp, Artificial Sequence
  Oligonucleotide primer for the detection of SNP TSC0001770
aatccgaaaact

SEQ ID NO: 269455 - DNA, 12 bp, Artificial Sequence
  Oligonucleotide primer for the detection of SNP TSC0001770
tttggaaattta

SEQ ID NO: 269456 - DNA, 12 bp, Artificial Sequence
  Oligonucleotide primer for the detection of SNP TSC0001771
atatatatatat

SEQ ID NO: 269457 - DNA, 12 bp, Artificial Sequence
  Oligonukleotid-Primer
tagttatatatg

SEQ ID NO: 269458 - DNA, 12 bp, Artificial Sequence
  Oligonucleotide primer for the detection of SNP TSC0001771
tagttatatacg

SEQ ID NO: 269459 - DNA, 12 bp, Artificial Sequence
  Oligonucleotide primer for the detection of SNP TSC0001771
caaccacacaca

SEQ ID NO: 269460 - DNA, 12 bp, Artificial Sequence
  Oligonucleotide primer for the detection of SNP TSC0001771
caaccacacacg

SEQ ID NO: 269461 - DNA, 12 bp, Artificial Sequence
  Oligonucleotide primer for the detection of SNP TSC0001771
gtgtgtgtgtgt

SEQ ID NO: 269462 - DNA, 12 bp, Artificial Sequence
  Oligonucleotide primer for the detection of SNP TSC0001772
acatacatacat

SEQ ID NO: 269463 - DNA, 12 bp, Artificial Sequence
  Oligonucleotide primer for the detection of SNP TSC0001772
acatacgtacat

SEQ ID NO: 269464 - DNA, 12 bp, Artificial Sequence
  Oligonucleotide primer for the detection of SNP TSC0001772
atatgtatgtat

SEQ ID NO: 269465 - DNA, 12 bp, Artificial Sequence
  Oligonucleotide primer for the detection of SNP TSC0001772
catacatacata

SEQ ID NO: 269466 - DNA, 12 bp, Artificial Sequence
  Oligonucleotide primer for the detection of SNP TSC0001772
gtatgtgtgtat

SEQ ID NO: 269467 - DNA, 12 bp, Artificial Sequence
  Oligonucleotide primer for the detection of SNP TSC0001772
gtatgcgtgtat

SEQ ID NO: 269468 - DNA, 12 bp, Artificial Sequence
  Oligonucleotide primer for the detection of SNP TSC0001773
ttattcaaaata

SEQ ID NO: 269469 - DNA, 12 bp, Artificial Sequence
  Oligonucleotide primer for the detection of SNP TSC0001773
taaataattata

SEQ ID NO: 269470 - DNA, 12 bp, Artificial Sequence
  Oligonucleotide primer for the detection of SNP TSC0001773
aaataattacaa

SEQ ID NO: 269471 - DNA, 12 bp, Artificial Sequence
  Oligonucleotide primer for the detection of SNP TSC0001773
ttatttaggatg

SEQ ID NO: 269472 - DNA, 12 bp, Artificial Sequence
  Oligonucleotide primer for the detection of SNP TSC0001774
tattcattaatt

SEQ ID NO: 269473 - DNA, 12 bp, Artificial Sequence
  Oligonucleotide primer for the detection of SNP TSC0001774
tattttaatgtg

SEQ ID NO: 269474 - DNA, 12 bp, Artificial Sequence
  Oligonucleotide primer for the detection of SNP TSC0001775
catacttcctcc

SEQ ID NO: 269475 - DNA, 12 bp, Artificial Sequence
  Oligonucleotide primer for the detection of SNP TSC0001775
cgtacttcctcc

SEQ ID NO: 269476 - DNA, 12 bp, Artificial Sequence
  Oligonucleotide primer for the detection of SNP TSC0001775
atagaaaatatg

SEQ ID NO: 269477 - DNA, 12 bp, Artificial Sequence
  Oligonucleotide primer for the detection of SNP TSC0001776
ataccttctatt

SEQ ID NO: 269478 - DNA, 12 bp, Artificial Sequence
  Oligonucleotide primer for the detection of SNP TSC0001776
agttttaggaat

SEQ ID NO: 269479 - DNA, 12 bp, Artificial Sequence
  Oligonucleotide primer for the detection of SNP TSC0001776
aatcttaaaaat

SEQ ID NO: 269480 - DNA, 12 bp, Artificial Sequence
  Oligonucleotide primer for the detection of SNP TSC0001776
gtgttttttgtt

SEQ ID NO: 269481 - DNA, 12 bp, Artificial Sequence
  Oligonucleotide primer for the detection of SNP TSC0001777
tacatccctaat

SEQ ID NO: 269482 - DNA, 12 bp, Artificial Sequence
  Oligonucleotide primer for the detection of SNP TSC0001777
ttttaaataata

SEQ ID NO: 269483 - DNA, 12 bp, Artificial Sequence
  Oligonucleotide primer for the detection of SNP TSC0001778
cattaaaatttt

SEQ ID NO: 269484 - DNA, 12 bp, Artificial Sequence
  Oligonucleotide primer for the detection of SNP TSC0001778
ttgagagtttga

SEQ ID NO: 269485 - DNA, 12 bp, Artificial Sequence
  Oligonucleotide primer for the detection of SNP TSC0001778
ttaaaaatctaa

SEQ ID NO: 269486 - DNA, 12 bp, Artificial Sequence
  Oligonucleotide primer for the detection of SNP TSC0001778
tattagagtttt

SEQ ID NO: 269487 - DNA, 12 bp, Artificial Sequence
  Oligonucleotide primer for the detection of SNP TSC0001779
cctccctaccta

SEQ ID NO: 269488 - DNA, 12 bp, Artificial Sequence
  Oligonucleotide primer for the detection of SNP TSC0001779
aggtgtggattt

SEQ ID NO: 269489 - DNA, 12 bp, Artificial Sequence
  Oligonucleotide primer for the detection of SNP TSC0001779
aaatataaatcc

SEQ ID NO: 269490 - DNA, 12 bp, Artificial Sequence
  Oligonucleotide primer for the detection of SNP TSC0001779
tttttttgtttg

SEQ ID NO: 269491 - DNA, 12 bp, Artificial Sequence
  Oligonucleotide primer for the detection of SNP TSC0001780
cctaaattaatt

SEQ ID NO: 269492 - DNA, 12 bp, Artificial Sequence
  Oligonucleotide primer for the detection of SNP TSC0001780
taggaagagtta

SEQ ID NO: 269493 - DNA, 12 bp, Artificial Sequence
  Oligonucleotide primer for the detection of SNP TSC0001781
atcctaactcct

SEQ ID NO: 269494 - DNA, 12 bp, Artificial Sequence
  Oligonucleotide primer for the detection of SNP TSC0001781
ttatttaattta

SEQ ID NO: 269495 - DNA, 12 bp, Artificial Sequence
  Oligonucleotide primer for the detection of SNP TSC0001782
aaaaaaaatatt

SEQ ID NO: 269496 - DNA, 12 bp, Artificial Sequence
  Oligonucleotide primer for the detection of SNP TSC0001782
tgattaatttat

SEQ ID NO: 269497 - DNA, 12 bp, Artificial Sequence
  Oligonucleotide primer for the detection of SNP TSC0001782
taatcaacttat

SEQ ID NO: 269498 - DNA, 12 bp, Artificial Sequence
  Oligonucleotide primer for the detection of SNP TSC0001782
gaaaaaagtatt

SEQ ID NO: 269499 - DNA, 12 bp, Artificial Sequence
  Oligonucleotide primer for the detection of SNP TSC0001783
atttttaaacta

SEQ ID NO: 269500 - DNA, 12 bp, Artificial Sequence
  Oligonucleotide primer for the detection of SNP TSC0001783
aatgttataaat

SEQ ID NO: 269501 - DNA, 12 bp, Artificial Sequence
  Oligonucleotide primer for the detection of SNP TSC0001783
atattataaata

SEQ ID NO: 269502 - DNA, 12 bp, Artificial Sequence
  Oligonucleotide primer for the detection of SNP TSC0001783
atttttaaatta

SEQ ID NO: 269503 - DNA, 12 bp, Artificial Sequence
  Oligonucleotide primer for the detection of SNP TSC0001784
tatattactcta

SEQ ID NO: 269504 - DNA, 12 bp, Artificial Sequence
  Oligonucleotide primer for the detection of SNP TSC0001784
ttaaatgtttta

SEQ ID NO: 269505 - DNA, 12 bp, Artificial Sequence
  Oligonucleotide primer for the detection of SNP TSC0001785
ctacaaaaaaaa

SEQ ID NO: 269506 - DNA, 12 bp, Artificial Sequence
  Oligonucleotide primer for the detection of SNP TSC0001785
tgtaagtgtatt

SEQ ID NO: 269507 - DNA, 12 bp, Artificial Sequence
  Oligonucleotide primer for the detection of SNP TSC0001785
tataaatacatc

SEQ ID NO: 269508 - DNA, 12 bp, Artificial Sequence
  Oligonucleotide primer for the detection of SNP TSC0001785
ttgtaaggagga

SEQ ID NO: 269509 - DNA, 12 bp, Artificial Sequence
  Oligonucleotide primer for the detection of SNP TSC0001786
acttcaaaatca

SEQ ID NO: 269510 - DNA, 12 bp, Artificial Sequence
  Oligonucleotide primer for the detection of SNP TSC0001786
aaaaataaagtg

SEQ ID NO: 269511 - DNA, 12 bp, Artificial Sequence
  Oligonucleotide primer for the detection of SNP TSC0001786
aaaataaaataa

SEQ ID NO: 269512 - DNA, 12 bp, Artificial Sequence
  Oligonucleotide primer for the detection of SNP TSC0001786
ttttaaagttat

SEQ ID NO: 269513 - DNA, 12 bp, Artificial Sequence
  Oligonucleotide primer for the detection of SNP TSC0001787
aactcaataaaa

SEQ ID NO: 269514 - DNA, 12 bp, Artificial Sequence
  Oligonucleotide primer for the detection of SNP TSC0001787
tggaaggtatat

SEQ ID NO: 269515 - DNA, 12 bp, Artificial Sequence
  Oligonucleotide primer for the detection of SNP TSC0001787
aaaaacacacaa

SEQ ID NO: 269516 - DNA, 12 bp, Artificial Sequence
  Oligonucleotide primer for the detection of SNP TSC0001787
tttaatggagtt

SEQ ID NO: 269517 - DNA, 12 bp, Artificial Sequence
  Oligonucleotide primer for the detection of SNP TSC0001788
tacatccatcct

SEQ ID NO: 269518 - DNA, 12 bp, Artificial Sequence
  Oligonucleotide primer for the detection of SNP TSC0001788
tacatccgtcct

SEQ ID NO: 269519 - DNA, 12 bp, Artificial Sequence
  Oligonucleotide primer for the detection of SNP TSC0001788
agtatttgtaag

SEQ ID NO: 269520 - DNA, 12 bp, Artificial Sequence
  Oligonucleotide primer for the detection of SNP TSC0001789
ccactatataaa

SEQ ID NO: 269521 - DNA, 12 bp, Artificial Sequence
  Oligonucleotide primer for the detection of SNP TSC0001789
ttttttttatgt

SEQ ID NO: 269522 - DNA, 12 bp, Artificial Sequence
  Oligonucleotide primer for the detection of SNP TSC0001789
cttctttctata

SEQ ID NO: 269523 - DNA, 12 bp, Artificial Sequence
  Oligonucleotide primer for the detection of SNP TSC0001789
ttattgtgtgag

SEQ ID NO: 269524 - DNA, 12 bp, Artificial Sequence
  Oligonucleotide primer for the detection of SNP TSC0001790
caaataaacacc

SEQ ID NO: 269525 - DNA, 12 bp, Artificial Sequence
  Oligonucleotide primer for the detection of SNP TSC0001790
ttatttgttata

SEQ ID NO: 269526 - DNA, 12 bp, Artificial Sequence
  Oligonucleotide primer for the detection of SNP TSC0001791
caaccccacttt

SEQ ID NO: 269527 - DNA, 12 bp, Artificial Sequence
  Oligonucleotide primer for the detection of SNP TSC0001791
aaatttttaaag

SEQ ID NO: 269528 - DNA, 12 bp, Artificial Sequence
  Oligonucleotide primer for the detection of SNP TSC0001792
acaaactctctt

SEQ ID NO: 269529 - DNA, 12 bp, Artificial Sequence
  Oligonucleotide primer for the detection of SNP TSC0001792
gtaattggtgag

SEQ ID NO: 269530 - DNA, 12 bp, Artificial Sequence
  Oligonucleotide primer for the detection of SNP TSC0001793
aacacacaacct

SEQ ID NO: 269531 - DNA, 12 bp, Artificial Sequence
  Oligonucleotide primer for the detection of SNP TSC0001793
ttgtagagttgg

SEQ ID NO: 269532 - DNA, 12 bp, Artificial Sequence
  Oligonucleotide primer for the detection of SNP TSC0001794
tttttaaaattt

SEQ ID NO: 269533 - DNA, 12 bp, Artificial Sequence
  Oligonucleotide primer for the detection of SNP TSC0001794
tatagttaatta

SEQ ID NO: 269534 - DNA, 12 bp, Artificial Sequence
  Oligonucleotide primer for the detection of SNP TSC0001797
ataatatacccc

SEQ ID NO: 269535 - DNA, 12 bp, Artificial Sequence
  Oligonucleotide primer for the detection of SNP TSC0001797
taaatggggttg

SEQ ID NO: 269536 - DNA, 12 bp, Artificial Sequence
  Oligonucleotide primer for the detection of SNP TSC0001799
cttctacaaacc

SEQ ID NO: 269537 - DNA, 12 bp, Artificial Sequence
  Oligonucleotide primer for the detection of SNP TSC0001799
gtgttttttatg

SEQ ID NO: 269538 - DNA, 12 bp, Artificial Sequence
  Oligonucleotide primer for the detection of SNP TSC0001802
accctaacatat

SEQ ID NO: 269539 - DNA, 12 bp, Artificial Sequence
  Oligonucleotide primer for the detection of SNP TSC0001802
accctaacgtat

SEQ ID NO: 269540 - DNA, 12 bp, Artificial Sequence
  Oligonucleotide primer for the detection of SNP TSC0001802
gtatgttttagg

SEQ ID NO: 269541 - DNA, 12 bp, Artificial Sequence
  Oligonucleotide primer for the detection of SNP TSC0001802
gtacgttttagg

SEQ ID NO: 269542 - DNA, 12 bp, Artificial Sequence
  Oligonucleotide primer for the detection of SNP TSC0001802
acacattccaaa

SEQ ID NO: 269543 - DNA, 12 bp, Artificial Sequence
  Oligonucleotide primer for the detection of SNP TSC0001802
acacgttccaaa

SEQ ID NO: 269544 - DNA, 12 bp, Artificial Sequence
  Oligonucleotide primer for the detection of SNP TSC0001802
gttttggtgtat

SEQ ID NO: 269545 - DNA, 12 bp, Artificial Sequence
  Oligonucleotide primer for the detection of SNP TSC0001802
gttttggcgtat

SEQ ID NO: 269546 - DNA, 12 bp, Artificial Sequence
  Oligonukleotid-Primer
actaaactcccc

SEQ ID NO: 269547 - DNA, 12 bp, Artificial Sequence
  Oligonucleotide primer for the detection of SNP TSC0001803
gaagaggaaggt

SEQ ID NO: 269548 - DNA, 12 bp, Artificial Sequence
  Oligonucleotide primer for the detection of SNP TSC0001803
aaaaaaaaaaat

SEQ ID NO: 269549 - DNA, 12 bp, Artificial Sequence
  Oligonucleotide primer for the detection of SNP TSC0001803
gttgggtttttt

SEQ ID NO: 269550 - DNA, 12 bp, Artificial Sequence
  Oligonucleotide primer for the detection of SNP TSC0001804
attttaaccact

SEQ ID NO: 269551 - DNA, 12 bp, Artificial Sequence
  Oligonucleotide primer for the detection of SNP TSC0001804
attttaaccgct

SEQ ID NO: 269552 - DNA, 12 bp, Artificial Sequence
  Oligonucleotide primer for the detection of SNP TSC0001804
taatttgataaa

SEQ ID NO: 269553 - DNA, 12 bp, Artificial Sequence
  Oligonucleotide primer for the detection of SNP TSC0001804
taatttaataaa

SEQ ID NO: 269554 - DNA, 12 bp, Artificial Sequence
  Oligonucleotide primer for the detection of SNP TSC0001804
attttaattgtt

SEQ ID NO: 269555 - DNA, 12 bp, Artificial Sequence
  Oligonucleotide primer for the detection of SNP TSC0001804
attttaatcgtt

SEQ ID NO: 269556 - DNA, 12 bp, Artificial Sequence
  Oligonucleotide primer for the detection of SNP TSC0001805
aaataatattta

SEQ ID NO: 269557 - DNA, 12 bp, Artificial Sequence
  Oligonucleotide primer for the detection of SNP TSC0001805
attttgtttagt

SEQ ID NO: 269558 - DNA, 12 bp, Artificial Sequence
  Oligonucleotide primer for the detection of SNP TSC0001805
actttacttaat

SEQ ID NO: 269559 - DNA, 12 bp, Artificial Sequence
  Oligonucleotide primer for the detection of SNP TSC0001805
gaataatgttta

SEQ ID NO: 269560 - DNA, 12 bp, Artificial Sequence
  Oligonucleotide primer for the detection of SNP TSC0001806
taactcaacttt

SEQ ID NO: 269561 - DNA, 12 bp, Artificial Sequence
  Oligonucleotide primer for the detection of SNP TSC0001806
gttattgagatg

SEQ ID NO: 269562 - DNA, 12 bp, Artificial Sequence
  Oligonucleotide primer for the detection of SNP TSC0001807
tcataactcata

SEQ ID NO: 269563 - DNA, 12 bp, Artificial Sequence
  Oligonucleotide primer for the detection of SNP TSC0001807
agaaaaattatt

SEQ ID NO: 269564 - DNA, 12 bp, Artificial Sequence
  Oligonucleotide primer for the detection of SNP TSC0001807
aaaaaaaccacc

SEQ ID NO: 269565 - DNA, 12 bp, Artificial Sequence
  Oligonucleotide primer for the detection of SNP TSC0001807
ttatgatttatg

SEQ ID NO: 269566 - DNA, 12 bp, Artificial Sequence
  Oligonucleotide primer for the detection of SNP TSC0001808
ccaaatattccc

SEQ ID NO: 269567 - DNA, 12 bp, Artificial Sequence
  Oligonucleotide primer for the detection of SNP TSC0001808
ggttgtagttag

SEQ ID NO: 269568 - DNA, 12 bp, Artificial Sequence
  Oligonucleotide primer for the detection of SNP TSC0001808
aactacaaccaa

SEQ ID NO: 269569 - DNA, 12 bp, Artificial Sequence
  Oligonucleotide primer for the detection of SNP TSC0001808
ttagatgttttt

SEQ ID NO: 269570 - DNA, 12 bp, Artificial Sequence
  Oligonucleotide primer for the detection of SNP TSC0001809
aataataactac

SEQ ID NO: 269571 - DNA, 12 bp, Artificial Sequence
  Oligonucleotide primer for the detection of SNP TSC0001809
ttttagaggttt

SEQ ID NO: 269572 - DNA, 12 bp, Artificial Sequence
  Oligonucleotide primer for the detection of SNP TSC0001810
aacatttaatat

SEQ ID NO: 269573 - DNA, 12 bp, Artificial Sequence
  Oligonucleotide primer for the detection of SNP TSC0001810
taattggaaaag

SEQ ID NO: 269574 - DNA, 12 bp, Artificial Sequence
  Oligonucleotide primer for the detection of SNP TSC0001811
aattaaccaacc

SEQ ID NO: 269575 - DNA, 12 bp, Artificial Sequence
  Oligonucleotide primer for the detection of SNP TSC0001811
aggtttgaatta

SEQ ID NO: 269576 - DNA, 12 bp, Artificial Sequence
  Oligonucleotide primer for the detection of SNP TSC0001811
aggttcgaatta

SEQ ID NO: 269577 - DNA, 12 bp, Artificial Sequence
  Oligonucleotide primer for the detection of SNP TSC0001811
aaactcaaacca

SEQ ID NO: 269578 - DNA, 12 bp, Artificial Sequence
  Oligonucleotide primer for the detection of SNP TSC0001811
aaactcgaacca

SEQ ID NO: 269579 - DNA, 12 bp, Artificial Sequence
  Oligonucleotide primer for the detection of SNP TSC0001811
aattagttagtt

SEQ ID NO: 269580 - DNA, 12 bp, Artificial Sequence
  Oligonucleotide primer for the detection of SNP TSC0001812
aataaacactaa

SEQ ID NO: 269581 - DNA, 12 bp, Artificial Sequence
  Oligonucleotide primer for the detection of SNP TSC0001812
gattttaattgg

SEQ ID NO: 269582 - DNA, 12 bp, Artificial Sequence
  Oligonucleotide primer for the detection of SNP TSC0001812
aactccaactaa

SEQ ID NO: 269583 - DNA, 12 bp, Artificial Sequence
  Oligonucleotide primer for the detection of SNP TSC0001812
gtaagtattggt

SEQ ID NO: 269584 - DNA, 12 bp, Artificial Sequence
  Oligonucleotide primer for the detection of SNP TSC0001813
acaataaaaaaa

SEQ ID NO: 269585 - DNA, 12 bp, Artificial Sequence
  Oligonucleotide primer for the detection of SNP TSC0001813
ttttttagggtt

SEQ ID NO: 269586 - DNA, 12 bp, Artificial Sequence
  Oligonucleotide primer for the detection of SNP TSC0001813
cctcccaaaatc

SEQ ID NO: 269587 - DNA, 12 bp, Artificial Sequence
  Oligonucleotide primer for the detection of SNP TSC0001813
atagtgggagga

SEQ ID NO: 269588 - DNA, 12 bp, Artificial Sequence
  Oligonucleotide primer for the detection of SNP TSC0001814
caccactatatt

SEQ ID NO: 269589 - DNA, 12 bp, Artificial Sequence
  Oligonucleotide primer for the detection of SNP TSC0001814
aggagttagtta

SEQ ID NO: 269590 - DNA, 12 bp, Artificial Sequence
  Oligonucleotide primer for the detection of SNP TSC0001815
accaatataaac

SEQ ID NO: 269591 - DNA, 12 bp, Artificial Sequence
  Oligonucleotide primer for the detection of SNP TSC0001815
agggttttattg

SEQ ID NO: 269592 - DNA, 12 bp, Artificial Sequence
  Oligonucleotide primer for the detection of SNP TSC0001816
tattaaaattac

SEQ ID NO: 269593 - DNA, 12 bp, Artificial Sequence
  Oligonucleotide primer for the detection of SNP TSC0001816
aatagtggttta

SEQ ID NO: 269594 - DNA, 12 bp, Artificial Sequence
  Oligonucleotide primer for the detection of SNP TSC0001816
aacaataactca

SEQ ID NO: 269595 - DNA, 12 bp, Artificial Sequence
  Oligonucleotide primer for the detection of SNP TSC0001816
tgttgagattat

SEQ ID NO: 269596 - DNA, 12 bp, Artificial Sequence
  Oligonucleotide primer for the detection of SNP TSC0001817
aatataagtagg

SEQ ID NO: 269597 - DNA, 12 bp, Artificial Sequence
  Oligonucleotide primer for the detection of SNP TSC0001818
tatatatatata

SEQ ID NO: 269598 - DNA, 12 bp, Artificial Sequence
  Oligonucleotide primer for the detection of SNP TSC0001819
tattaccctcaa

SEQ ID NO: 269599 - DNA, 12 bp, Artificial Sequence
  Oligonucleotide primer for the detection of SNP TSC0001819
agaaggaatttt

SEQ ID NO: 269600 - DNA, 12 bp, Artificial Sequence
  Oligonucleotide primer for the detection of SNP TSC0001819
aaaaaaaatttc

SEQ ID NO: 269601 - DNA, 12 bp, Artificial Sequence
  Oligonucleotide primer for the detection of SNP TSC0001819
tgttatttttaa

SEQ ID NO: 269602 - DNA, 12 bp, Artificial Sequence
  Oligonucleotide primer for the detection of SNP TSC0001820
tctaaaaacttc

SEQ ID NO: 269603 - DNA, 12 bp, Artificial Sequence
  Oligonucleotide primer for the detection of SNP TSC0001820
gagttaatgaat

SEQ ID NO: 269604 - DNA, 12 bp, Artificial Sequence
  Oligonucleotide primer for the detection of SNP TSC0001821
taagtgattttt

SEQ ID NO: 269605 - DNA, 12 bp, Artificial Sequence
  Oligonucleotide primer for the detection of SNP TSC0001821
caaataatcctc

SEQ ID NO: 269606 - DNA, 12 bp, Artificial Sequence
  Oligonucleotide primer for the detection of SNP TSC0001821
gggaggttgagg

SEQ ID NO: 269607 - DNA, 12 bp, Artificial Sequence
  Oligonucleotide primer for the detection of SNP TSC0001822
ataacttcctta

SEQ ID NO: 269608 - DNA, 12 bp, Artificial Sequence
  Oligonucleotide primer for the detection of SNP TSC0001822
ttaattttgttt

SEQ ID NO: 269609 - DNA, 12 bp, Artificial Sequence
  Oligonucleotide primer for the detection of SNP TSC0001822
ttaattttacct

SEQ ID NO: 269610 - DNA, 12 bp, Artificial Sequence
  Oligonucleotide primer for the detection of SNP TSC0001822
tagtttttttat

SEQ ID NO: 269611 - DNA, 12 bp, Artificial Sequence
  Oligonucleotide primer for the detection of SNP TSC0001823
aaataccatcca

SEQ ID NO: 269612 - DNA, 12 bp, Artificial Sequence
  Oligonucleotide primer for the detection of SNP TSC0001823
ttgtgaaggaaa

SEQ ID NO: 269613 - DNA, 12 bp, Artificial Sequence
  Oligonucleotide primer for the detection of SNP TSC0001823
aagtgttattta

SEQ ID NO: 269614 - DNA, 12 bp, Artificial Sequence
  Oligonucleotide primer for the detection of SNP TSC0001824
tttactttaata

SEQ ID NO: 269615 - DNA, 12 bp, Artificial Sequence
  Oligonucleotide primer for the detection of SNP TSC0001824
acctaatcactt

SEQ ID NO: 269616 - DNA, 12 bp, Artificial Sequence
  Oligonucleotide primer for the detection of SNP TSC0001824
tttgttttgata

SEQ ID NO: 269617 - DNA, 12 bp, Artificial Sequence
  Oligonucleotide primer for the detection of SNP TSC0001825
ataacaaaaaac

SEQ ID NO: 269618 - DNA, 12 bp, Artificial Sequence
  Oligonucleotide primer for the detection of SNP TSC0001825
tttttatttaag

SEQ ID NO: 269619 - DNA, 12 bp, Artificial Sequence
  Oligonucleotide primer for the detection of SNP TSC0001826
ctaatttaatta

SEQ ID NO: 269620 - DNA, 12 bp, Artificial Sequence
  Oligonucleotide primer for the detection of SNP TSC0001826
aataaagaatgt

SEQ ID NO: 269621 - DNA, 12 bp, Artificial Sequence
  Oligonucleotide primer for the detection of SNP TSC0001826
aacaaaaaatac

SEQ ID NO: 269622 - DNA, 12 bp, Artificial Sequence
  Oligonucleotide primer for the detection of SNP TSC0001826
attggtttgatt

SEQ ID NO: 269623 - DNA, 12 bp, Artificial Sequence
  Oligonucleotide primer for the detection of SNP TSC0001829
caaaccattata

SEQ ID NO: 269624 - DNA, 12 bp, Artificial Sequence
  Oligonucleotide primer for the detection of SNP TSC0001829
gttgtattattt

SEQ ID NO: 269625 - DNA, 12 bp, Artificial Sequence
  Oligonucleotide primer for the detection of SNP TSC0001829
ctatactaccta

SEQ ID NO: 269626 - DNA, 12 bp, Artificial Sequence
  Oligonucleotide primer for the detection of SNP TSC0001829
ataggttattgt

SEQ ID NO: 269627 - DNA, 12 bp, Artificial Sequence
  Oligonucleotide primer for the detection of SNP TSC0001830
ccttcattccat

SEQ ID NO: 269628 - DNA, 12 bp, Artificial Sequence
  Oligonucleotide primer for the detection of SNP TSC0001830
gtaatttaatta

SEQ ID NO: 269629 - DNA, 12 bp, Artificial Sequence
  Oligonucleotide primer for the detection of SNP TSC0001831
tatctatcaatc

SEQ ID NO: 269630 - DNA, 12 bp, Artificial Sequence
  Oligonucleotide primer for the detection of SNP TSC0001831
tatctatcgatc

SEQ ID NO: 269631 - DNA, 12 bp, Artificial Sequence
  Oligonucleotide primer for the detection of SNP TSC0001831
taaatggggagt

SEQ ID NO: 269632 - DNA, 12 bp, Artificial Sequence
  Oligonucleotide primer for the detection of SNP TSC0001831
taaatggggagc

SEQ ID NO: 269633 - DNA, 12 bp, Artificial Sequence
  Oligonucleotide primer for the detection of SNP TSC0001831
taaataaaaaac

SEQ ID NO: 269634 - DNA, 12 bp, Artificial Sequence
  Oligonucleotide primer for the detection of SNP TSC0001831
tttgttggtttt

SEQ ID NO: 269635 - DNA, 12 bp, Artificial Sequence
  Oligonucleotide primer for the detection of SNP TSC0001831
tttgtcggtttt

SEQ ID NO: 269636 - DNA, 12 bp, Artificial Sequence
  Oligonucleotide primer for the detection of SNP TSC0001832
ctaccaactacc

SEQ ID NO: 269637 - DNA, 12 bp, Artificial Sequence
  Oligonucleotide primer for the detection of SNP TSC0001832
aatatttattaa

SEQ ID NO: 269638 - DNA, 12 bp, Artificial Sequence
  Oligonucleotide primer for the detection of SNP TSC0001833
ttcctaccactc

SEQ ID NO: 269639 - DNA, 12 bp, Artificial Sequence
  Oligonucleotide primer for the detection of SNP TSC0001833
agtatataaata

SEQ ID NO: 269640 - DNA, 12 bp, Artificial Sequence
  Oligonucleotide primer for the detection of SNP TSC0001834
tcatctatttat

SEQ ID NO: 269641 - DNA, 12 bp, Artificial Sequence
  Oligonucleotide primer for the detection of SNP TSC0001834
ttgttagaaaaa

SEQ ID NO: 269642 - DNA, 12 bp, Artificial Sequence
  Oligonucleotide primer for the detection of SNP TSC0001836
acaaactattta

SEQ ID NO: 269643 - DNA, 12 bp, Artificial Sequence
  Oligonucleotide primer for the detection of SNP TSC0001836
atttttttttgg

SEQ ID NO: 269644 - DNA, 12 bp, Artificial Sequence
  Oligonucleotide primer for the detection of SNP TSC0001836
cctttctttaaa

SEQ ID NO: 269645 - DNA, 12 bp, Artificial Sequence
  Oligonucleotide primer for the detection of SNP TSC0001836
gtaaattattta

SEQ ID NO: 269646 - DNA, 12 bp, Artificial Sequence
  Oligonucleotide primer for the detection of SNP TSC0001837
atataaatacct

SEQ ID NO: 269647 - DNA, 12 bp, Artificial Sequence
  Oligonucleotide primer for the detection of SNP TSC0001837
agggtaaatata

SEQ ID NO: 269648 - DNA, 12 bp, Artificial Sequence
  Oligonucleotide primer for the detection of SNP TSC0001838
atataatctcaa

SEQ ID NO: 269649 - DNA, 12 bp, Artificial Sequence
  Oligonucleotide primer for the detection of SNP TSC0001838
ggtagaggttgt

SEQ ID NO: 269650 - DNA, 12 bp, Artificial Sequence
  Oligonucleotide primer for the detection of SNP TSC0001838
aacaaaaattat

SEQ ID NO: 269651 - DNA, 12 bp, Artificial Sequence
  Oligonucleotide primer for the detection of SNP TSC0001838
gtgtgattttag

SEQ ID NO: 269652 - DNA, 12 bp, Artificial Sequence
  Oligonucleotide primer for the detection of SNP TSC0001840
ttactaaacaaa

SEQ ID NO: 269653 - DNA, 12 bp, Artificial Sequence
  Oligonucleotide primer for the detection of SNP TSC0001840
tttatggtaaat

SEQ ID NO: 269654 - DNA, 12 bp, Artificial Sequence
  Oligonucleotide primer for the detection of SNP TSC0001840
cataacaaataa

SEQ ID NO: 269655 - DNA, 12 bp, Artificial Sequence
  Oligonucleotide primer for the detection of SNP TSC0001840
gttgagtagatt

SEQ ID NO: 269656 - DNA, 12 bp, Artificial Sequence
  Oligonucleotide primer for the detection of SNP TSC0001841
actcttcaatct

SEQ ID NO: 269657 - DNA, 12 bp, Artificial Sequence
  Oligonucleotide primer for the detection of SNP TSC0001841
aaatatttaaag

SEQ ID NO: 269658 - DNA, 12 bp, Artificial Sequence
  Oligonucleotide primer for the detection of SNP TSC0001842
atccacccacct

SEQ ID NO: 269659 - DNA, 12 bp, Artificial Sequence
  Oligonucleotide primer for the detection of SNP TSC0001842
atccacccgcct

SEQ ID NO: 269660 - DNA, 12 bp, Artificial Sequence
  Oligonucleotide primer for the detection of SNP TSC0001842
atccgcccacct

SEQ ID NO: 269661 - DNA, 12 bp, Artificial Sequence
  Oligonucleotide primer for the detection of SNP TSC0001842
atccgcccgcct

SEQ ID NO: 269662 - DNA, 12 bp, Artificial Sequence
  Oligonucleotide primer for the detection of SNP TSC0001842
tattttgggagg

SEQ ID NO: 269663 - DNA, 12 bp, Artificial Sequence
  Oligonucleotide primer for the detection of SNP TSC0001842
cactttaaaaaa

SEQ ID NO: 269664 - DNA, 12 bp, Artificial Sequence
  Oligonucleotide primer for the detection of SNP TSC0001842
atttgtttgttt

SEQ ID NO: 269665 - DNA, 12 bp, Artificial Sequence
  Oligonucleotide primer for the detection of SNP TSC0001842
attcgtttgttt

SEQ ID NO: 269666 - DNA, 12 bp, Artificial Sequence
  Oligonucleotide primer for the detection of SNP TSC0001842
atttgttcgttt

SEQ ID NO: 269667 - DNA, 12 bp, Artificial Sequence
  Oligonucleotide primer for the detection of SNP TSC0001842
attcgttcgttt

SEQ ID NO: 269668 - DNA, 12 bp, Artificial Sequence
  Oligonucleotide primer for the detection of SNP TSC0001843
ctaactatttat

SEQ ID NO: 269669 - DNA, 12 bp, Artificial Sequence
  Oligonucleotide primer for the detection of SNP TSC0001843
ggagaaatgtga

SEQ ID NO: 269670 - DNA, 12 bp, Artificial Sequence
  Oligonucleotide primer for the detection of SNP TSC0001844
tacccattatta

SEQ ID NO: 269671 - DNA, 12 bp, Artificial Sequence
  Oligonucleotide primer for the detection of SNP TSC0001844
taggtgaatgtt

SEQ ID NO: 269672 - DNA, 12 bp, Artificial Sequence
  Oligonucleotide primer for the detection of SNP TSC0001844
caaataaatact

SEQ ID NO: 269673 - DNA, 12 bp, Artificial Sequence
  Oligonucleotide primer for the detection of SNP TSC0001844
ttgtttattatt

SEQ ID NO: 269674 - DNA, 12 bp, Artificial Sequence
  Oligonucleotide primer for the detection of SNP TSC0001845
tatacacattct

SEQ ID NO: 269675 - DNA, 12 bp, Artificial Sequence
  Oligonucleotide primer for the detection of SNP TSC0001845
attgaaataata

SEQ ID NO: 269676 - DNA, 12 bp, Artificial Sequence
  Oligonucleotide primer for the detection of SNP TSC0001845
actaaaataata

SEQ ID NO: 269677 - DNA, 12 bp, Artificial Sequence
  Oligonucleotide primer for the detection of SNP TSC0001845
tatgtatatttt

SEQ ID NO: 269678 - DNA, 12 bp, Artificial Sequence
  Oligonucleotide primer for the detection of SNP TSC0001846
aaatttttaaat

SEQ ID NO: 269679 - DNA, 12 bp, Artificial Sequence
  Oligonucleotide primer for the detection of SNP TSC0001846
taaaattgggaa

SEQ ID NO: 269680 - DNA, 12 bp, Artificial Sequence
  Oligonucleotide primer for the detection of SNP TSC0001847
acaaaatttaac

SEQ ID NO: 269681 - DNA, 12 bp, Artificial Sequence
  Oligonucleotide primer for the detection of SNP TSC0001847
tatcctaattct

SEQ ID NO: 269682 - DNA, 12 bp, Artificial Sequence
  Oligonucleotide primer for the detection of SNP TSC0001847
ataagatttgat

SEQ ID NO: 269683 - DNA, 12 bp, Artificial Sequence
  Oligonucleotide primer for the detection of SNP TSC0001848
aatattataata

SEQ ID NO: 269684 - DNA, 12 bp, Artificial Sequence
  Oligonucleotide primer for the detection of SNP TSC0001848
aagtaaaatgag

SEQ ID NO: 269685 - DNA, 12 bp, Artificial Sequence
  Oligonucleotide primer for the detection of SNP TSC0001848
aaataaaataaa

SEQ ID NO: 269686 - DNA, 12 bp, Artificial Sequence
  Oligonucleotide primer for the detection of SNP TSC0001848
gatattatagta

SEQ ID NO: 269687 - DNA, 12 bp, Artificial Sequence
  Oligonucleotide primer for the detection of SNP TSC0001849
aacattcatata

SEQ ID NO: 269688 - DNA, 12 bp, Artificial Sequence
  Oligonucleotide primer for the detection of SNP TSC0001849
agagtaatttta

SEQ ID NO: 269689 - DNA, 12 bp, Artificial Sequence
  Oligonucleotide primer for the detection of SNP TSC0001849
agtatttatatg

SEQ ID NO: 269690 - DNA, 12 bp, Artificial Sequence
  Oligonucleotide primer for the detection of SNP TSC0001850
cataaatttaaa

SEQ ID NO: 269691 - DNA, 12 bp, Artificial Sequence
  Oligonucleotide primer for the detection of SNP TSC0001850
tgttagttagat

SEQ ID NO: 269692 - DNA, 12 bp, Artificial Sequence
  Oligonucleotide primer for the detection of SNP TSC0001850
cgttagttagat

SEQ ID NO: 269693 - DNA, 12 bp, Artificial Sequence
  Oligonucleotide primer for the detection of SNP TSC0001850
caccaattaaac

SEQ ID NO: 269694 - DNA, 12 bp, Artificial Sequence
  Oligonucleotide primer for the detection of SNP TSC0001850
cgccaattaaac

SEQ ID NO: 269695 - DNA, 12 bp, Artificial Sequence
  Oligonucleotide primer for the detection of SNP TSC0001850
tataaatttgag

SEQ ID NO: 269696 - DNA, 12 bp, Artificial Sequence
  Oligonucleotide primer for the detection of SNP TSC0001851
aaaatttaaaat

SEQ ID NO: 269697 - DNA, 12 bp, Artificial Sequence
  Oligonucleotide primer for the detection of SNP TSC0001851
gaagaattataa

SEQ ID NO: 269698 - DNA, 12 bp, Artificial Sequence
  Oligonucleotide primer for the detection of SNP TSC0001852
taatttaaatcc

SEQ ID NO: 269699 - DNA, 12 bp, Artificial Sequence
  Oligonucleotide primer for the detection of SNP TSC0001852
agaggtagagta

SEQ ID NO: 269700 - DNA, 12 bp, Artificial Sequence
  Oligonucleotide primer for the detection of SNP TSC0001853
tcattatactac

SEQ ID NO: 269701 - DNA, 12 bp, Artificial Sequence
  Oligonucleotide primer for the detection of SNP TSC0001853
tagtgtattatg

SEQ ID NO: 269702 - DNA, 12 bp, Artificial Sequence
  Oligonucleotide primer for the detection of SNP TSC0001853
tagtgtattacg

SEQ ID NO: 269703 - DNA, 12 bp, Artificial Sequence
  Oligonucleotide primer for the detection of SNP TSC0001853
caatacatcaca

SEQ ID NO: 269704 - DNA, 12 bp, Artificial Sequence
  Oligonucleotide primer for the detection of SNP TSC0001853
caatacatcacg

SEQ ID NO: 269705 - DNA, 12 bp, Artificial Sequence
  Oligonucleotide primer for the detection of SNP TSC0001853
ttattgtattgt

SEQ ID NO: 269706 - DNA, 12 bp, Artificial Sequence
  Oligonucleotide primer for the detection of SNP TSC0001856
caaaaaccttac

SEQ ID NO: 269707 - DNA, 12 bp, Artificial Sequence
  Oligonucleotide primer for the detection of SNP TSC0001856
ttttagaaatgg

SEQ ID NO: 269708 - DNA, 12 bp, Artificial Sequence
  Oligonucleotide primer for the detection of SNP TSC0001857
gttgttgttttt

SEQ ID NO: 269709 - DNA, 12 bp, Artificial Sequence
  Oligonucleotide primer for the detection of SNP TSC0001857
ttattattttta

SEQ ID NO: 269710 - DNA, 12 bp, Artificial Sequence
  Oligonucleotide primer for the detection of SNP TSC0001858
catccaaaaaat

SEQ ID NO: 269711 - DNA, 12 bp, Artificial Sequence
  Oligonucleotide primer for the detection of SNP TSC0001858
gtggtagtagta

SEQ ID NO: 269712 - DNA, 12 bp, Artificial Sequence
  Oligonucleotide primer for the detection of SNP TSC0001859
atattcatacct

SEQ ID NO: 269713 - DNA, 12 bp, Artificial Sequence
  Oligonucleotide primer for the detection of SNP TSC0001859
gaaataaattaa

SEQ ID NO: 269714 - DNA, 12 bp, Artificial Sequence
  Oligonucleotide primer for the detection of SNP TSC0001860
actatatccacc

SEQ ID NO: 269715 - DNA, 12 bp, Artificial Sequence
  Oligonucleotide primer for the detection of SNP TSC0001860
tgttgtgttagt

SEQ ID NO: 269716 - DNA, 12 bp, Artificial Sequence
  Oligonukleotid-Primer
cgttgtgttagt

SEQ ID NO: 269717 - DNA, 12 bp, Artificial Sequence
  Oligonucleotide primer for the detection of SNP TSC0001860
tgtcgtgttagt

SEQ ID NO: 269718 - DNA, 12 bp, Artificial Sequence
  Oligonucleotide primer for the detection of SNP TSC0001860
cgtcgtgttagt

SEQ ID NO: 269719 - DNA, 12 bp, Artificial Sequence
  Oligonucleotide primer for the detection of SNP TSC0001860
accatatcaaca

SEQ ID NO: 269720 - DNA, 12 bp, Artificial Sequence
  Oligonucleotide primer for the detection of SNP TSC0001860
accgtatcaaca

SEQ ID NO: 269721 - DNA, 12 bp, Artificial Sequence
  Oligonucleotide primer for the detection of SNP TSC0001860
gccatatcaaca

SEQ ID NO: 269722 - DNA, 12 bp, Artificial Sequence
  Oligonucleotide primer for the detection of SNP TSC0001860
gccgtatcaaca

SEQ ID NO: 269723 - DNA, 12 bp, Artificial Sequence
  Oligonucleotide primer for the detection of SNP TSC0001860
gttgtgtttatt

SEQ ID NO: 269724 - DNA, 12 bp, Artificial Sequence
  Oligonucleotide primer for the detection of SNP TSC0001860
gttgtgtttatc

SEQ ID NO: 269725 - DNA, 12 bp, Artificial Sequence
  Oligonucleotide primer for the detection of SNP TSC0001861
aataccaaacat

SEQ ID NO: 269726 - DNA, 12 bp, Artificial Sequence
  Oligonucleotide primer for the detection of SNP TSC0001861
ttgagaattgga

SEQ ID NO: 269727 - DNA, 12 bp, Artificial Sequence
  Oligonucleotide primer for the detection of SNP TSC0001862
tccaacaatctt

SEQ ID NO: 269728 - DNA, 12 bp, Artificial Sequence
  Oligonucleotide primer for the detection of SNP TSC0001862
tccaacgatctt

SEQ ID NO: 269729 - DNA, 12 bp, Artificial Sequence
  Oligonucleotide primer for the detection of SNP TSC0001862
ggagtttaaaag

SEQ ID NO: 269730 - DNA, 12 bp, Artificial Sequence
  Oligonucleotide primer for the detection of SNP TSC0001864
aaaactccttcc

SEQ ID NO: 269731 - DNA, 12 bp, Artificial Sequence
  Oligonucleotide primer for the detection of SNP TSC0001864
taaagattgata

SEQ ID NO: 269732 - DNA, 12 bp, Artificial Sequence
  Oligonucleotide primer for the detection of SNP TSC0001864
caaaaattaata

SEQ ID NO: 269733 - DNA, 12 bp, Artificial Sequence
  Oligonucleotide primer for the detection of SNP TSC0001864
aaaatttttttt

SEQ ID NO: 269734 - DNA, 12 bp, Artificial Sequence
  Oligonucleotide primer for the detection of SNP TSC0001865
aaaaaattaaac

SEQ ID NO: 269735 - DNA, 12 bp, Artificial Sequence
  Oligonucleotide primer for the detection of SNP TSC0001865
tttgataatgag

SEQ ID NO: 269736 - DNA, 12 bp, Artificial Sequence
  Oligonucleotide primer for the detection of SNP TSC0001865
cttaacaataaa

SEQ ID NO: 269737 - DNA, 12 bp, Artificial Sequence
  Oligonucleotide primer for the detection of SNP TSC0001865
aagggttgaatt

SEQ ID NO: 269738 - DNA, 12 bp, Artificial Sequence
  Oligonucleotide primer for the detection of SNP TSC0001866
taaactcttata

SEQ ID NO: 269739 - DNA, 12 bp, Artificial Sequence
  Oligonucleotide primer for the detection of SNP TSC0001866
gtttaatttttt

SEQ ID NO: 269740 - DNA, 12 bp, Artificial Sequence
  Oligonucleotide primer for the detection of SNP TSC0001866
attcaacccttc

SEQ ID NO: 269741 - DNA, 12 bp, Artificial Sequence
  Oligonucleotide primer for the detection of SNP TSC0001866
tggatttttgtg

SEQ ID NO: 269742 - DNA, 12 bp, Artificial Sequence
  Oligonucleotide primer for the detection of SNP TSC0001868
atttactaaaaa

SEQ ID NO: 269743 - DNA, 12 bp, Artificial Sequence
  Oligonucleotide primer for the detection of SNP TSC0001868
ttttttgttagt

SEQ ID NO: 269744 - DNA, 12 bp, Artificial Sequence
  Oligonucleotide primer for the detection of SNP TSC0001868
ctcttatcaata

SEQ ID NO: 269745 - DNA, 12 bp, Artificial Sequence
  Oligonucleotide primer for the detection of SNP TSC0001868
gtttgttgaaaa

SEQ ID NO: 269746 - DNA, 12 bp, Artificial Sequence
  Oligonucleotide primer for the detection of SNP TSC0001869
taccaacaaact

SEQ ID NO: 269747 - DNA, 12 bp, Artificial Sequence
  Oligonucleotide primer for the detection of SNP TSC0001869
tttttagggtga

SEQ ID NO: 269748 - DNA, 12 bp, Artificial Sequence
  Oligonucleotide primer for the detection of SNP TSC0001871
tatatacatata

SEQ ID NO: 269749 - DNA, 12 bp, Artificial Sequence
  Oligonucleotide primer for the detection of SNP TSC0001871
gttttggttttt

SEQ ID NO: 269750 - DNA, 12 bp, Artificial Sequence
  Oligonucleotide primer for the detection of SNP TSC0001871
accctaactcct

SEQ ID NO: 269751 - DNA, 12 bp, Artificial Sequence
  Oligonucleotide primer for the detection of SNP TSC0001871
tgtgtgtatgta

SEQ ID NO: 269752 - DNA, 12 bp, Artificial Sequence
  Oligonucleotide primer for the detection of SNP TSC0001873
atgttttaaaaa

SEQ ID NO: 269753 - DNA, 12 bp, Artificial Sequence
  Oligonucleotide primer for the detection of SNP TSC0001874
taaaacttatta

SEQ ID NO: 269754 - DNA, 12 bp, Artificial Sequence
  Oligonucleotide primer for the detection of SNP TSC0001874
gtttatagaata

SEQ ID NO: 269755 - DNA, 12 bp, Artificial Sequence
  Oligonucleotide primer for the detection of SNP TSC0001874
atttataaaata

SEQ ID NO: 269756 - DNA, 12 bp, Artificial Sequence
  Oligonucleotide primer for the detection of SNP TSC0001874
ataaaatttgtt

SEQ ID NO: 269757 - DNA, 12 bp, Artificial Sequence
  Oligonucleotide primer for the detection of SNP TSC0001875
aagtagattatg

SEQ ID NO: 269758 - DNA, 12 bp, Artificial Sequence
  Oligonucleotide primer for the detection of SNP TSC0001875
aagtagattacg

SEQ ID NO: 269759 - DNA, 12 bp, Artificial Sequence
  Oligonucleotide primer for the detection of SNP TSC0001876
atttttaaatac

SEQ ID NO: 269760 - DNA, 12 bp, Artificial Sequence
  Oligonucleotide primer for the detection of SNP TSC0001876
ttgggaaattaa

SEQ ID NO: 269761 - DNA, 12 bp, Artificial Sequence
  Oligonucleotide primer for the detection of SNP TSC0001877
caaaaaccccaa

SEQ ID NO: 269762 - DNA, 12 bp, Artificial Sequence
  Oligonucleotide primer for the detection of SNP TSC0001877
aggagtttttaa

SEQ ID NO: 269763 - DNA, 12 bp, Artificial Sequence
  Oligonucleotide primer for the detection of SNP TSC0001877
aaaaattcttaa

SEQ ID NO: 269764 - DNA, 12 bp, Artificial Sequence
  Oligonucleotide primer for the detection of SNP TSC0001877
taaggattttag

SEQ ID NO: 269765 - DNA, 12 bp, Artificial Sequence
  Oligonucleotide primer for the detection of SNP TSC0001878
atttctaaaaaa

SEQ ID NO: 269766 - DNA, 12 bp, Artificial Sequence
  Oligonucleotide primer for the detection of SNP TSC0001878
gttattttttat

SEQ ID NO: 269767 - DNA, 12 bp, Artificial Sequence
  Oligonucleotide primer for the detection of SNP TSC0001878
atcactccttat

SEQ ID NO: 269768 - DNA, 12 bp, Artificial Sequence
  Oligonucleotide primer for the detection of SNP TSC0001878
gtttttaggaaa

SEQ ID NO: 269769 - DNA, 12 bp, Artificial Sequence
  Oligonucleotide primer for the detection of SNP TSC0001879
ttataaaaatca

SEQ ID NO: 269770 - DNA, 12 bp, Artificial Sequence
  Oligonucleotide primer for the detection of SNP TSC0001879
gttattatgttt

SEQ ID NO: 269771 - DNA, 12 bp, Artificial Sequence
  Oligonucleotide primer for the detection of SNP TSC0001879
cactatacccaa

SEQ ID NO: 269772 - DNA, 12 bp, Artificial Sequence
  Oligonucleotide primer for the detection of SNP TSC0001879
tttgtaaaaatt

SEQ ID NO: 269773 - DNA, 12 bp, Artificial Sequence
  Oligonucleotide primer for the detection of SNP TSC0001880
caacccaaccct

SEQ ID NO: 269774 - DNA, 12 bp, Artificial Sequence
  Oligonucleotide primer for the detection of SNP TSC0001880
attaaagtattg

SEQ ID NO: 269775 - DNA, 12 bp, Artificial Sequence
  Oligonucleotide primer for the detection of SNP TSC0001881
tgttatttaaaa

SEQ ID NO: 269776 - DNA, 12 bp, Artificial Sequence
  Oligonucleotide primer for the detection of SNP TSC0001882
ccaaaccctcat

SEQ ID NO: 269777 - DNA, 12 bp, Artificial Sequence
  Oligonucleotide primer for the detection of SNP TSC0001882
ccgaaccctcat

SEQ ID NO: 269778 - DNA, 12 bp, Artificial Sequence
  Oligonucleotide primer for the detection of SNP TSC0001882
gtgaattaggta

SEQ ID NO: 269779 - DNA, 12 bp, Artificial Sequence
  Oligonucleotide primer for the detection of SNP TSC0001882
ataaatcaaaca

SEQ ID NO: 269780 - DNA, 12 bp, Artificial Sequence
  Oligonucleotide primer for the detection of SNP TSC0001882
ttgggtttttat

SEQ ID NO: 269781 - DNA, 12 bp, Artificial Sequence
  Oligonucleotide primer for the detection of SNP TSC0001882
tcgggtttttat

SEQ ID NO: 269782 - DNA, 12 bp, Artificial Sequence
  Oligonucleotide primer for the detection of SNP TSC0001883
tattctccccta

SEQ ID NO: 269783 - DNA, 12 bp, Artificial Sequence
  Oligonucleotide primer for the detection of SNP TSC0001883
taggattgtatt

SEQ ID NO: 269784 - DNA, 12 bp, Artificial Sequence
  Oligonucleotide primer for the detection of SNP TSC0001883
taggattgtatc

SEQ ID NO: 269785 - DNA, 12 bp, Artificial Sequence
  Oligonucleotide primer for the detection of SNP TSC0001883
caaaattatacc

SEQ ID NO: 269786 - DNA, 12 bp, Artificial Sequence
  Oligonucleotide primer for the detection of SNP TSC0001883
tatttttttttg

SEQ ID NO: 269787 - DNA, 12 bp, Artificial Sequence
  Oligonucleotide primer for the detection of SNP TSC0001884
cacaacaaacac

SEQ ID NO: 269788 - DNA, 12 bp, Artificial Sequence
  Oligonucleotide primer for the detection of SNP TSC0001884
cacgacaaacac

SEQ ID NO: 269789 - DNA, 12 bp, Artificial Sequence
  Oligonukleotid-Primer
ttggagtggtgg

SEQ ID NO: 269790 - DNA, 12 bp, Artificial Sequence
  Oligonucleotide primer for the detection of SNP TSC0001884
ttaaaataataa

SEQ ID NO: 269791 - DNA, 12 bp, Artificial Sequence
  Oligonucleotide primer for the detection of SNP TSC0001884
tatgatagatat

SEQ ID NO: 269792 - DNA, 12 bp, Artificial Sequence
  Oligonucleotide primer for the detection of SNP TSC0001884
tacgatagatat

SEQ ID NO: 269793 - DNA, 12 bp, Artificial Sequence
  Oligonucleotide primer for the detection of SNP TSC0001885
ctaacaaaactt

SEQ ID NO: 269794 - DNA, 12 bp, Artificial Sequence
  Oligonucleotide primer for the detection of SNP TSC0001885
ctaacgaaactt

SEQ ID NO: 269795 - DNA, 12 bp, Artificial Sequence
  Oligonucleotide primer for the detection of SNP TSC0001885
ttgttgtttgta

SEQ ID NO: 269796 - DNA, 12 bp, Artificial Sequence
  Oligonucleotide primer for the detection of SNP TSC0001885
tcgttgtttgta

SEQ ID NO: 269797 - DNA, 12 bp, Artificial Sequence
  Oligonucleotide primer for the detection of SNP TSC0001886
ctataatcccaa

SEQ ID NO: 269798 - DNA, 12 bp, Artificial Sequence
  Oligonucleotide primer for the detection of SNP TSC0001886
gttttttaaagt

SEQ ID NO: 269799 - DNA, 12 bp, Artificial Sequence
  Oligonucleotide primer for the detection of SNP TSC0001886
aacctcccaaaa

SEQ ID NO: 269800 - DNA, 12 bp, Artificial Sequence
  Oligonucleotide primer for the detection of SNP TSC0001886
gacctcccaaaa

SEQ ID NO: 269801 - DNA, 12 bp, Artificial Sequence
  Oligonucleotide primer for the detection of SNP TSC0001886
ttgtaattttag

SEQ ID NO: 269802 - DNA, 12 bp, Artificial Sequence
  Oligonucleotide primer for the detection of SNP TSC0001887
cttaactattat

SEQ ID NO: 269803 - DNA, 12 bp, Artificial Sequence
  Oligonucleotide primer for the detection of SNP TSC0001887
ttttatttataa

SEQ ID NO: 269804 - DNA, 12 bp, Artificial Sequence
  Oligonucleotide primer for the detection of SNP TSC0001887
ttttacttacaa

SEQ ID NO: 269805 - DNA, 12 bp, Artificial Sequence
  Oligonucleotide primer for the detection of SNP TSC0001887
tttggttgttgt

SEQ ID NO: 269806 - DNA, 12 bp, Artificial Sequence
  Oligonucleotide primer for the detection of SNP TSC0001888
tatacattaaat

SEQ ID NO: 269807 - DNA, 12 bp, Artificial Sequence
  Oligonucleotide primer for the detection of SNP TSC0001888
aggtattggtag

SEQ ID NO: 269808 - DNA, 12 bp, Artificial Sequence
  Oligonucleotide primer for the detection of SNP TSC0001889
aaaatacaatta

SEQ ID NO: 269809 - DNA, 12 bp, Artificial Sequence
  Oligonucleotide primer for the detection of SNP TSC0001889
aatgaaatatat

SEQ ID NO: 269810 - DNA, 12 bp, Artificial Sequence
  Oligonucleotide primer for the detection of SNP TSC0001889
taataaaacata

SEQ ID NO: 269811 - DNA, 12 bp, Artificial Sequence
  Oligonucleotide primer for the detection of SNP TSC0001889
aagagtataatt

SEQ ID NO: 269812 - DNA, 12 bp, Artificial Sequence
  Oligonucleotide primer for the detection of SNP TSC0001890
aaacaaaaacaa

SEQ ID NO: 269813 - DNA, 12 bp, Artificial Sequence
  Oligonucleotide primer for the detection of SNP TSC0001890
aaacaaaaacga

SEQ ID NO: 269814 - DNA, 12 bp, Artificial Sequence
  Oligonucleotide primer for the detection of SNP TSC0001890
attgtatgtatt

SEQ ID NO: 269815 - DNA, 12 bp, Artificial Sequence
  Oligonucleotide primer for the detection of SNP TSC0001890
ccactacataca

SEQ ID NO: 269816 - DNA, 12 bp, Artificial Sequence
  Oligonucleotide primer for the detection of SNP TSC0001890
gtaggagtgatt

SEQ ID NO: 269817 - DNA, 12 bp, Artificial Sequence
  Oligonucleotide primer for the detection of SNP TSC0001890
gtaggagcgatt

SEQ ID NO: 269818 - DNA, 12 bp, Artificial Sequence
  Oligonucleotide primer for the detection of SNP TSC0001891
taaacaaaatta

SEQ ID NO: 269819 - DNA, 12 bp, Artificial Sequence
  Oligonucleotide primer for the detection of SNP TSC0001891
ttgagaatgtgt

SEQ ID NO: 269820 - DNA, 12 bp, Artificial Sequence
  Oligonucleotide primer for the detection of SNP TSC0001891
ttgagaacgtgt

SEQ ID NO: 269821 - DNA, 12 bp, Artificial Sequence
  Oligonucleotide primer for the detection of SNP TSC0001891
actaaaaacata

SEQ ID NO: 269822 - DNA, 12 bp, Artificial Sequence
  Oligonucleotide primer for the detection of SNP TSC0001891
actaaaaacgta

SEQ ID NO: 269823 - DNA, 12 bp, Artificial Sequence
  Oligonucleotide primer for the detection of SNP TSC0001891
taagtaagatta

SEQ ID NO: 269824 - DNA, 12 bp, Artificial Sequence
  Oligonucleotide primer for the detection of SNP TSC0001892
tctaatacaact

SEQ ID NO: 269825 - DNA, 12 bp, Artificial Sequence
  Oligonucleotide primer for the detection of SNP TSC0001892
aattttttatta

SEQ ID NO: 269826 - DNA, 12 bp, Artificial Sequence
  Oligonucleotide primer for the detection of SNP TSC0001892
tctctcactaaa

SEQ ID NO: 269827 - DNA, 12 bp, Artificial Sequence
  Oligonucleotide primer for the detection of SNP TSC0001892
tttaatgtaatt

SEQ ID NO: 269828 - DNA, 12 bp, Artificial Sequence
  Oligonucleotide primer for the detection of SNP TSC0001893
taaacattacat

SEQ ID NO: 269829 - DNA, 12 bp, Artificial Sequence
  Oligonucleotide primer for the detection of SNP TSC0001893
tgtgaattatag

SEQ ID NO: 269830 - DNA, 12 bp, Artificial Sequence
  Oligonucleotide primer for the detection of SNP TSC0001894
ataactttctcc

SEQ ID NO: 269831 - DNA, 12 bp, Artificial Sequence
  Oligonucleotide primer for the detection of SNP TSC0001894
ggataattgtaa

SEQ ID NO: 269832 - DNA, 12 bp, Artificial Sequence
  Oligonucleotide primer for the detection of SNP TSC0001894
atagtttttttt

SEQ ID NO: 269833 - DNA, 12 bp, Artificial Sequence
  Oligonucleotide primer for the detection of SNP TSC0001895
aacataataaat

SEQ ID NO: 269834 - DNA, 12 bp, Artificial Sequence
  Oligonucleotide primer for the detection of SNP TSC0001895
aatttttattta

SEQ ID NO: 269835 - DNA, 12 bp, Artificial Sequence
  Oligonucleotide primer for the detection of SNP TSC0001896
tgtttttgtgta

SEQ ID NO: 269836 - DNA, 12 bp, Artificial Sequence
  Oligonucleotide primer for the detection of SNP TSC0001897
tcaaccaaatat

SEQ ID NO: 269837 - DNA, 12 bp, Artificial Sequence
  Oligonucleotide primer for the detection of SNP TSC0001897
tcaaccgaatat

SEQ ID NO: 269838 - DNA, 12 bp, Artificial Sequence
  Oligonucleotide primer for the detection of SNP TSC0001897
atggtattagta

SEQ ID NO: 269839 - DNA, 12 bp, Artificial Sequence
  Oligonucleotide primer for the detection of SNP TSC0001897
ataacattaata

SEQ ID NO: 269840 - DNA, 12 bp, Artificial Sequence
  Oligonucleotide primer for the detection of SNP TSC0001897
ttagttgggtat

SEQ ID NO: 269841 - DNA, 12 bp, Artificial Sequence
  Oligonucleotide primer for the detection of SNP TSC0001897
ttagtcgggtat

SEQ ID NO: 269842 - DNA, 12 bp, Artificial Sequence
  Oligonucleotide primer for the detection of SNP TSC0001898
accattttatcc

SEQ ID NO: 269843 - DNA, 12 bp, Artificial Sequence
  Oligonucleotide primer for the detection of SNP TSC0001898
aaagtaattttt

SEQ ID NO: 269844 - DNA, 12 bp, Artificial Sequence
  Oligonucleotide primer for the detection of SNP TSC0001898
aaaaacaattcc

SEQ ID NO: 269845 - DNA, 12 bp, Artificial Sequence
  Oligonucleotide primer for the detection of SNP TSC0001899
tatatatatatt

SEQ ID NO: 269846 - DNA, 12 bp, Artificial Sequence
  Oligonucleotide primer for the detection of SNP TSC0001899
atgtatatatag

SEQ ID NO: 269847 - DNA, 12 bp, Artificial Sequence
  Oligonucleotide primer for the detection of SNP TSC0001900
tatacaaataat

SEQ ID NO: 269848 - DNA, 12 bp, Artificial Sequence
  Oligonucleotide primer for the detection of SNP TSC0001900
aatgggtgtgta

SEQ ID NO: 269849 - DNA, 12 bp, Artificial Sequence
  Oligonucleotide primer for the detection of SNP TSC0001903
ctcaataaaata

SEQ ID NO: 269850 - DNA, 12 bp, Artificial Sequence
  Oligonucleotide primer for the detection of SNP TSC0001903
tttatttgatat

SEQ ID NO: 269851 - DNA, 12 bp, Artificial Sequence
  Oligonucleotide primer for the detection of SNP TSC0001903
tttacttaacat

SEQ ID NO: 269852 - DNA, 12 bp, Artificial Sequence
  Oligonucleotide primer for the detection of SNP TSC0001903
taataaaatatt

SEQ ID NO: 269853 - DNA, 12 bp, Artificial Sequence
  Oligonucleotide primer for the detection of SNP TSC0001904
ctcaaacaaaat

SEQ ID NO: 269854 - DNA, 12 bp, Artificial Sequence
  Oligonucleotide primer for the detection of SNP TSC0001904
tgtttttttgta

SEQ ID NO: 269855 - DNA, 12 bp, Artificial Sequence
  Oligonucleotide primer for the detection of SNP TSC0001907
ttttattgtttt

SEQ ID NO: 269856 - DNA, 12 bp, Artificial Sequence
  Oligonucleotide primer for the detection of SNP TSC0001907
ttttattatttt

SEQ ID NO: 269857 - DNA, 12 bp, Artificial Sequence
  Oligonucleotide primer for the detection of SNP TSC0001907
atagaaaaaaaa

SEQ ID NO: 269858 - DNA, 12 bp, Artificial Sequence
  Oligonucleotide primer for the detection of SNP TSC0001908
taattacaacct

SEQ ID NO: 269859 - DNA, 12 bp, Artificial Sequence
  Oligonucleotide primer for the detection of SNP TSC0001908
tttgtattagtg

SEQ ID NO: 269860 - DNA, 12 bp, Artificial Sequence
  Oligonucleotide primer for the detection of SNP TSC0001909
ttacccaaacta

SEQ ID NO: 269861 - DNA, 12 bp, Artificial Sequence
  Oligonucleotide primer for the detection of SNP TSC0001909
gtgattgtatta

SEQ ID NO: 269862 - DNA, 12 bp, Artificial Sequence
  Oligonucleotide primer for the detection of SNP TSC0001909
gtgatcgtatta

SEQ ID NO: 269863 - DNA, 12 bp, Artificial Sequence
  Oligonucleotide primer for the detection of SNP TSC0001910
aacaaaaaaaat

SEQ ID NO: 269864 - DNA, 12 bp, Artificial Sequence
  Oligonucleotide primer for the detection of SNP TSC0001910
atgtttgtatta

SEQ ID NO: 269865 - DNA, 12 bp, Artificial Sequence
  Oligonucleotide primer for the detection of SNP TSC0001910
atatttacatta

SEQ ID NO: 269866 - DNA, 12 bp, Artificial Sequence
  Oligonukleotid-Primer
aataggggagat

SEQ ID NO: 269867 - DNA, 12 bp, Artificial Sequence
  Oligonucleotide primer for the detection of SNP TSC0001911
ttacatttataa

SEQ ID NO: 269868 - DNA, 12 bp, Artificial Sequence
  Oligonucleotide primer for the detection of SNP TSC0001911
attattgaatgt

SEQ ID NO: 269869 - DNA, 12 bp, Artificial Sequence
  Oligonucleotide primer for the detection of SNP TSC0001911
actactaaatat

SEQ ID NO: 269870 - DNA, 12 bp, Artificial Sequence
  Oligonucleotide primer for the detection of SNP TSC0001911
ttatatttataa

SEQ ID NO: 269871 - DNA, 12 bp, Artificial Sequence
  Oligonucleotide primer for the detection of SNP TSC0001912
taatacttatca

SEQ ID NO: 269872 - DNA, 12 bp, Artificial Sequence
  Oligonucleotide primer for the detection of SNP TSC0001912
atttgtttaaat

SEQ ID NO: 269873 - DNA, 12 bp, Artificial Sequence
  Oligonucleotide primer for the detection of SNP TSC0001912
atttattcaaat

SEQ ID NO: 269874 - DNA, 12 bp, Artificial Sequence
  Oligonucleotide primer for the detection of SNP TSC0001912
taatatttatta

SEQ ID NO: 269875 - DNA, 12 bp, Artificial Sequence
  Oligonucleotide primer for the detection of SNP TSC0001913
tcattttttttt

SEQ ID NO: 269876 - DNA, 12 bp, Artificial Sequence
  Oligonucleotide primer for the detection of SNP TSC0001913
agttttttgttt

SEQ ID NO: 269877 - DNA, 12 bp, Artificial Sequence
  Oligonucleotide primer for the detection of SNP TSC0001913
aatttcctaccc

SEQ ID NO: 269878 - DNA, 12 bp, Artificial Sequence
  Oligonucleotide primer for the detection of SNP TSC0001914
attttgggagaa

SEQ ID NO: 269879 - DNA, 12 bp, Artificial Sequence
  Oligonucleotide primer for the detection of SNP TSC0001915
atcattttataa

SEQ ID NO: 269880 - DNA, 12 bp, Artificial Sequence
  Oligonucleotide primer for the detection of SNP TSC0001915
taattttatatt

SEQ ID NO: 269881 - DNA, 12 bp, Artificial Sequence
  Oligonucleotide primer for the detection of SNP TSC0001915
taattttatatc

SEQ ID NO: 269882 - DNA, 12 bp, Artificial Sequence
  Oligonucleotide primer for the detection of SNP TSC0001915
ttaactttacat

SEQ ID NO: 269883 - DNA, 12 bp, Artificial Sequence
  Oligonucleotide primer for the detection of SNP TSC0001915
attattttatga

SEQ ID NO: 269884 - DNA, 12 bp, Artificial Sequence
  Oligonucleotide primer for the detection of SNP TSC0001916
caacaataataa

SEQ ID NO: 269885 - DNA, 12 bp, Artificial Sequence
  Oligonucleotide primer for the detection of SNP TSC0001916
ttaagtgttagt

SEQ ID NO: 269886 - DNA, 12 bp, Artificial Sequence
  Oligonucleotide primer for the detection of SNP TSC0001916
ttaaatattaat

SEQ ID NO: 269887 - DNA, 12 bp, Artificial Sequence
  Oligonucleotide primer for the detection of SNP TSC0001916
tagtaataatga

SEQ ID NO: 269888 - DNA, 12 bp, Artificial Sequence
  Oligonucleotide primer for the detection of SNP TSC0001917
atataataacct

SEQ ID NO: 269889 - DNA, 12 bp, Artificial Sequence
  Oligonucleotide primer for the detection of SNP TSC0001917
tgttttagtatt

SEQ ID NO: 269890 - DNA, 12 bp, Artificial Sequence
  Oligonucleotide primer for the detection of SNP TSC0001917
tatttcaacatt

SEQ ID NO: 269891 - DNA, 12 bp, Artificial Sequence
  Oligonucleotide primer for the detection of SNP TSC0001917
gtgtaataattt

SEQ ID NO: 269892 - DNA, 12 bp, Artificial Sequence
  Oligonucleotide primer for the detection of SNP TSC0001919
cataccactttt

SEQ ID NO: 269893 - DNA, 12 bp, Artificial Sequence
  Oligonucleotide primer for the detection of SNP TSC0001919
cataccgctttt

SEQ ID NO: 269894 - DNA, 12 bp, Artificial Sequence
  Oligonucleotide primer for the detection of SNP TSC0001919
cgtaccactttt

SEQ ID NO: 269895 - DNA, 12 bp, Artificial Sequence
  Oligonucleotide primer for the detection of SNP TSC0001919
cgtaccgctttt

SEQ ID NO: 269896 - DNA, 12 bp, Artificial Sequence
  Oligonucleotide primer for the detection of SNP TSC0001919
tgggttaaagaa

SEQ ID NO: 269897 - DNA, 12 bp, Artificial Sequence
  Oligonucleotide primer for the detection of SNP TSC0001920
accacaacaaca

SEQ ID NO: 269898 - DNA, 12 bp, Artificial Sequence
  Oligonucleotide primer for the detection of SNP TSC0001920
accacaacaacg

SEQ ID NO: 269899 - DNA, 12 bp, Artificial Sequence
  Oligonucleotide primer for the detection of SNP TSC0001920
accgcaacaaca

SEQ ID NO: 269900 - DNA, 12 bp, Artificial Sequence
  Oligonucleotide primer for the detection of SNP TSC0001920
accgcaacaacg

SEQ ID NO: 269901 - DNA, 12 bp, Artificial Sequence
  Oligonucleotide primer for the detection of SNP TSC0001920
tataaattttgt

SEQ ID NO: 269902 - DNA, 12 bp, Artificial Sequence
  Oligonucleotide primer for the detection of SNP TSC0001920
tataaattttgc

SEQ ID NO: 269903 - DNA, 12 bp, Artificial Sequence
  Oligonucleotide primer for the detection of SNP TSC0001920
tcacaaactcta

SEQ ID NO: 269904 - DNA, 12 bp, Artificial Sequence
  Oligonucleotide primer for the detection of SNP TSC0001920
aattgtagtagt

SEQ ID NO: 269905 - DNA, 12 bp, Artificial Sequence
  Oligonucleotide primer for the detection of SNP TSC0001920
aatcgtagtagt

SEQ ID NO: 269906 - DNA, 12 bp, Artificial Sequence
  Oligonucleotide primer for the detection of SNP TSC0001920
aattgtagtagc

SEQ ID NO: 269907 - DNA, 12 bp, Artificial Sequence
  Oligonucleotide primer for the detection of SNP TSC0001920
aatcgtagtagc

SEQ ID NO: 269908 - DNA, 12 bp, Artificial Sequence
  Oligonucleotide primer for the detection of SNP TSC0001921
aaacccccaaac

SEQ ID NO: 269909 - DNA, 12 bp, Artificial Sequence
  Oligonucleotide primer for the detection of SNP TSC0001921
aatgtgtatatg

SEQ ID NO: 269910 - DNA, 12 bp, Artificial Sequence
  Oligonucleotide primer for the detection of SNP TSC0001922
caaacacccaca

SEQ ID NO: 269911 - DNA, 12 bp, Artificial Sequence
  Oligonucleotide primer for the detection of SNP TSC0001922
cgaacacccaca

SEQ ID NO: 269912 - DNA, 12 bp, Artificial Sequence
  Oligonucleotide primer for the detection of SNP TSC0001922
tatttaggtgtg

SEQ ID NO: 269913 - DNA, 12 bp, Artificial Sequence
  Oligonucleotide primer for the detection of SNP TSC0001922
tatttaggcgtg

SEQ ID NO: 269914 - DNA, 12 bp, Artificial Sequence
  Oligonucleotide primer for the detection of SNP TSC0001922
tatccaaacata

SEQ ID NO: 269915 - DNA, 12 bp, Artificial Sequence
  Oligonucleotide primer for the detection of SNP TSC0001922
tatccaaacgta

SEQ ID NO: 269916 - DNA, 12 bp, Artificial Sequence
  Oligonucleotide primer for the detection of SNP TSC0001922
tgggtatttata

SEQ ID NO: 269917 - DNA, 12 bp, Artificial Sequence
  Oligonucleotide primer for the detection of SNP TSC0001922
cgggtatttata

SEQ ID NO: 269918 - DNA, 12 bp, Artificial Sequence
  Oligonucleotide primer for the detection of SNP TSC0001923
tgagtttaagta

SEQ ID NO: 269919 - DNA, 12 bp, Artificial Sequence
  Oligonucleotide primer for the detection of SNP TSC0001924
ctttctaaaaaa

SEQ ID NO: 269920 - DNA, 12 bp, Artificial Sequence
  Oligonucleotide primer for the detection of SNP TSC0001924
attagagttatg

SEQ ID NO: 269921 - DNA, 12 bp, Artificial Sequence
  Oligonucleotide primer for the detection of SNP TSC0001925
tttaatttaata

SEQ ID NO: 269922 - DNA, 12 bp, Artificial Sequence
  Oligonucleotide primer for the detection of SNP TSC0001925
aaaaaatagaat

SEQ ID NO: 269923 - DNA, 12 bp, Artificial Sequence
  Oligonucleotide primer for the detection of SNP TSC0001925
aaaaaacaaaat

SEQ ID NO: 269924 - DNA, 12 bp, Artificial Sequence
  Oligonucleotide primer for the detection of SNP TSC0001925
ttagtttgatgt

SEQ ID NO: 269925 - DNA, 12 bp, Artificial Sequence
  Oligonucleotide primer for the detection of SNP TSC0001926
ctaaactattac

SEQ ID NO: 269926 - DNA, 12 bp, Artificial Sequence
  Oligonucleotide primer for the detection of SNP TSC0001926
attagaaggtta

SEQ ID NO: 269927 - DNA, 12 bp, Artificial Sequence
  Oligonucleotide primer for the detection of SNP TSC0001928
aatctcataaaa

SEQ ID NO: 269928 - DNA, 12 bp, Artificial Sequence
  Oligonucleotide primer for the detection of SNP TSC0001928
atggtttatatt

SEQ ID NO: 269929 - DNA, 12 bp, Artificial Sequence
  Oligonucleotide primer for the detection of SNP TSC0001928
cctatattaaaa

SEQ ID NO: 269930 - DNA, 12 bp, Artificial Sequence
  Oligonucleotide primer for the detection of SNP TSC0001928
attttataaaat

SEQ ID NO: 269931 - DNA, 12 bp, Artificial Sequence
  Oligonucleotide primer for the detection of SNP TSC0001929
taacaaaatcca

SEQ ID NO: 269932 - DNA, 12 bp, Artificial Sequence
  Oligonucleotide primer for the detection of SNP TSC0001929
ttaggattttgt

SEQ ID NO: 269933 - DNA, 12 bp, Artificial Sequence
  Oligonucleotide primer for the detection of SNP TSC0001929
aaaaccctataa

SEQ ID NO: 269934 - DNA, 12 bp, Artificial Sequence
  Oligonucleotide primer for the detection of SNP TSC0001929
tgatagagttta

SEQ ID NO: 269935 - DNA, 12 bp, Artificial Sequence
  Oligonukleotid-Primer
ataaaatataac

SEQ ID NO: 269936 - DNA, 12 bp, Artificial Sequence
  Oligonucleotide primer for the detection of SNP TSC0001930
atttaaaagatg

SEQ ID NO: 269937 - DNA, 12 bp, Artificial Sequence
  Oligonucleotide primer for the detection of SNP TSC0001931
ctccctcttacc

SEQ ID NO: 269938 - DNA, 12 bp, Artificial Sequence
  Oligonucleotide primer for the detection of SNP TSC0001931
aggtagaaggaa

SEQ ID NO: 269939 - DNA, 12 bp, Artificial Sequence
  Oligonucleotide primer for the detection of SNP TSC0001931
aaacaaaaaaaa

SEQ ID NO: 269940 - DNA, 12 bp, Artificial Sequence
  Oligonucleotide primer for the detection of SNP TSC0001931
tttttttttgtt

SEQ ID NO: 269941 - DNA, 12 bp, Artificial Sequence
  Oligonucleotide primer for the detection of SNP TSC0001934
aattaaacaact

SEQ ID NO: 269942 - DNA, 12 bp, Artificial Sequence
  Oligonucleotide primer for the detection of SNP TSC0001934
attatatgtgta

SEQ ID NO: 269943 - DNA, 12 bp, Artificial Sequence
  Oligonucleotide primer for the detection of SNP TSC0001934
accacatatata

SEQ ID NO: 269944 - DNA, 12 bp, Artificial Sequence
  Oligonucleotide primer for the detection of SNP TSC0001934
aattggatagtt

SEQ ID NO: 269945 - DNA, 12 bp, Artificial Sequence
  Oligonucleotide primer for the detection of SNP TSC0001935
taacaacatcct

SEQ ID NO: 269946 - DNA, 12 bp, Artificial Sequence
  Oligonucleotide primer for the detection of SNP TSC0001935
gtagttttttag

SEQ ID NO: 269947 - DNA, 12 bp, Artificial Sequence
  Oligonucleotide primer for the detection of SNP TSC0001938
tattaaaataaa

SEQ ID NO: 269948 - DNA, 12 bp, Artificial Sequence
  Oligonucleotide primer for the detection of SNP TSC0001938
ttattgaggtat

SEQ ID NO: 269949 - DNA, 12 bp, Artificial Sequence
  Oligonucleotide primer for the detection of SNP TSC0001938
ttatcgaggtat

SEQ ID NO: 269950 - DNA, 12 bp, Artificial Sequence
  Oligonucleotide primer for the detection of SNP TSC0001938
tcatcaaaacat

SEQ ID NO: 269951 - DNA, 12 bp, Artificial Sequence
  Oligonucleotide primer for the detection of SNP TSC0001938
tcatcgaaacat

SEQ ID NO: 269952 - DNA, 12 bp, Artificial Sequence
  Oligonucleotide primer for the detection of SNP TSC0001938
tattgggatgga

SEQ ID NO: 269953 - DNA, 12 bp, Artificial Sequence
  Oligonucleotide primer for the detection of SNP TSC0001939
actactaactct

SEQ ID NO: 269954 - DNA, 12 bp, Artificial Sequence
  Oligonucleotide primer for the detection of SNP TSC0001939
ttgatgtttgtg

SEQ ID NO: 269955 - DNA, 12 bp, Artificial Sequence
  Oligonucleotide primer for the detection of SNP TSC0001941
aaataaactacc

SEQ ID NO: 269956 - DNA, 12 bp, Artificial Sequence
  Oligonucleotide primer for the detection of SNP TSC0001941
taaatttattga

SEQ ID NO: 269957 - DNA, 12 bp, Artificial Sequence
  Oligonucleotide primer for the detection of SNP TSC0001944
ataaaatttaat

SEQ ID NO: 269958 - DNA, 12 bp, Artificial Sequence
  Oligonucleotide primer for the detection of SNP TSC0001944
tttttttattta

SEQ ID NO: 269959 - DNA, 12 bp, Artificial Sequence
  Oligonucleotide primer for the detection of SNP TSC0001945
ccaaacaaaaaa

SEQ ID NO: 269960 - DNA, 12 bp, Artificial Sequence
  Oligonucleotide primer for the detection of SNP TSC0001945
agttttttggtt

SEQ ID NO: 269961 - DNA, 12 bp, Artificial Sequence
  Oligonucleotide primer for the detection of SNP TSC0001946
ataacattaatt

SEQ ID NO: 269962 - DNA, 12 bp, Artificial Sequence
  Oligonucleotide primer for the detection of SNP TSC0001946
tttgtaaaaatg

SEQ ID NO: 269963 - DNA, 12 bp, Artificial Sequence
  Oligonucleotide primer for the detection of SNP TSC0001947
caaattacaaaa

SEQ ID NO: 269964 - DNA, 12 bp, Artificial Sequence
  Oligonucleotide primer for the detection of SNP TSC0001947
tttttgagtttt

SEQ ID NO: 269965 - DNA, 12 bp, Artificial Sequence
  Oligonucleotide primer for the detection of SNP TSC0001947
ttctaaattcta

SEQ ID NO: 269966 - DNA, 12 bp, Artificial Sequence
  Oligonucleotide primer for the detection of SNP TSC0001947
tttataaattat

SEQ ID NO: 269967 - DNA, 12 bp, Artificial Sequence
  Oligonucleotide primer for the detection of SNP TSC0001948
aatcttcaactt

SEQ ID NO: 269968 - DNA, 12 bp, Artificial Sequence
  Oligonucleotide primer for the detection of SNP TSC0001948
gagatgatagta

SEQ ID NO: 269969 - DNA, 12 bp, Artificial Sequence
  Oligonucleotide primer for the detection of SNP TSC0001948
gagacgatagta

SEQ ID NO: 269970 - DNA, 12 bp, Artificial Sequence
  Oligonucleotide primer for the detection of SNP TSC0001949
aatacatcccat

SEQ ID NO: 269971 - DNA, 12 bp, Artificial Sequence
  Oligonucleotide primer for the detection of SNP TSC0001949
attttaaaaaat

SEQ ID NO: 269972 - DNA, 12 bp, Artificial Sequence
  Oligonucleotide primer for the detection of SNP TSC0001949
caccccaaaaaa

SEQ ID NO: 269973 - DNA, 12 bp, Artificial Sequence
  Oligonucleotide primer for the detection of SNP TSC0001949
aatgtattttat

SEQ ID NO: 269974 - DNA, 12 bp, Artificial Sequence
  Oligonucleotide primer for the detection of SNP TSC0001951
taaaaacccaaa

SEQ ID NO: 269975 - DNA, 12 bp, Artificial Sequence
  Oligonucleotide primer for the detection of SNP TSC0001951
atttggttttgt

SEQ ID NO: 269976 - DNA, 12 bp, Artificial Sequence
  Oligonucleotide primer for the detection of SNP TSC0001951
attcggttttgt

SEQ ID NO: 269977 - DNA, 12 bp, Artificial Sequence
  Oligonucleotide primer for the detection of SNP TSC0001951
atttggtttcgt

SEQ ID NO: 269978 - DNA, 12 bp, Artificial Sequence
  Oligonucleotide primer for the detection of SNP TSC0001951
attcggtttcgt

SEQ ID NO: 269979 - DNA, 12 bp, Artificial Sequence
  Oligonucleotide primer for the detection of SNP TSC0001951
acccaactccac

SEQ ID NO: 269980 - DNA, 12 bp, Artificial Sequence
  Oligonucleotide primer for the detection of SNP TSC0001951
acccaactccgc

SEQ ID NO: 269981 - DNA, 12 bp, Artificial Sequence
  Oligonucleotide primer for the detection of SNP TSC0001951
acccgactccac

SEQ ID NO: 269982 - DNA, 12 bp, Artificial Sequence
  Oligonucleotide primer for the detection of SNP TSC0001951
acccgactccgc

SEQ ID NO: 269983 - DNA, 12 bp, Artificial Sequence
  Oligonucleotide primer for the detection of SNP TSC0001951
ttaagaatttag

SEQ ID NO: 269984 - DNA, 12 bp, Artificial Sequence
  Oligonucleotide primer for the detection of SNP TSC0001952
ctaatacaaatt

SEQ ID NO: 269985 - DNA, 12 bp, Artificial Sequence
  Oligonucleotide primer for the detection of SNP TSC0001952
taaatattttta

SEQ ID NO: 269986 - DNA, 12 bp, Artificial Sequence
  Oligonucleotide primer for the detection of SNP TSC0001952
caaatatcctca

SEQ ID NO: 269987 - DNA, 12 bp, Artificial Sequence
  Oligonucleotide primer for the detection of SNP TSC0001952
ttggtgtagatt

SEQ ID NO: 269988 - DNA, 12 bp, Artificial Sequence
  Oligonucleotide primer for the detection of SNP TSC0001954
attactacacta

SEQ ID NO: 269989 - DNA, 12 bp, Artificial Sequence
  Oligonucleotide primer for the detection of SNP TSC0001954
gtttaggttggt

SEQ ID NO: 269990 - DNA, 12 bp, Artificial Sequence
  Oligonucleotide primer for the detection of SNP TSC0001954
gtttaggttggc

SEQ ID NO: 269991 - DNA, 12 bp, Artificial Sequence
  Oligonucleotide primer for the detection of SNP TSC0001954
acccaaactaac

SEQ ID NO: 269992 - DNA, 12 bp, Artificial Sequence
  Oligonucleotide primer for the detection of SNP TSC0001954
gttgttgtattg

SEQ ID NO: 269993 - DNA, 12 bp, Artificial Sequence
  Oligonucleotide primer for the detection of SNP TSC0001955
tataaccttaat

SEQ ID NO: 269994 - DNA, 12 bp, Artificial Sequence
  Oligonucleotide primer for the detection of SNP TSC0001955
gtggtagtgttg

SEQ ID NO: 269995 - DNA, 12 bp, Artificial Sequence
  Oligonucleotide primer for the detection of SNP TSC0001955
ataacaatacta

SEQ ID NO: 269996 - DNA, 12 bp, Artificial Sequence
  Oligonucleotide primer for the detection of SNP TSC0001955
tgtgattttagt

SEQ ID NO: 269997 - DNA, 12 bp, Artificial Sequence
  Oligonucleotide primer for the detection of SNP TSC0001956
taaacctaaaat

SEQ ID NO: 269998 - DNA, 12 bp, Artificial Sequence
  Oligonucleotide primer for the detection of SNP TSC0001956
taggattatata

SEQ ID NO: 269999 - DNA, 12 bp, Artificial Sequence
  Oligonucleotide primer for the detection of SNP TSC0001957
cttttaataaat

SEQ ID NO: 270000 - DNA, 12 bp, Artificial Sequence
  Oligonucleotide primer for the detection of SNP TSC0001957
taaatttaaata

SEQ ID NO: 270001 - DNA, 12 bp, Artificial Sequence
  Oligonucleotide primer for the detection of SNP TSC0001958
aaattaactaaa

SEQ ID NO: 270002 - DNA, 12 bp, Artificial Sequence
  Oligonucleotide primer for the detection of SNP TSC0001958
tgtttgttaata

SEQ ID NO: 270003 - DNA, 12 bp, Artificial Sequence
  Oligonucleotide primer for the detection of SNP TSC0001958
cgtttgttaata

SEQ ID NO: 270004 - DNA, 12 bp, Artificial Sequence
  Oligonucleotide primer for the detection of SNP TSC0001958
tgttcgttaata

SEQ ID NO: 270005 - DNA, 12 bp, Artificial Sequence
  Oligonucleotide primer for the detection of SNP TSC0001958
cgttcgttaata

SEQ ID NO: 270006 - DNA, 12 bp, Artificial Sequence
  Oligonucleotide primer for the detection of SNP TSC0001958
cacccaccaata

SEQ ID NO: 270007 - DNA, 12 bp, Artificial Sequence
  Oligonucleotide primer for the detection of SNP TSC0001958
cacccgccaata

SEQ ID NO: 270008 - DNA, 12 bp, Artificial Sequence
  Oligonucleotide primer for the detection of SNP TSC0001958
cgcccaccaata

SEQ ID NO: 270009 - DNA, 12 bp, Artificial Sequence
  Oligonucleotide primer for the detection of SNP TSC0001958
cgcccgccaata

SEQ ID NO: 270010 - DNA, 12 bp, Artificial Sequence
  Oligonucleotide primer for the detection of SNP TSC0001958
aattagttgggt

SEQ ID NO: 270011 - DNA, 12 bp, Artificial Sequence
  Oligonucleotide primer for the detection of SNP TSC0001958
aattagttgggc

SEQ ID NO: 270012 - DNA, 12 bp, Artificial Sequence
  Oligonukleotid-Primer
catctattcaaa

SEQ ID NO: 270013 - DNA, 12 bp, Artificial Sequence
  Oligonucleotide primer for the detection of SNP TSC0001959
attaggaaaatg

SEQ ID NO: 270014 - DNA, 12 bp, Artificial Sequence
  Oligonucleotide primer for the detection of SNP TSC0001959
attaaaaaaata

SEQ ID NO: 270015 - DNA, 12 bp, Artificial Sequence
  Oligonucleotide primer for the detection of SNP TSC0001959
gtttatttgttt

SEQ ID NO: 270016 - DNA, 12 bp, Artificial Sequence
  Oligonucleotide primer for the detection of SNP TSC0001960
ctattttcaatc

SEQ ID NO: 270017 - DNA, 12 bp, Artificial Sequence
  Oligonucleotide primer for the detection of SNP TSC0001960
gttaagtgagga

SEQ ID NO: 270018 - DNA, 12 bp, Artificial Sequence
  Oligonucleotide primer for the detection of SNP TSC0001960
atcaaataaaaa

SEQ ID NO: 270019 - DNA, 12 bp, Artificial Sequence
  Oligonucleotide primer for the detection of SNP TSC0001960
ttatttttaatt

SEQ ID NO: 270020 - DNA, 12 bp, Artificial Sequence
  Oligonucleotide primer for the detection of SNP TSC0001961
aaaaaaaatcaa

SEQ ID NO: 270021 - DNA, 12 bp, Artificial Sequence
  Oligonucleotide primer for the detection of SNP TSC0001961
aagttaatgagt

SEQ ID NO: 270022 - DNA, 12 bp, Artificial Sequence
  Oligonucleotide primer for the detection of SNP TSC0001961
aaatcaataaac

SEQ ID NO: 270023 - DNA, 12 bp, Artificial Sequence
  Oligonucleotide primer for the detection of SNP TSC0001961
aaaaaagattag

SEQ ID NO: 270024 - DNA, 12 bp, Artificial Sequence
  Oligonucleotide primer for the detection of SNP TSC0001962
ctaaaacccaaa

SEQ ID NO: 270025 - DNA, 12 bp, Artificial Sequence
  Oligonucleotide primer for the detection of SNP TSC0001962
tttttgtttttc

SEQ ID NO: 270026 - DNA, 12 bp, Artificial Sequence
  Oligonucleotide primer for the detection of SNP TSC0001962
ccccctttatct

SEQ ID NO: 270027 - DNA, 12 bp, Artificial Sequence
  Oligonucleotide primer for the detection of SNP TSC0001962
ttttgggattta

SEQ ID NO: 270028 - DNA, 12 bp, Artificial Sequence
  Oligonucleotide primer for the detection of SNP TSC0001963
aataacccaaaa

SEQ ID NO: 270029 - DNA, 12 bp, Artificial Sequence
  Oligonucleotide primer for the detection of SNP TSC0001963
tattagagaagt

SEQ ID NO: 270030 - DNA, 12 bp, Artificial Sequence
  Oligonucleotide primer for the detection of SNP TSC0001963
catcaaaaaaac

SEQ ID NO: 270031 - DNA, 12 bp, Artificial Sequence
  Oligonucleotide primer for the detection of SNP TSC0001963
gtggtttagggt

SEQ ID NO: 270032 - DNA, 12 bp, Artificial Sequence
  Oligonucleotide primer for the detection of SNP TSC0001963
gtggtttagggc

SEQ ID NO: 270033 - DNA, 12 bp, Artificial Sequence
  Oligonucleotide primer for the detection of SNP TSC0001964
aaaatatactaa

SEQ ID NO: 270034 - DNA, 12 bp, Artificial Sequence
  Oligonucleotide primer for the detection of SNP TSC0001964
tatatttataat

SEQ ID NO: 270035 - DNA, 12 bp, Artificial Sequence
  Oligonucleotide primer for the detection of SNP TSC0001964
tatatttataac

SEQ ID NO: 270036 - DNA, 12 bp, Artificial Sequence
  Oligonucleotide primer for the detection of SNP TSC0001964
tacattcataac

SEQ ID NO: 270037 - DNA, 12 bp, Artificial Sequence
  Oligonucleotide primer for the detection of SNP TSC0001964
aaaatgtgttgg

SEQ ID NO: 270038 - DNA, 12 bp, Artificial Sequence
  Oligonucleotide primer for the detection of SNP TSC0001966
cctatctattct

SEQ ID NO: 270039 - DNA, 12 bp, Artificial Sequence
  Oligonucleotide primer for the detection of SNP TSC0001966
aaggtttagatg

SEQ ID NO: 270040 - DNA, 12 bp, Artificial Sequence
  Oligonucleotide primer for the detection of SNP TSC0001969
tactactcatta

SEQ ID NO: 270041 - DNA, 12 bp, Artificial Sequence
  Oligonucleotide primer for the detection of SNP TSC0001969
attggttaagtt

SEQ ID NO: 270042 - DNA, 12 bp, Artificial Sequence
  Oligonucleotide primer for the detection of SNP TSC0001969
aactaactaaac

SEQ ID NO: 270043 - DNA, 12 bp, Artificial Sequence
  Oligonucleotide primer for the detection of SNP TSC0001969
gtttattgtttt

SEQ ID NO: 270044 - DNA, 12 bp, Artificial Sequence
  Oligonucleotide primer for the detection of SNP TSC0001972
acataattccca

SEQ ID NO: 270045 - DNA, 12 bp, Artificial Sequence
  Oligonucleotide primer for the detection of SNP TSC0001972
gaataggaaatt

SEQ ID NO: 270046 - DNA, 12 bp, Artificial Sequence
  Oligonucleotide primer for the detection of SNP TSC0001972
taaacaaaaaac

SEQ ID NO: 270047 - DNA, 12 bp, Artificial Sequence
  Oligonucleotide primer for the detection of SNP TSC0001972
aatatggttttt

SEQ ID NO: 270048 - DNA, 12 bp, Artificial Sequence
  Oligonucleotide primer for the detection of SNP TSC0001974
atttattaacct

SEQ ID NO: 270049 - DNA, 12 bp, Artificial Sequence
  Oligonucleotide primer for the detection of SNP TSC0001974
gtatagtgaata

SEQ ID NO: 270050 - DNA, 12 bp, Artificial Sequence
  Oligonucleotide primer for the detection of SNP TSC0001976
taaaactcaatc

SEQ ID NO: 270051 - DNA, 12 bp, Artificial Sequence
  Oligonucleotide primer for the detection of SNP TSC0001976
attttatatttg

SEQ ID NO: 270052 - DNA, 12 bp, Artificial Sequence
  Oligonucleotide primer for the detection of SNP TSC0001976
actccacattta

SEQ ID NO: 270053 - DNA, 12 bp, Artificial Sequence
  Oligonucleotide primer for the detection of SNP TSC0001976
aagtttagtttt

SEQ ID NO: 270054 - DNA, 12 bp, Artificial Sequence
  Oligonucleotide primer for the detection of SNP TSC0001977
caactctaacaa

SEQ ID NO: 270055 - DNA, 12 bp, Artificial Sequence
  Oligonucleotide primer for the detection of SNP TSC0001977
taaaattttagt

SEQ ID NO: 270056 - DNA, 12 bp, Artificial Sequence
  Oligonucleotide primer for the detection of SNP TSC0001977
caaaatttcaat

SEQ ID NO: 270057 - DNA, 12 bp, Artificial Sequence
  Oligonucleotide primer for the detection of SNP TSC0001977
tagttttaatag

SEQ ID NO: 270058 - DNA, 12 bp, Artificial Sequence
  Oligonucleotide primer for the detection of SNP TSC0001980
ataaataaccta

SEQ ID NO: 270059 - DNA, 12 bp, Artificial Sequence
  Oligonucleotide primer for the detection of SNP TSC0001980
gtaatttaggag

SEQ ID NO: 270060 - DNA, 12 bp, Artificial Sequence
  Oligonucleotide primer for the detection of SNP TSC0001980
taacttaaaaaa

SEQ ID NO: 270061 - DNA, 12 bp, Artificial Sequence
  Oligonucleotide primer for the detection of SNP TSC0001980
atgggtgattta

SEQ ID NO: 270062 - DNA, 12 bp, Artificial Sequence
  Oligonucleotide primer for the detection of SNP TSC0001981
tacacactcctc

SEQ ID NO: 270063 - DNA, 12 bp, Artificial Sequence
  Oligonucleotide primer for the detection of SNP TSC0001981
gttatgtaaaag

SEQ ID NO: 270064 - DNA, 12 bp, Artificial Sequence
  Oligonucleotide primer for the detection of SNP TSC0001982
aaaaatataaac

SEQ ID NO: 270065 - DNA, 12 bp, Artificial Sequence
  Oligonucleotide primer for the detection of SNP TSC0001982
tatttggatgaa

SEQ ID NO: 270066 - DNA, 12 bp, Artificial Sequence
  Oligonucleotide primer for the detection of SNP TSC0001983
tgtatgtatttt

SEQ ID NO: 270067 - DNA, 12 bp, Artificial Sequence
  Oligonucleotide primer for the detection of SNP TSC0001983
tatatatattct

SEQ ID NO: 270068 - DNA, 12 bp, Artificial Sequence
  Oligonucleotide primer for the detection of SNP TSC0001983
taaggaaaaaaa

SEQ ID NO: 270069 - DNA, 12 bp, Artificial Sequence
  Oligonucleotide primer for the detection of SNP TSC0001984
taccccaaactt

SEQ ID NO: 270070 - DNA, 12 bp, Artificial Sequence
  Oligonucleotide primer for the detection of SNP TSC0001984
taaggatattta

SEQ ID NO: 270071 - DNA, 12 bp, Artificial Sequence
  Oligonucleotide primer for the detection of SNP TSC0001985
tttaaaaactac

SEQ ID NO: 270072 - DNA, 12 bp, Artificial Sequence
  Oligonucleotide primer for the detection of SNP TSC0001985
tagatgttttta

SEQ ID NO: 270073 - DNA, 12 bp, Artificial Sequence
  Oligonucleotide primer for the detection of SNP TSC0001985
tagacgttttta

SEQ ID NO: 270074 - DNA, 12 bp, Artificial Sequence
  Oligonucleotide primer for the detection of SNP TSC0001986
ttcccttatatt

SEQ ID NO: 270075 - DNA, 12 bp, Artificial Sequence
  Oligonucleotide primer for the detection of SNP TSC0001986
tttatattttga

SEQ ID NO: 270076 - DNA, 12 bp, Artificial Sequence
  Oligonucleotide primer for the detection of SNP TSC0001987
gatgggtgattt

SEQ ID NO: 270077 - DNA, 12 bp, Artificial Sequence
  Oligonucleotide primer for the detection of SNP TSC0001987
aataaataacct

SEQ ID NO: 270078 - DNA, 12 bp, Artificial Sequence
  Oligonucleotide primer for the detection of SNP TSC0001987
aatttaggagat

SEQ ID NO: 270079 - DNA, 12 bp, Artificial Sequence
  Oligonucleotide primer for the detection of SNP TSC0001988
taaaatatataa

SEQ ID NO: 270080 - DNA, 12 bp, Artificial Sequence
  Oligonucleotide primer for the detection of SNP TSC0001988
gaagtagtatat

SEQ ID NO: 270081 - DNA, 12 bp, Artificial Sequence
  Oligonucleotide primer for the detection of SNP TSC0001988
aaaaataatata

SEQ ID NO: 270082 - DNA, 12 bp, Artificial Sequence
  Oligonucleotide primer for the detection of SNP TSC0001988
aatgaggtgtat

SEQ ID NO: 270083 - DNA, 12 bp, Artificial Sequence
  Oligonucleotide primer for the detection of SNP TSC0001989
tatcttatacac

SEQ ID NO: 270084 - DNA, 12 bp, Artificial Sequence
  Oligonucleotide primer for the detection of SNP TSC0001989
ttgaagtaatga

SEQ ID NO: 270085 - DNA, 12 bp, Artificial Sequence
  Oligonucleotide primer for the detection of SNP TSC0001990
acattaataccc

SEQ ID NO: 270086 - DNA, 12 bp, Artificial Sequence
  Oligonucleotide primer for the detection of SNP TSC0001990
gcattaataccc

SEQ ID NO: 270087 - DNA, 12 bp, Artificial Sequence
  Oligonucleotide primer for the detection of SNP TSC0001990
tatatattattg

SEQ ID NO: 270088 - DNA, 12 bp, Artificial Sequence
  Oligonucleotide primer for the detection of SNP TSC0001990
tatatattatcg

SEQ ID NO: 270089 - DNA, 12 bp, Artificial Sequence
  Oligonucleotide primer for the detection of SNP TSC0001994
aacctccacccc

SEQ ID NO: 270090 - DNA, 12 bp, Artificial Sequence
  Oligonucleotide primer for the detection of SNP TSC0001994
tttttgtatttg

SEQ ID NO: 270091 - DNA, 12 bp, Artificial Sequence
  Oligonucleotide primer for the detection of SNP TSC0001994
ttttcgtatttg

SEQ ID NO: 270092 - DNA, 12 bp, Artificial Sequence
  Oligonucleotide primer for the detection of SNP TSC0001995
atttctttacac

SEQ ID NO: 270093 - DNA, 12 bp, Artificial Sequence
  Oligonucleotide primer for the detection of SNP TSC0001995
ggaaaatttgag

SEQ ID NO: 270094 - DNA, 12 bp, Artificial Sequence
  Oligonucleotide primer for the detection of SNP TSC0001995
aaaaacttaaaa

SEQ ID NO: 270095 - DNA, 12 bp, Artificial Sequence
  Oligonucleotide primer for the detection of SNP TSC0001995
tttttttgtatt

SEQ ID NO: 270096 - DNA, 12 bp, Artificial Sequence
  Oligonucleotide primer for the detection of SNP TSC0001996
taattttaacta

SEQ ID NO: 270097 - DNA, 12 bp, Artificial Sequence
  Oligonukleotid-Primer
agtggtatgaat

SEQ ID NO: 270098 - DNA, 12 bp, Artificial Sequence
  Oligonucleotide primer for the detection of SNP TSC0001996
aataatataaac

SEQ ID NO: 270099 - DNA, 12 bp, Artificial Sequence
  Oligonucleotide primer for the detection of SNP TSC0001996
tagttttggttg

SEQ ID NO: 270100 - DNA, 12 bp, Artificial Sequence
  Oligonucleotide primer for the detection of SNP TSC0001999
ccacaataatcc

SEQ ID NO: 270101 - DNA, 12 bp, Artificial Sequence
  Oligonucleotide primer for the detection of SNP TSC0001999
tggagtagtata

SEQ ID NO: 270102 - DNA, 12 bp, Artificial Sequence
  Oligonucleotide primer for the detection of SNP TSC0002000
actaaaataaaa

SEQ ID NO: 270103 - DNA, 12 bp, Artificial Sequence
  Oligonucleotide primer for the detection of SNP TSC0002000
tagaattggtta

SEQ ID NO: 270104 - DNA, 12 bp, Artificial Sequence
  Oligonucleotide primer for the detection of SNP TSC0002000
taaaattaacca

SEQ ID NO: 270105 - DNA, 12 bp, Artificial Sequence
  Oligonucleotide primer for the detection of SNP TSC0002000
attgaaatggga

SEQ ID NO: 270106 - DNA, 12 bp, Artificial Sequence
  Oligonucleotide primer for the detection of SNP TSC0002001
cataacaccaac

SEQ ID NO: 270107 - DNA, 12 bp, Artificial Sequence
  Oligonucleotide primer for the detection of SNP TSC0002001
tttgattgatag

SEQ ID NO: 270108 - DNA, 12 bp, Artificial Sequence
  Oligonucleotide primer for the detection of SNP TSC0002002
aaaaacttctat

SEQ ID NO: 270109 - DNA, 12 bp, Artificial Sequence
  Oligonucleotide primer for the detection of SNP TSC0002002
ttatgaattaaa

SEQ ID NO: 270110 - DNA, 12 bp, Artificial Sequence
  Oligonucleotide primer for the detection of SNP TSC0002002
ttataaatcaaa

SEQ ID NO: 270111 - DNA, 12 bp, Artificial Sequence
  Oligonucleotide primer for the detection of SNP TSC0002004
cccactttttaa

SEQ ID NO: 270112 - DNA, 12 bp, Artificial Sequence
  Oligonucleotide primer for the detection of SNP TSC0002004
aaaaaaaaattt

SEQ ID NO: 270113 - DNA, 12 bp, Artificial Sequence
  Oligonucleotide primer for the detection of SNP TSC0002004
aaaaaaaaattc

SEQ ID NO: 270114 - DNA, 12 bp, Artificial Sequence
  Oligonucleotide primer for the detection of SNP TSC0002004
aaaaaaaaaccc

SEQ ID NO: 270115 - DNA, 12 bp, Artificial Sequence
  Oligonucleotide primer for the detection of SNP TSC0002004
ttattttttgat

SEQ ID NO: 270116 - DNA, 12 bp, Artificial Sequence
  Oligonucleotide primer for the detection of SNP TSC0002005
aataattcttat

SEQ ID NO: 270117 - DNA, 12 bp, Artificial Sequence
  Oligonucleotide primer for the detection of SNP TSC0002006
aactcaaattat

SEQ ID NO: 270118 - DNA, 12 bp, Artificial Sequence
  Oligonucleotide primer for the detection of SNP TSC0002006
gactcaaattat

SEQ ID NO: 270119 - DNA, 12 bp, Artificial Sequence
  Oligonucleotide primer for the detection of SNP TSC0002006
ttgaggtgggaa

SEQ ID NO: 270120 - DNA, 12 bp, Artificial Sequence
  Oligonucleotide primer for the detection of SNP TSC0002007
aattctttatat

SEQ ID NO: 270121 - DNA, 12 bp, Artificial Sequence
  Oligonucleotide primer for the detection of SNP TSC0002007
taaattttattg

SEQ ID NO: 270122 - DNA, 12 bp, Artificial Sequence
  Oligonucleotide primer for the detection of SNP TSC0002008
ctttctttcttt

SEQ ID NO: 270123 - DNA, 12 bp, Artificial Sequence
  Oligonucleotide primer for the detection of SNP TSC0002009
caacatttctat

SEQ ID NO: 270124 - DNA, 12 bp, Artificial Sequence
  Oligonucleotide primer for the detection of SNP TSC0002009
tttaagtagtaa

SEQ ID NO: 270125 - DNA, 12 bp, Artificial Sequence
  Oligonucleotide primer for the detection of SNP TSC0002009
tttaaataacaa

SEQ ID NO: 270126 - DNA, 12 bp, Artificial Sequence
  Oligonucleotide primer for the detection of SNP TSC0002009
tagtatttttgt

SEQ ID NO: 270127 - DNA, 12 bp, Artificial Sequence
  Oligonucleotide primer for the detection of SNP TSC0002010
atcctcaaaatc

SEQ ID NO: 270128 - DNA, 12 bp, Artificial Sequence
  Oligonucleotide primer for the detection of SNP TSC0002010
atcctcgaaatc

SEQ ID NO: 270129 - DNA, 12 bp, Artificial Sequence
  Oligonucleotide primer for the detection of SNP TSC0002010
agtaagaaggag

SEQ ID NO: 270130 - DNA, 12 bp, Artificial Sequence
  Oligonucleotide primer for the detection of SNP TSC0002011
taacaccaatac

SEQ ID NO: 270131 - DNA, 12 bp, Artificial Sequence
  Oligonucleotide primer for the detection of SNP TSC0002011
ttttgtttttag

SEQ ID NO: 270132 - DNA, 12 bp, Artificial Sequence
  Oligonucleotide primer for the detection of SNP TSC0002012
aaccaacataat

SEQ ID NO: 270133 - DNA, 12 bp, Artificial Sequence
  Oligonucleotide primer for the detection of SNP TSC0002012
agtagagattag

SEQ ID NO: 270134 - DNA, 12 bp, Artificial Sequence
  Oligonucleotide primer for the detection of SNP TSC0002014
acacccactaaa

SEQ ID NO: 270135 - DNA, 12 bp, Artificial Sequence
  Oligonucleotide primer for the detection of SNP TSC0002014
tggaaagtgtat

SEQ ID NO: 270136 - DNA, 12 bp, Artificial Sequence
  Oligonucleotide primer for the detection of SNP TSC0002014
taaaaaatatat

SEQ ID NO: 270137 - DNA, 12 bp, Artificial Sequence
  Oligonucleotide primer for the detection of SNP TSC0002014
atatttattggg

SEQ ID NO: 270138 - DNA, 12 bp, Artificial Sequence
  Oligonucleotide primer for the detection of SNP TSC0002015
cacataactaaa

SEQ ID NO: 270139 - DNA, 12 bp, Artificial Sequence
  Oligonucleotide primer for the detection of SNP TSC0002015
tttttgttgttt

SEQ ID NO: 270140 - DNA, 12 bp, Artificial Sequence
  Oligonucleotide primer for the detection of SNP TSC0002015
tctttattattt

SEQ ID NO: 270141 - DNA, 12 bp, Artificial Sequence
  Oligonucleotide primer for the detection of SNP TSC0002015
tatatgattgga

SEQ ID NO: 270142 - DNA, 12 bp, Artificial Sequence
  Oligonucleotide primer for the detection of SNP TSC0002016
attaaaaatacc

SEQ ID NO: 270143 - DNA, 12 bp, Artificial Sequence
  Oligonucleotide primer for the detection of SNP TSC0002016
gtattataaata

SEQ ID NO: 270144 - DNA, 12 bp, Artificial Sequence
  Oligonucleotide primer for the detection of SNP TSC0002017
tatttttatttt

SEQ ID NO: 270145 - DNA, 12 bp, Artificial Sequence
  Oligonucleotide primer for the detection of SNP TSC0002017
agttatggaaaa

SEQ ID NO: 270146 - DNA, 12 bp, Artificial Sequence
  Oligonucleotide primer for the detection of SNP TSC0002019
taatttaatcta

SEQ ID NO: 270147 - DNA, 12 bp, Artificial Sequence
  Oligonucleotide primer for the detection of SNP TSC0002019
gtattattaatt

SEQ ID NO: 270148 - DNA, 12 bp, Artificial Sequence
  Oligonucleotide primer for the detection of SNP TSC0002019
atattatcaacc

SEQ ID NO: 270149 - DNA, 12 bp, Artificial Sequence
  Oligonucleotide primer for the detection of SNP TSC0002019
taatttaattta

SEQ ID NO: 270150 - DNA, 12 bp, Artificial Sequence
  Oligonucleotide primer for the detection of SNP TSC0002020
aatcattaccta

SEQ ID NO: 270151 - DNA, 12 bp, Artificial Sequence
  Oligonucleotide primer for the detection of SNP TSC0002020
gaaaatatattt

SEQ ID NO: 270152 - DNA, 12 bp, Artificial Sequence
  Oligonucleotide primer for the detection of SNP TSC0002020
aaaaacacatct

SEQ ID NO: 270153 - DNA, 12 bp, Artificial Sequence
  Oligonucleotide primer for the detection of SNP TSC0002020
aagttattgttt

SEQ ID NO: 270154 - DNA, 12 bp, Artificial Sequence
  Oligonucleotide primer for the detection of SNP TSC0002021
acaaaaaattta

SEQ ID NO: 270155 - DNA, 12 bp, Artificial Sequence
  Oligonucleotide primer for the detection of SNP TSC0002021
atattaagaggt

SEQ ID NO: 270156 - DNA, 12 bp, Artificial Sequence
  Oligonucleotide primer for the detection of SNP TSC0002021
acattaaaaaat

SEQ ID NO: 270157 - DNA, 12 bp, Artificial Sequence
  Oligonucleotide primer for the detection of SNP TSC0002021
ataaggaattta

SEQ ID NO: 270158 - DNA, 12 bp, Artificial Sequence
  Oligonucleotide primer for the detection of SNP TSC0002022
atcaaaaaactc

SEQ ID NO: 270159 - DNA, 12 bp, Artificial Sequence
  Oligonucleotide primer for the detection of SNP TSC0002022
tttttataatag

SEQ ID NO: 270160 - DNA, 12 bp, Artificial Sequence
  Oligonucleotide primer for the detection of SNP TSC0002022
tctctacaataa

SEQ ID NO: 270161 - DNA, 12 bp, Artificial Sequence
  Oligonucleotide primer for the detection of SNP TSC0002022
ttaggaggtttt

SEQ ID NO: 270162 - DNA, 12 bp, Artificial Sequence
  Oligonucleotide primer for the detection of SNP TSC0002023
aatatatactct

SEQ ID NO: 270163 - DNA, 12 bp, Artificial Sequence
  Oligonucleotide primer for the detection of SNP TSC0002023
ggattttgataa

SEQ ID NO: 270164 - DNA, 12 bp, Artificial Sequence
  Oligonucleotide primer for the detection of SNP TSC0002023
aaaccttaataa

SEQ ID NO: 270165 - DNA, 12 bp, Artificial Sequence
  Oligonucleotide primer for the detection of SNP TSC0002023
aatatgtatttt

SEQ ID NO: 270166 - DNA, 12 bp, Artificial Sequence
  Oligonucleotide primer for the detection of SNP TSC0002026
gttagatggttg

SEQ ID NO: 270167 - DNA, 12 bp, Artificial Sequence
  Oligonucleotide primer for the detection of SNP TSC0002026
accaaataatta

SEQ ID NO: 270168 - DNA, 12 bp, Artificial Sequence
  Oligonucleotide primer for the detection of SNP TSC0002026
aaaagaatgaga

SEQ ID NO: 270169 - DNA, 12 bp, Artificial Sequence
  Oligonucleotide primer for the detection of SNP TSC0002027
ataacaataatt

SEQ ID NO: 270170 - DNA, 12 bp, Artificial Sequence
  Oligonucleotide primer for the detection of SNP TSC0002027
ttttttttttag

SEQ ID NO: 270171 - DNA, 12 bp, Artificial Sequence
  Oligonucleotide primer for the detection of SNP TSC0002027
ttcttttttcaa

SEQ ID NO: 270172 - DNA, 12 bp, Artificial Sequence
  Oligonucleotide primer for the detection of SNP TSC0002027
gtggtaatagtt

SEQ ID NO: 270173 - DNA, 12 bp, Artificial Sequence
  Oligonucleotide primer for the detection of SNP TSC0002028
taccaaataata

SEQ ID NO: 270174 - DNA, 12 bp, Artificial Sequence
  Oligonucleotide primer for the detection of SNP TSC0002028
tggtagggattt

SEQ ID NO: 270175 - DNA, 12 bp, Artificial Sequence
  Oligonucleotide primer for the detection of SNP TSC0002028
ccttaacaaaaa

SEQ ID NO: 270176 - DNA, 12 bp, Artificial Sequence
  Oligonucleotide primer for the detection of SNP TSC0002028
taaataatgttt

SEQ ID NO: 270177 - DNA, 12 bp, Artificial Sequence
  Oligonucleotide primer for the detection of SNP TSC0002029
ttataaacctat

SEQ ID NO: 270178 - DNA, 12 bp, Artificial Sequence
  Oligonucleotide primer for the detection of SNP TSC0002029
gaaatattagaa

SEQ ID NO: 270179 - DNA, 12 bp, Artificial Sequence
  Oligonucleotide primer for the detection of SNP TSC0002033
ctactaacaaaa

SEQ ID NO: 270180 - DNA, 12 bp, Artificial Sequence
  Oligonucleotide primer for the detection of SNP TSC0002033
tgagttaagttt

SEQ ID NO: 270181 - DNA, 12 bp, Artificial Sequence
  Oligonucleotide primer for the detection of SNP TSC0002033
taaactaaattt

SEQ ID NO: 270182 - DNA, 12 bp, Artificial Sequence
  Oligonucleotide primer for the detection of SNP TSC0002033
attattggtaaa

SEQ ID NO: 270183 - DNA, 12 bp, Artificial Sequence
  Oligonucleotide primer for the detection of SNP TSC0002034
taatatcttctc

SEQ ID NO: 270184 - DNA, 12 bp, Artificial Sequence
  Oligonucleotide primer for the detection of SNP TSC0002034
agaagtattttt

SEQ ID NO: 270185 - DNA, 12 bp, Artificial Sequence
  Oligonucleotide primer for the detection of SNP TSC0002034
agaagtattttc

SEQ ID NO: 270186 - DNA, 12 bp, Artificial Sequence
  Oligonucleotide primer for the detection of SNP TSC0002034
aaaaatattttc

SEQ ID NO: 270187 - DNA, 12 bp, Artificial Sequence
  Oligonucleotide primer for the detection of SNP TSC0002035
attataaactcc

SEQ ID NO: 270188 - DNA, 12 bp, Artificial Sequence
  Oligonucleotide primer for the detection of SNP TSC0002035
gaaaatgattga

SEQ ID NO: 270189 - DNA, 12 bp, Artificial Sequence
  Oligonucleotide primer for the detection of SNP TSC0002036
ttaaacatactt

SEQ ID NO: 270190 - DNA, 12 bp, Artificial Sequence
  Oligonucleotide primer for the detection of SNP TSC0002036
tgggattattaa

SEQ ID NO: 270191 - DNA, 12 bp, Artificial Sequence
  Oligonucleotide primer for the detection of SNP TSC0002036
cgggattattaa

SEQ ID NO: 270192 - DNA, 12 bp, Artificial Sequence
  Oligonucleotide primer for the detection of SNP TSC0002038
tctactttttaa

SEQ ID NO: 270193 - DNA, 12 bp, Artificial Sequence
  Oligonucleotide primer for the detection of SNP TSC0002038
aggattttgttt

SEQ ID NO: 270194 - DNA, 12 bp, Artificial Sequence
  Oligonucleotide primer for the detection of SNP TSC0002038
taaaattctatc

SEQ ID NO: 270195 - DNA, 12 bp, Artificial Sequence
  Oligonucleotide primer for the detection of SNP TSC0002038
gttttatttttt

SEQ ID NO: 270196 - DNA, 12 bp, Artificial Sequence
  Oligonucleotide primer for the detection of SNP TSC0002039
tcaaatcaataa

SEQ ID NO: 270197 - DNA, 12 bp, Artificial Sequence
  Oligonucleotide primer for the detection of SNP TSC0002039
ttatgagaattt

SEQ ID NO: 270198 - DNA, 12 bp, Artificial Sequence
  Oligonucleotide primer for the detection of SNP TSC0002039
ctataaaaatct

SEQ ID NO: 270199 - DNA, 12 bp, Artificial Sequence
  Oligonucleotide primer for the detection of SNP TSC0002039
ttagattagtgg

SEQ ID NO: 270200 - DNA, 12 bp, Artificial Sequence
  Oligonucleotide primer for the detection of SNP TSC0002041
actaaaaaaaaa

SEQ ID NO: 270201 - DNA, 12 bp, Artificial Sequence
  Oligonucleotide primer for the detection of SNP TSC0002041
tataagtaaatg

SEQ ID NO: 270202 - DNA, 12 bp, Artificial Sequence
  Oligonukleotid-Primer
ataaacaaataa

SEQ ID NO: 270203 - DNA, 12 bp, Artificial Sequence
  Oligonucleotide primer for the detection of SNP TSC0002041
attaggaaaaaa

SEQ ID NO: 270204 - DNA, 12 bp, Artificial Sequence
  Oligonucleotide primer for the detection of SNP TSC0002044
ttttcaaacatt

SEQ ID NO: 270205 - DNA, 12 bp, Artificial Sequence
  Oligonucleotide primer for the detection of SNP TSC0002044
gtttggtattta

SEQ ID NO: 270206 - DNA, 12 bp, Artificial Sequence
  Oligonucleotide primer for the detection of SNP TSC0002044
atctaacattta

SEQ ID NO: 270207 - DNA, 12 bp, Artificial Sequence
  Oligonucleotide primer for the detection of SNP TSC0002044
tttttagatatt

SEQ ID NO: 270208 - DNA, 12 bp, Artificial Sequence
  Oligonucleotide primer for the detection of SNP TSC0002046
ttaaatactact

SEQ ID NO: 270209 - DNA, 12 bp, Artificial Sequence
  Oligonucleotide primer for the detection of SNP TSC0002046
agtagttttaga

SEQ ID NO: 270210 - DNA, 12 bp, Artificial Sequence
  Oligonucleotide primer for the detection of SNP TSC0002047
tatcaaaacacc

SEQ ID NO: 270211 - DNA, 12 bp, Artificial Sequence
  Oligonucleotide primer for the detection of SNP TSC0002047
tggtaagtgtta

SEQ ID NO: 270212 - DNA, 12 bp, Artificial Sequence
  Oligonucleotide primer for the detection of SNP TSC0002047
taacaaatatca

SEQ ID NO: 270213 - DNA, 12 bp, Artificial Sequence
  Oligonucleotide primer for the detection of SNP TSC0002047
tgttaaagtatt

SEQ ID NO: 270214 - DNA, 12 bp, Artificial Sequence
  Oligonucleotide primer for the detection of SNP TSC0002048
atactaattaat

SEQ ID NO: 270215 - DNA, 12 bp, Artificial Sequence
  Oligonucleotide primer for the detection of SNP TSC0002048
agtttttttatg

SEQ ID NO: 270216 - DNA, 12 bp, Artificial Sequence
  Oligonucleotide primer for the detection of SNP TSC0002049
aacataataaaa

SEQ ID NO: 270217 - DNA, 12 bp, Artificial Sequence
  Oligonucleotide primer for the detection of SNP TSC0002049
ttttgtagagat

SEQ ID NO: 270218 - DNA, 12 bp, Artificial Sequence
  Oligonucleotide primer for the detection of SNP TSC0002049
ttttataaaaat

SEQ ID NO: 270219 - DNA, 12 bp, Artificial Sequence
  Oligonucleotide primer for the detection of SNP TSC0002049
aatatggtaaaa

SEQ ID NO: 270220 - DNA, 12 bp, Artificial Sequence
  Oligonucleotide primer for the detection of SNP TSC0002050
taaattcaaata

SEQ ID NO: 270221 - DNA, 12 bp, Artificial Sequence
  Oligonucleotide primer for the detection of SNP TSC0002050
ggagagggaatt

SEQ ID NO: 270222 - DNA, 12 bp, Artificial Sequence
  Oligonucleotide primer for the detection of SNP TSC0002050
aaaaaaaaatta

SEQ ID NO: 270223 - DNA, 12 bp, Artificial Sequence
  Oligonucleotide primer for the detection of SNP TSC0002050
aaatttaggtat

SEQ ID NO: 270224 - DNA, 12 bp, Artificial Sequence
  Oligonucleotide primer for the detection of SNP TSC0002051
ccccacctatac

SEQ ID NO: 270225 - DNA, 12 bp, Artificial Sequence
  Oligonucleotide primer for the detection of SNP TSC0002051
ataaatatagaa

SEQ ID NO: 270226 - DNA, 12 bp, Artificial Sequence
  Oligonucleotide primer for the detection of SNP TSC0002052
ttaacttttaaa

SEQ ID NO: 270227 - DNA, 12 bp, Artificial Sequence
  Oligonucleotide primer for the detection of SNP TSC0002052
gtatgtgtattt

SEQ ID NO: 270228 - DNA, 12 bp, Artificial Sequence
  Oligonucleotide primer for the detection of SNP TSC0002052
gtacgtgtattt

SEQ ID NO: 270229 - DNA, 12 bp, Artificial Sequence
  Oligonucleotide primer for the detection of SNP TSC0002052
acacatataccc

SEQ ID NO: 270230 - DNA, 12 bp, Artificial Sequence
  Oligonucleotide primer for the detection of SNP TSC0002052
acacgtataccc

SEQ ID NO: 270231 - DNA, 12 bp, Artificial Sequence
  Oligonucleotide primer for the detection of SNP TSC0002052
ttaatttttaag

SEQ ID NO: 270232 - DNA, 12 bp, Artificial Sequence
  Oligonucleotide primer for the detection of SNP TSC0002054
gtttttagatag

SEQ ID NO: 270233 - DNA, 12 bp, Artificial Sequence
  Oligonucleotide primer for the detection of SNP TSC0002055
ttaatataatct

SEQ ID NO: 270234 - DNA, 12 bp, Artificial Sequence
  Oligonucleotide primer for the detection of SNP TSC0002055
gaaattttttaa

SEQ ID NO: 270235 - DNA, 12 bp, Artificial Sequence
  Oligonucleotide primer for the detection of SNP TSC0002056
aaaataaaatcc

SEQ ID NO: 270236 - DNA, 12 bp, Artificial Sequence
  Oligonucleotide primer for the detection of SNP TSC0002056
atgttttagaga

SEQ ID NO: 270237 - DNA, 12 bp, Artificial Sequence
  Oligonucleotide primer for the detection of SNP TSC0002058
caaaatactaaa

SEQ ID NO: 270238 - DNA, 12 bp, Artificial Sequence
  Oligonucleotide primer for the detection of SNP TSC0002058
aatttttaggaa

SEQ ID NO: 270239 - DNA, 12 bp, Artificial Sequence
  Oligonucleotide primer for the detection of SNP TSC0002058
aatttctaaaaa

SEQ ID NO: 270240 - DNA, 12 bp, Artificial Sequence
  Oligonucleotide primer for the detection of SNP TSC0002058
tagaatattaag

SEQ ID NO: 270241 - DNA, 12 bp, Artificial Sequence
  Oligonucleotide primer for the detection of SNP TSC0002059
aatacctaaaac

SEQ ID NO: 270242 - DNA, 12 bp, Artificial Sequence
  Oligonucleotide primer for the detection of SNP TSC0002059
aggatatagata

SEQ ID NO: 270243 - DNA, 12 bp, Artificial Sequence
  Oligonucleotide primer for the detection of SNP TSC0002059
aaaatataaaca

SEQ ID NO: 270244 - DNA, 12 bp, Artificial Sequence
  Oligonucleotide primer for the detection of SNP TSC0002059
aatatttgaaat

SEQ ID NO: 270245 - DNA, 12 bp, Artificial Sequence
  Oligonucleotide primer for the detection of SNP TSC0002060
ataaaactacta

SEQ ID NO: 270246 - DNA, 12 bp, Artificial Sequence
  Oligonucleotide primer for the detection of SNP TSC0002060
tgtatattttat

SEQ ID NO: 270247 - DNA, 12 bp, Artificial Sequence
  Oligonucleotide primer for the detection of SNP TSC0002060
atacacacttca

SEQ ID NO: 270248 - DNA, 12 bp, Artificial Sequence
  Oligonucleotide primer for the detection of SNP TSC0002060
atgaaattgtta

SEQ ID NO: 270249 - DNA, 12 bp, Artificial Sequence
  Oligonucleotide primer for the detection of SNP TSC0002061
ctaaaattaatt

SEQ ID NO: 270250 - DNA, 12 bp, Artificial Sequence
  Oligonucleotide primer for the detection of SNP TSC0002061
gttgtgtgatga

SEQ ID NO: 270251 - DNA, 12 bp, Artificial Sequence
  Oligonucleotide primer for the detection of SNP TSC0002064
ccaaactaaaca

SEQ ID NO: 270252 - DNA, 12 bp, Artificial Sequence
  Oligonucleotide primer for the detection of SNP TSC0002064
ccaaactaaacg

SEQ ID NO: 270253 - DNA, 12 bp, Artificial Sequence
  Oligonucleotide primer for the detection of SNP TSC0002064
ggtgtaagttat

SEQ ID NO: 270254 - DNA, 12 bp, Artificial Sequence
  Oligonucleotide primer for the detection of SNP TSC0002064
ggcgtaagttat

SEQ ID NO: 270255 - DNA, 12 bp, Artificial Sequence
  Oligonucleotide primer for the detection of SNP TSC0002064
aacataaaccac

SEQ ID NO: 270256 - DNA, 12 bp, Artificial Sequence
  Oligonucleotide primer for the detection of SNP TSC0002064
aacgtaaaccac

SEQ ID NO: 270257 - DNA, 12 bp, Artificial Sequence
  Oligonucleotide primer for the detection of SNP TSC0002064
ttaggttgggtg

SEQ ID NO: 270258 - DNA, 12 bp, Artificial Sequence
  Oligonucleotide primer for the detection of SNP TSC0002064
ttaggttgggcg

SEQ ID NO: 270259 - DNA, 12 bp, Artificial Sequence
  Oligonucleotide primer for the detection of SNP TSC0002065
ataataaatata

SEQ ID NO: 270260 - DNA, 12 bp, Artificial Sequence
  Oligonucleotide primer for the detection of SNP TSC0002065
gttgggtaattt

SEQ ID NO: 270261 - DNA, 12 bp, Artificial Sequence
  Oligonucleotide primer for the detection of SNP TSC0002065
attaaacaattt

SEQ ID NO: 270262 - DNA, 12 bp, Artificial Sequence
  Oligonucleotide primer for the detection of SNP TSC0002067
aatattttattt

SEQ ID NO: 270263 - DNA, 12 bp, Artificial Sequence
  Oligonucleotide primer for the detection of SNP TSC0002067
tttaggtatgga

SEQ ID NO: 270264 - DNA, 12 bp, Artificial Sequence
  Oligonucleotide primer for the detection of SNP TSC0002067
ctcaaatataaa

SEQ ID NO: 270265 - DNA, 12 bp, Artificial Sequence
  Oligonucleotide primer for the detection of SNP TSC0002067
gtattttatttt

SEQ ID NO: 270266 - DNA, 12 bp, Artificial Sequence
  Oligonucleotide primer for the detection of SNP TSC0002068
aattcaaaaaaa

SEQ ID NO: 270267 - DNA, 12 bp, Artificial Sequence
  Oligonucleotide primer for the detection of SNP TSC0002068
ggattgaatttt

SEQ ID NO: 270268 - DNA, 12 bp, Artificial Sequence
  Oligonucleotide primer for the detection of SNP TSC0002068
aactaaatttta

SEQ ID NO: 270269 - DNA, 12 bp, Artificial Sequence
  Oligonucleotide primer for the detection of SNP TSC0002068
gaatttagggga

SEQ ID NO: 270270 - DNA, 12 bp, Artificial Sequence
  Oligonucleotide primer for the detection of SNP TSC0002069
aaataaacaact

SEQ ID NO: 270271 - DNA, 12 bp, Artificial Sequence
  Oligonucleotide primer for the detection of SNP TSC0002069
tagatatttttt

SEQ ID NO: 270272 - DNA, 12 bp, Artificial Sequence
  Oligonucleotide primer for the detection of SNP TSC0002069
caaacaccctcc

SEQ ID NO: 270273 - DNA, 12 bp, Artificial Sequence
  Oligonucleotide primer for the detection of SNP TSC0002069
gaatgagtagtt

SEQ ID NO: 270274 - DNA, 12 bp, Artificial Sequence
  Oligonucleotide primer for the detection of SNP TSC0002071
ctttataaaaaa

SEQ ID NO: 270275 - DNA, 12 bp, Artificial Sequence
  Oligonucleotide primer for the detection of SNP TSC0002071
taaataagtaat

SEQ ID NO: 270276 - DNA, 12 bp, Artificial Sequence
  Oligonucleotide primer for the detection of SNP TSC0002071
taaataagtaac

SEQ ID NO: 270277 - DNA, 12 bp, Artificial Sequence
  Oligonucleotide primer for the detection of SNP TSC0002071
caaataaataac

SEQ ID NO: 270278 - DNA, 12 bp, Artificial Sequence
  Oligonucleotide primer for the detection of SNP TSC0002071
tttgtgaaaaat

SEQ ID NO: 270279 - DNA, 12 bp, Artificial Sequence
  Oligonukleotid-Primer
aaaaatacatct

SEQ ID NO: 270280 - DNA, 12 bp, Artificial Sequence
  Oligonucleotide primer for the detection of SNP TSC0002072
agtttagtgaag

SEQ ID NO: 270281 - DNA, 12 bp, Artificial Sequence
  Oligonucleotide primer for the detection of SNP TSC0002073
aatactaataat

SEQ ID NO: 270282 - DNA, 12 bp, Artificial Sequence
  Oligonucleotide primer for the detection of SNP TSC0002073
aaatgttaaaaa

SEQ ID NO: 270283 - DNA, 12 bp, Artificial Sequence
  Oligonukleotid-Primer
ttttcaaaaaaa

SEQ ID NO: 270284 - DNA, 12 bp, Artificial Sequence
  Oligonucleotide primer for the detection of SNP TSC0002075
tttaaaaattta

SEQ ID NO: 270285 - DNA, 12 bp, Artificial Sequence
  Oligonucleotide primer for the detection of SNP TSC0002075
ttcaaaaactca

SEQ ID NO: 270286 - DNA, 12 bp, Artificial Sequence
  Oligonucleotide primer for the detection of SNP TSC0002075
tttttaaagaag

SEQ ID NO: 270287 - DNA, 12 bp, Artificial Sequence
  Oligonucleotide primer for the detection of SNP TSC0002076
aaactaaaatca

SEQ ID NO: 270288 - DNA, 12 bp, Artificial Sequence
  Oligonucleotide primer for the detection of SNP TSC0002076
ttggagtgtggt

SEQ ID NO: 270289 - DNA, 12 bp, Artificial Sequence
  Oligonucleotide primer for the detection of SNP TSC0002076
ttggagtgcggt

SEQ ID NO: 270290 - DNA, 12 bp, Artificial Sequence
  Oligonucleotide primer for the detection of SNP TSC0002076
ctaaaatacaat

SEQ ID NO: 270291 - DNA, 12 bp, Artificial Sequence
  Oligonucleotide primer for the detection of SNP TSC0002076
ctaaaatacgat

SEQ ID NO: 270292 - DNA, 12 bp, Artificial Sequence
  Oligonucleotide primer for the detection of SNP TSC0002076
gagttaagatta

SEQ ID NO: 270293 - DNA, 12 bp, Artificial Sequence
  Oligonucleotide primer for the detection of SNP TSC0002077
tgatggtttaat

SEQ ID NO: 270294 - DNA, 12 bp, Artificial Sequence
  Oligonucleotide primer for the detection of SNP TSC0002077
ctaataacctaa

SEQ ID NO: 270295 - DNA, 12 bp, Artificial Sequence
  Oligonucleotide primer for the detection of SNP TSC0002077
gagaagaggaag

SEQ ID NO: 270296 - DNA, 12 bp, Artificial Sequence
  Oligonucleotide primer for the detection of SNP TSC0002079
tctaactaacac

SEQ ID NO: 270297 - DNA, 12 bp, Artificial Sequence
  Oligonucleotide primer for the detection of SNP TSC0002079
ggtagttatagg

SEQ ID NO: 270298 - DNA, 12 bp, Artificial Sequence
  Oligonucleotide primer for the detection of SNP TSC0002080
caccacaaatat

SEQ ID NO: 270299 - DNA, 12 bp, Artificial Sequence
  Oligonucleotide primer for the detection of SNP TSC0002080
aagaattatgta

SEQ ID NO: 270300 - DNA, 12 bp, Artificial Sequence
  Oligonucleotide primer for the detection of SNP TSC0002082
ttcaaccaaaac

SEQ ID NO: 270301 - DNA, 12 bp, Artificial Sequence
  Oligonucleotide primer for the detection of SNP TSC0002082
aaagatgtaata

SEQ ID NO: 270302 - DNA, 12 bp, Artificial Sequence
  Oligonucleotide primer for the detection of SNP TSC0002082
aaagacgtaata

SEQ ID NO: 270303 - DNA, 12 bp, Artificial Sequence
  Oligonucleotide primer for the detection of SNP TSC0002082
aaaaacacaaca

SEQ ID NO: 270304 - DNA, 12 bp, Artificial Sequence
  Oligonucleotide primer for the detection of SNP TSC0002082
aaaaacgcaaca

SEQ ID NO: 270305 - DNA, 12 bp, Artificial Sequence
  Oligonucleotide primer for the detection of SNP TSC0002082
tttaattaggat

SEQ ID NO: 270306 - DNA, 12 bp, Artificial Sequence
  Oligonucleotide primer for the detection of SNP TSC0002083
aaaaaaaaaaac

SEQ ID NO: 270307 - DNA, 12 bp, Artificial Sequence
  Oligonucleotide primer for the detection of SNP TSC0002083
ttttttgttttt

SEQ ID NO: 270308 - DNA, 12 bp, Artificial Sequence
  Oligonucleotide primer for the detection of SNP TSC0002083
ttttttattttt

SEQ ID NO: 270309 - DNA, 12 bp, Artificial Sequence
  Oligonucleotide primer for the detection of SNP TSC0002084
tttttatttttt

SEQ ID NO: 270310 - DNA, 12 bp, Artificial Sequence
  Oligonucleotide primer for the detection of SNP TSC0002085
aaaaaaattttc

SEQ ID NO: 270311 - DNA, 12 bp, Artificial Sequence
  Oligonucleotide primer for the detection of SNP TSC0002086
aatcttctaact

SEQ ID NO: 270312 - DNA, 12 bp, Artificial Sequence
  Oligonucleotide primer for the detection of SNP TSC0002086
ttttaagagtta

SEQ ID NO: 270313 - DNA, 12 bp, Artificial Sequence
  Oligonucleotide primer for the detection of SNP TSC0002087
tatctatacaat

SEQ ID NO: 270314 - DNA, 12 bp, Artificial Sequence
  Oligonucleotide primer for the detection of SNP TSC0002087
taatttatttgt

SEQ ID NO: 270315 - DNA, 12 bp, Artificial Sequence
  Oligonucleotide primer for the detection of SNP TSC0002087
ataactcattta

SEQ ID NO: 270316 - DNA, 12 bp, Artificial Sequence
  Oligonucleotide primer for the detection of SNP TSC0002087
tatttatatagt

SEQ ID NO: 270317 - DNA, 12 bp, Artificial Sequence
  Oligonucleotide primer for the detection of SNP TSC0002088
ataaaaaatcta

SEQ ID NO: 270318 - DNA, 12 bp, Artificial Sequence
  Oligonucleotide primer for the detection of SNP TSC0002088
tttcttaccttt

SEQ ID NO: 270319 - DNA, 12 bp, Artificial Sequence
  Oligonucleotide primer for the detection of SNP TSC0002088
gtgaaaagtttg

SEQ ID NO: 270320 - DNA, 12 bp, Artificial Sequence
  Oligonucleotide primer for the detection of SNP TSC0002089
taaatatttcaa

SEQ ID NO: 270321 - DNA, 12 bp, Artificial Sequence
  Oligonucleotide primer for the detection of SNP TSC0002089
aaattaaaatat

SEQ ID NO: 270322 - DNA, 12 bp, Artificial Sequence
  Oligonucleotide primer for the detection of SNP TSC0002089
aaattaaaacac

SEQ ID NO: 270323 - DNA, 12 bp, Artificial Sequence
  Oligonucleotide primer for the detection of SNP TSC0002089
tgaatattttaa

SEQ ID NO: 270324 - DNA, 12 bp, Artificial Sequence
  Oligonucleotide primer for the detection of SNP TSC0002090
tacaacaaaccc

SEQ ID NO: 270325 - DNA, 12 bp, Artificial Sequence
  Oligonucleotide primer for the detection of SNP TSC0002090
attttgatttgg

SEQ ID NO: 270326 - DNA, 12 bp, Artificial Sequence
  Oligonucleotide primer for the detection of SNP TSC0002091
aaaaataatacc

SEQ ID NO: 270327 - DNA, 12 bp, Artificial Sequence
  Oligonucleotide primer for the detection of SNP TSC0002091
aatttatgggga

SEQ ID NO: 270328 - DNA, 12 bp, Artificial Sequence
  Oligonucleotide primer for the detection of SNP TSC0002092
aaatctacctta

SEQ ID NO: 270329 - DNA, 12 bp, Artificial Sequence
  Oligonucleotide primer for the detection of SNP TSC0002092
gatagattttgt

SEQ ID NO: 270330 - DNA, 12 bp, Artificial Sequence
  Oligonucleotide primer for the detection of SNP TSC0002092
aacaaactttat

SEQ ID NO: 270331 - DNA, 12 bp, Artificial Sequence
  Oligonucleotide primer for the detection of SNP TSC0002092
gagtttattttg

SEQ ID NO: 270332 - DNA, 12 bp, Artificial Sequence
  Oligonucleotide primer for the detection of SNP TSC0002093
aaaataatccta

SEQ ID NO: 270333 - DNA, 12 bp, Artificial Sequence
  Oligonucleotide primer for the detection of SNP TSC0002093
gtgaagtaaggt

SEQ ID NO: 270334 - DNA, 12 bp, Artificial Sequence
  Oligonucleotide primer for the detection of SNP TSC0002093
ataaaataaaat

SEQ ID NO: 270335 - DNA, 12 bp, Artificial Sequence
  Oligonucleotide primer for the detection of SNP TSC0002093
gtaaaataaaat

SEQ ID NO: 270336 - DNA, 12 bp, Artificial Sequence
  Oligonucleotide primer for the detection of SNP TSC0002093
gaagtaatttta

SEQ ID NO: 270337 - DNA, 12 bp, Artificial Sequence
  Oligonucleotide primer for the detection of SNP TSC0002094
acaacctctacc

SEQ ID NO: 270338 - DNA, 12 bp, Artificial Sequence
  Oligonucleotide primer for the detection of SNP TSC0002094
ggtataaagatg

SEQ ID NO: 270339 - DNA, 12 bp, Artificial Sequence
  Oligonucleotide primer for the detection of SNP TSC0002094
aatataaaaata

SEQ ID NO: 270340 - DNA, 12 bp, Artificial Sequence
  Oligonucleotide primer for the detection of SNP TSC0002094
taatttttgttt

SEQ ID NO: 270341 - DNA, 12 bp, Artificial Sequence
  Oligonucleotide primer for the detection of SNP TSC0002095
tacccccaaaaa

SEQ ID NO: 270342 - DNA, 12 bp, Artificial Sequence
  Oligonucleotide primer for the detection of SNP TSC0002095
gtttgaaaattt

SEQ ID NO: 270343 - DNA, 12 bp, Artificial Sequence
  Oligonucleotide primer for the detection of SNP TSC0002095
acctaaaaattt

SEQ ID NO: 270344 - DNA, 12 bp, Artificial Sequence
  Oligonucleotide primer for the detection of SNP TSC0002095
atatttttaaaa

SEQ ID NO: 270345 - DNA, 12 bp, Artificial Sequence
  Oligonucleotide primer for the detection of SNP TSC0002096
ctatattcacat

SEQ ID NO: 270346 - DNA, 12 bp, Artificial Sequence
  Oligonucleotide primer for the detection of SNP TSC0002096
aatatgattaaa

SEQ ID NO: 270347 - DNA, 12 bp, Artificial Sequence
  Oligonucleotide primer for the detection of SNP TSC0002096
aacataattaaa

SEQ ID NO: 270348 - DNA, 12 bp, Artificial Sequence
  Oligonucleotide primer for the detection of SNP TSC0002096
ttgtgtttatat

SEQ ID NO: 270349 - DNA, 12 bp, Artificial Sequence
  Oligonucleotide primer for the detection of SNP TSC0002097
aacaaacttctc

SEQ ID NO: 270350 - DNA, 12 bp, Artificial Sequence
  Oligonucleotide primer for the detection of SNP TSC0002098
ttaaaatattcc

SEQ ID NO: 270351 - DNA, 12 bp, Artificial Sequence
  Oligonucleotide primer for the detection of SNP TSC0002098
tatgtttataga

SEQ ID NO: 270352 - DNA, 12 bp, Artificial Sequence
  Oligonucleotide primer for the detection of SNP TSC0002099
aaccatttaatc

SEQ ID NO: 270353 - DNA, 12 bp, Artificial Sequence
  Oligonucleotide primer for the detection of SNP TSC0002099
aaaaagatattt

SEQ ID NO: 270354 - DNA, 12 bp, Artificial Sequence
  Oligonucleotide primer for the detection of SNP TSC0002099
aaaaaaatattt

SEQ ID NO: 270355 - DNA, 12 bp, Artificial Sequence
  Oligonucleotide primer for the detection of SNP TSC0002099
agttatttgatt

SEQ ID NO: 270356 - DNA, 12 bp, Artificial Sequence
  Oligonucleotide primer for the detection of SNP TSC0002100
taataacccaac

SEQ ID NO: 270357 - DNA, 12 bp, Artificial Sequence
  Oligonucleotide primer for the detection of SNP TSC0002100
atgatttgaaaa

SEQ ID NO: 270358 - DNA, 12 bp, Artificial Sequence
  Oligonucleotide primer for the detection of SNP TSC0002102
tagtggttgtta

SEQ ID NO: 270359 - DNA, 12 bp, Artificial Sequence
  Oligonucleotide primer for the detection of SNP TSC0002102
caataattatta

SEQ ID NO: 270360 - DNA, 12 bp, Artificial Sequence
  Oligonucleotide primer for the detection of SNP TSC0002102
ataaatgaaaat

SEQ ID NO: 270361 - DNA, 12 bp, Artificial Sequence
  Oligonucleotide primer for the detection of SNP TSC0002102
ataaatgaaaac

SEQ ID NO: 270362 - DNA, 12 bp, Artificial Sequence
  Oligonucleotide primer for the detection of SNP TSC0002103
tatccaaaaact

SEQ ID NO: 270363 - DNA, 12 bp, Artificial Sequence
  Oligonucleotide primer for the detection of SNP TSC0002103
gggtttattgta

SEQ ID NO: 270364 - DNA, 12 bp, Artificial Sequence
  Oligonucleotide primer for the detection of SNP TSC0002104
aaattcaactct

SEQ ID NO: 270365 - DNA, 12 bp, Artificial Sequence
  Oligonucleotide primer for the detection of SNP TSC0002104
gaatttttaaaa

SEQ ID NO: 270366 - DNA, 12 bp, Artificial Sequence
  Oligonucleotide primer for the detection of SNP TSC0002106
attcaacccttt

SEQ ID NO: 270367 - DNA, 12 bp, Artificial Sequence
  Oligonucleotide primer for the detection of SNP TSC0002106
ttatttgtaaaa

SEQ ID NO: 270368 - DNA, 12 bp, Artificial Sequence
  Oligonucleotide primer for the detection of SNP TSC0002106
tcatctataaaa

SEQ ID NO: 270369 - DNA, 12 bp, Artificial Sequence
  Oligonucleotide primer for the detection of SNP TSC0002106
tttagttttttt

SEQ ID NO: 270370 - DNA, 12 bp, Artificial Sequence
  Oligonucleotide primer for the detection of SNP TSC0002107
aataattaaaac

SEQ ID NO: 270371 - DNA, 12 bp, Artificial Sequence
  Oligonucleotide primer for the detection of SNP TSC0002107
atagtagaagtg

SEQ ID NO: 270372 - DNA, 12 bp, Artificial Sequence
  Oligonucleotide primer for the detection of SNP TSC0002107
atagtagaagcg

SEQ ID NO: 270373 - DNA, 12 bp, Artificial Sequence
  Oligonucleotide primer for the detection of SNP TSC0002108
tatatatatacc

SEQ ID NO: 270374 - DNA, 12 bp, Artificial Sequence
  Oligonucleotide primer for the detection of SNP TSC0002108
atatatttaatg

SEQ ID NO: 270375 - DNA, 12 bp, Artificial Sequence
  Oligonucleotide primer for the detection of SNP TSC0002108
cacattcaataa

SEQ ID NO: 270376 - DNA, 12 bp, Artificial Sequence
  Oligonukleotid-Primer
gtatatatgttt

SEQ ID NO: 270377 - DNA, 12 bp, Artificial Sequence
  Oligonucleotide primer for the detection of SNP TSC0002109
tttatttccact

SEQ ID NO: 270378 - DNA, 12 bp, Artificial Sequence
  Oligonucleotide primer for the detection of SNP TSC0002110
ccaccaaataca

SEQ ID NO: 270379 - DNA, 12 bp, Artificial Sequence
  Oligonucleotide primer for the detection of SNP TSC0002110
attaggtaattt

SEQ ID NO: 270380 - DNA, 12 bp, Artificial Sequence
  Oligonukleotid-Primer
accaaacaaccc

SEQ ID NO: 270381 - DNA, 12 bp, Artificial Sequence
  Oligonucleotide primer for the detection of SNP TSC0002110
ttattagatgta

SEQ ID NO: 270382 - DNA, 12 bp, Artificial Sequence
  Oligonucleotide primer for the detection of SNP TSC0002111
tattcttattaa

SEQ ID NO: 270383 - DNA, 12 bp, Artificial Sequence
  Oligonucleotide primer for the detection of SNP TSC0002111
gtatttattaat

SEQ ID NO: 270384 - DNA, 12 bp, Artificial Sequence
  Oligonucleotide primer for the detection of SNP TSC0002111
atatttattaat

SEQ ID NO: 270385 - DNA, 12 bp, Artificial Sequence
  Oligonucleotide primer for the detection of SNP TSC0002111
tatttttattaa

SEQ ID NO: 270386 - DNA, 12 bp, Artificial Sequence
  Oligonucleotide primer for the detection of SNP TSC0002112
taatcactcttc

SEQ ID NO: 270387 - DNA, 12 bp, Artificial Sequence
  Oligonucleotide primer for the detection of SNP TSC0002112
aagtattaaaga

SEQ ID NO: 270388 - DNA, 12 bp, Artificial Sequence
  Oligonucleotide primer for the detection of SNP TSC0002113
aaatctttataa

SEQ ID NO: 270389 - DNA, 12 bp, Artificial Sequence
  Oligonucleotide primer for the detection of SNP TSC0002113
tatgtgtgattt

SEQ ID NO: 270390 - DNA, 12 bp, Artificial Sequence
  Oligonucleotide primer for the detection of SNP TSC0002113
atatataatcta

SEQ ID NO: 270391 - DNA, 12 bp, Artificial Sequence
  Oligonucleotide primer for the detection of SNP TSC0002113
gtaaatttttat

SEQ ID NO: 270392 - DNA, 12 bp, Artificial Sequence
  Oligonucleotide primer for the detection of SNP TSC0002114
aatacaaaaaat

SEQ ID NO: 270393 - DNA, 12 bp, Artificial Sequence
  Oligonucleotide primer for the detection of SNP TSC0002114
aatacgaaaaat

SEQ ID NO: 270394 - DNA, 12 bp, Artificial Sequence
  Oligonucleotide primer for the detection of SNP TSC0002114
attagagagtta

SEQ ID NO: 270395 - DNA, 12 bp, Artificial Sequence
  Oligonucleotide primer for the detection of SNP TSC0002115
acataaacataa

SEQ ID NO: 270396 - DNA, 12 bp, Artificial Sequence
  Oligonucleotide primer for the detection of SNP TSC0002115
tatgttatgttt

SEQ ID NO: 270397 - DNA, 12 bp, Artificial Sequence
  Oligonucleotide primer for the detection of SNP TSC0002115
tatattatatcc

SEQ ID NO: 270398 - DNA, 12 bp, Artificial Sequence
  Oligonucleotide primer for the detection of SNP TSC0002115
atatggatatag

SEQ ID NO: 270399 - DNA, 12 bp, Artificial Sequence
  Oligonucleotide primer for the detection of SNP TSC0002116
acttactaaatt

SEQ ID NO: 270400 - DNA, 12 bp, Artificial Sequence
  Oligonucleotide primer for the detection of SNP TSC0002116
atttatttttaa

SEQ ID NO: 270401 - DNA, 12 bp, Artificial Sequence
  Oligonucleotide primer for the detection of SNP TSC0002117
tcaaatactcct

SEQ ID NO: 270402 - DNA, 12 bp, Artificial Sequence
  Oligonucleotide primer for the detection of SNP TSC0002117
attattttttta

SEQ ID NO: 270403 - DNA, 12 bp, Artificial Sequence
  Oligonucleotide primer for the detection of SNP TSC0002119
attctcctacct

SEQ ID NO: 270404 - DNA, 12 bp, Artificial Sequence
  Oligonucleotide primer for the detection of SNP TSC0002122
tttcaaatctac

SEQ ID NO: 270405 - DNA, 12 bp, Artificial Sequence
  Oligonucleotide primer for the detection of SNP TSC0002122
tttattgattta

SEQ ID NO: 270406 - DNA, 12 bp, Artificial Sequence
  Oligonucleotide primer for the detection of SNP TSC0002122
tccactaatcca

SEQ ID NO: 270407 - DNA, 12 bp, Artificial Sequence
  Oligonucleotide primer for the detection of SNP TSC0002122
ttttaagtttat

SEQ ID NO: 270408 - DNA, 12 bp, Artificial Sequence
  Oligonucleotide primer for the detection of SNP TSC0002123
acatctcatatc

SEQ ID NO: 270409 - DNA, 12 bp, Artificial Sequence
  Oligonucleotide primer for the detection of SNP TSC0002123
taatttgtattg

SEQ ID NO: 270410 - DNA, 12 bp, Artificial Sequence
  Oligonucleotide primer for the detection of SNP TSC0002123
aatctacactaa

SEQ ID NO: 270411 - DNA, 12 bp, Artificial Sequence
  Oligonucleotide primer for the detection of SNP TSC0002123
tattttatgttt

SEQ ID NO: 270412 - DNA, 12 bp, Artificial Sequence
  Oligonucleotide primer for the detection of SNP TSC0002124
taataacaaaat

SEQ ID NO: 270413 - DNA, 12 bp, Artificial Sequence
  Oligonucleotide primer for the detection of SNP TSC0002124
agtttagggttt

SEQ ID NO: 270414 - DNA, 12 bp, Artificial Sequence
  Oligonucleotide primer for the detection of SNP TSC0002124
aattcaaaattt

SEQ ID NO: 270415 - DNA, 12 bp, Artificial Sequence
  Oligonucleotide primer for the detection of SNP TSC0002124
tgatgataaaat

SEQ ID NO: 270416 - DNA, 12 bp, Artificial Sequence
  Oligonucleotide primer for the detection of SNP TSC0002125
taattttatcat

SEQ ID NO: 270417 - DNA, 12 bp, Artificial Sequence
  Oligonucleotide primer for the detection of SNP TSC0002125
attatttttttg

SEQ ID NO: 270418 - DNA, 12 bp, Artificial Sequence
  Oligonucleotide primer for the detection of SNP TSC0002126
tatatattagta

SEQ ID NO: 270419 - DNA, 12 bp, Artificial Sequence
  Oligonucleotide primer for the detection of SNP TSC0002126
tacatattaaca

SEQ ID NO: 270420 - DNA, 12 bp, Artificial Sequence
  Oligonucleotide primer for the detection of SNP TSC0002126
attgtgtttgtt

SEQ ID NO: 270421 - DNA, 12 bp, Artificial Sequence
  Oligonucleotide primer for the detection of SNP TSC0002127
ttattttgatat

SEQ ID NO: 270422 - DNA, 12 bp, Artificial Sequence
  Oligonucleotide primer for the detection of SNP TSC0002127
tcattttaacac

SEQ ID NO: 270423 - DNA, 12 bp, Artificial Sequence
  Oligonucleotide primer for the detection of SNP TSC0002127
attgaaataaag

SEQ ID NO: 270424 - DNA, 12 bp, Artificial Sequence
  Oligonucleotide primer for the detection of SNP TSC0002130
atctttctatct

SEQ ID NO: 270425 - DNA, 12 bp, Artificial Sequence
  Oligonucleotide primer for the detection of SNP TSC0002130
gtggttttgagg

SEQ ID NO: 270426 - DNA, 12 bp, Artificial Sequence
  Oligonucleotide primer for the detection of SNP TSC0002131
aaaaattttttt

SEQ ID NO: 270427 - DNA, 12 bp, Artificial Sequence
  Oligonucleotide primer for the detection of SNP TSC0002131
attaattttttt

SEQ ID NO: 270428 - DNA, 12 bp, Artificial Sequence
  Oligonucleotide primer for the detection of SNP TSC0002132
aaacaaaaaaac

SEQ ID NO: 270429 - DNA, 12 bp, Artificial Sequence
  Oligonucleotide primer for the detection of SNP TSC0002132
aatgggagtatg

SEQ ID NO: 270430 - DNA, 12 bp, Artificial Sequence
  Oligonucleotide primer for the detection of SNP TSC0002133
actctaaaatat

SEQ ID NO: 270431 - DNA, 12 bp, Artificial Sequence
  Oligonucleotide primer for the detection of SNP TSC0002133
aatttgtgaagg

SEQ ID NO: 270432 - DNA, 12 bp, Artificial Sequence
  Oligonucleotide primer for the detection of SNP TSC0002134
attccaaatata

SEQ ID NO: 270433 - DNA, 12 bp, Artificial Sequence
  Oligonucleotide primer for the detection of SNP TSC0002134
ttttgttttatg

SEQ ID NO: 270434 - DNA, 12 bp, Artificial Sequence
  Oligonucleotide primer for the detection of SNP TSC0002135
ctaaaatcccaa

SEQ ID NO: 270435 - DNA, 12 bp, Artificial Sequence
  Oligonucleotide primer for the detection of SNP TSC0002135
tttttattatgg

SEQ ID NO: 270436 - DNA, 12 bp, Artificial Sequence
  Oligonucleotide primer for the detection of SNP TSC0002135
ccttcatcataa

SEQ ID NO: 270437 - DNA, 12 bp, Artificial Sequence
  Oligonucleotide primer for the detection of SNP TSC0002136
ttatttcaaaaa

SEQ ID NO: 270438 - DNA, 12 bp, Artificial Sequence
  Oligonucleotide primer for the detection of SNP TSC0002136
ttatagaaatta

SEQ ID NO: 270439 - DNA, 12 bp, Artificial Sequence
  Oligonucleotide primer for the detection of SNP TSC0002136
ctataaaaatca

SEQ ID NO: 270440 - DNA, 12 bp, Artificial Sequence
  Oligonucleotide primer for the detection of SNP TSC0002136
ttgttttagaaa

SEQ ID NO: 270441 - DNA, 12 bp, Artificial Sequence
  Oligonucleotide primer for the detection of SNP TSC0002137
cacaaaactatc

SEQ ID NO: 270442 - DNA, 12 bp, Artificial Sequence
  Oligonucleotide primer for the detection of SNP TSC0002137
cgcaaaactatc

SEQ ID NO: 270443 - DNA, 12 bp, Artificial Sequence
  Oligonucleotide primer for the detection of SNP TSC0002137
tttggagaaaag

SEQ ID NO: 270444 - DNA, 12 bp, Artificial Sequence
  Oligonucleotide primer for the detection of SNP TSC0002138
aaacacaactcc

SEQ ID NO: 270445 - DNA, 12 bp, Artificial Sequence
  Oligonucleotide primer for the detection of SNP TSC0002138
tggggaaattta

SEQ ID NO: 270446 - DNA, 12 bp, Artificial Sequence
  Oligonucleotide primer for the detection of SNP TSC0002141
ccttcaaactcc

SEQ ID NO: 270447 - DNA, 12 bp, Artificial Sequence
  Oligonucleotide primer for the detection of SNP TSC0002141
gtgtatggatta

SEQ ID NO: 270448 - DNA, 12 bp, Artificial Sequence
  Oligonucleotide primer for the detection of SNP TSC0002142
cctattttatct

SEQ ID NO: 270449 - DNA, 12 bp, Artificial Sequence
  Oligonucleotide primer for the detection of SNP TSC0002142
attgtatttaaa

SEQ ID NO: 270450 - DNA, 12 bp, Artificial Sequence
  Oligonucleotide primer for the detection of SNP TSC0002143
cttacctttttc

SEQ ID NO: 270451 - DNA, 12 bp, Artificial Sequence
  Oligonucleotide primer for the detection of SNP TSC0002143
tgttgtttgata

SEQ ID NO: 270452 - DNA, 12 bp, Artificial Sequence
  Oligonucleotide primer for the detection of SNP TSC0002144
aacaaataaaaa

SEQ ID NO: 270453 - DNA, 12 bp, Artificial Sequence
  Oligonucleotide primer for the detection of SNP TSC0002144
aatgtggtatgt

SEQ ID NO: 270454 - DNA, 12 bp, Artificial Sequence
  Oligonucleotide primer for the detection of SNP TSC0002144
aatataatatac

SEQ ID NO: 270455 - DNA, 12 bp, Artificial Sequence
  Oligonucleotide primer for the detection of SNP TSC0002144
atagatggaaat

SEQ ID NO: 270456 - DNA, 12 bp, Artificial Sequence
  Oligonucleotide primer for the detection of SNP TSC0002144
atagatggaaac

SEQ ID NO: 270457 - DNA, 12 bp, Artificial Sequence
  Oligonucleotide primer for the detection of SNP TSC0002145
ctaacaaaaaat

SEQ ID NO: 270458 - DNA, 12 bp, Artificial Sequence
  Oligonucleotide primer for the detection of SNP TSC0002145
atatatattgaa

SEQ ID NO: 270459 - DNA, 12 bp, Artificial Sequence
  Oligonucleotide primer for the detection of SNP TSC0002145
atatatatcgaa

SEQ ID NO: 270460 - DNA, 12 bp, Artificial Sequence
  Oligonucleotide primer for the detection of SNP TSC0002147
aaattaaaaata

SEQ ID NO: 270461 - DNA, 12 bp, Artificial Sequence
  Oligonucleotide primer for the detection of SNP TSC0002147
ataaagtttttt

SEQ ID NO: 270462 - DNA, 12 bp, Artificial Sequence
  Oligonucleotide primer for the detection of SNP TSC0002147
ataaaatccctt

SEQ ID NO: 270463 - DNA, 12 bp, Artificial Sequence
  Oligonucleotide primer for the detection of SNP TSC0002148
tacctcaacctc

SEQ ID NO: 270464 - DNA, 12 bp, Artificial Sequence
  Oligonucleotide primer for the detection of SNP TSC0002148
tttagttatttg

SEQ ID NO: 270465 - DNA, 12 bp, Artificial Sequence
  Oligonucleotide primer for the detection of SNP TSC0002149
ttacaaactata

SEQ ID NO: 270466 - DNA, 12 bp, Artificial Sequence
  Oligonucleotide primer for the detection of SNP TSC0002149
taagtattttaa

SEQ ID NO: 270467 - DNA, 12 bp, Artificial Sequence
  Oligonucleotide primer for the detection of SNP TSC0002149
taaatattttaa

SEQ ID NO: 270468 - DNA, 12 bp, Artificial Sequence
  Oligonucleotide primer for the detection of SNP TSC0002149
ttgtaagttata

SEQ ID NO: 270469 - DNA, 12 bp, Artificial Sequence
  Oligonucleotide primer for the detection of SNP TSC0002150
aatgaagtatta

SEQ ID NO: 270470 - DNA, 12 bp, Artificial Sequence
  Oligonucleotide primer for the detection of SNP TSC0002151
accaaacaaaaa

SEQ ID NO: 270471 - DNA, 12 bp, Artificial Sequence
  Oligonucleotide primer for the detection of SNP TSC0002151
accaaacgaaaa

SEQ ID NO: 270472 - DNA, 12 bp, Artificial Sequence
  Oligonucleotide primer for the detection of SNP TSC0002151
tttaggtttttt

SEQ ID NO: 270473 - DNA, 12 bp, Artificial Sequence
  Oligonucleotide primer for the detection of SNP TSC0002151
ttccaaatccct

SEQ ID NO: 270474 - DNA, 12 bp, Artificial Sequence
  Oligonucleotide primer for the detection of SNP TSC0002151
attaggtgagga

SEQ ID NO: 270475 - DNA, 12 bp, Artificial Sequence
  Oligonucleotide primer for the detection of SNP TSC0002151
attaggcgagga

SEQ ID NO: 270476 - DNA, 12 bp, Artificial Sequence
  Oligonucleotide primer for the detection of SNP TSC0002152
accatcatatcc

SEQ ID NO: 270477 - DNA, 12 bp, Artificial Sequence
  Oligonucleotide primer for the detection of SNP TSC0002152
aagttaagaatt

SEQ ID NO: 270478 - DNA, 12 bp, Artificial Sequence
  Oligonucleotide primer for the detection of SNP TSC0002152
aactaaaaacta

SEQ ID NO: 270479 - DNA, 12 bp, Artificial Sequence
  Oligonucleotide primer for the detection of SNP TSC0002152
tattatgttttt

SEQ ID NO: 270480 - DNA, 12 bp, Artificial Sequence
  Oligonucleotide primer for the detection of SNP TSC0002154
aattttaactat

SEQ ID NO: 270481 - DNA, 12 bp, Artificial Sequence
  Oligonucleotide primer for the detection of SNP TSC0002154
aggttatattta

SEQ ID NO: 270482 - DNA, 12 bp, Artificial Sequence
  Oligonucleotide primer for the detection of SNP TSC0002155
aaataataactt

SEQ ID NO: 270483 - DNA, 12 bp, Artificial Sequence
  Oligonucleotide primer for the detection of SNP TSC0002155
gtattttgtgag

SEQ ID NO: 270484 - DNA, 12 bp, Artificial Sequence
  Oligonucleotide primer for the detection of SNP TSC0002156
atcacaaatatt

SEQ ID NO: 270485 - DNA, 12 bp, Artificial Sequence
  Oligonucleotide primer for the detection of SNP TSC0002156
tgattaatttaa

SEQ ID NO: 270486 - DNA, 12 bp, Artificial Sequence
  Oligonucleotide primer for the detection of SNP TSC0002156
taaccaatctaa

SEQ ID NO: 270487 - DNA, 12 bp, Artificial Sequence
  Oligonucleotide primer for the detection of SNP TSC0002156
attataggtatt

SEQ ID NO: 270488 - DNA, 12 bp, Artificial Sequence
  Oligonucleotide primer for the detection of SNP TSC0002159
acaatctaacat

SEQ ID NO: 270489 - DNA, 12 bp, Artificial Sequence
  Oligonucleotide primer for the detection of SNP TSC0002159
ttgtgagtattg

SEQ ID NO: 270490 - DNA, 12 bp, Artificial Sequence
  Oligonucleotide primer for the detection of SNP TSC0002160
ataacacctcat

SEQ ID NO: 270491 - DNA, 12 bp, Artificial Sequence
  Oligonucleotide primer for the detection of SNP TSC0002160
tttagtgtgttt

SEQ ID NO: 270492 - DNA, 12 bp, Artificial Sequence
  Oligonucleotide primer for the detection of SNP TSC0002160
tcctaatatatc

SEQ ID NO: 270493 - DNA, 12 bp, Artificial Sequence
  Oligonucleotide primer for the detection of SNP TSC0002160
gtgatattttat

SEQ ID NO: 270494 - DNA, 12 bp, Artificial Sequence
  Oligonucleotide primer for the detection of SNP TSC0002161
caaatataatct

SEQ ID NO: 270495 - DNA, 12 bp, Artificial Sequence
  Oligonucleotide primer for the detection of SNP TSC0002161
gaattttagagg

SEQ ID NO: 270496 - DNA, 12 bp, Artificial Sequence
  Oligonucleotide primer for the detection of SNP TSC0002161
aaaccccaaaaa

SEQ ID NO: 270497 - DNA, 12 bp, Artificial Sequence
  Oligonucleotide primer for the detection of SNP TSC0002161
taagtgtggttt

SEQ ID NO: 270498 - DNA, 12 bp, Artificial Sequence
  Oligonucleotide primer for the detection of SNP TSC0002164
ccaaattttttt

SEQ ID NO: 270499 - DNA, 12 bp, Artificial Sequence
  Oligonucleotide primer for the detection of SNP TSC0002164
gagagagagaga

SEQ ID NO: 270500 - DNA, 12 bp, Artificial Sequence
  Oligonucleotide primer for the detection of SNP TSC0002165
atatattatata

SEQ ID NO: 270501 - DNA, 12 bp, Artificial Sequence
  Oligonucleotide primer for the detection of SNP TSC0002165
taggttatatat

SEQ ID NO: 270502 - DNA, 12 bp, Artificial Sequence
  Oligonucleotide primer for the detection of SNP TSC0002165
aaattatatata

SEQ ID NO: 270503 - DNA, 12 bp, Artificial Sequence
  Oligonucleotide primer for the detection of SNP TSC0002165
gtatgttatata

SEQ ID NO: 270504 - DNA, 12 bp, Artificial Sequence
  Oligonucleotide primer for the detection of SNP TSC0002166
taaaacctttta

SEQ ID NO: 270505 - DNA, 12 bp, Artificial Sequence
  Oligonukleotid-Primer
agtataagaaat

SEQ ID NO: 270506 - DNA, 12 bp, Artificial Sequence
  Oligonucleotide primer for the detection of SNP TSC0002166
aacacaaaaaac

SEQ ID NO: 270507 - DNA, 12 bp, Artificial Sequence
  Oligonucleotide primer for the detection of SNP TSC0002166
ttgaggtttttt

SEQ ID NO: 270508 - DNA, 12 bp, Artificial Sequence
  Oligonucleotide primer for the detection of SNP TSC0002167
ttaaatttaaat

SEQ ID NO: 270509 - DNA, 12 bp, Artificial Sequence
  Oligonucleotide primer for the detection of SNP TSC0002167
gagatatataaa

SEQ ID NO: 270510 - DNA, 12 bp, Artificial Sequence
  Oligonucleotide primer for the detection of SNP TSC0002168
cccacaaaaatt

SEQ ID NO: 270511 - DNA, 12 bp, Artificial Sequence
  Oligonucleotide primer for the detection of SNP TSC0002168
cccgcaaaaatt

SEQ ID NO: 270512 - DNA, 12 bp, Artificial Sequence
  Oligonucleotide primer for the detection of SNP TSC0002168
ttattttagtta

SEQ ID NO: 270513 - DNA, 12 bp, Artificial Sequence
  Oligonucleotide primer for the detection of SNP TSC0002169
taacaatattat

SEQ ID NO: 270514 - DNA, 12 bp, Artificial Sequence
  Oligonucleotide primer for the detection of SNP TSC0002169
ttaaaaatggta

SEQ ID NO: 270515 - DNA, 12 bp, Artificial Sequence
  Oligonucleotide primer for the detection of SNP TSC0002169
ttaaaaacggta

SEQ ID NO: 270516 - DNA, 12 bp, Artificial Sequence
  Oligonucleotide primer for the detection of SNP TSC0002170
aatacaatacaa

SEQ ID NO: 270517 - DNA, 12 bp, Artificial Sequence
  Oligonucleotide primer for the detection of SNP TSC0002170
tttagtttataa

SEQ ID NO: 270518 - DNA, 12 bp, Artificial Sequence
  Oligonucleotide primer for the detection of SNP TSC0002170
ctcaactcataa

SEQ ID NO: 270519 - DNA, 12 bp, Artificial Sequence
  Oligonucleotide primer for the detection of SNP TSC0002170
ggtgtagtgtag

SEQ ID NO: 270520 - DNA, 12 bp, Artificial Sequence
  Oligonucleotide primer for the detection of SNP TSC0002171
ttacattaaaat

SEQ ID NO: 270521 - DNA, 12 bp, Artificial Sequence
  Oligonucleotide primer for the detection of SNP TSC0002171
taatataaataa

SEQ ID NO: 270522 - DNA, 12 bp, Artificial Sequence
  Oligonucleotide primer for the detection of SNP TSC0002171
caatataaataa

SEQ ID NO: 270523 - DNA, 12 bp, Artificial Sequence
  Oligonucleotide primer for the detection of SNP TSC0002171
ttgtattaaaat

SEQ ID NO: 270524 - DNA, 12 bp, Artificial Sequence
  Oligonucleotide primer for the detection of SNP TSC0002172
atatatttttaa

SEQ ID NO: 270525 - DNA, 12 bp, Artificial Sequence
  Oligonucleotide primer for the detection of SNP TSC0002172
ggatttttttgg

SEQ ID NO: 270526 - DNA, 12 bp, Artificial Sequence
  Oligonucleotide primer for the detection of SNP TSC0002172
aattcttttaaa

SEQ ID NO: 270527 - DNA, 12 bp, Artificial Sequence
  Oligonucleotide primer for the detection of SNP TSC0002172
tatttttagttt

SEQ ID NO: 270528 - DNA, 12 bp, Artificial Sequence
  Oligonucleotide primer for the detection of SNP TSC0002173
actcttcaaata

SEQ ID NO: 270529 - DNA, 12 bp, Artificial Sequence
  Oligonucleotide primer for the detection of SNP TSC0002173
tttgttaatttg

SEQ ID NO: 270530 - DNA, 12 bp, Artificial Sequence
  Oligonucleotide primer for the detection of SNP TSC0002174
tcacctataaac

SEQ ID NO: 270531 - DNA, 12 bp, Artificial Sequence
  Oligonucleotide primer for the detection of SNP TSC0002174
tataaaattata

SEQ ID NO: 270532 - DNA, 12 bp, Artificial Sequence
  Oligonucleotide primer for the detection of SNP TSC0002174
cataaaactata

SEQ ID NO: 270533 - DNA, 12 bp, Artificial Sequence
  Oligonucleotide primer for the detection of SNP TSC0002174
ttatttgtagat

SEQ ID NO: 270534 - DNA, 12 bp, Artificial Sequence
  Oligonucleotide primer for the detection of SNP TSC0002175
cctcaaaaaaca

SEQ ID NO: 270535 - DNA, 12 bp, Artificial Sequence
  Oligonucleotide primer for the detection of SNP TSC0002175
tttattatggtt

SEQ ID NO: 270536 - DNA, 12 bp, Artificial Sequence
  Oligonucleotide primer for the detection of SNP TSC0002175
ttttaccataac

SEQ ID NO: 270537 - DNA, 12 bp, Artificial Sequence
  Oligonucleotide primer for the detection of SNP TSC0002175
attttaagaaat

SEQ ID NO: 270538 - DNA, 12 bp, Artificial Sequence
  Oligonucleotide primer for the detection of SNP TSC0002176
ctatctaaaatt

SEQ ID NO: 270539 - DNA, 12 bp, Artificial Sequence
  Oligonucleotide primer for the detection of SNP TSC0002176
ttaatgttttta

SEQ ID NO: 270540 - DNA, 12 bp, Artificial Sequence
  Oligonucleotide primer for the detection of SNP TSC0002176
ttaatatctcca

SEQ ID NO: 270541 - DNA, 12 bp, Artificial Sequence
  Oligonucleotide primer for the detection of SNP TSC0002176
ttatttagaatt

SEQ ID NO: 270542 - DNA, 12 bp, Artificial Sequence
  Oligonucleotide primer for the detection of SNP TSC0002177
atcccttctcac

SEQ ID NO: 270543 - DNA, 12 bp, Artificial Sequence
  Oligonucleotide primer for the detection of SNP TSC0002177
atcccttctcgc

SEQ ID NO: 270544 - DNA, 12 bp, Artificial Sequence
  Oligonucleotide primer for the detection of SNP TSC0002177
ttgtagtgtttg

SEQ ID NO: 270545 - DNA, 12 bp, Artificial Sequence
  Oligonucleotide primer for the detection of SNP TSC0002177
ttgtagtgttcg

SEQ ID NO: 270546 - DNA, 12 bp, Artificial Sequence
  Oligonucleotide primer for the detection of SNP TSC0002178
aacaaaactccc

SEQ ID NO: 270547 - DNA, 12 bp, Artificial Sequence
  Oligonucleotide primer for the detection of SNP TSC0002178
aacgaaactccc

SEQ ID NO: 270548 - DNA, 12 bp, Artificial Sequence
  Oligonucleotide primer for the detection of SNP TSC0002178
tgtggtagtagg

SEQ ID NO: 270549 - DNA, 12 bp, Artificial Sequence
  Oligonucleotide primer for the detection of SNP TSC0002178
tataataacaaa

SEQ ID NO: 270550 - DNA, 12 bp, Artificial Sequence
  Oligonucleotide primer for the detection of SNP TSC0002178
ggtggggttttt

SEQ ID NO: 270551 - DNA, 12 bp, Artificial Sequence
  Oligonucleotide primer for the detection of SNP TSC0002178
ggcggggttttt

SEQ ID NO: 270552 - DNA, 12 bp, Artificial Sequence
  Oligonucleotide primer for the detection of SNP TSC0002178
ggtggggttttc

SEQ ID NO: 270553 - DNA, 12 bp, Artificial Sequence
  Oligonucleotide primer for the detection of SNP TSC0002178
ggcggggttttc

SEQ ID NO: 270554 - DNA, 12 bp, Artificial Sequence
  Oligonucleotide primer for the detection of SNP TSC0002179
atacacaacatt

SEQ ID NO: 270555 - DNA, 12 bp, Artificial Sequence
  Oligonucleotide primer for the detection of SNP TSC0002179
atacgcaacatt

SEQ ID NO: 270556 - DNA, 12 bp, Artificial Sequence
  Oligonucleotide primer for the detection of SNP TSC0002179
aagtatgtttat

SEQ ID NO: 270557 - DNA, 12 bp, Artificial Sequence
  Oligonucleotide primer for the detection of SNP TSC0002179
atatatttataa

SEQ ID NO: 270558 - DNA, 12 bp, Artificial Sequence
  Oligonucleotide primer for the detection of SNP TSC0002179
atatgtaatatt

SEQ ID NO: 270559 - DNA, 12 bp, Artificial Sequence
  Oligonucleotide primer for the detection of SNP TSC0002179
atacgtaatatt

SEQ ID NO: 270560 - DNA, 12 bp, Artificial Sequence
  Oligonucleotide primer for the detection of SNP TSC0002180
acaatccctttt

SEQ ID NO: 270561 - DNA, 12 bp, Artificial Sequence
  Oligonucleotide primer for the detection of SNP TSC0002180
ataagaatataa

SEQ ID NO: 270562 - DNA, 12 bp, Artificial Sequence
  Oligonucleotide primer for the detection of SNP TSC0002181
aaataatattac

SEQ ID NO: 270563 - DNA, 12 bp, Artificial Sequence
  Oligonucleotide primer for the detection of SNP TSC0002181
ttttttatatta

SEQ ID NO: 270564 - DNA, 12 bp, Artificial Sequence
  Oligonucleotide primer for the detection of SNP TSC0002183
actataatattt

SEQ ID NO: 270565 - DNA, 12 bp, Artificial Sequence
  Oligonucleotide primer for the detection of SNP TSC0002184
acaacaaaatca

SEQ ID NO: 270566 - DNA, 12 bp, Artificial Sequence
  Oligonucleotide primer for the detection of SNP TSC0002184
acaacgaaatca

SEQ ID NO: 270567 - DNA, 12 bp, Artificial Sequence
  Oligonucleotide primer for the detection of SNP TSC0002184
ggtatgtttaag

SEQ ID NO: 270568 - DNA, 12 bp, Artificial Sequence
  Oligonucleotide primer for the detection of SNP TSC0002184
ggtacgtttaag

SEQ ID NO: 270569 - DNA, 12 bp, Artificial Sequence
  Oligonucleotide primer for the detection of SNP TSC0002184
aacacactcaaa

SEQ ID NO: 270570 - DNA, 12 bp, Artificial Sequence
  Oligonucleotide primer for the detection of SNP TSC0002184
aacacgctcaaa

SEQ ID NO: 270571 - DNA, 12 bp, Artificial Sequence
  Oligonucleotide primer for the detection of SNP TSC0002184
gtaatggggtta

SEQ ID NO: 270572 - DNA, 12 bp, Artificial Sequence
  Oligonucleotide primer for the detection of SNP TSC0002184
gtaacggggtta

SEQ ID NO: 270573 - DNA, 12 bp, Artificial Sequence
  Oligonucleotide primer for the detection of SNP TSC0002185
aaattaaacaca

SEQ ID NO: 270574 - DNA, 12 bp, Artificial Sequence
  Oligonukleotid-Primer
aaattaaacacg

SEQ ID NO: 270575 - DNA, 12 bp, Artificial Sequence
  Oligonucleotide primer for the detection of SNP TSC0002185
gggagtatagag

SEQ ID NO: 270576 - DNA, 12 bp, Artificial Sequence
  Oligonucleotide primer for the detection of SNP TSC0002185
aaaaacacaaaa

SEQ ID NO: 270577 - DNA, 12 bp, Artificial Sequence
  Oligonucleotide primer for the detection of SNP TSC0002185
ggattggatatg

SEQ ID NO: 270578 - DNA, 12 bp, Artificial Sequence
  Oligonucleotide primer for the detection of SNP TSC0002185
ggattggatacg

SEQ ID NO: 270579 - DNA, 12 bp, Artificial Sequence
  Oligonucleotide primer for the detection of SNP TSC0002186
accaccaaacta

SEQ ID NO: 270580 - DNA, 12 bp, Artificial Sequence
  Oligonucleotide primer for the detection of SNP TSC0002186
aaaggatgagtg

SEQ ID NO: 270581 - DNA, 12 bp, Artificial Sequence
  Oligonucleotide primer for the detection of SNP TSC0002188
atataaaaacat

SEQ ID NO: 270582 - DNA, 12 bp, Artificial Sequence
  Oligonucleotide primer for the detection of SNP TSC0002188
atataaaaacgt

SEQ ID NO: 270583 - DNA, 12 bp, Artificial Sequence
  Oligonucleotide primer for the detection of SNP TSC0002188
ttaagatataag

SEQ ID NO: 270584 - DNA, 12 bp, Artificial Sequence
  Oligonucleotide primer for the detection of SNP TSC0002190
aaaaaaccctaa

SEQ ID NO: 270585 - DNA, 12 bp, Artificial Sequence
  Oligonucleotide primer for the detection of SNP TSC0002190
ataggagagatt

SEQ ID NO: 270586 - DNA, 12 bp, Artificial Sequence
  Oligonucleotide primer for the detection of SNP TSC0002190
ataaaaaaaatt

SEQ ID NO: 270587 - DNA, 12 bp, Artificial Sequence
  Oligonucleotide primer for the detection of SNP TSC0002190
aaaaaattttga

SEQ ID NO: 270588 - DNA, 12 bp, Artificial Sequence
  Oligonucleotide primer for the detection of SNP TSC0002192
aatttacaatac

SEQ ID NO: 270589 - DNA, 12 bp, Artificial Sequence
  Oligonucleotide primer for the detection of SNP TSC0002192
ttgttagttata

SEQ ID NO: 270590 - DNA, 12 bp, Artificial Sequence
  Oligonucleotide primer for the detection of SNP TSC0002193
caaaactaaaca

SEQ ID NO: 270591 - DNA, 12 bp, Artificial Sequence
  Oligonucleotide primer for the detection of SNP TSC0002193
caaaactaaacg

SEQ ID NO: 270592 - DNA, 12 bp, Artificial Sequence
  Oligonucleotide primer for the detection of SNP TSC0002193
ttattaattttt

SEQ ID NO: 270593 - DNA, 12 bp, Artificial Sequence
  Oligonucleotide primer for the detection of SNP TSC0002193
ccattaaccttt

SEQ ID NO: 270594 - DNA, 12 bp, Artificial Sequence
  Oligonucleotide primer for the detection of SNP TSC0002193
gtagagttggat

SEQ ID NO: 270595 - DNA, 12 bp, Artificial Sequence
  Oligonucleotide primer for the detection of SNP TSC0002193
gtagagttggac

SEQ ID NO: 270596 - DNA, 12 bp, Artificial Sequence
  Oligonucleotide primer for the detection of SNP TSC0002194
aaacattatttt

SEQ ID NO: 270597 - DNA, 12 bp, Artificial Sequence
  Oligonucleotide primer for the detection of SNP TSC0002194
ttttagtattta

SEQ ID NO: 270598 - DNA, 12 bp, Artificial Sequence
  Oligonucleotide primer for the detection of SNP TSC0002195
aaatattccttt

SEQ ID NO: 270599 - DNA, 12 bp, Artificial Sequence
  Oligonucleotide primer for the detection of SNP TSC0002195
gtttaagaaaaa

SEQ ID NO: 270600 - DNA, 12 bp, Artificial Sequence
  Oligonucleotide primer for the detection of SNP TSC0002196
aaaaaacacaaa

SEQ ID NO: 270601 - DNA, 12 bp, Artificial Sequence
  Oligonucleotide primer for the detection of SNP TSC0002196
ttgttttgtaag

SEQ ID NO: 270602 - DNA, 12 bp, Artificial Sequence
  Oligonucleotide primer for the detection of SNP TSC0002196
tactttataaaa

SEQ ID NO: 270603 - DNA, 12 bp, Artificial Sequence
  Oligonucleotide primer for the detection of SNP TSC0002196
aaaaatataaat

SEQ ID NO: 270604 - DNA, 12 bp, Artificial Sequence
  Oligonucleotide primer for the detection of SNP TSC0002198
ttctatataacc

SEQ ID NO: 270605 - DNA, 12 bp, Artificial Sequence
  Oligonucleotide primer for the detection of SNP TSC0002198
ttgtttttaata

SEQ ID NO: 270606 - DNA, 12 bp, Artificial Sequence
  Oligonucleotide primer for the detection of SNP TSC0002198
ttatttttaata

SEQ ID NO: 270607 - DNA, 12 bp, Artificial Sequence
  Oligonucleotide primer for the detection of SNP TSC0002198
ttttgtgtgatt

SEQ ID NO: 270608 - DNA, 12 bp, Artificial Sequence
  Oligonucleotide primer for the detection of SNP TSC0002199
aaatttaactat

SEQ ID NO: 270609 - DNA, 12 bp, Artificial Sequence
  Oligonucleotide primer for the detection of SNP TSC0002199
gaatatttggga

SEQ ID NO: 270610 - DNA, 12 bp, Artificial Sequence
  Oligonucleotide primer for the detection of SNP TSC0002200
taccttcacact

SEQ ID NO: 270611 - DNA, 12 bp, Artificial Sequence
  Oligonucleotide primer for the detection of SNP TSC0002200
ttatgatggtaa

SEQ ID NO: 270612 - DNA, 12 bp, Artificial Sequence
  Oligonucleotide primer for the detection of SNP TSC0002200
ttataataacaa

SEQ ID NO: 270613 - DNA, 12 bp, Artificial Sequence
  Oligonucleotide primer for the detection of SNP TSC0002201
aacaacacatca

SEQ ID NO: 270614 - DNA, 12 bp, Artificial Sequence
  Oligonucleotide primer for the detection of SNP TSC0002201
aacaacacgtca

SEQ ID NO: 270615 - DNA, 12 bp, Artificial Sequence
  Oligonucleotide primer for the detection of SNP TSC0002201
tgtgttggatta

SEQ ID NO: 270616 - DNA, 12 bp, Artificial Sequence
  Oligonucleotide primer for the detection of SNP TSC0002202
aaattaaaattc

SEQ ID NO: 270617 - DNA, 12 bp, Artificial Sequence
  Oligonucleotide primer for the detection of SNP TSC0002202
tagtggagatag

SEQ ID NO: 270618 - DNA, 12 bp, Artificial Sequence
  Oligonucleotide primer for the detection of SNP TSC0002203
ataacacttaat

SEQ ID NO: 270619 - DNA, 12 bp, Artificial Sequence
  Oligonucleotide primer for the detection of SNP TSC0002203
ttgttgttatag

SEQ ID NO: 270620 - DNA, 12 bp, Artificial Sequence
  Oligonucleotide primer for the detection of SNP TSC0002204
atattacttcac

SEQ ID NO: 270621 - DNA, 12 bp, Artificial Sequence
  Oligonucleotide primer for the detection of SNP TSC0002204
tttatagagtaa

SEQ ID NO: 270622 - DNA, 12 bp, Artificial Sequence
  Oligonucleotide primer for the detection of SNP TSC0002205
aacactttaaat

SEQ ID NO: 270623 - DNA, 12 bp, Artificial Sequence
  Oligonucleotide primer for the detection of SNP TSC0002205
gatggaaggaag

SEQ ID NO: 270624 - DNA, 12 bp, Artificial Sequence
  Oligonucleotide primer for the detection of SNP TSC0002205
aataaaaaaaaa

SEQ ID NO: 270625 - DNA, 12 bp, Artificial Sequence
  Oligonucleotide primer for the detection of SNP TSC0002205
agtattttgaat

SEQ ID NO: 270626 - DNA, 12 bp, Artificial Sequence
  Oligonucleotide primer for the detection of SNP TSC0002206
taatatattaac

SEQ ID NO: 270627 - DNA, 12 bp, Artificial Sequence
  Oligonucleotide primer for the detection of SNP TSC0002206
tttttgggaaag

SEQ ID NO: 270628 - DNA, 12 bp, Artificial Sequence
  Oligonucleotide primer for the detection of SNP TSC0002207
tttaaataaacc

SEQ ID NO: 270629 - DNA, 12 bp, Artificial Sequence
  Oligonucleotide primer for the detection of SNP TSC0002207
ttgtgatattga

SEQ ID NO: 270630 - DNA, 12 bp, Artificial Sequence
  Oligonucleotide primer for the detection of SNP TSC0002208
acaaatattata

SEQ ID NO: 270631 - DNA, 12 bp, Artificial Sequence
  Oligonucleotide primer for the detection of SNP TSC0002208
attgattgtttg

SEQ ID NO: 270632 - DNA, 12 bp, Artificial Sequence
  Oligonucleotide primer for the detection of SNP TSC0002208
attaattactta

SEQ ID NO: 270633 - DNA, 12 bp, Artificial Sequence
  Oligonucleotide primer for the detection of SNP TSC0002208
gtaagtgttata

SEQ ID NO: 270634 - DNA, 12 bp, Artificial Sequence
  Oligonucleotide primer for the detection of SNP TSC0002209
cttattaaattt

SEQ ID NO: 270635 - DNA, 12 bp, Artificial Sequence
  Oligonucleotide primer for the detection of SNP TSC0002209
aaaagatatatg

SEQ ID NO: 270636 - DNA, 12 bp, Artificial Sequence
  Oligonucleotide primer for the detection of SNP TSC0002210
aatcaaaaattt

SEQ ID NO: 270637 - DNA, 12 bp, Artificial Sequence
  Oligonucleotide primer for the detection of SNP TSC0002211
tatatataaaac

SEQ ID NO: 270638 - DNA, 12 bp, Artificial Sequence
  Oligonucleotide primer for the detection of SNP TSC0002211
tgaatatttttt

SEQ ID NO: 270639 - DNA, 12 bp, Artificial Sequence
  Oligonucleotide primer for the detection of SNP TSC0002211
taaacatttttt

SEQ ID NO: 270640 - DNA, 12 bp, Artificial Sequence
  Oligonucleotide primer for the detection of SNP TSC0002211
gtatgtaaaatt

SEQ ID NO: 270641 - DNA, 12 bp, Artificial Sequence
  Oligonucleotide primer for the detection of SNP TSC0002212
caccatccattt

SEQ ID NO: 270642 - DNA, 12 bp, Artificial Sequence
  Oligonucleotide primer for the detection of SNP TSC0002212
agtgaagaataa

SEQ ID NO: 270643 - DNA, 12 bp, Artificial Sequence
  Oligonucleotide primer for the detection of SNP TSC0002213
atctaatctaat

SEQ ID NO: 270644 - DNA, 12 bp, Artificial Sequence
  Oligonucleotide primer for the detection of SNP TSC0002213
tgtgtttttata

SEQ ID NO: 270645 - DNA, 12 bp, Artificial Sequence
  Oligonucleotide primer for the detection of SNP TSC0002214
aataataccttc

SEQ ID NO: 270646 - DNA, 12 bp, Artificial Sequence
  Oligonucleotide primer for the detection of SNP TSC0002214
aattagaataat

SEQ ID NO: 270647 - DNA, 12 bp, Artificial Sequence
  Oligonucleotide primer for the detection of SNP TSC0002214
atcaaaataata

SEQ ID NO: 270648 - DNA, 12 bp, Artificial Sequence
  Oligonucleotide primer for the detection of SNP TSC0002214
aataatgttttt

SEQ ID NO: 270649 - DNA, 12 bp, Artificial Sequence
  Oligonucleotide primer for the detection of SNP TSC0002216
caaaataataaa

SEQ ID NO: 270650 - DNA, 12 bp, Artificial Sequence
  Oligonucleotide primer for the detection of SNP TSC0002216
actatttctcct

SEQ ID NO: 270651 - DNA, 12 bp, Artificial Sequence
  Oligonucleotide primer for the detection of SNP TSC0002216
taaaatgatgaa

SEQ ID NO: 270652 - DNA, 12 bp, Artificial Sequence
  Oligonucleotide primer for the detection of SNP TSC0002217
acacccacccta

SEQ ID NO: 270653 - DNA, 12 bp, Artificial Sequence
  Oligonucleotide primer for the detection of SNP TSC0002217
gtggtggggggt

SEQ ID NO: 270654 - DNA, 12 bp, Artificial Sequence
  Oligonucleotide primer for the detection of SNP TSC0002217
ataataaaaaat

SEQ ID NO: 270655 - DNA, 12 bp, Artificial Sequence
  Oligonucleotide primer for the detection of SNP TSC0002217
gtatttattttg

SEQ ID NO: 270656 - DNA, 12 bp, Artificial Sequence
  Oligonucleotide primer for the detection of SNP TSC0002218
aatttataaata

SEQ ID NO: 270657 - DNA, 12 bp, Artificial Sequence
  Oligonucleotide primer for the detection of SNP TSC0002218
atattaaattgt

SEQ ID NO: 270658 - DNA, 12 bp, Artificial Sequence
  Oligonucleotide primer for the detection of SNP TSC0002218
cacatcaaatta

SEQ ID NO: 270659 - DNA, 12 bp, Artificial Sequence
  Oligonucleotide primer for the detection of SNP TSC0002218
gatttataggta

SEQ ID NO: 270660 - DNA, 12 bp, Artificial Sequence
  Oligonucleotide primer for the detection of SNP TSC0002219
tacttatatatt

SEQ ID NO: 270661 - DNA, 12 bp, Artificial Sequence
  Oligonucleotide primer for the detection of SNP TSC0002219
taatgttgggaa

SEQ ID NO: 270662 - DNA, 12 bp, Artificial Sequence
  Oligonucleotide primer for the detection of SNP TSC0002221
tataacatttct

SEQ ID NO: 270663 - DNA, 12 bp, Artificial Sequence
  Oligonucleotide primer for the detection of SNP TSC0002221
tatttttttaaa

SEQ ID NO: 270664 - DNA, 12 bp, Artificial Sequence
  Oligonucleotide primer for the detection of SNP TSC0002222
actcccattaaa

SEQ ID NO: 270665 - DNA, 12 bp, Artificial Sequence
  Oligonucleotide primer for the detection of SNP TSC0002222
agttttattatg

SEQ ID NO: 270666 - DNA, 12 bp, Artificial Sequence
  Oligonucleotide primer for the detection of SNP TSC0002223
aactaaaactca

SEQ ID NO: 270667 - DNA, 12 bp, Artificial Sequence
  Oligonucleotide primer for the detection of SNP TSC0002223
tggagtaggtat

SEQ ID NO: 270668 - DNA, 12 bp, Artificial Sequence
  Oligonucleotide primer for the detection of SNP TSC0002223
taaaacaaacac

SEQ ID NO: 270669 - DNA, 12 bp, Artificial Sequence
  Oligonucleotide primer for the detection of SNP TSC0002223
ggttggagttta

SEQ ID NO: 270670 - DNA, 12 bp, Artificial Sequence
  Oligonucleotide primer for the detection of SNP TSC0002225
caacctacatat

SEQ ID NO: 270671 - DNA, 12 bp, Artificial Sequence
  Oligonucleotide primer for the detection of SNP TSC0002225
gaaaaaggaaaa

SEQ ID NO: 270672 - DNA, 12 bp, Artificial Sequence
  Oligonucleotide primer for the detection of SNP TSC0002225
tagtttgtatgt

SEQ ID NO: 270673 - DNA, 12 bp, Artificial Sequence
  Oligonucleotide primer for the detection of SNP TSC0002226
taactaaatctt

SEQ ID NO: 270674 - DNA, 12 bp, Artificial Sequence
  Oligonucleotide primer for the detection of SNP TSC0002226
tttatattgttt

SEQ ID NO: 270675 - DNA, 12 bp, Artificial Sequence
  Oligonucleotide primer for the detection of SNP TSC0002226
cctatattattc

SEQ ID NO: 270676 - DNA, 12 bp, Artificial Sequence
  Oligonucleotide primer for the detection of SNP TSC0002226
tgattaaatttt

SEQ ID NO: 270677 - DNA, 12 bp, Artificial Sequence
  Oligonucleotide primer for the detection of SNP TSC0002227
cctaaatatctt

SEQ ID NO: 270678 - DNA, 12 bp, Artificial Sequence
  Oligonucleotide primer for the detection of SNP TSC0002227
tttgattgataa

SEQ ID NO: 270679 - DNA, 12 bp, Artificial Sequence
  Oligonucleotide primer for the detection of SNP TSC0002227
tttgatcgataa

SEQ ID NO: 270680 - DNA, 12 bp, Artificial Sequence
  Oligonucleotide primer for the detection of SNP TSC0002227
tttaaccaataa

SEQ ID NO: 270681 - DNA, 12 bp, Artificial Sequence
  Oligonucleotide primer for the detection of SNP TSC0002227
tttaaccgataa

SEQ ID NO: 270682 - DNA, 12 bp, Artificial Sequence
  Oligonucleotide primer for the detection of SNP TSC0002227
tttgagtgtttt

SEQ ID NO: 270683 - DNA, 12 bp, Artificial Sequence
  Oligonucleotide primer for the detection of SNP TSC0002230
aaattcacatct

SEQ ID NO: 270684 - DNA, 12 bp, Artificial Sequence
  Oligonucleotide primer for the detection of SNP TSC0002230
gatatattttta

SEQ ID NO: 270685 - DNA, 12 bp, Artificial Sequence
  Oligonucleotide primer for the detection of SNP TSC0002231
aaaaatactctc

SEQ ID NO: 270686 - DNA, 12 bp, Artificial Sequence
  Oligonucleotide primer for the detection of SNP TSC0002231
aaatatagtaaa

SEQ ID NO: 270687 - DNA, 12 bp, Artificial Sequence
  Oligonucleotide primer for the detection of SNP TSC0002232
ttatatctttat

SEQ ID NO: 270688 - DNA, 12 bp, Artificial Sequence
  Oligonucleotide primer for the detection of SNP TSC0002232
aggaatataaag

SEQ ID NO: 270689 - DNA, 12 bp, Artificial Sequence
  Oligonucleotide primer for the detection of SNP TSC0002233
accaccataaca

SEQ ID NO: 270690 - DNA, 12 bp, Artificial Sequence
  Oligonucleotide primer for the detection of SNP TSC0002233
atataggtatat

SEQ ID NO: 270691 - DNA, 12 bp, Artificial Sequence
  Oligonukleotid-Primer
acataaatatac

SEQ ID NO: 270692 - DNA, 12 bp, Artificial Sequence
  Oligonucleotide primer for the detection of SNP TSC0002233
attattatggta

SEQ ID NO: 270693 - DNA, 12 bp, Artificial Sequence
  Oligonucleotide primer for the detection of SNP TSC0002234
ccactcaatcct

SEQ ID NO: 270694 - DNA, 12 bp, Artificial Sequence
  Oligonucleotide primer for the detection of SNP TSC0002234
tgttgatgagga

SEQ ID NO: 270695 - DNA, 12 bp, Artificial Sequence
  Oligonukleotid-Primer
ctaaacaaaact

SEQ ID NO: 270696 - DNA, 12 bp, Artificial Sequence
  Oligonucleotide primer for the detection of SNP TSC0002236
tatttattagag

SEQ ID NO: 270697 - DNA, 12 bp, Artificial Sequence
  Oligonucleotide primer for the detection of SNP TSC0002237
acaacccaaaca

SEQ ID NO: 270698 - DNA, 12 bp, Artificial Sequence
  Oligonucleotide primer for the detection of SNP TSC0002237
gttatattatat

SEQ ID NO: 270699 - DNA, 12 bp, Artificial Sequence
  Oligonucleotide primer for the detection of SNP TSC0002237
attacatcacat

SEQ ID NO: 270700 - DNA, 12 bp, Artificial Sequence
  Oligonucleotide primer for the detection of SNP TSC0002237
atagtttaggta

SEQ ID NO: 270701 - DNA, 12 bp, Artificial Sequence
  Oligonucleotide primer for the detection of SNP TSC0002239
taaacaaaaact

SEQ ID NO: 270702 - DNA, 12 bp, Artificial Sequence
  Oligonucleotide primer for the detection of SNP TSC0002239
ttggggaatata

SEQ ID NO: 270703 - DNA, 12 bp, Artificial Sequence
  Oligonucleotide primer for the detection of SNP TSC0002240
aatataaatcta

SEQ ID NO: 270704 - DNA, 12 bp, Artificial Sequence
  Oligonucleotide primer for the detection of SNP TSC0002240
tgtttatatgta

SEQ ID NO: 270705 - DNA, 12 bp, Artificial Sequence
  Oligonucleotide primer for the detection of SNP TSC0002240
tacttatatata

SEQ ID NO: 270706 - DNA, 12 bp, Artificial Sequence
  Oligonucleotide primer for the detection of SNP TSC0002240
gatatggattta

SEQ ID NO: 270707 - DNA, 12 bp, Artificial Sequence
  Oligonucleotide primer for the detection of SNP TSC0002241
attaaataaaaa

SEQ ID NO: 270708 - DNA, 12 bp, Artificial Sequence
  Oligonucleotide primer for the detection of SNP TSC0002241
atgggttatgat

SEQ ID NO: 270709 - DNA, 12 bp, Artificial Sequence
  Oligonucleotide primer for the detection of SNP TSC0002241
aataaatcataa

SEQ ID NO: 270710 - DNA, 12 bp, Artificial Sequence
  Oligonucleotide primer for the detection of SNP TSC0002241
attggataaaaa

SEQ ID NO: 270711 - DNA, 12 bp, Artificial Sequence
  Oligonucleotide primer for the detection of SNP TSC0002243
aaacaaactccc

SEQ ID NO: 270712 - DNA, 12 bp, Artificial Sequence
  Oligonucleotide primer for the detection of SNP TSC0002243
atttatatttat

SEQ ID NO: 270713 - DNA, 12 bp, Artificial Sequence
  Oligonucleotide primer for the detection of SNP TSC0002243
agataaattttt

SEQ ID NO: 270714 - DNA, 12 bp, Artificial Sequence
  Oligonucleotide primer for the detection of SNP TSC0002244
atataacaactt

SEQ ID NO: 270715 - DNA, 12 bp, Artificial Sequence
  Oligonucleotide primer for the detection of SNP TSC0002244
gatagtaatgta

SEQ ID NO: 270716 - DNA, 12 bp, Artificial Sequence
  Oligonucleotide primer for the detection of SNP TSC0002244
aacaataatata

SEQ ID NO: 270717 - DNA, 12 bp, Artificial Sequence
  Oligonucleotide primer for the detection of SNP TSC0002245
aatactaattta

SEQ ID NO: 270718 - DNA, 12 bp, Artificial Sequence
  Oligonucleotide primer for the detection of SNP TSC0002245
gtaatggtaatt

SEQ ID NO: 270719 - DNA, 12 bp, Artificial Sequence
  Oligonucleotide primer for the detection of SNP TSC0002245
ataataataatt

SEQ ID NO: 270720 - DNA, 12 bp, Artificial Sequence
  Oligonucleotide primer for the detection of SNP TSC0002245
aatattgatttg

SEQ ID NO: 270721 - DNA, 12 bp, Artificial Sequence
  Oligonucleotide primer for the detection of SNP TSC0002247
aacttaaaattc

SEQ ID NO: 270722 - DNA, 12 bp, Artificial Sequence
  Oligonucleotide primer for the detection of SNP TSC0002247
ataggtatagga

SEQ ID NO: 270723 - DNA, 12 bp, Artificial Sequence
  Oligonucleotide primer for the detection of SNP TSC0002247
acaaatacaaaa

SEQ ID NO: 270724 - DNA, 12 bp, Artificial Sequence
  Oligonucleotide primer for the detection of SNP TSC0002247
aatttaagattt

SEQ ID NO: 270725 - DNA, 12 bp, Artificial Sequence
  Oligonucleotide primer for the detection of SNP TSC0002248
caaaacaatctt

SEQ ID NO: 270726 - DNA, 12 bp, Artificial Sequence
  Oligonucleotide primer for the detection of SNP TSC0002248
attgattaatta

SEQ ID NO: 270727 - DNA, 12 bp, Artificial Sequence
  Oligonucleotide primer for the detection of SNP TSC0002249
acataaaccacc

SEQ ID NO: 270728 - DNA, 12 bp, Artificial Sequence
  Oligonucleotide primer for the detection of SNP TSC0002249
ttattggttggg

SEQ ID NO: 270729 - DNA, 12 bp, Artificial Sequence
  Oligonucleotide primer for the detection of SNP TSC0002251
atattaacaata

SEQ ID NO: 270730 - DNA, 12 bp, Artificial Sequence
  Oligonucleotide primer for the detection of SNP TSC0002251
taaatgtatatt

SEQ ID NO: 270731 - DNA, 12 bp, Artificial Sequence
  Oligonucleotide primer for the detection of SNP TSC0002251
taaatacacact

SEQ ID NO: 270732 - DNA, 12 bp, Artificial Sequence
  Oligonucleotide primer for the detection of SNP TSC0002251
gtattagtaatg

SEQ ID NO: 270733 - DNA, 12 bp, Artificial Sequence
  Oligonucleotide primer for the detection of SNP TSC0002252
aaataacctacc

SEQ ID NO: 270734 - DNA, 12 bp, Artificial Sequence
  Oligonucleotide primer for the detection of SNP TSC0002252
aatttttttttg

SEQ ID NO: 270735 - DNA, 12 bp, Artificial Sequence
  Oligonucleotide primer for the detection of SNP TSC0002253
ataaaatcctaa

SEQ ID NO: 270736 - DNA, 12 bp, Artificial Sequence
  Oligonucleotide primer for the detection of SNP TSC0002253
agtggaagaaat

SEQ ID NO: 270737 - DNA, 12 bp, Artificial Sequence
  Oligonucleotide primer for the detection of SNP TSC0002255
cttacaaaacaa

SEQ ID NO: 270738 - DNA, 12 bp, Artificial Sequence
  Oligonucleotide primer for the detection of SNP TSC0002255
gagaggtttatg

SEQ ID NO: 270739 - DNA, 12 bp, Artificial Sequence
  Oligonucleotide primer for the detection of SNP TSC0002255
aaaaaatttata

SEQ ID NO: 270740 - DNA, 12 bp, Artificial Sequence
  Oligonucleotide primer for the detection of SNP TSC0002255
gtagaatagttt

SEQ ID NO: 270741 - DNA, 12 bp, Artificial Sequence
  Oligonucleotide primer for the detection of SNP TSC0002256
ataaacctttat

SEQ ID NO: 270742 - DNA, 12 bp, Artificial Sequence
  Oligonucleotide primer for the detection of SNP TSC0002256
taatggttttta

SEQ ID NO: 270743 - DNA, 12 bp, Artificial Sequence
  Oligonucleotide primer for the detection of SNP TSC0002257
ttaaaataaatc

SEQ ID NO: 270744 - DNA, 12 bp, Artificial Sequence
  Oligonucleotide primer for the detection of SNP TSC0002257
ataatgtttaaa

SEQ ID NO: 270745 - DNA, 12 bp, Artificial Sequence
  Oligonucleotide primer for the detection of SNP TSC0002257
ataatatttaaa

SEQ ID NO: 270746 - DNA, 12 bp, Artificial Sequence
  Oligonucleotide primer for the detection of SNP TSC0002257
ttagagtgagtt

SEQ ID NO: 270747 - DNA, 12 bp, Artificial Sequence
  Oligonucleotide primer for the detection of SNP TSC0002258
acataaatttaa

SEQ ID NO: 270748 - DNA, 12 bp, Artificial Sequence
  Oligonucleotide primer for the detection of SNP TSC0002258
gatgttatttgt

SEQ ID NO: 270749 - DNA, 12 bp, Artificial Sequence
  Oligonucleotide primer for the detection of SNP TSC0002258
gatgttatttgc

SEQ ID NO: 270750 - DNA, 12 bp, Artificial Sequence
  Oligonucleotide primer for the detection of SNP TSC0002258
aatactatttac

SEQ ID NO: 270751 - DNA, 12 bp, Artificial Sequence
  Oligonucleotide primer for the detection of SNP TSC0002258
agtatgagtttg

SEQ ID NO: 270752 - DNA, 12 bp, Artificial Sequence
  Oligonucleotide primer for the detection of SNP TSC0002259
ctctccaaaata

SEQ ID NO: 270753 - DNA, 12 bp, Artificial Sequence
  Oligonucleotide primer for the detection of SNP TSC0002259
tgtttttttgtt

SEQ ID NO: 270754 - DNA, 12 bp, Artificial Sequence
  Oligonucleotide primer for the detection of SNP TSC0002259
cctatccctcta

SEQ ID NO: 270755 - DNA, 12 bp, Artificial Sequence
  Oligonucleotide primer for the detection of SNP TSC0002259
tttttagagtgt

SEQ ID NO: 270756 - DNA, 12 bp, Artificial Sequence
  Oligonucleotide primer for the detection of SNP TSC0002260
tattatccaatt

SEQ ID NO: 270757 - DNA, 12 bp, Artificial Sequence
  Oligonucleotide primer for the detection of SNP TSC0002260
tattatccgatt

SEQ ID NO: 270758 - DNA, 12 bp, Artificial Sequence
  Oligonucleotide primer for the detection of SNP TSC0002260
taataataaagg

SEQ ID NO: 270759 - DNA, 12 bp, Artificial Sequence
  Oligonucleotide primer for the detection of SNP TSC0002262
cttaacactaaa

SEQ ID NO: 270760 - DNA, 12 bp, Artificial Sequence
  Oligonucleotide primer for the detection of SNP TSC0002262
atgttaaagtga

SEQ ID NO: 270761 - DNA, 12 bp, Artificial Sequence
  Oligonucleotide primer for the detection of SNP TSC0002262
atactaaaataa

SEQ ID NO: 270762 - DNA, 12 bp, Artificial Sequence
  Oligonucleotide primer for the detection of SNP TSC0002262
tttggtattaaa

SEQ ID NO: 270763 - DNA, 12 bp, Artificial Sequence
  Oligonucleotide primer for the detection of SNP TSC0002263
actcttaaattt

SEQ ID NO: 270764 - DNA, 12 bp, Artificial Sequence
  Oligonucleotide primer for the detection of SNP TSC0002263
ttttgtaatttg

SEQ ID NO: 270765 - DNA, 12 bp, Artificial Sequence
  Oligonucleotide primer for the detection of SNP TSC0002263
ttttgtaattcg

SEQ ID NO: 270766 - DNA, 12 bp, Artificial Sequence
  Oligonucleotide primer for the detection of SNP TSC0002264
aaaaataccaca

SEQ ID NO: 270767 - DNA, 12 bp, Artificial Sequence
  Oligonucleotide primer for the detection of SNP TSC0002264
atttggaatatt

SEQ ID NO: 270768 - DNA, 12 bp, Artificial Sequence
  Oligonucleotide primer for the detection of SNP TSC0002264
atttaaaacatt

SEQ ID NO: 270769 - DNA, 12 bp, Artificial Sequence
  Oligonucleotide primer for the detection of SNP TSC0002264
aaaaatgttata

SEQ ID NO: 270770 - DNA, 12 bp, Artificial Sequence
  Oligonucleotide primer for the detection of SNP TSC0002268
ttatactccaac

SEQ ID NO: 270771 - DNA, 12 bp, Artificial Sequence
  Oligonucleotide primer for the detection of SNP TSC0002268
ttttgattttta

SEQ ID NO: 270772 - DNA, 12 bp, Artificial Sequence
  Oligonucleotide primer for the detection of SNP TSC0002269
taataaaacccc

SEQ ID NO: 270773 - DNA, 12 bp, Artificial Sequence
  Oligonucleotide primer for the detection of SNP TSC0002269
ttttttgtaggg

SEQ ID NO: 270774 - DNA, 12 bp, Artificial Sequence
  Oligonucleotide primer for the detection of SNP TSC0002270
tacaaaatttat

SEQ ID NO: 270775 - DNA, 12 bp, Artificial Sequence
  Oligonucleotide primer for the detection of SNP TSC0002270
atgaatgtttta

SEQ ID NO: 270776 - DNA, 12 bp, Artificial Sequence
  Oligonucleotide primer for the detection of SNP TSC0002270
ataaatacttca

SEQ ID NO: 270777 - DNA, 12 bp, Artificial Sequence
  Oligonucleotide primer for the detection of SNP TSC0002270
tgtagaatttat

SEQ ID NO: 270778 - DNA, 12 bp, Artificial Sequence
  Oligonucleotide primer for the detection of SNP TSC0002271
aataattatacc

SEQ ID NO: 270779 - DNA, 12 bp, Artificial Sequence
  Oligonucleotide primer for the detection of SNP TSC0002271
gataattatacc

SEQ ID NO: 270780 - DNA, 12 bp, Artificial Sequence
  Oligonucleotide primer for the detection of SNP TSC0002271
ttgaaaagttta

SEQ ID NO: 270781 - DNA, 12 bp, Artificial Sequence
  Oligonucleotide primer for the detection of SNP TSC0002272
aataatacttat

SEQ ID NO: 270782 - DNA, 12 bp, Artificial Sequence
  Oligonucleotide primer for the detection of SNP TSC0002272
ttttattattta

SEQ ID NO: 270783 - DNA, 12 bp, Artificial Sequence
  Oligonucleotide primer for the detection of SNP TSC0002273
tccaaaaaaaaa

SEQ ID NO: 270784 - DNA, 12 bp, Artificial Sequence
  Oligonucleotide primer for the detection of SNP TSC0002273
tagataatttag

SEQ ID NO: 270785 - DNA, 12 bp, Artificial Sequence
  Oligonucleotide primer for the detection of SNP TSC0002273
caaataatccaa

SEQ ID NO: 270786 - DNA, 12 bp, Artificial Sequence
  Oligonucleotide primer for the detection of SNP TSC0002273
tttaggaaagaa

SEQ ID NO: 270787 - DNA, 12 bp, Artificial Sequence
  Oligonucleotide primer for the detection of SNP TSC0002274
atttcccatttc

SEQ ID NO: 270788 - DNA, 12 bp, Artificial Sequence
  Oligonucleotide primer for the detection of SNP TSC0002274
aaaggtttttta

SEQ ID NO: 270789 - DNA, 12 bp, Artificial Sequence
  Oligonucleotide primer for the detection of SNP TSC0002276
aatatactctat

SEQ ID NO: 270790 - DNA, 12 bp, Artificial Sequence
  Oligonucleotide primer for the detection of SNP TSC0002278
accttctatctt

SEQ ID NO: 270791 - DNA, 12 bp, Artificial Sequence
  Oligonucleotide primer for the detection of SNP TSC0002278
tttatgggtata

SEQ ID NO: 270792 - DNA, 12 bp, Artificial Sequence
  Oligonucleotide primer for the detection of SNP TSC0002279
aaaaaatataat

SEQ ID NO: 270793 - DNA, 12 bp, Artificial Sequence
  Oligonucleotide primer for the detection of SNP TSC0002279
atttgtttatgg

SEQ ID NO: 270794 - DNA, 12 bp, Artificial Sequence
  Oligonucleotide primer for the detection of SNP TSC0002280
atttcccaacct

SEQ ID NO: 270795 - DNA, 12 bp, Artificial Sequence
  Oligonucleotide primer for the detection of SNP TSC0002280
ggttatatgttg

SEQ ID NO: 270796 - DNA, 12 bp, Artificial Sequence
  Oligonucleotide primer for the detection of SNP TSC0002280
ggttatacgttg

SEQ ID NO: 270797 - DNA, 12 bp, Artificial Sequence
  Oligonucleotide primer for the detection of SNP TSC0002281
aaattttttttt

SEQ ID NO: 270798 - DNA, 12 bp, Artificial Sequence
  Oligonucleotide primer for the detection of SNP TSC0002281
tttttatgtttt

SEQ ID NO: 270799 - DNA, 12 bp, Artificial Sequence
  Oligonucleotide primer for the detection of SNP TSC0002281
tccctatatttt

SEQ ID NO: 270800 - DNA, 12 bp, Artificial Sequence
  Oligonucleotide primer for the detection of SNP TSC0002282
tttacactctat

SEQ ID NO: 270801 - DNA, 12 bp, Artificial Sequence
  Oligonucleotide primer for the detection of SNP TSC0002282
aattatatgtaa

SEQ ID NO: 270802 - DNA, 12 bp, Artificial Sequence
  Oligonucleotide primer for the detection of SNP TSC0002284
tctcattactaa

SEQ ID NO: 270803 - DNA, 12 bp, Artificial Sequence
  Oligonucleotide primer for the detection of SNP TSC0002284
tctcgttactaa

SEQ ID NO: 270804 - DNA, 12 bp, Artificial Sequence
  Oligonucleotide primer for the detection of SNP TSC0002284
tagtatgtaaat

SEQ ID NO: 270805 - DNA, 12 bp, Artificial Sequence
  Oligonucleotide primer for the detection of SNP TSC0002284
aatatataaata

SEQ ID NO: 270806 - DNA, 12 bp, Artificial Sequence
  Oligonucleotide primer for the detection of SNP TSC0002284
ttttttgttgtt

SEQ ID NO: 270807 - DNA, 12 bp, Artificial Sequence
  Oligonucleotide primer for the detection of SNP TSC0002284
tttttcgttgtt

SEQ ID NO: 270808 - DNA, 12 bp, Artificial Sequence
  Oligonucleotide primer for the detection of SNP TSC0002286
tctaatattttt

SEQ ID NO: 270809 - DNA, 12 bp, Artificial Sequence
  Oligonucleotide primer for the detection of SNP TSC0002286
atgaattattta

SEQ ID NO: 270810 - DNA, 12 bp, Artificial Sequence
  Oligonucleotide primer for the detection of SNP TSC0002287
ttccttaaacat

SEQ ID NO: 270811 - DNA, 12 bp, Artificial Sequence
  Oligonucleotide primer for the detection of SNP TSC0002287
ttccttaaacgt

SEQ ID NO: 270812 - DNA, 12 bp, Artificial Sequence
  Oligonukleotid-Primer
ataaggtagata

SEQ ID NO: 270813 - DNA, 12 bp, Artificial Sequence
  Oligonucleotide primer for the detection of SNP TSC0002288
caaaatttaaat

SEQ ID NO: 270814 - DNA, 12 bp, Artificial Sequence
  Oligonucleotide primer for the detection of SNP TSC0002288
cgaaatttaaat

SEQ ID NO: 270815 - DNA, 12 bp, Artificial Sequence
  Oligonucleotide primer for the detection of SNP TSC0002288
atagattgtaag

SEQ ID NO: 270816 - DNA, 12 bp, Artificial Sequence
  Oligonukleotid-Primer
caaatatttaaa

SEQ ID NO: 270817 - DNA, 12 bp, Artificial Sequence
  Oligonucleotide primer for the detection of SNP TSC0002289
gaattataaatt

SEQ ID NO: 270818 - DNA, 12 bp, Artificial Sequence
  Oligonucleotide primer for the detection of SNP TSC0002289
aaatcataaact

SEQ ID NO: 270819 - DNA, 12 bp, Artificial Sequence
  Oligonucleotide primer for the detection of SNP TSC0002289
taaatgtttaaa

SEQ ID NO: 270820 - DNA, 12 bp, Artificial Sequence
  Oligonucleotide primer for the detection of SNP TSC0002290
aaaaaaaaaaca

SEQ ID NO: 270821 - DNA, 12 bp, Artificial Sequence
  Oligonucleotide primer for the detection of SNP TSC0002290
tgggtggtatat

SEQ ID NO: 270822 - DNA, 12 bp, Artificial Sequence
  Oligonucleotide primer for the detection of SNP TSC0002290
tgggcggtatat

SEQ ID NO: 270823 - DNA, 12 bp, Artificial Sequence
  Oligonucleotide primer for the detection of SNP TSC0002290
taaacaacacac

SEQ ID NO: 270824 - DNA, 12 bp, Artificial Sequence
  Oligonucleotide primer for the detection of SNP TSC0002290
taaacgacacac

SEQ ID NO: 270825 - DNA, 12 bp, Artificial Sequence
  Oligonucleotide primer for the detection of SNP TSC0002290
aaggagagagta

SEQ ID NO: 270826 - DNA, 12 bp, Artificial Sequence
  Oligonucleotide primer for the detection of SNP TSC0002291
aatttctcaaaa

SEQ ID NO: 270827 - DNA, 12 bp, Artificial Sequence
  Oligonucleotide primer for the detection of SNP TSC0002291
agatttagaaat

SEQ ID NO: 270828 - DNA, 12 bp, Artificial Sequence
  Oligonucleotide primer for the detection of SNP TSC0002291
aaaacttaaaaa

SEQ ID NO: 270829 - DNA, 12 bp, Artificial Sequence
  Oligonucleotide primer for the detection of SNP TSC0002291
agttttttagaa

SEQ ID NO: 270830 - DNA, 12 bp, Artificial Sequence
  Oligonucleotide primer for the detection of SNP TSC0002292
aaaaaacgttta

SEQ ID NO: 270831 - DNA, 12 bp, Artificial Sequence
  Oligonucleotide primer for the detection of SNP TSC0002292
tattttatagag

SEQ ID NO: 270832 - DNA, 12 bp, Artificial Sequence
  Oligonucleotide primer for the detection of SNP TSC0002292
catctcacaaaa

SEQ ID NO: 270833 - DNA, 12 bp, Artificial Sequence
  Oligonucleotide primer for the detection of SNP TSC0002292
aagaaatgttta

SEQ ID NO: 270834 - DNA, 12 bp, Artificial Sequence
  Oligonucleotide primer for the detection of SNP TSC0002292
aagaaacgttta

SEQ ID NO: 270835 - DNA, 12 bp, Artificial Sequence
  Oligonucleotide primer for the detection of SNP TSC0002293
tatttattttct

SEQ ID NO: 270836 - DNA, 12 bp, Artificial Sequence
  Oligonucleotide primer for the detection of SNP TSC0002293
tgttgttttttg

SEQ ID NO: 270837 - DNA, 12 bp, Artificial Sequence
  Oligonucleotide primer for the detection of SNP TSC0002295
ccaaaccatatc

SEQ ID NO: 270838 - DNA, 12 bp, Artificial Sequence
  Oligonucleotide primer for the detection of SNP TSC0002295
gttttgtattta

SEQ ID NO: 270839 - DNA, 12 bp, Artificial Sequence
  Oligonucleotide primer for the detection of SNP TSC0002295
attttacactta

SEQ ID NO: 270840 - DNA, 12 bp, Artificial Sequence
  Oligonucleotide primer for the detection of SNP TSC0002295
ttaaattatatt

SEQ ID NO: 270841 - DNA, 12 bp, Artificial Sequence
  Oligonucleotide primer for the detection of SNP TSC0002296
acaataaaattt

SEQ ID NO: 270842 - DNA, 12 bp, Artificial Sequence
  Oligonucleotide primer for the detection of SNP TSC0002296
tttagggttgaa

SEQ ID NO: 270843 - DNA, 12 bp, Artificial Sequence
  Oligonucleotide primer for the detection of SNP TSC0002297
cataaatactac

SEQ ID NO: 270844 - DNA, 12 bp, Artificial Sequence
  Oligonucleotide primer for the detection of SNP TSC0002297
ttttttgggata

SEQ ID NO: 270845 - DNA, 12 bp, Artificial Sequence
  Oligonucleotide primer for the detection of SNP TSC0002298
tcaaaaaaaaat

SEQ ID NO: 270846 - DNA, 12 bp, Artificial Sequence
  Oligonucleotide primer for the detection of SNP TSC0002298
atatttatgaat

SEQ ID NO: 270847 - DNA, 12 bp, Artificial Sequence
  Oligonucleotide primer for the detection of SNP TSC0002298
cacctataaata

SEQ ID NO: 270848 - DNA, 12 bp, Artificial Sequence
  Oligonucleotide primer for the detection of SNP TSC0002298
ttaagaaaagat

SEQ ID NO: 270849 - DNA, 12 bp, Artificial Sequence
  Oligonucleotide primer for the detection of SNP TSC0002299
tcctataataat

SEQ ID NO: 270850 - DNA, 12 bp, Artificial Sequence
  Oligonucleotide primer for the detection of SNP TSC0002299
gttattttttta

SEQ ID NO: 270851 - DNA, 12 bp, Artificial Sequence
  Oligonucleotide primer for the detection of SNP TSC0002300
taacttaattta

SEQ ID NO: 270852 - DNA, 12 bp, Artificial Sequence
  Oligonucleotide primer for the detection of SNP TSC0002300
aagaattatatt

SEQ ID NO: 270853 - DNA, 12 bp, Artificial Sequence
  Oligonucleotide primer for the detection of SNP TSC0002300
aaaaaaattata

SEQ ID NO: 270854 - DNA, 12 bp, Artificial Sequence
  Oligonucleotide primer for the detection of SNP TSC0002300
tgatttgattta

SEQ ID NO: 270855 - DNA, 12 bp, Artificial Sequence
  Oligonucleotide primer for the detection of SNP TSC0002301
atacaacaatct

SEQ ID NO: 270856 - DNA, 12 bp, Artificial Sequence
  Oligonucleotide primer for the detection of SNP TSC0002301
tatttagttaga

SEQ ID NO: 270857 - DNA, 12 bp, Artificial Sequence
  Oligonucleotide primer for the detection of SNP TSC0002302
tatccttcctaa

SEQ ID NO: 270858 - DNA, 12 bp, Artificial Sequence
  Oligonucleotide primer for the detection of SNP TSC0002302
atttatatttgt

SEQ ID NO: 270859 - DNA, 12 bp, Artificial Sequence
  Oligonucleotide primer for the detection of SNP TSC0002302
attcacacttac

SEQ ID NO: 270860 - DNA, 12 bp, Artificial Sequence
  Oligonucleotide primer for the detection of SNP TSC0002302
tattttttttag

SEQ ID NO: 270861 - DNA, 12 bp, Artificial Sequence
  Oligonucleotide primer for the detection of SNP TSC0002303
tttccttttatt

SEQ ID NO: 270862 - DNA, 12 bp, Artificial Sequence
  Oligonucleotide primer for the detection of SNP TSC0002303
aaattttataaa

SEQ ID NO: 270863 - DNA, 12 bp, Artificial Sequence
  Oligonucleotide primer for the detection of SNP TSC0002303
aaattttacaaa

SEQ ID NO: 270864 - DNA, 12 bp, Artificial Sequence
  Oligonucleotide primer for the detection of SNP TSC0002303
tttttttttatt

SEQ ID NO: 270865 - DNA, 12 bp, Artificial Sequence
  Oligonucleotide primer for the detection of SNP TSC0002305
ctataaatacaa

SEQ ID NO: 270866 - DNA, 12 bp, Artificial Sequence
  Oligonucleotide primer for the detection of SNP TSC0002305
aagtttaatttt

SEQ ID NO: 270867 - DNA, 12 bp, Artificial Sequence
  Oligonucleotide primer for the detection of SNP TSC0002305
aaattcaacttc

SEQ ID NO: 270868 - DNA, 12 bp, Artificial Sequence
  Oligonucleotide primer for the detection of SNP TSC0002305
ttgtggatataa

SEQ ID NO: 270869 - DNA, 12 bp, Artificial Sequence
  Oligonucleotide primer for the detection of SNP TSC0002306
aatccaaaaatt

SEQ ID NO: 270870 - DNA, 12 bp, Artificial Sequence
  Oligonucleotide primer for the detection of SNP TSC0002306
attttttttata

SEQ ID NO: 270871 - DNA, 12 bp, Artificial Sequence
  Oligonucleotide primer for the detection of SNP TSC0002307
ctaaaaaacttc

SEQ ID NO: 270872 - DNA, 12 bp, Artificial Sequence
  Oligonucleotide primer for the detection of SNP TSC0002307
gatatattataa

SEQ ID NO: 270873 - DNA, 12 bp, Artificial Sequence
  Oligonucleotide primer for the detection of SNP TSC0002308
acaatttaattt

SEQ ID NO: 270874 - DNA, 12 bp, Artificial Sequence
  Oligonucleotide primer for the detection of SNP TSC0002308
gttattaggaaa

SEQ ID NO: 270875 - DNA, 12 bp, Artificial Sequence
  Oligonucleotide primer for the detection of SNP TSC0002310
tattttatattc

SEQ ID NO: 270876 - DNA, 12 bp, Artificial Sequence
  Oligonucleotide primer for the detection of SNP TSC0002310
aataaaattata

SEQ ID NO: 270877 - DNA, 12 bp, Artificial Sequence
  Oligonucleotide primer for the detection of SNP TSC0002311
aacctaaaatat

SEQ ID NO: 270878 - DNA, 12 bp, Artificial Sequence
  Oligonucleotide primer for the detection of SNP TSC0002311
tttattattata

SEQ ID NO: 270879 - DNA, 12 bp, Artificial Sequence
  Oligonucleotide primer for the detection of SNP TSC0002312
aaaatacacata

SEQ ID NO: 270880 - DNA, 12 bp, Artificial Sequence
  Oligonucleotide primer for the detection of SNP TSC0002312
gtagtatattgt

SEQ ID NO: 270881 - DNA, 12 bp, Artificial Sequence
  Oligonucleotide primer for the detection of SNP TSC0002312
taatatattata

SEQ ID NO: 270882 - DNA, 12 bp, Artificial Sequence
  Oligonucleotide primer for the detection of SNP TSC0002312
gaaaatgtatat

SEQ ID NO: 270883 - DNA, 12 bp, Artificial Sequence
  Oligonucleotide primer for the detection of SNP TSC0002313
gtggtttttaaa

SEQ ID NO: 270884 - DNA, 12 bp, Artificial Sequence
  Oligonucleotide primer for the detection of SNP TSC0002314
aattctaaccac

SEQ ID NO: 270885 - DNA, 12 bp, Artificial Sequence
  Oligonucleotide primer for the detection of SNP TSC0002314
gattctaaccac

SEQ ID NO: 270886 - DNA, 12 bp, Artificial Sequence
  Oligonucleotide primer for the detection of SNP TSC0002314
atttttttagaa

SEQ ID NO: 270887 - DNA, 12 bp, Artificial Sequence
  Oligonucleotide primer for the detection of SNP TSC0002315
aacaataataat

SEQ ID NO: 270888 - DNA, 12 bp, Artificial Sequence
  Oligonucleotide primer for the detection of SNP TSC0002315
gatatatgatta

SEQ ID NO: 270889 - DNA, 12 bp, Artificial Sequence
  Oligonucleotide primer for the detection of SNP TSC0002316
tttcccttaacc

SEQ ID NO: 270890 - DNA, 12 bp, Artificial Sequence
  Oligonucleotide primer for the detection of SNP TSC0002316
ttggtagtgtag

SEQ ID NO: 270891 - DNA, 12 bp, Artificial Sequence
  Oligonucleotide primer for the detection of SNP TSC0002317
aaaataaataaa

SEQ ID NO: 270892 - DNA, 12 bp, Artificial Sequence
  Oligonucleotide primer for the detection of SNP TSC0002317
gtgttgttatat

SEQ ID NO: 270893 - DNA, 12 bp, Artificial Sequence
  Oligonucleotide primer for the detection of SNP TSC0002317
gtgttgttatac

SEQ ID NO: 270894 - DNA, 12 bp, Artificial Sequence
  Oligonucleotide primer for the detection of SNP TSC0002317
tatattaccaca

SEQ ID NO: 270895 - DNA, 12 bp, Artificial Sequence
  Oligonucleotide primer for the detection of SNP TSC0002318
cctcccctccac

SEQ ID NO: 270896 - DNA, 12 bp, Artificial Sequence
  Oligonucleotide primer for the detection of SNP TSC0002318
tgttgggatttt

SEQ ID NO: 270897 - DNA, 12 bp, Artificial Sequence
  Oligonucleotide primer for the detection of SNP TSC0002318
tatactaaaacc

SEQ ID NO: 270898 - DNA, 12 bp, Artificial Sequence
  Oligonucleotide primer for the detection of SNP TSC0002319
ttttctcccccc

SEQ ID NO: 270899 - DNA, 12 bp, Artificial Sequence
  Oligonucleotide primer for the detection of SNP TSC0002319
aattggttgtgt

SEQ ID NO: 270900 - DNA, 12 bp, Artificial Sequence
  Oligonucleotide primer for the detection of SNP TSC0002319
taattaactata

SEQ ID NO: 270901 - DNA, 12 bp, Artificial Sequence
  Oligonucleotide primer for the detection of SNP TSC0002319
tttttttttttc

SEQ ID NO: 270902 - DNA, 12 bp, Artificial Sequence
  Oligonucleotide primer for the detection of SNP TSC0002320
acaaaaaatcaa

SEQ ID NO: 270903 - DNA, 12 bp, Artificial Sequence
  Oligonucleotide primer for the detection of SNP TSC0002320
tatagtttttta

SEQ ID NO: 270904 - DNA, 12 bp, Artificial Sequence
  Oligonucleotide primer for the detection of SNP TSC0002320
tataactttcca

SEQ ID NO: 270905 - DNA, 12 bp, Artificial Sequence
  Oligonucleotide primer for the detection of SNP TSC0002320
gtaggagattag

SEQ ID NO: 270906 - DNA, 12 bp, Artificial Sequence
  Oligonucleotide primer for the detection of SNP TSC0002321
aataaaaaatat

SEQ ID NO: 270907 - DNA, 12 bp, Artificial Sequence
  Oligonucleotide primer for the detection of SNP TSC0002321
atgtatttaata

SEQ ID NO: 270908 - DNA, 12 bp, Artificial Sequence
  Oligonucleotide primer for the detection of SNP TSC0002323
taaaataaataa

SEQ ID NO: 270909 - DNA, 12 bp, Artificial Sequence
  Oligonucleotide primer for the detection of SNP TSC0002323
tttaataatggt

SEQ ID NO: 270910 - DNA, 12 bp, Artificial Sequence
  Oligonucleotide primer for the detection of SNP TSC0002323
tttaataataac

SEQ ID NO: 270911 - DNA, 12 bp, Artificial Sequence
  Oligonucleotide primer for the detection of SNP TSC0002323
tgaagtaaataa

SEQ ID NO: 270912 - DNA, 12 bp, Artificial Sequence
  Oligonucleotide primer for the detection of SNP TSC0002324
accataactaaa

SEQ ID NO: 270913 - DNA, 12 bp, Artificial Sequence
  Oligonukleotid-Primer
atataattttgt

SEQ ID NO: 270914 - DNA, 12 bp, Artificial Sequence
  Oligonucleotide primer for the detection of SNP TSC0002324
atataattctat

SEQ ID NO: 270915 - DNA, 12 bp, Artificial Sequence
  Oligonucleotide primer for the detection of SNP TSC0002324
gttatgattgaa

SEQ ID NO: 270916 - DNA, 12 bp, Artificial Sequence
  Oligonucleotide primer for the detection of SNP TSC0002325
ttaaaattatat

SEQ ID NO: 270917 - DNA, 12 bp, Artificial Sequence
  Oligonucleotide primer for the detection of SNP TSC0002325
atagtataagta

SEQ ID NO: 270918 - DNA, 12 bp, Artificial Sequence
  Oligonucleotide primer for the detection of SNP TSC0002325
ataacataaaca

SEQ ID NO: 270919 - DNA, 12 bp, Artificial Sequence
  Oligonucleotide primer for the detection of SNP TSC0002325
ttaaggttgtgt

SEQ ID NO: 270920 - DNA, 12 bp, Artificial Sequence
  Oligonucleotide primer for the detection of SNP TSC0002326
tttgggaagtta

SEQ ID NO: 270921 - DNA, 12 bp, Artificial Sequence
  Oligonucleotide primer for the detection of SNP TSC0002327
aaacaacaccac

SEQ ID NO: 270922 - DNA, 12 bp, Artificial Sequence
  Oligonucleotide primer for the detection of SNP TSC0002327
tttgtagttaga

SEQ ID NO: 270923 - DNA, 12 bp, Artificial Sequence
  Oligonucleotide primer for the detection of SNP TSC0002328
attttaacaata

SEQ ID NO: 270924 - DNA, 12 bp, Artificial Sequence
  Oligonucleotide primer for the detection of SNP TSC0002328
ttagaatataat

SEQ ID NO: 270925 - DNA, 12 bp, Artificial Sequence
  Oligonucleotide primer for the detection of SNP TSC0002328
tcaaaacataat

SEQ ID NO: 270926 - DNA, 12 bp, Artificial Sequence
  Oligonucleotide primer for the detection of SNP TSC0002328
attttgataata

SEQ ID NO: 270927 - DNA, 12 bp, Artificial Sequence
  Oligonucleotide primer for the detection of SNP TSC0002329
ttaaaattccat

SEQ ID NO: 270928 - DNA, 12 bp, Artificial Sequence
  Oligonucleotide primer for the detection of SNP TSC0002329
ttttaatttagg

SEQ ID NO: 270929 - DNA, 12 bp, Artificial Sequence
  Oligonucleotide primer for the detection of SNP TSC0002330
actatttatata

SEQ ID NO: 270930 - DNA, 12 bp, Artificial Sequence
  Oligonucleotide primer for the detection of SNP TSC0002330
tgtaatatagtg

SEQ ID NO: 270931 - DNA, 12 bp, Artificial Sequence
  Oligonucleotide primer for the detection of SNP TSC0002330
tataacataata

SEQ ID NO: 270932 - DNA, 12 bp, Artificial Sequence
  Oligonucleotide primer for the detection of SNP TSC0002330
tgttatttgtat

SEQ ID NO: 270933 - DNA, 12 bp, Artificial Sequence
  Oligonucleotide primer for the detection of SNP TSC0002331
aaaacatcaata

SEQ ID NO: 270934 - DNA, 12 bp, Artificial Sequence
  Oligonucleotide primer for the detection of SNP TSC0002331
agttaagatttt

SEQ ID NO: 270935 - DNA, 12 bp, Artificial Sequence
  Oligonucleotide primer for the detection of SNP TSC0002331
aatcaaaattcc

SEQ ID NO: 270936 - DNA, 12 bp, Artificial Sequence
  Oligonucleotide primer for the detection of SNP TSC0002331
gatattaatgtt

SEQ ID NO: 270937 - DNA, 12 bp, Artificial Sequence
  Oligonucleotide primer for the detection of SNP TSC0002331
gatattaatgtc

SEQ ID NO: 270938 - DNA, 12 bp, Artificial Sequence
  Oligonucleotide primer for the detection of SNP TSC0002332
ccacccccatcc

SEQ ID NO: 270939 - DNA, 12 bp, Artificial Sequence
  Oligonucleotide primer for the detection of SNP TSC0002332
tggtggaatagg

SEQ ID NO: 270940 - DNA, 12 bp, Artificial Sequence
  Oligonucleotide primer for the detection of SNP TSC0002332
taataaaataaa

SEQ ID NO: 270941 - DNA, 12 bp, Artificial Sequence
  Oligonucleotide primer for the detection of SNP TSC0002333
atctcttctcac

SEQ ID NO: 270942 - DNA, 12 bp, Artificial Sequence
  Oligonucleotide primer for the detection of SNP TSC0002333
ggtggtgtagta

SEQ ID NO: 270943 - DNA, 12 bp, Artificial Sequence
  Oligonucleotide primer for the detection of SNP TSC0002334
ctaaccaaacac

SEQ ID NO: 270944 - DNA, 12 bp, Artificial Sequence
  Oligonucleotide primer for the detection of SNP TSC0002334
ctaaccgaacac

SEQ ID NO: 270945 - DNA, 12 bp, Artificial Sequence
  Oligonucleotide primer for the detection of SNP TSC0002334
gatatgagttat

SEQ ID NO: 270946 - DNA, 12 bp, Artificial Sequence
  Oligonucleotide primer for the detection of SNP TSC0002334
gatatgagttac

SEQ ID NO: 270947 - DNA, 12 bp, Artificial Sequence
  Oligonucleotide primer for the detection of SNP TSC0002334
ttgattgggtat

SEQ ID NO: 270948 - DNA, 12 bp, Artificial Sequence
  Oligonucleotide primer for the detection of SNP TSC0002334
ttgatcgggtat

SEQ ID NO: 270949 - DNA, 12 bp, Artificial Sequence
  Oligonucleotide primer for the detection of SNP TSC0002334
ttgattgggtac

SEQ ID NO: 270950 - DNA, 12 bp, Artificial Sequence
  Oligonucleotide primer for the detection of SNP TSC0002334
ttgatcgggtac

SEQ ID NO: 270951 - DNA, 12 bp, Artificial Sequence
  Oligonucleotide primer for the detection of SNP TSC0002335
ctaactccaaat

SEQ ID NO: 270952 - DNA, 12 bp, Artificial Sequence
  Oligonucleotide primer for the detection of SNP TSC0002335
tttttttgttga

SEQ ID NO: 270953 - DNA, 12 bp, Artificial Sequence
  Oligonucleotide primer for the detection of SNP TSC0002335
tttttttgtcga

SEQ ID NO: 270954 - DNA, 12 bp, Artificial Sequence
  Oligonucleotide primer for the detection of SNP TSC0002337
cttaactactat

SEQ ID NO: 270955 - DNA, 12 bp, Artificial Sequence
  Oligonucleotide primer for the detection of SNP TSC0002337
taggattagata

SEQ ID NO: 270956 - DNA, 12 bp, Artificial Sequence
  Oligonucleotide primer for the detection of SNP TSC0002338
aatttttttagt

SEQ ID NO: 270957 - DNA, 12 bp, Artificial Sequence
  Oligonucleotide primer for the detection of SNP TSC0002338
aaattttcccaa

SEQ ID NO: 270958 - DNA, 12 bp, Artificial Sequence
  Oligonucleotide primer for the detection of SNP TSC0002338
aaaaaaaaaaag

SEQ ID NO: 270959 - DNA, 12 bp, Artificial Sequence
  Oligonucleotide primer for the detection of SNP TSC0002339
actcccattaca

SEQ ID NO: 270960 - DNA, 12 bp, Artificial Sequence
  Oligonucleotide primer for the detection of SNP TSC0002339
gagaaataatat

SEQ ID NO: 270961 - DNA, 12 bp, Artificial Sequence
  Oligonucleotide primer for the detection of SNP TSC0002339
aaaaaataatac

SEQ ID NO: 270962 - DNA, 12 bp, Artificial Sequence
  Oligonucleotide primer for the detection of SNP TSC0002339
atttttattata

SEQ ID NO: 270963 - DNA, 12 bp, Artificial Sequence
  Oligonucleotide primer for the detection of SNP TSC0002340
cactatacctaa

SEQ ID NO: 270964 - DNA, 12 bp, Artificial Sequence
  Oligonucleotide primer for the detection of SNP TSC0002340
aaaatattgttt

SEQ ID NO: 270965 - DNA, 12 bp, Artificial Sequence
  Oligonucleotide primer for the detection of SNP TSC0002340
aaaatactacct

SEQ ID NO: 270966 - DNA, 12 bp, Artificial Sequence
  Oligonucleotide primer for the detection of SNP TSC0002340
tattgtgtttgg

SEQ ID NO: 270967 - DNA, 12 bp, Artificial Sequence
  Oligonucleotide primer for the detection of SNP TSC0002341
ctaaaaataaat

SEQ ID NO: 270968 - DNA, 12 bp, Artificial Sequence
  Oligonucleotide primer for the detection of SNP TSC0002341
agtagttattgt

SEQ ID NO: 270969 - DNA, 12 bp, Artificial Sequence
  Oligonucleotide primer for the detection of SNP TSC0002341
aacaaccactac

SEQ ID NO: 270970 - DNA, 12 bp, Artificial Sequence
  Oligonucleotide primer for the detection of SNP TSC0002341
ttgaaggtgggt

SEQ ID NO: 270971 - DNA, 12 bp, Artificial Sequence
  Oligonucleotide primer for the detection of SNP TSC0002342
cccacccctatt

SEQ ID NO: 270972 - DNA, 12 bp, Artificial Sequence
  Oligonucleotide primer for the detection of SNP TSC0002342
tatttattatta

SEQ ID NO: 270973 - DNA, 12 bp, Artificial Sequence
  Oligonucleotide primer for the detection of SNP TSC0002343
ttattaaaatat

SEQ ID NO: 270974 - DNA, 12 bp, Artificial Sequence
  Oligonucleotide primer for the detection of SNP TSC0002343
agtttatgtaaa

SEQ ID NO: 270975 - DNA, 12 bp, Artificial Sequence
  Oligonucleotide primer for the detection of SNP TSC0002344
tcctatcttaat

SEQ ID NO: 270976 - DNA, 12 bp, Artificial Sequence
  Oligonucleotide primer for the detection of SNP TSC0002344
tttgttggagag

SEQ ID NO: 270977 - DNA, 12 bp, Artificial Sequence
  Oligonucleotide primer for the detection of SNP TSC0002345
ataattaaaaac

SEQ ID NO: 270978 - DNA, 12 bp, Artificial Sequence
  Oligonucleotide primer for the detection of SNP TSC0002345
gatttgaggggg

SEQ ID NO: 270979 - DNA, 12 bp, Artificial Sequence
  Oligonucleotide primer for the detection of SNP TSC0002346
tcatttaattat

SEQ ID NO: 270980 - DNA, 12 bp, Artificial Sequence
  Oligonucleotide primer for the detection of SNP TSC0002346
ttttatgtttta

SEQ ID NO: 270981 - DNA, 12 bp, Artificial Sequence
  Oligonucleotide primer for the detection of SNP TSC0002347
aaaaaaaaaacc

SEQ ID NO: 270982 - DNA, 12 bp, Artificial Sequence
  Oligonucleotide primer for the detection of SNP TSC0002347
tagttaaaattg

SEQ ID NO: 270983 - DNA, 12 bp, Artificial Sequence
  Oligonucleotide primer for the detection of SNP TSC0002347
taaccaaaacta

SEQ ID NO: 270984 - DNA, 12 bp, Artificial Sequence
  Oligonucleotide primer for the detection of SNP TSC0002347
agaaaagaaatt

SEQ ID NO: 270985 - DNA, 12 bp, Artificial Sequence
  Oligonucleotide primer for the detection of SNP TSC0002349
cactaaaaaata

SEQ ID NO: 270986 - DNA, 12 bp, Artificial Sequence
  Oligonucleotide primer for the detection of SNP TSC0002349
tttttttttata

SEQ ID NO: 270987 - DNA, 12 bp, Artificial Sequence
  Oligonucleotide primer for the detection of SNP TSC0002349
ttccttcccaca

SEQ ID NO: 270988 - DNA, 12 bp, Artificial Sequence
  Oligonucleotide primer for the detection of SNP TSC0002349
tattggaaaata

SEQ ID NO: 270989 - DNA, 12 bp, Artificial Sequence
  Oligonucleotide primer for the detection of SNP TSC0002351
agatattagtat

SEQ ID NO: 270990 - DNA, 12 bp, Artificial Sequence
  Oligonucleotide primer for the detection of SNP TSC0002351
aaacattaacac

SEQ ID NO: 270991 - DNA, 12 bp, Artificial Sequence
  Oligonucleotide primer for the detection of SNP TSC0002351
gggtaaataaag

SEQ ID NO: 270992 - DNA, 12 bp, Artificial Sequence
  Oligonucleotide primer for the detection of SNP TSC0002353
ttacaatactac

SEQ ID NO: 270993 - DNA, 12 bp, Artificial Sequence
  Oligonucleotide primer for the detection of SNP TSC0002353
ttagagttttga

SEQ ID NO: 270994 - DNA, 12 bp, Artificial Sequence
  Oligonucleotide primer for the detection of SNP TSC0002353
tcaaaaccctaa

SEQ ID NO: 270995 - DNA, 12 bp, Artificial Sequence
  Oligonucleotide primer for the detection of SNP TSC0002353
ttgtaatgttgt

SEQ ID NO: 270996 - DNA, 12 bp, Artificial Sequence
  Oligonucleotide primer for the detection of SNP TSC0002355
cctttcctcccc

SEQ ID NO: 270997 - DNA, 12 bp, Artificial Sequence
  Oligonucleotide primer for the detection of SNP TSC0002355
aggtaggtgtga

SEQ ID NO: 270998 - DNA, 12 bp, Artificial Sequence
  Oligonucleotide primer for the detection of SNP TSC0002355
aggtaggtgcga

SEQ ID NO: 270999 - DNA, 12 bp, Artificial Sequence
  Oligonucleotide primer for the detection of SNP TSC0002357
caaaacaaaacc

SEQ ID NO: 271000 - DNA, 12 bp, Artificial Sequence
  Oligonucleotide primer for the detection of SNP TSC0002357
tagggaggtgaa

SEQ ID NO: 271001 - DNA, 12 bp, Artificial Sequence
  Oligonucleotide primer for the detection of SNP TSC0002359
cttattaaacta

SEQ ID NO: 271002 - DNA, 12 bp, Artificial Sequence
  Oligonucleotide primer for the detection of SNP TSC0002359
attagttgtaga

SEQ ID NO: 271003 - DNA, 12 bp, Artificial Sequence
  Oligonucleotide primer for the detection of SNP TSC0002361
aaaataataaat

SEQ ID NO: 271004 - DNA, 12 bp, Artificial Sequence
  Oligonucleotide primer for the detection of SNP TSC0002361
attattaatgaa

SEQ ID NO: 271005 - DNA, 12 bp, Artificial Sequence
  Oligonucleotide primer for the detection of SNP TSC0002362
tccaccaaactc

SEQ ID NO: 271006 - DNA, 12 bp, Artificial Sequence
  Oligonucleotide primer for the detection of SNP TSC0002362
atttttttggtg

SEQ ID NO: 271007 - DNA, 12 bp, Artificial Sequence
  Oligonucleotide primer for the detection of SNP TSC0002362
attttttcggtg

SEQ ID NO: 271008 - DNA, 12 bp, Artificial Sequence
  Oligonucleotide primer for the detection of SNP TSC0002364
aatctatataaa

SEQ ID NO: 271009 - DNA, 12 bp, Artificial Sequence
  Oligonucleotide primer for the detection of SNP TSC0002364
tttttttttggg

SEQ ID NO: 271010 - DNA, 12 bp, Artificial Sequence
  Oligonucleotide primer for the detection of SNP TSC0002364
cctttccctaaa

SEQ ID NO: 271011 - DNA, 12 bp, Artificial Sequence
  Oligonucleotide primer for the detection of SNP TSC0002364
ggtttgtgtggg

SEQ ID NO: 271012 - DNA, 12 bp, Artificial Sequence
  Oligonucleotide primer for the detection of SNP TSC0002366
attttaaaaatt

SEQ ID NO: 271013 - DNA, 12 bp, Artificial Sequence
  Oligonucleotide primer for the detection of SNP TSC0002366
taataatatttg

SEQ ID NO: 271014 - DNA, 12 bp, Artificial Sequence
  Oligonucleotide primer for the detection of SNP TSC0002367
aaccaatcaaaa

SEQ ID NO: 271015 - DNA, 12 bp, Artificial Sequence
  Oligonucleotide primer for the detection of SNP TSC0002367
ggtattgttttt

SEQ ID NO: 271016 - DNA, 12 bp, Artificial Sequence
  Oligonucleotide primer for the detection of SNP TSC0002367
aacactacccct

SEQ ID NO: 271017 - DNA, 12 bp, Artificial Sequence
  Oligonucleotide primer for the detection of SNP TSC0002367
atgggttagtta

SEQ ID NO: 271018 - DNA, 12 bp, Artificial Sequence
  Oligonucleotide primer for the detection of SNP TSC0002368
aaataaataaat

SEQ ID NO: 271019 - DNA, 12 bp, Artificial Sequence
  Oligonucleotide primer for the detection of SNP TSC0002368
gtgttttgtttg

SEQ ID NO: 271020 - DNA, 12 bp, Artificial Sequence
  Oligonucleotide primer for the detection of SNP TSC0002370
atttccccttaa

SEQ ID NO: 271021 - DNA, 12 bp, Artificial Sequence
  Oligonucleotide primer for the detection of SNP TSC0002370
tgtattttttgt

SEQ ID NO: 271022 - DNA, 12 bp, Artificial Sequence
  Oligonucleotide primer for the detection of SNP TSC0002370
tgtatttttcgt

SEQ ID NO: 271023 - DNA, 12 bp, Artificial Sequence
  Oligonucleotide primer for the detection of SNP TSC0002370
tatactcctcat

SEQ ID NO: 271024 - DNA, 12 bp, Artificial Sequence
  Oligonucleotide primer for the detection of SNP TSC0002370
tatactcctcgt

SEQ ID NO: 271025 - DNA, 12 bp, Artificial Sequence
  Oligonucleotide primer for the detection of SNP TSC0002371
actacaaacatc

SEQ ID NO: 271026 - DNA, 12 bp, Artificial Sequence
  Oligonucleotide primer for the detection of SNP TSC0002371
actacaaacgtc

SEQ ID NO: 271027 - DNA, 12 bp, Artificial Sequence
  Oligonucleotide primer for the detection of SNP TSC0002371
ttaggtatggtg

SEQ ID NO: 271028 - DNA, 12 bp, Artificial Sequence
  Oligonucleotide primer for the detection of SNP TSC0002372
catttttataac

SEQ ID NO: 271029 - DNA, 12 bp, Artificial Sequence
  Oligonucleotide primer for the detection of SNP TSC0002372
ttgtttttttta

SEQ ID NO: 271030 - DNA, 12 bp, Artificial Sequence
  Oligonucleotide primer for the detection of SNP TSC0002373
aaacacaattcc

SEQ ID NO: 271031 - DNA, 12 bp, Artificial Sequence
  Oligonucleotide primer for the detection of SNP TSC0002373
tttttgaatttt

SEQ ID NO: 271032 - DNA, 12 bp, Artificial Sequence
  Oligonucleotide primer for the detection of SNP TSC0002374
aattcaaatcct

SEQ ID NO: 271033 - DNA, 12 bp, Artificial Sequence
  Oligonucleotide primer for the detection of SNP TSC0002374
ataaaaaaataa

SEQ ID NO: 271034 - DNA, 12 bp, Artificial Sequence
  Oligonucleotide primer for the detection of SNP TSC0002375
tcaaattttctt

SEQ ID NO: 271035 - DNA, 12 bp, Artificial Sequence
  Oligonucleotide primer for the detection of SNP TSC0002375
tatataattagg

SEQ ID NO: 271036 - DNA, 12 bp, Artificial Sequence
  Oligonucleotide primer for the detection of SNP TSC0002376
aatataaaccac

SEQ ID NO: 271037 - DNA, 12 bp, Artificial Sequence
  Oligonucleotide primer for the detection of SNP TSC0002376
ttgggttaggtg

SEQ ID NO: 271038 - DNA, 12 bp, Artificial Sequence
  Oligonukleotid-Primer
ctaaaccaaata

SEQ ID NO: 271039 - DNA, 12 bp, Artificial Sequence
  Oligonucleotide primer for the detection of SNP TSC0002376
ggtgtgagttat

SEQ ID NO: 271040 - DNA, 12 bp, Artificial Sequence
  Oligonucleotide primer for the detection of SNP TSC0002377
aaaactataaac

SEQ ID NO: 271041 - DNA, 12 bp, Artificial Sequence
  Oligonucleotide primer for the detection of SNP TSC0002377
atttaggtgtaa

SEQ ID NO: 271042 - DNA, 12 bp, Artificial Sequence
  Oligonukleotid-Primer
aaccactcatat

SEQ ID NO: 271043 - DNA, 12 bp, Artificial Sequence
  Oligonucleotide primer for the detection of SNP TSC0002378
aaccgctcatat

SEQ ID NO: 271044 - DNA, 12 bp, Artificial Sequence
  Oligonucleotide primer for the detection of SNP TSC0002378
atttaaagatag

SEQ ID NO: 271045 - DNA, 12 bp, Artificial Sequence
  Oligonucleotide primer for the detection of SNP TSC0002378
actcaaaaataa

SEQ ID NO: 271046 - DNA, 12 bp, Artificial Sequence
  Oligonucleotide primer for the detection of SNP TSC0002378
agttgtttatat

SEQ ID NO: 271047 - DNA, 12 bp, Artificial Sequence
  Oligonucleotide primer for the detection of SNP TSC0002378
agtcgtttatat

SEQ ID NO: 271048 - DNA, 12 bp, Artificial Sequence
  Oligonucleotide primer for the detection of SNP TSC0002379
aaacaaacaaat

SEQ ID NO: 271049 - DNA, 12 bp, Artificial Sequence
  Oligonucleotide primer for the detection of SNP TSC0002379
aaacaaacgaat

SEQ ID NO: 271050 - DNA, 12 bp, Artificial Sequence
  Oligonucleotide primer for the detection of SNP TSC0002379
tttaggtaaagg

SEQ ID NO: 271051 - DNA, 12 bp, Artificial Sequence
  Oligonucleotide primer for the detection of SNP TSC0002381
cactacaatttc

SEQ ID NO: 271052 - DNA, 12 bp, Artificial Sequence
  Oligonucleotide primer for the detection of SNP TSC0002381
aaatttaggagg

SEQ ID NO: 271053 - DNA, 12 bp, Artificial Sequence
  Oligonucleotide primer for the detection of SNP TSC0002382
ttctaaaaattc

SEQ ID NO: 271054 - DNA, 12 bp, Artificial Sequence
  Oligonucleotide primer for the detection of SNP TSC0002382
ttgttagttagt

SEQ ID NO: 271055 - DNA, 12 bp, Artificial Sequence
  Oligonucleotide primer for the detection of SNP TSC0002382
taccaatcaaca

SEQ ID NO: 271056 - DNA, 12 bp, Artificial Sequence
  Oligonucleotide primer for the detection of SNP TSC0002382
tttgagagtttt

SEQ ID NO: 271057 - DNA, 12 bp, Artificial Sequence
  Oligonucleotide primer for the detection of SNP TSC0002383
cattaaaaaaat

SEQ ID NO: 271058 - DNA, 12 bp, Artificial Sequence
  Oligonucleotide primer for the detection of SNP TSC0002383
gtatgggagaaa

SEQ ID NO: 271059 - DNA, 12 bp, Artificial Sequence
  Oligonucleotide primer for the detection of SNP TSC0002384
aaattaaactat

SEQ ID NO: 271060 - DNA, 12 bp, Artificial Sequence
  Oligonucleotide primer for the detection of SNP TSC0002384
gatttgaattta

SEQ ID NO: 271061 - DNA, 12 bp, Artificial Sequence
  Oligonucleotide primer for the detection of SNP TSC0002385
cctcaccctaca

SEQ ID NO: 271062 - DNA, 12 bp, Artificial Sequence
  Oligonucleotide primer for the detection of SNP TSC0002385
tgagatagtagt

SEQ ID NO: 271063 - DNA, 12 bp, Artificial Sequence
  Oligonucleotide primer for the detection of SNP TSC0002385
taaaacaacaac

SEQ ID NO: 271064 - DNA, 12 bp, Artificial Sequence
  Oligonucleotide primer for the detection of SNP TSC0002385
ttttattttgta

SEQ ID NO: 271065 - DNA, 12 bp, Artificial Sequence
  Oligonucleotide primer for the detection of SNP TSC0002386
atatcataaaat

SEQ ID NO: 271066 - DNA, 12 bp, Artificial Sequence
  Oligonucleotide primer for the detection of SNP TSC0002386
tattttttatta

SEQ ID NO: 271067 - DNA, 12 bp, Artificial Sequence
  Oligonucleotide primer for the detection of SNP TSC0002387
ttctccaactcc

SEQ ID NO: 271068 - DNA, 12 bp, Artificial Sequence
  Oligonucleotide primer for the detection of SNP TSC0002387
agggagtttgga

SEQ ID NO: 271069 - DNA, 12 bp, Artificial Sequence
  Oligonucleotide primer for the detection of SNP TSC0002387
aaaaaacctaaa

SEQ ID NO: 271070 - DNA, 12 bp, Artificial Sequence
  Oligonucleotide primer for the detection of SNP TSC0002387
ttttttagtttt

SEQ ID NO: 271071 - DNA, 12 bp, Artificial Sequence
  Oligonucleotide primer for the detection of SNP TSC0002388
actacccaaaaa

SEQ ID NO: 271072 - DNA, 12 bp, Artificial Sequence
  Oligonucleotide primer for the detection of SNP TSC0002388
atgtgagttttg

SEQ ID NO: 271073 - DNA, 12 bp, Artificial Sequence
  Oligonucleotide primer for the detection of SNP TSC0002388
atataaacctta

SEQ ID NO: 271074 - DNA, 12 bp, Artificial Sequence
  Oligonucleotide primer for the detection of SNP TSC0002388
gttgtttaggaa

SEQ ID NO: 271075 - DNA, 12 bp, Artificial Sequence
  Oligonucleotide primer for the detection of SNP TSC0002389
ctatttctatct

SEQ ID NO: 271076 - DNA, 12 bp, Artificial Sequence
  Oligonucleotide primer for the detection of SNP TSC0002389
tagaaataaatg

SEQ ID NO: 271077 - DNA, 12 bp, Artificial Sequence
  Oligonucleotide primer for the detection of SNP TSC0002391
catacctaatca

SEQ ID NO: 271078 - DNA, 12 bp, Artificial Sequence
  Oligonucleotide primer for the detection of SNP TSC0002391
tgagaattaagt

SEQ ID NO: 271079 - DNA, 12 bp, Artificial Sequence
  Oligonucleotide primer for the detection of SNP TSC0002391
taaaaaccaaat

SEQ ID NO: 271080 - DNA, 12 bp, Artificial Sequence
  Oligonucleotide primer for the detection of SNP TSC0002391
tatatttggtta

SEQ ID NO: 271081 - DNA, 12 bp, Artificial Sequence
  Oligonucleotide primer for the detection of SNP TSC0002392
ctaaacccaaac

SEQ ID NO: 271082 - DNA, 12 bp, Artificial Sequence
  Oligonucleotide primer for the detection of SNP TSC0002392
gtgtttgtttta

SEQ ID NO: 271083 - DNA, 12 bp, Artificial Sequence
  Oligonucleotide primer for the detection of SNP TSC0002393
aactaaaactac

SEQ ID NO: 271084 - DNA, 12 bp, Artificial Sequence
  Oligonucleotide primer for the detection of SNP TSC0002393
tgtggtggtggg

SEQ ID NO: 271085 - DNA, 12 bp, Artificial Sequence
  Oligonucleotide primer for the detection of SNP TSC0002393
tgtggtggcggg

SEQ ID NO: 271086 - DNA, 12 bp, Artificial Sequence
  Oligonucleotide primer for the detection of SNP TSC0002393
tataataacgaa

SEQ ID NO: 271087 - DNA, 12 bp, Artificial Sequence
  Oligonucleotide primer for the detection of SNP TSC0002393
agttgggattat

SEQ ID NO: 271088 - DNA, 12 bp, Artificial Sequence
  Oligonucleotide primer for the detection of SNP TSC0002394
ataaccacaaaa

SEQ ID NO: 271089 - DNA, 12 bp, Artificial Sequence
  Oligonucleotide primer for the detection of SNP TSC0002394
ttttgttttgtt

SEQ ID NO: 271090 - DNA, 12 bp, Artificial Sequence
  Oligonucleotide primer for the detection of SNP TSC0002394
ccctactctacc

SEQ ID NO: 271091 - DNA, 12 bp, Artificial Sequence
  Oligonucleotide primer for the detection of SNP TSC0002394
atggttataggg

SEQ ID NO: 271092 - DNA, 12 bp, Artificial Sequence
  Oligonucleotide primer for the detection of SNP TSC0002395
atctatttcaat

SEQ ID NO: 271093 - DNA, 12 bp, Artificial Sequence
  Oligonucleotide primer for the detection of SNP TSC0002395
atctatttcgat

SEQ ID NO: 271094 - DNA, 12 bp, Artificial Sequence
  Oligonucleotide primer for the detection of SNP TSC0002395
ttatatataata

SEQ ID NO: 271095 - DNA, 12 bp, Artificial Sequence
  Oligonucleotide primer for the detection of SNP TSC0002395
tcatatataata

SEQ ID NO: 271096 - DNA, 12 bp, Artificial Sequence
  Oligonucleotide primer for the detection of SNP TSC0002395
gtttgttttggt

SEQ ID NO: 271097 - DNA, 12 bp, Artificial Sequence
  Oligonucleotide primer for the detection of SNP TSC0002395
gtttgtttcggt

SEQ ID NO: 271098 - DNA, 12 bp, Artificial Sequence
  Oligonucleotide primer for the detection of SNP TSC0002396
caaaataacaaa

SEQ ID NO: 271099 - DNA, 12 bp, Artificial Sequence
  Oligonucleotide primer for the detection of SNP TSC0002396
aagagtgtttat

SEQ ID NO: 271100 - DNA, 12 bp, Artificial Sequence
  Oligonucleotide primer for the detection of SNP TSC0002396
aagagtgtttac

SEQ ID NO: 271101 - DNA, 12 bp, Artificial Sequence
  Oligonucleotide primer for the detection of SNP TSC0002396
taaaaatatcta

SEQ ID NO: 271102 - DNA, 12 bp, Artificial Sequence
  Oligonucleotide primer for the detection of SNP TSC0002396
atagggtggtaa

SEQ ID NO: 271103 - DNA, 12 bp, Artificial Sequence
  Oligonucleotide primer for the detection of SNP TSC0002397
tagattatttta

SEQ ID NO: 271104 - DNA, 12 bp, Artificial Sequence
  Oligonucleotide primer for the detection of SNP TSC0002400
catatttcaatc

SEQ ID NO: 271105 - DNA, 12 bp, Artificial Sequence
  Oligonucleotide primer for the detection of SNP TSC0002400
attttgtatagg

SEQ ID NO: 271106 - DNA, 12 bp, Artificial Sequence
  Oligonucleotide primer for the detection of SNP TSC0002400
actttacacaaa

SEQ ID NO: 271107 - DNA, 12 bp, Artificial Sequence
  Oligonucleotide primer for the detection of SNP TSC0002400
tatgttttaatt

SEQ ID NO: 271108 - DNA, 12 bp, Artificial Sequence
  Oligonucleotide primer for the detection of SNP TSC0002401
aatttttccttt

SEQ ID NO: 271109 - DNA, 12 bp, Artificial Sequence
  Oligonucleotide primer for the detection of SNP TSC0002401
aggagaaggaga

SEQ ID NO: 271110 - DNA, 12 bp, Artificial Sequence
  Oligonucleotide primer for the detection of SNP TSC0002402
aataaacccaca

SEQ ID NO: 271111 - DNA, 12 bp, Artificial Sequence
  Oligonucleotide primer for the detection of SNP TSC0002402
ggtagttttttt

SEQ ID NO: 271112 - DNA, 12 bp, Artificial Sequence
  Oligonucleotide primer for the detection of SNP TSC0002402
acaattttccta

SEQ ID NO: 271113 - DNA, 12 bp, Artificial Sequence
  Oligonucleotide primer for the detection of SNP TSC0002402
agtgggtttata

SEQ ID NO: 271114 - DNA, 12 bp, Artificial Sequence
  Oligonucleotide primer for the detection of SNP TSC0002403
ccactaaacaac

SEQ ID NO: 271115 - DNA, 12 bp, Artificial Sequence
  Oligonucleotide primer for the detection of SNP TSC0002403
tgttggtggatg

SEQ ID NO: 271116 - DNA, 12 bp, Artificial Sequence
  Oligonucleotide primer for the detection of SNP TSC0002403
tgttggcggatg

SEQ ID NO: 271117 - DNA, 12 bp, Artificial Sequence
  Oligonucleotide primer for the detection of SNP TSC0002403
tgttggtggacg

SEQ ID NO: 271118 - DNA, 12 bp, Artificial Sequence
  Oligonucleotide primer for the detection of SNP TSC0002403
tgttggcggacg

SEQ ID NO: 271119 - DNA, 12 bp, Artificial Sequence
  Oligonucleotide primer for the detection of SNP TSC0002403
tattaacaaaca

SEQ ID NO: 271120 - DNA, 12 bp, Artificial Sequence
  Oligonucleotide primer for the detection of SNP TSC0002403
tattaacaaacg

SEQ ID NO: 271121 - DNA, 12 bp, Artificial Sequence
  Oligonucleotide primer for the detection of SNP TSC0002403
tattaacgaaca

SEQ ID NO: 271122 - DNA, 12 bp, Artificial Sequence
  Oligonucleotide primer for the detection of SNP TSC0002403
tattaacgaacg

SEQ ID NO: 271123 - DNA, 12 bp, Artificial Sequence
  Oligonukleotid-Primer
ttattgagtagt

SEQ ID NO: 271124 - DNA, 12 bp, Artificial Sequence
  Oligonucleotide primer for the detection of SNP TSC0002404
ctaaaatatcac

SEQ ID NO: 271125 - DNA, 12 bp, Artificial Sequence
  Oligonucleotide primer for the detection of SNP TSC0002404
ctaaaatatcgc

SEQ ID NO: 271126 - DNA, 12 bp, Artificial Sequence
  Oligonucleotide primer for the detection of SNP TSC0002404
tttttggatttt

SEQ ID NO: 271127 - DNA, 12 bp, Artificial Sequence
  Oligonucleotide primer for the detection of SNP TSC0002404
tcttaaatttca

SEQ ID NO: 271128 - DNA, 12 bp, Artificial Sequence
  Oligonucleotide primer for the detection of SNP TSC0002404
tgagatgttgtt

SEQ ID NO: 271129 - DNA, 12 bp, Artificial Sequence
  Oligonucleotide primer for the detection of SNP TSC0002404
tgagatgtcgtt

SEQ ID NO: 271130 - DNA, 12 bp, Artificial Sequence
  Oligonucleotide primer for the detection of SNP TSC0002405
taaaatcaaaaa

SEQ ID NO: 271131 - DNA, 12 bp, Artificial Sequence
  Oligonucleotide primer for the detection of SNP TSC0002405
ggttggttttaa

SEQ ID NO: 271132 - DNA, 12 bp, Artificial Sequence
  Oligonucleotide primer for the detection of SNP TSC0002405
aactaatctcaa

SEQ ID NO: 271133 - DNA, 12 bp, Artificial Sequence
  Oligonucleotide primer for the detection of SNP TSC0002405
ttgaagttagga

SEQ ID NO: 271134 - DNA, 12 bp, Artificial Sequence
  Oligonucleotide primer for the detection of SNP TSC0002406
tttatcctaact

SEQ ID NO: 271135 - DNA, 12 bp, Artificial Sequence
  Oligonucleotide primer for the detection of SNP TSC0002406
tttagtattaga

SEQ ID NO: 271136 - DNA, 12 bp, Artificial Sequence
  Oligonucleotide primer for the detection of SNP TSC0002407
cactattttacc

SEQ ID NO: 271137 - DNA, 12 bp, Artificial Sequence
  Oligonucleotide primer for the detection of SNP TSC0002407
tgagattagttt

SEQ ID NO: 271138 - DNA, 12 bp, Artificial Sequence
  Oligonucleotide primer for the detection of SNP TSC0002407
ttaaaaccaacc

SEQ ID NO: 271139 - DNA, 12 bp, Artificial Sequence
  Oligonucleotide primer for the detection of SNP TSC0002407
tattattttatt

SEQ ID NO: 271140 - DNA, 12 bp, Artificial Sequence
  Oligonucleotide primer for the detection of SNP TSC0002407
tattattttatc

SEQ ID NO: 271141 - DNA, 12 bp, Artificial Sequence
  Oligonucleotide primer for the detection of SNP TSC0002409
aaacaacacaca

SEQ ID NO: 271142 - DNA, 12 bp, Artificial Sequence
  Oligonucleotide primer for the detection of SNP TSC0002409
aaacaacacacg

SEQ ID NO: 271143 - DNA, 12 bp, Artificial Sequence
  Oligonucleotide primer for the detection of SNP TSC0002409
aaacgacacaca

SEQ ID NO: 271144 - DNA, 12 bp, Artificial Sequence
  Oligonucleotide primer for the detection of SNP TSC0002409
aaacgacacacg

SEQ ID NO: 271145 - DNA, 12 bp, Artificial Sequence
  Oligonucleotide primer for the detection of SNP TSC0002409
attttattttag

SEQ ID NO: 271146 - DNA, 12 bp, Artificial Sequence
  Oligonucleotide primer for the detection of SNP TSC0002409
atctcactccaa

SEQ ID NO: 271147 - DNA, 12 bp, Artificial Sequence
  Oligonucleotide primer for the detection of SNP TSC0002409
gggtggtatatg

SEQ ID NO: 271148 - DNA, 12 bp, Artificial Sequence
  Oligonucleotide primer for the detection of SNP TSC0002409
gggcggtatatg

SEQ ID NO: 271149 - DNA, 12 bp, Artificial Sequence
  Oligonucleotide primer for the detection of SNP TSC0002409
gggtggtatacg

SEQ ID NO: 271150 - DNA, 12 bp, Artificial Sequence
  Oligonucleotide primer for the detection of SNP TSC0002409
gggcggtatacg

SEQ ID NO: 271151 - DNA, 12 bp, Artificial Sequence
  Oligonucleotide primer for the detection of SNP TSC0002410
caacctctaaca

SEQ ID NO: 271152 - DNA, 12 bp, Artificial Sequence
  Oligonucleotide primer for the detection of SNP TSC0002410
gtgttgtatatt

SEQ ID NO: 271153 - DNA, 12 bp, Artificial Sequence
  Oligonucleotide primer for the detection of SNP TSC0002410
gtgttgtatatc

SEQ ID NO: 271154 - DNA, 12 bp, Artificial Sequence
  Oligonucleotide primer for the detection of SNP TSC0002410
atattacacacc

SEQ ID NO: 271155 - DNA, 12 bp, Artificial Sequence
  Oligonucleotide primer for the detection of SNP TSC0002410
ttagtttttggt

SEQ ID NO: 271156 - DNA, 12 bp, Artificial Sequence
  Oligonucleotide primer for the detection of SNP TSC0002413
ccaatattaaaa

SEQ ID NO: 271157 - DNA, 12 bp, Artificial Sequence
  Oligonucleotide primer for the detection of SNP TSC0002413
ccgatattaaaa

SEQ ID NO: 271158 - DNA, 12 bp, Artificial Sequence
  Oligonucleotide primer for the detection of SNP TSC0002413
agggtatggttt

SEQ ID NO: 271159 - DNA, 12 bp, Artificial Sequence
  Oligonucleotide primer for the detection of SNP TSC0002413
aaaacataacct

SEQ ID NO: 271160 - DNA, 12 bp, Artificial Sequence
  Oligonucleotide primer for the detection of SNP TSC0002413
ttggtgttgaga

SEQ ID NO: 271161 - DNA, 12 bp, Artificial Sequence
  Oligonucleotide primer for the detection of SNP TSC0002413
tcggtgttgaga

SEQ ID NO: 271162 - DNA, 12 bp, Artificial Sequence
  Oligonucleotide primer for the detection of SNP TSC0002414
tataacaaatac

SEQ ID NO: 271163 - DNA, 12 bp, Artificial Sequence
  Oligonucleotide primer for the detection of SNP TSC0002414
tatttatatgtg

SEQ ID NO: 271164 - DNA, 12 bp, Artificial Sequence
  Oligonucleotide primer for the detection of SNP TSC0002414
tatctatatata

SEQ ID NO: 271165 - DNA, 12 bp, Artificial Sequence
  Oligonucleotide primer for the detection of SNP TSC0002414
tgtggtaagtgt

SEQ ID NO: 271166 - DNA, 12 bp, Artificial Sequence
  Oligonucleotide primer for the detection of SNP TSC0002415
atactaaaaacc

SEQ ID NO: 271167 - DNA, 12 bp, Artificial Sequence
  Oligonucleotide primer for the detection of SNP TSC0002415
aagaattatatg

SEQ ID NO: 271168 - DNA, 12 bp, Artificial Sequence
  Oligonucleotide primer for the detection of SNP TSC0002415
aaaaaccacata

SEQ ID NO: 271169 - DNA, 12 bp, Artificial Sequence
  Oligonucleotide primer for the detection of SNP TSC0002415
atgttgagggtt

SEQ ID NO: 271170 - DNA, 12 bp, Artificial Sequence
  Oligonucleotide primer for the detection of SNP TSC0002416
aaactccttact

SEQ ID NO: 271171 - DNA, 12 bp, Artificial Sequence
  Oligonucleotide primer for the detection of SNP TSC0002416
tgtagtgagttg

SEQ ID NO: 271172 - DNA, 12 bp, Artificial Sequence
  Oligonucleotide primer for the detection of SNP TSC0002417
ccaccctttcct

SEQ ID NO: 271173 - DNA, 12 bp, Artificial Sequence
  Oligonucleotide primer for the detection of SNP TSC0002417
tttagggtgtta

SEQ ID NO: 271174 - DNA, 12 bp, Artificial Sequence
  Oligonucleotide primer for the detection of SNP TSC0002418
accacattaaca

SEQ ID NO: 271175 - DNA, 12 bp, Artificial Sequence
  Oligonucleotide primer for the detection of SNP TSC0002418
accgcattaaca

SEQ ID NO: 271176 - DNA, 12 bp, Artificial Sequence
  Oligonucleotide primer for the detection of SNP TSC0002418
tggttgttttat

SEQ ID NO: 271177 - DNA, 12 bp, Artificial Sequence
  Oligonucleotide primer for the detection of SNP TSC0002418
aattacctcata

SEQ ID NO: 271178 - DNA, 12 bp, Artificial Sequence
  Oligonucleotide primer for the detection of SNP TSC0002418
attgtattagta

SEQ ID NO: 271179 - DNA, 12 bp, Artificial Sequence
  Oligonucleotide primer for the detection of SNP TSC0002418
atcgtattagta

SEQ ID NO: 271180 - DNA, 12 bp, Artificial Sequence
  Oligonucleotide primer for the detection of SNP TSC0002419
tctctaatctaa

SEQ ID NO: 271181 - DNA, 12 bp, Artificial Sequence
  Oligonucleotide primer for the detection of SNP TSC0002419
tatagttttaat

SEQ ID NO: 271182 - DNA, 12 bp, Artificial Sequence
  Oligonucleotide primer for the detection of SNP TSC0002419
tttttgatttgg

SEQ ID NO: 271183 - DNA, 12 bp, Artificial Sequence
  Oligonucleotide primer for the detection of SNP TSC0002420
gggaggaaaata

SEQ ID NO: 271184 - DNA, 12 bp, Artificial Sequence
  Oligonucleotide primer for the detection of SNP TSC0002421
acctctaaaatc

SEQ ID NO: 271185 - DNA, 12 bp, Artificial Sequence
  Oligonucleotide primer for the detection of SNP TSC0002421
aaatgttggttt

SEQ ID NO: 271186 - DNA, 12 bp, Artificial Sequence
  Oligonucleotide primer for the detection of SNP TSC0002421
aaacgttggttt

SEQ ID NO: 271187 - DNA, 12 bp, Artificial Sequence
  Oligonucleotide primer for the detection of SNP TSC0002421
aacactaactta

SEQ ID NO: 271188 - DNA, 12 bp, Artificial Sequence
  Oligonucleotide primer for the detection of SNP TSC0002421
aacgctaactta

SEQ ID NO: 271189 - DNA, 12 bp, Artificial Sequence
  Oligonucleotide primer for the detection of SNP TSC0002421
tttttaaggttt

SEQ ID NO: 271190 - DNA, 12 bp, Artificial Sequence
  Oligonucleotide primer for the detection of SNP TSC0002422
ttacactaaaaa

SEQ ID NO: 271191 - DNA, 12 bp, Artificial Sequence
  Oligonucleotide primer for the detection of SNP TSC0002422
ttacgctaaaaa

SEQ ID NO: 271192 - DNA, 12 bp, Artificial Sequence
  Oligonukleotid-Primer
aaatatatatgt

SEQ ID NO: 271193 - DNA, 12 bp, Artificial Sequence
  Oligonucleotide primer for the detection of SNP TSC0002422
aaatatacatat

SEQ ID NO: 271194 - DNA, 12 bp, Artificial Sequence
  Oligonucleotide primer for the detection of SNP TSC0002422
gttggaagtttt

SEQ ID NO: 271195 - DNA, 12 bp, Artificial Sequence
  Oligonucleotide primer for the detection of SNP TSC0002423
tacaaacatata

SEQ ID NO: 271196 - DNA, 12 bp, Artificial Sequence
  Oligonucleotide primer for the detection of SNP TSC0002423
ttgggtatggtg

SEQ ID NO: 271197 - DNA, 12 bp, Artificial Sequence
  Oligonucleotide primer for the detection of SNP TSC0002423
tcgggtatggtg

SEQ ID NO: 271198 - DNA, 12 bp, Artificial Sequence
  Oligonucleotide primer for the detection of SNP TSC0002423
ccaaacataata

SEQ ID NO: 271199 - DNA, 12 bp, Artificial Sequence
  Oligonucleotide primer for the detection of SNP TSC0002423
ccgaacataata

SEQ ID NO: 271200 - DNA, 12 bp, Artificial Sequence
  Oligonucleotide primer for the detection of SNP TSC0002423
ttataggtatgt

SEQ ID NO: 271201 - DNA, 12 bp, Artificial Sequence
  Oligonucleotide primer for the detection of SNP TSC0002424
aataaaaaacac

SEQ ID NO: 271202 - DNA, 12 bp, Artificial Sequence
  Oligonucleotide primer for the detection of SNP TSC0002424
ttatttgattta

SEQ ID NO: 271203 - DNA, 12 bp, Artificial Sequence
  Oligonucleotide primer for the detection of SNP TSC0002425
acactaaatatt

SEQ ID NO: 271204 - DNA, 12 bp, Artificial Sequence
  Oligonucleotide primer for the detection of SNP TSC0002425
acgctaaatatt

SEQ ID NO: 271205 - DNA, 12 bp, Artificial Sequence
  Oligonucleotide primer for the detection of SNP TSC0002425
gaaagtaaatga

SEQ ID NO: 271206 - DNA, 12 bp, Artificial Sequence
  Oligonucleotide primer for the detection of SNP TSC0002425
aaaaataaataa

SEQ ID NO: 271207 - DNA, 12 bp, Artificial Sequence
  Oligonucleotide primer for the detection of SNP TSC0002425
tgttgggtgttt

SEQ ID NO: 271208 - DNA, 12 bp, Artificial Sequence
  Oligonucleotide primer for the detection of SNP TSC0002425
cgttgggtgttt

SEQ ID NO: 271209 - DNA, 12 bp, Artificial Sequence
  Oligonucleotide primer for the detection of SNP TSC0002427
actaaaactaat

SEQ ID NO: 271210 - DNA, 12 bp, Artificial Sequence
  Oligonucleotide primer for the detection of SNP TSC0002427
gagtttgttatt

SEQ ID NO: 271211 - DNA, 12 bp, Artificial Sequence
  Oligonucleotide primer for the detection of SNP TSC0002427
aaatttatcacc

SEQ ID NO: 271212 - DNA, 12 bp, Artificial Sequence
  Oligonucleotide primer for the detection of SNP TSC0002427
attaaaattggt

SEQ ID NO: 271213 - DNA, 12 bp, Artificial Sequence
  Oligonucleotide primer for the detection of SNP TSC0002428
tttcttcccaaa

SEQ ID NO: 271214 - DNA, 12 bp, Artificial Sequence
  Oligonucleotide primer for the detection of SNP TSC0002428
atttatattttt

SEQ ID NO: 271215 - DNA, 12 bp, Artificial Sequence
  Oligonucleotide primer for the detection of SNP TSC0002428
attcacatcttt

SEQ ID NO: 271216 - DNA, 12 bp, Artificial Sequence
  Oligonucleotide primer for the detection of SNP TSC0002428
tttttttttaaa

SEQ ID NO: 271217 - DNA, 12 bp, Artificial Sequence
  Oligonucleotide primer for the detection of SNP TSC0002429
aaaaaaaataaa

SEQ ID NO: 271218 - DNA, 12 bp, Artificial Sequence
  Oligonucleotide primer for the detection of SNP TSC0002429
aattgtttatat

SEQ ID NO: 271219 - DNA, 12 bp, Artificial Sequence
  Oligonucleotide primer for the detection of SNP TSC0002429
aattactcatat

SEQ ID NO: 271220 - DNA, 12 bp, Artificial Sequence
  Oligonucleotide primer for the detection of SNP TSC0002429
gggggagataga

SEQ ID NO: 271221 - DNA, 12 bp, Artificial Sequence
  Oligonucleotide primer for the detection of SNP TSC0002431
acacactccaat

SEQ ID NO: 271222 - DNA, 12 bp, Artificial Sequence
  Oligonucleotide primer for the detection of SNP TSC0002431
gttaagataagg

SEQ ID NO: 271223 - DNA, 12 bp, Artificial Sequence
  Oligonucleotide primer for the detection of SNP TSC0002431
attaaaataaaa

SEQ ID NO: 271224 - DNA, 12 bp, Artificial Sequence
  Oligonucleotide primer for the detection of SNP TSC0002431
gtatattttagt

SEQ ID NO: 271225 - DNA, 12 bp, Artificial Sequence
  Oligonucleotide primer for the detection of SNP TSC0002432
tttctttttttt

SEQ ID NO: 271226 - DNA, 12 bp, Artificial Sequence
  Oligonucleotide primer for the detection of SNP TSC0002432
ttttgttttaaa

SEQ ID NO: 271227 - DNA, 12 bp, Artificial Sequence
  Oligonucleotide primer for the detection of SNP TSC0002432
tttcgttttaaa

SEQ ID NO: 271228 - DNA, 12 bp, Artificial Sequence
  Oligonucleotide primer for the detection of SNP TSC0002432
ctccatttcaaa

SEQ ID NO: 271229 - DNA, 12 bp, Artificial Sequence
  Oligonucleotide primer for the detection of SNP TSC0002432
ctccgtttcaaa

SEQ ID NO: 271230 - DNA, 12 bp, Artificial Sequence
  Oligonucleotide primer for the detection of SNP TSC0002433
cccccaaaacac

SEQ ID NO: 271231 - DNA, 12 bp, Artificial Sequence
  Oligonucleotide primer for the detection of SNP TSC0002433
ttgttaagtttg

SEQ ID NO: 271232 - DNA, 12 bp, Artificial Sequence
  Oligonucleotide primer for the detection of SNP TSC0002433
ctatcaaattta

SEQ ID NO: 271233 - DNA, 12 bp, Artificial Sequence
  Oligonucleotide primer for the detection of SNP TSC0002433
tttttagggtat

SEQ ID NO: 271234 - DNA, 12 bp, Artificial Sequence
  Oligonucleotide primer for the detection of SNP TSC0002434
aaccaatatctc

SEQ ID NO: 271235 - DNA, 12 bp, Artificial Sequence
  Oligonucleotide primer for the detection of SNP TSC0002434
aattttttgtgg

SEQ ID NO: 271236 - DNA, 12 bp, Artificial Sequence
  Oligonucleotide primer for the detection of SNP TSC0002435
aaaaactcatac

SEQ ID NO: 271237 - DNA, 12 bp, Artificial Sequence
  Oligonucleotide primer for the detection of SNP TSC0002435
aaaaactcgtac

SEQ ID NO: 271238 - DNA, 12 bp, Artificial Sequence
  Oligonucleotide primer for the detection of SNP TSC0002435
tatttaatattg

SEQ ID NO: 271239 - DNA, 12 bp, Artificial Sequence
  Oligonucleotide primer for the detection of SNP TSC0002436
attaacaaataa

SEQ ID NO: 271240 - DNA, 12 bp, Artificial Sequence
  Oligonucleotide primer for the detection of SNP TSC0002436
aattatttttag

SEQ ID NO: 271241 - DNA, 12 bp, Artificial Sequence
  Oligonucleotide primer for the detection of SNP TSC0002436
attattcttaaa

SEQ ID NO: 271242 - DNA, 12 bp, Artificial Sequence
  Oligonucleotide primer for the detection of SNP TSC0002436
gggttaataaat

SEQ ID NO: 271243 - DNA, 12 bp, Artificial Sequence
  Oligonucleotide primer for the detection of SNP TSC0002437
ttttgttggtag

SEQ ID NO: 271244 - DNA, 12 bp, Artificial Sequence
  Oligonucleotide primer for the detection of SNP TSC0002439
atatcccaccac

SEQ ID NO: 271245 - DNA, 12 bp, Artificial Sequence
  Oligonucleotide primer for the detection of SNP TSC0002439
atatcccaccgc

SEQ ID NO: 271246 - DNA, 12 bp, Artificial Sequence
  Oligonucleotide primer for the detection of SNP TSC0002439
atatcccgccac

SEQ ID NO: 271247 - DNA, 12 bp, Artificial Sequence
  Oligonucleotide primer for the detection of SNP TSC0002439
atatcccgccgc

SEQ ID NO: 271248 - DNA, 12 bp, Artificial Sequence
  Oligonucleotide primer for the detection of SNP TSC0002439
tttggagtttgg

SEQ ID NO: 271249 - DNA, 12 bp, Artificial Sequence
  Oligonucleotide primer for the detection of SNP TSC0002439
tttggagttcgg

SEQ ID NO: 271250 - DNA, 12 bp, Artificial Sequence
  Oligonucleotide primer for the detection of SNP TSC0002440
caaataacctca

SEQ ID NO: 271251 - DNA, 12 bp, Artificial Sequence
  Oligonucleotide primer for the detection of SNP TSC0002440
cgaataacctca

SEQ ID NO: 271252 - DNA, 12 bp, Artificial Sequence
  Oligonucleotide primer for the detection of SNP TSC0002440
gatagggagtat

SEQ ID NO: 271253 - DNA, 12 bp, Artificial Sequence
  Oligonucleotide primer for the detection of SNP TSC0002440
tgaatggtttta

SEQ ID NO: 271254 - DNA, 12 bp, Artificial Sequence
  Oligonucleotide primer for the detection of SNP TSC0002440
cgaatggtttta

SEQ ID NO: 271255 - DNA, 12 bp, Artificial Sequence
  Oligonucleotide primer for the detection of SNP TSC0002442
aaacctaaacca

SEQ ID NO: 271256 - DNA, 12 bp, Artificial Sequence
  Oligonucleotide primer for the detection of SNP TSC0002442
aattaagattat

SEQ ID NO: 271257 - DNA, 12 bp, Artificial Sequence
  Oligonucleotide primer for the detection of SNP TSC0002442
aatcaaaaccac

SEQ ID NO: 271258 - DNA, 12 bp, Artificial Sequence
  Oligonucleotide primer for the detection of SNP TSC0002442
aaagtttggatt

SEQ ID NO: 271259 - DNA, 12 bp, Artificial Sequence
  Oligonucleotide primer for the detection of SNP TSC0002443
cctactcaaaac

SEQ ID NO: 271260 - DNA, 12 bp, Artificial Sequence
  Oligonucleotide primer for the detection of SNP TSC0002443
tttggtatgttg

SEQ ID NO: 271261 - DNA, 12 bp, Artificial Sequence
  Oligonucleotide primer for the detection of SNP TSC0002444
aaaaattatttc

SEQ ID NO: 271262 - DNA, 12 bp, Artificial Sequence
  Oligonucleotide primer for the detection of SNP TSC0002444
ttttttcgttga

SEQ ID NO: 271263 - DNA, 12 bp, Artificial Sequence
  Oligonucleotide primer for the detection of SNP TSC0002444
ttttttcgtcga

SEQ ID NO: 271264 - DNA, 12 bp, Artificial Sequence
  Oligonucleotide primer for the detection of SNP TSC0002446
ctatcaaataat

SEQ ID NO: 271265 - DNA, 12 bp, Artificial Sequence
  Oligonucleotide primer for the detection of SNP TSC0002446
atgtaattaaag

SEQ ID NO: 271266 - DNA, 12 bp, Artificial Sequence
  Oligonucleotide primer for the detection of SNP TSC0002447
aaataaccaaac

SEQ ID NO: 271267 - DNA, 12 bp, Artificial Sequence
  Oligonucleotide primer for the detection of SNP TSC0002447
aaataaccgaac

SEQ ID NO: 271268 - DNA, 12 bp, Artificial Sequence
  Oligonucleotide primer for the detection of SNP TSC0002447
ataagtatatta

SEQ ID NO: 271269 - DNA, 12 bp, Artificial Sequence
  Oligonucleotide primer for the detection of SNP TSC0002449
aaaaaaaaaata

SEQ ID NO: 271270 - DNA, 12 bp, Artificial Sequence
  Oligonucleotide primer for the detection of SNP TSC0002449
agttttagaatt

SEQ ID NO: 271271 - DNA, 12 bp, Artificial Sequence
  Oligonucleotide primer for the detection of SNP TSC0002449
atcttaaaacta

SEQ ID NO: 271272 - DNA, 12 bp, Artificial Sequence
  Oligonucleotide primer for the detection of SNP TSC0002449
gaggggaaatgt

SEQ ID NO: 271273 - DNA, 12 bp, Artificial Sequence
  Oligonucleotide primer for the detection of SNP TSC0002449
gaggggaaatgc

SEQ ID NO: 271274 - DNA, 12 bp, Artificial Sequence
  Oligonucleotide primer for the detection of SNP TSC0002450
aaaaaaaaatac

SEQ ID NO: 271275 - DNA, 12 bp, Artificial Sequence
  Oligonucleotide primer for the detection of SNP TSC0002450
tttttgtgtgta

SEQ ID NO: 271276 - DNA, 12 bp, Artificial Sequence
  Oligonucleotide primer for the detection of SNP TSC0002450
ttttcgtgtgta

SEQ ID NO: 271277 - DNA, 12 bp, Artificial Sequence
  Oligonucleotide primer for the detection of SNP TSC0002450
ccttcatataca

SEQ ID NO: 271278 - DNA, 12 bp, Artificial Sequence
  Oligonucleotide primer for the detection of SNP TSC0002450
ccttcgtataca

SEQ ID NO: 271279 - DNA, 12 bp, Artificial Sequence
  Oligonucleotide primer for the detection of SNP TSC0002450
gagggaagatgt

SEQ ID NO: 271280 - DNA, 12 bp, Artificial Sequence
  Oligonucleotide primer for the detection of SNP TSC0002451
aaacaaattaat

SEQ ID NO: 271281 - DNA, 12 bp, Artificial Sequence
  Oligonukleotid-Primer
gttggtttaatg

SEQ ID NO: 271282 - DNA, 12 bp, Artificial Sequence
  Oligonucleotide primer for the detection of SNP TSC0002452
aaatctaaccct

SEQ ID NO: 271283 - DNA, 12 bp, Artificial Sequence
  Oligonucleotide primer for the detection of SNP TSC0002452
gaaagttttttt

SEQ ID NO: 271284 - DNA, 12 bp, Artificial Sequence
  Oligonucleotide primer for the detection of SNP TSC0002452
aaaacccctcta

SEQ ID NO: 271285 - DNA, 12 bp, Artificial Sequence
  Oligonucleotide primer for the detection of SNP TSC0002452
ggtttgattttt

SEQ ID NO: 271286 - DNA, 12 bp, Artificial Sequence
  Oligonucleotide primer for the detection of SNP TSC0002453
tctaccccttaa

SEQ ID NO: 271287 - DNA, 12 bp, Artificial Sequence
  Oligonucleotide primer for the detection of SNP TSC0002453
attagttgtttt

SEQ ID NO: 271288 - DNA, 12 bp, Artificial Sequence
  Oligonucleotide primer for the detection of SNP TSC0002453
cactaactatcc

SEQ ID NO: 271289 - DNA, 12 bp, Artificial Sequence
  Oligonucleotide primer for the detection of SNP TSC0002454
aaatatctttct

SEQ ID NO: 271290 - DNA, 12 bp, Artificial Sequence
  Oligonucleotide primer for the detection of SNP TSC0002454
ttttaatttaag

SEQ ID NO: 271291 - DNA, 12 bp, Artificial Sequence
  Oligonucleotide primer for the detection of SNP TSC0002455
ttttcctttctc

SEQ ID NO: 271292 - DNA, 12 bp, Artificial Sequence
  Oligonucleotide primer for the detection of SNP TSC0002455
tgtttttgggag

SEQ ID NO: 271293 - DNA, 12 bp, Artificial Sequence
  Oligonucleotide primer for the detection of SNP TSC0002455
cgtttttgggag

SEQ ID NO: 271294 - DNA, 12 bp, Artificial Sequence
  Oligonucleotide primer for the detection of SNP TSC0002456
taatttcttcct

SEQ ID NO: 271295 - DNA, 12 bp, Artificial Sequence
  Oligonucleotide primer for the detection of SNP TSC0002456
ttgttaaattgg

SEQ ID NO: 271296 - DNA, 12 bp, Artificial Sequence
  Oligonucleotide primer for the detection of SNP TSC0002457
acaaaacaatat

SEQ ID NO: 271297 - DNA, 12 bp, Artificial Sequence
  Oligonucleotide primer for the detection of SNP TSC0002457
acaaaacgatat

SEQ ID NO: 271298 - DNA, 12 bp, Artificial Sequence
  Oligonucleotide primer for the detection of SNP TSC0002457
ccccatcttact

SEQ ID NO: 271299 - DNA, 12 bp, Artificial Sequence
  Oligonucleotide primer for the detection of SNP TSC0002457
atagggtgatat

SEQ ID NO: 271300 - DNA, 12 bp, Artificial Sequence
  Oligonucleotide primer for the detection of SNP TSC0002457
atagggcgatat

SEQ ID NO: 271301 - DNA, 12 bp, Artificial Sequence
  Oligonucleotide primer for the detection of SNP TSC0002458
taatctattcaa

SEQ ID NO: 271302 - DNA, 12 bp, Artificial Sequence
  Oligonucleotide primer for the detection of SNP TSC0002458
gtgtattttgat

SEQ ID NO: 271303 - DNA, 12 bp, Artificial Sequence
  Oligonucleotide primer for the detection of SNP TSC0002458
atacatcctaac

SEQ ID NO: 271304 - DNA, 12 bp, Artificial Sequence
  Oligonucleotide primer for the detection of SNP TSC0002459
aaaaaaacaaac

SEQ ID NO: 271305 - DNA, 12 bp, Artificial Sequence
  Oligonucleotide primer for the detection of SNP TSC0002459
ttttgttttggg

SEQ ID NO: 271306 - DNA, 12 bp, Artificial Sequence
  Oligonucleotide primer for the detection of SNP TSC0002460
aaatcaaacttc

SEQ ID NO: 271307 - DNA, 12 bp, Artificial Sequence
  Oligonucleotide primer for the detection of SNP TSC0002460
aaatcgaacttc

SEQ ID NO: 271308 - DNA, 12 bp, Artificial Sequence
  Oligonucleotide primer for the detection of SNP TSC0002460
gtaattgagtga

SEQ ID NO: 271309 - DNA, 12 bp, Artificial Sequence
  Oligonucleotide primer for the detection of SNP TSC0002461
ataacataaaaa

SEQ ID NO: 271310 - DNA, 12 bp, Artificial Sequence
  Oligonucleotide primer for the detection of SNP TSC0002461
gtgtatagttat

SEQ ID NO: 271311 - DNA, 12 bp, Artificial Sequence
  Oligonucleotide primer for the detection of SNP TSC0002461
atacataattac

SEQ ID NO: 271312 - DNA, 12 bp, Artificial Sequence
  Oligonucleotide primer for the detection of SNP TSC0002461
gtagtatgaagg

SEQ ID NO: 271313 - DNA, 12 bp, Artificial Sequence
  Oligonucleotide primer for the detection of SNP TSC0002462
cactccctttaa

SEQ ID NO: 271314 - DNA, 12 bp, Artificial Sequence
  Oligonucleotide primer for the detection of SNP TSC0002462
gtttaaattttt

SEQ ID NO: 271315 - DNA, 12 bp, Artificial Sequence
  Oligonucleotide primer for the detection of SNP TSC0002464
aaccaacacaaa

SEQ ID NO: 271316 - DNA, 12 bp, Artificial Sequence
  Oligonucleotide primer for the detection of SNP TSC0002464
aaccaacgcaaa

SEQ ID NO: 271317 - DNA, 12 bp, Artificial Sequence
  Oligonucleotide primer for the detection of SNP TSC0002464
ttttttaggttt

SEQ ID NO: 271318 - DNA, 12 bp, Artificial Sequence
  Oligonucleotide primer for the detection of SNP TSC0002464
cctctcaaaccc

SEQ ID NO: 271319 - DNA, 12 bp, Artificial Sequence
  Oligonucleotide primer for the detection of SNP TSC0002464
agttagtgtaga

SEQ ID NO: 271320 - DNA, 12 bp, Artificial Sequence
  Oligonucleotide primer for the detection of SNP TSC0002464
agttagcgtaga

SEQ ID NO: 271321 - DNA, 12 bp, Artificial Sequence
  Oligonucleotide primer for the detection of SNP TSC0002468
tttatttaactc

SEQ ID NO: 271322 - DNA, 12 bp, Artificial Sequence
  Oligonucleotide primer for the detection of SNP TSC0002468
ttgattgtagga

SEQ ID NO: 271323 - DNA, 12 bp, Artificial Sequence
  Oligonucleotide primer for the detection of SNP TSC0002468
ctaactacaaaa

SEQ ID NO: 271324 - DNA, 12 bp, Artificial Sequence
  Oligonucleotide primer for the detection of SNP TSC0002468
tttatttggttt

SEQ ID NO: 271325 - DNA, 12 bp, Artificial Sequence
  Oligonucleotide primer for the detection of SNP TSC0002469
tctactcaccac

SEQ ID NO: 271326 - DNA, 12 bp, Artificial Sequence
  Oligonucleotide primer for the detection of SNP TSC0002469
tttttttgtata

SEQ ID NO: 271327 - DNA, 12 bp, Artificial Sequence
  Oligonucleotide primer for the detection of SNP TSC0002470
tctcacaactac

SEQ ID NO: 271328 - DNA, 12 bp, Artificial Sequence
  Oligonucleotide primer for the detection of SNP TSC0002470
aaaataatatta

SEQ ID NO: 271329 - DNA, 12 bp, Artificial Sequence
  Oligonucleotide primer for the detection of SNP TSC0002471
aaactacctcac

SEQ ID NO: 271330 - DNA, 12 bp, Artificial Sequence
  Oligonucleotide primer for the detection of SNP TSC0002471
aaaggaagggga

SEQ ID NO: 271331 - DNA, 12 bp, Artificial Sequence
  Oligonucleotide primer for the detection of SNP TSC0002472
taaatacaccta

SEQ ID NO: 271332 - DNA, 12 bp, Artificial Sequence
  Oligonucleotide primer for the detection of SNP TSC0002472
attagagtttgt

SEQ ID NO: 271333 - DNA, 12 bp, Artificial Sequence
  Oligonucleotide primer for the detection of SNP TSC0002472
attagagtttgc

SEQ ID NO: 271334 - DNA, 12 bp, Artificial Sequence
  Oligonucleotide primer for the detection of SNP TSC0002472
aactaaaactta

SEQ ID NO: 271335 - DNA, 12 bp, Artificial Sequence
  Oligonucleotide primer for the detection of SNP TSC0002472
taaatgtattta

SEQ ID NO: 271336 - DNA, 12 bp, Artificial Sequence
  Oligonucleotide primer for the detection of SNP TSC0002473
caattttttttt

SEQ ID NO: 271337 - DNA, 12 bp, Artificial Sequence
  Oligonucleotide primer for the detection of SNP TSC0002474
caaataataacc

SEQ ID NO: 271338 - DNA, 12 bp, Artificial Sequence
  Oligonucleotide primer for the detection of SNP TSC0002474
gtggtggataag

SEQ ID NO: 271339 - DNA, 12 bp, Artificial Sequence
  Oligonucleotide primer for the detection of SNP TSC0002474
gcggtggataag

SEQ ID NO: 271340 - DNA, 12 bp, Artificial Sequence
  Oligonucleotide primer for the detection of SNP TSC0002474
acaataaataaa

SEQ ID NO: 271341 - DNA, 12 bp, Artificial Sequence
  Oligonucleotide primer for the detection of SNP TSC0002474
acgataaataaa

SEQ ID NO: 271342 - DNA, 12 bp, Artificial Sequence
  Oligonucleotide primer for the detection of SNP TSC0002474
taagtgatgatt

SEQ ID NO: 271343 - DNA, 12 bp, Artificial Sequence
  Oligonucleotide primer for the detection of SNP TSC0002475
caaactatctat

SEQ ID NO: 271344 - DNA, 12 bp, Artificial Sequence
  Oligonucleotide primer for the detection of SNP TSC0002475
ggagttagtatg

SEQ ID NO: 271345 - DNA, 12 bp, Artificial Sequence
  Oligonucleotide primer for the detection of SNP TSC0002475
aaaaccaacata

SEQ ID NO: 271346 - DNA, 12 bp, Artificial Sequence
  Oligonucleotide primer for the detection of SNP TSC0002475
taggttatttgt

SEQ ID NO: 271347 - DNA, 12 bp, Artificial Sequence
  Oligonucleotide primer for the detection of SNP TSC0002476
catcaatacact

SEQ ID NO: 271348 - DNA, 12 bp, Artificial Sequence
  Oligonucleotide primer for the detection of SNP TSC0002476
catcgatacact

SEQ ID NO: 271349 - DNA, 12 bp, Artificial Sequence
  Oligonucleotide primer for the detection of SNP TSC0002476
cgtcaatacact

SEQ ID NO: 271350 - DNA, 12 bp, Artificial Sequence
  Oligonucleotide primer for the detection of SNP TSC0002476
cgtcgatacact

SEQ ID NO: 271351 - DNA, 12 bp, Artificial Sequence
  Oligonucleotide primer for the detection of SNP TSC0002476
gggttgagtgta

SEQ ID NO: 271352 - DNA, 12 bp, Artificial Sequence
  Oligonucleotide primer for the detection of SNP TSC0002478
atacacatttat

SEQ ID NO: 271353 - DNA, 12 bp, Artificial Sequence
  Oligonucleotide primer for the detection of SNP TSC0002478
atacacgtttat

SEQ ID NO: 271354 - DNA, 12 bp, Artificial Sequence
  Oligonucleotide primer for the detection of SNP TSC0002478
atacgcatttat

SEQ ID NO: 271355 - DNA, 12 bp, Artificial Sequence
  Oligonucleotide primer for the detection of SNP TSC0002478
atacgcgtttat

SEQ ID NO: 271356 - DNA, 12 bp, Artificial Sequence
  Oligonucleotide primer for the detection of SNP TSC0002478
atgaaatgtatg

SEQ ID NO: 271357 - DNA, 12 bp, Artificial Sequence
  Oligonucleotide primer for the detection of SNP TSC0002479
ccaaaataactt

SEQ ID NO: 271358 - DNA, 12 bp, Artificial Sequence
  Oligonucleotide primer for the detection of SNP TSC0002479
tatagttttata

SEQ ID NO: 271359 - DNA, 12 bp, Artificial Sequence
  Oligonucleotide primer for the detection of SNP TSC0002480
aataataaaacc

SEQ ID NO: 271360 - DNA, 12 bp, Artificial Sequence
  Oligonucleotide primer for the detection of SNP TSC0002480
atatgagagggt

SEQ ID NO: 271361 - DNA, 12 bp, Artificial Sequence
  Oligonucleotide primer for the detection of SNP TSC0002480
atacgagagggt

SEQ ID NO: 271362 - DNA, 12 bp, Artificial Sequence
  Oligonucleotide primer for the detection of SNP TSC0002480
atacaaaaaaat

SEQ ID NO: 271363 - DNA, 12 bp, Artificial Sequence
  Oligonucleotide primer for the detection of SNP TSC0002480
atacgaaaaaat

SEQ ID NO: 271364 - DNA, 12 bp, Artificial Sequence
  Oligonucleotide primer for the detection of SNP TSC0002480
agtaataaagtt

SEQ ID NO: 271365 - DNA, 12 bp, Artificial Sequence
  Oligonucleotide primer for the detection of SNP TSC0002482
tcccatataata

SEQ ID NO: 271366 - DNA, 12 bp, Artificial Sequence
  Oligonucleotide primer for the detection of SNP TSC0002482
ttgtggtaaaat

SEQ ID NO: 271367 - DNA, 12 bp, Artificial Sequence
  Oligonucleotide primer for the detection of SNP TSC0002482
ttataataaaat

SEQ ID NO: 271368 - DNA, 12 bp, Artificial Sequence
  Oligonucleotide primer for the detection of SNP TSC0002482
ttttatgtgatg

SEQ ID NO: 271369 - DNA, 12 bp, Artificial Sequence
  Oligonucleotide primer for the detection of SNP TSC0002483
taaataaatatt

SEQ ID NO: 271370 - DNA, 12 bp, Artificial Sequence
  Oligonucleotide primer for the detection of SNP TSC0002484
tacctactaaaa

SEQ ID NO: 271371 - DNA, 12 bp, Artificial Sequence
  Oligonucleotide primer for the detection of SNP TSC0002484
aattattttttt

SEQ ID NO: 271372 - DNA, 12 bp, Artificial Sequence
  Oligonucleotide primer for the detection of SNP TSC0002484
aatcattctttt

SEQ ID NO: 271373 - DNA, 12 bp, Artificial Sequence
  Oligonucleotide primer for the detection of SNP TSC0002484
tatttattaaaa

SEQ ID NO: 271374 - DNA, 12 bp, Artificial Sequence
  Oligonucleotide primer for the detection of SNP TSC0002485
taaaaaattctt

SEQ ID NO: 271375 - DNA, 12 bp, Artificial Sequence
  Oligonucleotide primer for the detection of SNP TSC0002485
agatgtagtaga

SEQ ID NO: 271376 - DNA, 12 bp, Artificial Sequence
  Oligonucleotide primer for the detection of SNP TSC0002485
aatacaataaaa

SEQ ID NO: 271377 - DNA, 12 bp, Artificial Sequence
  Oligonucleotide primer for the detection of SNP TSC0002485
aagaaatttttt

SEQ ID NO: 271378 - DNA, 12 bp, Artificial Sequence
  Oligonukleotid-Primer
aaaaaaaacaca

SEQ ID NO: 271379 - DNA, 12 bp, Artificial Sequence
  Oligonucleotide primer for the detection of SNP TSC0002486
ttgttagattga

SEQ ID NO: 271380 - DNA, 12 bp, Artificial Sequence
  Oligonucleotide primer for the detection of SNP TSC0002486
tattaaactaaa

SEQ ID NO: 271381 - DNA, 12 bp, Artificial Sequence
  Oligonucleotide primer for the detection of SNP TSC0002486
ggggaaaatata

SEQ ID NO: 271382 - DNA, 12 bp, Artificial Sequence
  Oligonucleotide primer for the detection of SNP TSC0002487
cctcccatcctc

SEQ ID NO: 271383 - DNA, 12 bp, Artificial Sequence
  Oligonucleotide primer for the detection of SNP TSC0002487
ttgttgtggtat

SEQ ID NO: 271384 - DNA, 12 bp, Artificial Sequence
  Oligonucleotide primer for the detection of SNP TSC0002487
ttgtcgtggtat

SEQ ID NO: 271385 - DNA, 12 bp, Artificial Sequence
  Oligonucleotide primer for the detection of SNP TSC0002487
taccataacaca

SEQ ID NO: 271386 - DNA, 12 bp, Artificial Sequence
  Oligonucleotide primer for the detection of SNP TSC0002487
taccgtaacaca

SEQ ID NO: 271387 - DNA, 12 bp, Artificial Sequence
  Oligonucleotide primer for the detection of SNP TSC0002489
cctaatctcttt

SEQ ID NO: 271388 - DNA, 12 bp, Artificial Sequence
  Oligonucleotide primer for the detection of SNP TSC0002489
ggagaagtttga

SEQ ID NO: 271389 - DNA, 12 bp, Artificial Sequence
  Oligonucleotide primer for the detection of SNP TSC0002492
ccaaaatactaa

SEQ ID NO: 271390 - DNA, 12 bp, Artificial Sequence
  Oligonucleotide primer for the detection of SNP TSC0002492
taggtttgtaat

SEQ ID NO: 271391 - DNA, 12 bp, Artificial Sequence
  Oligonucleotide primer for the detection of SNP TSC0002492
ccaaacctataa

SEQ ID NO: 271392 - DNA, 12 bp, Artificial Sequence
  Oligonucleotide primer for the detection of SNP TSC0002492
ttaaaatgttgg

SEQ ID NO: 271393 - DNA, 12 bp, Artificial Sequence
  Oligonucleotide primer for the detection of SNP TSC0002493
aactctaataat

SEQ ID NO: 271394 - DNA, 12 bp, Artificial Sequence
  Oligonucleotide primer for the detection of SNP TSC0002493
gatttttgagta

SEQ ID NO: 271395 - DNA, 12 bp, Artificial Sequence
  Oligonucleotide primer for the detection of SNP TSC0002495
cttcaataaaaa

SEQ ID NO: 271396 - DNA, 12 bp, Artificial Sequence
  Oligonucleotide primer for the detection of SNP TSC0002495
aagatattattt

SEQ ID NO: 271397 - DNA, 12 bp, Artificial Sequence
  Oligonucleotide primer for the detection of SNP TSC0002495
aaaacatcatct

SEQ ID NO: 271398 - DNA, 12 bp, Artificial Sequence
  Oligonucleotide primer for the detection of SNP TSC0002495
ttttaatgaaaa

SEQ ID NO: 271399 - DNA, 12 bp, Artificial Sequence
  Oligonucleotide primer for the detection of SNP TSC0002496
tatctttattcc

SEQ ID NO: 271400 - DNA, 12 bp, Artificial Sequence
  Oligonucleotide primer for the detection of SNP TSC0002496
gggaagggagag

SEQ ID NO: 271401 - DNA, 12 bp, Artificial Sequence
  Oligonucleotide primer for the detection of SNP TSC0002496
tatttttgtttt

SEQ ID NO: 271402 - DNA, 12 bp, Artificial Sequence
  Oligonucleotide primer for the detection of SNP TSC0002497
cccattcccacc

SEQ ID NO: 271403 - DNA, 12 bp, Artificial Sequence
  Oligonucleotide primer for the detection of SNP TSC0002497
cccgttcccacc

SEQ ID NO: 271404 - DNA, 12 bp, Artificial Sequence
  Oligonucleotide primer for the detection of SNP TSC0002497
aggatttagggg

SEQ ID NO: 271405 - DNA, 12 bp, Artificial Sequence
  Oligonucleotide primer for the detection of SNP TSC0002497
aaaactcaaaaa

SEQ ID NO: 271406 - DNA, 12 bp, Artificial Sequence
  Oligonucleotide primer for the detection of SNP TSC0002498
gaattgagattg

SEQ ID NO: 271407 - DNA, 12 bp, Artificial Sequence
  Oligonucleotide primer for the detection of SNP TSC0002498
gaatcgagattg

SEQ ID NO: 271408 - DNA, 12 bp, Artificial Sequence
  Oligonucleotide primer for the detection of SNP TSC0002498
gaattgagatcg

SEQ ID NO: 271409 - DNA, 12 bp, Artificial Sequence
  Oligonucleotide primer for the detection of SNP TSC0002498
gaatcgagatcg

SEQ ID NO: 271410 - DNA, 12 bp, Artificial Sequence
  Oligonucleotide primer for the detection of SNP TSC0002498
aaaccaaaatca

SEQ ID NO: 271411 - DNA, 12 bp, Artificial Sequence
  Oligonucleotide primer for the detection of SNP TSC0002498
aaaccaaaatcg

SEQ ID NO: 271412 - DNA, 12 bp, Artificial Sequence
  Oligonucleotide primer for the detection of SNP TSC0002498
aaaccgaaatca

SEQ ID NO: 271413 - DNA, 12 bp, Artificial Sequence
  Oligonucleotide primer for the detection of SNP TSC0002498
aaaccgaaatcg

SEQ ID NO: 271414 - DNA, 12 bp, Artificial Sequence
  Oligonucleotide primer for the detection of SNP TSC0002498
ttggagtgtagt

SEQ ID NO: 271415 - DNA, 12 bp, Artificial Sequence
  Oligonucleotide primer for the detection of SNP TSC0002499
cacacctctctc

SEQ ID NO: 271416 - DNA, 12 bp, Artificial Sequence
  Oligonucleotide primer for the detection of SNP TSC0002499
cacgcctctctc

SEQ ID NO: 271417 - DNA, 12 bp, Artificial Sequence
  Oligonucleotide primer for the detection of SNP TSC0002499
taaaaattaatg

SEQ ID NO: 271418 - DNA, 12 bp, Artificial Sequence
  Oligonucleotide primer for the detection of SNP TSC0002499
tatgtttttttt

SEQ ID NO: 271419 - DNA, 12 bp, Artificial Sequence
  Oligonucleotide primer for the detection of SNP TSC0002499
tacgtttttttt

SEQ ID NO: 271420 - DNA, 12 bp, Artificial Sequence
  Oligonucleotide primer for the detection of SNP TSC0002500
ttacattatatc

SEQ ID NO: 271421 - DNA, 12 bp, Artificial Sequence
  Oligonucleotide primer for the detection of SNP TSC0002500
ggtaaaagaagg

SEQ ID NO: 271422 - DNA, 12 bp, Artificial Sequence
  Oligonucleotide primer for the detection of SNP TSC0002501
caaaatcatact

SEQ ID NO: 271423 - DNA, 12 bp, Artificial Sequence
  Oligonucleotide primer for the detection of SNP TSC0002501
gttattatttat

SEQ ID NO: 271424 - DNA, 12 bp, Artificial Sequence
  Oligonucleotide primer for the detection of SNP TSC0002501
aaccactattca

SEQ ID NO: 271425 - DNA, 12 bp, Artificial Sequence
  Oligonucleotide primer for the detection of SNP TSC0002501
taaagttatgtt

SEQ ID NO: 271426 - DNA, 12 bp, Artificial Sequence
  Oligonucleotide primer for the detection of SNP TSC0002503
aaactaaacaat

SEQ ID NO: 271427 - DNA, 12 bp, Artificial Sequence
  Oligonucleotide primer for the detection of SNP TSC0002503
gtatttttgtga

SEQ ID NO: 271428 - DNA, 12 bp, Artificial Sequence
  Oligonucleotide primer for the detection of SNP TSC0002503
cacctctataaa

SEQ ID NO: 271429 - DNA, 12 bp, Artificial Sequence
  Oligonucleotide primer for the detection of SNP TSC0002503
attgagtagttt

SEQ ID NO: 271430 - DNA, 12 bp, Artificial Sequence
  Oligonucleotide primer for the detection of SNP TSC0002504
ataacccttaat

SEQ ID NO: 271431 - DNA, 12 bp, Artificial Sequence
  Oligonucleotide primer for the detection of SNP TSC0002504
gttttttgtata

SEQ ID NO: 271432 - DNA, 12 bp, Artificial Sequence
  Oligonucleotide primer for the detection of SNP TSC0002506
cctaaaaaactt

SEQ ID NO: 271433 - DNA, 12 bp, Artificial Sequence
  Oligonucleotide primer for the detection of SNP TSC0002506
ttttaaagaatg

SEQ ID NO: 271434 - DNA, 12 bp, Artificial Sequence
  Oligonucleotide primer for the detection of SNP TSC0002506
ccccaaaaaata

SEQ ID NO: 271435 - DNA, 12 bp, Artificial Sequence
  Oligonucleotide primer for the detection of SNP TSC0002506
tttgggggattt

SEQ ID NO: 271436 - DNA, 12 bp, Artificial Sequence
  Oligonucleotide primer for the detection of SNP TSC0002507
acccacacaata

SEQ ID NO: 271437 - DNA, 12 bp, Artificial Sequence
  Oligonucleotide primer for the detection of SNP TSC0002507
acccacacgata

SEQ ID NO: 271438 - DNA, 12 bp, Artificial Sequence
  Oligonucleotide primer for the detection of SNP TSC0002507
ggtgttttgggt

SEQ ID NO: 271439 - DNA, 12 bp, Artificial Sequence
  Oligonucleotide primer for the detection of SNP TSC0002507
aatactctaaac

SEQ ID NO: 271440 - DNA, 12 bp, Artificial Sequence
  Oligonucleotide primer for the detection of SNP TSC0002507
atttatatgatg

SEQ ID NO: 271441 - DNA, 12 bp, Artificial Sequence
  Oligonucleotide primer for the detection of SNP TSC0002507
atttatacgatg

SEQ ID NO: 271442 - DNA, 12 bp, Artificial Sequence
  Oligonucleotide primer for the detection of SNP TSC0002508
aacttcaaaatc

SEQ ID NO: 271443 - DNA, 12 bp, Artificial Sequence
  Oligonukleotid-Primer
gatttaaattga

SEQ ID NO: 271444 - DNA, 12 bp, Artificial Sequence
  Oligonucleotide primer for the detection of SNP TSC0002510
atacaaacaaaa

SEQ ID NO: 271445 - DNA, 12 bp, Artificial Sequence
  Oligonucleotide primer for the detection of SNP TSC0002510
atagaagttgtt

SEQ ID NO: 271446 - DNA, 12 bp, Artificial Sequence
  Oligonucleotide primer for the detection of SNP TSC0002510
atagaagtcgtt

SEQ ID NO: 271447 - DNA, 12 bp, Artificial Sequence
  Oligonucleotide primer for the detection of SNP TSC0002510
ataaaaaccacc

SEQ ID NO: 271448 - DNA, 12 bp, Artificial Sequence
  Oligonucleotide primer for the detection of SNP TSC0002510
ataaaaaccgcc

SEQ ID NO: 271449 - DNA, 12 bp, Artificial Sequence
  Oligonucleotide primer for the detection of SNP TSC0002510
gtgtagatagga

SEQ ID NO: 271450 - DNA, 12 bp, Artificial Sequence
  Oligonucleotide primer for the detection of SNP TSC0002511
taaaaaaaaata

SEQ ID NO: 271451 - DNA, 12 bp, Artificial Sequence
  Oligonucleotide primer for the detection of SNP TSC0002511
attttttgattt

SEQ ID NO: 271452 - DNA, 12 bp, Artificial Sequence
  Oligonucleotide primer for the detection of SNP TSC0002511
attttttgattc

SEQ ID NO: 271453 - DNA, 12 bp, Artificial Sequence
  Oligonucleotide primer for the detection of SNP TSC0002511
taaactctctaa

SEQ ID NO: 271454 - DNA, 12 bp, Artificial Sequence
  Oligonucleotide primer for the detection of SNP TSC0002511
ataaggagggat

SEQ ID NO: 271455 - DNA, 12 bp, Artificial Sequence
  Oligonucleotide primer for the detection of SNP TSC0002512
atatttaaataa

SEQ ID NO: 271456 - DNA, 12 bp, Artificial Sequence
  Oligonucleotide primer for the detection of SNP TSC0002512
aaatgatgtatt

SEQ ID NO: 271457 - DNA, 12 bp, Artificial Sequence
  Oligonucleotide primer for the detection of SNP TSC0002512
aaacgatgtatt

SEQ ID NO: 271458 - DNA, 12 bp, Artificial Sequence
  Oligonucleotide primer for the detection of SNP TSC0002512
aaatgatgtatc

SEQ ID NO: 271459 - DNA, 12 bp, Artificial Sequence
  Oligonucleotide primer for the detection of SNP TSC0002512
aaacgatgtatc

SEQ ID NO: 271460 - DNA, 12 bp, Artificial Sequence
  Oligonucleotide primer for the detection of SNP TSC0002512
aaaacaatatat

SEQ ID NO: 271461 - DNA, 12 bp, Artificial Sequence
  Oligonucleotide primer for the detection of SNP TSC0002512
aaaacgatatat

SEQ ID NO: 271462 - DNA, 12 bp, Artificial Sequence
  Oligonucleotide primer for the detection of SNP TSC0002512
gtatttaggtga

SEQ ID NO: 271463 - DNA, 12 bp, Artificial Sequence
  Oligonucleotide primer for the detection of SNP TSC0002513
tcttcaaataaa

SEQ ID NO: 271464 - DNA, 12 bp, Artificial Sequence
  Oligonucleotide primer for the detection of SNP TSC0002513
ggagagtattat

SEQ ID NO: 271465 - DNA, 12 bp, Artificial Sequence
  Oligonucleotide primer for the detection of SNP TSC0002513
ggagagtattac

SEQ ID NO: 271466 - DNA, 12 bp, Artificial Sequence
  Oligonucleotide primer for the detection of SNP TSC0002513
aaaaaacactac

SEQ ID NO: 271467 - DNA, 12 bp, Artificial Sequence
  Oligonucleotide primer for the detection of SNP TSC0002514
acatacccctcc

SEQ ID NO: 271468 - DNA, 12 bp, Artificial Sequence
  Oligonucleotide primer for the detection of SNP TSC0002514
agtttgtttgag

SEQ ID NO: 271469 - DNA, 12 bp, Artificial Sequence
  Oligonucleotide primer for the detection of SNP TSC0002514
agttcgtttgag

SEQ ID NO: 271470 - DNA, 12 bp, Artificial Sequence
  Oligonucleotide primer for the detection of SNP TSC0002515
ccaatataaaac

SEQ ID NO: 271471 - DNA, 12 bp, Artificial Sequence
  Oligonucleotide primer for the detection of SNP TSC0002515
atatgagaagtg

SEQ ID NO: 271472 - DNA, 12 bp, Artificial Sequence
  Oligonucleotide primer for the detection of SNP TSC0002515
atataaaaaata

SEQ ID NO: 271473 - DNA, 12 bp, Artificial Sequence
  Oligonucleotide primer for the detection of SNP TSC0002515
ttagtatagaat

SEQ ID NO: 271474 - DNA, 12 bp, Artificial Sequence
  Oligonucleotide primer for the detection of SNP TSC0002516
aataaaaaactt

SEQ ID NO: 271475 - DNA, 12 bp, Artificial Sequence
  Oligonucleotide primer for the detection of SNP TSC0002516
gttaatttttat

SEQ ID NO: 271476 - DNA, 12 bp, Artificial Sequence
  Oligonucleotide primer for the detection of SNP TSC0002516
aatcaatttcta

SEQ ID NO: 271477 - DNA, 12 bp, Artificial Sequence
  Oligonucleotide primer for the detection of SNP TSC0002516
ggtgaagaattt

SEQ ID NO: 271478 - DNA, 12 bp, Artificial Sequence
  Oligonucleotide primer for the detection of SNP TSC0002517
taattcccccac

SEQ ID NO: 271479 - DNA, 12 bp, Artificial Sequence
  Oligonucleotide primer for the detection of SNP TSC0002517
ttaaaaaggatg

SEQ ID NO: 271480 - DNA, 12 bp, Artificial Sequence
  Oligonucleotide primer for the detection of SNP TSC0002518
acacatatattt

SEQ ID NO: 271481 - DNA, 12 bp, Artificial Sequence
  Oligonucleotide primer for the detection of SNP TSC0002518
acacgtatattt

SEQ ID NO: 271482 - DNA, 12 bp, Artificial Sequence
  Oligonucleotide primer for the detection of SNP TSC0002518
aatagtgttgta

SEQ ID NO: 271483 - DNA, 12 bp, Artificial Sequence
  Oligonucleotide primer for the detection of SNP TSC0002518
aatagtgtcgta

SEQ ID NO: 271484 - DNA, 12 bp, Artificial Sequence
  Oligonucleotide primer for the detection of SNP TSC0002519
atatattttatc

SEQ ID NO: 271485 - DNA, 12 bp, Artificial Sequence
  Oligonucleotide primer for the detection of SNP TSC0002519
tgtgtgaatgtg

SEQ ID NO: 271486 - DNA, 12 bp, Artificial Sequence
  Oligonucleotide primer for the detection of SNP TSC0002519
tatataaatata

SEQ ID NO: 271487 - DNA, 12 bp, Artificial Sequence
  Oligonucleotide primer for the detection of SNP TSC0002519
atgtgttttgtt

SEQ ID NO: 271488 - DNA, 12 bp, Artificial Sequence
  Oligonucleotide primer for the detection of SNP TSC0002520
agagtttaagta

SEQ ID NO: 271489 - DNA, 12 bp, Artificial Sequence
  Oligonucleotide primer for the detection of SNP TSC0002521
aatcataaaaac

SEQ ID NO: 271490 - DNA, 12 bp, Artificial Sequence
  Oligonucleotide primer for the detection of SNP TSC0002521
aatcgtaaaaac

SEQ ID NO: 271491 - DNA, 12 bp, Artificial Sequence
  Oligonucleotide primer for the detection of SNP TSC0002521
tttattttttta

SEQ ID NO: 271492 - DNA, 12 bp, Artificial Sequence
  Oligonucleotide primer for the detection of SNP TSC0002522
tttaccacctat

SEQ ID NO: 271493 - DNA, 12 bp, Artificial Sequence
  Oligonucleotide primer for the detection of SNP TSC0002522
attaggttattg

SEQ ID NO: 271494 - DNA, 12 bp, Artificial Sequence
  Oligonucleotide primer for the detection of SNP TSC0002522
attaggttatcg

SEQ ID NO: 271495 - DNA, 12 bp, Artificial Sequence
  Oligonucleotide primer for the detection of SNP TSC0002524
ctaccatacaac

SEQ ID NO: 271496 - DNA, 12 bp, Artificial Sequence
  Oligonucleotide primer for the detection of SNP TSC0002524
tattttgggtta

SEQ ID NO: 271497 - DNA, 12 bp, Artificial Sequence
  Oligonucleotide primer for the detection of SNP TSC0002525
acaaaccacctc

SEQ ID NO: 271498 - DNA, 12 bp, Artificial Sequence
  Oligonucleotide primer for the detection of SNP TSC0002525
acaaaccgcctc

SEQ ID NO: 271499 - DNA, 12 bp, Artificial Sequence
  Oligonucleotide primer for the detection of SNP TSC0002525
taggttgggaag

SEQ ID NO: 271500 - DNA, 12 bp, Artificial Sequence
  Oligonucleotide primer for the detection of SNP TSC0002525
taggtcgggaag

SEQ ID NO: 271501 - DNA, 12 bp, Artificial Sequence
  Oligonucleotide primer for the detection of SNP TSC0002526
tactcaaatcca

SEQ ID NO: 271502 - DNA, 12 bp, Artificial Sequence
  Oligonucleotide primer for the detection of SNP TSC0002526
ttttttttatat

SEQ ID NO: 271503 - DNA, 12 bp, Artificial Sequence
  Oligonucleotide primer for the detection of SNP TSC0002526
ctctctctcaca

SEQ ID NO: 271504 - DNA, 12 bp, Artificial Sequence
  Oligonucleotide primer for the detection of SNP TSC0002526
gtgtttaggttt

SEQ ID NO: 271505 - DNA, 12 bp, Artificial Sequence
  Oligonucleotide primer for the detection of SNP TSC0002527
cccctcccctca

SEQ ID NO: 271506 - DNA, 12 bp, Artificial Sequence
  Oligonucleotide primer for the detection of SNP TSC0002527
gtaggtgttgag

SEQ ID NO: 271507 - DNA, 12 bp, Artificial Sequence
  Oligonucleotide primer for the detection of SNP TSC0002527
caaatactaaaa

SEQ ID NO: 271508 - DNA, 12 bp, Artificial Sequence
  Oligonucleotide primer for the detection of SNP TSC0002528
aatttacaaatt

SEQ ID NO: 271509 - DNA, 12 bp, Artificial Sequence
  Oligonucleotide primer for the detection of SNP TSC0002528
tgtttgtttttg

SEQ ID NO: 271510 - DNA, 12 bp, Artificial Sequence
  Oligonucleotide primer for the detection of SNP TSC0002528
cgtttgtttttg

SEQ ID NO: 271511 - DNA, 12 bp, Artificial Sequence
  Oligonucleotide primer for the detection of SNP TSC0002528
cacctattttta

SEQ ID NO: 271512 - DNA, 12 bp, Artificial Sequence
  Oligonukleotid-Primer
cgcctattttta

SEQ ID NO: 271513 - DNA, 12 bp, Artificial Sequence
  Oligonucleotide primer for the detection of SNP TSC0002528
ggtttgtaaatt

SEQ ID NO: 271514 - DNA, 12 bp, Artificial Sequence
  Oligonucleotide primer for the detection of SNP TSC0002529
aaattcccaaat

SEQ ID NO: 271515 - DNA, 12 bp, Artificial Sequence
  Oligonucleotide primer for the detection of SNP TSC0002529
gtggggaaaata

SEQ ID NO: 271516 - DNA, 12 bp, Artificial Sequence
  Oligonukleotid-Primer
caaaacaaaata

SEQ ID NO: 271517 - DNA, 12 bp, Artificial Sequence
  Oligonucleotide primer for the detection of SNP TSC0002531
ttttttgatttg

SEQ ID NO: 271518 - DNA, 12 bp, Artificial Sequence
  Oligonucleotide primer for the detection of SNP TSC0002531
ttttttgattcg

SEQ ID NO: 271519 - DNA, 12 bp, Artificial Sequence
  Oligonucleotide primer for the detection of SNP TSC0002532
cttatctctaca

SEQ ID NO: 271520 - DNA, 12 bp, Artificial Sequence
  Oligonucleotide primer for the detection of SNP TSC0002532
gttaatttttaa

SEQ ID NO: 271521 - DNA, 12 bp, Artificial Sequence
  Oligonucleotide primer for the detection of SNP TSC0002533
caaaacaaatcc

SEQ ID NO: 271522 - DNA, 12 bp, Artificial Sequence
  Oligonucleotide primer for the detection of SNP TSC0002533
atttttaatatg

SEQ ID NO: 271523 - DNA, 12 bp, Artificial Sequence
  Oligonucleotide primer for the detection of SNP TSC0002534
aaaacaaaaaca

SEQ ID NO: 271524 - DNA, 12 bp, Artificial Sequence
  Oligonucleotide primer for the detection of SNP TSC0002534
tttggattgtta

SEQ ID NO: 271525 - DNA, 12 bp, Artificial Sequence
  Oligonucleotide primer for the detection of SNP TSC0002536
aactttaataat

SEQ ID NO: 271526 - DNA, 12 bp, Artificial Sequence
  Oligonucleotide primer for the detection of SNP TSC0002536
tattagtggtta

SEQ ID NO: 271527 - DNA, 12 bp, Artificial Sequence
  Oligonucleotide primer for the detection of SNP TSC0002537
ctccaacataac

SEQ ID NO: 271528 - DNA, 12 bp, Artificial Sequence
  Oligonucleotide primer for the detection of SNP TSC0002537
tgtttttgggga

SEQ ID NO: 271529 - DNA, 12 bp, Artificial Sequence
  Oligonucleotide primer for the detection of SNP TSC0002538
cttccaaactaa

SEQ ID NO: 271530 - DNA, 12 bp, Artificial Sequence
  Oligonucleotide primer for the detection of SNP TSC0002538
gtgtttgagagt

SEQ ID NO: 271531 - DNA, 12 bp, Artificial Sequence
  Oligonucleotide primer for the detection of SNP TSC0002538
aatacctaaaaa

SEQ ID NO: 271532 - DNA, 12 bp, Artificial Sequence
  Oligonucleotide primer for the detection of SNP TSC0002538
ttttaggttagt

SEQ ID NO: 271533 - DNA, 12 bp, Artificial Sequence
  Oligonucleotide primer for the detection of SNP TSC0002539
tctcattttata

SEQ ID NO: 271534 - DNA, 12 bp, Artificial Sequence
  Oligonucleotide primer for the detection of SNP TSC0002539
taatgagttttt

SEQ ID NO: 271535 - DNA, 12 bp, Artificial Sequence
  Oligonucleotide primer for the detection of SNP TSC0002539
ataaatttctaa

SEQ ID NO: 271536 - DNA, 12 bp, Artificial Sequence
  Oligonucleotide primer for the detection of SNP TSC0002540
ccacctcaacct

SEQ ID NO: 271537 - DNA, 12 bp, Artificial Sequence
  Oligonucleotide primer for the detection of SNP TSC0002540
ccacctcgacct

SEQ ID NO: 271538 - DNA, 12 bp, Artificial Sequence
  Oligonucleotide primer for the detection of SNP TSC0002540
ccgcctcaacct

SEQ ID NO: 271539 - DNA, 12 bp, Artificial Sequence
  Oligonucleotide primer for the detection of SNP TSC0002540
ccgcctcgacct

SEQ ID NO: 271540 - DNA, 12 bp, Artificial Sequence
  Oligonucleotide primer for the detection of SNP TSC0002540
ttagtattttgg

SEQ ID NO: 271541 - DNA, 12 bp, Artificial Sequence
  Oligonucleotide primer for the detection of SNP TSC0002541
caaaaaaactaa

SEQ ID NO: 271542 - DNA, 12 bp, Artificial Sequence
  Oligonucleotide primer for the detection of SNP TSC0002541
ttgagtagtttg

SEQ ID NO: 271543 - DNA, 12 bp, Artificial Sequence
  Oligonucleotide primer for the detection of SNP TSC0002541
ttaaacaattta

SEQ ID NO: 271544 - DNA, 12 bp, Artificial Sequence
  Oligonucleotide primer for the detection of SNP TSC0002541
aaaagattgatt

SEQ ID NO: 271545 - DNA, 12 bp, Artificial Sequence
  Oligonucleotide primer for the detection of SNP TSC0002542
ttattatctttt

SEQ ID NO: 271546 - DNA, 12 bp, Artificial Sequence
  Oligonucleotide primer for the detection of SNP TSC0002542
aaatggttatta

SEQ ID NO: 271547 - DNA, 12 bp, Artificial Sequence
  Oligonucleotide primer for the detection of SNP TSC0002542
aaataactatta

SEQ ID NO: 271548 - DNA, 12 bp, Artificial Sequence
  Oligonucleotide primer for the detection of SNP TSC0002542
ttattatttttt

SEQ ID NO: 271549 - DNA, 12 bp, Artificial Sequence
  Oligonucleotide primer for the detection of SNP TSC0002545
acctccttctct

SEQ ID NO: 271550 - DNA, 12 bp, Artificial Sequence
  Oligonucleotide primer for the detection of SNP TSC0002545
gcctccttctct

SEQ ID NO: 271551 - DNA, 12 bp, Artificial Sequence
  Oligonucleotide primer for the detection of SNP TSC0002545
ttttggggattt

SEQ ID NO: 271552 - DNA, 12 bp, Artificial Sequence
  Oligonucleotide primer for the detection of SNP TSC0002545
tttctctaaaaa

SEQ ID NO: 271553 - DNA, 12 bp, Artificial Sequence
  Oligonucleotide primer for the detection of SNP TSC0002546
tctttaataaac

SEQ ID NO: 271554 - DNA, 12 bp, Artificial Sequence
  Oligonucleotide primer for the detection of SNP TSC0002546
gaggataagttg

SEQ ID NO: 271555 - DNA, 12 bp, Artificial Sequence
  Oligonucleotide primer for the detection of SNP TSC0002547
taacacaacccc

SEQ ID NO: 271556 - DNA, 12 bp, Artificial Sequence
  Oligonucleotide primer for the detection of SNP TSC0002547
taacacgacccc

SEQ ID NO: 271557 - DNA, 12 bp, Artificial Sequence
  Oligonucleotide primer for the detection of SNP TSC0002547
tgttgatgttag

SEQ ID NO: 271558 - DNA, 12 bp, Artificial Sequence
  Oligonucleotide primer for the detection of SNP TSC0002548
ctcaactcacta

SEQ ID NO: 271559 - DNA, 12 bp, Artificial Sequence
  Oligonucleotide primer for the detection of SNP TSC0002548
ctcgactcacta

SEQ ID NO: 271560 - DNA, 12 bp, Artificial Sequence
  Oligonucleotide primer for the detection of SNP TSC0002548
gaggtagaggtt

SEQ ID NO: 271561 - DNA, 12 bp, Artificial Sequence
  Oligonucleotide primer for the detection of SNP TSC0002548
aaaacaaaaatt

SEQ ID NO: 271562 - DNA, 12 bp, Artificial Sequence
  Oligonucleotide primer for the detection of SNP TSC0002548
ttttggtttatt

SEQ ID NO: 271563 - DNA, 12 bp, Artificial Sequence
  Oligonucleotide primer for the detection of SNP TSC0002548
tttcggtttatt

SEQ ID NO: 271564 - DNA, 12 bp, Artificial Sequence
  Oligonucleotide primer for the detection of SNP TSC0002549
ctactcaaaaaa

SEQ ID NO: 271565 - DNA, 12 bp, Artificial Sequence
  Oligonucleotide primer for the detection of SNP TSC0002549
ctactcgaaaaa

SEQ ID NO: 271566 - DNA, 12 bp, Artificial Sequence
  Oligonucleotide primer for the detection of SNP TSC0002549
tctcctacctct

SEQ ID NO: 271567 - DNA, 12 bp, Artificial Sequence
  Oligonucleotide primer for the detection of SNP TSC0002549
atttatttggga

SEQ ID NO: 271568 - DNA, 12 bp, Artificial Sequence
  Oligonucleotide primer for the detection of SNP TSC0002549
atttattcggga

SEQ ID NO: 271569 - DNA, 12 bp, Artificial Sequence
  Oligonucleotide primer for the detection of SNP TSC0002550
ttggttgtttgt

SEQ ID NO: 271570 - DNA, 12 bp, Artificial Sequence
  Oligonucleotide primer for the detection of SNP TSC0002550
aactacctataa

SEQ ID NO: 271571 - DNA, 12 bp, Artificial Sequence
  Oligonucleotide primer for the detection of SNP TSC0002550
agatgagagggg

SEQ ID NO: 271572 - DNA, 12 bp, Artificial Sequence
  Oligonucleotide primer for the detection of SNP TSC0002552
tcccccaccaat

SEQ ID NO: 271573 - DNA, 12 bp, Artificial Sequence
  Oligonucleotide primer for the detection of SNP TSC0002552
cattccaaaaca

SEQ ID NO: 271574 - DNA, 12 bp, Artificial Sequence
  Oligonucleotide primer for the detection of SNP TSC0002552
ttttttattagt

SEQ ID NO: 271575 - DNA, 12 bp, Artificial Sequence
  Oligonucleotide primer for the detection of SNP TSC0002553
ataacataatct

SEQ ID NO: 271576 - DNA, 12 bp, Artificial Sequence
  Oligonucleotide primer for the detection of SNP TSC0002553
ataacgtaatct

SEQ ID NO: 271577 - DNA, 12 bp, Artificial Sequence
  Oligonucleotide primer for the detection of SNP TSC0002553
gtttgtagtgag

SEQ ID NO: 271578 - DNA, 12 bp, Artificial Sequence
  Oligonucleotide primer for the detection of SNP TSC0002553
acttacaataaa

SEQ ID NO: 271579 - DNA, 12 bp, Artificial Sequence
  Oligonucleotide primer for the detection of SNP TSC0002553
gtggtgtgattt

SEQ ID NO: 271580 - DNA, 12 bp, Artificial Sequence
  Oligonucleotide primer for the detection of SNP TSC0002553
gtggcgtgattt

SEQ ID NO: 271581 - DNA, 12 bp, Artificial Sequence
  Oligonucleotide primer for the detection of SNP TSC0002554
aaataaaaaacc

SEQ ID NO: 271582 - DNA, 12 bp, Artificial Sequence
  Oligonucleotide primer for the detection of SNP TSC0002554
gtaggattttgg

SEQ ID NO: 271583 - DNA, 12 bp, Artificial Sequence
  Oligonucleotide primer for the detection of SNP TSC0002555
aacctccacaac

SEQ ID NO: 271584 - DNA, 12 bp, Artificial Sequence
  Oligonucleotide primer for the detection of SNP TSC0002555
gttgttgttaga

SEQ ID NO: 271585 - DNA, 12 bp, Artificial Sequence
  Oligonucleotide primer for the detection of SNP TSC0002555
actattaccaaa

SEQ ID NO: 271586 - DNA, 12 bp, Artificial Sequence
  Oligonucleotide primer for the detection of SNP TSC0002555
aatttttataat

SEQ ID NO: 271587 - DNA, 12 bp, Artificial Sequence
  Oligonucleotide primer for the detection of SNP TSC0002556
ttattcatttat

SEQ ID NO: 271588 - DNA, 12 bp, Artificial Sequence
  Oligonucleotide primer for the detection of SNP TSC0002556
gatttttaaaag

SEQ ID NO: 271589 - DNA, 12 bp, Artificial Sequence
  Oligonucleotide primer for the detection of SNP TSC0002556
aattcctaaaaa

SEQ ID NO: 271590 - DNA, 12 bp, Artificial Sequence
  Oligonucleotide primer for the detection of SNP TSC0002556
ttgtttatttat

SEQ ID NO: 271591 - DNA, 12 bp, Artificial Sequence
  Oligonucleotide primer for the detection of SNP TSC0002557
aaacatacaaac

SEQ ID NO: 271592 - DNA, 12 bp, Artificial Sequence
  Oligonucleotide primer for the detection of SNP TSC0002557
aagtagttagga

SEQ ID NO: 271593 - DNA, 12 bp, Artificial Sequence
  Oligonucleotide primer for the detection of SNP TSC0002559
ctctaataaact

SEQ ID NO: 271594 - DNA, 12 bp, Artificial Sequence
  Oligonucleotide primer for the detection of SNP TSC0002561
taataaaaccta

SEQ ID NO: 271595 - DNA, 12 bp, Artificial Sequence
  Oligonucleotide primer for the detection of SNP TSC0002561
accccacccaaa

SEQ ID NO: 271596 - DNA, 12 bp, Artificial Sequence
  Oligonucleotide primer for the detection of SNP TSC0002561
accccacccgaa

SEQ ID NO: 271597 - DNA, 12 bp, Artificial Sequence
  Oligonucleotide primer for the detection of SNP TSC0002561
agtagggtttgt

SEQ ID NO: 271598 - DNA, 12 bp, Artificial Sequence
  Oligonucleotide primer for the detection of SNP TSC0002562
caaccaaataat

SEQ ID NO: 271599 - DNA, 12 bp, Artificial Sequence
  Oligonucleotide primer for the detection of SNP TSC0002562
attttttttgtg

SEQ ID NO: 271600 - DNA, 12 bp, Artificial Sequence
  Oligonucleotide primer for the detection of SNP TSC0002562
atttttttcgtg

SEQ ID NO: 271601 - DNA, 12 bp, Artificial Sequence
  Oligonucleotide primer for the detection of SNP TSC0002563
tccaaacctcaa

SEQ ID NO: 271602 - DNA, 12 bp, Artificial Sequence
  Oligonucleotide primer for the detection of SNP TSC0002563
tttatagattgg

SEQ ID NO: 271603 - DNA, 12 bp, Artificial Sequence
  Oligonucleotide primer for the detection of SNP TSC0002563
tataaactaaaa

SEQ ID NO: 271604 - DNA, 12 bp, Artificial Sequence
  Oligonucleotide primer for the detection of SNP TSC0002563
ttaagttttagt

SEQ ID NO: 271605 - DNA, 12 bp, Artificial Sequence
  Oligonukleotid-Primer
aaataaaaaaaa

SEQ ID NO: 271606 - DNA, 12 bp, Artificial Sequence
  Oligonucleotide primer for the detection of SNP TSC0002564
ttaattattaag

SEQ ID NO: 271607 - DNA, 12 bp, Artificial Sequence
  Oligonucleotide primer for the detection of SNP TSC0002564
tcaattatcaaa

SEQ ID NO: 271608 - DNA, 12 bp, Artificial Sequence
  Oligonucleotide primer for the detection of SNP TSC0002564
aggtagagagaa

SEQ ID NO: 271609 - DNA, 12 bp, Artificial Sequence
  Oligonucleotide primer for the detection of SNP TSC0002566
ctcctacctcaa

SEQ ID NO: 271610 - DNA, 12 bp, Artificial Sequence
  Oligonucleotide primer for the detection of SNP TSC0002566
ttttagttattt

SEQ ID NO: 271611 - DNA, 12 bp, Artificial Sequence
  Oligonucleotide primer for the detection of SNP TSC0002566
ttttagttattc

SEQ ID NO: 271612 - DNA, 12 bp, Artificial Sequence
  Oligonucleotide primer for the detection of SNP TSC0002566
caactactcaaa

SEQ ID NO: 271613 - DNA, 12 bp, Artificial Sequence
  Oligonucleotide primer for the detection of SNP TSC0002566
caactactcgaa

SEQ ID NO: 271614 - DNA, 12 bp, Artificial Sequence
  Oligonucleotide primer for the detection of SNP TSC0002566
tttgttttagtt

SEQ ID NO: 271615 - DNA, 12 bp, Artificial Sequence
  Oligonucleotide primer for the detection of SNP TSC0002568
aacccttaaaat

SEQ ID NO: 271616 - DNA, 12 bp, Artificial Sequence
  Oligonucleotide primer for the detection of SNP TSC0002568
tttttttaattt

SEQ ID NO: 271617 - DNA, 12 bp, Artificial Sequence
  Oligonucleotide primer for the detection of SNP TSC0002568
attctctcaacc

SEQ ID NO: 271618 - DNA, 12 bp, Artificial Sequence
  Oligonucleotide primer for the detection of SNP TSC0002568
aatttttaaagt

SEQ ID NO: 271619 - DNA, 12 bp, Artificial Sequence
  Oligonucleotide primer for the detection of SNP TSC0002570
taattttattaa

SEQ ID NO: 271620 - DNA, 12 bp, Artificial Sequence
  Oligonucleotide primer for the detection of SNP TSC0002570
attattatatgt

SEQ ID NO: 271621 - DNA, 12 bp, Artificial Sequence
  Oligonucleotide primer for the detection of SNP TSC0002570
tattatatataa

SEQ ID NO: 271622 - DNA, 12 bp, Artificial Sequence
  Oligonucleotide primer for the detection of SNP TSC0002570
gttttattggtt

SEQ ID NO: 271623 - DNA, 12 bp, Artificial Sequence
  Oligonucleotide primer for the detection of SNP TSC0002571
acccaaaaccaa

SEQ ID NO: 271624 - DNA, 12 bp, Artificial Sequence
  Oligonucleotide primer for the detection of SNP TSC0002571
attaagattatt

SEQ ID NO: 271625 - DNA, 12 bp, Artificial Sequence
  Oligonucleotide primer for the detection of SNP TSC0002571
ttatcaaaacta

SEQ ID NO: 271626 - DNA, 12 bp, Artificial Sequence
  Oligonucleotide primer for the detection of SNP TSC0002571
gtttagaattag

SEQ ID NO: 271627 - DNA, 12 bp, Artificial Sequence
  Oligonucleotide primer for the detection of SNP TSC0002572
taataacattct

SEQ ID NO: 271628 - DNA, 12 bp, Artificial Sequence
  Oligonucleotide primer for the detection of SNP TSC0002572
atgtggttttag

SEQ ID NO: 271629 - DNA, 12 bp, Artificial Sequence
  Oligonucleotide primer for the detection of SNP TSC0002572
acgtggttttag

SEQ ID NO: 271630 - DNA, 12 bp, Artificial Sequence
  Oligonucleotide primer for the detection of SNP TSC0002573
aaatactaaccc

SEQ ID NO: 271631 - DNA, 12 bp, Artificial Sequence
  Oligonucleotide primer for the detection of SNP TSC0002573
gggttagggagg

SEQ ID NO: 271632 - DNA, 12 bp, Artificial Sequence
  Oligonucleotide primer for the detection of SNP TSC0002574
ctaaatttaaaa

SEQ ID NO: 271633 - DNA, 12 bp, Artificial Sequence
  Oligonucleotide primer for the detection of SNP TSC0002574
ttagagtggatt

SEQ ID NO: 271634 - DNA, 12 bp, Artificial Sequence
  Oligonucleotide primer for the detection of SNP TSC0002574
ttagagcggatt

SEQ ID NO: 271635 - DNA, 12 bp, Artificial Sequence
  Oligonucleotide primer for the detection of SNP TSC0002574
ttttaaaacaaa

SEQ ID NO: 271636 - DNA, 12 bp, Artificial Sequence
  Oligonucleotide primer for the detection of SNP TSC0002574
ttttaaaacgaa

SEQ ID NO: 271637 - DNA, 12 bp, Artificial Sequence
  Oligonucleotide primer for the detection of SNP TSC0002574
gttgaatttaag

SEQ ID NO: 271638 - DNA, 12 bp, Artificial Sequence
  Oligonucleotide primer for the detection of SNP TSC0002575
aaccctccacct

SEQ ID NO: 271639 - DNA, 12 bp, Artificial Sequence
  Oligonucleotide primer for the detection of SNP TSC0002575
ctttttctaaaa

SEQ ID NO: 271640 - DNA, 12 bp, Artificial Sequence
  Oligonucleotide primer for the detection of SNP TSC0002576
acaaacctaata

SEQ ID NO: 271641 - DNA, 12 bp, Artificial Sequence
  Oligonucleotide primer for the detection of SNP TSC0002576
acgaacctaata

SEQ ID NO: 271642 - DNA, 12 bp, Artificial Sequence
  Oligonucleotide primer for the detection of SNP TSC0002576
gttataattttt

SEQ ID NO: 271643 - DNA, 12 bp, Artificial Sequence
  Oligonucleotide primer for the detection of SNP TSC0002576
attacaatcctt

SEQ ID NO: 271644 - DNA, 12 bp, Artificial Sequence
  Oligonucleotide primer for the detection of SNP TSC0002576
gatgggtttggt

SEQ ID NO: 271645 - DNA, 12 bp, Artificial Sequence
  Oligonucleotide primer for the detection of SNP TSC0002576
gacgggtttggt

SEQ ID NO: 271646 - DNA, 12 bp, Artificial Sequence
  Oligonucleotide primer for the detection of SNP TSC0002577
cattttcataat

SEQ ID NO: 271647 - DNA, 12 bp, Artificial Sequence
  Oligonucleotide primer for the detection of SNP TSC0002577
cattttcgtaat

SEQ ID NO: 271648 - DNA, 12 bp, Artificial Sequence
  Oligonucleotide primer for the detection of SNP TSC0002577
ttaatattatta

SEQ ID NO: 271649 - DNA, 12 bp, Artificial Sequence
  Oligonucleotide primer for the detection of SNP TSC0002579
acaaacacatac

SEQ ID NO: 271650 - DNA, 12 bp, Artificial Sequence
  Oligonucleotide primer for the detection of SNP TSC0002579
agttaggtatgg

SEQ ID NO: 271651 - DNA, 12 bp, Artificial Sequence
  Oligonucleotide primer for the detection of SNP TSC0002580
ataagagtaaga

SEQ ID NO: 271652 - DNA, 12 bp, Artificial Sequence
  Oligonucleotide primer for the detection of SNP TSC0002580
acaaaaacaaaa

SEQ ID NO: 271653 - DNA, 12 bp, Artificial Sequence
  Oligonucleotide primer for the detection of SNP TSC0002583
aataaatcacct

SEQ ID NO: 271654 - DNA, 12 bp, Artificial Sequence
  Oligonucleotide primer for the detection of SNP TSC0002583
tttaaatttttg

SEQ ID NO: 271655 - DNA, 12 bp, Artificial Sequence
  Oligonucleotide primer for the detection of SNP TSC0002584
taaataacttac

SEQ ID NO: 271656 - DNA, 12 bp, Artificial Sequence
  Oligonucleotide primer for the detection of SNP TSC0002584
tttcgtgatttt

SEQ ID NO: 271657 - DNA, 12 bp, Artificial Sequence
  Oligonucleotide primer for the detection of SNP TSC0002584
catctcataacc

SEQ ID NO: 271658 - DNA, 12 bp, Artificial Sequence
  Oligonucleotide primer for the detection of SNP TSC0002584
catctcgtaacc

SEQ ID NO: 271659 - DNA, 12 bp, Artificial Sequence
  Oligonucleotide primer for the detection of SNP TSC0002584
aagtgatttgtt

SEQ ID NO: 271660 - DNA, 12 bp, Artificial Sequence
  Oligonucleotide primer for the detection of SNP TSC0002585
ccttaatccccc

SEQ ID NO: 271661 - DNA, 12 bp, Artificial Sequence
  Oligonucleotide primer for the detection of SNP TSC0002585
gtgtttggggtg

SEQ ID NO: 271662 - DNA, 12 bp, Artificial Sequence
  Oligonucleotide primer for the detection of SNP TSC0002586
aataaaacaaaa

SEQ ID NO: 271663 - DNA, 12 bp, Artificial Sequence
  Oligonucleotide primer for the detection of SNP TSC0002586
ttttaaatattg

SEQ ID NO: 271664 - DNA, 12 bp, Artificial Sequence
  Oligonucleotide primer for the detection of SNP TSC0002586
cttcaaatacta

SEQ ID NO: 271665 - DNA, 12 bp, Artificial Sequence
  Oligonucleotide primer for the detection of SNP TSC0002586
gaatagagtaga

SEQ ID NO: 271666 - DNA, 12 bp, Artificial Sequence
  Oligonucleotide primer for the detection of SNP TSC0002587
aattttatatcc

SEQ ID NO: 271667 - DNA, 12 bp, Artificial Sequence
  Oligonucleotide primer for the detection of SNP TSC0002587
gaatttatttgg

SEQ ID NO: 271668 - DNA, 12 bp, Artificial Sequence
  Oligonucleotide primer for the detection of SNP TSC0002587
aaatttatctaa

SEQ ID NO: 271669 - DNA, 12 bp, Artificial Sequence
  Oligonucleotide primer for the detection of SNP TSC0002587
agttttgtattt

SEQ ID NO: 271670 - DNA, 12 bp, Artificial Sequence
  Oligonucleotide primer for the detection of SNP TSC0002588
tacttttctatt

SEQ ID NO: 271671 - DNA, 12 bp, Artificial Sequence
  Oligonucleotide primer for the detection of SNP TSC0002588
tgtttaaattta

SEQ ID NO: 271672 - DNA, 12 bp, Artificial Sequence
  Oligonucleotide primer for the detection of SNP TSC0002588
cgtttaaattta

SEQ ID NO: 271673 - DNA, 12 bp, Artificial Sequence
  Oligonucleotide primer for the detection of SNP TSC0002589
taattccctcta

SEQ ID NO: 271674 - DNA, 12 bp, Artificial Sequence
  Oligonucleotide primer for the detection of SNP TSC0002589
gataatttttgt

SEQ ID NO: 271675 - DNA, 12 bp, Artificial Sequence
  Oligonucleotide primer for the detection of SNP TSC0002589
aataatttttac

SEQ ID NO: 271676 - DNA, 12 bp, Artificial Sequence
  Oligonucleotide primer for the detection of SNP TSC0002589
taattttttttg

SEQ ID NO: 271677 - DNA, 12 bp, Artificial Sequence
  Oligonucleotide primer for the detection of SNP TSC0002590
catctaaaataa

SEQ ID NO: 271678 - DNA, 12 bp, Artificial Sequence
  Oligonukleotid-Primer
tattatgaaatt

SEQ ID NO: 271679 - DNA, 12 bp, Artificial Sequence
  Oligonucleotide primer for the detection of SNP TSC0002590
ttattataaaac

SEQ ID NO: 271680 - DNA, 12 bp, Artificial Sequence
  Oligonucleotide primer for the detection of SNP TSC0002590
ttatttgagatg

SEQ ID NO: 271681 - DNA, 12 bp, Artificial Sequence
  Oligonucleotide primer for the detection of SNP TSC0002591
tacttttaaata

SEQ ID NO: 271682 - DNA, 12 bp, Artificial Sequence
  Oligonucleotide primer for the detection of SNP TSC0002591
tggtttttagta

SEQ ID NO: 271683 - DNA, 12 bp, Artificial Sequence
  Oligonucleotide primer for the detection of SNP TSC0002591
aaccctcaataa

SEQ ID NO: 271684 - DNA, 12 bp, Artificial Sequence
  Oligonucleotide primer for the detection of SNP TSC0002591
tatttttgagtg

SEQ ID NO: 271685 - DNA, 12 bp, Artificial Sequence
  Oligonucleotide primer for the detection of SNP TSC0002592
tctacatccctc

SEQ ID NO: 271686 - DNA, 12 bp, Artificial Sequence
  Oligonucleotide primer for the detection of SNP TSC0002592
tctacgtccctc

SEQ ID NO: 271687 - DNA, 12 bp, Artificial Sequence
  Oligonucleotide primer for the detection of SNP TSC0002592
tatagtttttag

SEQ ID NO: 271688 - DNA, 12 bp, Artificial Sequence
  Oligonucleotide primer for the detection of SNP TSC0002592
tacaactcccaa

SEQ ID NO: 271689 - DNA, 12 bp, Artificial Sequence
  Oligonucleotide primer for the detection of SNP TSC0002592
tttgcgtttttt

SEQ ID NO: 271690 - DNA, 12 bp, Artificial Sequence
  Oligonucleotide primer for the detection of SNP TSC0002593
accaacactcaa

SEQ ID NO: 271691 - DNA, 12 bp, Artificial Sequence
  Oligonucleotide primer for the detection of SNP TSC0002593
accaacactcga

SEQ ID NO: 271692 - DNA, 12 bp, Artificial Sequence
  Oligonucleotide primer for the detection of SNP TSC0002593
gaatgaggaagt

SEQ ID NO: 271693 - DNA, 12 bp, Artificial Sequence
  Oligonucleotide primer for the detection of SNP TSC0002593
gaacgaggaagt

SEQ ID NO: 271694 - DNA, 12 bp, Artificial Sequence
  Oligonucleotide primer for the detection of SNP TSC0002593
aaacgaaaaaac

SEQ ID NO: 271695 - DNA, 12 bp, Artificial Sequence
  Oligonucleotide primer for the detection of SNP TSC0002593
gttaatatttgg

SEQ ID NO: 271696 - DNA, 12 bp, Artificial Sequence
  Oligonucleotide primer for the detection of SNP TSC0002593
gttaatattcgg

SEQ ID NO: 271697 - DNA, 12 bp, Artificial Sequence
  Oligonucleotide primer for the detection of SNP TSC0002594
aatttataaaaa

SEQ ID NO: 271698 - DNA, 12 bp, Artificial Sequence
  Oligonucleotide primer for the detection of SNP TSC0002594
ttgtttgtttta

SEQ ID NO: 271699 - DNA, 12 bp, Artificial Sequence
  Oligonucleotide primer for the detection of SNP TSC0002595
ttgattgttatt

SEQ ID NO: 271700 - DNA, 12 bp, Artificial Sequence
  Oligonucleotide primer for the detection of SNP TSC0002595
tcgattgttatt

SEQ ID NO: 271701 - DNA, 12 bp, Artificial Sequence
  Oligonucleotide primer for the detection of SNP TSC0002595
ttgatcgttatt

SEQ ID NO: 271702 - DNA, 12 bp, Artificial Sequence
  Oligonucleotide primer for the detection of SNP TSC0002595
tcgatcgttatt

SEQ ID NO: 271703 - DNA, 12 bp, Artificial Sequence
  Oligonucleotide primer for the detection of SNP TSC0002595
tcaaccaccatc

SEQ ID NO: 271704 - DNA, 12 bp, Artificial Sequence
  Oligonucleotide primer for the detection of SNP TSC0002595
tcaaccgccatc

SEQ ID NO: 271705 - DNA, 12 bp, Artificial Sequence
  Oligonucleotide primer for the detection of SNP TSC0002595
tcgaccaccatc

SEQ ID NO: 271706 - DNA, 12 bp, Artificial Sequence
  Oligonucleotide primer for the detection of SNP TSC0002595
tcgaccgccatc

SEQ ID NO: 271707 - DNA, 12 bp, Artificial Sequence
  Oligonucleotide primer for the detection of SNP TSC0002595
ttgggaggagag

SEQ ID NO: 271708 - DNA, 12 bp, Artificial Sequence
  Oligonucleotide primer for the detection of SNP TSC0002597
acacattattta

SEQ ID NO: 271709 - DNA, 12 bp, Artificial Sequence
  Oligonucleotide primer for the detection of SNP TSC0002597
acacgttattta

SEQ ID NO: 271710 - DNA, 12 bp, Artificial Sequence
  Oligonucleotide primer for the detection of SNP TSC0002597
acgcattattta

SEQ ID NO: 271711 - DNA, 12 bp, Artificial Sequence
  Oligonucleotide primer for the detection of SNP TSC0002597
acgcgttattta

SEQ ID NO: 271712 - DNA, 12 bp, Artificial Sequence
  Oligonucleotide primer for the detection of SNP TSC0002597
atgtaagttttg

SEQ ID NO: 271713 - DNA, 12 bp, Artificial Sequence
  Oligonucleotide primer for the detection of SNP TSC0002597
atacaaacttta

SEQ ID NO: 271714 - DNA, 12 bp, Artificial Sequence
  Oligonucleotide primer for the detection of SNP TSC0002597
tatgtgttgttt

SEQ ID NO: 271715 - DNA, 12 bp, Artificial Sequence
  Oligonucleotide primer for the detection of SNP TSC0002597
tacgtgttgttt

SEQ ID NO: 271716 - DNA, 12 bp, Artificial Sequence
  Oligonucleotide primer for the detection of SNP TSC0002597
tatgcgttgttt

SEQ ID NO: 271717 - DNA, 12 bp, Artificial Sequence
  Oligonucleotide primer for the detection of SNP TSC0002597
tacgcgttgttt

SEQ ID NO: 271718 - DNA, 12 bp, Artificial Sequence
  Oligonucleotide primer for the detection of SNP TSC0002598
acacacattatt

SEQ ID NO: 271719 - DNA, 12 bp, Artificial Sequence
  Oligonucleotide primer for the detection of SNP TSC0002598
acacacgttatt

SEQ ID NO: 271720 - DNA, 12 bp, Artificial Sequence
  Oligonucleotide primer for the detection of SNP TSC0002598
acacgcattatt

SEQ ID NO: 271721 - DNA, 12 bp, Artificial Sequence
  Oligonucleotide primer for the detection of SNP TSC0002598
acacgcgttatt

SEQ ID NO: 271722 - DNA, 12 bp, Artificial Sequence
  Oligonucleotide primer for the detection of SNP TSC0002598
gtaagttttggt

SEQ ID NO: 271723 - DNA, 12 bp, Artificial Sequence
  Oligonucleotide primer for the detection of SNP TSC0002598
tacaaactttaa

SEQ ID NO: 271724 - DNA, 12 bp, Artificial Sequence
  Oligonucleotide primer for the detection of SNP TSC0002598
gtatgtgttgtt

SEQ ID NO: 271725 - DNA, 12 bp, Artificial Sequence
  Oligonucleotide primer for the detection of SNP TSC0002598
gtacgtgttgtt

SEQ ID NO: 271726 - DNA, 12 bp, Artificial Sequence
  Oligonucleotide primer for the detection of SNP TSC0002598
gtatgcgttgtt

SEQ ID NO: 271727 - DNA, 12 bp, Artificial Sequence
  Oligonucleotide primer for the detection of SNP TSC0002598
gtacgcgttgtt

SEQ ID NO: 271728 - DNA, 12 bp, Artificial Sequence
  Oligonucleotide primer for the detection of SNP TSC0002600
aaaacaaatcac

SEQ ID NO: 271729 - DNA, 12 bp, Artificial Sequence
  Oligonucleotide primer for the detection of SNP TSC0002600
ttttttgaatag

SEQ ID NO: 271730 - DNA, 12 bp, Artificial Sequence
  Oligonucleotide primer for the detection of SNP TSC0002601
caatttcataca

SEQ ID NO: 271731 - DNA, 12 bp, Artificial Sequence
  Oligonucleotide primer for the detection of SNP TSC0002601
caatttcatacg

SEQ ID NO: 271732 - DNA, 12 bp, Artificial Sequence
  Oligonucleotide primer for the detection of SNP TSC0002601
ttttatatggat

SEQ ID NO: 271733 - DNA, 12 bp, Artificial Sequence
  Oligonucleotide primer for the detection of SNP TSC0002601
ttttatacggat

SEQ ID NO: 271734 - DNA, 12 bp, Artificial Sequence
  Oligonucleotide primer for the detection of SNP TSC0002601
ttttatatggac

SEQ ID NO: 271735 - DNA, 12 bp, Artificial Sequence
  Oligonucleotide primer for the detection of SNP TSC0002601
ttttatacggac

SEQ ID NO: 271736 - DNA, 12 bp, Artificial Sequence
  Oligonucleotide primer for the detection of SNP TSC0002601
cttcacacaaac

SEQ ID NO: 271737 - DNA, 12 bp, Artificial Sequence
  Oligonucleotide primer for the detection of SNP TSC0002601
cttcacacgaac

SEQ ID NO: 271738 - DNA, 12 bp, Artificial Sequence
  Oligonucleotide primer for the detection of SNP TSC0002601
tagttttatgtg

SEQ ID NO: 271739 - DNA, 12 bp, Artificial Sequence
  Oligonucleotide primer for the detection of SNP TSC0002601
tagttttatgcg

SEQ ID NO: 271740 - DNA, 12 bp, Artificial Sequence
  Oligonucleotide primer for the detection of SNP TSC0002602
ccccaacctctc

SEQ ID NO: 271741 - DNA, 12 bp, Artificial Sequence
  Oligonucleotide primer for the detection of SNP TSC0002602
ttatgtatttgg

SEQ ID NO: 271742 - DNA, 12 bp, Artificial Sequence
  Oligonucleotide primer for the detection of SNP TSC0002603
ctcaatttcata

SEQ ID NO: 271743 - DNA, 12 bp, Artificial Sequence
  Oligonucleotide primer for the detection of SNP TSC0002603
ttatatggatgt

SEQ ID NO: 271744 - DNA, 12 bp, Artificial Sequence
  Oligonucleotide primer for the detection of SNP TSC0002603
ttatacggatgt

SEQ ID NO: 271745 - DNA, 12 bp, Artificial Sequence
  Oligonucleotide primer for the detection of SNP TSC0002603
ttatatggacgt

SEQ ID NO: 271746 - DNA, 12 bp, Artificial Sequence
  Oligonucleotide primer for the detection of SNP TSC0002603
ttatatggatgc

SEQ ID NO: 271747 - DNA, 12 bp, Artificial Sequence
  Oligonucleotide primer for the detection of SNP TSC0002603
ttatacggacgt

SEQ ID NO: 271748 - DNA, 12 bp, Artificial Sequence
  Oligonucleotide primer for the detection of SNP TSC0002603
ttatacggatgc

SEQ ID NO: 271749 - DNA, 12 bp, Artificial Sequence
  Oligonucleotide primer for the detection of SNP TSC0002603
ttatatggacgc

SEQ ID NO: 271750 - DNA, 12 bp, Artificial Sequence
  Oligonucleotide primer for the detection of SNP TSC0002603
ttatacggacgc

SEQ ID NO: 271751 - DNA, 12 bp, Artificial Sequence
  Oligonucleotide primer for the detection of SNP TSC0002603
tcacacaaacac

SEQ ID NO: 271752 - DNA, 12 bp, Artificial Sequence
  Oligonucleotide primer for the detection of SNP TSC0002603
tcacacaaacgc

SEQ ID NO: 271753 - DNA, 12 bp, Artificial Sequence
  Oligonucleotide primer for the detection of SNP TSC0002603
tcacacgaacac

SEQ ID NO: 271754 - DNA, 12 bp, Artificial Sequence
  Oligonucleotide primer for the detection of SNP TSC0002603
tcacacgaacgc

SEQ ID NO: 271755 - DNA, 12 bp, Artificial Sequence
  Oligonucleotide primer for the detection of SNP TSC0002603
tttagttttatg

SEQ ID NO: 271756 - DNA, 12 bp, Artificial Sequence
  Oligonucleotide primer for the detection of SNP TSC0002604
atacaaacatac

SEQ ID NO: 271757 - DNA, 12 bp, Artificial Sequence
  Oligonucleotide primer for the detection of SNP TSC0002604
tatatttttatg

SEQ ID NO: 271758 - DNA, 12 bp, Artificial Sequence
  Oligonucleotide primer for the detection of SNP TSC0002605
ttaaacctcttt

SEQ ID NO: 271759 - DNA, 12 bp, Artificial Sequence
  Oligonucleotide primer for the detection of SNP TSC0002605
gttgttaaggaa

SEQ ID NO: 271760 - DNA, 12 bp, Artificial Sequence
  Oligonucleotide primer for the detection of SNP TSC0002606
taccaatatcaa

SEQ ID NO: 271761 - DNA, 12 bp, Artificial Sequence
  Oligonucleotide primer for the detection of SNP TSC0002606
taccgatatcaa

SEQ ID NO: 271762 - DNA, 12 bp, Artificial Sequence
  Oligonucleotide primer for the detection of SNP TSC0002606
gtaagtatgaaa

SEQ ID NO: 271763 - DNA, 12 bp, Artificial Sequence
  Oligonucleotide primer for the detection of SNP TSC0002606
caaacataaaaa

SEQ ID NO: 271764 - DNA, 12 bp, Artificial Sequence
  Oligonucleotide primer for the detection of SNP TSC0002606
ttgttgatgtta

SEQ ID NO: 271765 - DNA, 12 bp, Artificial Sequence
  Oligonucleotide primer for the detection of SNP TSC0002606
ttgtcgatgtta

SEQ ID NO: 271766 - DNA, 12 bp, Artificial Sequence
  Oligonucleotide primer for the detection of SNP TSC0002608
aacccaactccc

SEQ ID NO: 271767 - DNA, 12 bp, Artificial Sequence
  Oligonucleotide primer for the detection of SNP TSC0002608
atgtttgggtag

SEQ ID NO: 271768 - DNA, 12 bp, Artificial Sequence
  Oligonucleotide primer for the detection of SNP TSC0002608
atgttcgggtag

SEQ ID NO: 271769 - DNA, 12 bp, Artificial Sequence
  Oligonucleotide primer for the detection of SNP TSC0002611
aaaataaaaaat

SEQ ID NO: 271770 - DNA, 12 bp, Artificial Sequence
  Oligonucleotide primer for the detection of SNP TSC0002611
tggtttattttg

SEQ ID NO: 271771 - DNA, 12 bp, Artificial Sequence
  Oligonucleotide primer for the detection of SNP TSC0002612
aataatttttct

SEQ ID NO: 271772 - DNA, 12 bp, Artificial Sequence
  Oligonucleotide primer for the detection of SNP TSC0002612
tagtattattta

SEQ ID NO: 271773 - DNA, 12 bp, Artificial Sequence
  Oligonucleotide primer for the detection of SNP TSC0002613
aacttcaacttt

SEQ ID NO: 271774 - DNA, 12 bp, Artificial Sequence
  Oligonucleotide primer for the detection of SNP TSC0002613
tgtttttattaa

SEQ ID NO: 271775 - DNA, 12 bp, Artificial Sequence
  Oligonucleotide primer for the detection of SNP TSC0002613
tactctcaccaa

SEQ ID NO: 271776 - DNA, 12 bp, Artificial Sequence
  Oligonucleotide primer for the detection of SNP TSC0002613
aattttagtttt

SEQ ID NO: 271777 - DNA, 12 bp, Artificial Sequence
  Oligonucleotide primer for the detection of SNP TSC0002614
attaattaccct

SEQ ID NO: 271778 - DNA, 12 bp, Artificial Sequence
  Oligonucleotide primer for the detection of SNP TSC0002614
ataatataggta

SEQ ID NO: 271779 - DNA, 12 bp, Artificial Sequence
  Oligonucleotide primer for the detection of SNP TSC0002616
cccctttccata

SEQ ID NO: 271780 - DNA, 12 bp, Artificial Sequence
  Oligonucleotide primer for the detection of SNP TSC0002616
ttgtgtggtttt

SEQ ID NO: 271781 - DNA, 12 bp, Artificial Sequence
  Oligonucleotide primer for the detection of SNP TSC0002616
tcgtgtggtttt

SEQ ID NO: 271782 - DNA, 12 bp, Artificial Sequence
  Oligonucleotide primer for the detection of SNP TSC0002616
tcatataatctc

SEQ ID NO: 271783 - DNA, 12 bp, Artificial Sequence
  Oligonucleotide primer for the detection of SNP TSC0002616
tcgtataatctc

SEQ ID NO: 271784 - DNA, 12 bp, Artificial Sequence
  Oligonukleotid-Primer
tttttttttatg

SEQ ID NO: 271785 - DNA, 12 bp, Artificial Sequence
  Oligonucleotide primer for the detection of SNP TSC0002617
ctctatcaccat

SEQ ID NO: 271786 - DNA, 12 bp, Artificial Sequence
  Oligonucleotide primer for the detection of SNP TSC0002617
attgtattttaa

SEQ ID NO: 271787 - DNA, 12 bp, Artificial Sequence
  Oligonucleotide primer for the detection of SNP TSC0002617
actacactccaa

SEQ ID NO: 271788 - DNA, 12 bp, Artificial Sequence
  Oligonucleotide primer for the detection of SNP TSC0002617
ttttgttattat

SEQ ID NO: 271789 - DNA, 12 bp, Artificial Sequence
  Oligonucleotide primer for the detection of SNP TSC0002618
ttctctctatca

SEQ ID NO: 271790 - DNA, 12 bp, Artificial Sequence
  Oligonucleotide primer for the detection of SNP TSC0002618
ttctctctatcg

SEQ ID NO: 271791 - DNA, 12 bp, Artificial Sequence
  Oligonucleotide primer for the detection of SNP TSC0002618
aagtttgttatt

SEQ ID NO: 271792 - DNA, 12 bp, Artificial Sequence
  Oligonucleotide primer for the detection of SNP TSC0002618
acaaacttatta

SEQ ID NO: 271793 - DNA, 12 bp, Artificial Sequence
  Oligonucleotide primer for the detection of SNP TSC0002618
ttttttttattg

SEQ ID NO: 271794 - DNA, 12 bp, Artificial Sequence
  Oligonucleotide primer for the detection of SNP TSC0002618
ttttttttatcg

SEQ ID NO: 271795 - DNA, 12 bp, Artificial Sequence
  Oligonucleotide primer for the detection of SNP TSC0002619
aacaaaacattt

SEQ ID NO: 271796 - DNA, 12 bp, Artificial Sequence
  Oligonucleotide primer for the detection of SNP TSC0002619
gaatgagagata

SEQ ID NO: 271797 - DNA, 12 bp, Artificial Sequence
  Oligonucleotide primer for the detection of SNP TSC0002620
taaaaactcaaa

SEQ ID NO: 271798 - DNA, 12 bp, Artificial Sequence
  Oligonucleotide primer for the detection of SNP TSC0002620
tatattgaatat

SEQ ID NO: 271799 - DNA, 12 bp, Artificial Sequence
  Oligonucleotide primer for the detection of SNP TSC0002620
cacactaaatac

SEQ ID NO: 271800 - DNA, 12 bp, Artificial Sequence
  Oligonucleotide primer for the detection of SNP TSC0002620
taggaatttaga

SEQ ID NO: 271801 - DNA, 12 bp, Artificial Sequence
  Oligonucleotide primer for the detection of SNP TSC0002621
cccaatcactta

SEQ ID NO: 271802 - DNA, 12 bp, Artificial Sequence
  Oligonucleotide primer for the detection of SNP TSC0002621
ttgtgtttattg

SEQ ID NO: 271803 - DNA, 12 bp, Artificial Sequence
  Oligonucleotide primer for the detection of SNP TSC0002621
tatattcactaa

SEQ ID NO: 271804 - DNA, 12 bp, Artificial Sequence
  Oligonucleotide primer for the detection of SNP TSC0002622
aaaaaatcttaa

SEQ ID NO: 271805 - DNA, 12 bp, Artificial Sequence
  Oligonucleotide primer for the detection of SNP TSC0002622
ataattgtatgt

SEQ ID NO: 271806 - DNA, 12 bp, Artificial Sequence
  Oligonucleotide primer for the detection of SNP TSC0002622
aacaactacata

SEQ ID NO: 271807 - DNA, 12 bp, Artificial Sequence
  Oligonucleotide primer for the detection of SNP TSC0002622
aaggaattttgg

SEQ ID NO: 271808 - DNA, 12 bp, Artificial Sequence
  Oligonucleotide primer for the detection of SNP TSC0002623
ttaaatttcaaa

SEQ ID NO: 271809 - DNA, 12 bp, Artificial Sequence
  Oligonucleotide primer for the detection of SNP TSC0002623
ttaaatttcgaa

SEQ ID NO: 271810 - DNA, 12 bp, Artificial Sequence
  Oligonucleotide primer for the detection of SNP TSC0002623
ttttgatgatat

SEQ ID NO: 271811 - DNA, 12 bp, Artificial Sequence
  Oligonucleotide primer for the detection of SNP TSC0002623
ttttaataacat

SEQ ID NO: 271812 - DNA, 12 bp, Artificial Sequence
  Oligonucleotide primer for the detection of SNP TSC0002623
tttaggttttga

SEQ ID NO: 271813 - DNA, 12 bp, Artificial Sequence
  Oligonucleotide primer for the detection of SNP TSC0002623
tttaggtttcga

SEQ ID NO: 271814 - DNA, 12 bp, Artificial Sequence
  Oligonucleotide primer for the detection of SNP TSC0002624
tccctcttaaca

SEQ ID NO: 271815 - DNA, 12 bp, Artificial Sequence
  Oligonucleotide primer for the detection of SNP TSC0002624
tccctcttaacg

SEQ ID NO: 271816 - DNA, 12 bp, Artificial Sequence
  Oligonucleotide primer for the detection of SNP TSC0002624
ttaaatgttaat

SEQ ID NO: 271817 - DNA, 12 bp, Artificial Sequence
  Oligonucleotide primer for the detection of SNP TSC0002624
caaatatcaaca

SEQ ID NO: 271818 - DNA, 12 bp, Artificial Sequence
  Oligonucleotide primer for the detection of SNP TSC0002624
ttttttttggtg

SEQ ID NO: 271819 - DNA, 12 bp, Artificial Sequence
  Oligonucleotide primer for the detection of SNP TSC0002624
ttttttttggcg

SEQ ID NO: 271820 - DNA, 12 bp, Artificial Sequence
  Oligonucleotide primer for the detection of SNP TSC0002625
aaaatttcacta

SEQ ID NO: 271821 - DNA, 12 bp, Artificial Sequence
  Oligonucleotide primer for the detection of SNP TSC0002625
agtttagttaat

SEQ ID NO: 271822 - DNA, 12 bp, Artificial Sequence
  Oligonucleotide primer for the detection of SNP TSC0002625
caacctaaccaa

SEQ ID NO: 271823 - DNA, 12 bp, Artificial Sequence
  Oligonucleotide primer for the detection of SNP TSC0002625
agggttttatta

SEQ ID NO: 271824 - DNA, 12 bp, Artificial Sequence
  Oligonucleotide primer for the detection of SNP TSC0002626
tttatctaatta

SEQ ID NO: 271825 - DNA, 12 bp, Artificial Sequence
  Oligonucleotide primer for the detection of SNP TSC0002626
tttttagtaatt

SEQ ID NO: 271826 - DNA, 12 bp, Artificial Sequence
  Oligonucleotide primer for the detection of SNP TSC0002626
ctctcaataact

SEQ ID NO: 271827 - DNA, 12 bp, Artificial Sequence
  Oligonucleotide primer for the detection of SNP TSC0002626
tttatttggttg

SEQ ID NO: 271828 - DNA, 12 bp, Artificial Sequence
  Oligonucleotide primer for the detection of SNP TSC0002627
tttcctttcaac

SEQ ID NO: 271829 - DNA, 12 bp, Artificial Sequence
  Oligonucleotide primer for the detection of SNP TSC0002627
tgaggatgtggg

SEQ ID NO: 271830 - DNA, 12 bp, Artificial Sequence
  Oligonucleotide primer for the detection of SNP TSC0002629
ccctaaacctta

SEQ ID NO: 271831 - DNA, 12 bp, Artificial Sequence
  Oligonucleotide primer for the detection of SNP TSC0002629
atttagagagtt

SEQ ID NO: 271832 - DNA, 12 bp, Artificial Sequence
  Oligonucleotide primer for the detection of SNP TSC0002629
atttaaaaaatt

SEQ ID NO: 271833 - DNA, 12 bp, Artificial Sequence
  Oligonucleotide primer for the detection of SNP TSC0002629
ttttaggtttta

SEQ ID NO: 271834 - DNA, 12 bp, Artificial Sequence
  Oligonucleotide primer for the detection of SNP TSC0002630
ttacacataacc

SEQ ID NO: 271835 - DNA, 12 bp, Artificial Sequence
  Oligonucleotide primer for the detection of SNP TSC0002630
ggttgtttggta

SEQ ID NO: 271836 - DNA, 12 bp, Artificial Sequence
  Oligonucleotide primer for the detection of SNP TSC0002631
aaaacaataaat

SEQ ID NO: 271837 - DNA, 12 bp, Artificial Sequence
  Oligonucleotide primer for the detection of SNP TSC0002631
aaaacgataaat

SEQ ID NO: 271838 - DNA, 12 bp, Artificial Sequence
  Oligonucleotide primer for the detection of SNP TSC0002631
tgttgttaaggt

SEQ ID NO: 271839 - DNA, 12 bp, Artificial Sequence
  Oligonucleotide primer for the detection of SNP TSC0002631
tactaccaaaac

SEQ ID NO: 271840 - DNA, 12 bp, Artificial Sequence
  Oligonucleotide primer for the detection of SNP TSC0002631
gggatggtggat

SEQ ID NO: 271841 - DNA, 12 bp, Artificial Sequence
  Oligonucleotide primer for the detection of SNP TSC0002631
gggacggtggat

SEQ ID NO: 271842 - DNA, 12 bp, Artificial Sequence
  Oligonucleotide primer for the detection of SNP TSC0002632
taaatcactcct

SEQ ID NO: 271843 - DNA, 12 bp, Artificial Sequence
  Oligonucleotide primer for the detection of SNP TSC0002632
gaggttttaaaa

SEQ ID NO: 271844 - DNA, 12 bp, Artificial Sequence
  Oligonucleotide primer for the detection of SNP TSC0002632
aaaacttcaaaa

SEQ ID NO: 271845 - DNA, 12 bp, Artificial Sequence
  Oligonucleotide primer for the detection of SNP TSC0002632
tgggttattttt

SEQ ID NO: 271846 - DNA, 12 bp, Artificial Sequence
  Oligonucleotide primer for the detection of SNP TSC0002633
taaactaataaa

SEQ ID NO: 271847 - DNA, 12 bp, Artificial Sequence
  Oligonucleotide primer for the detection of SNP TSC0002633
ttgtaggtatgt

SEQ ID NO: 271848 - DNA, 12 bp, Artificial Sequence
  Oligonucleotide primer for the detection of SNP TSC0002633
acaaacatacaa

SEQ ID NO: 271849 - DNA, 12 bp, Artificial Sequence
  Oligonukleotid-Primer
atgagttaataa

SEQ ID NO: 271850 - DNA, 12 bp, Artificial Sequence
  Oligonucleotide primer for the detection of SNP TSC0002634
ccctaaaaaaaa

SEQ ID NO: 271851 - DNA, 12 bp, Artificial Sequence
  Oligonucleotide primer for the detection of SNP TSC0002634
taagttaaaaaa

SEQ ID NO: 271852 - DNA, 12 bp, Artificial Sequence
  Oligonucleotide primer for the detection of SNP TSC0002635
ttacttcttaaa

SEQ ID NO: 271853 - DNA, 12 bp, Artificial Sequence
  Oligonukleotid-Primer
taggtatgtaag

SEQ ID NO: 271854 - DNA, 12 bp, Artificial Sequence
  Oligonucleotide primer for the detection of SNP TSC0002635
caaacatacaaa

SEQ ID NO: 271855 - DNA, 12 bp, Artificial Sequence
  Oligonucleotide primer for the detection of SNP TSC0002635
ggttgttttttg

SEQ ID NO: 271856 - DNA, 12 bp, Artificial Sequence
  Oligonucleotide primer for the detection of SNP TSC0002636
ccaaacataccc

SEQ ID NO: 271857 - DNA, 12 bp, Artificial Sequence
  Oligonucleotide primer for the detection of SNP TSC0002636
ttgattgagggg

SEQ ID NO: 271858 - DNA, 12 bp, Artificial Sequence
  Oligonucleotide primer for the detection of SNP TSC0002636
taactaaaaaaa

SEQ ID NO: 271859 - DNA, 12 bp, Artificial Sequence
  Oligonucleotide primer for the detection of SNP TSC0002636
ttaagtatgttt

SEQ ID NO: 271860 - DNA, 12 bp, Artificial Sequence
  Oligonucleotide primer for the detection of SNP TSC0002637
ataataaaatta

SEQ ID NO: 271861 - DNA, 12 bp, Artificial Sequence
  Oligonucleotide primer for the detection of SNP TSC0002637
atttatgttttt

SEQ ID NO: 271862 - DNA, 12 bp, Artificial Sequence
  Oligonucleotide primer for the detection of SNP TSC0002637
atccatattccc

SEQ ID NO: 271863 - DNA, 12 bp, Artificial Sequence
  Oligonucleotide primer for the detection of SNP TSC0002637
gtagtggggttg

SEQ ID NO: 271864 - DNA, 12 bp, Artificial Sequence
  Oligonucleotide primer for the detection of SNP TSC0002638
tccctaaacaaa

SEQ ID NO: 271865 - DNA, 12 bp, Artificial Sequence
  Oligonucleotide primer for the detection of SNP TSC0002638
gtagtgttgagt

SEQ ID NO: 271866 - DNA, 12 bp, Artificial Sequence
  Oligonucleotide primer for the detection of SNP TSC0002638
acaatattaaac

SEQ ID NO: 271867 - DNA, 12 bp, Artificial Sequence
  Oligonucleotide primer for the detection of SNP TSC0002638
gcaatattaaac

SEQ ID NO: 271868 - DNA, 12 bp, Artificial Sequence
  Oligonucleotide primer for the detection of SNP TSC0002638
tttttgagtagg

SEQ ID NO: 271869 - DNA, 12 bp, Artificial Sequence
  Oligonucleotide primer for the detection of SNP TSC0002639
attaaccaacat

SEQ ID NO: 271870 - DNA, 12 bp, Artificial Sequence
  Oligonucleotide primer for the detection of SNP TSC0002639
agatgaatgtga

SEQ ID NO: 271871 - DNA, 12 bp, Artificial Sequence
  Oligonucleotide primer for the detection of SNP TSC0002640
attatttaattc

SEQ ID NO: 271872 - DNA, 12 bp, Artificial Sequence
  Oligonucleotide primer for the detection of SNP TSC0002640
ttttatgattat

SEQ ID NO: 271873 - DNA, 12 bp, Artificial Sequence
  Oligonucleotide primer for the detection of SNP TSC0002640
ttttacgattat

SEQ ID NO: 271874 - DNA, 12 bp, Artificial Sequence
  Oligonucleotide primer for the detection of SNP TSC0002640
cctacaattaca

SEQ ID NO: 271875 - DNA, 12 bp, Artificial Sequence
  Oligonucleotide primer for the detection of SNP TSC0002640
cctacgattaca

SEQ ID NO: 271876 - DNA, 12 bp, Artificial Sequence
  Oligonucleotide primer for the detection of SNP TSC0002640
attatttgattt

SEQ ID NO: 271877 - DNA, 12 bp, Artificial Sequence
  Oligonucleotide primer for the detection of SNP TSC0002641
ctatccccaaac

SEQ ID NO: 271878 - DNA, 12 bp, Artificial Sequence
  Oligonucleotide primer for the detection of SNP TSC0002641
ttttgtgtgtta

SEQ ID NO: 271879 - DNA, 12 bp, Artificial Sequence
  Oligonucleotide primer for the detection of SNP TSC0002642
aaataaattact

SEQ ID NO: 271880 - DNA, 12 bp, Artificial Sequence
  Oligonucleotide primer for the detection of SNP TSC0002642
atagtattgtga

SEQ ID NO: 271881 - DNA, 12 bp, Artificial Sequence
  Oligonucleotide primer for the detection of SNP TSC0002642
atagtattgcga

SEQ ID NO: 271882 - DNA, 12 bp, Artificial Sequence
  Oligonucleotide primer for the detection of SNP TSC0002643
tatttcattttt

SEQ ID NO: 271883 - DNA, 12 bp, Artificial Sequence
  Oligonucleotide primer for the detection of SNP TSC0002643
atgtaagttttt

SEQ ID NO: 271884 - DNA, 12 bp, Artificial Sequence
  Oligonucleotide primer for the detection of SNP TSC0002643
atacaaactttt

SEQ ID NO: 271885 - DNA, 12 bp, Artificial Sequence
  Oligonucleotide primer for the detection of SNP TSC0002644
aatctttatttc

SEQ ID NO: 271886 - DNA, 12 bp, Artificial Sequence
  Oligonucleotide primer for the detection of SNP TSC0002644
gtgtgttagata

SEQ ID NO: 271887 - DNA, 12 bp, Artificial Sequence
  Oligonucleotide primer for the detection of SNP TSC0002644
gcgtgttagata

SEQ ID NO: 271888 - DNA, 12 bp, Artificial Sequence
  Oligonucleotide primer for the detection of SNP TSC0002644
acataccaaata

SEQ ID NO: 271889 - DNA, 12 bp, Artificial Sequence
  Oligonucleotide primer for the detection of SNP TSC0002644
acgtaccaaata

SEQ ID NO: 271890 - DNA, 12 bp, Artificial Sequence
  Oligonucleotide primer for the detection of SNP TSC0002644
agtttttatttt

SEQ ID NO: 271891 - DNA, 12 bp, Artificial Sequence
  Oligonucleotide primer for the detection of SNP TSC0002645
tattttatccca

SEQ ID NO: 271892 - DNA, 12 bp, Artificial Sequence
  Oligonucleotide primer for the detection of SNP TSC0002645
tttttgtgtgaa

SEQ ID NO: 271893 - DNA, 12 bp, Artificial Sequence
  Oligonucleotide primer for the detection of SNP TSC0002645
ctcctatataaa

SEQ ID NO: 271894 - DNA, 12 bp, Artificial Sequence
  Oligonucleotide primer for the detection of SNP TSC0002645
gttttgttttat

SEQ ID NO: 271895 - DNA, 12 bp, Artificial Sequence
  Oligonucleotide primer for the detection of SNP TSC0002646
atcccataacca

SEQ ID NO: 271896 - DNA, 12 bp, Artificial Sequence
  Oligonucleotide primer for the detection of SNP TSC0002646
tgatttataggg

SEQ ID NO: 271897 - DNA, 12 bp, Artificial Sequence
  Oligonucleotide primer for the detection of SNP TSC0002647
tatgtttttatt

SEQ ID NO: 271898 - DNA, 12 bp, Artificial Sequence
  Oligonucleotide primer for the detection of SNP TSC0002647
tcatatttttat

SEQ ID NO: 271899 - DNA, 12 bp, Artificial Sequence
  Oligonucleotide primer for the detection of SNP TSC0002648
cctaattatatt

SEQ ID NO: 271900 - DNA, 12 bp, Artificial Sequence
  Oligonucleotide primer for the detection of SNP TSC0002648
gtaattttgtgt

SEQ ID NO: 271901 - DNA, 12 bp, Artificial Sequence
  Oligonucleotide primer for the detection of SNP TSC0002648
aaccttatataa

SEQ ID NO: 271902 - DNA, 12 bp, Artificial Sequence
  Oligonucleotide primer for the detection of SNP TSC0002648
tttggttgtgtt

SEQ ID NO: 271903 - DNA, 12 bp, Artificial Sequence
  Oligonucleotide primer for the detection of SNP TSC0002650
ttttgtgtgaat

SEQ ID NO: 271904 - DNA, 12 bp, Artificial Sequence
  Oligonucleotide primer for the detection of SNP TSC0002650
tcctatataaat

SEQ ID NO: 271905 - DNA, 12 bp, Artificial Sequence
  Oligonucleotide primer for the detection of SNP TSC0002650
tgttttgtttta

SEQ ID NO: 271906 - DNA, 12 bp, Artificial Sequence
  Oligonucleotide primer for the detection of SNP TSC0002651
atatacctctta

SEQ ID NO: 271907 - DNA, 12 bp, Artificial Sequence
  Oligonucleotide primer for the detection of SNP TSC0002651
ccctttttttct

SEQ ID NO: 271908 - DNA, 12 bp, Artificial Sequence
  Oligonucleotide primer for the detection of SNP TSC0002651
tatgtgtttttt

SEQ ID NO: 271909 - DNA, 12 bp, Artificial Sequence
  Oligonucleotide primer for the detection of SNP TSC0002652
caataattctat

SEQ ID NO: 271910 - DNA, 12 bp, Artificial Sequence
  Oligonucleotide primer for the detection of SNP TSC0002652
aagtttggtgga

SEQ ID NO: 271911 - DNA, 12 bp, Artificial Sequence
  Oligonucleotide primer for the detection of SNP TSC0002652
aaacttaataaa

SEQ ID NO: 271912 - DNA, 12 bp, Artificial Sequence
  Oligonucleotide primer for the detection of SNP TSC0002652
taataattttgt

SEQ ID NO: 271913 - DNA, 12 bp, Artificial Sequence
  Oligonucleotide primer for the detection of SNP TSC0002653
catatacctctt

SEQ ID NO: 271914 - DNA, 12 bp, Artificial Sequence
  Oligonucleotide primer for the detection of SNP TSC0002653
cctttttttctc

SEQ ID NO: 271915 - DNA, 12 bp, Artificial Sequence
  Oligonucleotide primer for the detection of SNP TSC0002657
ttctttcttttt

SEQ ID NO: 271916 - DNA, 12 bp, Artificial Sequence
  Oligonucleotide primer for the detection of SNP TSC0002657
taaaaaataaaa

SEQ ID NO: 271917 - DNA, 12 bp, Artificial Sequence
  Oligonucleotide primer for the detection of SNP TSC0002658
caaatcaaaaaa

SEQ ID NO: 271918 - DNA, 12 bp, Artificial Sequence
  Oligonucleotide primer for the detection of SNP TSC0002658
gattggagatgt

SEQ ID NO: 271919 - DNA, 12 bp, Artificial Sequence
  Oligonucleotide primer for the detection of SNP TSC0002658
aactaaaaatat

SEQ ID NO: 271920 - DNA, 12 bp, Artificial Sequence
  Oligonucleotide primer for the detection of SNP TSC0002658
ttaggttaagaa

SEQ ID NO: 271921 - DNA, 12 bp, Artificial Sequence
  Oligonucleotide primer for the detection of SNP TSC0002659
tcaaatcaaaaa

SEQ ID NO: 271922 - DNA, 12 bp, Artificial Sequence
  Oligonucleotide primer for the detection of SNP TSC0002659
attggatatgtt

SEQ ID NO: 271923 - DNA, 12 bp, Artificial Sequence
  Oligonucleotide primer for the detection of SNP TSC0002659
acactaaacata

SEQ ID NO: 271924 - DNA, 12 bp, Artificial Sequence
  Oligonucleotide primer for the detection of SNP TSC0002659
atttaggttaag

SEQ ID NO: 271925 - skipped

SEQ ID NO: 271926 - DNA, 12 bp, Artificial Sequence
  Oligonucleotide primer for the detection of SNP TSC0002660
tattaatggtat

SEQ ID NO: 271927 - DNA, 12 bp, Artificial Sequence
  Oligonucleotide primer for the detection of SNP TSC0002660
cactaataacac

SEQ ID NO: 271928 - skipped

SEQ ID NO: 271929 - DNA, 12 bp, Artificial Sequence
  Oligonucleotide primer for the detection of SNP TSC0002661
taacaattcaaa

SEQ ID NO: 271930 - DNA, 12 bp, Artificial Sequence
  Oligonukleotid-Primer
tagatatagtat

SEQ ID NO: 271931 - DNA, 12 bp, Artificial Sequence
  Oligonucleotide primer for the detection of SNP TSC0002661
caaatataatac

SEQ ID NO: 271932 - DNA, 12 bp, Artificial Sequence
  Oligonucleotide primer for the detection of SNP TSC0002661
ttggtaatttag

SEQ ID NO: 271933 - DNA, 12 bp, Artificial Sequence
  Oligonucleotide primer for the detection of SNP TSC0002663
gttgattttaga

SEQ ID NO: 271934 - DNA, 12 bp, Artificial Sequence
  Oligonukleotid-Primer
gtcgattttaga

SEQ ID NO: 271935 - DNA, 12 bp, Artificial Sequence
  Oligonucleotide primer for the detection of SNP TSC0002664
aacaaaaccaac

SEQ ID NO: 271936 - DNA, 12 bp, Artificial Sequence
  Oligonucleotide primer for the detection of SNP TSC0002664
aacaaaaccgac

SEQ ID NO: 271937 - DNA, 12 bp, Artificial Sequence
  Oligonucleotide primer for the detection of SNP TSC0002664
tatatgtatata

SEQ ID NO: 271938 - DNA, 12 bp, Artificial Sequence
  Oligonucleotide primer for the detection of SNP TSC0002664
tatatatacata

SEQ ID NO: 271939 - DNA, 12 bp, Artificial Sequence
  Oligonucleotide primer for the detection of SNP TSC0002664
aatagaattgat

SEQ ID NO: 271940 - DNA, 12 bp, Artificial Sequence
  Oligonucleotide primer for the detection of SNP TSC0002664
aatagaatcgat

SEQ ID NO: 271941 - DNA, 12 bp, Artificial Sequence
  Oligonucleotide primer for the detection of SNP TSC0002665
tttaacaattca

SEQ ID NO: 271942 - DNA, 12 bp, Artificial Sequence
  Oligonucleotide primer for the detection of SNP TSC0002665
gatatagtatat

SEQ ID NO: 271943 - DNA, 12 bp, Artificial Sequence
  Oligonucleotide primer for the detection of SNP TSC0002665
aaatataataca

SEQ ID NO: 271944 - DNA, 12 bp, Artificial Sequence
  Oligonucleotide primer for the detection of SNP TSC0002665
ttttggtaattt

SEQ ID NO: 271945 - DNA, 12 bp, Artificial Sequence
  Oligonucleotide primer for the detection of SNP TSC0002666
taaccaaaaaat

SEQ ID NO: 271946 - DNA, 12 bp, Artificial Sequence
  Oligonucleotide primer for the detection of SNP TSC0002666
tttttatttgta

SEQ ID NO: 271947 - DNA, 12 bp, Artificial Sequence
  Oligonucleotide primer for the detection of SNP TSC0002667
aataatactaaa

SEQ ID NO: 271948 - DNA, 12 bp, Artificial Sequence
  Oligonucleotide primer for the detection of SNP TSC0002667
tggatattaaat

SEQ ID NO: 271949 - DNA, 12 bp, Artificial Sequence
  Oligonucleotide primer for the detection of SNP TSC0002667
taaacattaaat

SEQ ID NO: 271950 - DNA, 12 bp, Artificial Sequence
  Oligonucleotide primer for the detection of SNP TSC0002667
aatggtgttgga

SEQ ID NO: 271951 - DNA, 12 bp, Artificial Sequence
  Oligonucleotide primer for the detection of SNP TSC0002668
ctataaattata

SEQ ID NO: 271952 - DNA, 12 bp, Artificial Sequence
  Oligonucleotide primer for the detection of SNP TSC0002668
gttgtggttttt

SEQ ID NO: 271953 - DNA, 12 bp, Artificial Sequence
  Oligonucleotide primer for the detection of SNP TSC0002668
taatttttaaaa

SEQ ID NO: 271954 - DNA, 12 bp, Artificial Sequence
  Oligonucleotide primer for the detection of SNP TSC0002668
attgtaaattat

SEQ ID NO: 271955 - DNA, 12 bp, Artificial Sequence
  Oligonucleotide primer for the detection of SNP TSC0002669
taaacaataaaa

SEQ ID NO: 271956 - DNA, 12 bp, Artificial Sequence
  Oligonucleotide primer for the detection of SNP TSC0002669
gaatgggtagtg

SEQ ID NO: 271957 - DNA, 12 bp, Artificial Sequence
  Oligonucleotide primer for the detection of SNP TSC0002670
ataatactaaac

SEQ ID NO: 271958 - DNA, 12 bp, Artificial Sequence
  Oligonucleotide primer for the detection of SNP TSC0002670
atggatattaaa

SEQ ID NO: 271959 - DNA, 12 bp, Artificial Sequence
  Oligonucleotide primer for the detection of SNP TSC0002671
aataacataaaa

SEQ ID NO: 271960 - DNA, 12 bp, Artificial Sequence
  Oligonucleotide primer for the detection of SNP TSC0002671
tatgttgtgggt

SEQ ID NO: 271961 - DNA, 12 bp, Artificial Sequence
  Oligonucleotide primer for the detection of SNP TSC0002671
tatgttgcgggt

SEQ ID NO: 271962 - DNA, 12 bp, Artificial Sequence
  Oligonucleotide primer for the detection of SNP TSC0002671
tatactacaaat

SEQ ID NO: 271963 - DNA, 12 bp, Artificial Sequence
  Oligonucleotide primer for the detection of SNP TSC0002671
tatactacgaat

SEQ ID NO: 271964 - DNA, 12 bp, Artificial Sequence
  Oligonucleotide primer for the detection of SNP TSC0002671
aatagtataaga

SEQ ID NO: 271965 - DNA, 12 bp, Artificial Sequence
  Oligonucleotide primer for the detection of SNP TSC0002672
atgggtagtgaa

SEQ ID NO: 271966 - DNA, 12 bp, Artificial Sequence
  Oligonucleotide primer for the detection of SNP TSC0002673
ataataacataa

SEQ ID NO: 271967 - DNA, 12 bp, Artificial Sequence
  Oligonucleotide primer for the detection of SNP TSC0002673
tgttgtgggttt

SEQ ID NO: 271968 - DNA, 12 bp, Artificial Sequence
  Oligonucleotide primer for the detection of SNP TSC0002673
tgttgcgggttt

SEQ ID NO: 271969 - DNA, 12 bp, Artificial Sequence
  Oligonucleotide primer for the detection of SNP TSC0002673
ttatactacaaa

SEQ ID NO: 271970 - DNA, 12 bp, Artificial Sequence
  Oligonucleotide primer for the detection of SNP TSC0002673
ttatactacgaa

SEQ ID NO: 271971 - DNA, 12 bp, Artificial Sequence
  Oligonucleotide primer for the detection of SNP TSC0002673
ttataatagtat

SEQ ID NO: 271972 - DNA, 12 bp, Artificial Sequence
  Oligonucleotide primer for the detection of SNP TSC0002674
ctccaatctcta

SEQ ID NO: 271973 - DNA, 12 bp, Artificial Sequence
  Oligonucleotide primer for the detection of SNP TSC0002674
ctccgatctcta

SEQ ID NO: 271974 - DNA, 12 bp, Artificial Sequence
  Oligonucleotide primer for the detection of SNP TSC0002674
ggtatgtaagtt

SEQ ID NO: 271975 - DNA, 12 bp, Artificial Sequence
  Oligonucleotide primer for the detection of SNP TSC0002674
aacatacaaact

SEQ ID NO: 271976 - DNA, 12 bp, Artificial Sequence
  Oligonucleotide primer for the detection of SNP TSC0002674
ttttggttttta

SEQ ID NO: 271977 - DNA, 12 bp, Artificial Sequence
  Oligonucleotide primer for the detection of SNP TSC0002674
tttcggttttta

SEQ ID NO: 271978 - DNA, 12 bp, Artificial Sequence
  Oligonucleotide primer for the detection of SNP TSC0002675
gtgggggaaata

SEQ ID NO: 271979 - DNA, 12 bp, Artificial Sequence
  Oligonucleotide primer for the detection of SNP TSC0002676
aatacaaacaac

SEQ ID NO: 271980 - DNA, 12 bp, Artificial Sequence
  Oligonucleotide primer for the detection of SNP TSC0002676
ataattatagga

SEQ ID NO: 271981 - DNA, 12 bp, Artificial Sequence
  Oligonucleotide primer for the detection of SNP TSC0002677
aatccctactca

SEQ ID NO: 271982 - DNA, 12 bp, Artificial Sequence
  Oligonucleotide primer for the detection of SNP TSC0002677
aatccctactcg

SEQ ID NO: 271983 - DNA, 12 bp, Artificial Sequence
  Oligonucleotide primer for the detection of SNP TSC0002677
gatccctactca

SEQ ID NO: 271984 - DNA, 12 bp, Artificial Sequence
  Oligonucleotide primer for the detection of SNP TSC0002677
gatccctactcg

SEQ ID NO: 271985 - DNA, 12 bp, Artificial Sequence
  Oligonucleotide primer for the detection of SNP TSC0002677
ggaggtgaaggt

SEQ ID NO: 271986 - DNA, 12 bp, Artificial Sequence
  Oligonucleotide primer for the detection of SNP TSC0002677
ggaggcgaaggt

SEQ ID NO: 271987 - DNA, 12 bp, Artificial Sequence
  Oligonucleotide primer for the detection of SNP TSC0002677
aaaaacaaaaac

SEQ ID NO: 271988 - DNA, 12 bp, Artificial Sequence
  Oligonucleotide primer for the detection of SNP TSC0002677
aaaaacgaaaac

SEQ ID NO: 271989 - DNA, 12 bp, Artificial Sequence
  Oligonucleotide primer for the detection of SNP TSC0002677
ggtttttgtttg

SEQ ID NO: 271990 - DNA, 12 bp, Artificial Sequence
  Oligonucleotide primer for the detection of SNP TSC0002677
ggtttttgttcg

SEQ ID NO: 271991 - DNA, 12 bp, Artificial Sequence
  Oligonucleotide primer for the detection of SNP TSC0002679
caaaaaaataaa

SEQ ID NO: 271992 - DNA, 12 bp, Artificial Sequence
  Oligonucleotide primer for the detection of SNP TSC0002679
aatagaaaaatg

SEQ ID NO: 271993 - DNA, 12 bp, Artificial Sequence
  Oligonucleotide primer for the detection of SNP TSC0002680
tttggagatatt

SEQ ID NO: 271994 - DNA, 12 bp, Artificial Sequence
  Oligonucleotide primer for the detection of SNP TSC0002680
ttcggagatatt

SEQ ID NO: 271995 - DNA, 12 bp, Artificial Sequence
  Oligonucleotide primer for the detection of SNP TSC0002680
ctcaaaaacact

SEQ ID NO: 271996 - DNA, 12 bp, Artificial Sequence
  Oligonucleotide primer for the detection of SNP TSC0002680
ctcgaaaacact

SEQ ID NO: 271997 - DNA, 12 bp, Artificial Sequence
  Oligonucleotide primer for the detection of SNP TSC0002680
gttgagggaggg

SEQ ID NO: 271998 - DNA, 12 bp, Artificial Sequence
  Oligonucleotide primer for the detection of SNP TSC0002681
caaaataaattt

SEQ ID NO: 271999 - DNA, 12 bp, Artificial Sequence
  Oligonucleotide primer for the detection of SNP TSC0002681
cgaaataaattt

SEQ ID NO: 272000 - DNA, 12 bp, Artificial Sequence
  Oligonucleotide primer for the detection of SNP TSC0002681
tagagtgtttat

SEQ ID NO: 272001 - DNA, 12 bp, Artificial Sequence
  Oligonucleotide primer for the detection of SNP TSC0002681
caaaatacttat

SEQ ID NO: 272002 - DNA, 12 bp, Artificial Sequence
  Oligonucleotide primer for the detection of SNP TSC0002681
tggaatgaattt

SEQ ID NO: 272003 - DNA, 12 bp, Artificial Sequence
  Oligonucleotide primer for the detection of SNP TSC0002681
cggaatgaattt

SEQ ID NO: 272004 - DNA, 12 bp, Artificial Sequence
  Oligonucleotide primer for the detection of SNP TSC0002682
tcattttcatac

SEQ ID NO: 272005 - DNA, 12 bp, Artificial Sequence
  Oligonucleotide primer for the detection of SNP TSC0002682
ttatttggggta

SEQ ID NO: 272006 - DNA, 12 bp, Artificial Sequence
  Oligonucleotide primer for the detection of SNP TSC0002682
ttattcggggta

SEQ ID NO: 272007 - DNA, 12 bp, Artificial Sequence
  Oligonucleotide primer for the detection of SNP TSC0002683
taccatatttct

SEQ ID NO: 272008 - DNA, 12 bp, Artificial Sequence
  Oligonucleotide primer for the detection of SNP TSC0002683
gtttggataaag

SEQ ID NO: 272009 - DNA, 12 bp, Artificial Sequence
  Oligonucleotide primer for the detection of SNP TSC0002684
acatacaaactt

SEQ ID NO: 272010 - DNA, 12 bp, Artificial Sequence
  Oligonucleotide primer for the detection of SNP TSC0002684
ataaaattttgg

SEQ ID NO: 272011 - DNA, 12 bp, Artificial Sequence
  Oligonucleotide primer for the detection of SNP TSC0002684
ataaaatttcgg

SEQ ID NO: 272012 - DNA, 12 bp, Artificial Sequence
  Oligonucleotide primer for the detection of SNP TSC0002685
aaactccaatct

SEQ ID NO: 272013 - DNA, 12 bp, Artificial Sequence
  Oligonucleotide primer for the detection of SNP TSC0002685
aaactccgatct

SEQ ID NO: 272014 - DNA, 12 bp, Artificial Sequence
  Oligonucleotide primer for the detection of SNP TSC0002685
tatgtaagtttt

SEQ ID NO: 272015 - DNA, 12 bp, Artificial Sequence
  Oligonucleotide primer for the detection of SNP TSC0002685
catacaaacttt

SEQ ID NO: 272016 - DNA, 12 bp, Artificial Sequence
  Oligonucleotide primer for the detection of SNP TSC0002685
aattttggtttt

SEQ ID NO: 272017 - DNA, 12 bp, Artificial Sequence
  Oligonucleotide primer for the detection of SNP TSC0002685
aatttcggtttt

SEQ ID NO: 272018 - DNA, 12 bp, Artificial Sequence
  Oligonucleotide primer for the detection of SNP TSC0002686
atgatttgtaaa

SEQ ID NO: 272019 - DNA, 12 bp, Artificial Sequence
  Oligonucleotide primer for the detection of SNP TSC0002687
taaacaaaccaa

SEQ ID NO: 272020 - DNA, 12 bp, Artificial Sequence
  Oligonucleotide primer for the detection of SNP TSC0002687
ggaattgaaaat

SEQ ID NO: 272021 - DNA, 12 bp, Artificial Sequence
  Oligonucleotide primer for the detection of SNP TSC0002687
aaaactaaaaat

SEQ ID NO: 272022 - DNA, 12 bp, Artificial Sequence
  Oligonucleotide primer for the detection of SNP TSC0002687
tagataggttag

SEQ ID NO: 272023 - DNA, 12 bp, Artificial Sequence
  Oligonucleotide primer for the detection of SNP TSC0002688
cctaactctaaa

SEQ ID NO: 272024 - DNA, 12 bp, Artificial Sequence
  Oligonucleotide primer for the detection of SNP TSC0002688
attttaattttg

SEQ ID NO: 272025 - DNA, 12 bp, Artificial Sequence
  Oligonucleotide primer for the detection of SNP TSC0002689
atacactaacaa

SEQ ID NO: 272026 - DNA, 12 bp, Artificial Sequence
  Oligonucleotide primer for the detection of SNP TSC0002689
atacgctaacaa

SEQ ID NO: 272027 - DNA, 12 bp, Artificial Sequence
  Oligonucleotide primer for the detection of SNP TSC0002689
gtacactaacaa

SEQ ID NO: 272028 - DNA, 12 bp, Artificial Sequence
  Oligonucleotide primer for the detection of SNP TSC0002689
gtacgctaacaa

SEQ ID NO: 272029 - DNA, 12 bp, Artificial Sequence
  Oligonucleotide primer for the detection of SNP TSC0002689
taggtttgtaag

SEQ ID NO: 272030 - DNA, 12 bp, Artificial Sequence
  Oligonucleotide primer for the detection of SNP TSC0002689
caaacttacaaa

SEQ ID NO: 272031 - DNA, 12 bp, Artificial Sequence
  Oligonucleotide primer for the detection of SNP TSC0002689
ttgtgtgttggt

SEQ ID NO: 272032 - DNA, 12 bp, Artificial Sequence
  Oligonucleotide primer for the detection of SNP TSC0002689
tcgtgtgttggt

SEQ ID NO: 272033 - DNA, 12 bp, Artificial Sequence
  Oligonucleotide primer for the detection of SNP TSC0002689
ttgtgcgttggt

SEQ ID NO: 272034 - DNA, 12 bp, Artificial Sequence
  Oligonucleotide primer for the detection of SNP TSC0002689
tcgtgcgttggt

SEQ ID NO: 272035 - DNA, 12 bp, Artificial Sequence
  Oligonucleotide primer for the detection of SNP TSC0002690
ttttaattttga

SEQ ID NO: 272036 - DNA, 12 bp, Artificial Sequence
  Oligonucleotide primer for the detection of SNP TSC0002691
aaacttacaaac

SEQ ID NO: 272037 - DNA, 12 bp, Artificial Sequence
  Oligonucleotide primer for the detection of SNP TSC0002691
tgtgtgttggta

SEQ ID NO: 272038 - DNA, 12 bp, Artificial Sequence
  Oligonucleotide primer for the detection of SNP TSC0002691
cgtgtgttggta

SEQ ID NO: 272039 - DNA, 12 bp, Artificial Sequence
  Oligonucleotide primer for the detection of SNP TSC0002691
tgtgcgttggta

SEQ ID NO: 272040 - DNA, 12 bp, Artificial Sequence
  Oligonucleotide primer for the detection of SNP TSC0002691
cgtgcgttggta

SEQ ID NO: 272041 - DNA, 12 bp, Artificial Sequence
  Oligonucleotide primer for the detection of SNP TSC0002692
cttaatcatttt

SEQ ID NO: 272042 - DNA, 12 bp, Artificial Sequence
  Oligonucleotide primer for the detection of SNP TSC0002692
ggtgaataagga

SEQ ID NO: 272043 - DNA, 12 bp, Artificial Sequence
  Oligonucleotide primer for the detection of SNP TSC0002693
ttaaaacaaaat

SEQ ID NO: 272044 - DNA, 12 bp, Artificial Sequence
  Oligonucleotide primer for the detection of SNP TSC0002693
gtgatagagtaa

SEQ ID NO: 272045 - DNA, 12 bp, Artificial Sequence
  Oligonucleotide primer for the detection of SNP TSC0002693
gcgatagagtaa

SEQ ID NO: 272046 - DNA, 12 bp, Artificial Sequence
  Oligonucleotide primer for the detection of SNP TSC0002694
taaacaacaaaa

SEQ ID NO: 272047 - DNA, 12 bp, Artificial Sequence
  Oligonucleotide primer for the detection of SNP TSC0002694
taaacgacaaaa

SEQ ID NO: 272048 - DNA, 12 bp, Artificial Sequence
  Oligonucleotide primer for the detection of SNP TSC0002694
agatagaatttt

SEQ ID NO: 272049 - DNA, 12 bp, Artificial Sequence
  Oligonucleotide primer for the detection of SNP TSC0002694
aaacaaaatctt

SEQ ID NO: 272050 - DNA, 12 bp, Artificial Sequence
  Oligonucleotide primer for the detection of SNP TSC0002694
ttgggtgataga

SEQ ID NO: 272051 - DNA, 12 bp, Artificial Sequence
  Oligonucleotide primer for the detection of SNP TSC0002694
ttgggcgataga

SEQ ID NO: 272052 - DNA, 12 bp, Artificial Sequence
  Oligonucleotide primer for the detection of SNP TSC0002695
atagaaaaatga

SEQ ID NO: 272053 - DNA, 12 bp, Artificial Sequence
  Oligonucleotide primer for the detection of SNP TSC0002697
aaataataaatc

SEQ ID NO: 272054 - DNA, 12 bp, Artificial Sequence
  Oligonucleotide primer for the detection of SNP TSC0002697
aaaaattgaaag

SEQ ID NO: 272055 - DNA, 12 bp, Artificial Sequence
  Oligonucleotide primer for the detection of SNP TSC0002698
caaaatcttact

SEQ ID NO: 272056 - DNA, 12 bp, Artificial Sequence
  Oligonucleotide primer for the detection of SNP TSC0002698
gtttgggtgata

SEQ ID NO: 272057 - DNA, 12 bp, Artificial Sequence
  Oligonucleotide primer for the detection of SNP TSC0002698
gtttgggcgata

SEQ ID NO: 272058 - DNA, 12 bp, Artificial Sequence
  Oligonucleotide primer for the detection of SNP TSC0002699
ataattttacaa

SEQ ID NO: 272059 - DNA, 12 bp, Artificial Sequence
  Oligonucleotide primer for the detection of SNP TSC0002699
ttggtattagtt

SEQ ID NO: 272060 - DNA, 12 bp, Artificial Sequence
  Oligonucleotide primer for the detection of SNP TSC0002699
tcggtattagtt

SEQ ID NO: 272061 - DNA, 12 bp, Artificial Sequence
  Oligonucleotide primer for the detection of SNP TSC0002699
ttggtattagtc

SEQ ID NO: 272062 - DNA, 12 bp, Artificial Sequence
  Oligonucleotide primer for the detection of SNP TSC0002699
tcggtattagtc

SEQ ID NO: 272063 - DNA, 12 bp, Artificial Sequence
  Oligonucleotide primer for the detection of SNP TSC0002699
ccaataccaacc

SEQ ID NO: 272064 - DNA, 12 bp, Artificial Sequence
  Oligonucleotide primer for the detection of SNP TSC0002699
ccgataccaacc

SEQ ID NO: 272065 - DNA, 12 bp, Artificial Sequence
  Oligonucleotide primer for the detection of SNP TSC0002699
atgattttgtag

SEQ ID NO: 272066 - DNA, 12 bp, Artificial Sequence
  Oligonucleotide primer for the detection of SNP TSC0002700
caaccaccttat

SEQ ID NO: 272067 - DNA, 12 bp, Artificial Sequence
  Oligonucleotide primer for the detection of SNP TSC0002700
gagttagataat

SEQ ID NO: 272068 - DNA, 12 bp, Artificial Sequence
  Oligonucleotide primer for the detection of SNP TSC0002700
taaattaaacaa

SEQ ID NO: 272069 - DNA, 12 bp, Artificial Sequence
  Oligonucleotide primer for the detection of SNP TSC0002700
taattattttgt

SEQ ID NO: 272070 - DNA, 12 bp, Artificial Sequence
  Oligonucleotide primer for the detection of SNP TSC0002701
acctaaaaacac

SEQ ID NO: 272071 - DNA, 12 bp, Artificial Sequence
  Oligonucleotide primer for the detection of SNP TSC0002701
tggtgtttttta

SEQ ID NO: 272072 - DNA, 12 bp, Artificial Sequence
  Oligonucleotide primer for the detection of SNP TSC0002702
aactctcaacct

SEQ ID NO: 272073 - DNA, 12 bp, Artificial Sequence
  Oligonucleotide primer for the detection of SNP TSC0002702
tttgataaggga

SEQ ID NO: 272074 - DNA, 12 bp, Artificial Sequence
  Oligonucleotide primer for the detection of SNP TSC0002702
taataaaaaaaa

SEQ ID NO: 272075 - DNA, 12 bp, Artificial Sequence
  Oligonucleotide primer for the detection of SNP TSC0002702
gtttttagtttt

SEQ ID NO: 272076 - DNA, 12 bp, Artificial Sequence
  Oligonukleotid-Primer
gtttttagtttc

SEQ ID NO: 272077 - DNA, 12 bp, Artificial Sequence
  Oligonucleotide primer for the detection of SNP TSC0002703
atagtattttaa

SEQ ID NO: 272078 - DNA, 12 bp, Artificial Sequence
  Oligonucleotide primer for the detection of SNP TSC0002703
ataatatttcaa

SEQ ID NO: 272079 - DNA, 12 bp, Artificial Sequence
  Oligonucleotide primer for the detection of SNP TSC0002703
gaaaaaaaaaaa

SEQ ID NO: 272080 - DNA, 12 bp, Artificial Sequence
  Oligonukleotid-Primer
gataagggagga

SEQ ID NO: 272081 - DNA, 12 bp, Artificial Sequence
  Oligonucleotide primer for the detection of SNP TSC0002705
ccttcaacaaat

SEQ ID NO: 272082 - DNA, 12 bp, Artificial Sequence
  Oligonucleotide primer for the detection of SNP TSC0002705
ccttcaacgaat

SEQ ID NO: 272083 - DNA, 12 bp, Artificial Sequence
  Oligonucleotide primer for the detection of SNP TSC0002705
aatgtgtgtggg

SEQ ID NO: 272084 - DNA, 12 bp, Artificial Sequence
  Oligonucleotide primer for the detection of SNP TSC0002705
aatgtgcgtggg

SEQ ID NO: 272085 - DNA, 12 bp, Artificial Sequence
  Oligonucleotide primer for the detection of SNP TSC0002705
aatatacataaa

SEQ ID NO: 272086 - DNA, 12 bp, Artificial Sequence
  Oligonucleotide primer for the detection of SNP TSC0002705
aatatacgtaaa

SEQ ID NO: 272087 - DNA, 12 bp, Artificial Sequence
  Oligonucleotide primer for the detection of SNP TSC0002705
tttttaatggat

SEQ ID NO: 272088 - DNA, 12 bp, Artificial Sequence
  Oligonucleotide primer for the detection of SNP TSC0002705
tttttaacggat

SEQ ID NO: 272089 - DNA, 12 bp, Artificial Sequence
  Oligonucleotide primer for the detection of SNP TSC0002706
ttacaaatataa

SEQ ID NO: 272090 - DNA, 12 bp, Artificial Sequence
  Oligonucleotide primer for the detection of SNP TSC0002706
tgggaggtggga

SEQ ID NO: 272091 - DNA, 12 bp, Artificial Sequence
  Oligonucleotide primer for the detection of SNP TSC0002706
tttgtaagtgtg

SEQ ID NO: 272092 - DNA, 12 bp, Artificial Sequence
  Oligonucleotide primer for the detection of SNP TSC0002707
ctctctctctct

SEQ ID NO: 272093 - DNA, 12 bp, Artificial Sequence
  Oligonucleotide primer for the detection of SNP TSC0002707
aagaaagagaga

SEQ ID NO: 272094 - DNA, 12 bp, Artificial Sequence
  Oligonucleotide primer for the detection of SNP TSC0002708
catactaaatac

SEQ ID NO: 272095 - DNA, 12 bp, Artificial Sequence
  Oligonucleotide primer for the detection of SNP TSC0002708
ggtatttttttg

SEQ ID NO: 272096 - DNA, 12 bp, Artificial Sequence
  Oligonucleotide primer for the detection of SNP TSC0002709
cttaaatctcat

SEQ ID NO: 272097 - DNA, 12 bp, Artificial Sequence
  Oligonucleotide primer for the detection of SNP TSC0002709
attggtgggaaa

SEQ ID NO: 272098 - DNA, 12 bp, Artificial Sequence
  Oligonucleotide primer for the detection of SNP TSC0002709
ttaataaaaaaa

SEQ ID NO: 272099 - DNA, 12 bp, Artificial Sequence
  Oligonucleotide primer for the detection of SNP TSC0002709
tttgggttttat

SEQ ID NO: 272100 - DNA, 12 bp, Artificial Sequence
  Oligonucleotide primer for the detection of SNP TSC0002710
aaccttttataa

SEQ ID NO: 272101 - DNA, 12 bp, Artificial Sequence
  Oligonucleotide primer for the detection of SNP TSC0002710
tttttatattat

SEQ ID NO: 272102 - DNA, 12 bp, Artificial Sequence
  Oligonucleotide primer for the detection of SNP TSC0002710
ctcttatactat

SEQ ID NO: 272103 - DNA, 12 bp, Artificial Sequence
  Oligonucleotide primer for the detection of SNP TSC0002710
agttttttatag

SEQ ID NO: 272104 - DNA, 12 bp, Artificial Sequence
  Oligonucleotide primer for the detection of SNP TSC0002711
tttgttaatgag

SEQ ID NO: 272105 - DNA, 12 bp, Artificial Sequence
  Oligonucleotide primer for the detection of SNP TSC0002711
tttgttaacgag

SEQ ID NO: 272106 - DNA, 12 bp, Artificial Sequence
  Oligonucleotide primer for the detection of SNP TSC0002711
tttattaacaaa

SEQ ID NO: 272107 - DNA, 12 bp, Artificial Sequence
  Oligonucleotide primer for the detection of SNP TSC0002711
tttattaacgaa

SEQ ID NO: 272108 - DNA, 12 bp, Artificial Sequence
  Oligonucleotide primer for the detection of SNP TSC0002711
gaaagtttatat

SEQ ID NO: 272109 - DNA, 12 bp, Artificial Sequence
  Oligonucleotide primer for the detection of SNP TSC0002712
ataataaactca

SEQ ID NO: 272110 - DNA, 12 bp, Artificial Sequence
  Oligonucleotide primer for the detection of SNP TSC0002712
agtatatagggt

SEQ ID NO: 272111 - DNA, 12 bp, Artificial Sequence
  Oligonucleotide primer for the detection of SNP TSC0002712
agtatatagggc

SEQ ID NO: 272112 - DNA, 12 bp, Artificial Sequence
  Oligonucleotide primer for the detection of SNP TSC0002712
caatacacaaaa

SEQ ID NO: 272113 - DNA, 12 bp, Artificial Sequence
  Oligonucleotide primer for the detection of SNP TSC0002712
gtaatgagttta

SEQ ID NO: 272114 - DNA, 12 bp, Artificial Sequence
  Oligonucleotide primer for the detection of SNP TSC0002713
atttatataaac

SEQ ID NO: 272115 - DNA, 12 bp, Artificial Sequence
  Oligonucleotide primer for the detection of SNP TSC0002713
gtttatataaac

SEQ ID NO: 272116 - DNA, 12 bp, Artificial Sequence
  Oligonucleotide primer for the detection of SNP TSC0002713
ttgtagtatgta

SEQ ID NO: 272117 - DNA, 12 bp, Artificial Sequence
  Oligonucleotide primer for the detection of SNP TSC0002714
atataataaact

SEQ ID NO: 272118 - DNA, 12 bp, Artificial Sequence
  Oligonucleotide primer for the detection of SNP TSC0002714
gtataataaact

SEQ ID NO: 272119 - DNA, 12 bp, Artificial Sequence
  Oligonucleotide primer for the detection of SNP TSC0002714
tagtatataggg

SEQ ID NO: 272120 - DNA, 12 bp, Artificial Sequence
  Oligonucleotide primer for the detection of SNP TSC0002715
catttatataaa

SEQ ID NO: 272121 - DNA, 12 bp, Artificial Sequence
  Oligonucleotide primer for the detection of SNP TSC0002715
cgtttatataaa

SEQ ID NO: 272122 - DNA, 12 bp, Artificial Sequence
  Oligonucleotide primer for the detection of SNP TSC0002715
tttgtagtatgt

SEQ ID NO: 272123 - DNA, 12 bp, Artificial Sequence
  Oligonucleotide primer for the detection of SNP TSC0002715
tacaacatacaa

SEQ ID NO: 272124 - DNA, 12 bp, Artificial Sequence
  Oligonucleotide primer for the detection of SNP TSC0002715
tgtttgtataag

SEQ ID NO: 272125 - DNA, 12 bp, Artificial Sequence
  Oligonucleotide primer for the detection of SNP TSC0002715
cgtttgtataag

SEQ ID NO: 272126 - DNA, 12 bp, Artificial Sequence
  Oligonucleotide primer for the detection of SNP TSC0002716
acaaatattaaa

SEQ ID NO: 272127 - DNA, 12 bp, Artificial Sequence
  Oligonucleotide primer for the detection of SNP TSC0002716
attattaatttg

SEQ ID NO: 272128 - DNA, 12 bp, Artificial Sequence
  Oligonucleotide primer for the detection of SNP TSC0002716
tcattaacctaa

SEQ ID NO: 272129 - DNA, 12 bp, Artificial Sequence
  Oligonucleotide primer for the detection of SNP TSC0002716
aaataaatattg

SEQ ID NO: 272130 - DNA, 12 bp, Artificial Sequence
  Oligonucleotide primer for the detection of SNP TSC0002717
acaacctccatc

SEQ ID NO: 272131 - DNA, 12 bp, Artificial Sequence
  Oligonucleotide primer for the detection of SNP TSC0002717
aggtgtatatta

SEQ ID NO: 272132 - DNA, 12 bp, Artificial Sequence
  Oligonucleotide primer for the detection of SNP TSC0002717
aaatatacatta

SEQ ID NO: 272133 - DNA, 12 bp, Artificial Sequence
  Oligonucleotide primer for the detection of SNP TSC0002717
atagtttttatt

SEQ ID NO: 272134 - DNA, 12 bp, Artificial Sequence
  Oligonucleotide primer for the detection of SNP TSC0002718
cctacaacatac

SEQ ID NO: 272135 - DNA, 12 bp, Artificial Sequence
  Oligonucleotide primer for the detection of SNP TSC0002718
atgtttgtataa

SEQ ID NO: 272136 - DNA, 12 bp, Artificial Sequence
  Oligonucleotide primer for the detection of SNP TSC0002718
acgtttgtataa

SEQ ID NO: 272137 - DNA, 12 bp, Artificial Sequence
  Oligonucleotide primer for the detection of SNP TSC0002719
caacctccatca

SEQ ID NO: 272138 - DNA, 12 bp, Artificial Sequence
  Oligonucleotide primer for the detection of SNP TSC0002719
ggtgtatattat

SEQ ID NO: 272139 - DNA, 12 bp, Artificial Sequence
  Oligonucleotide primer for the detection of SNP TSC0002719
ggtgtatattac

SEQ ID NO: 272140 - DNA, 12 bp, Artificial Sequence
  Oligonucleotide primer for the detection of SNP TSC0002719
tagtttttatta

SEQ ID NO: 272141 - DNA, 12 bp, Artificial Sequence
  Oligonucleotide primer for the detection of SNP TSC0002720
ttaaaatataaa

SEQ ID NO: 272142 - DNA, 12 bp, Artificial Sequence
  Oligonucleotide primer for the detection of SNP TSC0002720
ttatgaagaagt

SEQ ID NO: 272143 - DNA, 12 bp, Artificial Sequence
  Oligonucleotide primer for the detection of SNP TSC0002720
ttatgaagaagc

SEQ ID NO: 272144 - DNA, 12 bp, Artificial Sequence
  Oligonucleotide primer for the detection of SNP TSC0002720
atcataaaaaaa

SEQ ID NO: 272145 - DNA, 12 bp, Artificial Sequence
  Oligonukleotid-Primer
tttttgaaatgt

SEQ ID NO: 272146 - DNA, 12 bp, Artificial Sequence
  Oligonucleotide primer for the detection of SNP TSC0002721
tattttatataa

SEQ ID NO: 272147 - DNA, 12 bp, Artificial Sequence
  Oligonucleotide primer for the detection of SNP TSC0002721
gttttattataa

SEQ ID NO: 272148 - DNA, 12 bp, Artificial Sequence
  Oligonucleotide primer for the detection of SNP TSC0002721
actttattacaa

SEQ ID NO: 272149 - DNA, 12 bp, Artificial Sequence
  Oligonucleotide primer for the detection of SNP TSC0002721
tgttttgtgtga

SEQ ID NO: 272150 - DNA, 12 bp, Artificial Sequence
  Oligonucleotide primer for the detection of SNP TSC0002722
tataaataaaat

SEQ ID NO: 272151 - DNA, 12 bp, Artificial Sequence
  Oligonucleotide primer for the detection of SNP TSC0002722
atgtgtttttag

SEQ ID NO: 272152 - DNA, 12 bp, Artificial Sequence
  Oligonucleotide primer for the detection of SNP TSC0002723
aattacaataaa

SEQ ID NO: 272153 - DNA, 12 bp, Artificial Sequence
  Oligonucleotide primer for the detection of SNP TSC0002723
aattacgataaa

SEQ ID NO: 272154 - DNA, 12 bp, Artificial Sequence
  Oligonucleotide primer for the detection of SNP TSC0002723
aaatttatttat

SEQ ID NO: 272155 - DNA, 12 bp, Artificial Sequence
  Oligonucleotide primer for the detection of SNP TSC0002723
aaatctactcat

SEQ ID NO: 272156 - DNA, 12 bp, Artificial Sequence
  Oligonucleotide primer for the detection of SNP TSC0002723
gattatggtaaa

SEQ ID NO: 272157 - DNA, 12 bp, Artificial Sequence
  Oligonucleotide primer for the detection of SNP TSC0002723
gattacggtaaa

SEQ ID NO: 272158 - DNA, 12 bp, Artificial Sequence
  Oligonucleotide primer for the detection of SNP TSC0002724
ccaaattttccc

SEQ ID NO: 272159 - DNA, 12 bp, Artificial Sequence
  Oligonucleotide primer for the detection of SNP TSC0002724
ccgaattttccc

SEQ ID NO: 272160 - DNA, 12 bp, Artificial Sequence
  Oligonucleotide primer for the detection of SNP TSC0002724
taaggggataga

SEQ ID NO: 272161 - DNA, 12 bp, Artificial Sequence
  Oligonucleotide primer for the detection of SNP TSC0002725
agatgggtttgg

SEQ ID NO: 272162 - DNA, 12 bp, Artificial Sequence
  Oligonucleotide primer for the detection of SNP TSC0002725
agacgggtttgg

SEQ ID NO: 272163 - DNA, 12 bp, Artificial Sequence
  Oligonucleotide primer for the detection of SNP TSC0002726
caaaacaaacct

SEQ ID NO: 272164 - DNA, 12 bp, Artificial Sequence
  Oligonucleotide primer for the detection of SNP TSC0002726
caaaacgaacct

SEQ ID NO: 272165 - DNA, 12 bp, Artificial Sequence
  Oligonucleotide primer for the detection of SNP TSC0002726
ttataatttttg

SEQ ID NO: 272166 - DNA, 12 bp, Artificial Sequence
  Oligonucleotide primer for the detection of SNP TSC0002726
ttacaatcctta

SEQ ID NO: 272167 - DNA, 12 bp, Artificial Sequence
  Oligonucleotide primer for the detection of SNP TSC0002726
taagatgggttt

SEQ ID NO: 272168 - DNA, 12 bp, Artificial Sequence
  Oligonucleotide primer for the detection of SNP TSC0002726
taagacgggttt

SEQ ID NO: 272169 - DNA, 12 bp, Artificial Sequence
  Oligonucleotide primer for the detection of SNP TSC0002727
tacaaaataact

SEQ ID NO: 272170 - DNA, 12 bp, Artificial Sequence
  Oligonucleotide primer for the detection of SNP TSC0002727
tagtatagttgg

SEQ ID NO: 272171 - DNA, 12 bp, Artificial Sequence
  Oligonucleotide primer for the detection of SNP TSC0002728
acctttttttta

SEQ ID NO: 272172 - DNA, 12 bp, Artificial Sequence
  Oligonucleotide primer for the detection of SNP TSC0002728
gtttttttttta

SEQ ID NO: 272173 - DNA, 12 bp, Artificial Sequence
  Oligonucleotide primer for the detection of SNP TSC0002729
aacctttttttt

SEQ ID NO: 272174 - DNA, 12 bp, Artificial Sequence
  Oligonucleotide primer for the detection of SNP TSC0002730
acacacacacaa

SEQ ID NO: 272175 - DNA, 12 bp, Artificial Sequence
  Oligonucleotide primer for the detection of SNP TSC0002730
acacacacacga

SEQ ID NO: 272176 - DNA, 12 bp, Artificial Sequence
  Oligonucleotide primer for the detection of SNP TSC0002730
attttatttagt

SEQ ID NO: 272177 - DNA, 12 bp, Artificial Sequence
  Oligonucleotide primer for the detection of SNP TSC0002730
accttacctaat

SEQ ID NO: 272178 - DNA, 12 bp, Artificial Sequence
  Oligonucleotide primer for the detection of SNP TSC0002730
tatatatatggt

SEQ ID NO: 272179 - DNA, 12 bp, Artificial Sequence
  Oligonucleotide primer for the detection of SNP TSC0002730
tatatatacggt

SEQ ID NO: 272180 - DNA, 12 bp, Artificial Sequence
  Oligonucleotide primer for the detection of SNP TSC0002731
actttaaatttc

SEQ ID NO: 272181 - DNA, 12 bp, Artificial Sequence
  Oligonucleotide primer for the detection of SNP TSC0002731
tgatgatatttt

SEQ ID NO: 272182 - DNA, 12 bp, Artificial Sequence
  Oligonucleotide primer for the detection of SNP TSC0002731
ttaataacattc

SEQ ID NO: 272183 - DNA, 12 bp, Artificial Sequence
  Oligonucleotide primer for the detection of SNP TSC0002731
gttttaggtttt

SEQ ID NO: 272184 - DNA, 12 bp, Artificial Sequence
  Oligonucleotide primer for the detection of SNP TSC0002731
gttttaggtttc

SEQ ID NO: 272185 - DNA, 12 bp, Artificial Sequence
  Oligonucleotide primer for the detection of SNP TSC0002732
ttttatttagtt

SEQ ID NO: 272186 - DNA, 12 bp, Artificial Sequence
  Oligonucleotide primer for the detection of SNP TSC0002732
ccttacctaatt

SEQ ID NO: 272187 - DNA, 12 bp, Artificial Sequence
  Oligonucleotide primer for the detection of SNP TSC0002732
atatatatatac

SEQ ID NO: 272188 - DNA, 12 bp, Artificial Sequence
  Oligonucleotide primer for the detection of SNP TSC0002733
aactttaaattt

SEQ ID NO: 272189 - DNA, 12 bp, Artificial Sequence
  Oligonucleotide primer for the detection of SNP TSC0002733
tttttgatgata

SEQ ID NO: 272190 - DNA, 12 bp, Artificial Sequence
  Oligonucleotide primer for the detection of SNP TSC0002733
cttttaataaca

SEQ ID NO: 272191 - DNA, 12 bp, Artificial Sequence
  Oligonucleotide primer for the detection of SNP TSC0002733
ggttttaggttt

SEQ ID NO: 272192 - DNA, 12 bp, Artificial Sequence
  Oligonucleotide primer for the detection of SNP TSC0002734
tatacctcttaa

SEQ ID NO: 272193 - DNA, 12 bp, Artificial Sequence
  Oligonucleotide primer for the detection of SNP TSC0002734
tccctttttttc

SEQ ID NO: 272194 - DNA, 12 bp, Artificial Sequence
  Oligonucleotide primer for the detection of SNP TSC0002734
atgtgttttttg

SEQ ID NO: 272195 - DNA, 12 bp, Artificial Sequence
  Oligonucleotide primer for the detection of SNP TSC0002735
cacacacacaca

SEQ ID NO: 272196 - DNA, 12 bp, Artificial Sequence
  Oligonucleotide primer for the detection of SNP TSC0002735
cacacacacacg

SEQ ID NO: 272197 - DNA, 12 bp, Artificial Sequence
  Oligonucleotide primer for the detection of SNP TSC0002735
cttacctaatta

SEQ ID NO: 272198 - DNA, 12 bp, Artificial Sequence
  Oligonucleotide primer for the detection of SNP TSC0002735
tatatatatatg

SEQ ID NO: 272199 - DNA, 12 bp, Artificial Sequence
  Oligonucleotide primer for the detection of SNP TSC0002735
tatatatatacg

SEQ ID NO: 272200 - DNA, 12 bp, Artificial Sequence
  Oligonucleotide primer for the detection of SNP TSC0002736
ttatttagttat

SEQ ID NO: 272201 - DNA, 12 bp, Artificial Sequence
  Oligonucleotide primer for the detection of SNP TSC0002736
ttacctaattac

SEQ ID NO: 272202 - DNA, 12 bp, Artificial Sequence
  Oligonucleotide primer for the detection of SNP TSC0002737
ctaataaaattc

SEQ ID NO: 272203 - DNA, 12 bp, Artificial Sequence
  Oligonucleotide primer for the detection of SNP TSC0002737
agttagggtgtg

SEQ ID NO: 272204 - DNA, 12 bp, Artificial Sequence
  Oligonucleotide primer for the detection of SNP TSC0002738
taattacaataa

SEQ ID NO: 272205 - DNA, 12 bp, Artificial Sequence
  Oligonucleotide primer for the detection of SNP TSC0002738
taattacgataa

SEQ ID NO: 272206 - DNA, 12 bp, Artificial Sequence
  Oligonucleotide primer for the detection of SNP TSC0002738
aatttatttatg

SEQ ID NO: 272207 - DNA, 12 bp, Artificial Sequence
  Oligonucleotide primer for the detection of SNP TSC0002738
aatctactcata

SEQ ID NO: 272208 - DNA, 12 bp, Artificial Sequence
  Oligonucleotide primer for the detection of SNP TSC0002738
tgattatggtaa

SEQ ID NO: 272209 - DNA, 12 bp, Artificial Sequence
  Oligonucleotide primer for the detection of SNP TSC0002738
tgattacggtaa

SEQ ID NO: 272210 - DNA, 12 bp, Artificial Sequence
  Oligonucleotide primer for the detection of SNP TSC0002739
aataatattaac

SEQ ID NO: 272211 - DNA, 12 bp, Artificial Sequence
  Oligonucleotide primer for the detection of SNP TSC0002739
aatatggggtta

SEQ ID NO: 272212 - DNA, 12 bp, Artificial Sequence
  Oligonucleotide primer for the detection of SNP TSC0002740
cataccaaacta

SEQ ID NO: 272213 - DNA, 12 bp, Artificial Sequence
  Oligonucleotide primer for the detection of SNP TSC0002740
cataccgaacta

SEQ ID NO: 272214 - DNA, 12 bp, Artificial Sequence
  Oligonucleotide primer for the detection of SNP TSC0002740
aaggttgttttg

SEQ ID NO: 272215 - DNA, 12 bp, Artificial Sequence
  Oligonucleotide primer for the detection of SNP TSC0002740
aaaactactcta

SEQ ID NO: 272216 - DNA, 12 bp, Artificial Sequence
  Oligonucleotide primer for the detection of SNP TSC0002740
tatgttgggttg

SEQ ID NO: 272217 - DNA, 12 bp, Artificial Sequence
  Oligonucleotide primer for the detection of SNP TSC0002740
tatgtcgggttg

SEQ ID NO: 272218 - DNA, 12 bp, Artificial Sequence
  Oligonucleotide primer for the detection of SNP TSC0002741
cccactcttaaa

SEQ ID NO: 272219 - DNA, 12 bp, Artificial Sequence
  Oligonucleotide primer for the detection of SNP TSC0002741
taattttatttg

SEQ ID NO: 272220 - DNA, 12 bp, Artificial Sequence
  Oligonucleotide primer for the detection of SNP TSC0002742
aaatctatttcc

SEQ ID NO: 272221 - DNA, 12 bp, Artificial Sequence
  Oligonucleotide primer for the detection of SNP TSC0002742
attaagaagtgg

SEQ ID NO: 272222 - DNA, 12 bp, Artificial Sequence
  Oligonukleotid-Primer
atcaaaaaataa

SEQ ID NO: 272223 - DNA, 12 bp, Artificial Sequence
  Oligonucleotide primer for the detection of SNP TSC0002742
gagtttattttt

SEQ ID NO: 272224 - DNA, 12 bp, Artificial Sequence
  Oligonucleotide primer for the detection of SNP TSC0002743
atttcattttta

SEQ ID NO: 272225 - DNA, 12 bp, Artificial Sequence
  Oligonucleotide primer for the detection of SNP TSC0002743
gttttattttta

SEQ ID NO: 272226 - DNA, 12 bp, Artificial Sequence
  Oligonukleotid-Primer
atacatacacat

SEQ ID NO: 272227 - DNA, 12 bp, Artificial Sequence
  Oligonucleotide primer for the detection of SNP TSC0002744
ggtagtttggta

SEQ ID NO: 272228 - DNA, 12 bp, Artificial Sequence
  Oligonucleotide primer for the detection of SNP TSC0002745
aaaaaaaaataa

SEQ ID NO: 272229 - DNA, 12 bp, Artificial Sequence
  Oligonucleotide primer for the detection of SNP TSC0002745
agaatttgtgtt

SEQ ID NO: 272230 - DNA, 12 bp, Artificial Sequence
  Oligonucleotide primer for the detection of SNP TSC0002745
aaatttatacta

SEQ ID NO: 272231 - DNA, 12 bp, Artificial Sequence
  Oligonucleotide primer for the detection of SNP TSC0002745
gaggaaggtgat

SEQ ID NO: 272232 - DNA, 12 bp, Artificial Sequence
  Oligonucleotide primer for the detection of SNP TSC0002747
ctaaattactat

SEQ ID NO: 272233 - DNA, 12 bp, Artificial Sequence
  Oligonucleotide primer for the detection of SNP TSC0002747
ggtatatagtga

SEQ ID NO: 272234 - DNA, 12 bp, Artificial Sequence
  Oligonucleotide primer for the detection of SNP TSC0002747
aacacacaataa

SEQ ID NO: 272235 - DNA, 12 bp, Artificial Sequence
  Oligonucleotide primer for the detection of SNP TSC0002747
ttgagttattgt

SEQ ID NO: 272236 - DNA, 12 bp, Artificial Sequence
  Oligonucleotide primer for the detection of SNP TSC0002748
aaaactaatacc

SEQ ID NO: 272237 - DNA, 12 bp, Artificial Sequence
  Oligonucleotide primer for the detection of SNP TSC0002748
aagaattttttt

SEQ ID NO: 272238 - DNA, 12 bp, Artificial Sequence
  Oligonucleotide primer for the detection of SNP TSC0002748
aagaattttttc

SEQ ID NO: 272239 - DNA, 12 bp, Artificial Sequence
  Oligonucleotide primer for the detection of SNP TSC0002748
tcaaaaatttct

SEQ ID NO: 272240 - DNA, 12 bp, Artificial Sequence
  Oligonucleotide primer for the detection of SNP TSC0002748
aaggttgatgtt

SEQ ID NO: 272241 - DNA, 12 bp, Artificial Sequence
  Oligonucleotide primer for the detection of SNP TSC0002751
tgattttttttt

SEQ ID NO: 272242 - DNA, 12 bp, Artificial Sequence
  Oligonucleotide primer for the detection of SNP TSC0002751
taaccttccttt

SEQ ID NO: 272243 - DNA, 12 bp, Artificial Sequence
  Oligonucleotide primer for the detection of SNP TSC0002751
aagtaaagtaaa

SEQ ID NO: 272244 - DNA, 12 bp, Artificial Sequence
  Oligonucleotide primer for the detection of SNP TSC0002752
tttccccaactt

SEQ ID NO: 272245 - DNA, 12 bp, Artificial Sequence
  Oligonucleotide primer for the detection of SNP TSC0002752
ggaattaaatgg

SEQ ID NO: 272246 - DNA, 12 bp, Artificial Sequence
  Oligonucleotide primer for the detection of SNP TSC0002753
aaactttcaatt

SEQ ID NO: 272247 - DNA, 12 bp, Artificial Sequence
  Oligonucleotide primer for the detection of SNP TSC0002753
aaactttcgatt

SEQ ID NO: 272248 - DNA, 12 bp, Artificial Sequence
  Oligonucleotide primer for the detection of SNP TSC0002753
tggagagtatta

SEQ ID NO: 272249 - DNA, 12 bp, Artificial Sequence
  Oligonucleotide primer for the detection of SNP TSC0002754
cactaaaaataa

SEQ ID NO: 272250 - DNA, 12 bp, Artificial Sequence
  Oligonucleotide primer for the detection of SNP TSC0002754
atttgttttgga

SEQ ID NO: 272251 - DNA, 12 bp, Artificial Sequence
  Oligonucleotide primer for the detection of SNP TSC0002754
atttgtttcgga

SEQ ID NO: 272252 - DNA, 12 bp, Artificial Sequence
  Oligonucleotide primer for the detection of SNP TSC0002754
tctactccaaaa

SEQ ID NO: 272253 - DNA, 12 bp, Artificial Sequence
  Oligonucleotide primer for the detection of SNP TSC0002754
tctactccgaaa

SEQ ID NO: 272254 - DNA, 12 bp, Artificial Sequence
  Oligonucleotide primer for the detection of SNP TSC0002754
ttattggaaata

SEQ ID NO: 272255 - DNA, 12 bp, Artificial Sequence
  Oligonucleotide primer for the detection of SNP TSC0002755
aaaccaatattt

SEQ ID NO: 272256 - DNA, 12 bp, Artificial Sequence
  Oligonucleotide primer for the detection of SNP TSC0002755
tttagggtagtg

SEQ ID NO: 272257 - DNA, 12 bp, Artificial Sequence
  Oligonucleotide primer for the detection of SNP TSC0002757
aatacaaaaatc

SEQ ID NO: 272258 - DNA, 12 bp, Artificial Sequence
  Oligonucleotide primer for the detection of SNP TSC0002757
agtgtttagaat

SEQ ID NO: 272259 - DNA, 12 bp, Artificial Sequence
  Oligonucleotide primer for the detection of SNP TSC0002757
agcgtttagaat

SEQ ID NO: 272260 - DNA, 12 bp, Artificial Sequence
  Oligonucleotide primer for the detection of SNP TSC0002757
aacacccaaaat

SEQ ID NO: 272261 - DNA, 12 bp, Artificial Sequence
  Oligonucleotide primer for the detection of SNP TSC0002757
aacgcccaaaat

SEQ ID NO: 272262 - DNA, 12 bp, Artificial Sequence
  Oligonucleotide primer for the detection of SNP TSC0002757
agtgtagaggtt

SEQ ID NO: 272263 - DNA, 12 bp, Artificial Sequence
  Oligonucleotide primer for the detection of SNP TSC0002758
acaatacaaaaa

SEQ ID NO: 272264 - DNA, 12 bp, Artificial Sequence
  Oligonucleotide primer for the detection of SNP TSC0002758
gtgtttagaatg

SEQ ID NO: 272265 - DNA, 12 bp, Artificial Sequence
  Oligonucleotide primer for the detection of SNP TSC0002758
gcgtttagaatg

SEQ ID NO: 272266 - DNA, 12 bp, Artificial Sequence
  Oligonucleotide primer for the detection of SNP TSC0002758
acacccaaaata

SEQ ID NO: 272267 - DNA, 12 bp, Artificial Sequence
  Oligonucleotide primer for the detection of SNP TSC0002758
acgcccaaaata

SEQ ID NO: 272268 - DNA, 12 bp, Artificial Sequence
  Oligonucleotide primer for the detection of SNP TSC0002758
tagtgtagaggt

SEQ ID NO: 272269 - DNA, 12 bp, Artificial Sequence
  Oligonucleotide primer for the detection of SNP TSC0002760
taaataacaatc

SEQ ID NO: 272270 - DNA, 12 bp, Artificial Sequence
  Oligonucleotide primer for the detection of SNP TSC0002760
ttgttattatag

SEQ ID NO: 272271 - DNA, 12 bp, Artificial Sequence
  Oligonucleotide primer for the detection of SNP TSC0002761
taacttcttcat

SEQ ID NO: 272272 - DNA, 12 bp, Artificial Sequence
  Oligonucleotide primer for the detection of SNP TSC0002761
taacttcttcgt

SEQ ID NO: 272273 - DNA, 12 bp, Artificial Sequence
  Oligonucleotide primer for the detection of SNP TSC0002761
gaggaaatttta

SEQ ID NO: 272274 - DNA, 12 bp, Artificial Sequence
  Oligonucleotide primer for the detection of SNP TSC0002763
acaataacacaa

SEQ ID NO: 272275 - DNA, 12 bp, Artificial Sequence
  Oligonucleotide primer for the detection of SNP TSC0002763
acaataacacga

SEQ ID NO: 272276 - DNA, 12 bp, Artificial Sequence
  Oligonucleotide primer for the detection of SNP TSC0002763
acaataacgcaa

SEQ ID NO: 272277 - DNA, 12 bp, Artificial Sequence
  Oligonucleotide primer for the detection of SNP TSC0002763
acaataacgcga

SEQ ID NO: 272278 - DNA, 12 bp, Artificial Sequence
  Oligonucleotide primer for the detection of SNP TSC0002763
acaataaactaa

SEQ ID NO: 272279 - DNA, 12 bp, Artificial Sequence
  Oligonucleotide primer for the detection of SNP TSC0002763
tagtggtgtgat

SEQ ID NO: 272280 - DNA, 12 bp, Artificial Sequence
  Oligonucleotide primer for the detection of SNP TSC0002763
tagtggcgtgat

SEQ ID NO: 272281 - DNA, 12 bp, Artificial Sequence
  Oligonucleotide primer for the detection of SNP TSC0002763
tagtggtgcgat

SEQ ID NO: 272282 - DNA, 12 bp, Artificial Sequence
  Oligonucleotide primer for the detection of SNP TSC0002763
tagtggcgcgat

SEQ ID NO: 272283 - DNA, 12 bp, Artificial Sequence
  Oligonucleotide primer for the detection of SNP TSC0002764
ttatactaacat

SEQ ID NO: 272284 - DNA, 12 bp, Artificial Sequence
  Oligonucleotide primer for the detection of SNP TSC0002764
agaagttgagta

SEQ ID NO: 272285 - DNA, 12 bp, Artificial Sequence
  Oligonucleotide primer for the detection of SNP TSC0002765
cccaaaaaaaat

SEQ ID NO: 272286 - DNA, 12 bp, Artificial Sequence
  Oligonucleotide primer for the detection of SNP TSC0002765
gatttaaaatgg

SEQ ID NO: 272287 - DNA, 12 bp, Artificial Sequence
  Oligonucleotide primer for the detection of SNP TSC0002767
attatatttgaa

SEQ ID NO: 272288 - DNA, 12 bp, Artificial Sequence
  Oligonucleotide primer for the detection of SNP TSC0002767
ccacacttaaaa

SEQ ID NO: 272289 - DNA, 12 bp, Artificial Sequence
  Oligonucleotide primer for the detection of SNP TSC0002767
agagaagaagta

SEQ ID NO: 272290 - DNA, 12 bp, Artificial Sequence
  Oligonucleotide primer for the detection of SNP TSC0002768
ctttacccatca

SEQ ID NO: 272291 - DNA, 12 bp, Artificial Sequence
  Oligonucleotide primer for the detection of SNP TSC0002768
agtatttattat

SEQ ID NO: 272292 - DNA, 12 bp, Artificial Sequence
  Oligonucleotide primer for the detection of SNP TSC0002768
aacacttactat

SEQ ID NO: 272293 - DNA, 12 bp, Artificial Sequence
  Oligonucleotide primer for the detection of SNP TSC0002768
ttttatttatta

SEQ ID NO: 272294 - DNA, 12 bp, Artificial Sequence
  Oligonucleotide primer for the detection of SNP TSC0002769
ttctacactaca

SEQ ID NO: 272295 - DNA, 12 bp, Artificial Sequence
  Oligonukleotid-Primer
ggtaatatatgt

SEQ ID NO: 272296 - DNA, 12 bp, Artificial Sequence
  Oligonucleotide primer for the detection of SNP TSC0002769
ggtaatatacgt

SEQ ID NO: 272297 - DNA, 12 bp, Artificial Sequence
  Oligonucleotide primer for the detection of SNP TSC0002769
caacaacataca

SEQ ID NO: 272298 - DNA, 12 bp, Artificial Sequence
  Oligonucleotide primer for the detection of SNP TSC0002769
caacaacatacg

SEQ ID NO: 272299 - DNA, 12 bp, Artificial Sequence
  Oligonucleotide primer for the detection of SNP TSC0002769
cgacaacataca

SEQ ID NO: 272300 - DNA, 12 bp, Artificial Sequence
  Oligonucleotide primer for the detection of SNP TSC0002769
cgacaacatacg

SEQ ID NO: 272301 - DNA, 12 bp, Artificial Sequence
  Oligonucleotide primer for the detection of SNP TSC0002769
attttgtattat

SEQ ID NO: 272302 - DNA, 12 bp, Artificial Sequence
  Oligonucleotide primer for the detection of SNP TSC0002770
tataatatatat

SEQ ID NO: 272303 - DNA, 12 bp, Artificial Sequence
  Oligonucleotide primer for the detection of SNP TSC0002770
taaggataggtg

SEQ ID NO: 272304 - DNA, 12 bp, Artificial Sequence
  Oligonucleotide primer for the detection of SNP TSC0002772
ccccaaatcatt

SEQ ID NO: 272305 - DNA, 12 bp, Artificial Sequence
  Oligonucleotide primer for the detection of SNP TSC0002772
ccccgaatcatt

SEQ ID NO: 272306 - DNA, 12 bp, Artificial Sequence
  Oligonucleotide primer for the detection of SNP TSC0002772
ttttggtattga

SEQ ID NO: 272307 - DNA, 12 bp, Artificial Sequence
  Oligonucleotide primer for the detection of SNP TSC0002774
aacataaaacca

SEQ ID NO: 272308 - DNA, 12 bp, Artificial Sequence
  Oligonucleotide primer for the detection of SNP TSC0002774
tctcctaaaatc

SEQ ID NO: 272309 - DNA, 12 bp, Artificial Sequence
  Oligonucleotide primer for the detection of SNP TSC0002774
gggtatggaatt

SEQ ID NO: 272310 - DNA, 12 bp, Artificial Sequence
  Oligonucleotide primer for the detection of SNP TSC0002775
cacaacctccac

SEQ ID NO: 272311 - DNA, 12 bp, Artificial Sequence
  Oligonucleotide primer for the detection of SNP TSC0002777
ttcaaaaccaac

SEQ ID NO: 272312 - DNA, 12 bp, Artificial Sequence
  Oligonucleotide primer for the detection of SNP TSC0002777
ttatgttggtta

SEQ ID NO: 272313 - DNA, 12 bp, Artificial Sequence
  Oligonucleotide primer for the detection of SNP TSC0002778
cccaactaaaaa

SEQ ID NO: 272314 - DNA, 12 bp, Artificial Sequence
  Oligonucleotide primer for the detection of SNP TSC0002778
ctcctctccttc

SEQ ID NO: 272315 - DNA, 12 bp, Artificial Sequence
  Oligonucleotide primer for the detection of SNP TSC0002778
ttaattgggaat

SEQ ID NO: 272316 - DNA, 12 bp, Artificial Sequence
  Oligonucleotide primer for the detection of SNP TSC0002778
ttaattgggaac

SEQ ID NO: 272317 - DNA, 12 bp, Artificial Sequence
  Oligonucleotide primer for the detection of SNP TSC0002779
attcatatacaa

SEQ ID NO: 272318 - DNA, 12 bp, Artificial Sequence
  Oligonucleotide primer for the detection of SNP TSC0002779
attcgtatacaa

SEQ ID NO: 272319-272320 - skipped (2 entries)

SEQ ID NO: 272321 - DNA, 12 bp, Artificial Sequence
  Oligonucleotide primer for the detection of SNP TSC0002779
atttgtgtataa

SEQ ID NO: 272322 - DNA, 12 bp, Artificial Sequence
  Oligonucleotide primer for the detection of SNP TSC0002779
attcgtgtataa

SEQ ID NO: 272323 - DNA, 12 bp, Artificial Sequence
  Oligonucleotide primer for the detection of SNP TSC0002780
aatcactaacca

SEQ ID NO: 272324 - DNA, 12 bp, Artificial Sequence
  Oligonucleotide primer for the detection of SNP TSC0002780
tagagttatttg

SEQ ID NO: 272325 - DNA, 12 bp, Artificial Sequence
  Oligonucleotide primer for the detection of SNP TSC0002780
caaaaccaccta

SEQ ID NO: 272326 - DNA, 12 bp, Artificial Sequence
  Oligonucleotide primer for the detection of SNP TSC0002780
gagttattggtt

SEQ ID NO: 272327 - DNA, 12 bp, Artificial Sequence
  Oligonucleotide primer for the detection of SNP TSC0002782
catcatctttac

SEQ ID NO: 272328 - DNA, 12 bp, Artificial Sequence
  Oligonucleotide primer for the detection of SNP TSC0002782
tatgtgtgtgtg

SEQ ID NO: 272329 - DNA, 12 bp, Artificial Sequence
  Oligonucleotide primer for the detection of SNP TSC0002783
cacacctataat

SEQ ID NO: 272330 - DNA, 12 bp, Artificial Sequence
  Oligonucleotide primer for the detection of SNP TSC0002783
cacgcctataat

SEQ ID NO: 272331 - DNA, 12 bp, Artificial Sequence
  Oligonucleotide primer for the detection of SNP TSC0002783
ttaaagtgttgg

SEQ ID NO: 272332 - DNA, 12 bp, Artificial Sequence
  Oligonucleotide primer for the detection of SNP TSC0002784
attataatattt

SEQ ID NO: 272333 - DNA, 12 bp, Artificial Sequence
  Oligonucleotide primer for the detection of SNP TSC0002784
agtgagtattta

SEQ ID NO: 272334 - DNA, 12 bp, Artificial Sequence
  Oligonucleotide primer for the detection of SNP TSC0002787
attaaattatat

SEQ ID NO: 272335 - DNA, 12 bp, Artificial Sequence
  Oligonucleotide primer for the detection of SNP TSC0002787
tagaagtttgta

SEQ ID NO: 272336 - DNA, 12 bp, Artificial Sequence
  Oligonucleotide primer for the detection of SNP TSC0002788
cctcttacacct

SEQ ID NO: 272337 - DNA, 12 bp, Artificial Sequence
  Oligonucleotide primer for the detection of SNP TSC0002788
tttggggggtag

SEQ ID NO: 272338 - DNA, 12 bp, Artificial Sequence
  Oligonucleotide primer for the detection of SNP TSC0002790
cactactaaaat

SEQ ID NO: 272339 - DNA, 12 bp, Artificial Sequence
  Oligonucleotide primer for the detection of SNP TSC0002790
atgtatagttta

SEQ ID NO: 272340 - DNA, 12 bp, Artificial Sequence
  Oligonucleotide primer for the detection of SNP TSC0002790
atacacaattta

SEQ ID NO: 272341 - DNA, 12 bp, Artificial Sequence
  Oligonucleotide primer for the detection of SNP TSC0002790
tattattgaaat

SEQ ID NO: 272342 - DNA, 12 bp, Artificial Sequence
  Oligonucleotide primer for the detection of SNP TSC0002791
aacaacaataac

SEQ ID NO: 272343 - DNA, 12 bp, Artificial Sequence
  Oligonucleotide primer for the detection of SNP TSC0002791
tagtgaatatga

SEQ ID NO: 272344 - DNA, 12 bp, Artificial Sequence
  Oligonucleotide primer for the detection of SNP TSC0002792
aaaaaacttaac

SEQ ID NO: 272345 - DNA, 12 bp, Artificial Sequence
  Oligonucleotide primer for the detection of SNP TSC0002792
ttgtgatatgag

SEQ ID NO: 272346 - DNA, 12 bp, Artificial Sequence
  Oligonucleotide primer for the detection of SNP TSC0002793
ctaaataacaac

SEQ ID NO: 272347 - DNA, 12 bp, Artificial Sequence
  Oligonucleotide primer for the detection of SNP TSC0002793
attttgaggata

SEQ ID NO: 272348 - DNA, 12 bp, Artificial Sequence
  Oligonucleotide primer for the detection of SNP TSC0002793
atttcgaggata

SEQ ID NO: 272349 - DNA, 12 bp, Artificial Sequence
  Oligonucleotide primer for the detection of SNP TSC0002793
attccaaaaaca

SEQ ID NO: 272350 - DNA, 12 bp, Artificial Sequence
  Oligonucleotide primer for the detection of SNP TSC0002793
attccgaaaaca

SEQ ID NO: 272351 - DNA, 12 bp, Artificial Sequence
  Oligonucleotide primer for the detection of SNP TSC0002793
ttaggtagtagt

SEQ ID NO: 272352 - DNA, 12 bp, Artificial Sequence
  Oligonucleotide primer for the detection of SNP TSC0002794
accttactccta

SEQ ID NO: 272353 - DNA, 12 bp, Artificial Sequence
  Oligonucleotide primer for the detection of SNP TSC0002794
tgaatatggtag

SEQ ID NO: 272354 - DNA, 12 bp, Artificial Sequence
  Oligonucleotide primer for the detection of SNP TSC0002794
tgaatacggtag

SEQ ID NO: 272355 - DNA, 12 bp, Artificial Sequence
  Oligonucleotide primer for the detection of SNP TSC0002794
taaacacaacaa

SEQ ID NO: 272356 - DNA, 12 bp, Artificial Sequence
  Oligonucleotide primer for the detection of SNP TSC0002794
taaacacgacaa

SEQ ID NO: 272357 - DNA, 12 bp, Artificial Sequence
  Oligonucleotide primer for the detection of SNP TSC0002794
tttgtttttgtt

SEQ ID NO: 272358 - DNA, 12 bp, Artificial Sequence
  Oligonucleotide primer for the detection of SNP TSC0002795
aaaacttataac

SEQ ID NO: 272359 - DNA, 12 bp, Artificial Sequence
  Oligonucleotide primer for the detection of SNP TSC0002795
ttattgtttaaa

SEQ ID NO: 272360 - DNA, 12 bp, Artificial Sequence
  Oligonucleotide primer for the detection of SNP TSC0002796
aaaactaaaaca

SEQ ID NO: 272361 - DNA, 12 bp, Artificial Sequence
  Oligonucleotide primer for the detection of SNP TSC0002796
aaaactaaaacg

SEQ ID NO: 272362 - DNA, 12 bp, Artificial Sequence
  Oligonucleotide primer for the detection of SNP TSC0002796
gaaatggaatat

SEQ ID NO: 272363 - DNA, 12 bp, Artificial Sequence
  Oligonucleotide primer for the detection of SNP TSC0002796
aaaataaaatac

SEQ ID NO: 272364 - DNA, 12 bp, Artificial Sequence
  Oligonucleotide primer for the detection of SNP TSC0002796
gagattgaaatg

SEQ ID NO: 272365 - DNA, 12 bp, Artificial Sequence
  Oligonucleotide primer for the detection of SNP TSC0002796
gagattgaaacg

SEQ ID NO: 272366 - DNA, 12 bp, Artificial Sequence
  Oligonucleotide primer for the detection of SNP TSC0002797
aaaattaacact

SEQ ID NO: 272367 - DNA, 12 bp, Artificial Sequence
  Oligonucleotide primer for the detection of SNP TSC0002797
tgttaggtgatg

SEQ ID NO: 272368 - DNA, 12 bp, Artificial Sequence
  Oligonucleotide primer for the detection of SNP TSC0002797
tgttaggcgatg

SEQ ID NO: 272369 - DNA, 12 bp, Artificial Sequence
  Oligonucleotide primer for the detection of SNP TSC0002798
tcttcttaaact

SEQ ID NO: 272370 - DNA, 12 bp, Artificial Sequence
  Oligonucleotide primer for the detection of SNP TSC0002798
tgtgagttattg

SEQ ID NO: 272371 - DNA, 12 bp, Artificial Sequence
  Oligonucleotide primer for the detection of SNP TSC0002798
cgtgagttattg

SEQ ID NO: 272372 - DNA, 12 bp, Artificial Sequence
  Oligonukleotid-Primer
cataaaccacta

SEQ ID NO: 272373 - DNA, 12 bp, Artificial Sequence
  Oligonucleotide primer for the detection of SNP TSC0002798
cgtaaaccacta

SEQ ID NO: 272374 - DNA, 12 bp, Artificial Sequence
  Oligonucleotide primer for the detection of SNP TSC0002798
tttttttaggtt

SEQ ID NO: 272375 - DNA, 12 bp, Artificial Sequence
  Oligonucleotide primer for the detection of SNP TSC0002799
aattccaaaaat

SEQ ID NO: 272376 - DNA, 12 bp, Artificial Sequence
  Oligonucleotide primer for the detection of SNP TSC0002799
ggtttattttta

SEQ ID NO: 272377 - DNA, 12 bp, Artificial Sequence
  Oligonucleotide primer for the detection of SNP TSC0002800
ccctccccaacc

SEQ ID NO: 272378 - DNA, 12 bp, Artificial Sequence
  Oligonucleotide primer for the detection of SNP TSC0002800
ttattgtggtgg

SEQ ID NO: 272379 - DNA, 12 bp, Artificial Sequence
  Oligonucleotide primer for the detection of SNP TSC0002800
ttattgcggtgg

SEQ ID NO: 272380 - DNA, 12 bp, Artificial Sequence
  Oligonucleotide primer for the detection of SNP TSC0002800
ttattgtggcgg

SEQ ID NO: 272381 - DNA, 12 bp, Artificial Sequence
  Oligonucleotide primer for the detection of SNP TSC0002800
ttattgcggcgg

SEQ ID NO: 272382 - DNA, 12 bp, Artificial Sequence
  Oligonucleotide primer for the detection of SNP TSC0002800
ttattacaacaa

SEQ ID NO: 272383 - DNA, 12 bp, Artificial Sequence
  Oligonucleotide primer for the detection of SNP TSC0002800
ttattacaacga

SEQ ID NO: 272384 - DNA, 12 bp, Artificial Sequence
  Oligonucleotide primer for the detection of SNP TSC0002800
ttattacgacaa

SEQ ID NO: 272385 - DNA, 12 bp, Artificial Sequence
  Oligonucleotide primer for the detection of SNP TSC0002800
ttattacgacga

SEQ ID NO: 272386 - DNA, 12 bp, Artificial Sequence
  Oligonucleotide primer for the detection of SNP TSC0002800
ttttttttaatt

SEQ ID NO: 272387 - DNA, 12 bp, Artificial Sequence
  Oligonucleotide primer for the detection of SNP TSC0002801
tacaccttccca

SEQ ID NO: 272388 - DNA, 12 bp, Artificial Sequence
  Oligonucleotide primer for the detection of SNP TSC0002801
aaatgggattgg

SEQ ID NO: 272389 - DNA, 12 bp, Artificial Sequence
  Oligonucleotide primer for the detection of SNP TSC0002801
aaatgggatcgg

SEQ ID NO: 272390 - DNA, 12 bp, Artificial Sequence
  Oligonucleotide primer for the detection of SNP TSC0002801
aataaaaccaaa

SEQ ID NO: 272391 - DNA, 12 bp, Artificial Sequence
  Oligonucleotide primer for the detection of SNP TSC0002801
aataaaaccgaa

SEQ ID NO: 272392 - DNA, 12 bp, Artificial Sequence
  Oligonucleotide primer for the detection of SNP TSC0002801
tatattttttta

SEQ ID NO: 272393 - DNA, 12 bp, Artificial Sequence
  Oligonucleotide primer for the detection of SNP TSC0002802
tcaaaaaaaaaa

SEQ ID NO: 272394 - DNA, 12 bp, Artificial Sequence
  Oligonucleotide primer for the detection of SNP TSC0002802
tattgatggtat

SEQ ID NO: 272395 - DNA, 12 bp, Artificial Sequence
  Oligonucleotide primer for the detection of SNP TSC0002802
cattaataatac

SEQ ID NO: 272396 - DNA, 12 bp, Artificial Sequence
  Oligonucleotide primer for the detection of SNP TSC0002802
ttaaaaaaaagg

SEQ ID NO: 272397 - DNA, 12 bp, Artificial Sequence
  Oligonucleotide primer for the detection of SNP TSC0002804
cccaacacattt

SEQ ID NO: 272398 - DNA, 12 bp, Artificial Sequence
  Oligonucleotide primer for the detection of SNP TSC0002804
tattaaaaatgt

SEQ ID NO: 272399 - DNA, 12 bp, Artificial Sequence
  Oligonucleotide primer for the detection of SNP TSC0002804
tactaaaaatac

SEQ ID NO: 272400 - DNA, 12 bp, Artificial Sequence
  Oligonucleotide primer for the detection of SNP TSC0002804
tttagtatattt

SEQ ID NO: 272401-272404 - skipped (4 entries)

SEQ ID NO: 272405 - DNA, 12 bp, Artificial Sequence
  Oligonucleotide primer for the detection of SNP TSC0002806
ctataaaaactc

SEQ ID NO: 272406 - DNA, 12 bp, Artificial Sequence
  Oligonucleotide primer for the detection of SNP TSC0002806
tttaatgagtgt

SEQ ID NO: 272407 - DNA, 12 bp, Artificial Sequence
  Oligonucleotide primer for the detection of SNP TSC0002806
tttaacgagtgt

SEQ ID NO: 272408 - DNA, 12 bp, Artificial Sequence
  Oligonucleotide primer for the detection of SNP TSC0002806
ctaacaaatata

SEQ ID NO: 272409 - DNA, 12 bp, Artificial Sequence
  Oligonucleotide primer for the detection of SNP TSC0002806
ctaacgaatata

SEQ ID NO: 272410 - DNA, 12 bp, Artificial Sequence
  Oligonucleotide primer for the detection of SNP TSC0002806
ttgtgaaagttt

SEQ ID NO: 272411 - DNA, 12 bp, Artificial Sequence
  Oligonucleotide primer for the detection of SNP TSC0002808
cctcaactaaaa

SEQ ID NO: 272412 - DNA, 12 bp, Artificial Sequence
  Oligonucleotide primer for the detection of SNP TSC0002808
ttgtttttgttt

SEQ ID NO: 272413 - DNA, 12 bp, Artificial Sequence
  Oligonucleotide primer for the detection of SNP TSC0002808
ttacccctactc

SEQ ID NO: 272414 - DNA, 12 bp, Artificial Sequence
  Oligonucleotide primer for the detection of SNP TSC0002808
ttttagttggag

SEQ ID NO: 272415 - DNA, 12 bp, Artificial Sequence
  Oligonucleotide primer for the detection of SNP TSC0002811
aatcaaaccaaa

SEQ ID NO: 272416 - DNA, 12 bp, Artificial Sequence
  Oligonucleotide primer for the detection of SNP TSC0002811
aatcgaaccaaa

SEQ ID NO: 272417 - DNA, 12 bp, Artificial Sequence
  Oligonucleotide primer for the detection of SNP TSC0002811
tttattgagtat

SEQ ID NO: 272418 - DNA, 12 bp, Artificial Sequence
  Oligonucleotide primer for the detection of SNP TSC0002811
ctcattaaacac

SEQ ID NO: 272419 - DNA, 12 bp, Artificial Sequence
  Oligonucleotide primer for the detection of SNP TSC0002811
tggttgggttag

SEQ ID NO: 272420 - DNA, 12 bp, Artificial Sequence
  Oligonucleotide primer for the detection of SNP TSC0002811
tggtcgggttag

SEQ ID NO: 272421 - DNA, 12 bp, Artificial Sequence
  Oligonucleotide primer for the detection of SNP TSC0002812
ccttactcctat

SEQ ID NO: 272422 - DNA, 12 bp, Artificial Sequence
  Oligonucleotide primer for the detection of SNP TSC0002812
gtgaatatggta

SEQ ID NO: 272423 - DNA, 12 bp, Artificial Sequence
  Oligonucleotide primer for the detection of SNP TSC0002812
gtgaatacggta

SEQ ID NO: 272424 - DNA, 12 bp, Artificial Sequence
  Oligonucleotide primer for the detection of SNP TSC0002812
aaacacaacaaa

SEQ ID NO: 272425 - DNA, 12 bp, Artificial Sequence
  Oligonucleotide primer for the detection of SNP TSC0002812
aaacacgacaaa

SEQ ID NO: 272426 - DNA, 12 bp, Artificial Sequence
  Oligonucleotide primer for the detection of SNP TSC0002812
ttttgtttttgt

SEQ ID NO: 272427 - DNA, 12 bp, Artificial Sequence
  Oligonucleotide primer for the detection of SNP TSC0002813
catccacacaac

SEQ ID NO: 272428 - DNA, 12 bp, Artificial Sequence
  Oligonucleotide primer for the detection of SNP TSC0002813
ttaattatgttt

SEQ ID NO: 272429 - DNA, 12 bp, Artificial Sequence
  Oligonukleotid-Primer
ttaatcatattt

SEQ ID NO: 272430 - DNA, 12 bp, Artificial Sequence
  Oligonucleotide primer for the detection of SNP TSC0002813
tatttatataat

SEQ ID NO: 272431 - DNA, 12 bp, Artificial Sequence
  Oligonucleotide primer for the detection of SNP TSC0002816
ttcttacctact

SEQ ID NO: 272432 - DNA, 12 bp, Artificial Sequence
  Oligonucleotide primer for the detection of SNP TSC0002816
tttgtatatata

SEQ ID NO: 272433 - DNA, 12 bp, Artificial Sequence
  Oligonukleotid-Primer
cctacatataca

SEQ ID NO: 272434 - DNA, 12 bp, Artificial Sequence
  Oligonucleotide primer for the detection of SNP TSC0002816
tttttatttgtt

SEQ ID NO: 272435 - DNA, 12 bp, Artificial Sequence
  Oligonucleotide primer for the detection of SNP TSC0002817
aaaaactaaatt

SEQ ID NO: 272436 - DNA, 12 bp, Artificial Sequence
  Oligonucleotide primer for the detection of SNP TSC0002817
agtgggttttaa

SEQ ID NO: 272437 - DNA, 12 bp, Artificial Sequence
  Oligonucleotide primer for the detection of SNP TSC0002817
aataaatctcaa

SEQ ID NO: 272438 - DNA, 12 bp, Artificial Sequence
  Oligonucleotide primer for the detection of SNP TSC0002817
gaagttgaattt

SEQ ID NO: 272439 - DNA, 12 bp, Artificial Sequence
  Oligonucleotide primer for the detection of SNP TSC0002817
gaagttgaattc

SEQ ID NO: 272440 - DNA, 12 bp, Artificial Sequence
  Oligonucleotide primer for the detection of SNP TSC0002818
tctaaacttcat

SEQ ID NO: 272441 - DNA, 12 bp, Artificial Sequence
  Oligonucleotide primer for the detection of SNP TSC0002818
tctaaacttcgt

SEQ ID NO: 272442 - DNA, 12 bp, Artificial Sequence
  Oligonucleotide primer for the detection of SNP TSC0002818
ggttgtgggggg

SEQ ID NO: 272443 - DNA, 12 bp, Artificial Sequence
  Oligonucleotide primer for the detection of SNP TSC0002818
ggtcgtgggggg

SEQ ID NO: 272444 - DNA, 12 bp, Artificial Sequence
  Oligonucleotide primer for the detection of SNP TSC0002818
aatcataaaaaa

SEQ ID NO: 272445 - DNA, 12 bp, Artificial Sequence
  Oligonucleotide primer for the detection of SNP TSC0002818
aatcgtaaaaaa

SEQ ID NO: 272446 - DNA, 12 bp, Artificial Sequence
  Oligonucleotide primer for the detection of SNP TSC0002818
tttggattttgt

SEQ ID NO: 272447 - DNA, 12 bp, Artificial Sequence
  Oligonucleotide primer for the detection of SNP TSC0002818
tttggatttcgt

SEQ ID NO: 272448 - DNA, 12 bp, Artificial Sequence
  Oligonucleotide primer for the detection of SNP TSC0002819
acataaataaat

SEQ ID NO: 272449 - DNA, 12 bp, Artificial Sequence
  Oligonucleotide primer for the detection of SNP TSC0002819
aggatttgttta

SEQ ID NO: 272450 - DNA, 12 bp, Artificial Sequence
  Oligonucleotide primer for the detection of SNP TSC0002820
tctaatcccaac

SEQ ID NO: 272451 - DNA, 12 bp, Artificial Sequence
  Oligonucleotide primer for the detection of SNP TSC0002820
atatttgtaaag

SEQ ID NO: 272452 - DNA, 12 bp, Artificial Sequence
  Oligonucleotide primer for the detection of SNP TSC0002822
taaccaataaaa

SEQ ID NO: 272453 - DNA, 12 bp, Artificial Sequence
  Oligonucleotide primer for the detection of SNP TSC0002822
taaccgataaaa

SEQ ID NO: 272454 - DNA, 12 bp, Artificial Sequence
  Oligonucleotide primer for the detection of SNP TSC0002822
tctaacccacca

SEQ ID NO: 272455 - DNA, 12 bp, Artificial Sequence
  Oligonucleotide primer for the detection of SNP TSC0002822
ggttggtggggt

SEQ ID NO: 272456 - DNA, 12 bp, Artificial Sequence
  Oligonucleotide primer for the detection of SNP TSC0002822
ggtcggtggggt

SEQ ID NO: 272457 - DNA, 12 bp, Artificial Sequence
  Oligonucleotide primer for the detection of SNP TSC0002823
tatcaaaaccta

SEQ ID NO: 272458 - DNA, 12 bp, Artificial Sequence
  Oligonucleotide primer for the detection of SNP TSC0002823
tgtttgtttttt

SEQ ID NO: 272459 - DNA, 12 bp, Artificial Sequence
  Oligonucleotide primer for the detection of SNP TSC0002823
aatatatctatc

SEQ ID NO: 272460 - DNA, 12 bp, Artificial Sequence
  Oligonucleotide primer for the detection of SNP TSC0002823
gttagagtttat

SEQ ID NO: 272461 - DNA, 12 bp, Artificial Sequence
  Oligonucleotide primer for the detection of SNP TSC0002824
acattactattt

SEQ ID NO: 272462 - DNA, 12 bp, Artificial Sequence
  Oligonucleotide primer for the detection of SNP TSC0002824
taatgttgtata

SEQ ID NO: 272463 - DNA, 12 bp, Artificial Sequence
  Oligonucleotide primer for the detection of SNP TSC0002825
cttctcacatat

SEQ ID NO: 272464 - DNA, 12 bp, Artificial Sequence
  Oligonucleotide primer for the detection of SNP TSC0002825
aggggaaaatag

SEQ ID NO: 272465 - DNA, 12 bp, Artificial Sequence
  Oligonucleotide primer for the detection of SNP TSC0002826
aataaaaaactc

SEQ ID NO: 272466 - DNA, 12 bp, Artificial Sequence
  Oligonucleotide primer for the detection of SNP TSC0002826
gtaatttggttg

SEQ ID NO: 272467 - DNA, 12 bp, Artificial Sequence
  Oligonucleotide primer for the detection of SNP TSC0002826
acaatctaatta

SEQ ID NO: 272468 - DNA, 12 bp, Artificial Sequence
  Oligonucleotide primer for the detection of SNP TSC0002826
agtaaggagttt

SEQ ID NO: 272469 - DNA, 12 bp, Artificial Sequence
  Oligonucleotide primer for the detection of SNP TSC0002827
caaccctcctac

SEQ ID NO: 272470 - DNA, 12 bp, Artificial Sequence
  Oligonucleotide primer for the detection of SNP TSC0002827
cgaccctcctac

SEQ ID NO: 272471 - DNA, 12 bp, Artificial Sequence
  Oligonucleotide primer for the detection of SNP TSC0002827
attgggaggttg

SEQ ID NO: 272472 - DNA, 12 bp, Artificial Sequence
  Oligonucleotide primer for the detection of SNP TSC0002828
accaaaacaaaa

SEQ ID NO: 272473 - DNA, 12 bp, Artificial Sequence
  Oligonucleotide primer for the detection of SNP TSC0002828
ggaagttttttt

SEQ ID NO: 272474 - DNA, 12 bp, Artificial Sequence
  Oligonucleotide primer for the detection of SNP TSC0002828
aaaaatcctttt

SEQ ID NO: 272475 - DNA, 12 bp, Artificial Sequence
  Oligonucleotide primer for the detection of SNP TSC0002828
gttaagataaaa

SEQ ID NO: 272476 - DNA, 12 bp, Artificial Sequence
  Oligonucleotide primer for the detection of SNP TSC0002829
ataatacccaaa

SEQ ID NO: 272477 - DNA, 12 bp, Artificial Sequence
  Oligonucleotide primer for the detection of SNP TSC0002829
gtaatacccaaa

SEQ ID NO: 272478 - DNA, 12 bp, Artificial Sequence
  Oligonucleotide primer for the detection of SNP TSC0002829
gaattttgaagg

SEQ ID NO: 272479 - DNA, 12 bp, Artificial Sequence
  Oligonucleotide primer for the detection of SNP TSC0002829
aaattttaaaaa

SEQ ID NO: 272480 - DNA, 12 bp, Artificial Sequence
  Oligonucleotide primer for the detection of SNP TSC0002829
gtaatgtttaaa

SEQ ID NO: 272481 - DNA, 12 bp, Artificial Sequence
  Oligonucleotide primer for the detection of SNP TSC0002830
attataaaaatt

SEQ ID NO: 272482 - DNA, 12 bp, Artificial Sequence
  Oligonucleotide primer for the detection of SNP TSC0002830
aaaaattgagta

SEQ ID NO: 272483 - DNA, 12 bp, Artificial Sequence
  Oligonucleotide primer for the detection of SNP TSC0002831
atctcctctaac

SEQ ID NO: 272484 - DNA, 12 bp, Artificial Sequence
  Oligonucleotide primer for the detection of SNP TSC0002831
agttgaaagggg

SEQ ID NO: 272485 - DNA, 12 bp, Artificial Sequence
  Oligonucleotide primer for the detection of SNP TSC0002831
gttttttttggt

SEQ ID NO: 272486 - DNA, 12 bp, Artificial Sequence
  Oligonucleotide primer for the detection of SNP TSC0002831
gttttttttggc

SEQ ID NO: 272487 - DNA, 12 bp, Artificial Sequence
  Oligonucleotide primer for the detection of SNP TSC0002832
tacataccaccc

SEQ ID NO: 272488 - DNA, 12 bp, Artificial Sequence
  Oligonucleotide primer for the detection of SNP TSC0002832
aaaattagttgg

SEQ ID NO: 272489 - DNA, 12 bp, Artificial Sequence
  Oligonucleotide primer for the detection of SNP TSC0002833
aatatcatcctt

SEQ ID NO: 272490 - DNA, 12 bp, Artificial Sequence
  Oligonucleotide primer for the detection of SNP TSC0002833
ggtaaagagtta

SEQ ID NO: 272491 - DNA, 12 bp, Artificial Sequence
  Oligonucleotide primer for the detection of SNP TSC0002834
atttacctaatc

SEQ ID NO: 272492 - DNA, 12 bp, Artificial Sequence
  Oligonucleotide primer for the detection of SNP TSC0002834
aataattatata

SEQ ID NO: 272493 - DNA, 12 bp, Artificial Sequence
  Oligonucleotide primer for the detection of SNP TSC0002835
aaataactacta

SEQ ID NO: 272494 - DNA, 12 bp, Artificial Sequence
  Oligonucleotide primer for the detection of SNP TSC0002835
taagtttttttg

SEQ ID NO: 272495 - DNA, 12 bp, Artificial Sequence
  Oligonucleotide primer for the detection of SNP TSC0002835
caaatctttcta

SEQ ID NO: 272496 - DNA, 12 bp, Artificial Sequence
  Oligonucleotide primer for the detection of SNP TSC0002835
agggtgattatt

SEQ ID NO: 272497 - DNA, 12 bp, Artificial Sequence
  Oligonucleotide primer for the detection of SNP TSC0002836
ttttctttatat

SEQ ID NO: 272498 - DNA, 12 bp, Artificial Sequence
  Oligonucleotide primer for the detection of SNP TSC0002836
ttgaatagtaga

SEQ ID NO: 272499 - DNA, 12 bp, Artificial Sequence
  Oligonucleotide primer for the detection of SNP TSC0002837
ttaacttaacaa

SEQ ID NO: 272500 - DNA, 12 bp, Artificial Sequence
  Oligonucleotide primer for the detection of SNP TSC0002837
gtgggtgagaag

SEQ ID NO: 272501 - DNA, 12 bp, Artificial Sequence
  Oligonucleotide primer for the detection of SNP TSC0002837
tagtttgataat

SEQ ID NO: 272502 - DNA, 12 bp, Artificial Sequence
  Oligonucleotide primer for the detection of SNP TSC0002838
aatctcactcta

SEQ ID NO: 272503 - DNA, 12 bp, Artificial Sequence
  Oligonucleotide primer for the detection of SNP TSC0002838
aatctcgctcta

SEQ ID NO: 272504 - DNA, 12 bp, Artificial Sequence
  Oligonucleotide primer for the detection of SNP TSC0002838
gtattttagttt

SEQ ID NO: 272505 - DNA, 12 bp, Artificial Sequence
  Oligonucleotide primer for the detection of SNP TSC0002838
acactccaacct

SEQ ID NO: 272506 - DNA, 12 bp, Artificial Sequence
  Oligonucleotide primer for the detection of SNP TSC0002838
agttttgttttg

SEQ ID NO: 272507 - DNA, 12 bp, Artificial Sequence
  Oligonucleotide primer for the detection of SNP TSC0002838
agtttcgttttg

SEQ ID NO: 272508 - DNA, 12 bp, Artificial Sequence
  Oligonucleotide primer for the detection of SNP TSC0002839
aattcccaactc

SEQ ID NO: 272509 - DNA, 12 bp, Artificial Sequence
  Oligonucleotide primer for the detection of SNP TSC0002839
tgttagatattg

SEQ ID NO: 272510 - DNA, 12 bp, Artificial Sequence
  Oligonukleotid-Primer
tactaaatacta

SEQ ID NO: 272511 - DNA, 12 bp, Artificial Sequence
  Oligonucleotide primer for the detection of SNP TSC0002839
agtttttagttt

SEQ ID NO: 272512 - DNA, 12 bp, Artificial Sequence
  Oligonucleotide primer for the detection of SNP TSC0002841
cctttttcaaat

SEQ ID NO: 272513 - DNA, 12 bp, Artificial Sequence
  Oligonucleotide primer for the detection of SNP TSC0002841
ttatgttgaatg

SEQ ID NO: 272514 - DNA, 12 bp, Artificial Sequence
  Oligonucleotide primer for the detection of SNP TSC0002842
tactccaatatc

SEQ ID NO: 272515 - DNA, 12 bp, Artificial Sequence
  Oligonucleotide primer for the detection of SNP TSC0002842
tttattaataga

SEQ ID NO: 272516 - DNA, 12 bp, Artificial Sequence
  Oligonucleotide primer for the detection of SNP TSC0002843
tacctaaaaaat

SEQ ID NO: 272517 - DNA, 12 bp, Artificial Sequence
  Oligonucleotide primer for the detection of SNP TSC0002843
ttttttttaagg

SEQ ID NO: 272518 - DNA, 12 bp, Artificial Sequence
  Oligonucleotide primer for the detection of SNP TSC0002844
aaaatagttgga

SEQ ID NO: 272519 - DNA, 12 bp, Artificial Sequence
  Oligonucleotide primer for the detection of SNP TSC0002844
aaaataattaaa

SEQ ID NO: 272520 - DNA, 12 bp, Artificial Sequence
  Oligonucleotide primer for the detection of SNP TSC0002845
cctactcccccc

SEQ ID NO: 272521 - DNA, 12 bp, Artificial Sequence
  Oligonucleotide primer for the detection of SNP TSC0002845
ttggggatggaa

SEQ ID NO: 272522 - DNA, 12 bp, Artificial Sequence
  Oligonucleotide primer for the detection of SNP TSC0002846
atctaaaaatac

SEQ ID NO: 272523 - DNA, 12 bp, Artificial Sequence
  Oligonucleotide primer for the detection of SNP TSC0002846
tattagatttga

SEQ ID NO: 272524 - DNA, 12 bp, Artificial Sequence
  Oligonucleotide primer for the detection of SNP TSC0002847
ttaattttttta

SEQ ID NO: 272525 - DNA, 12 bp, Artificial Sequence
  Oligonucleotide primer for the detection of SNP TSC0002847
taattctctcaa

SEQ ID NO: 272526 - DNA, 12 bp, Artificial Sequence
  Oligonukleotid-Primer
ggaagttgaagt

SEQ ID NO: 272527 - DNA, 12 bp, Artificial Sequence
  Oligonucleotide primer for the detection of SNP TSC0002848
taaaaaaccaaa

SEQ ID NO: 272528 - DNA, 12 bp, Artificial Sequence
  Oligonucleotide primer for the detection of SNP TSC0002848
taaaagattagg

SEQ ID NO: 272529 - DNA, 12 bp, Artificial Sequence
  Oligonucleotide primer for the detection of SNP TSC0002849
aaaaattaaaaa

SEQ ID NO: 272530 - DNA, 12 bp, Artificial Sequence
  Oligonukleotid-Primer
tagttgttaaga

SEQ ID NO: 272531 - DNA, 12 bp, Artificial Sequence
  Oligonucleotide primer for the detection of SNP TSC0002849
tagtcgttaaga

SEQ ID NO: 272532 - DNA, 12 bp, Artificial Sequence
  Oligonucleotide primer for the detection of SNP TSC0002849
accaccaaaaaa

SEQ ID NO: 272533 - DNA, 12 bp, Artificial Sequence
  Oligonucleotide primer for the detection of SNP TSC0002849
accgccaaaaaa

SEQ ID NO: 272534 - DNA, 12 bp, Artificial Sequence
  Oligonucleotide primer for the detection of SNP TSC0002849
gagattagaaat

SEQ ID NO: 272535 - DNA, 12 bp, Artificial Sequence
  Oligonucleotide primer for the detection of SNP TSC0002849
gagattagaaac

SEQ ID NO: 272536 - DNA, 12 bp, Artificial Sequence
  Oligonucleotide primer for the detection of SNP TSC0002850
acaaaaaaattt

SEQ ID NO: 272537 - DNA, 12 bp, Artificial Sequence
  Oligonucleotide primer for the detection of SNP TSC0002850
tagtgttggaga

SEQ ID NO: 272538 - DNA, 12 bp, Artificial Sequence
  Oligonucleotide primer for the detection of SNP TSC0002851
acactaatacct

SEQ ID NO: 272539 - DNA, 12 bp, Artificial Sequence
  Oligonucleotide primer for the detection of SNP TSC0002851
gttattttagta

SEQ ID NO: 272540 - DNA, 12 bp, Artificial Sequence
  Oligonucleotide primer for the detection of SNP TSC0002851
atcatctcaaca

SEQ ID NO: 272541 - DNA, 12 bp, Artificial Sequence
  Oligonucleotide primer for the detection of SNP TSC0002851
gtattggtattt

SEQ ID NO: 272542 - DNA, 12 bp, Artificial Sequence
  Oligonucleotide primer for the detection of SNP TSC0002852
aaaaatacatac

SEQ ID NO: 272543 - DNA, 12 bp, Artificial Sequence
  Oligonucleotide primer for the detection of SNP TSC0002852
tgtttaaggata

SEQ ID NO: 272544 - DNA, 12 bp, Artificial Sequence
  Oligonucleotide primer for the detection of SNP TSC0002852
tacctaaaaata

SEQ ID NO: 272545 - DNA, 12 bp, Artificial Sequence
  Oligonucleotide primer for the detection of SNP TSC0002852
aaagatgtatgt

SEQ ID NO: 272546 - DNA, 12 bp, Artificial Sequence
  Oligonucleotide primer for the detection of SNP TSC0002853
ttataatacacc

SEQ ID NO: 272547 - DNA, 12 bp, Artificial Sequence
  Oligonucleotide primer for the detection of SNP TSC0002853
aaagtatatatt

SEQ ID NO: 272548 - DNA, 12 bp, Artificial Sequence
  Oligonucleotide primer for the detection of SNP TSC0002855
aaaaaacatttt

SEQ ID NO: 272549 - DNA, 12 bp, Artificial Sequence
  Oligonucleotide primer for the detection of SNP TSC0002855
tagtgtagtatg

SEQ ID NO: 272550 - DNA, 12 bp, Artificial Sequence
  Oligonucleotide primer for the detection of SNP TSC0002856
tactcttttcat

SEQ ID NO: 272551 - DNA, 12 bp, Artificial Sequence
  Oligonucleotide primer for the detection of SNP TSC0002856
tgttaaagttta

SEQ ID NO: 272552 - DNA, 12 bp, Artificial Sequence
  Oligonucleotide primer for the detection of SNP TSC0002856
atcaaaacccaa

SEQ ID NO: 272553 - DNA, 12 bp, Artificial Sequence
  Oligonucleotide primer for the detection of SNP TSC0002856
tgttttttttat

SEQ ID NO: 272554 - DNA, 12 bp, Artificial Sequence
  Oligonucleotide primer for the detection of SNP TSC0002857
ttattattactc

SEQ ID NO: 272555 - DNA, 12 bp, Artificial Sequence
  Oligonucleotide primer for the detection of SNP TSC0002857
gatttgtattta

SEQ ID NO: 272556 - DNA, 12 bp, Artificial Sequence
  Oligonucleotide primer for the detection of SNP TSC0002858
taacttaaacta

SEQ ID NO: 272557 - DNA, 12 bp, Artificial Sequence
  Oligonucleotide primer for the detection of SNP TSC0002858
agagagtattat

SEQ ID NO: 272558 - DNA, 12 bp, Artificial Sequence
  Oligonucleotide primer for the detection of SNP TSC0002858
aaaaaacatcac

SEQ ID NO: 272559 - DNA, 12 bp, Artificial Sequence
  Oligonucleotide primer for the detection of SNP TSC0002858
tggtttgaatta

SEQ ID NO: 272560 - DNA, 12 bp, Artificial Sequence
  Oligonucleotide primer for the detection of SNP TSC0002859
actttaaaatcc

SEQ ID NO: 272561 - DNA, 12 bp, Artificial Sequence
  Oligonucleotide primer for the detection of SNP TSC0002859
ttttatttagta

SEQ ID NO: 272562 - DNA, 12 bp, Artificial Sequence
  Oligonucleotide primer for the detection of SNP TSC0002860
ttaaccaaatac

SEQ ID NO: 272563 - DNA, 12 bp, Artificial Sequence
  Oligonucleotide primer for the detection of SNP TSC0002860
tttttaaaagta

SEQ ID NO: 272564 - DNA, 12 bp, Artificial Sequence
  Oligonucleotide primer for the detection of SNP TSC0002861
caacctaaacaa

SEQ ID NO: 272565 - DNA, 12 bp, Artificial Sequence
  Oligonucleotide primer for the detection of SNP TSC0002861
caacctaaacga

SEQ ID NO: 272566 - DNA, 12 bp, Artificial Sequence
  Oligonucleotide primer for the detection of SNP TSC0002861
agagttttgttt

SEQ ID NO: 272567 - DNA, 12 bp, Artificial Sequence
  Oligonucleotide primer for the detection of SNP TSC0002861
aaaatcttactc

SEQ ID NO: 272568 - DNA, 12 bp, Artificial Sequence
  Oligonucleotide primer for the detection of SNP TSC0002861
tagtttgggtga

SEQ ID NO: 272569 - DNA, 12 bp, Artificial Sequence
  Oligonucleotide primer for the detection of SNP TSC0002861
tagtttgggcga

SEQ ID NO: 272570 - DNA, 12 bp, Artificial Sequence
  Oligonucleotide primer for the detection of SNP TSC0002862
cataacacaacc

SEQ ID NO: 272571 - DNA, 12 bp, Artificial Sequence
  Oligonucleotide primer for the detection of SNP TSC0002862
ttagtagagatg

SEQ ID NO: 272572 - DNA, 12 bp, Artificial Sequence
  Oligonucleotide primer for the detection of SNP TSC0002862
ttagtagagacg

SEQ ID NO: 272573 - DNA, 12 bp, Artificial Sequence
  Oligonucleotide primer for the detection of SNP TSC0002863
aaaagtttaaaa

SEQ ID NO: 272574 - DNA, 12 bp, Artificial Sequence
  Oligonucleotide primer for the detection of SNP TSC0002863
aaaaatccaaaa

SEQ ID NO: 272575 - DNA, 12 bp, Artificial Sequence
  Oligonucleotide primer for the detection of SNP TSC0002863
ttgttttttttt

SEQ ID NO: 272576 - DNA, 12 bp, Artificial Sequence
  Oligonucleotide primer for the detection of SNP TSC0002864
tttaaaaaaaaa

SEQ ID NO: 272577 - DNA, 12 bp, Artificial Sequence
  Oligonucleotide primer for the detection of SNP TSC0002864
ttgttttgtttt

SEQ ID NO: 272578 - DNA, 12 bp, Artificial Sequence
  Oligonucleotide primer for the detection of SNP TSC0002865
aatacaaattat

SEQ ID NO: 272579 - DNA, 12 bp, Artificial Sequence
  Oligonucleotide primer for the detection of SNP TSC0002865
atagaataataa

SEQ ID NO: 272580 - DNA, 12 bp, Artificial Sequence
  Oligonucleotide primer for the detection of SNP TSC0002866
ctacaacaccat

SEQ ID NO: 272581 - DNA, 12 bp, Artificial Sequence
  Oligonucleotide primer for the detection of SNP TSC0002866
ttgttggtagaa

SEQ ID NO: 272582 - DNA, 12 bp, Artificial Sequence
  Oligonucleotide primer for the detection of SNP TSC0002866
ttattaacaaaa

SEQ ID NO: 272583 - DNA, 12 bp, Artificial Sequence
  Oligonucleotide primer for the detection of SNP TSC0002866
ttatagtattat

SEQ ID NO: 272584 - DNA, 12 bp, Artificial Sequence
  Oligonucleotide primer for the detection of SNP TSC0002867
attactataaac

SEQ ID NO: 272585 - DNA, 12 bp, Artificial Sequence
  Oligonucleotide primer for the detection of SNP TSC0002867
gtaatggtaaaa

SEQ ID NO: 272586 - DNA, 12 bp, Artificial Sequence
  Oligonucleotide primer for the detection of SNP TSC0002867
acaataacaaaa

SEQ ID NO: 272587 - DNA, 12 bp, Artificial Sequence
  Oligonucleotide primer for the detection of SNP TSC0002867
gttgttgtgagt

SEQ ID NO: 272588 - DNA, 12 bp, Artificial Sequence
  Oligonucleotide primer for the detection of SNP TSC0002868
aatcccaacact

SEQ ID NO: 272589 - DNA, 12 bp, Artificial Sequence
  Oligonucleotide primer for the detection of SNP TSC0002868
tttagtttttta

SEQ ID NO: 272590 - DNA, 12 bp, Artificial Sequence
  Oligonucleotide primer for the detection of SNP TSC0002869
tacatactcttt

SEQ ID NO: 272591 - DNA, 12 bp, Artificial Sequence
  Oligonucleotide primer for the detection of SNP TSC0002869
ttggaggtagga

SEQ ID NO: 272592 - DNA, 12 bp, Artificial Sequence
  Oligonucleotide primer for the detection of SNP TSC0002870
aaacaaactacc

SEQ ID NO: 272593 - DNA, 12 bp, Artificial Sequence
  Oligonucleotide primer for the detection of SNP TSC0002870
aatttaatgaag

SEQ ID NO: 272594 - DNA, 12 bp, Artificial Sequence
  Oligonucleotide primer for the detection of SNP TSC0002871
tatcctacctac

SEQ ID NO: 272595 - DNA, 12 bp, Artificial Sequence
  Oligonucleotide primer for the detection of SNP TSC0002871
agtgttaaggga

SEQ ID NO: 272596 - DNA, 12 bp, Artificial Sequence
  Oligonucleotide primer for the detection of SNP TSC0002872
aaataaatacat

SEQ ID NO: 272597 - DNA, 12 bp, Artificial Sequence
  Oligonucleotide primer for the detection of SNP TSC0002872
aaataaatacgt

SEQ ID NO: 272598 - DNA, 12 bp, Artificial Sequence
  Oligonucleotide primer for the detection of SNP TSC0002872
aagaaatagaaa

SEQ ID NO: 272599 - DNA, 12 bp, Artificial Sequence
  Oligonucleotide primer for the detection of SNP TSC0002873
tctctaaacaaa

SEQ ID NO: 272600 - DNA, 12 bp, Artificial Sequence
  Oligonucleotide primer for the detection of SNP TSC0002873
atttgaatagat

SEQ ID NO: 272601 - DNA, 12 bp, Artificial Sequence
  Oligonucleotide primer for the detection of SNP TSC0002873
attcgaatagat

SEQ ID NO: 272602 - DNA, 12 bp, Artificial Sequence
  Oligonucleotide primer for the detection of SNP TSC0002873
actcaaacaaat

SEQ ID NO: 272603 - DNA, 12 bp, Artificial Sequence
  Oligonucleotide primer for the detection of SNP TSC0002873
actcgaacaaat

SEQ ID NO: 272604 - DNA, 12 bp, Artificial Sequence
  Oligonucleotide primer for the detection of SNP TSC0002873
tttttaggtaaa

SEQ ID NO: 272605 - DNA, 12 bp, Artificial Sequence
  Oligonucleotide primer for the detection of SNP TSC0002874
taaaaatcaaca

SEQ ID NO: 272606 - DNA, 12 bp, Artificial Sequence
  Oligonucleotide primer for the detection of SNP TSC0002874
atagtaattgta

SEQ ID NO: 272607 - DNA, 12 bp, Artificial Sequence
  Oligonucleotide primer for the detection of SNP TSC0002874
ataattacaaaa

SEQ ID NO: 272608 - DNA, 12 bp, Artificial Sequence
  Oligonucleotide primer for the detection of SNP TSC0002874
ttgaaaattaat

SEQ ID NO: 272609 - DNA, 12 bp, Artificial Sequence
  Oligonucleotide primer for the detection of SNP TSC0002875
ttattaaaaacc

SEQ ID NO: 272610 - DNA, 12 bp, Artificial Sequence
  Oligonucleotide primer for the detection of SNP TSC0002875
gaaggttaatta

SEQ ID NO: 272611 - DNA, 12 bp, Artificial Sequence
  Oligonucleotide primer for the detection of SNP TSC0002876
ttccttctacct

SEQ ID NO: 272612 - DNA, 12 bp, Artificial Sequence
  Oligonucleotide primer for the detection of SNP TSC0002876
agaaaaaaagga

SEQ ID NO: 272613 - DNA, 12 bp, Artificial Sequence
  Oligonucleotide primer for the detection of SNP TSC0002877
caatcaaaaact

SEQ ID NO: 272614 - DNA, 12 bp, Artificial Sequence
  Oligonucleotide primer for the detection of SNP TSC0002877
ttgggaaagttt

SEQ ID NO: 272615 - DNA, 12 bp, Artificial Sequence
  Oligonucleotide primer for the detection of SNP TSC0002877
tctaaaaaaacc

SEQ ID NO: 272616 - DNA, 12 bp, Artificial Sequence
  Oligonucleotide primer for the detection of SNP TSC0002877
tagttaagagtt

SEQ ID NO: 272617 - DNA, 12 bp, Artificial Sequence
  Oligonucleotide primer for the detection of SNP TSC0002880
cttacaaatctc

SEQ ID NO: 272618 - DNA, 12 bp, Artificial Sequence
  Oligonucleotide primer for the detection of SNP TSC0002880
ttgtatatatta

SEQ ID NO: 272619 - DNA, 12 bp, Artificial Sequence
  Oligonucleotide primer for the detection of SNP TSC0002881
attcaaattaat

SEQ ID NO: 272620 - DNA, 12 bp, Artificial Sequence
  Oligonucleotide primer for the detection of SNP TSC0002881
atgaaaataatg

SEQ ID NO: 272621 - DNA, 12 bp, Artificial Sequence
  Oligonucleotide primer for the detection of SNP TSC0002882
taatttattgat

SEQ ID NO: 272622 - DNA, 12 bp, Artificial Sequence
  Oligonucleotide primer for the detection of SNP TSC0002882
taatttatcgat

SEQ ID NO: 272623 - DNA, 12 bp, Artificial Sequence
  Oligonucleotide primer for the detection of SNP TSC0002882
taatttattgac

SEQ ID NO: 272624 - DNA, 12 bp, Artificial Sequence
  Oligonucleotide primer for the detection of SNP TSC0002882
taatttatcgac

SEQ ID NO: 272625 - DNA, 12 bp, Artificial Sequence
  Oligonucleotide primer for the detection of SNP TSC0002882
ataattcatcaa

SEQ ID NO: 272626 - DNA, 12 bp, Artificial Sequence
  Oligonucleotide primer for the detection of SNP TSC0002882
ataattcatcga

SEQ ID NO: 272627 - DNA, 12 bp, Artificial Sequence
  Oligonukleotid-Primer
aagaaattttga

SEQ ID NO: 272628 - DNA, 12 bp, Artificial Sequence
  Oligonucleotide primer for the detection of SNP TSC0002883
tttcttactact

SEQ ID NO: 272629 - DNA, 12 bp, Artificial Sequence
  Oligonucleotide primer for the detection of SNP TSC0002883
tttatgtgaata

SEQ ID NO: 272630 - DNA, 12 bp, Artificial Sequence
  Oligonucleotide primer for the detection of SNP TSC0002884
ataccctaatac

SEQ ID NO: 272631 - DNA, 12 bp, Artificial Sequence
  Oligonukleotid-Primer
gtaccctaatac

SEQ ID NO: 272632 - DNA, 12 bp, Artificial Sequence
  Oligonucleotide primer for the detection of SNP TSC0002884
gttgaaaattta

SEQ ID NO: 272633 - DNA, 12 bp, Artificial Sequence
  Oligonucleotide primer for the detection of SNP TSC0002885
aaaacaaaaaaa

SEQ ID NO: 272634 - DNA, 12 bp, Artificial Sequence
  Oligonucleotide primer for the detection of SNP TSC0002885
tgtgggttattt

SEQ ID NO: 272635 - DNA, 12 bp, Artificial Sequence
  Oligonucleotide primer for the detection of SNP TSC0002885
tataaattattc

SEQ ID NO: 272636 - DNA, 12 bp, Artificial Sequence
  Oligonucleotide primer for the detection of SNP TSC0002885
aagataaaggag

SEQ ID NO: 272637 - DNA, 12 bp, Artificial Sequence
  Oligonucleotide primer for the detection of SNP TSC0002886
cactactaatcc

SEQ ID NO: 272638 - DNA, 12 bp, Artificial Sequence
  Oligonucleotide primer for the detection of SNP TSC0002886
cgctactaatcc

SEQ ID NO: 272639 - DNA, 12 bp, Artificial Sequence
  Oligonucleotide primer for the detection of SNP TSC0002886
tttaaggtgtgg

SEQ ID NO: 272640 - DNA, 12 bp, Artificial Sequence
  Oligonucleotide primer for the detection of SNP TSC0002886
tttaaggtgcgg

SEQ ID NO: 272641 - DNA, 12 bp, Artificial Sequence
  Oligonucleotide primer for the detection of SNP TSC0002887
tataaaaacaat

SEQ ID NO: 272642 - DNA, 12 bp, Artificial Sequence
  Oligonucleotide primer for the detection of SNP TSC0002887
tataaatgttag

SEQ ID NO: 272643 - DNA, 12 bp, Artificial Sequence
  Oligonucleotide primer for the detection of SNP TSC0002887
tataaacgttag

SEQ ID NO: 272644 - DNA, 12 bp, Artificial Sequence
  Oligonucleotide primer for the detection of SNP TSC0002888
ctcctaaaccaa

SEQ ID NO: 272645 - DNA, 12 bp, Artificial Sequence
  Oligonucleotide primer for the detection of SNP TSC0002888
gtttgtggtttt

SEQ ID NO: 272646 - DNA, 12 bp, Artificial Sequence
  Oligonucleotide primer for the detection of SNP TSC0002888
gttcgtggtttt

SEQ ID NO: 272647 - DNA, 12 bp, Artificial Sequence
  Oligonucleotide primer for the detection of SNP TSC0002888
gtttgtggtttc

SEQ ID NO: 272648 - DNA, 12 bp, Artificial Sequence
  Oligonucleotide primer for the detection of SNP TSC0002888
gttcgtggtttc

SEQ ID NO: 272649 - DNA, 12 bp, Artificial Sequence
  Oligonucleotide primer for the detection of SNP TSC0002888
attcataatctc

SEQ ID NO: 272650 - DNA, 12 bp, Artificial Sequence
  Oligonucleotide primer for the detection of SNP TSC0002888
attcgtaatctc

SEQ ID NO: 272651 - DNA, 12 bp, Artificial Sequence
  Oligonucleotide primer for the detection of SNP TSC0002888
tttttgagttag

SEQ ID NO: 272652 - DNA, 12 bp, Artificial Sequence
  Oligonucleotide primer for the detection of SNP TSC0002889
aacaactccaaa

SEQ ID NO: 272653 - DNA, 12 bp, Artificial Sequence
  Oligonucleotide primer for the detection of SNP TSC0002889
ttttaaggtggt

SEQ ID NO: 272654 - DNA, 12 bp, Artificial Sequence
  Oligonucleotide primer for the detection of SNP TSC0002889
ttttaaggtggc

SEQ ID NO: 272655 - DNA, 12 bp, Artificial Sequence
  Oligonucleotide primer for the detection of SNP TSC0002889
tcttaaaataac

SEQ ID NO: 272656 - DNA, 12 bp, Artificial Sequence
  Oligonucleotide primer for the detection of SNP TSC0002889
aataattttagg

SEQ ID NO: 272657 - DNA, 12 bp, Artificial Sequence
  Oligonucleotide primer for the detection of SNP TSC0002891
aaaccctatctc

SEQ ID NO: 272658 - DNA, 12 bp, Artificial Sequence
  Oligonucleotide primer for the detection of SNP TSC0002892
caaaccttatct

SEQ ID NO: 272659 - DNA, 12 bp, Artificial Sequence
  Oligonucleotide primer for the detection of SNP TSC0002892
ggtatataggta

SEQ ID NO: 272660 - DNA, 12 bp, Artificial Sequence
  Oligonucleotide primer for the detection of SNP TSC0002893
ttttctcatttt

SEQ ID NO: 272661 - DNA, 12 bp, Artificial Sequence
  Oligonucleotide primer for the detection of SNP TSC0002893
ttttagattaat

SEQ ID NO: 272662 - DNA, 12 bp, Artificial Sequence
  Oligonucleotide primer for the detection of SNP TSC0002894
ttattaaataat

SEQ ID NO: 272663 - DNA, 12 bp, Artificial Sequence
  Oligonucleotide primer for the detection of SNP TSC0002894
gtagtttatgga

SEQ ID NO: 272664 - DNA, 12 bp, Artificial Sequence
  Oligonucleotide primer for the detection of SNP TSC0002894
ataacccataaa

SEQ ID NO: 272665 - DNA, 12 bp, Artificial Sequence
  Oligonucleotide primer for the detection of SNP TSC0002894
ttattgaatgat

SEQ ID NO: 272666 - DNA, 12 bp, Artificial Sequence
  Oligonucleotide primer for the detection of SNP TSC0002895
agataattggtt

SEQ ID NO: 272667 - DNA, 12 bp, Artificial Sequence
  Oligonucleotide primer for the detection of SNP TSC0002895
aaacaattaacc

SEQ ID NO: 272668 - DNA, 12 bp, Artificial Sequence
  Oligonucleotide primer for the detection of SNP TSC0002895
taagaggtagaa

SEQ ID NO: 272669 - DNA, 12 bp, Artificial Sequence
  Oligonucleotide primer for the detection of SNP TSC0002896
aatcttcctaaa

SEQ ID NO: 272670 - DNA, 12 bp, Artificial Sequence
  Oligonucleotide primer for the detection of SNP TSC0002896
ttttattttatt

SEQ ID NO: 272671 - DNA, 12 bp, Artificial Sequence
  Oligonucleotide primer for the detection of SNP TSC0002896
tcttactttatc

SEQ ID NO: 272672 - DNA, 12 bp, Artificial Sequence
  Oligonucleotide primer for the detection of SNP TSC0002896
agtttttttgaa

SEQ ID NO: 272673 - DNA, 12 bp, Artificial Sequence
  Oligonucleotide primer for the detection of SNP TSC0002897
tataagtggtgg

SEQ ID NO: 272674 - DNA, 12 bp, Artificial Sequence
  Oligonucleotide primer for the detection of SNP TSC0002897
tataagcggtgg

SEQ ID NO: 272675 - DNA, 12 bp, Artificial Sequence
  Oligonucleotide primer for the detection of SNP TSC0002898
aaattataaaaa

SEQ ID NO: 272676 - DNA, 12 bp, Artificial Sequence
  Oligonucleotide primer for the detection of SNP TSC0002898
attatggtagat

SEQ ID NO: 272677 - DNA, 12 bp, Artificial Sequence
  Oligonucleotide primer for the detection of SNP TSC0002898
taccataataaa

SEQ ID NO: 272678 - DNA, 12 bp, Artificial Sequence
  Oligonucleotide primer for the detection of SNP TSC0002898
aagttgtagaag

SEQ ID NO: 272679 - DNA, 12 bp, Artificial Sequence
  Oligonucleotide primer for the detection of SNP TSC0002899
acaaaaccactc

SEQ ID NO: 272680 - DNA, 12 bp, Artificial Sequence
  Oligonucleotide primer for the detection of SNP TSC0002899
taaataatttga

SEQ ID NO: 272681 - DNA, 12 bp, Artificial Sequence
  Oligonucleotide primer for the detection of SNP TSC0002900
aaaattaaaaat

SEQ ID NO: 272682 - DNA, 12 bp, Artificial Sequence
  Oligonucleotide primer for the detection of SNP TSC0002900
ttagttatatta

SEQ ID NO: 272683 - DNA, 12 bp, Artificial Sequence
  Oligonucleotide primer for the detection of SNP TSC0002901
ccacattatcaa

SEQ ID NO: 272684 - DNA, 12 bp, Artificial Sequence
  Oligonucleotide primer for the detection of SNP TSC0002901
ttttaaaggggg

SEQ ID NO: 272685 - DNA, 12 bp, Artificial Sequence
  Oligonucleotide primer for the detection of SNP TSC0002901
ttccaaaaaaaa

SEQ ID NO: 272686 - DNA, 12 bp, Artificial Sequence
  Oligonucleotide primer for the detection of SNP TSC0002901
ttatattattag

SEQ ID NO: 272687 - DNA, 12 bp, Artificial Sequence
  Oligonucleotide primer for the detection of SNP TSC0002906
aaacatcttaca

SEQ ID NO: 272688 - DNA, 12 bp, Artificial Sequence
  Oligonucleotide primer for the detection of SNP TSC0002906
tttgatttatat

SEQ ID NO: 272689 - DNA, 12 bp, Artificial Sequence
  Oligonucleotide primer for the detection of SNP TSC0002906
tttaattcatat

SEQ ID NO: 272690 - DNA, 12 bp, Artificial Sequence
  Oligonucleotide primer for the detection of SNP TSC0002906
gaatattttgta

SEQ ID NO: 272691 - DNA, 12 bp, Artificial Sequence
  Oligonucleotide primer for the detection of SNP TSC0002907
atttataccctc

SEQ ID NO: 272692 - DNA, 12 bp, Artificial Sequence
  Oligonucleotide primer for the detection of SNP TSC0002907
tgatttgtttag

SEQ ID NO: 272693 - DNA, 12 bp, Artificial Sequence
  Oligonucleotide primer for the detection of SNP TSC0002907
cgatttgtttag

SEQ ID NO: 272694 - DNA, 12 bp, Artificial Sequence
  Oligonucleotide primer for the detection of SNP TSC0002907
caatctattcaa

SEQ ID NO: 272695 - DNA, 12 bp, Artificial Sequence
  Oligonucleotide primer for the detection of SNP TSC0002907
cgatctattcaa

SEQ ID NO: 272696 - DNA, 12 bp, Artificial Sequence
  Oligonucleotide primer for the detection of SNP TSC0002908
tcttactttaac

SEQ ID NO: 272697 - DNA, 12 bp, Artificial Sequence
  Oligonucleotide primer for the detection of SNP TSC0002908
ggagtttagatt

SEQ ID NO: 272698 - DNA, 12 bp, Artificial Sequence
  Oligonucleotide primer for the detection of SNP TSC0002908
aaaaacctaaac

SEQ ID NO: 272699 - DNA, 12 bp, Artificial Sequence
  Oligonucleotide primer for the detection of SNP TSC0002908
ttttattttaat

SEQ ID NO: 272700 - DNA, 12 bp, Artificial Sequence
  Oligonucleotide primer for the detection of SNP TSC0002908
ttttattttaac

SEQ ID NO: 272701 - DNA, 12 bp, Artificial Sequence
  Oligonucleotide primer for the detection of SNP TSC0002909
accctaacccat

SEQ ID NO: 272702 - DNA, 12 bp, Artificial Sequence
  Oligonucleotide primer for the detection of SNP TSC0002909
ttttatattttg

SEQ ID NO: 272703 - DNA, 12 bp, Artificial Sequence
  Oligonucleotide primer for the detection of SNP TSC0002910
cctaccctaata

SEQ ID NO: 272704 - DNA, 12 bp, Artificial Sequence
  Oligonucleotide primer for the detection of SNP TSC0002910
tttgggttgttt

SEQ ID NO: 272705 - DNA, 12 bp, Artificial Sequence
  Oligonucleotide primer for the detection of SNP TSC0002910
cttaaactacct

SEQ ID NO: 272706 - DNA, 12 bp, Artificial Sequence
  Oligonucleotide primer for the detection of SNP TSC0002910
tttattttgatg

SEQ ID NO: 272707 - DNA, 12 bp, Artificial Sequence
  Oligonucleotide primer for the detection of SNP TSC0002911
ttaatttcttat

SEQ ID NO: 272708 - DNA, 12 bp, Artificial Sequence
  Oligonukleotid-Primer
aagttaataatg

SEQ ID NO: 272709 - DNA, 12 bp, Artificial Sequence
  Oligonucleotide primer for the detection of SNP TSC0002912
tcaactaaacat

SEQ ID NO: 272710 - DNA, 12 bp, Artificial Sequence
  Oligonucleotide primer for the detection of SNP TSC0002912
agtgttattttt

SEQ ID NO: 272711 - DNA, 12 bp, Artificial Sequence
  Oligonucleotide primer for the detection of SNP TSC0002913
tataacaataaa

SEQ ID NO: 272712 - DNA, 12 bp, Artificial Sequence
  Oligonukleotid-Primer
tataagttattt

SEQ ID NO: 272713 - DNA, 12 bp, Artificial Sequence
  Oligonucleotide primer for the detection of SNP TSC0002913
cacaaaccacct

SEQ ID NO: 272714 - DNA, 12 bp, Artificial Sequence
  Oligonucleotide primer for the detection of SNP TSC0002913
tatggtagtggg

SEQ ID NO: 272715 - DNA, 12 bp, Artificial Sequence
  Oligonucleotide primer for the detection of SNP TSC0002914
catacaaatatt

SEQ ID NO: 272716 - DNA, 12 bp, Artificial Sequence
  Oligonucleotide primer for the detection of SNP TSC0002914
acatacatatac

SEQ ID NO: 272717 - DNA, 12 bp, Artificial Sequence
  Oligonucleotide primer for the detection of SNP TSC0002914
tatatagatatt

SEQ ID NO: 272718 - DNA, 12 bp, Artificial Sequence
  Oligonucleotide primer for the detection of SNP TSC0002915
acatacaaatat

SEQ ID NO: 272719 - DNA, 12 bp, Artificial Sequence
  Oligonucleotide primer for the detection of SNP TSC0002915
catacatataca

SEQ ID NO: 272720 - DNA, 12 bp, Artificial Sequence
  Oligonucleotide primer for the detection of SNP TSC0002915
gtatatagatat

SEQ ID NO: 272721 - DNA, 12 bp, Artificial Sequence
  Oligonucleotide primer for the detection of SNP TSC0002916
gagagagagaaa

SEQ ID NO: 272722 - DNA, 12 bp, Artificial Sequence
  Oligonucleotide primer for the detection of SNP TSC0002917
tttaaaaacaac

SEQ ID NO: 272723 - DNA, 12 bp, Artificial Sequence
  Oligonucleotide primer for the detection of SNP TSC0002917
gaaagatatatg

SEQ ID NO: 272724 - DNA, 12 bp, Artificial Sequence
  Oligonucleotide primer for the detection of SNP TSC0002917
aaaaacacataa

SEQ ID NO: 272725 - DNA, 12 bp, Artificial Sequence
  Oligonucleotide primer for the detection of SNP TSC0002917
ttgaagataatt

SEQ ID NO: 272726 - DNA, 12 bp, Artificial Sequence
  Oligonucleotide primer for the detection of SNP TSC0002918
tataaccctact

SEQ ID NO: 272727 - DNA, 12 bp, Artificial Sequence
  Oligonucleotide primer for the detection of SNP TSC0002918
ttgttttagagg

SEQ ID NO: 272728 - DNA, 12 bp, Artificial Sequence
  Oligonucleotide primer for the detection of SNP TSC0002919
ataaatacaccc

SEQ ID NO: 272729 - DNA, 12 bp, Artificial Sequence
  Oligonucleotide primer for the detection of SNP TSC0002919
tgttttttggta

SEQ ID NO: 272730 - DNA, 12 bp, Artificial Sequence
  Oligonucleotide primer for the detection of SNP TSC0002919
tgtttttcggta

SEQ ID NO: 272731 - DNA, 12 bp, Artificial Sequence
  Oligonucleotide primer for the detection of SNP TSC0002920
taatcactacat

SEQ ID NO: 272732 - DNA, 12 bp, Artificial Sequence
  Oligonucleotide primer for the detection of SNP TSC0002920
aaatatttatga

SEQ ID NO: 272733 - DNA, 12 bp, Artificial Sequence
  Oligonucleotide primer for the detection of SNP TSC0002921
attcttaatttc

SEQ ID NO: 272734 - DNA, 12 bp, Artificial Sequence
  Oligonucleotide primer for the detection of SNP TSC0002921
ggttatttttaa

SEQ ID NO: 272735 - DNA, 12 bp, Artificial Sequence
  Oligonucleotide primer for the detection of SNP TSC0002923
aattcataaatt

SEQ ID NO: 272736 - DNA, 12 bp, Artificial Sequence
  Oligonucleotide primer for the detection of SNP TSC0002923
tatgtatagtta

SEQ ID NO: 272737 - DNA, 12 bp, Artificial Sequence
  Oligonucleotide primer for the detection of SNP TSC0002923
tatatacaatca

SEQ ID NO: 272738 - DNA, 12 bp, Artificial Sequence
  Oligonucleotide primer for the detection of SNP TSC0002923
ggtttatgagtt

SEQ ID NO: 272739 - DNA, 12 bp, Artificial Sequence
  Oligonucleotide primer for the detection of SNP TSC0002924
ttcatttttctt

SEQ ID NO: 272740 - DNA, 12 bp, Artificial Sequence
  Oligonucleotide primer for the detection of SNP TSC0002924
aaattagaaaaa

SEQ ID NO: 272741 - DNA, 12 bp, Artificial Sequence
  Oligonucleotide primer for the detection of SNP TSC0002925
tcatttttctta

SEQ ID NO: 272742 - DNA, 12 bp, Artificial Sequence
  Oligonucleotide primer for the detection of SNP TSC0002925
aattagaaaaaa

SEQ ID NO: 272743 - DNA, 12 bp, Artificial Sequence
  Oligonucleotide primer for the detection of SNP TSC0002925
aactaaaaaaaa

SEQ ID NO: 272744 - DNA, 12 bp, Artificial Sequence
  Oligonucleotide primer for the detection of SNP TSC0002925
ttattttttttg

SEQ ID NO: 272745 - DNA, 12 bp, Artificial Sequence
  Oligonucleotide primer for the detection of SNP TSC0002926
cacttcaccttt

SEQ ID NO: 272746 - DNA, 12 bp, Artificial Sequence
  Oligonucleotide primer for the detection of SNP TSC0002926
aaattaggtgta

SEQ ID NO: 272747 - DNA, 12 bp, Artificial Sequence
  Oligonucleotide primer for the detection of SNP TSC0002927
tattataataaa

SEQ ID NO: 272748 - DNA, 12 bp, Artificial Sequence
  Oligonucleotide primer for the detection of SNP TSC0002927
atttaaattaat

SEQ ID NO: 272749 - DNA, 12 bp, Artificial Sequence
  Oligonucleotide primer for the detection of SNP TSC0002927
tattataataga

SEQ ID NO: 272750 - DNA, 12 bp, Artificial Sequence
  Oligonucleotide primer for the detection of SNP TSC0002928
aaattaaacaat

SEQ ID NO: 272751 - DNA, 12 bp, Artificial Sequence
  Oligonucleotide primer for the detection of SNP TSC0002928
gtaatgttttat

SEQ ID NO: 272752 - DNA, 12 bp, Artificial Sequence
  Oligonucleotide primer for the detection of SNP TSC0002928
tataatatttta

SEQ ID NO: 272753 - DNA, 12 bp, Artificial Sequence
  Oligonucleotide primer for the detection of SNP TSC0002928
aaattgaataat

SEQ ID NO: 272754 - DNA, 12 bp, Artificial Sequence
  Oligonucleotide primer for the detection of SNP TSC0002929
cataattctcaa

SEQ ID NO: 272755 - DNA, 12 bp, Artificial Sequence
  Oligonucleotide primer for the detection of SNP TSC0002929
atattaaaatgt

SEQ ID NO: 272756 - DNA, 12 bp, Artificial Sequence
  Oligonucleotide primer for the detection of SNP TSC0002929
atattaaaatac

SEQ ID NO: 272757 - DNA, 12 bp, Artificial Sequence
  Oligonucleotide primer for the detection of SNP TSC0002929
atagtttttaat

SEQ ID NO: 272758 - DNA, 12 bp, Artificial Sequence
  Oligonucleotide primer for the detection of SNP TSC0002929
atagtttttaac

SEQ ID NO: 272759 - DNA, 12 bp, Artificial Sequence
  Oligonucleotide primer for the detection of SNP TSC0002930
ctttaccaaaca

SEQ ID NO: 272760 - DNA, 12 bp, Artificial Sequence
  Oligonucleotide primer for the detection of SNP TSC0002930
agtaaatttatt

SEQ ID NO: 272761 - DNA, 12 bp, Artificial Sequence
  Oligonucleotide primer for the detection of SNP TSC0002930
aataaatttatt

SEQ ID NO: 272762 - DNA, 12 bp, Artificial Sequence
  Oligonucleotide primer for the detection of SNP TSC0002930
ttttgttaaata

SEQ ID NO: 272763 - DNA, 12 bp, Artificial Sequence
  Oligonucleotide primer for the detection of SNP TSC0002931
ttacattactaa

SEQ ID NO: 272764 - DNA, 12 bp, Artificial Sequence
  Oligonucleotide primer for the detection of SNP TSC0002931
tggatttaataa

SEQ ID NO: 272765 - DNA, 12 bp, Artificial Sequence
  Oligonucleotide primer for the detection of SNP TSC0002931
aaactcaataaa

SEQ ID NO: 272766 - DNA, 12 bp, Artificial Sequence
  Oligonucleotide primer for the detection of SNP TSC0002931
tttatattatta

SEQ ID NO: 272767 - DNA, 12 bp, Artificial Sequence
  Oligonucleotide primer for the detection of SNP TSC0002932
atactctttctt

SEQ ID NO: 272768 - DNA, 12 bp, Artificial Sequence
  Oligonucleotide primer for the detection of SNP TSC0002932
aaaaaaagaaag

SEQ ID NO: 272769 - DNA, 12 bp, Artificial Sequence
  Oligonucleotide primer for the detection of SNP TSC0002933
aatttattttct

SEQ ID NO: 272770 - DNA, 12 bp, Artificial Sequence
  Oligonucleotide primer for the detection of SNP TSC0002933
tttttttttttg

SEQ ID NO: 272771 - DNA, 12 bp, Artificial Sequence
  Oligonucleotide primer for the detection of SNP TSC0002935
tccaccaataaa

SEQ ID NO: 272772 - DNA, 12 bp, Artificial Sequence
  Oligonucleotide primer for the detection of SNP TSC0002935
tccaccgataaa

SEQ ID NO: 272773 - DNA, 12 bp, Artificial Sequence
  Oligonucleotide primer for the detection of SNP TSC0002935
aatgatgaattt

SEQ ID NO: 272774 - DNA, 12 bp, Artificial Sequence
  Oligonucleotide primer for the detection of SNP TSC0002935
taaataataaac

SEQ ID NO: 272775 - DNA, 12 bp, Artificial Sequence
  Oligonucleotide primer for the detection of SNP TSC0002935
tttattgataag

SEQ ID NO: 272776 - DNA, 12 bp, Artificial Sequence
  Oligonucleotide primer for the detection of SNP TSC0002935
tttatcgataag

SEQ ID NO: 272777 - DNA, 12 bp, Artificial Sequence
  Oligonucleotide primer for the detection of SNP TSC0002936
acatcacattaa

SEQ ID NO: 272778 - DNA, 12 bp, Artificial Sequence
  Oligonucleotide primer for the detection of SNP TSC0002936
agttgtttattt

SEQ ID NO: 272779 - DNA, 12 bp, Artificial Sequence
  Oligonucleotide primer for the detection of SNP TSC0002936
aactactcattc

SEQ ID NO: 272780 - DNA, 12 bp, Artificial Sequence
  Oligonucleotide primer for the detection of SNP TSC0002936
atattatattag

SEQ ID NO: 272781 - DNA, 12 bp, Artificial Sequence
  Oligonucleotide primer for the detection of SNP TSC0002937
caaataaaaaac

SEQ ID NO: 272782 - DNA, 12 bp, Artificial Sequence
  Oligonucleotide primer for the detection of SNP TSC0002937
attcttcttcct

SEQ ID NO: 272783 - DNA, 12 bp, Artificial Sequence
  Oligonucleotide primer for the detection of SNP TSC0002937
taaatgagaaat

SEQ ID NO: 272784 - DNA, 12 bp, Artificial Sequence
  Oligonucleotide primer for the detection of SNP TSC0002938
tattaattattt

SEQ ID NO: 272785 - DNA, 12 bp, Artificial Sequence
  Oligonucleotide primer for the detection of SNP TSC0002939
atttaaattatt

SEQ ID NO: 272786 - DNA, 12 bp, Artificial Sequence
  Oligonucleotide primer for the detection of SNP TSC0002939
tataatatttga

SEQ ID NO: 272787 - DNA, 12 bp, Artificial Sequence
  Oligonucleotide primer for the detection of SNP TSC0002940
tattaaaaataa

SEQ ID NO: 272788 - DNA, 12 bp, Artificial Sequence
  Oligonucleotide primer for the detection of SNP TSC0002940
gtgaattttgat

SEQ ID NO: 272789 - DNA, 12 bp, Artificial Sequence
  Oligonucleotide primer for the detection of SNP TSC0002940
taaattttaaca

SEQ ID NO: 272790 - DNA, 12 bp, Artificial Sequence
  Oligonucleotide primer for the detection of SNP TSC0002940
tattggaaatga

SEQ ID NO: 272791 - DNA, 12 bp, Artificial Sequence
  Oligonucleotide primer for the detection of SNP TSC0002942
aaattttaaaac

SEQ ID NO: 272792 - DNA, 12 bp, Artificial Sequence
  Oligonucleotide primer for the detection of SNP TSC0002942
ttttttatttag

SEQ ID NO: 272793 - DNA, 12 bp, Artificial Sequence
  Oligonucleotide primer for the detection of SNP TSC0002943
attaaaaaatac

SEQ ID NO: 272794 - DNA, 12 bp, Artificial Sequence
  Oligonucleotide primer for the detection of SNP TSC0002943
gggtgtttttat

SEQ ID NO: 272795 - DNA, 12 bp, Artificial Sequence
  Oligonucleotide primer for the detection of SNP TSC0002943
aaaatacttcca

SEQ ID NO: 272796 - DNA, 12 bp, Artificial Sequence
  Oligonucleotide primer for the detection of SNP TSC0002943
ttgagggatgtt

SEQ ID NO: 272797 - DNA, 12 bp, Artificial Sequence
  Oligonucleotide primer for the detection of SNP TSC0002944
atataaaacatt

SEQ ID NO: 272798 - DNA, 12 bp, Artificial Sequence
  Oligonucleotide primer for the detection of SNP TSC0002944
tttttttggtag

SEQ ID NO: 272799 - DNA, 12 bp, Artificial Sequence
  Oligonucleotide primer for the detection of SNP TSC0002945
ctaaccacatcc

SEQ ID NO: 272800 - DNA, 12 bp, Artificial Sequence
  Oligonucleotide primer for the detection of SNP TSC0002945
gttggaggtgat

SEQ ID NO: 272801 - DNA, 12 bp, Artificial Sequence
  Oligonucleotide primer for the detection of SNP TSC0002945
actaaaaataat

SEQ ID NO: 272802 - DNA, 12 bp, Artificial Sequence
  Oligonucleotide primer for the detection of SNP TSC0002945
ttaattatattt

SEQ ID NO: 272803 - DNA, 12 bp, Artificial Sequence
  Oligonucleotide primer for the detection of SNP TSC0002946
cactaatcctac

SEQ ID NO: 272804 - DNA, 12 bp, Artificial Sequence
  Oligonucleotide primer for the detection of SNP TSC0002946
aagaaatggagg

SEQ ID NO: 272805 - DNA, 12 bp, Artificial Sequence
  Oligonucleotide primer for the detection of SNP TSC0002947
cttattttatat

SEQ ID NO: 272806 - DNA, 12 bp, Artificial Sequence
  Oligonucleotide primer for the detection of SNP TSC0002947
aaaaatattgta

SEQ ID NO: 272807 - DNA, 12 bp, Artificial Sequence
  Oligonucleotide primer for the detection of SNP TSC0002947
aaaaacattaca

SEQ ID NO: 272808 - DNA, 12 bp, Artificial Sequence
  Oligonucleotide primer for the detection of SNP TSC0002947
ttgttttatatt

SEQ ID NO: 272809 - DNA, 12 bp, Artificial Sequence
  Oligonucleotide primer for the detection of SNP TSC0002947
ttgttttatatc

SEQ ID NO: 272810 - DNA, 12 bp, Artificial Sequence
  Oligonucleotide primer for the detection of SNP TSC0002948
cttacataatac

SEQ ID NO: 272811 - DNA, 12 bp, Artificial Sequence
  Oligonucleotide primer for the detection of SNP TSC0002948
tagtagttttta

SEQ ID NO: 272812 - DNA, 12 bp, Artificial Sequence
  Oligonucleotide primer for the detection of SNP TSC0002949
attaaaaaaaaa

SEQ ID NO: 272813 - DNA, 12 bp, Artificial Sequence
  Oligonucleotide primer for the detection of SNP TSC0002949
agttttttttat

SEQ ID NO: 272814 - DNA, 12 bp, Artificial Sequence
  Oligonucleotide primer for the detection of SNP TSC0002949
aactctctttat

SEQ ID NO: 272815 - DNA, 12 bp, Artificial Sequence
  Oligonucleotide primer for the detection of SNP TSC0002949
agttgggaaaaa

SEQ ID NO: 272816 - DNA, 12 bp, Artificial Sequence
  Oligonucleotide primer for the detection of SNP TSC0002950
taaataactaat

SEQ ID NO: 272817 - DNA, 12 bp, Artificial Sequence
  Oligonucleotide primer for the detection of SNP TSC0002950
tttttaataatg

SEQ ID NO: 272818 - DNA, 12 bp, Artificial Sequence
  Oligonucleotide primer for the detection of SNP TSC0002950
ctcccaacaata

SEQ ID NO: 272819 - DNA, 12 bp, Artificial Sequence
  Oligonucleotide primer for the detection of SNP TSC0002950
tgaatagttgat

SEQ ID NO: 272820 - DNA, 12 bp, Artificial Sequence
  Oligonucleotide primer for the detection of SNP TSC0002952
aattattttaat

SEQ ID NO: 272821 - DNA, 12 bp, Artificial Sequence
  Oligonucleotide primer for the detection of SNP TSC0002952
gttattaagtta

SEQ ID NO: 272822 - DNA, 12 bp, Artificial Sequence
  Oligonucleotide primer for the detection of SNP TSC0002952
attaccaaatta

SEQ ID NO: 272823 - DNA, 12 bp, Artificial Sequence
  Oligonucleotide primer for the detection of SNP TSC0002952
aattgttttggt

SEQ ID NO: 272824 - DNA, 12 bp, Artificial Sequence
  Oligonucleotide primer for the detection of SNP TSC0002953
aataattttaat

SEQ ID NO: 272825 - DNA, 12 bp, Artificial Sequence
  Oligonucleotide primer for the detection of SNP TSC0002953
tgttaagaagaa

SEQ ID NO: 272826 - DNA, 12 bp, Artificial Sequence
  Oligonucleotide primer for the detection of SNP TSC0002954
atcatacacata

SEQ ID NO: 272827 - DNA, 12 bp, Artificial Sequence
  Oligonucleotide primer for the detection of SNP TSC0002954
agtatattgatt

SEQ ID NO: 272828 - DNA, 12 bp, Artificial Sequence
  Oligonucleotide primer for the detection of SNP TSC0002954
agtatattgatc

SEQ ID NO: 272829 - DNA, 12 bp, Artificial Sequence
  Oligonucleotide primer for the detection of SNP TSC0002954
taaacatactaa

SEQ ID NO: 272830 - DNA, 12 bp, Artificial Sequence
  Oligonucleotide primer for the detection of SNP TSC0002954
tatgtatatatt

SEQ ID NO: 272831 - DNA, 12 bp, Artificial Sequence
  Oligonucleotide primer for the detection of SNP TSC0002955
aaccaaacaccc

SEQ ID NO: 272832 - DNA, 12 bp, Artificial Sequence
  Oligonucleotide primer for the detection of SNP TSC0002955
attatggaatta

SEQ ID NO: 272833 - DNA, 12 bp, Artificial Sequence
  Oligonucleotide primer for the detection of SNP TSC0002955
accataaaatca

SEQ ID NO: 272834 - DNA, 12 bp, Artificial Sequence
  Oligonucleotide primer for the detection of SNP TSC0002955
aattagatattt

SEQ ID NO: 272835 - DNA, 12 bp, Artificial Sequence
  Oligonucleotide primer for the detection of SNP TSC0002956
aataaaaaacaa

SEQ ID NO: 272836 - DNA, 12 bp, Artificial Sequence
  Oligonucleotide primer for the detection of SNP TSC0002956
atgatttttttt

SEQ ID NO: 272837 - DNA, 12 bp, Artificial Sequence
  Oligonucleotide primer for the detection of SNP TSC0002956
acgatttttttt

SEQ ID NO: 272838 - DNA, 12 bp, Artificial Sequence
  Oligonucleotide primer for the detection of SNP TSC0002956
acaactctcttc

SEQ ID NO: 272839 - DNA, 12 bp, Artificial Sequence
  Oligonucleotide primer for the detection of SNP TSC0002956
acgactctcttc

SEQ ID NO: 272840 - DNA, 12 bp, Artificial Sequence
  Oligonucleotide primer for the detection of SNP TSC0002956
agtagggggtag

SEQ ID NO: 272841 - DNA, 12 bp, Artificial Sequence
  Oligonucleotide primer for the detection of SNP TSC0002957
attaaaaaaatt

SEQ ID NO: 272842 - DNA, 12 bp, Artificial Sequence
  Oligonucleotide primer for the detection of SNP TSC0002957
tgttatttttga

SEQ ID NO: 272843 - DNA, 12 bp, Artificial Sequence
  Oligonucleotide primer for the detection of SNP TSC0002957
tgttattttcga

SEQ ID NO: 272844 - DNA, 12 bp, Artificial Sequence
  Oligonucleotide primer for the detection of SNP TSC0002957
attattttcaaa

SEQ ID NO: 272845 - DNA, 12 bp, Artificial Sequence
  Oligonucleotide primer for the detection of SNP TSC0002957
attattttcgaa

SEQ ID NO: 272846 - DNA, 12 bp, Artificial Sequence
  Oligonucleotide primer for the detection of SNP TSC0002957
attgggggaatt

SEQ ID NO: 272847 - DNA, 12 bp, Artificial Sequence
  Oligonucleotide primer for the detection of SNP TSC0002958
attactaacata

SEQ ID NO: 272848 - DNA, 12 bp, Artificial Sequence
  Oligonucleotide primer for the detection of SNP TSC0002958
tatgtttgattt

SEQ ID NO: 272849 - DNA, 12 bp, Artificial Sequence
  Oligonucleotide primer for the detection of SNP TSC0002958
tatacttaattt

SEQ ID NO: 272850 - DNA, 12 bp, Artificial Sequence
  Oligonucleotide primer for the detection of SNP TSC0002958
attgttaatata

SEQ ID NO: 272851 - DNA, 12 bp, Artificial Sequence
  Oligonucleotide primer for the detection of SNP TSC0002959
ttaaaacccact

SEQ ID NO: 272852 - DNA, 12 bp, Artificial Sequence
  Oligonucleotide primer for the detection of SNP TSC0002959
tttgtttttatt

SEQ ID NO: 272853 - DNA, 12 bp, Artificial Sequence
  Oligonucleotide primer for the detection of SNP TSC0002959
ttcgtttttatt

SEQ ID NO: 272854 - DNA, 12 bp, Artificial Sequence
  Oligonucleotide primer for the detection of SNP TSC0002959
ttcatttttatc

SEQ ID NO: 272855 - DNA, 12 bp, Artificial Sequence
  Oligonucleotide primer for the detection of SNP TSC0002959
ttcgtttttatc

SEQ ID NO: 272856 - DNA, 12 bp, Artificial Sequence
  Oligonucleotide primer for the detection of SNP TSC0002959
ttgagatttatt

SEQ ID NO: 272857 - DNA, 12 bp, Artificial Sequence
  Oligonucleotide primer for the detection of SNP TSC0002960
taacaaaaaccc

SEQ ID NO: 272858 - DNA, 12 bp, Artificial Sequence
  Oligonucleotide primer for the detection of SNP TSC0002960
tagttgagggtt

SEQ ID NO: 272859 - DNA, 12 bp, Artificial Sequence
  Oligonucleotide primer for the detection of SNP TSC0002960
aactaaaaatta

SEQ ID NO: 272860 - DNA, 12 bp, Artificial Sequence
  Oligonucleotide primer for the detection of SNP TSC0002960
gtaaagattttt

SEQ ID NO: 272861 - DNA, 12 bp, Artificial Sequence
  Oligonucleotide primer for the detection of SNP TSC0002961
aataaccaaaaa

SEQ ID NO: 272862 - DNA, 12 bp, Artificial Sequence
  Oligonucleotide primer for the detection of SNP TSC0002961
atggtttttatt

SEQ ID NO: 272863 - DNA, 12 bp, Artificial Sequence
  Oligonucleotide primer for the detection of SNP TSC0002961
ataacccttatt

SEQ ID NO: 272864 - DNA, 12 bp, Artificial Sequence
  Oligonucleotide primer for the detection of SNP TSC0002961
gataattaagga

SEQ ID NO: 272865 - DNA, 12 bp, Artificial Sequence
  Oligonucleotide primer for the detection of SNP TSC0002962
caaaatccaact

SEQ ID NO: 272866 - DNA, 12 bp, Artificial Sequence
  Oligonucleotide primer for the detection of SNP TSC0002962
tttatataatta

SEQ ID NO: 272867 - DNA, 12 bp, Artificial Sequence
  Oligonucleotide primer for the detection of SNP TSC0002963
tcccttatttcc

SEQ ID NO: 272868 - DNA, 12 bp, Artificial Sequence
  Oligonucleotide primer for the detection of SNP TSC0002963
ggtggttgtgtg

SEQ ID NO: 272869 - DNA, 12 bp, Artificial Sequence
  Oligonucleotide primer for the detection of SNP TSC0002963
aattatataaaa

SEQ ID NO: 272870 - DNA, 12 bp, Artificial Sequence
  Oligonucleotide primer for the detection of SNP TSC0002963
ttttttgttttc

SEQ ID NO: 272871 - DNA, 12 bp, Artificial Sequence
  Oligonucleotide primer for the detection of SNP TSC0002964
aaaccccctata

SEQ ID NO: 272872 - DNA, 12 bp, Artificial Sequence
  Oligonucleotide primer for the detection of SNP TSC0002964
ttttatagtaga

SEQ ID NO: 272873 - DNA, 12 bp, Artificial Sequence
  Oligonucleotide primer for the detection of SNP TSC0002964
tttacaataaaa

SEQ ID NO: 272874 - DNA, 12 bp, Artificial Sequence
  Oligonukleotid-Primer
agattttttgtg

SEQ ID NO: 272875 - DNA, 12 bp, Artificial Sequence
  Oligonucleotide primer for the detection of SNP TSC0002965
aaaaccacttct

SEQ ID NO: 272876 - DNA, 12 bp, Artificial Sequence
  Oligonucleotide primer for the detection of SNP TSC0002965
tgatttagaggg

SEQ ID NO: 272877 - DNA, 12 bp, Artificial Sequence
  Oligonucleotide primer for the detection of SNP TSC0002966
tcttaaccataa

SEQ ID NO: 272878 - DNA, 12 bp, Artificial Sequence
  Oligonukleotid-Primer
tttgagataatt

SEQ ID NO: 272879 - DNA, 12 bp, Artificial Sequence
  Oligonucleotide primer for the detection of SNP TSC0002966
tctaaaacaatt

SEQ ID NO: 272880 - DNA, 12 bp, Artificial Sequence
  Oligonucleotide primer for the detection of SNP TSC0002966
ttttggttataa

SEQ ID NO: 272881 - DNA, 12 bp, Artificial Sequence
  Oligonucleotide primer for the detection of SNP TSC0002968
tttaaataacta

SEQ ID NO: 272882 - DNA, 12 bp, Artificial Sequence
  Oligonucleotide primer for the detection of SNP TSC0002968
agtgtaataata

SEQ ID NO: 272883 - DNA, 12 bp, Artificial Sequence
  Oligonucleotide primer for the detection of SNP TSC0002968
aatataacaaca

SEQ ID NO: 272884 - DNA, 12 bp, Artificial Sequence
  Oligonucleotide primer for the detection of SNP TSC0002968
ttttaagtagtt

SEQ ID NO: 272885 - DNA, 12 bp, Artificial Sequence
  Oligonucleotide primer for the detection of SNP TSC0002969
taaaaaaaacat

SEQ ID NO: 272886 - DNA, 12 bp, Artificial Sequence
  Oligonucleotide primer for the detection of SNP TSC0002969
atatttttaatg

SEQ ID NO: 272887 - DNA, 12 bp, Artificial Sequence
  Oligonucleotide primer for the detection of SNP TSC0002970
ataacctacacc

SEQ ID NO: 272888 - DNA, 12 bp, Artificial Sequence
  Oligonucleotide primer for the detection of SNP TSC0002970
gttaggaaaaga

SEQ ID NO: 272889 - DNA, 12 bp, Artificial Sequence
  Oligonucleotide primer for the detection of SNP TSC0002970
atggtttgtatt

SEQ ID NO: 272890 - DNA, 12 bp, Artificial Sequence
  Oligonucleotide primer for the detection of SNP TSC0002971
atattaacaaca

SEQ ID NO: 272891 - DNA, 12 bp, Artificial Sequence
  Oligonucleotide primer for the detection of SNP TSC0002971
agatagtaaatt

SEQ ID NO: 272892 - DNA, 12 bp, Artificial Sequence
  Oligonucleotide primer for the detection of SNP TSC0002971
aaacaacaaact

SEQ ID NO: 272893 - DNA, 12 bp, Artificial Sequence
  Oligonucleotide primer for the detection of SNP TSC0002971
atattgatagta

SEQ ID NO: 272894 - DNA, 12 bp, Artificial Sequence
  Oligonucleotide primer for the detection of SNP TSC0002972
tataaaccacca

SEQ ID NO: 272895 - DNA, 12 bp, Artificial Sequence
  Oligonucleotide primer for the detection of SNP TSC0002972
tataaaccaccg

SEQ ID NO: 272896 - DNA, 12 bp, Artificial Sequence
  Oligonucleotide primer for the detection of SNP TSC0002972
aatgtttttttt

SEQ ID NO: 272897 - DNA, 12 bp, Artificial Sequence
  Oligonucleotide primer for the detection of SNP TSC0002972
aatatttcctct

SEQ ID NO: 272898 - DNA, 12 bp, Artificial Sequence
  Oligonucleotide primer for the detection of SNP TSC0002972
tgtgagttatcg

SEQ ID NO: 272899 - DNA, 12 bp, Artificial Sequence
  Oligonucleotide primer for the detection of SNP TSC0002974
tatcaaaaaaaa

SEQ ID NO: 272900 - DNA, 12 bp, Artificial Sequence
  Oligonucleotide primer for the detection of SNP TSC0002974
ataaagtatttt

SEQ ID NO: 272901 - DNA, 12 bp, Artificial Sequence
  Oligonucleotide primer for the detection of SNP TSC0002974
caaaacatttta

SEQ ID NO: 272902 - DNA, 12 bp, Artificial Sequence
  Oligonucleotide primer for the detection of SNP TSC0002974
aaatgttaaaag

SEQ ID NO: 272903 - DNA, 12 bp, Artificial Sequence
  Oligonucleotide primer for the detection of SNP TSC0002976
ccaaccaaataa

SEQ ID NO: 272904 - DNA, 12 bp, Artificial Sequence
  Oligonucleotide primer for the detection of SNP TSC0002976
atggaggtttta

SEQ ID NO: 272905 - DNA, 12 bp, Artificial Sequence
  Oligonucleotide primer for the detection of SNP TSC0002976
taaaaatctcaa

SEQ ID NO: 272906 - DNA, 12 bp, Artificial Sequence
  Oligonucleotide primer for the detection of SNP TSC0002976
tagttagataat

SEQ ID NO: 272907 - DNA, 12 bp, Artificial Sequence
  Oligonucleotide primer for the detection of SNP TSC0002976
tagttagataac

SEQ ID NO: 272908 - DNA, 12 bp, Artificial Sequence
  Oligonucleotide primer for the detection of SNP TSC0002978
atatatttaatt

SEQ ID NO: 272909 - DNA, 12 bp, Artificial Sequence
  Oligonucleotide primer for the detection of SNP TSC0002978
gtaagtttttga

SEQ ID NO: 272910 - DNA, 12 bp, Artificial Sequence
  Oligonucleotide primer for the detection of SNP TSC0002980
tttaaattttta

SEQ ID NO: 272911 - DNA, 12 bp, Artificial Sequence
  Oligonucleotide primer for the detection of SNP TSC0002980
tgaaattaagag

SEQ ID NO: 272912 - DNA, 12 bp, Artificial Sequence
  Oligonucleotide primer for the detection of SNP TSC0002980
taaaattaaaaa

SEQ ID NO: 272913 - DNA, 12 bp, Artificial Sequence
  Oligonucleotide primer for the detection of SNP TSC0002980
tttagattttta

SEQ ID NO: 272914 - DNA, 12 bp, Artificial Sequence
  Oligonucleotide primer for the detection of SNP TSC0002981
aaaattaaaaac

SEQ ID NO: 272915 - DNA, 12 bp, Artificial Sequence
  Oligonucleotide primer for the detection of SNP TSC0002981
gtttttgagatg

SEQ ID NO: 272916 - DNA, 12 bp, Artificial Sequence
  Oligonucleotide primer for the detection of SNP TSC0002981
gttttcgagatg

SEQ ID NO: 272917 - DNA, 12 bp, Artificial Sequence
  Oligonucleotide primer for the detection of SNP TSC0002982
aatttctttcct

SEQ ID NO: 272918 - DNA, 12 bp, Artificial Sequence
  Oligonucleotide primer for the detection of SNP TSC0002982
tgtgtatgtagg

SEQ ID NO: 272919 - DNA, 12 bp, Artificial Sequence
  Oligonucleotide primer for the detection of SNP TSC0002983
cttcttataacc

SEQ ID NO: 272920 - DNA, 12 bp, Artificial Sequence
  Oligonucleotide primer for the detection of SNP TSC0002983
ttattttattta

SEQ ID NO: 272921 - DNA, 12 bp, Artificial Sequence
  Oligonucleotide primer for the detection of SNP TSC0002984
tataaaaaacaa

SEQ ID NO: 272922 - DNA, 12 bp, Artificial Sequence
  Oligonucleotide primer for the detection of SNP TSC0002984
ttttgtatgaat

SEQ ID NO: 272923 - DNA, 12 bp, Artificial Sequence
  Oligonucleotide primer for the detection of SNP TSC0002984
ccctacataaac

SEQ ID NO: 272924 - DNA, 12 bp, Artificial Sequence
  Oligonucleotide primer for the detection of SNP TSC0002984
tgtaaagagtag

SEQ ID NO: 272925 - DNA, 12 bp, Artificial Sequence
  Oligonucleotide primer for the detection of SNP TSC0002985
acttactttacc

SEQ ID NO: 272926 - DNA, 12 bp, Artificial Sequence
  Oligonucleotide primer for the detection of SNP TSC0002985
atttttgtttta

SEQ ID NO: 272927 - DNA, 12 bp, Artificial Sequence
  Oligonucleotide primer for the detection of SNP TSC0002986
ctaaaaatattc

SEQ ID NO: 272928 - DNA, 12 bp, Artificial Sequence
  Oligonucleotide primer for the detection of SNP TSC0002986
gatgaagagaga

SEQ ID NO: 272929 - DNA, 12 bp, Artificial Sequence
  Oligonucleotide primer for the detection of SNP TSC0002987
atctttataatt

SEQ ID NO: 272930 - DNA, 12 bp, Artificial Sequence
  Oligonucleotide primer for the detection of SNP TSC0002987
agatatatagaa

SEQ ID NO: 272931 - DNA, 12 bp, Artificial Sequence
  Oligonucleotide primer for the detection of SNP TSC0002988
ttttaataaaaa

SEQ ID NO: 272932 - DNA, 12 bp, Artificial Sequence
  Oligonucleotide primer for the detection of SNP TSC0002988
atggtgaaattt

SEQ ID NO: 272933 - DNA, 12 bp, Artificial Sequence
  Oligonucleotide primer for the detection of SNP TSC0002988
acggtgaaattt

SEQ ID NO: 272934 - DNA, 12 bp, Artificial Sequence
  Oligonucleotide primer for the detection of SNP TSC0002988
acaataaaaccc

SEQ ID NO: 272935 - DNA, 12 bp, Artificial Sequence
  Oligonucleotide primer for the detection of SNP TSC0002988
acgataaaaccc

SEQ ID NO: 272936 - DNA, 12 bp, Artificial Sequence
  Oligonucleotide primer for the detection of SNP TSC0002988
ttttagtagaga

SEQ ID NO: 272937 - DNA, 12 bp, Artificial Sequence
  Oligonucleotide primer for the detection of SNP TSC0002989
aatagtgtgaga

SEQ ID NO: 272938 - DNA, 12 bp, Artificial Sequence
  Oligonucleotide primer for the detection of SNP TSC0002989
aatagcgtgaga

SEQ ID NO: 272939 - DNA, 12 bp, Artificial Sequence
  Oligonucleotide primer for the detection of SNP TSC0002989
aacaacataaaa

SEQ ID NO: 272940 - DNA, 12 bp, Artificial Sequence
  Oligonucleotide primer for the detection of SNP TSC0002989
aacaacgtaaaa

SEQ ID NO: 272941 - DNA, 12 bp, Artificial Sequence
  Oligonucleotide primer for the detection of SNP TSC0002990
tcccccatattt

SEQ ID NO: 272942 - DNA, 12 bp, Artificial Sequence
  Oligonucleotide primer for the detection of SNP TSC0002990
tcccccgtattt

SEQ ID NO: 272943 - DNA, 12 bp, Artificial Sequence
  Oligonucleotide primer for the detection of SNP TSC0002990
ggaaatgagaat

SEQ ID NO: 272944 - DNA, 12 bp, Artificial Sequence
  Oligonucleotide primer for the detection of SNP TSC0002990
ttttttgtgttt

SEQ ID NO: 272945 - DNA, 12 bp, Artificial Sequence
  Oligonucleotide primer for the detection of SNP TSC0002990
tttttcgtgttt

SEQ ID NO: 272946 - DNA, 12 bp, Artificial Sequence
  Oligonucleotide primer for the detection of SNP TSC0002991
taataaaaatta

SEQ ID NO: 272947 - DNA, 12 bp, Artificial Sequence
  Oligonucleotide primer for the detection of SNP TSC0002991
ttttttaaattt

SEQ ID NO: 272948 - DNA, 12 bp, Artificial Sequence
  Oligonucleotide primer for the detection of SNP TSC0002991
ctccccttaaac

SEQ ID NO: 272949 - DNA, 12 bp, Artificial Sequence
  Oligonucleotide primer for the detection of SNP TSC0002991
gtgaaggttatt

SEQ ID NO: 272950 - DNA, 12 bp, Artificial Sequence
  Oligonucleotide primer for the detection of SNP TSC0002992
ttaatttaaaca

SEQ ID NO: 272951 - DNA, 12 bp, Artificial Sequence
  Oligonucleotide primer for the detection of SNP TSC0002992
gagtattgtagt

SEQ ID NO: 272952 - DNA, 12 bp, Artificial Sequence
  Oligonucleotide primer for the detection of SNP TSC0002992
aatactataata

SEQ ID NO: 272953 - DNA, 12 bp, Artificial Sequence
  Oligonucleotide primer for the detection of SNP TSC0002992
ttagtttaggta

SEQ ID NO: 272954 - DNA, 12 bp, Artificial Sequence
  Oligonucleotide primer for the detection of SNP TSC0002993
atcatcctttaa

SEQ ID NO: 272955 - DNA, 12 bp, Artificial Sequence
  Oligonucleotide primer for the detection of SNP TSC0002993
tatttatagttt

SEQ ID NO: 272956 - DNA, 12 bp, Artificial Sequence
  Oligonucleotide primer for the detection of SNP TSC0002993
tcacctacaatc

SEQ ID NO: 272957 - DNA, 12 bp, Artificial Sequence
  Oligonucleotide primer for the detection of SNP TSC0002993
attattttttag

SEQ ID NO: 272958 - DNA, 12 bp, Artificial Sequence
  Oligonucleotide primer for the detection of SNP TSC0002994
acaaattcttcc

SEQ ID NO: 272959 - DNA, 12 bp, Artificial Sequence
  Oligonukleotid-Primer
agaagtgaagag

SEQ ID NO: 272960 - DNA, 12 bp, Artificial Sequence
  Oligonucleotide primer for the detection of SNP TSC0002995
ttcaaaccaaaa

SEQ ID NO: 272961 - DNA, 12 bp, Artificial Sequence
  Oligonucleotide primer for the detection of SNP TSC0002995
atgtttatttaa

SEQ ID NO: 272962 - DNA, 12 bp, Artificial Sequence
  Oligonucleotide primer for the detection of SNP TSC0002995
atatttatctaa

SEQ ID NO: 272963 - DNA, 12 bp, Artificial Sequence
  Oligonucleotide primer for the detection of SNP TSC0002995
tttaaattaaag

SEQ ID NO: 272964 - DNA, 12 bp, Artificial Sequence
  Oligonucleotide primer for the detection of SNP TSC0002996
tccatttatttc

SEQ ID NO: 272965 - DNA, 12 bp, Artificial Sequence
  Oligonucleotide primer for the detection of SNP TSC0002996
gataagggatga

SEQ ID NO: 272966 - DNA, 12 bp, Artificial Sequence
  Oligonucleotide primer for the detection of SNP TSC0002996
aataaaaaataa

SEQ ID NO: 272967 - DNA, 12 bp, Artificial Sequence
  Oligonucleotide primer for the detection of SNP TSC0002996
tttatttgtttt

SEQ ID NO: 272968 - DNA, 12 bp, Artificial Sequence
  Oligonucleotide primer for the detection of SNP TSC0002997
taaacaaacacc

SEQ ID NO: 272969 - DNA, 12 bp, Artificial Sequence
  Oligonucleotide primer for the detection of SNP TSC0002997
taaacaaacgcc

SEQ ID NO: 272970 - DNA, 12 bp, Artificial Sequence
  Oligonucleotide primer for the detection of SNP TSC0002997
ggtttttttgta

SEQ ID NO: 272971 - DNA, 12 bp, Artificial Sequence
  Oligonucleotide primer for the detection of SNP TSC0002998
aaaaatcacacc

SEQ ID NO: 272972 - DNA, 12 bp, Artificial Sequence
  Oligonucleotide primer for the detection of SNP TSC0002998
aaatttgagtta

SEQ ID NO: 272973 - DNA, 12 bp, Artificial Sequence
  Oligonucleotide primer for the detection of SNP TSC0002998
aaatttaaatca

SEQ ID NO: 272974 - DNA, 12 bp, Artificial Sequence
  Oligonucleotide primer for the detection of SNP TSC0002998
agaaattatatt

SEQ ID NO: 272975 - DNA, 12 bp, Artificial Sequence
  Oligonucleotide primer for the detection of SNP TSC0002999
tataacatattt

SEQ ID NO: 272976 - DNA, 12 bp, Artificial Sequence
  Oligonucleotide primer for the detection of SNP TSC0002999
tttgtgttgtta

SEQ ID NO: 272977 - DNA, 12 bp, Artificial Sequence
  Oligonucleotide primer for the detection of SNP TSC0003000
aaaaaaaacact

SEQ ID NO: 272978 - DNA, 12 bp, Artificial Sequence
  Oligonucleotide primer for the detection of SNP TSC0003000
tatataattata

SEQ ID NO: 272979 - DNA, 12 bp, Artificial Sequence
  Oligonucleotide primer for the detection of SNP TSC0003001
aaatataaaacc

SEQ ID NO: 272980 - DNA, 12 bp, Artificial Sequence
  Oligonucleotide primer for the detection of SNP TSC0003001
attagaattaga

SEQ ID NO: 272981 - DNA, 12 bp, Artificial Sequence
  Oligonucleotide primer for the detection of SNP TSC0003002
ctcatataaaat

SEQ ID NO: 272982 - DNA, 12 bp, Artificial Sequence
  Oligonucleotide primer for the detection of SNP TSC0003002
gtggaaatagta

SEQ ID NO: 272983 - DNA, 12 bp, Artificial Sequence
  Oligonucleotide primer for the detection of SNP TSC0003003
aaaataacaaat

SEQ ID NO: 272984 - DNA, 12 bp, Artificial Sequence
  Oligonucleotide primer for the detection of SNP TSC0003003
gttgaggtttta

SEQ ID NO: 272985 - DNA, 12 bp, Artificial Sequence
  Oligonucleotide primer for the detection of SNP TSC0003004
taaataaataat

SEQ ID NO: 272986 - DNA, 12 bp, Artificial Sequence
  Oligonucleotide primer for the detection of SNP TSC0003004
aaatttatatta

SEQ ID NO: 272987 - DNA, 12 bp, Artificial Sequence
  Oligonucleotide primer for the detection of SNP TSC0003004
aaatccatatca

SEQ ID NO: 272988 - DNA, 12 bp, Artificial Sequence
  Oligonucleotide primer for the detection of SNP TSC0003004
taagtgggtggt

SEQ ID NO: 272989 - DNA, 12 bp, Artificial Sequence
  Oligonucleotide primer for the detection of SNP TSC0003005
aaaaagttgaaa

SEQ ID NO: 272990 - DNA, 12 bp, Artificial Sequence
  Oligonucleotide primer for the detection of SNP TSC0003005
gataaaagatgt

SEQ ID NO: 272991 - DNA, 12 bp, Artificial Sequence
  Oligonucleotide primer for the detection of SNP TSC0003006
aaatattccaaa

SEQ ID NO: 272992 - DNA, 12 bp, Artificial Sequence
  Oligonucleotide primer for the detection of SNP TSC0003006
ttgggagtttta

SEQ ID NO: 272993 - DNA, 12 bp, Artificial Sequence
  Oligonucleotide primer for the detection of SNP TSC0003006
taaaaattctaa

SEQ ID NO: 272994 - DNA, 12 bp, Artificial Sequence
  Oligonucleotide primer for the detection of SNP TSC0003006
atagaatatttt

SEQ ID NO: 272995 - DNA, 12 bp, Artificial Sequence
  Oligonucleotide primer for the detection of SNP TSC0003007
taaaattaacta

SEQ ID NO: 272996 - DNA, 12 bp, Artificial Sequence
  Oligonucleotide primer for the detection of SNP TSC0003007
tattggtttgga

SEQ ID NO: 272997 - DNA, 12 bp, Artificial Sequence
  Oligonucleotide primer for the detection of SNP TSC0003007
tactaacttaaa

SEQ ID NO: 272998 - DNA, 12 bp, Artificial Sequence
  Oligonucleotide primer for the detection of SNP TSC0003007
gtaaaattaatt

SEQ ID NO: 272999 - DNA, 12 bp, Artificial Sequence
  Oligonucleotide primer for the detection of SNP TSC0003008
tatattaaattt

SEQ ID NO: 273000 - DNA, 12 bp, Artificial Sequence
  Oligonucleotide primer for the detection of SNP TSC0003008
tgttttaatata

SEQ ID NO: 273001 - DNA, 12 bp, Artificial Sequence
  Oligonucleotide primer for the detection of SNP TSC0003008
tatcttaatata

SEQ ID NO: 273002 - DNA, 12 bp, Artificial Sequence
  Oligonucleotide primer for the detection of SNP TSC0003008
tgtgttgagttt

SEQ ID NO: 273003 - DNA, 12 bp, Artificial Sequence
  Oligonucleotide primer for the detection of SNP TSC0003009
aaataataaaaa

SEQ ID NO: 273004 - DNA, 12 bp, Artificial Sequence
  Oligonucleotide primer for the detection of SNP TSC0003009
ctcacctttcca

SEQ ID NO: 273005 - DNA, 12 bp, Artificial Sequence
  Oligonucleotide primer for the detection of SNP TSC0003009
ggtggtgaggat

SEQ ID NO: 273006 - DNA, 12 bp, Artificial Sequence
  Oligonucleotide primer for the detection of SNP TSC0003010
ttattacattct

SEQ ID NO: 273007 - DNA, 12 bp, Artificial Sequence
  Oligonucleotide primer for the detection of SNP TSC0003010
tatagtttaaaa

SEQ ID NO: 273008 - DNA, 12 bp, Artificial Sequence
  Oligonucleotide primer for the detection of SNP TSC0003011
aacatctaaatt

SEQ ID NO: 273009 - DNA, 12 bp, Artificial Sequence
  Oligonucleotide primer for the detection of SNP TSC0003011
ttttaatatata

SEQ ID NO: 273010 - DNA, 12 bp, Artificial Sequence
  Oligonucleotide primer for the detection of SNP TSC0003013
aaaccttttata

SEQ ID NO: 273011 - DNA, 12 bp, Artificial Sequence
  Oligonucleotide primer for the detection of SNP TSC0003013
ataagaatattt

SEQ ID NO: 273012 - DNA, 12 bp, Artificial Sequence
  Oligonucleotide primer for the detection of SNP TSC0003013
ataaaaatattc

SEQ ID NO: 273013 - DNA, 12 bp, Artificial Sequence
  Oligonucleotide primer for the detection of SNP TSC0003013
agattttttgta

SEQ ID NO: 273014 - DNA, 12 bp, Artificial Sequence
  Oligonucleotide primer for the detection of SNP TSC0003014
attttatatttt

SEQ ID NO: 273015 - DNA, 12 bp, Artificial Sequence
  Oligonucleotide primer for the detection of SNP TSC0003014
aaatgtaaatat

SEQ ID NO: 273016 - DNA, 12 bp, Artificial Sequence
  Oligonucleotide primer for the detection of SNP TSC0003014
aaatataaacat

SEQ ID NO: 273017 - DNA, 12 bp, Artificial Sequence
  Oligonucleotide primer for the detection of SNP TSC0003015
aatcaatatttt

SEQ ID NO: 273018 - DNA, 12 bp, Artificial Sequence
  Oligonucleotide primer for the detection of SNP TSC0003015
aatcgatatttt

SEQ ID NO: 273019 - DNA, 12 bp, Artificial Sequence
  Oligonucleotide primer for the detection of SNP TSC0003015
ttatatggttta

SEQ ID NO: 273020 - DNA, 12 bp, Artificial Sequence
  Oligonucleotide primer for the detection of SNP TSC0003016
aaatttttttat

SEQ ID NO: 273021 - DNA, 12 bp, Artificial Sequence
  Oligonucleotide primer for the detection of SNP TSC0003016
ttgatgaagata

SEQ ID NO: 273022 - DNA, 12 bp, Artificial Sequence
  Oligonucleotide primer for the detection of SNP TSC0003017
ctaatctatatt

SEQ ID NO: 273023 - DNA, 12 bp, Artificial Sequence
  Oligonucleotide primer for the detection of SNP TSC0003017
tatttttgtaaa

SEQ ID NO: 273024 - DNA, 12 bp, Artificial Sequence
  Oligonucleotide primer for the detection of SNP TSC0003018
acacacatatat

SEQ ID NO: 273025 - DNA, 12 bp, Artificial Sequence
  Oligonucleotide primer for the detection of SNP TSC0003018
tgtataagtata

SEQ ID NO: 273026 - DNA, 12 bp, Artificial Sequence
  Oligonucleotide primer for the detection of SNP TSC0003019
aatttctttaat

SEQ ID NO: 273027 - DNA, 12 bp, Artificial Sequence
  Oligonucleotide primer for the detection of SNP TSC0003019
tgttttatgtta

SEQ ID NO: 273028 - DNA, 12 bp, Artificial Sequence
  Oligonucleotide primer for the detection of SNP TSC0003020
caacctctaaat

SEQ ID NO: 273029 - DNA, 12 bp, Artificial Sequence
  Oligonucleotide primer for the detection of SNP TSC0003021
tcccattataac

SEQ ID NO: 273030 - DNA, 12 bp, Artificial Sequence
  Oligonucleotide primer for the detection of SNP TSC0003021
aaattattagaa

SEQ ID NO: 273031 - DNA, 12 bp, Artificial Sequence
  Oligonucleotide primer for the detection of SNP TSC0003022
ttataaatatta

SEQ ID NO: 273032 - DNA, 12 bp, Artificial Sequence
  Oligonucleotide primer for the detection of SNP TSC0003022
tatatataatat

SEQ ID NO: 273033 - DNA, 12 bp, Artificial Sequence
  Oligonucleotide primer for the detection of SNP TSC0003022
tatatataatac

SEQ ID NO: 273034 - DNA, 12 bp, Artificial Sequence
  Oligonucleotide primer for the detection of SNP TSC0003022
attataaatatt

SEQ ID NO: 273035 - DNA, 12 bp, Artificial Sequence
  Oligonucleotide primer for the detection of SNP TSC0003023
caaaaaaacacc

SEQ ID NO: 273036 - DNA, 12 bp, Artificial Sequence
  Oligonucleotide primer for the detection of SNP TSC0003024
attttcttatat

SEQ ID NO: 273037 - DNA, 12 bp, Artificial Sequence
  Oligonucleotide primer for the detection of SNP TSC0003024
ttagatttataa

SEQ ID NO: 273038 - DNA, 12 bp, Artificial Sequence
  Oligonucleotide primer for the detection of SNP TSC0003024
tcaaatctataa

SEQ ID NO: 273039 - DNA, 12 bp, Artificial Sequence
  Oligonucleotide primer for the detection of SNP TSC0003024
atttttttgtgt

SEQ ID NO: 273040 - DNA, 12 bp, Artificial Sequence
  Oligonucleotide primer for the detection of SNP TSC0003025
taaaacttacca

SEQ ID NO: 273041 - DNA, 12 bp, Artificial Sequence
  Oligonucleotide primer for the detection of SNP TSC0003025
ttttttgaaagt

SEQ ID NO: 273042 - DNA, 12 bp, Artificial Sequence
  Oligonucleotide primer for the detection of SNP TSC0003025
ttttttaaaaac

SEQ ID NO: 273043 - DNA, 12 bp, Artificial Sequence
  Oligonucleotide primer for the detection of SNP TSC0003025
taggatttatta

SEQ ID NO: 273044 - DNA, 12 bp, Artificial Sequence
  Oligonucleotide primer for the detection of SNP TSC0003028
atattaaataat

SEQ ID NO: 273045 - DNA, 12 bp, Artificial Sequence
  Oligonucleotide primer for the detection of SNP TSC0003028
tatttatgttta

SEQ ID NO: 273046 - DNA, 12 bp, Artificial Sequence
  Oligonucleotide primer for the detection of SNP TSC0003029
aaaataactctt

SEQ ID NO: 273047 - DNA, 12 bp, Artificial Sequence
  Oligonucleotide primer for the detection of SNP TSC0003029
tagaatattata

SEQ ID NO: 273048 - DNA, 12 bp, Artificial Sequence
  Oligonucleotide primer for the detection of SNP TSC0003029
taaaacattata

SEQ ID NO: 273049 - DNA, 12 bp, Artificial Sequence
  Oligonucleotide primer for the detection of SNP TSC0003029
agaataattttt

SEQ ID NO: 273050 - DNA, 12 bp, Artificial Sequence
  Oligonucleotide primer for the detection of SNP TSC0003030
caacttctcatt

SEQ ID NO: 273051 - DNA, 12 bp, Artificial Sequence
  Oligonucleotide primer for the detection of SNP TSC0003030
tattttgagaaa

SEQ ID NO: 273052 - DNA, 12 bp, Artificial Sequence
  Oligonucleotide primer for the detection of SNP TSC0003031
ttttcctttaaa

SEQ ID NO: 273053 - DNA, 12 bp, Artificial Sequence
  Oligonucleotide primer for the detection of SNP TSC0003031
gtttataaatgt

SEQ ID NO: 273054 - DNA, 12 bp, Artificial Sequence
  Oligonucleotide primer for the detection of SNP TSC0003031
aatctataaata

SEQ ID NO: 273055 - DNA, 12 bp, Artificial Sequence
  Oligonucleotide primer for the detection of SNP TSC0003031
tagttttttttt

SEQ ID NO: 273056 - DNA, 12 bp, Artificial Sequence
  Oligonucleotide primer for the detection of SNP TSC0003032
taataacttcat

SEQ ID NO: 273057 - DNA, 12 bp, Artificial Sequence
  Oligonucleotide primer for the detection of SNP TSC0003032
agaattgttttt

SEQ ID NO: 273058 - DNA, 12 bp, Artificial Sequence
  Oligonucleotide primer for the detection of SNP TSC0003032
aaaactatcttc

SEQ ID NO: 273059 - DNA, 12 bp, Artificial Sequence
  Oligonucleotide primer for the detection of SNP TSC0003032
tggtaattttat

SEQ ID NO: 273060 - DNA, 12 bp, Artificial Sequence
  Oligonucleotide primer for the detection of SNP TSC0003033
aaaaattatatc

SEQ ID NO: 273061 - DNA, 12 bp, Artificial Sequence
  Oligonucleotide primer for the detection of SNP TSC0003033
tttagtgaagaa

SEQ ID NO: 273062 - DNA, 12 bp, Artificial Sequence
  Oligonucleotide primer for the detection of SNP TSC0003033
ttcaataaaaaa

SEQ ID NO: 273063 - DNA, 12 bp, Artificial Sequence
  Oligonucleotide primer for the detection of SNP TSC0003033
aaaggttgtatt

SEQ ID NO: 273064 - DNA, 12 bp, Artificial Sequence
  Oligonukleotid-Primer
aaaggttgtatc

SEQ ID NO: 273065 - DNA, 12 bp, Artificial Sequence
  Oligonucleotide primer for the detection of SNP TSC0003034
cattatacctac

SEQ ID NO: 273066 - DNA, 12 bp, Artificial Sequence
  Oligonucleotide primer for the detection of SNP TSC0003034
gagtattaatga

SEQ ID NO: 273067 - DNA, 12 bp, Artificial Sequence
  Oligonucleotide primer for the detection of SNP TSC0003034
gagtattaacga

SEQ ID NO: 273068 - DNA, 12 bp, Artificial Sequence
  Oligonukleotid-Primer
tacacaaaattc

SEQ ID NO: 273069 - DNA, 12 bp, Artificial Sequence
  Oligonucleotide primer for the detection of SNP TSC0003035
tagtgttgttta

SEQ ID NO: 273070 - DNA, 12 bp, Artificial Sequence
  Oligonucleotide primer for the detection of SNP TSC0003036
aaatttacaata

SEQ ID NO: 273071 - DNA, 12 bp, Artificial Sequence
  Oligonucleotide primer for the detection of SNP TSC0003036
aaatttacgata

SEQ ID NO: 273072 - DNA, 12 bp, Artificial Sequence
  Oligonucleotide primer for the detection of SNP TSC0003036
tttattaggtat

SEQ ID NO: 273073 - DNA, 12 bp, Artificial Sequence
  Oligonucleotide primer for the detection of SNP TSC0003036
tccatcaaatat

SEQ ID NO: 273074 - DNA, 12 bp, Artificial Sequence
  Oligonucleotide primer for the detection of SNP TSC0003036
aagtttatgatg

SEQ ID NO: 273075 - DNA, 12 bp, Artificial Sequence
  Oligonucleotide primer for the detection of SNP TSC0003036
aagtttacgatg

SEQ ID NO: 273076 - DNA, 12 bp, Artificial Sequence
  Oligonucleotide primer for the detection of SNP TSC0003037
aactcttattat

SEQ ID NO: 273077 - DNA, 12 bp, Artificial Sequence
  Oligonucleotide primer for the detection of SNP TSC0003037
tttaaaaaagat

SEQ ID NO: 273078 - DNA, 12 bp, Artificial Sequence
  Oligonucleotide primer for the detection of SNP TSC0003038
aaatatcatacc

SEQ ID NO: 273079 - DNA, 12 bp, Artificial Sequence
  Oligonucleotide primer for the detection of SNP TSC0003038
atgatgatggta

SEQ ID NO: 273080 - DNA, 12 bp, Artificial Sequence
  Oligonucleotide primer for the detection of SNP TSC0003039
attatcatcttc

SEQ ID NO: 273081 - DNA, 12 bp, Artificial Sequence
  Oligonucleotide primer for the detection of SNP TSC0003039
tgaggatgttta

SEQ ID NO: 273082 - DNA, 12 bp, Artificial Sequence
  Oligonucleotide primer for the detection of SNP TSC0003040
aaaaaaattatt

SEQ ID NO: 273083 - DNA, 12 bp, Artificial Sequence
  Oligonucleotide primer for the detection of SNP TSC0003040
tttatagtaaag

SEQ ID NO: 273084 - DNA, 12 bp, Artificial Sequence
  Oligonucleotide primer for the detection of SNP TSC0003041
catactcctcac

SEQ ID NO: 273085 - DNA, 12 bp, Artificial Sequence
  Oligonucleotide primer for the detection of SNP TSC0003041
catactcctcgc

SEQ ID NO: 273086 - DNA, 12 bp, Artificial Sequence
  Oligonucleotide primer for the detection of SNP TSC0003041
tgatataatata

SEQ ID NO: 273087 - DNA, 12 bp, Artificial Sequence
  Oligonucleotide primer for the detection of SNP TSC0003042
tacttttcttca

SEQ ID NO: 273088 - DNA, 12 bp, Artificial Sequence
  Oligonucleotide primer for the detection of SNP TSC0003042
gatatatgatat

SEQ ID NO: 273089 - DNA, 12 bp, Artificial Sequence
  Oligonucleotide primer for the detection of SNP TSC0003042
acatataatata

SEQ ID NO: 273090 - DNA, 12 bp, Artificial Sequence
  Oligonucleotide primer for the detection of SNP TSC0003042
tgttttttttta

SEQ ID NO: 273091 - DNA, 12 bp, Artificial Sequence
  Oligonucleotide primer for the detection of SNP TSC0003043
acataatcacca

SEQ ID NO: 273092 - DNA, 12 bp, Artificial Sequence
  Oligonucleotide primer for the detection of SNP TSC0003043
ttgtggtagtaa

SEQ ID NO: 273093 - DNA, 12 bp, Artificial Sequence
  Oligonucleotide primer for the detection of SNP TSC0003043
ctataacaacaa

SEQ ID NO: 273094 - DNA, 12 bp, Artificial Sequence
  Oligonucleotide primer for the detection of SNP TSC0003043
atatgattatta

SEQ ID NO: 273095 - DNA, 12 bp, Artificial Sequence
  Oligonucleotide primer for the detection of SNP TSC0003044
ctaaatatacat

SEQ ID NO: 273096 - DNA, 12 bp, Artificial Sequence
  Oligonucleotide primer for the detection of SNP TSC0003045
aaatcatttctt

SEQ ID NO: 273097 - DNA, 12 bp, Artificial Sequence
  Oligonucleotide primer for the detection of SNP TSC0003045
aaatcgtttctt

SEQ ID NO: 273098 - DNA, 12 bp, Artificial Sequence
  Oligonucleotide primer for the detection of SNP TSC0003045
tatatagggggg

SEQ ID NO: 273099 - DNA, 12 bp, Artificial Sequence
  Oligonucleotide primer for the detection of SNP TSC0003045
catacaaaaaaa

SEQ ID NO: 273100 - DNA, 12 bp, Artificial Sequence
  Oligonucleotide primer for the detection of SNP TSC0003045
gttttttttttt

SEQ ID NO: 273101 - DNA, 12 bp, Artificial Sequence
  Oligonucleotide primer for the detection of SNP TSC0003046
taaaccaatcaa

SEQ ID NO: 273102 - DNA, 12 bp, Artificial Sequence
  Oligonucleotide primer for the detection of SNP TSC0003046
ggtttattttat

SEQ ID NO: 273103 - DNA, 12 bp, Artificial Sequence
  Oligonucleotide primer for the detection of SNP TSC0003046
aatccatttcac

SEQ ID NO: 273104 - DNA, 12 bp, Artificial Sequence
  Oligonucleotide primer for the detection of SNP TSC0003046
tggattaattag

SEQ ID NO: 273105 - DNA, 12 bp, Artificial Sequence
  Oligonucleotide primer for the detection of SNP TSC0003047
aaaaacctattt

SEQ ID NO: 273106 - DNA, 12 bp, Artificial Sequence
  Oligonucleotide primer for the detection of SNP TSC0003047
aaaattatgtta

SEQ ID NO: 273107 - DNA, 12 bp, Artificial Sequence
  Oligonucleotide primer for the detection of SNP TSC0003048
tcaaaaaataat

SEQ ID NO: 273108 - DNA, 12 bp, Artificial Sequence
  Oligonucleotide primer for the detection of SNP TSC0003048
ttaattttagat

SEQ ID NO: 273109 - DNA, 12 bp, Artificial Sequence
  Oligonucleotide primer for the detection of SNP TSC0003048
accaatctcaaa

SEQ ID NO: 273110 - DNA, 12 bp, Artificial Sequence
  Oligonucleotide primer for the detection of SNP TSC0003048
ttagaaaataat

SEQ ID NO: 273111 - DNA, 12 bp, Artificial Sequence
  Oligonucleotide primer for the detection of SNP TSC0003049
tccacatattca

SEQ ID NO: 273112 - DNA, 12 bp, Artificial Sequence
  Oligonucleotide primer for the detection of SNP TSC0003049
tccgcatattca

SEQ ID NO: 273113 - DNA, 12 bp, Artificial Sequence
  Oligonucleotide primer for the detection of SNP TSC0003049
aattttagataa

SEQ ID NO: 273114 - DNA, 12 bp, Artificial Sequence
  Oligonucleotide primer for the detection of SNP TSC0003050
aataaatactta

SEQ ID NO: 273115 - DNA, 12 bp, Artificial Sequence
  Oligonucleotide primer for the detection of SNP TSC0003050
tttatttgttta

SEQ ID NO: 273116 - DNA, 12 bp, Artificial Sequence
  Oligonucleotide primer for the detection of SNP TSC0003050
ttcatttattca

SEQ ID NO: 273117 - DNA, 12 bp, Artificial Sequence
  Oligonucleotide primer for the detection of SNP TSC0003050
tagtaaatattt

SEQ ID NO: 273118 - DNA, 12 bp, Artificial Sequence
  Oligonucleotide primer for the detection of SNP TSC0003051
tttattccaatt

SEQ ID NO: 273119 - DNA, 12 bp, Artificial Sequence
  Oligonucleotide primer for the detection of SNP TSC0003051
attaggtagtaa

SEQ ID NO: 273120 - DNA, 12 bp, Artificial Sequence
  Oligonucleotide primer for the detection of SNP TSC0003052
taataacttaac

SEQ ID NO: 273121 - DNA, 12 bp, Artificial Sequence
  Oligonucleotide primer for the detection of SNP TSC0003052
tgttaattgtag

SEQ ID NO: 273122 - DNA, 12 bp, Artificial Sequence
  Oligonucleotide primer for the detection of SNP TSC0003054
tttattttaatt

SEQ ID NO: 273123 - DNA, 12 bp, Artificial Sequence
  Oligonucleotide primer for the detection of SNP TSC0003054
gtatttttgaaa

SEQ ID NO: 273124 - DNA, 12 bp, Artificial Sequence
  Oligonucleotide primer for the detection of SNP TSC0003054
atacctttaaaa

SEQ ID NO: 273125 - DNA, 12 bp, Artificial Sequence
  Oligonucleotide primer for the detection of SNP TSC0003054
tttattttgatt

SEQ ID NO: 273126 - DNA, 12 bp, Artificial Sequence
  Oligonucleotide primer for the detection of SNP TSC0003055
aaaaaattattt

SEQ ID NO: 273127 - DNA, 12 bp, Artificial Sequence
  Oligonucleotide primer for the detection of SNP TSC0003055
atagtttttata

SEQ ID NO: 273128 - DNA, 12 bp, Artificial Sequence
  Oligonucleotide primer for the detection of SNP TSC0003056
aaaaattttctt

SEQ ID NO: 273129 - DNA, 12 bp, Artificial Sequence
  Oligonucleotide primer for the detection of SNP TSC0003056
aaatagtattta

SEQ ID NO: 273130 - DNA, 12 bp, Artificial Sequence
  Oligonucleotide primer for the detection of SNP TSC0003057
cttttacttcta

SEQ ID NO: 273131 - DNA, 12 bp, Artificial Sequence
  Oligonucleotide primer for the detection of SNP TSC0003057
taaattttaatt

SEQ ID NO: 273132 - DNA, 12 bp, Artificial Sequence
  Oligonucleotide primer for the detection of SNP TSC0003057
taaatctcaact

SEQ ID NO: 273133 - DNA, 12 bp, Artificial Sequence
  Oligonucleotide primer for the detection of SNP TSC0003058
tcacctaaactt

SEQ ID NO: 273134 - DNA, 12 bp, Artificial Sequence
  Oligonucleotide primer for the detection of SNP TSC0003058
ggtaggaggata

SEQ ID NO: 273135 - DNA, 12 bp, Artificial Sequence
  Oligonucleotide primer for the detection of SNP TSC0003059
tataaatatata

SEQ ID NO: 273136 - DNA, 12 bp, Artificial Sequence
  Oligonucleotide primer for the detection of SNP TSC0003059
cataaatacata

SEQ ID NO: 273137 - DNA, 12 bp, Artificial Sequence
  Oligonucleotide primer for the detection of SNP TSC0003059
gtatgtatgtat

SEQ ID NO: 273138 - DNA, 12 bp, Artificial Sequence
  Oligonucleotide primer for the detection of SNP TSC0003060
attccccatcac

SEQ ID NO: 273139 - DNA, 12 bp, Artificial Sequence
  Oligonucleotide primer for the detection of SNP TSC0003060
attccccgtcac

SEQ ID NO: 273140 - DNA, 12 bp, Artificial Sequence
  Oligonucleotide primer for the detection of SNP TSC0003060
gtgagtttgagg

SEQ ID NO: 273141 - DNA, 12 bp, Artificial Sequence
  Oligonucleotide primer for the detection of SNP TSC0003061
acctataaatat

SEQ ID NO: 273142 - DNA, 12 bp, Artificial Sequence
  Oligonucleotide primer for the detection of SNP TSC0003061
agtttgaggagt

SEQ ID NO: 273143 - DNA, 12 bp, Artificial Sequence
  Oligonucleotide primer for the detection of SNP TSC0003061
aatctaaaaaat

SEQ ID NO: 273144 - DNA, 12 bp, Artificial Sequence
  Oligonucleotide primer for the detection of SNP TSC0003061
gtttgtgagtgt

SEQ ID NO: 273145 - DNA, 12 bp, Artificial Sequence
  Oligonucleotide primer for the detection of SNP TSC0003062
ctcttaaataat

SEQ ID NO: 273146 - DNA, 12 bp, Artificial Sequence
  Oligonucleotide primer for the detection of SNP TSC0003062
agatattgaagg

SEQ ID NO: 273147 - DNA, 12 bp, Artificial Sequence
  Oligonucleotide primer for the detection of SNP TSC0003063
catatacattaa

SEQ ID NO: 273148 - DNA, 12 bp, Artificial Sequence
  Oligonucleotide primer for the detection of SNP TSC0003063
aattgttttttt

SEQ ID NO: 273149 - DNA, 12 bp, Artificial Sequence
  Oligonucleotide primer for the detection of SNP TSC0003063
aaaaaattattc

SEQ ID NO: 273150 - DNA, 12 bp, Artificial Sequence
  Oligonucleotide primer for the detection of SNP TSC0003063
atatatatattg

SEQ ID NO: 273151 - DNA, 12 bp, Artificial Sequence
  Oligonucleotide primer for the detection of SNP TSC0003064
ccaaaaaaaaaa

SEQ ID NO: 273152 - DNA, 12 bp, Artificial Sequence
  Oligonucleotide primer for the detection of SNP TSC0003064
ttgttattaatt

SEQ ID NO: 273153 - DNA, 12 bp, Artificial Sequence
  Oligonucleotide primer for the detection of SNP TSC0003064
ttactattaatt

SEQ ID NO: 273154 - DNA, 12 bp, Artificial Sequence
  Oligonucleotide primer for the detection of SNP TSC0003064
ttaaaaaaagga

SEQ ID NO: 273155 - DNA, 12 bp, Artificial Sequence
  Oligonucleotide primer for the detection of SNP TSC0003065
cttttctctaat

SEQ ID NO: 273156 - DNA, 12 bp, Artificial Sequence
  Oligonucleotide primer for the detection of SNP TSC0003065
ttggaagaattt

SEQ ID NO: 273157 - DNA, 12 bp, Artificial Sequence
  Oligonucleotide primer for the detection of SNP TSC0003066
aaaaatttccct

SEQ ID NO: 273158 - DNA, 12 bp, Artificial Sequence
  Oligonucleotide primer for the detection of SNP TSC0003066
ttttttttttga

SEQ ID NO: 273159 - DNA, 12 bp, Artificial Sequence
  Oligonucleotide primer for the detection of SNP TSC0003066
tcttttctctaa

SEQ ID NO: 273160 - DNA, 12 bp, Artificial Sequence
  Oligonucleotide primer for the detection of SNP TSC0003067
aaataaaaaata

SEQ ID NO: 273161 - DNA, 12 bp, Artificial Sequence
  Oligonucleotide primer for the detection of SNP TSC0003068
aaatagaaggta

SEQ ID NO: 273162 - DNA, 12 bp, Artificial Sequence
  Oligonucleotide primer for the detection of SNP TSC0003070
taaataaactat

SEQ ID NO: 273163 - DNA, 12 bp, Artificial Sequence
  Oligonucleotide primer for the detection of SNP TSC0003070
ttgtttgtaaag

SEQ ID NO: 273164 - DNA, 12 bp, Artificial Sequence
  Oligonucleotide primer for the detection of SNP TSC0003072
ttttttggtaaa

SEQ ID NO: 273165 - DNA, 12 bp, Artificial Sequence
  Oligonucleotide primer for the detection of SNP TSC0003073
aatcataatcct

SEQ ID NO: 273166 - DNA, 12 bp, Artificial Sequence
  Oligonucleotide primer for the detection of SNP TSC0003073
aattgatttttg

SEQ ID NO: 273167 - DNA, 12 bp, Artificial Sequence
  Oligonucleotide primer for the detection of SNP TSC0003074
aatatattaatt

SEQ ID NO: 273168 - DNA, 12 bp, Artificial Sequence
  Oligonucleotide primer for the detection of SNP TSC0003074
aaatttagataa

SEQ ID NO: 273169 - DNA, 12 bp, Artificial Sequence
  Oligonucleotide primer for the detection of SNP TSC0003075
aatatatataat

SEQ ID NO: 273170 - DNA, 12 bp, Artificial Sequence
  Oligonucleotide primer for the detection of SNP TSC0003075
aattaatagaaa

SEQ ID NO: 273171 - DNA, 12 bp, Artificial Sequence
  Oligonucleotide primer for the detection of SNP TSC0003076
aacctcttcaat

SEQ ID NO: 273172 - DNA, 12 bp, Artificial Sequence
  Oligonucleotide primer for the detection of SNP TSC0003076
atttttttaata

SEQ ID NO: 273173 - DNA, 12 bp, Artificial Sequence
  Oligonucleotide primer for the detection of SNP TSC0003078
tcaaacccccca

SEQ ID NO: 273174 - DNA, 12 bp, Artificial Sequence
  Oligonucleotide primer for the detection of SNP TSC0003078
tatatgagttag

SEQ ID NO: 273175 - DNA, 12 bp, Artificial Sequence
  Oligonucleotide primer for the detection of SNP TSC0003078
tatataaactaa

SEQ ID NO: 273176 - DNA, 12 bp, Artificial Sequence
  Oligonucleotide primer for the detection of SNP TSC0003078
tttagatttttt

SEQ ID NO: 273177 - DNA, 12 bp, Artificial Sequence
  Oligonucleotide primer for the detection of SNP TSC0003079
aacacaaccaac

SEQ ID NO: 273178 - DNA, 12 bp, Artificial Sequence
  Oligonucleotide primer for the detection of SNP TSC0003079
aggtagatttga

SEQ ID NO: 273179 - DNA, 12 bp, Artificial Sequence
  Oligonucleotide primer for the detection of SNP TSC0003079
aaacaaacttaa

SEQ ID NO: 273180 - DNA, 12 bp, Artificial Sequence
  Oligonucleotide primer for the detection of SNP TSC0003079
aatataattaat

SEQ ID NO: 273181 - DNA, 12 bp, Artificial Sequence
  Oligonucleotide primer for the detection of SNP TSC0003080
aatattaaattt

SEQ ID NO: 273182 - DNA, 12 bp, Artificial Sequence
  Oligonucleotide primer for the detection of SNP TSC0003080
ttgatatattga

SEQ ID NO: 273183 - DNA, 12 bp, Artificial Sequence
  Oligonucleotide primer for the detection of SNP TSC0003080
ctaacacattaa

SEQ ID NO: 273184 - DNA, 12 bp, Artificial Sequence
  Oligonucleotide primer for the detection of SNP TSC0003080
aatgttaaattt

SEQ ID NO: 273185 - DNA, 12 bp, Artificial Sequence
  Oligonucleotide primer for the detection of SNP TSC0003081
atttttgagttt

SEQ ID NO: 273186 - DNA, 12 bp, Artificial Sequence
  Oligonucleotide primer for the detection of SNP TSC0003081
actcctaaactc

SEQ ID NO: 273187 - DNA, 12 bp, Artificial Sequence
  Oligonucleotide primer for the detection of SNP TSC0003081
aaggtggatgaa

SEQ ID NO: 273188 - DNA, 12 bp, Artificial Sequence
  Oligonucleotide primer for the detection of SNP TSC0003082
tctatatacaat

SEQ ID NO: 273189 - DNA, 12 bp, Artificial Sequence
  Oligonucleotide primer for the detection of SNP TSC0003082
ttttttaggtta

SEQ ID NO: 273190 - DNA, 12 bp, Artificial Sequence
  Oligonucleotide primer for the detection of SNP TSC0003083
cctcatattctc

SEQ ID NO: 273191 - DNA, 12 bp, Artificial Sequence
  Oligonucleotide primer for the detection of SNP TSC0003083
gagggatttgaa

SEQ ID NO: 273192 - DNA, 12 bp, Artificial Sequence
  Oligonucleotide primer for the detection of SNP TSC0003083
ttttatattttt

SEQ ID NO: 273193 - DNA, 12 bp, Artificial Sequence
  Oligonucleotide primer for the detection of SNP TSC0003084
attataataccc

SEQ ID NO: 273194 - DNA, 12 bp, Artificial Sequence
  Oligonucleotide primer for the detection of SNP TSC0003084
attaattagagg

SEQ ID NO: 273195 - DNA, 12 bp, Artificial Sequence
  Oligonucleotide primer for the detection of SNP TSC0003085
caacttttaaaa

SEQ ID NO: 273196 - DNA, 12 bp, Artificial Sequence
  Oligonucleotide primer for the detection of SNP TSC0003085
tattaagtgaaa

SEQ ID NO: 273197 - DNA, 12 bp, Artificial Sequence
  Oligonukleotid-Primer
tattaaataaaa

SEQ ID NO: 273198 - DNA, 12 bp, Artificial Sequence
  Oligonucleotide primer for the detection of SNP TSC0003086
cacataaaaaaa

SEQ ID NO: 273199 - DNA, 12 bp, Artificial Sequence
  Oligonucleotide primer for the detection of SNP TSC0003086
taagtttattat

SEQ ID NO: 273200 - DNA, 12 bp, Artificial Sequence
  Oligonucleotide primer for the detection of SNP TSC0003086
tcaaacccatta

SEQ ID NO: 273201 - DNA, 12 bp, Artificial Sequence
  Oligonucleotide primer for the detection of SNP TSC0003086
tggttatatggg

SEQ ID NO: 273202 - DNA, 12 bp, Artificial Sequence
  Oligonucleotide primer for the detection of SNP TSC0003087
taatacattttt

SEQ ID NO: 273203 - DNA, 12 bp, Artificial Sequence
  Oligonucleotide primer for the detection of SNP TSC0003087
taatacgttttt

SEQ ID NO: 273204 - DNA, 12 bp, Artificial Sequence
  Oligonucleotide primer for the detection of SNP TSC0003087
tattaattagta

SEQ ID NO: 273205 - DNA, 12 bp, Artificial Sequence
  Oligonucleotide primer for the detection of SNP TSC0003088
ttactttccatt

SEQ ID NO: 273206 - DNA, 12 bp, Artificial Sequence
  Oligonucleotide primer for the detection of SNP TSC0003088
ttactttccgtt

SEQ ID NO: 273207 - DNA, 12 bp, Artificial Sequence
  Oligonucleotide primer for the detection of SNP TSC0003088
ttttaattgtta

SEQ ID NO: 273208 - DNA, 12 bp, Artificial Sequence
  Oligonucleotide primer for the detection of SNP TSC0003090
caaaaaacaaaa

SEQ ID NO: 273209 - DNA, 12 bp, Artificial Sequence
  Oligonucleotide primer for the detection of SNP TSC0003090
tttagattttat

SEQ ID NO: 273210 - DNA, 12 bp, Artificial Sequence
  Oligonucleotide primer for the detection of SNP TSC0003090
caaattttataa

SEQ ID NO: 273211 - DNA, 12 bp, Artificial Sequence
  Oligonucleotide primer for the detection of SNP TSC0003090
tagaaaataaaa

SEQ ID NO: 273212 - DNA, 12 bp, Artificial Sequence
  Oligonucleotide primer for the detection of SNP TSC0003092
actattatcaaa

SEQ ID NO: 273213 - DNA, 12 bp, Artificial Sequence
  Oligonucleotide primer for the detection of SNP TSC0003092
tttgtaaattat

SEQ ID NO: 273214 - DNA, 12 bp, Artificial Sequence
  Oligonucleotide primer for the detection of SNP TSC0003092
tataaaccacaa

SEQ ID NO: 273215 - DNA, 12 bp, Artificial Sequence
  Oligonucleotide primer for the detection of SNP TSC0003092
aatattgttatt

SEQ ID NO: 273216 - DNA, 12 bp, Artificial Sequence
  Oligonucleotide primer for the detection of SNP TSC0003093
ttttaaaacaac

SEQ ID NO: 273217 - DNA, 12 bp, Artificial Sequence
  Oligonucleotide primer for the detection of SNP TSC0003093
aaggagttaagg

SEQ ID NO: 273218 - DNA, 12 bp, Artificial Sequence
  Oligonucleotide primer for the detection of SNP TSC0003093
aaaaaattaaaa

SEQ ID NO: 273219 - DNA, 12 bp, Artificial Sequence
  Oligonucleotide primer for the detection of SNP TSC0003093
ttttggggtagt

SEQ ID NO: 273220 - DNA, 12 bp, Artificial Sequence
  Oligonucleotide primer for the detection of SNP TSC0003095
cctctttattct

SEQ ID NO: 273221 - DNA, 12 bp, Artificial Sequence
  Oligonucleotide primer for the detection of SNP TSC0003095
tattaaaatatg

SEQ ID NO: 273222 - DNA, 12 bp, Artificial Sequence
  Oligonucleotide primer for the detection of SNP TSC0003096
actaaaaaaatc

SEQ ID NO: 273223 - DNA, 12 bp, Artificial Sequence
  Oligonucleotide primer for the detection of SNP TSC0003096
gatatttggttt

SEQ ID NO: 273224 - DNA, 12 bp, Artificial Sequence
  Oligonucleotide primer for the detection of SNP TSC0003096
aatatctaactt

SEQ ID NO: 273225 - DNA, 12 bp, Artificial Sequence
  Oligonucleotide primer for the detection of SNP TSC0003096
gttggaaaaatt

SEQ ID NO: 273226 - DNA, 12 bp, Artificial Sequence
  Oligonucleotide primer for the detection of SNP TSC0003097
tcaaacacatta

SEQ ID NO: 273227 - DNA, 12 bp, Artificial Sequence
  Oligonucleotide primer for the detection of SNP TSC0003097
gtagatatattt

SEQ ID NO: 273228 - DNA, 12 bp, Artificial Sequence
  Oligonucleotide primer for the detection of SNP TSC0003097
acaaatatatct

SEQ ID NO: 273229 - DNA, 12 bp, Artificial Sequence
  Oligonucleotide primer for the detection of SNP TSC0003097
ttagatatatta

SEQ ID NO: 273230 - DNA, 12 bp, Artificial Sequence
  Oligonucleotide primer for the detection of SNP TSC0003098
tcctattctcaa

SEQ ID NO: 273231 - DNA, 12 bp, Artificial Sequence
  Oligonucleotide primer for the detection of SNP TSC0003098
tagttaggatgt

SEQ ID NO: 273232 - DNA, 12 bp, Artificial Sequence
  Oligonucleotide primer for the detection of SNP TSC0003098
taattaaaatat

SEQ ID NO: 273233 - DNA, 12 bp, Artificial Sequence
  Oligonucleotide primer for the detection of SNP TSC0003098
gttttgttttta

SEQ ID NO: 273234 - DNA, 12 bp, Artificial Sequence
  Oligonucleotide primer for the detection of SNP TSC0003099
taatacttaatt

SEQ ID NO: 273235 - DNA, 12 bp, Artificial Sequence
  Oligonucleotide primer for the detection of SNP TSC0003099
gtaagtattata

SEQ ID NO: 273236 - DNA, 12 bp, Artificial Sequence
  Oligonucleotide primer for the detection of SNP TSC0003099
ataaacattata

SEQ ID NO: 273237 - DNA, 12 bp, Artificial Sequence
  Oligonucleotide primer for the detection of SNP TSC0003099
tagtatttgatt

SEQ ID NO: 273238 - DNA, 12 bp, Artificial Sequence
  Oligonucleotide primer for the detection of SNP TSC0003101
ttttttttttat

SEQ ID NO: 273239 - DNA, 12 bp, Artificial Sequence
  Oligonucleotide primer for the detection of SNP TSC0003101
ctctctctctca

SEQ ID NO: 273240 - DNA, 12 bp, Artificial Sequence
  Oligonucleotide primer for the detection of SNP TSC0003102
aacaatacctac

SEQ ID NO: 273241 - DNA, 12 bp, Artificial Sequence
  Oligonucleotide primer for the detection of SNP TSC0003102
gtatttaatttg

SEQ ID NO: 273242 - DNA, 12 bp, Artificial Sequence
  Oligonucleotide primer for the detection of SNP TSC0003102
tattcaatttaa

SEQ ID NO: 273243 - DNA, 12 bp, Artificial Sequence
  Oligonucleotide primer for the detection of SNP TSC0003102
atagtatttgtt

SEQ ID NO: 273244 - DNA, 12 bp, Artificial Sequence
  Oligonucleotide primer for the detection of SNP TSC0003107
aacaaaaacttc

SEQ ID NO: 273245 - DNA, 12 bp, Artificial Sequence
  Oligonucleotide primer for the detection of SNP TSC0003107
agtttaaggtta

SEQ ID NO: 273246 - DNA, 12 bp, Artificial Sequence
  Oligonucleotide primer for the detection of SNP TSC0003107
aactcaaaacta

SEQ ID NO: 273247 - DNA, 12 bp, Artificial Sequence
  Oligonucleotide primer for the detection of SNP TSC0003107
gatagaaatttt

SEQ ID NO: 273248 - DNA, 12 bp, Artificial Sequence
  Oligonucleotide primer for the detection of SNP TSC0003108
taacttctacct

SEQ ID NO: 273249 - DNA, 12 bp, Artificial Sequence
  Oligonucleotide primer for the detection of SNP TSC0003108
tatttgagataa

SEQ ID NO: 273250 - DNA, 12 bp, Artificial Sequence
  Oligonucleotide primer for the detection of SNP TSC0003109
catttttataat

SEQ ID NO: 273251 - DNA, 12 bp, Artificial Sequence
  Oligonucleotide primer for the detection of SNP TSC0003109
cgtttttataat

SEQ ID NO: 273252 - DNA, 12 bp, Artificial Sequence
  Oligonucleotide primer for the detection of SNP TSC0003109
gttgttgatggg

SEQ ID NO: 273253 - DNA, 12 bp, Artificial Sequence
  Oligonucleotide primer for the detection of SNP TSC0003110
cctcaactatct

SEQ ID NO: 273254 - DNA, 12 bp, Artificial Sequence
  Oligonucleotide primer for the detection of SNP TSC0003110
attatagtattt

SEQ ID NO: 273255 - DNA, 12 bp, Artificial Sequence
  Oligonucleotide primer for the detection of SNP TSC0003113
taatcacccaat

SEQ ID NO: 273256 - DNA, 12 bp, Artificial Sequence
  Oligonucleotide primer for the detection of SNP TSC0003114
aaaaacctaact

SEQ ID NO: 273257 - DNA, 12 bp, Artificial Sequence
  Oligonucleotide primer for the detection of SNP TSC0003114
ttttatttgatt

SEQ ID NO: 273258 - DNA, 12 bp, Artificial Sequence
  Oligonucleotide primer for the detection of SNP TSC0003114
ttttacctaatt

SEQ ID NO: 273259 - DNA, 12 bp, Artificial Sequence
  Oligonucleotide primer for the detection of SNP TSC0003114
gaaggtttgatt

SEQ ID NO: 273260 - DNA, 12 bp, Artificial Sequence
  Oligonucleotide primer for the detection of SNP TSC0003115
attttttttaaa

SEQ ID NO: 273261 - DNA, 12 bp, Artificial Sequence
  Oligonucleotide primer for the detection of SNP TSC0003115
gttttttttggg

SEQ ID NO: 273262 - DNA, 12 bp, Artificial Sequence
  Oligonucleotide primer for the detection of SNP TSC0003116
ttttgttttttt

SEQ ID NO: 273263 - DNA, 12 bp, Artificial Sequence
  Oligonucleotide primer for the detection of SNP TSC0003117
ttttctttcttt

SEQ ID NO: 273264 - DNA, 12 bp, Artificial Sequence
  Oligonucleotide primer for the detection of SNP TSC0003118
actttaaaaaac

SEQ ID NO: 273265 - DNA, 12 bp, Artificial Sequence
  Oligonucleotide primer for the detection of SNP TSC0003118
gtgatttgtttg

SEQ ID NO: 273266 - DNA, 12 bp, Artificial Sequence
  Oligonucleotide primer for the detection of SNP TSC0003118
ataatctaccta

SEQ ID NO: 273267 - DNA, 12 bp, Artificial Sequence
  Oligonucleotide primer for the detection of SNP TSC0003118
attttgggaggt

SEQ ID NO: 273268 - DNA, 12 bp, Artificial Sequence
  Oligonucleotide primer for the detection of SNP TSC0003119
ctcacaccttac

SEQ ID NO: 273269 - DNA, 12 bp, Artificial Sequence
  Oligonucleotide primer for the detection of SNP TSC0003119
taaaggttttga

SEQ ID NO: 273270 - DNA, 12 bp, Artificial Sequence
  Oligonucleotide primer for the detection of SNP TSC0003120
taaaacacatcc

SEQ ID NO: 273271 - DNA, 12 bp, Artificial Sequence
  Oligonucleotide primer for the detection of SNP TSC0003120
taagatttttta

SEQ ID NO: 273272 - DNA, 12 bp, Artificial Sequence
  Oligonucleotide primer for the detection of SNP TSC0003121
tatctaaataac

SEQ ID NO: 273273 - DNA, 12 bp, Artificial Sequence
  Oligonucleotide primer for the detection of SNP TSC0003121
ggggttgttagg

SEQ ID NO: 273274 - DNA, 12 bp, Artificial Sequence
  Oligonucleotide primer for the detection of SNP TSC0003123
attttaaaatta

SEQ ID NO: 273275 - DNA, 12 bp, Artificial Sequence
  Oligonucleotide primer for the detection of SNP TSC0003123
ttaaaaatttta

SEQ ID NO: 273276 - DNA, 12 bp, Artificial Sequence
  Oligonucleotide primer for the detection of SNP TSC0003124
actaaaattaca

SEQ ID NO: 273277 - DNA, 12 bp, Artificial Sequence
  Oligonucleotide primer for the detection of SNP TSC0003124
agtggtttatat

SEQ ID NO: 273278 - DNA, 12 bp, Artificial Sequence
  Oligonucleotide primer for the detection of SNP TSC0003124
caataactcaca

SEQ ID NO: 273279 - DNA, 12 bp, Artificial Sequence
  Oligonucleotide primer for the detection of SNP TSC0003124
tgttgggattat

SEQ ID NO: 273280 - DNA, 12 bp, Artificial Sequence
  Oligonucleotide primer for the detection of SNP TSC0003126
ctttcattaaac

SEQ ID NO: 273281 - DNA, 12 bp, Artificial Sequence
  Oligonucleotide primer for the detection of SNP TSC0003126
gatatagtaaga

SEQ ID NO: 273282 - DNA, 12 bp, Artificial Sequence
  Oligonucleotide primer for the detection of SNP TSC0003128
taatctcctcac

SEQ ID NO: 273283 - DNA, 12 bp, Artificial Sequence
  Oligonucleotide primer for the detection of SNP TSC0003128
agtagattatga

SEQ ID NO: 273284 - DNA, 12 bp, Artificial Sequence
  Oligonucleotide primer for the detection of SNP TSC0003128
agtagattacga

SEQ ID NO: 273285 - DNA, 12 bp, Artificial Sequence
  Oligonucleotide primer for the detection of SNP TSC0003129
taatattaacaa

SEQ ID NO: 273286 - DNA, 12 bp, Artificial Sequence
  Oligonucleotide primer for the detection of SNP TSC0003129
aaaatatatttt

SEQ ID NO: 273287 - DNA, 12 bp, Artificial Sequence
  Oligonucleotide primer for the detection of SNP TSC0003129
cattaaaacaca

SEQ ID NO: 273288 - DNA, 12 bp, Artificial Sequence
  Oligonucleotide primer for the detection of SNP TSC0003129
tataatgttaat

SEQ ID NO: 273289 - DNA, 12 bp, Artificial Sequence
  Oligonucleotide primer for the detection of SNP TSC0003130
aaaccaattaaa

SEQ ID NO: 273290 - DNA, 12 bp, Artificial Sequence
  Oligonucleotide primer for the detection of SNP TSC0003130
atgtggtaaagt

SEQ ID NO: 273291 - DNA, 12 bp, Artificial Sequence
  Oligonucleotide primer for the detection of SNP TSC0003130
atgtggtaaagc

SEQ ID NO: 273292 - DNA, 12 bp, Artificial Sequence
  Oligonucleotide primer for the detection of SNP TSC0003130
atataacaaaac

SEQ ID NO: 273293 - DNA, 12 bp, Artificial Sequence
  Oligonucleotide primer for the detection of SNP TSC0003130
gaggattagttg

SEQ ID NO: 273294 - DNA, 12 bp, Artificial Sequence
  Oligonucleotide primer for the detection of SNP TSC0003131
tcaataatatat

SEQ ID NO: 273295 - DNA, 12 bp, Artificial Sequence
  Oligonucleotide primer for the detection of SNP TSC0003131
taagataatgat

SEQ ID NO: 273296 - DNA, 12 bp, Artificial Sequence
  Oligonucleotide primer for the detection of SNP TSC0003131
taaaacaataac

SEQ ID NO: 273297 - DNA, 12 bp, Artificial Sequence
  Oligonucleotide primer for the detection of SNP TSC0003131
ttaataatatat

SEQ ID NO: 273298 - DNA, 12 bp, Artificial Sequence
  Oligonucleotide primer for the detection of SNP TSC0003132
tttacaactcaa

SEQ ID NO: 273299 - DNA, 12 bp, Artificial Sequence
  Oligonucleotide primer for the detection of SNP TSC0003132
atgataatatat

SEQ ID NO: 273300 - DNA, 12 bp, Artificial Sequence
  Oligonucleotide primer for the detection of SNP TSC0003132
ataacaatatat

SEQ ID NO: 273301 - DNA, 12 bp, Artificial Sequence
  Oligonucleotide primer for the detection of SNP TSC0003132
ttataatttaat

SEQ ID NO: 273302 - DNA, 12 bp, Artificial Sequence
  Oligonucleotide primer for the detection of SNP TSC0003133
tccaacaattct

SEQ ID NO: 273303 - DNA, 12 bp, Artificial Sequence
  Oligonucleotide primer for the detection of SNP TSC0003133
atatatttagga

SEQ ID NO: 273304 - DNA, 12 bp, Artificial Sequence
  Oligonucleotide primer for the detection of SNP TSC0003133
tatacctaaaaa

SEQ ID NO: 273305 - DNA, 12 bp, Artificial Sequence
  Oligonucleotide primer for the detection of SNP TSC0003133
tttagtaatttt

SEQ ID NO: 273306 - DNA, 12 bp, Artificial Sequence
  Oligonukleotid-Primer
aaaaataacaaa

SEQ ID NO: 273307 - DNA, 12 bp, Artificial Sequence
  Oligonucleotide primer for the detection of SNP TSC0003134
atttttgttaat

SEQ ID NO: 273308 - DNA, 12 bp, Artificial Sequence
  Oligonucleotide primer for the detection of SNP TSC0003134
catccttaccaa

SEQ ID NO: 273309 - DNA, 12 bp, Artificial Sequence
  Oligonucleotide primer for the detection of SNP TSC0003134
ggaaaataataa

SEQ ID NO: 273310 - DNA, 12 bp, Artificial Sequence
  Oligonucleotide primer for the detection of SNP TSC0003135
aataaacccaaa

SEQ ID NO: 273311 - DNA, 12 bp, Artificial Sequence
  Oligonucleotide primer for the detection of SNP TSC0003135
tttagtttttat

SEQ ID NO: 273312 - DNA, 12 bp, Artificial Sequence
  Oligonucleotide primer for the detection of SNP TSC0003135
tttagtttttac

SEQ ID NO: 273313 - DNA, 12 bp, Artificial Sequence
  Oligonucleotide primer for the detection of SNP TSC0003135
tttcaactccca

SEQ ID NO: 273314 - DNA, 12 bp, Artificial Sequence
  Oligonucleotide primer for the detection of SNP TSC0003135
agggtgaattta

SEQ ID NO: 273315 - DNA, 12 bp, Artificial Sequence
  Oligonucleotide primer for the detection of SNP TSC0003136
caataaaataaa

SEQ ID NO: 273316 - DNA, 12 bp, Artificial Sequence
  Oligonucleotide primer for the detection of SNP TSC0003136
tgttttttattt

SEQ ID NO: 273317 - DNA, 12 bp, Artificial Sequence
  Oligonucleotide primer for the detection of SNP TSC0003136
cctttactcaaa

SEQ ID NO: 273318 - DNA, 12 bp, Artificial Sequence
  Oligonucleotide primer for the detection of SNP TSC0003136
ataagataagtt

SEQ ID NO: 273319 - DNA, 12 bp, Artificial Sequence
  Oligonucleotide primer for the detection of SNP TSC0003137
aacaaatttttt

SEQ ID NO: 273320 - DNA, 12 bp, Artificial Sequence
  Oligonucleotide primer for the detection of SNP TSC0003137
aaatattataat

SEQ ID NO: 273321 - DNA, 12 bp, Artificial Sequence
  Oligonucleotide primer for the detection of SNP TSC0003137
aaacatcataat

SEQ ID NO: 273322 - DNA, 12 bp, Artificial Sequence
  Oligonucleotide primer for the detection of SNP TSC0003137
agtagatttttt

SEQ ID NO: 273323 - DNA, 12 bp, Artificial Sequence
  Oligonucleotide primer for the detection of SNP TSC0003138
tttattaatata

SEQ ID NO: 273324 - DNA, 12 bp, Artificial Sequence
  Oligonucleotide primer for the detection of SNP TSC0003139
tcttcctaaaat

SEQ ID NO: 273325 - DNA, 12 bp, Artificial Sequence
  Oligonucleotide primer for the detection of SNP TSC0003139
aagtaagttgaa

SEQ ID NO: 273326 - DNA, 12 bp, Artificial Sequence
  Oligonucleotide primer for the detection of SNP TSC0003139
aaacaaattaaa

SEQ ID NO: 273327 - DNA, 12 bp, Artificial Sequence
  Oligonucleotide primer for the detection of SNP TSC0003139
tttttttgaagt

SEQ ID NO: 273328 - DNA, 12 bp, Artificial Sequence
  Oligonucleotide primer for the detection of SNP TSC0003140
aaaactctactt

SEQ ID NO: 273329 - DNA, 12 bp, Artificial Sequence
  Oligonucleotide primer for the detection of SNP TSC0003140
aattgaaggaaa

SEQ ID NO: 273330 - DNA, 12 bp, Artificial Sequence
  Oligonucleotide primer for the detection of SNP TSC0003141
tccttatccttt

SEQ ID NO: 273331 - DNA, 12 bp, Artificial Sequence
  Oligonucleotide primer for the detection of SNP TSC0003141
atgattagaata

SEQ ID NO: 273332 - DNA, 12 bp, Artificial Sequence
  Oligonucleotide primer for the detection of SNP TSC0003142
ccacctaactaa

SEQ ID NO: 273333 - DNA, 12 bp, Artificial Sequence
  Oligonucleotide primer for the detection of SNP TSC0003142
ttttagttatta

SEQ ID NO: 273334 - DNA, 12 bp, Artificial Sequence
  Oligonucleotide primer for the detection of SNP TSC0003142
ttctaatcatta

SEQ ID NO: 273335 - DNA, 12 bp, Artificial Sequence
  Oligonucleotide primer for the detection of SNP TSC0003142
tattatttagtt

SEQ ID NO: 273336 - DNA, 12 bp, Artificial Sequence
  Oligonucleotide primer for the detection of SNP TSC0003144
aaaaatataacc

SEQ ID NO: 273337 - DNA, 12 bp, Artificial Sequence
  Oligonucleotide primer for the detection of SNP TSC0003144
tttttttttgaa

SEQ ID NO: 273338 - DNA, 12 bp, Artificial Sequence
  Oligonucleotide primer for the detection of SNP TSC0003145
cttcattttcta

SEQ ID NO: 273339 - DNA, 12 bp, Artificial Sequence
  Oligonucleotide primer for the detection of SNP TSC0003145
tttgatatttat

SEQ ID NO: 273340 - DNA, 12 bp, Artificial Sequence
  Oligonucleotide primer for the detection of SNP TSC0003145
cttaatatccac

SEQ ID NO: 273341 - DNA, 12 bp, Artificial Sequence
  Oligonucleotide primer for the detection of SNP TSC0003145
ttttattttttg

SEQ ID NO: 273342 - DNA, 12 bp, Artificial Sequence
  Oligonucleotide primer for the detection of SNP TSC0003146
tataatttcaac

SEQ ID NO: 273343 - DNA, 12 bp, Artificial Sequence
  Oligonucleotide primer for the detection of SNP TSC0003146
agatttagatgt

SEQ ID NO: 273344 - DNA, 12 bp, Artificial Sequence
  Oligonucleotide primer for the detection of SNP TSC0003146
acttaaatataa

SEQ ID NO: 273345 - DNA, 12 bp, Artificial Sequence
  Oligonucleotide primer for the detection of SNP TSC0003146
ataattttagtt

SEQ ID NO: 273346 - DNA, 12 bp, Artificial Sequence
  Oligonucleotide primer for the detection of SNP TSC0003147
aaaatacccatt

SEQ ID NO: 273347 - DNA, 12 bp, Artificial Sequence
  Oligonucleotide primer for the detection of SNP TSC0003147
aaaatacccgtt

SEQ ID NO: 273348 - DNA, 12 bp, Artificial Sequence
  Oligonucleotide primer for the detection of SNP TSC0003147
agtaataagttt

SEQ ID NO: 273349 - DNA, 12 bp, Artificial Sequence
  Oligonucleotide primer for the detection of SNP TSC0003147
agggtatttgtt

SEQ ID NO: 273350 - DNA, 12 bp, Artificial Sequence
  Oligonucleotide primer for the detection of SNP TSC0003147
agggtattcgtt

SEQ ID NO: 273351 - DNA, 12 bp, Artificial Sequence
  Oligonucleotide primer for the detection of SNP TSC0003148
aaaataaactac

SEQ ID NO: 273352 - DNA, 12 bp, Artificial Sequence
  Oligonucleotide primer for the detection of SNP TSC0003148
agaaaagaaaaa

SEQ ID NO: 273353 - DNA, 12 bp, Artificial Sequence
  Oligonucleotide primer for the detection of SNP TSC0003149
aaaaacaaaacc

SEQ ID NO: 273354 - DNA, 12 bp, Artificial Sequence
  Oligonucleotide primer for the detection of SNP TSC0003149
gattaggtgata

SEQ ID NO: 273355 - DNA, 12 bp, Artificial Sequence
  Oligonucleotide primer for the detection of SNP TSC0003149
aaccaaataaca

SEQ ID NO: 273356 - DNA, 12 bp, Artificial Sequence
  Oligonucleotide primer for the detection of SNP TSC0003149
aggaataaagtt

SEQ ID NO: 273357 - DNA, 12 bp, Artificial Sequence
  Oligonucleotide primer for the detection of SNP TSC0003150
aattctaaaaac

SEQ ID NO: 273358 - DNA, 12 bp, Artificial Sequence
  Oligonucleotide primer for the detection of SNP TSC0003150
attaagggtaag

SEQ ID NO: 273359 - DNA, 12 bp, Artificial Sequence
  Oligonucleotide primer for the detection of SNP TSC0003150
attaaaaacaaa

SEQ ID NO: 273360 - DNA, 12 bp, Artificial Sequence
  Oligonucleotide primer for the detection of SNP TSC0003150
aattttaaaagt

SEQ ID NO: 273361 - DNA, 12 bp, Artificial Sequence
  Oligonucleotide primer for the detection of SNP TSC0003152
aaataacatcct

SEQ ID NO: 273362 - DNA, 12 bp, Artificial Sequence
  Oligonucleotide primer for the detection of SNP TSC0003152
tataagtaaaga

SEQ ID NO: 273363 - DNA, 12 bp, Artificial Sequence
  Oligonucleotide primer for the detection of SNP TSC0003152
cataaacaaaaa

SEQ ID NO: 273364 - DNA, 12 bp, Artificial Sequence
  Oligonucleotide primer for the detection of SNP TSC0003152
aaatgatatttt

SEQ ID NO: 273365 - DNA, 12 bp, Artificial Sequence
  Oligonucleotide primer for the detection of SNP TSC0003153
aaaaaaaccttc

SEQ ID NO: 273366 - DNA, 12 bp, Artificial Sequence
  Oligonucleotide primer for the detection of SNP TSC0003153
agatgtaaaaga

SEQ ID NO: 273367 - DNA, 12 bp, Artificial Sequence
  Oligonucleotide primer for the detection of SNP TSC0003154
aactataatcat

SEQ ID NO: 273368 - DNA, 12 bp, Artificial Sequence
  Oligonucleotide primer for the detection of SNP TSC0003154
ggattatggaaa

SEQ ID NO: 273369 - DNA, 12 bp, Artificial Sequence
  Oligonucleotide primer for the detection of SNP TSC0003154
ggattacggaaa

SEQ ID NO: 273370 - DNA, 12 bp, Artificial Sequence
  Oligonucleotide primer for the detection of SNP TSC0003155
tacaatcataca

SEQ ID NO: 273371 - DNA, 12 bp, Artificial Sequence
  Oligonucleotide primer for the detection of SNP TSC0003155
aaaaaaataaat

SEQ ID NO: 273372 - DNA, 12 bp, Artificial Sequence
  Oligonucleotide primer for the detection of SNP TSC0003155
aaaaaacaaata

SEQ ID NO: 273373 - DNA, 12 bp, Artificial Sequence
  Oligonucleotide primer for the detection of SNP TSC0003155
tgtaattatata

SEQ ID NO: 273374 - DNA, 12 bp, Artificial Sequence
  Oligonucleotide primer for the detection of SNP TSC0003156
aaacttctatac

SEQ ID NO: 273375 - DNA, 12 bp, Artificial Sequence
  Oligonucleotide primer for the detection of SNP TSC0003156
ggaaggagtttg

SEQ ID NO: 273376 - DNA, 12 bp, Artificial Sequence
  Oligonucleotide primer for the detection of SNP TSC0003156
aaaaaaaaccta

SEQ ID NO: 273377 - DNA, 12 bp, Artificial Sequence
  Oligonucleotide primer for the detection of SNP TSC0003156
aaatttttgtat

SEQ ID NO: 273378 - DNA, 12 bp, Artificial Sequence
  Oligonucleotide primer for the detection of SNP TSC0003157
aaacaattattc

SEQ ID NO: 273379 - DNA, 12 bp, Artificial Sequence
  Oligonucleotide primer for the detection of SNP TSC0003157
aaacgattattc

SEQ ID NO: 273380 - DNA, 12 bp, Artificial Sequence
  Oligonucleotide primer for the detection of SNP TSC0003157
gtttagaaagag

SEQ ID NO: 273381 - DNA, 12 bp, Artificial Sequence
  Oligonucleotide primer for the detection of SNP TSC0003162
aataacacttta

SEQ ID NO: 273382 - DNA, 12 bp, Artificial Sequence
  Oligonucleotide primer for the detection of SNP TSC0003162
aataacgcttta

SEQ ID NO: 273383 - DNA, 12 bp, Artificial Sequence
  Oligonukleotid-Primer
aaaagggtgaat

SEQ ID NO: 273384 - DNA, 12 bp, Artificial Sequence
  Oligonucleotide primer for the detection of SNP TSC0003162
ggtaatgtttta

SEQ ID NO: 273385 - DNA, 12 bp, Artificial Sequence
  Oligonucleotide primer for the detection of SNP TSC0003162
ggtaacgtttta

SEQ ID NO: 273386 - DNA, 12 bp, Artificial Sequence
  Oligonucleotide primer for the detection of SNP TSC0003163
tttatttatata

SEQ ID NO: 273387 - DNA, 12 bp, Artificial Sequence
  Oligonukleotid-Primer
aatattataaaa

SEQ ID NO: 273388 - DNA, 12 bp, Artificial Sequence
  Oligonucleotide primer for the detection of SNP TSC0003164
aaggtggtatta

SEQ ID NO: 273389 - DNA, 12 bp, Artificial Sequence
  Oligonucleotide primer for the detection of SNP TSC0003164
aaaataacacca

SEQ ID NO: 273390 - DNA, 12 bp, Artificial Sequence
  Oligonucleotide primer for the detection of SNP TSC0003164
aagtgttataaa

SEQ ID NO: 273391 - DNA, 12 bp, Artificial Sequence
  Oligonucleotide primer for the detection of SNP TSC0003165
ttattatttcca

SEQ ID NO: 273392 - DNA, 12 bp, Artificial Sequence
  Oligonucleotide primer for the detection of SNP TSC0003165
tttgtatatttt

SEQ ID NO: 273393 - DNA, 12 bp, Artificial Sequence
  Oligonucleotide primer for the detection of SNP TSC0003165
cttatatatttc

SEQ ID NO: 273394 - DNA, 12 bp, Artificial Sequence
  Oligonucleotide primer for the detection of SNP TSC0003165
ttattgttttta

SEQ ID NO: 273395 - DNA, 12 bp, Artificial Sequence
  Oligonucleotide primer for the detection of SNP TSC0003166
aataatataatt

SEQ ID NO: 273396 - DNA, 12 bp, Artificial Sequence
  Oligonucleotide primer for the detection of SNP TSC0003166
aaggaaggttta

SEQ ID NO: 273397 - DNA, 12 bp, Artificial Sequence
  Oligonucleotide primer for the detection of SNP TSC0003169
tcaaaaaaataa

SEQ ID NO: 273398 - DNA, 12 bp, Artificial Sequence
  Oligonucleotide primer for the detection of SNP TSC0003169
agtgtttttttt

SEQ ID NO: 273399 - DNA, 12 bp, Artificial Sequence
  Oligonucleotide primer for the detection of SNP TSC0003169
aatactcctctc

SEQ ID NO: 273400 - DNA, 12 bp, Artificial Sequence
  Oligonucleotide primer for the detection of SNP TSC0003169
ttaggagggtga

SEQ ID NO: 273401 - DNA, 12 bp, Artificial Sequence
  Oligonucleotide primer for the detection of SNP TSC0003170
taaaaaaaactt

SEQ ID NO: 273402 - DNA, 12 bp, Artificial Sequence
  Oligonucleotide primer for the detection of SNP TSC0003170
ttaattttttaa

SEQ ID NO: 273403 - DNA, 12 bp, Artificial Sequence
  Oligonucleotide primer for the detection of SNP TSC0003171
ctactattatct

SEQ ID NO: 273404 - DNA, 12 bp, Artificial Sequence
  Oligonucleotide primer for the detection of SNP TSC0003171
acatcatattca

SEQ ID NO: 273405 - DNA, 12 bp, Artificial Sequence
  Oligonucleotide primer for the detection of SNP TSC0003171
ttgttattgttt

SEQ ID NO: 273406 - DNA, 12 bp, Artificial Sequence
  Oligonucleotide primer for the detection of SNP TSC0003172
taaatctatata

SEQ ID NO: 273407 - DNA, 12 bp, Artificial Sequence
  Oligonucleotide primer for the detection of SNP TSC0003172
ttttatttgttt

SEQ ID NO: 273408 - DNA, 12 bp, Artificial Sequence
  Oligonucleotide primer for the detection of SNP TSC0003172
ttttatttactt

SEQ ID NO: 273409 - DNA, 12 bp, Artificial Sequence
  Oligonucleotide primer for the detection of SNP TSC0003172
taaatttatata

SEQ ID NO: 273410 - DNA, 12 bp, Artificial Sequence
  Oligonucleotide primer for the detection of SNP TSC0003173
aactaaaaaact

SEQ ID NO: 273411 - DNA, 12 bp, Artificial Sequence
  Oligonucleotide primer for the detection of SNP TSC0003173
tttggaatttta

SEQ ID NO: 273412 - DNA, 12 bp, Artificial Sequence
  Oligonucleotide primer for the detection of SNP TSC0003174
cctaaaaattct

SEQ ID NO: 273413 - DNA, 12 bp, Artificial Sequence
  Oligonucleotide primer for the detection of SNP TSC0003174
ttggaggggtta

SEQ ID NO: 273414 - DNA, 12 bp, Artificial Sequence
  Oligonucleotide primer for the detection of SNP TSC0003175
aataacaccact

SEQ ID NO: 273415 - DNA, 12 bp, Artificial Sequence
  Oligonucleotide primer for the detection of SNP TSC0003175
tttaggttaaag

SEQ ID NO: 273416 - DNA, 12 bp, Artificial Sequence
  Oligonucleotide primer for the detection of SNP TSC0003177
actcctcttttc

SEQ ID NO: 273417 - DNA, 12 bp, Artificial Sequence
  Oligonucleotide primer for the detection of SNP TSC0003177
ttagtggtatgg

SEQ ID NO: 273418 - DNA, 12 bp, Artificial Sequence
  Oligonucleotide primer for the detection of SNP TSC0003177
ccaataacataa

SEQ ID NO: 273419 - DNA, 12 bp, Artificial Sequence
  Oligonucleotide primer for the detection of SNP TSC0003178
aaaaaaaaacct

SEQ ID NO: 273420 - DNA, 12 bp, Artificial Sequence
  Oligonucleotide primer for the detection of SNP TSC0003178
gaatgtggtttg

SEQ ID NO: 273421 - DNA, 12 bp, Artificial Sequence
  Oligonucleotide primer for the detection of SNP TSC0003179
ccatactctcta

SEQ ID NO: 273422 - DNA, 12 bp, Artificial Sequence
  Oligonucleotide primer for the detection of SNP TSC0003179
tatgaagtgggg

SEQ ID NO: 273423 - DNA, 12 bp, Artificial Sequence
  Oligonucleotide primer for the detection of SNP TSC0003179
tataaaataaaa

SEQ ID NO: 273424 - DNA, 12 bp, Artificial Sequence
  Oligonucleotide primer for the detection of SNP TSC0003179
ttatattttttg

SEQ ID NO: 273425 - DNA, 12 bp, Artificial Sequence
  Oligonucleotide primer for the detection of SNP TSC0003180
aaaattttatct

SEQ ID NO: 273426 - DNA, 12 bp, Artificial Sequence
  Oligonucleotide primer for the detection of SNP TSC0003180
gtatagagaata

SEQ ID NO: 273427 - DNA, 12 bp, Artificial Sequence
  Oligonucleotide primer for the detection of SNP TSC0003180
atataaaaaaca

SEQ ID NO: 273428 - DNA, 12 bp, Artificial Sequence
  Oligonucleotide primer for the detection of SNP TSC0003180
aaggttttgttt

SEQ ID NO: 273429 - DNA, 12 bp, Artificial Sequence
  Oligonucleotide primer for the detection of SNP TSC0003181
ttcctaactcca

SEQ ID NO: 273430 - DNA, 12 bp, Artificial Sequence
  Oligonucleotide primer for the detection of SNP TSC0003181
gtttatgtattt

SEQ ID NO: 273431 - DNA, 12 bp, Artificial Sequence
  Oligonucleotide primer for the detection of SNP TSC0003181
gtttacgtattt

SEQ ID NO: 273432 - DNA, 12 bp, Artificial Sequence
  Oligonucleotide primer for the detection of SNP TSC0003181
attcacacacct

SEQ ID NO: 273433 - DNA, 12 bp, Artificial Sequence
  Oligonucleotide primer for the detection of SNP TSC0003181
attcacgcacct

SEQ ID NO: 273434 - DNA, 12 bp, Artificial Sequence
  Oligonucleotide primer for the detection of SNP TSC0003181
tttttggtttta

SEQ ID NO: 273435 - DNA, 12 bp, Artificial Sequence
  Oligonucleotide primer for the detection of SNP TSC0003182
ttaaaaaaactc

SEQ ID NO: 273436 - DNA, 12 bp, Artificial Sequence
  Oligonucleotide primer for the detection of SNP TSC0003182
aagaaagaggtg

SEQ ID NO: 273437 - DNA, 12 bp, Artificial Sequence
  Oligonucleotide primer for the detection of SNP TSC0003186
tttaattaattt

SEQ ID NO: 273438 - DNA, 12 bp, Artificial Sequence
  Oligonucleotide primer for the detection of SNP TSC0003186
taattatatttt

SEQ ID NO: 273439 - DNA, 12 bp, Artificial Sequence
  Oligonucleotide primer for the detection of SNP TSC0003188
atatttctctat

SEQ ID NO: 273440 - DNA, 12 bp, Artificial Sequence
  Oligonucleotide primer for the detection of SNP TSC0003188
gaatataagtaa

SEQ ID NO: 273441 - DNA, 12 bp, Artificial Sequence
  Oligonucleotide primer for the detection of SNP TSC0003189
attcttactcta

SEQ ID NO: 273442 - DNA, 12 bp, Artificial Sequence
  Oligonucleotide primer for the detection of SNP TSC0003189
ttttgatatgta

SEQ ID NO: 273443 - DNA, 12 bp, Artificial Sequence
  Oligonucleotide primer for the detection of SNP TSC0003189
tctaatatataa

SEQ ID NO: 273444 - DNA, 12 bp, Artificial Sequence
  Oligonucleotide primer for the detection of SNP TSC0003189
atttttatttta

SEQ ID NO: 273445 - DNA, 12 bp, Artificial Sequence
  Oligonucleotide primer for the detection of SNP TSC0003190
caaatcaattta

SEQ ID NO: 273446 - DNA, 12 bp, Artificial Sequence
  Oligonucleotide primer for the detection of SNP TSC0003190
gttttttaagta

SEQ ID NO: 273447 - DNA, 12 bp, Artificial Sequence
  Oligonucleotide primer for the detection of SNP TSC0003190
acttcctaaata

SEQ ID NO: 273448 - DNA, 12 bp, Artificial Sequence
  Oligonucleotide primer for the detection of SNP TSC0003190
ggttaatttgtt

SEQ ID NO: 273449 - DNA, 12 bp, Artificial Sequence
  Oligonucleotide primer for the detection of SNP TSC0003190
ggttaatttgtc

SEQ ID NO: 273450 - DNA, 12 bp, Artificial Sequence
  Oligonucleotide primer for the detection of SNP TSC0003191
ttcttttctttt

SEQ ID NO: 273451 - DNA, 12 bp, Artificial Sequence
  Oligonucleotide primer for the detection of SNP TSC0003192
taataaccacaa

SEQ ID NO: 273452 - DNA, 12 bp, Artificial Sequence
  Oligonucleotide primer for the detection of SNP TSC0003192
gtatttttattt

SEQ ID NO: 273453 - DNA, 12 bp, Artificial Sequence
  Oligonucleotide primer for the detection of SNP TSC0003192
cattttcactta

SEQ ID NO: 273454 - DNA, 12 bp, Artificial Sequence
  Oligonucleotide primer for the detection of SNP TSC0003192
tttaataattat

SEQ ID NO: 273455 - DNA, 12 bp, Artificial Sequence
  Oligonucleotide primer for the detection of SNP TSC0003193
taacaaaaaaat

SEQ ID NO: 273456 - DNA, 12 bp, Artificial Sequence
  Oligonucleotide primer for the detection of SNP TSC0003193
tatatatgttta

SEQ ID NO: 273457 - DNA, 12 bp, Artificial Sequence
  Oligonucleotide primer for the detection of SNP TSC0003194
ttcatatttctt

SEQ ID NO: 273458 - DNA, 12 bp, Artificial Sequence
  Oligonucleotide primer for the detection of SNP TSC0003194
gataaaataagg

SEQ ID NO: 273459 - DNA, 12 bp, Artificial Sequence
  Oligonucleotide primer for the detection of SNP TSC0003195
ttcaaattttct

SEQ ID NO: 273460 - DNA, 12 bp, Artificial Sequence
  Oligonucleotide primer for the detection of SNP TSC0003195
tgatttaaaaag

SEQ ID NO: 273461 - DNA, 12 bp, Artificial Sequence
  Oligonucleotide primer for the detection of SNP TSC0003196
cacttttattta

SEQ ID NO: 273462 - DNA, 12 bp, Artificial Sequence
  Oligonucleotide primer for the detection of SNP TSC0003196
atttaaaagtat

SEQ ID NO: 273463 - DNA, 12 bp, Artificial Sequence
  Oligonucleotide primer for the detection of SNP TSC0003196
attcaaaaacat

SEQ ID NO: 273464 - DNA, 12 bp, Artificial Sequence
  Oligonucleotide primer for the detection of SNP TSC0003196
tatttttatttg

SEQ ID NO: 273465 - DNA, 12 bp, Artificial Sequence
  Oligonucleotide primer for the detection of SNP TSC0003197
tcttttaaaaat

SEQ ID NO: 273466 - DNA, 12 bp, Artificial Sequence
  Oligonucleotide primer for the detection of SNP TSC0003197
ttttgtataaaa

SEQ ID NO: 273467 - DNA, 12 bp, Artificial Sequence
  Oligonucleotide primer for the detection of SNP TSC0003198
tattattataca

SEQ ID NO: 273468 - DNA, 12 bp, Artificial Sequence
  Oligonucleotide primer for the detection of SNP TSC0003198
tattattatacg

SEQ ID NO: 273469 - DNA, 12 bp, Artificial Sequence
  Oligonucleotide primer for the detection of SNP TSC0003198
ttgggggttttt

SEQ ID NO: 273470 - DNA, 12 bp, Artificial Sequence
  Oligonucleotide primer for the detection of SNP TSC0003198
ttaaaaacctcc

SEQ ID NO: 273471 - DNA, 12 bp, Artificial Sequence
  Oligonucleotide primer for the detection of SNP TSC0003198
tgttattgtgtg

SEQ ID NO: 273472 - DNA, 12 bp, Artificial Sequence
  Oligonucleotide primer for the detection of SNP TSC0003198
tgttattgtgcg

SEQ ID NO: 273473 - DNA, 12 bp, Artificial Sequence
  Oligonucleotide primer for the detection of SNP TSC0003199
attttgtgatga

SEQ ID NO: 273474 - DNA, 12 bp, Artificial Sequence
  Oligonucleotide primer for the detection of SNP TSC0003199
attttgtgacga

SEQ ID NO: 273475 - DNA, 12 bp, Artificial Sequence
  Oligonucleotide primer for the detection of SNP TSC0003200
acactatatcct

SEQ ID NO: 273476 - DNA, 12 bp, Artificial Sequence
  Oligonucleotide primer for the detection of SNP TSC0003200
gggattaggttg

SEQ ID NO: 273477 - DNA, 12 bp, Artificial Sequence
  Oligonucleotide primer for the detection of SNP TSC0003201
acctaaacaaca

SEQ ID NO: 273478 - DNA, 12 bp, Artificial Sequence
  Oligonucleotide primer for the detection of SNP TSC0003201
atgttttgtttt

SEQ ID NO: 273479 - DNA, 12 bp, Artificial Sequence
  Oligonucleotide primer for the detection of SNP TSC0003201
atatcctatttt

SEQ ID NO: 273480 - DNA, 12 bp, Artificial Sequence
  Oligonukleotid-Primer
gtttgggtaata

SEQ ID NO: 273481 - DNA, 12 bp, Artificial Sequence
  Oligonucleotide primer for the detection of SNP TSC0003202
acttacataaaa

SEQ ID NO: 273482 - DNA, 12 bp, Artificial Sequence
  Oligonucleotide primer for the detection of SNP TSC0003202
gatagttttagt

SEQ ID NO: 273483 - DNA, 12 bp, Artificial Sequence
  Oligonucleotide primer for the detection of SNP TSC0003202
aataatttcaac

SEQ ID NO: 273484 - DNA, 12 bp, Artificial Sequence
  Oligonucleotide primer for the detection of SNP TSC0003202
gtttgtatgagg

SEQ ID NO: 273485 - DNA, 12 bp, Artificial Sequence
  Oligonucleotide primer for the detection of SNP TSC0003203
tcctaaaaccaa

SEQ ID NO: 273486 - DNA, 12 bp, Artificial Sequence
  Oligonucleotide primer for the detection of SNP TSC0003203
aacttataatct

SEQ ID NO: 273487 - DNA, 12 bp, Artificial Sequence
  Oligonucleotide primer for the detection of SNP TSC0003203
tttttgaagtta

SEQ ID NO: 273488 - DNA, 12 bp, Artificial Sequence
  Oligonucleotide primer for the detection of SNP TSC0003204
cattttataatt

SEQ ID NO: 273489 - DNA, 12 bp, Artificial Sequence
  Oligonucleotide primer for the detection of SNP TSC0003204
tttatttataag

SEQ ID NO: 273490 - DNA, 12 bp, Artificial Sequence
  Oligonucleotide primer for the detection of SNP TSC0003205
aatttcaacata

SEQ ID NO: 273491 - DNA, 12 bp, Artificial Sequence
  Oligonucleotide primer for the detection of SNP TSC0003205
ttagaatagatt

SEQ ID NO: 273492 - DNA, 12 bp, Artificial Sequence
  Oligonucleotide primer for the detection of SNP TSC0003205
ccaaaataaatt

SEQ ID NO: 273493 - DNA, 12 bp, Artificial Sequence
  Oligonucleotide primer for the detection of SNP TSC0003205
agttttagtata

SEQ ID NO: 273494 - DNA, 12 bp, Artificial Sequence
  Oligonucleotide primer for the detection of SNP TSC0003207
acaatatttttt

SEQ ID NO: 273495 - DNA, 12 bp, Artificial Sequence
  Oligonucleotide primer for the detection of SNP TSC0003207
ataaaaataaaa

SEQ ID NO: 273496 - DNA, 12 bp, Artificial Sequence
  Oligonucleotide primer for the detection of SNP TSC0003208
ttttcaacataa

SEQ ID NO: 273497 - DNA, 12 bp, Artificial Sequence
  Oligonucleotide primer for the detection of SNP TSC0003208
attatagaggtt

SEQ ID NO: 273498 - DNA, 12 bp, Artificial Sequence
  Oligonucleotide primer for the detection of SNP TSC0003208
aatcacaaaaac

SEQ ID NO: 273499 - DNA, 12 bp, Artificial Sequence
  Oligonucleotide primer for the detection of SNP TSC0003208
tttttaatatag

SEQ ID NO: 273500 - DNA, 12 bp, Artificial Sequence
  Oligonucleotide primer for the detection of SNP TSC0003209
ttaagttttagg

SEQ ID NO: 273501 - DNA, 12 bp, Artificial Sequence
  Oligonucleotide primer for the detection of SNP TSC0003209
gtgaaatgtagt

SEQ ID NO: 273502 - DNA, 12 bp, Artificial Sequence
  Oligonucleotide primer for the detection of SNP TSC0003210
taatctccccca

SEQ ID NO: 273503 - DNA, 12 bp, Artificial Sequence
  Oligonucleotide primer for the detection of SNP TSC0003210
aagattaatgat

SEQ ID NO: 273504 - DNA, 12 bp, Artificial Sequence
  Oligonucleotide primer for the detection of SNP TSC0003210
aaaaccaataac

SEQ ID NO: 273505 - DNA, 12 bp, Artificial Sequence
  Oligonucleotide primer for the detection of SNP TSC0003210
taatttttttta

SEQ ID NO: 273506 - DNA, 12 bp, Artificial Sequence
  Oligonucleotide primer for the detection of SNP TSC0003211
acttaccaaatt

SEQ ID NO: 273507 - DNA, 12 bp, Artificial Sequence
  Oligonucleotide primer for the detection of SNP TSC0003211
tgatataaatta

SEQ ID NO: 273508 - DNA, 12 bp, Artificial Sequence
  Oligonucleotide primer for the detection of SNP TSC0003212
ttataaacacac

SEQ ID NO: 273509 - DNA, 12 bp, Artificial Sequence
  Oligonucleotide primer for the detection of SNP TSC0003212
ttataaacgcac

SEQ ID NO: 273510 - DNA, 12 bp, Artificial Sequence
  Oligonucleotide primer for the detection of SNP TSC0003212
atttaaagattt

SEQ ID NO: 273511 - DNA, 12 bp, Artificial Sequence
  Oligonucleotide primer for the detection of SNP TSC0003212
ttcaaaaactta

SEQ ID NO: 273512 - DNA, 12 bp, Artificial Sequence
  Oligonucleotide primer for the detection of SNP TSC0003212
ttgtgggtgtat

SEQ ID NO: 273513 - DNA, 12 bp, Artificial Sequence
  Oligonucleotide primer for the detection of SNP TSC0003212
ttgtgggcgtat

SEQ ID NO: 273514 - DNA, 12 bp, Artificial Sequence
  Oligonucleotide primer for the detection of SNP TSC0003212
ttgtgggtgtac

SEQ ID NO: 273515 - DNA, 12 bp, Artificial Sequence
  Oligonucleotide primer for the detection of SNP TSC0003212
ttgtgggcgtac

SEQ ID NO: 273516 - DNA, 12 bp, Artificial Sequence
  Oligonucleotide primer for the detection of SNP TSC0003213
aaatgggtattg

SEQ ID NO: 273517 - DNA, 12 bp, Artificial Sequence
  Oligonucleotide primer for the detection of SNP TSC0003213
aaacgggtattg

SEQ ID NO: 273518 - DNA, 12 bp, Artificial Sequence
  Oligonucleotide primer for the detection of SNP TSC0003214
tattttatactt

SEQ ID NO: 273519 - DNA, 12 bp, Artificial Sequence
  Oligonucleotide primer for the detection of SNP TSC0003214
tgtagtgtataa

SEQ ID NO: 273520 - DNA, 12 bp, Artificial Sequence
  Oligonucleotide primer for the detection of SNP TSC0003215
ttacaaaaacta

SEQ ID NO: 273521 - DNA, 12 bp, Artificial Sequence
  Oligonucleotide primer for the detection of SNP TSC0003215
gaggaggggagt

SEQ ID NO: 273522 - DNA, 12 bp, Artificial Sequence
  Oligonucleotide primer for the detection of SNP TSC0003215
ttataaaagtta

SEQ ID NO: 273523 - DNA, 12 bp, Artificial Sequence
  Oligonucleotide primer for the detection of SNP TSC0003216
aacacttaaaat

SEQ ID NO: 273524 - DNA, 12 bp, Artificial Sequence
  Oligonucleotide primer for the detection of SNP TSC0003216
gatttaatttta

SEQ ID NO: 273525 - DNA, 12 bp, Artificial Sequence
  Oligonucleotide primer for the detection of SNP TSC0003217
taccccttctaa

SEQ ID NO: 273526 - DNA, 12 bp, Artificial Sequence
  Oligonucleotide primer for the detection of SNP TSC0003217
aagattaaattt

SEQ ID NO: 273527 - DNA, 12 bp, Artificial Sequence
  Oligonucleotide primer for the detection of SNP TSC0003217
aaaattaaatcc

SEQ ID NO: 273528 - DNA, 12 bp, Artificial Sequence
  Oligonucleotide primer for the detection of SNP TSC0003217
tattttttttaa

SEQ ID NO: 273529 - DNA, 12 bp, Artificial Sequence
  Oligonucleotide primer for the detection of SNP TSC0003218
atctaaaatctc

SEQ ID NO: 273530 - DNA, 12 bp, Artificial Sequence
  Oligonucleotide primer for the detection of SNP TSC0003218
gttttggtatta

SEQ ID NO: 273531 - DNA, 12 bp, Artificial Sequence
  Oligonucleotide primer for the detection of SNP TSC0003219
actacacaatct

SEQ ID NO: 273532 - DNA, 12 bp, Artificial Sequence
  Oligonucleotide primer for the detection of SNP TSC0003219
gttaagtggtta

SEQ ID NO: 273533 - DNA, 12 bp, Artificial Sequence
  Oligonucleotide primer for the detection of SNP TSC0003220
caaaaaaaaaac

SEQ ID NO: 273534 - DNA, 12 bp, Artificial Sequence
  Oligonucleotide primer for the detection of SNP TSC0003220
gaagggatttta

SEQ ID NO: 273535 - DNA, 12 bp, Artificial Sequence
  Oligonucleotide primer for the detection of SNP TSC0003221
acaacataataa

SEQ ID NO: 273536 - DNA, 12 bp, Artificial Sequence
  Oligonucleotide primer for the detection of SNP TSC0003221
tatgtttgagat

SEQ ID NO: 273537 - DNA, 12 bp, Artificial Sequence
  Oligonucleotide primer for the detection of SNP TSC0003221
tatatttaaaat

SEQ ID NO: 273538 - DNA, 12 bp, Artificial Sequence
  Oligonucleotide primer for the detection of SNP TSC0003221
gtaatatagtaa

SEQ ID NO: 273539 - DNA, 12 bp, Artificial Sequence
  Oligonucleotide primer for the detection of SNP TSC0003222
cttttcatcatt

SEQ ID NO: 273540 - DNA, 12 bp, Artificial Sequence
  Oligonucleotide primer for the detection of SNP TSC0003222
taatatagagaa

SEQ ID NO: 273541 - DNA, 12 bp, Artificial Sequence
  Oligonucleotide primer for the detection of SNP TSC0003223
cctcataatcca

SEQ ID NO: 273542 - DNA, 12 bp, Artificial Sequence
  Oligonucleotide primer for the detection of SNP TSC0003223
cctcataatccg

SEQ ID NO: 273543 - DNA, 12 bp, Artificial Sequence
  Oligonucleotide primer for the detection of SNP TSC0003223
cctcgtaatcca

SEQ ID NO: 273544 - DNA, 12 bp, Artificial Sequence
  Oligonucleotide primer for the detection of SNP TSC0003223
cctcgtaatccg

SEQ ID NO: 273545 - DNA, 12 bp, Artificial Sequence
  Oligonucleotide primer for the detection of SNP TSC0003223
ttttgggaggtt

SEQ ID NO: 273546 - DNA, 12 bp, Artificial Sequence
  Oligonucleotide primer for the detection of SNP TSC0003223
ttttgggaggtc

SEQ ID NO: 273547 - DNA, 12 bp, Artificial Sequence
  Oligonucleotide primer for the detection of SNP TSC0003223
tttcgtgatttg

SEQ ID NO: 273548 - DNA, 12 bp, Artificial Sequence
  Oligonucleotide primer for the detection of SNP TSC0003223
ttttgtgattcg

SEQ ID NO: 273549 - DNA, 12 bp, Artificial Sequence
  Oligonucleotide primer for the detection of SNP TSC0003223
tttcgtgattcg

SEQ ID NO: 273550 - DNA, 12 bp, Artificial Sequence
  Oligonucleotide primer for the detection of SNP TSC0003224
atataaatatat

SEQ ID NO: 273551 - DNA, 12 bp, Artificial Sequence
  Oligonucleotide primer for the detection of SNP TSC0003224
gttttatatttg

SEQ ID NO: 273552 - DNA, 12 bp, Artificial Sequence
  Oligonucleotide primer for the detection of SNP TSC0003224
attttatattta

SEQ ID NO: 273553 - DNA, 12 bp, Artificial Sequence
  Oligonucleotide primer for the detection of SNP TSC0003224
gtataaatatat

SEQ ID NO: 273554 - DNA, 12 bp, Artificial Sequence
  Oligonucleotide primer for the detection of SNP TSC0003228
catactacatat

SEQ ID NO: 273555 - DNA, 12 bp, Artificial Sequence
  Oligonucleotide primer for the detection of SNP TSC0003228
gttttttggttg

SEQ ID NO: 273556 - DNA, 12 bp, Artificial Sequence
  Oligonucleotide primer for the detection of SNP TSC0003228
accctctaatta

SEQ ID NO: 273557 - DNA, 12 bp, Artificial Sequence
  Oligonucleotide primer for the detection of SNP TSC0003228
tatgttatatat

SEQ ID NO: 273558 - DNA, 12 bp, Artificial Sequence
  Oligonucleotide primer for the detection of SNP TSC0003230
ctcctaaataaa

SEQ ID NO: 273559 - DNA, 12 bp, Artificial Sequence
  Oligonucleotide primer for the detection of SNP TSC0003230
gagtagattaag

SEQ ID NO: 273560 - DNA, 12 bp, Artificial Sequence
  Oligonucleotide primer for the detection of SNP TSC0003230
aaataaatcaaa

SEQ ID NO: 273561 - DNA, 12 bp, Artificial Sequence
  Oligonukleotid-Primer
tttttgagtggg

SEQ ID NO: 273562 - DNA, 12 bp, Artificial Sequence
  Oligonucleotide primer for the detection of SNP TSC0003234
atatatatacac

SEQ ID NO: 273563 - DNA, 12 bp, Artificial Sequence
  Oligonucleotide primer for the detection of SNP TSC0003234
atatatatacgc

SEQ ID NO: 273564 - DNA, 12 bp, Artificial Sequence
  Oligonucleotide primer for the detection of SNP TSC0003234
tgtatgtgtatg

SEQ ID NO: 273565 - DNA, 12 bp, Artificial Sequence
  Oligonucleotide primer for the detection of SNP TSC0003234
tgtacgtgtatg

SEQ ID NO: 273566 - DNA, 12 bp, Artificial Sequence
  Oligonucleotide primer for the detection of SNP TSC0003234
tgtatgcgtatg

SEQ ID NO: 273567 - DNA, 12 bp, Artificial Sequence
  Oligonucleotide primer for the detection of SNP TSC0003234
tgtatgtgtacg

SEQ ID NO: 273568 - DNA, 12 bp, Artificial Sequence
  Oligonucleotide primer for the detection of SNP TSC0003234
tgtacgcgtatg

SEQ ID NO: 273569 - DNA, 12 bp, Artificial Sequence
  Oligonucleotide primer for the detection of SNP TSC0003234
tgtacgtgtacg

SEQ ID NO: 273570 - DNA, 12 bp, Artificial Sequence
  Oligonucleotide primer for the detection of SNP TSC0003234
tgtatgcgtacg

SEQ ID NO: 273571 - DNA, 12 bp, Artificial Sequence
  Oligonucleotide primer for the detection of SNP TSC0003234
tgtacgcgtacg

SEQ ID NO: 273572 - DNA, 12 bp, Artificial Sequence
  Oligonucleotide primer for the detection of SNP TSC0003234
tacacacacaca

SEQ ID NO: 273573 - DNA, 12 bp, Artificial Sequence
  Oligonucleotide primer for the detection of SNP TSC0003234
tacacacacacg

SEQ ID NO: 273574 - DNA, 12 bp, Artificial Sequence
  Oligonucleotide primer for the detection of SNP TSC0003234
tacacacgcaca

SEQ ID NO: 273575 - DNA, 12 bp, Artificial Sequence
  Oligonucleotide primer for the detection of SNP TSC0003234
tacacgcacaca

SEQ ID NO: 273576 - DNA, 12 bp, Artificial Sequence
  Oligonucleotide primer for the detection of SNP TSC0003234
tacacacgcacg

SEQ ID NO: 273577 - DNA, 12 bp, Artificial Sequence
  Oligonucleotide primer for the detection of SNP TSC0003234
tacacgcacacg

SEQ ID NO: 273578 - DNA, 12 bp, Artificial Sequence
  Oligonucleotide primer for the detection of SNP TSC0003234
tacacgcgcaca

SEQ ID NO: 273579 - DNA, 12 bp, Artificial Sequence
  Oligonucleotide primer for the detection of SNP TSC0003234
tacacgcgcacg

SEQ ID NO: 273580 - DNA, 12 bp, Artificial Sequence
  Oligonucleotide primer for the detection of SNP TSC0003234
gtgtgtgtgcgt

SEQ ID NO: 273581 - DNA, 12 bp, Artificial Sequence
  Oligonucleotide primer for the detection of SNP TSC0003234
gtgtgtgtgtgc

SEQ ID NO: 273582 - DNA, 12 bp, Artificial Sequence
  Oligonucleotide primer for the detection of SNP TSC0003234
gtgtgtgtgcgc

SEQ ID NO: 273583 - DNA, 12 bp, Artificial Sequence
  Oligonucleotide primer for the detection of SNP TSC0003235
ataaacataaat

SEQ ID NO: 273584 - DNA, 12 bp, Artificial Sequence
  Oligonucleotide primer for the detection of SNP TSC0003235
gattgagattta

SEQ ID NO: 273585 - DNA, 12 bp, Artificial Sequence
  Oligonucleotide primer for the detection of SNP TSC0003236
atctctctctct

SEQ ID NO: 273586 - DNA, 12 bp, Artificial Sequence
  Oligonucleotide primer for the detection of SNP TSC0003236
agttaaaaaaaa

SEQ ID NO: 273587 - DNA, 12 bp, Artificial Sequence
  Oligonucleotide primer for the detection of SNP TSC0003237
aacctcaaataa

SEQ ID NO: 273588 - DNA, 12 bp, Artificial Sequence
  Oligonucleotide primer for the detection of SNP TSC0003237
gacctcaaataa

SEQ ID NO: 273589 - DNA, 12 bp, Artificial Sequence
  Oligonucleotide primer for the detection of SNP TSC0003237
gttaaggtggaa

SEQ ID NO: 273590 - DNA, 12 bp, Artificial Sequence
  Oligonucleotide primer for the detection of SNP TSC0003237
caaaataaaaaa

SEQ ID NO: 273591 - DNA, 12 bp, Artificial Sequence
  Oligonucleotide primer for the detection of SNP TSC0003237
gattttaagtga

SEQ ID NO: 273592 - DNA, 12 bp, Artificial Sequence
  Oligonucleotide primer for the detection of SNP TSC0003238
acctctacctcc

SEQ ID NO: 273593 - DNA, 12 bp, Artificial Sequence
  Oligonucleotide primer for the detection of SNP TSC0003238
gaattgtttgaa

SEQ ID NO: 273594 - DNA, 12 bp, Artificial Sequence
  Oligonucleotide primer for the detection of SNP TSC0003238
gaatcgtttgaa

SEQ ID NO: 273595 - DNA, 12 bp, Artificial Sequence
  Oligonucleotide primer for the detection of SNP TSC0003238
aaatcacttaaa

SEQ ID NO: 273596 - DNA, 12 bp, Artificial Sequence
  Oligonucleotide primer for the detection of SNP TSC0003238
aaatcgcttaaa

SEQ ID NO: 273597 - DNA, 12 bp, Artificial Sequence
  Oligonucleotide primer for the detection of SNP TSC0003238
atttttgttttt

SEQ ID NO: 273598 - DNA, 12 bp, Artificial Sequence
  Oligonucleotide primer for the detection of SNP TSC0003242
cctaatcaaaat

SEQ ID NO: 273599 - DNA, 12 bp, Artificial Sequence
  Oligonucleotide primer for the detection of SNP TSC0003242
cctaatcgaaat

SEQ ID NO: 273600 - DNA, 12 bp, Artificial Sequence
  Oligonucleotide primer for the detection of SNP TSC0003242
ttaatagttgta

SEQ ID NO: 273601 - DNA, 12 bp, Artificial Sequence
  Oligonucleotide primer for the detection of SNP TSC0003243
ttaaaacaaacc

SEQ ID NO: 273602 - DNA, 12 bp, Artificial Sequence
  Oligonucleotide primer for the detection of SNP TSC0003243
aatatgaaaaaa

SEQ ID NO: 273603 - DNA, 12 bp, Artificial Sequence
  Oligonucleotide primer for the detection of SNP TSC0003244
acaaactaacca

SEQ ID NO: 273604 - DNA, 12 bp, Artificial Sequence
  Oligonucleotide primer for the detection of SNP TSC0003244
aaatataaacac

SEQ ID NO: 273605 - DNA, 12 bp, Artificial Sequence
  Oligonucleotide primer for the detection of SNP TSC0003244
atagattagtta

SEQ ID NO: 273606 - DNA, 12 bp, Artificial Sequence
  Oligonucleotide primer for the detection of SNP TSC0003245
taaaaatttaat

SEQ ID NO: 273607 - DNA, 12 bp, Artificial Sequence
  Oligonucleotide primer for the detection of SNP TSC0003245
agagtgtgtata

SEQ ID NO: 273608 - DNA, 12 bp, Artificial Sequence
  Oligonucleotide primer for the detection of SNP TSC0003246
aataaccaccac

SEQ ID NO: 273609 - DNA, 12 bp, Artificial Sequence
  Oligonucleotide primer for the detection of SNP TSC0003246
atttgagtttgg

SEQ ID NO: 273610 - DNA, 12 bp, Artificial Sequence
  Oligonucleotide primer for the detection of SNP TSC0003247
aactaaaacaat

SEQ ID NO: 273611 - DNA, 12 bp, Artificial Sequence
  Oligonucleotide primer for the detection of SNP TSC0003247
tatttttgtatt

SEQ ID NO: 273612 - DNA, 12 bp, Artificial Sequence
  Oligonucleotide primer for the detection of SNP TSC0003247
atatttttatat

SEQ ID NO: 273613 - DNA, 12 bp, Artificial Sequence
  Oligonucleotide primer for the detection of SNP TSC0003247
aattgaagtaat

SEQ ID NO: 273614 - DNA, 12 bp, Artificial Sequence
  Oligonucleotide primer for the detection of SNP TSC0003248
actcacactcaa

SEQ ID NO: 273615 - DNA, 12 bp, Artificial Sequence
  Oligonucleotide primer for the detection of SNP TSC0003248
ttattgtggtaa

SEQ ID NO: 273616 - DNA, 12 bp, Artificial Sequence
  Oligonucleotide primer for the detection of SNP TSC0003248
ctactataacaa

SEQ ID NO: 273617 - DNA, 12 bp, Artificial Sequence
  Oligonucleotide primer for the detection of SNP TSC0003248
aaatttatattt

SEQ ID NO: 273618 - DNA, 12 bp, Artificial Sequence
  Oligonucleotide primer for the detection of SNP TSC0003249
caataaaccctc

SEQ ID NO: 273619 - DNA, 12 bp, Artificial Sequence
  Oligonucleotide primer for the detection of SNP TSC0003249
ttttttaatgta

SEQ ID NO: 273620 - DNA, 12 bp, Artificial Sequence
  Oligonucleotide primer for the detection of SNP TSC0003249
cttttcaataca

SEQ ID NO: 273621 - DNA, 12 bp, Artificial Sequence
  Oligonucleotide primer for the detection of SNP TSC0003249
tagtggattttt

SEQ ID NO: 273622 - DNA, 12 bp, Artificial Sequence
  Oligonukleotid-Primer
caaaaccaccac

SEQ ID NO: 273623 - DNA, 12 bp, Artificial Sequence
  Oligonucleotide primer for the detection of SNP TSC0003250
caaaaccgccac

SEQ ID NO: 273624 - DNA, 12 bp, Artificial Sequence
  Oligonucleotide primer for the detection of SNP TSC0003250
atattttgttta

SEQ ID NO: 273625 - DNA, 12 bp, Artificial Sequence
  Oligonucleotide primer for the detection of SNP TSC0003251
atacaaaaaaaa

SEQ ID NO: 273626 - DNA, 12 bp, Artificial Sequence
  Oligonucleotide primer for the detection of SNP TSC0003251
tattagttttat

SEQ ID NO: 273627 - DNA, 12 bp, Artificial Sequence
  Oligonucleotide primer for the detection of SNP TSC0003251
taccaattttac

SEQ ID NO: 273628 - DNA, 12 bp, Artificial Sequence
  Oligonucleotide primer for the detection of SNP TSC0003251
atataaaaggag

SEQ ID NO: 273629 - DNA, 12 bp, Artificial Sequence
  Oligonucleotide primer for the detection of SNP TSC0003252
tttaacttcttc

SEQ ID NO: 273630 - DNA, 12 bp, Artificial Sequence
  Oligonucleotide primer for the detection of SNP TSC0003253
tcactccaacct

SEQ ID NO: 273631 - DNA, 12 bp, Artificial Sequence
  Oligonucleotide primer for the detection of SNP TSC0003253
ggttttattttg

SEQ ID NO: 273632 - DNA, 12 bp, Artificial Sequence
  Oligonucleotide primer for the detection of SNP TSC0003253
ttattttagttt

SEQ ID NO: 273633 - DNA, 12 bp, Artificial Sequence
  Oligonucleotide primer for the detection of SNP TSC0003254
tcattaaaaaat

SEQ ID NO: 273634 - DNA, 12 bp, Artificial Sequence
  Oligonucleotide primer for the detection of SNP TSC0003254
tttttattttag

SEQ ID NO: 273635 - DNA, 12 bp, Artificial Sequence
  Oligonucleotide primer for the detection of SNP TSC0003255
ctctacaaccaa

SEQ ID NO: 273636 - DNA, 12 bp, Artificial Sequence
  Oligonucleotide primer for the detection of SNP TSC0003255
ctctacgaccaa

SEQ ID NO: 273637 - DNA, 12 bp, Artificial Sequence
  Oligonucleotide primer for the detection of SNP TSC0003255
atgtatttagag

SEQ ID NO: 273638 - DNA, 12 bp, Artificial Sequence
  Oligonucleotide primer for the detection of SNP TSC0003255
tatacccaaaaa

SEQ ID NO: 273639 - DNA, 12 bp, Artificial Sequence
  Oligonucleotide primer for the detection of SNP TSC0003255
ttttatggttag

SEQ ID NO: 273640 - DNA, 12 bp, Artificial Sequence
  Oligonucleotide primer for the detection of SNP TSC0003255
ttttacggttag

SEQ ID NO: 273641 - DNA, 12 bp, Artificial Sequence
  Oligonucleotide primer for the detection of SNP TSC0003256
tcaataaaacaa

SEQ ID NO: 273642 - DNA, 12 bp, Artificial Sequence
  Oligonucleotide primer for the detection of SNP TSC0003256
ttttgtgggtat

SEQ ID NO: 273643 - DNA, 12 bp, Artificial Sequence
  Oligonucleotide primer for the detection of SNP TSC0003256
atcctataaaca

SEQ ID NO: 273644 - DNA, 12 bp, Artificial Sequence
  Oligonucleotide primer for the detection of SNP TSC0003256
ttttaatgggat

SEQ ID NO: 273645 - DNA, 12 bp, Artificial Sequence
  Oligonucleotide primer for the detection of SNP TSC0003257
ttccactatcca

SEQ ID NO: 273646 - DNA, 12 bp, Artificial Sequence
  Oligonucleotide primer for the detection of SNP TSC0003257
aaaaaaatggtt

SEQ ID NO: 273647 - DNA, 12 bp, Artificial Sequence
  Oligonucleotide primer for the detection of SNP TSC0003257
aaaaaaataact

SEQ ID NO: 273648 - DNA, 12 bp, Artificial Sequence
  Oligonucleotide primer for the detection of SNP TSC0003257
ttttattgttta

SEQ ID NO: 273649 - DNA, 12 bp, Artificial Sequence
  Oligonucleotide primer for the detection of SNP TSC0003258
gttaaatatgta

SEQ ID NO: 273650 - DNA, 12 bp, Artificial Sequence
  Oligonucleotide primer for the detection of SNP TSC0003258
gttaaatacgta

SEQ ID NO: 273651 - DNA, 12 bp, Artificial Sequence
  Oligonucleotide primer for the detection of SNP TSC0003258
actaaacacata

SEQ ID NO: 273652 - DNA, 12 bp, Artificial Sequence
  Oligonucleotide primer for the detection of SNP TSC0003258
actaaacacgta

SEQ ID NO: 273653 - DNA, 12 bp, Artificial Sequence
  Oligonucleotide primer for the detection of SNP TSC0003258
agaaaagagagt

SEQ ID NO: 273654 - DNA, 12 bp, Artificial Sequence
  Oligonucleotide primer for the detection of SNP TSC0003259
ataataaatttt

SEQ ID NO: 273655 - DNA, 12 bp, Artificial Sequence
  Oligonucleotide primer for the detection of SNP TSC0003259
gaaaagaaaaaa

SEQ ID NO: 273656 - DNA, 12 bp, Artificial Sequence
  Oligonucleotide primer for the detection of SNP TSC0003262
aattatgtgtgg

SEQ ID NO: 273657 - DNA, 12 bp, Artificial Sequence
  Oligonucleotide primer for the detection of SNP TSC0003263
tacccaatctaa

SEQ ID NO: 273658 - DNA, 12 bp, Artificial Sequence
  Oligonucleotide primer for the detection of SNP TSC0003263
aatattttaagt

SEQ ID NO: 273659 - DNA, 12 bp, Artificial Sequence
  Oligonucleotide primer for the detection of SNP TSC0003263
atattttaaata

SEQ ID NO: 273660 - DNA, 12 bp, Artificial Sequence
  Oligonucleotide primer for the detection of SNP TSC0003263
tgtttagtttaa

SEQ ID NO: 273661 - DNA, 12 bp, Artificial Sequence
  Oligonucleotide primer for the detection of SNP TSC0003264
aaaataaaacta

SEQ ID NO: 273662 - DNA, 12 bp, Artificial Sequence
  Oligonucleotide primer for the detection of SNP TSC0003264
taatttgtgtgg

SEQ ID NO: 273663 - DNA, 12 bp, Artificial Sequence
  Oligonucleotide primer for the detection of SNP TSC0003264
taatttgcgtgg

SEQ ID NO: 273664 - DNA, 12 bp, Artificial Sequence
  Oligonucleotide primer for the detection of SNP TSC0003264
taacttacataa

SEQ ID NO: 273665 - DNA, 12 bp, Artificial Sequence
  Oligonucleotide primer for the detection of SNP TSC0003264
taacttacgtaa

SEQ ID NO: 273666 - DNA, 12 bp, Artificial Sequence
  Oligonucleotide primer for the detection of SNP TSC0003264
agggtggggtta

SEQ ID NO: 273667 - DNA, 12 bp, Artificial Sequence
  Oligonucleotide primer for the detection of SNP TSC0003265
acaaatattcca

SEQ ID NO: 273668 - DNA, 12 bp, Artificial Sequence
  Oligonucleotide primer for the detection of SNP TSC0003265
ttatagtttaat

SEQ ID NO: 273669 - DNA, 12 bp, Artificial Sequence
  Oligonucleotide primer for the detection of SNP TSC0003265
ccataatttaat

SEQ ID NO: 273670 - DNA, 12 bp, Artificial Sequence
  Oligonucleotide primer for the detection of SNP TSC0003265
taggtattttat

SEQ ID NO: 273671 - DNA, 12 bp, Artificial Sequence
  Oligonucleotide primer for the detection of SNP TSC0003266
acaaaacaaaac

SEQ ID NO: 273672 - DNA, 12 bp, Artificial Sequence
  Oligonucleotide primer for the detection of SNP TSC0003266
tttttgagatag

SEQ ID NO: 273673 - DNA, 12 bp, Artificial Sequence
  Oligonucleotide primer for the detection of SNP TSC0003266
tttttaaaacaa

SEQ ID NO: 273674 - DNA, 12 bp, Artificial Sequence
  Oligonucleotide primer for the detection of SNP TSC0003266
atagagtaagat

SEQ ID NO: 273675 - DNA, 12 bp, Artificial Sequence
  Oligonucleotide primer for the detection of SNP TSC0003266
atagagtaagac

SEQ ID NO: 273676 - DNA, 12 bp, Artificial Sequence
  Oligonucleotide primer for the detection of SNP TSC0003267
cttaaaaaacta

SEQ ID NO: 273677 - DNA, 12 bp, Artificial Sequence
  Oligonucleotide primer for the detection of SNP TSC0003267
tttttttatttt

SEQ ID NO: 273678 - DNA, 12 bp, Artificial Sequence
  Oligonucleotide primer for the detection of SNP TSC0003267
tttttttatttc

SEQ ID NO: 273679 - DNA, 12 bp, Artificial Sequence
  Oligonucleotide primer for the detection of SNP TSC0003267
accctcccacct

SEQ ID NO: 273680 - DNA, 12 bp, Artificial Sequence
  Oligonucleotide primer for the detection of SNP TSC0003267
atttaggagatt

SEQ ID NO: 273681 - DNA, 12 bp, Artificial Sequence
  Oligonucleotide primer for the detection of SNP TSC0003268
aatttcatcaaa

SEQ ID NO: 273682 - DNA, 12 bp, Artificial Sequence
  Oligonucleotide primer for the detection of SNP TSC0003268
ttatattaagaa

SEQ ID NO: 273683 - DNA, 12 bp, Artificial Sequence
  Oligonucleotide primer for the detection of SNP TSC0003268
tatactaaaaaa

SEQ ID NO: 273684 - DNA, 12 bp, Artificial Sequence
  Oligonucleotide primer for the detection of SNP TSC0003268
ataattttatta

SEQ ID NO: 273685 - DNA, 12 bp, Artificial Sequence
  Oligonucleotide primer for the detection of SNP TSC0003269
tctattcattaa

SEQ ID NO: 273686 - DNA, 12 bp, Artificial Sequence
  Oligonucleotide primer for the detection of SNP TSC0003269
tttaataaatat

SEQ ID NO: 273687 - DNA, 12 bp, Artificial Sequence
  Oligonucleotide primer for the detection of SNP TSC0003269
ctcaataaatat

SEQ ID NO: 273688 - DNA, 12 bp, Artificial Sequence
  Oligonucleotide primer for the detection of SNP TSC0003269
tttatttattga

SEQ ID NO: 273689 - DNA, 12 bp, Artificial Sequence
  Oligonucleotide primer for the detection of SNP TSC0003270
aaatcttatctc

SEQ ID NO: 273690 - DNA, 12 bp, Artificial Sequence
  Oligonucleotide primer for the detection of SNP TSC0003270
agattttgtttt

SEQ ID NO: 273691 - DNA, 12 bp, Artificial Sequence
  Oligonucleotide primer for the detection of SNP TSC0003271
gtatggtggttt

SEQ ID NO: 273692 - DNA, 12 bp, Artificial Sequence
  Oligonucleotide primer for the detection of SNP TSC0003271
acataataactc

SEQ ID NO: 273693 - DNA, 12 bp, Artificial Sequence
  Oligonucleotide primer for the detection of SNP TSC0003271
tgggattatagg

SEQ ID NO: 273694 - DNA, 12 bp, Artificial Sequence
  Oligonucleotide primer for the detection of SNP TSC0003272
tataatctatta

SEQ ID NO: 273695 - DNA, 12 bp, Artificial Sequence
  Oligonukleotid-Primer
gaatgttttaat

SEQ ID NO: 273696 - DNA, 12 bp, Artificial Sequence
  Oligonucleotide primer for the detection of SNP TSC0003272
aaatacttcaat

SEQ ID NO: 273697 - DNA, 12 bp, Artificial Sequence
  Oligonucleotide primer for the detection of SNP TSC0003272
tataatttgttg

SEQ ID NO: 273698 - DNA, 12 bp, Artificial Sequence
  Oligonucleotide primer for the detection of SNP TSC0003273
tactaaatttta

SEQ ID NO: 273699 - DNA, 12 bp, Artificial Sequence
  Oligonucleotide primer for the detection of SNP TSC0003273
ttgagttttttt

SEQ ID NO: 273700 - DNA, 12 bp, Artificial Sequence
  Oligonucleotide primer for the detection of SNP TSC0003273
tttaaattctcc

SEQ ID NO: 273701 - DNA, 12 bp, Artificial Sequence
  Oligonucleotide primer for the detection of SNP TSC0003273
gttaaattttat

SEQ ID NO: 273702 - DNA, 12 bp, Artificial Sequence
  Oligonucleotide primer for the detection of SNP TSC0003274
cactttaacctc

SEQ ID NO: 273703 - DNA, 12 bp, Artificial Sequence
  Oligonucleotide primer for the detection of SNP TSC0003274
tttagtattttg

SEQ ID NO: 273704 - DNA, 12 bp, Artificial Sequence
  Oligonucleotide primer for the detection of SNP TSC0003274
tttagtatttcg

SEQ ID NO: 273705 - DNA, 12 bp, Artificial Sequence
  Oligonucleotide primer for the detection of SNP TSC0003275
ttaaataaaaat

SEQ ID NO: 273706 - DNA, 12 bp, Artificial Sequence
  Oligonucleotide primer for the detection of SNP TSC0003275
aagaaaaatgta

SEQ ID NO: 273707 - DNA, 12 bp, Artificial Sequence
  Oligonucleotide primer for the detection of SNP TSC0003275
aagaaaaacgta

SEQ ID NO: 273708 - DNA, 12 bp, Artificial Sequence
  Oligonucleotide primer for the detection of SNP TSC0003279
tttattttctct

SEQ ID NO: 273709 - DNA, 12 bp, Artificial Sequence
  Oligonucleotide primer for the detection of SNP TSC0003279
ttttaattaaaa

SEQ ID NO: 273710 - DNA, 12 bp, Artificial Sequence
  Oligonucleotide primer for the detection of SNP TSC0003279
tcctaactaaaa

SEQ ID NO: 273711 - DNA, 12 bp, Artificial Sequence
  Oligonucleotide primer for the detection of SNP TSC0003280
actaaaacaaaa

SEQ ID NO: 273712 - DNA, 12 bp, Artificial Sequence
  Oligonucleotide primer for the detection of SNP TSC0003280
atatattgtaaa

SEQ ID NO: 273713 - DNA, 12 bp, Artificial Sequence
  Oligonucleotide primer for the detection of SNP TSC0003281
tataattgttta

SEQ ID NO: 273714 - DNA, 12 bp, Artificial Sequence
  Oligonucleotide primer for the detection of SNP TSC0003282
tattaaattata

SEQ ID NO: 273715 - DNA, 12 bp, Artificial Sequence
  Oligonucleotide primer for the detection of SNP TSC0003282
tgaaaggataaa

SEQ ID NO: 273716 - DNA, 12 bp, Artificial Sequence
  Oligonucleotide primer for the detection of SNP TSC0003282
taaaaaaataaa

SEQ ID NO: 273717 - DNA, 12 bp, Artificial Sequence
  Oligonucleotide primer for the detection of SNP TSC0003282
tattaggttgtg

SEQ ID NO: 273718 - DNA, 12 bp, Artificial Sequence
  Oligonucleotide primer for the detection of SNP TSC0003283
acaaaactaact

SEQ ID NO: 273719 - DNA, 12 bp, Artificial Sequence
  Oligonucleotide primer for the detection of SNP TSC0003283
acgaaactaact

SEQ ID NO: 273720 - DNA, 12 bp, Artificial Sequence
  Oligonucleotide primer for the detection of SNP TSC0003283
aatttaaagggg

SEQ ID NO: 273721 - DNA, 12 bp, Artificial Sequence
  Oligonucleotide primer for the detection of SNP TSC0003284
tcttctaaatct

SEQ ID NO: 273722 - DNA, 12 bp, Artificial Sequence
  Oligonucleotide primer for the detection of SNP TSC0003284
tgtataatttaa

SEQ ID NO: 273723 - DNA, 12 bp, Artificial Sequence
  Oligonucleotide primer for the detection of SNP TSC0003284
tatataatctaa

SEQ ID NO: 273724 - DNA, 12 bp, Artificial Sequence
  Oligonucleotide primer for the detection of SNP TSC0003284
ttttttgggttt

SEQ ID NO: 273725 - DNA, 12 bp, Artificial Sequence
  Oligonucleotide primer for the detection of SNP TSC0003286
aaacccaaaaaa

SEQ ID NO: 273726 - DNA, 12 bp, Artificial Sequence
  Oligonucleotide primer for the detection of SNP TSC0003286
ttgtaatttttt

SEQ ID NO: 273727 - DNA, 12 bp, Artificial Sequence
  Oligonucleotide primer for the detection of SNP TSC0003286
tcgtaatttttt

SEQ ID NO: 273728 - DNA, 12 bp, Artificial Sequence
  Oligonucleotide primer for the detection of SNP TSC0003286
ttgtaatttttc

SEQ ID NO: 273729 - DNA, 12 bp, Artificial Sequence
  Oligonucleotide primer for the detection of SNP TSC0003286
tcgtaatttttc

SEQ ID NO: 273730 - DNA, 12 bp, Artificial Sequence
  Oligonucleotide primer for the detection of SNP TSC0003286
ttaccacaacct

SEQ ID NO: 273731 - DNA, 12 bp, Artificial Sequence
  Oligonucleotide primer for the detection of SNP TSC0003286
ttaccgcaacct

SEQ ID NO: 273732 - DNA, 12 bp, Artificial Sequence
  Oligonucleotide primer for the detection of SNP TSC0003286
ttgaatttagga

SEQ ID NO: 273733 - DNA, 12 bp, Artificial Sequence
  Oligonucleotide primer for the detection of SNP TSC0003287
taactactcaac

SEQ ID NO: 273734 - DNA, 12 bp, Artificial Sequence
  Oligonucleotide primer for the detection of SNP TSC0003287
tgttattttaga

SEQ ID NO: 273735 - DNA, 12 bp, Artificial Sequence
  Oligonucleotide primer for the detection of SNP TSC0003288
ataattacactc

SEQ ID NO: 273736 - DNA, 12 bp, Artificial Sequence
  Oligonucleotide primer for the detection of SNP TSC0003288
gttgtttaggtt

SEQ ID NO: 273737 - DNA, 12 bp, Artificial Sequence
  Oligonucleotide primer for the detection of SNP TSC0003288
gtcgtttaggtt

SEQ ID NO: 273738 - DNA, 12 bp, Artificial Sequence
  Oligonucleotide primer for the detection of SNP TSC0003288
atcactcaaact

SEQ ID NO: 273739 - DNA, 12 bp, Artificial Sequence
  Oligonucleotide primer for the detection of SNP TSC0003288
atcgctcaaact

SEQ ID NO: 273740 - DNA, 12 bp, Artificial Sequence
  Oligonucleotide primer for the detection of SNP TSC0003288
gtgattgtattt

SEQ ID NO: 273741 - DNA, 12 bp, Artificial Sequence
  Oligonucleotide primer for the detection of SNP TSC0003289
aataaaaaattc

SEQ ID NO: 273742 - DNA, 12 bp, Artificial Sequence
  Oligonucleotide primer for the detection of SNP TSC0003289
ttagagagtata

SEQ ID NO: 273743 - DNA, 12 bp, Artificial Sequence
  Oligonucleotide primer for the detection of SNP TSC0003289
ccaaaaaacaca

SEQ ID NO: 273744 - DNA, 12 bp, Artificial Sequence
  Oligonucleotide primer for the detection of SNP TSC0003289
ggtgagagattt

SEQ ID NO: 273745 - DNA, 12 bp, Artificial Sequence
  Oligonucleotide primer for the detection of SNP TSC0003290
cttttaactctt

SEQ ID NO: 273746 - DNA, 12 bp, Artificial Sequence
  Oligonucleotide primer for the detection of SNP TSC0003290
attgaatagaag

SEQ ID NO: 273747 - DNA, 12 bp, Artificial Sequence
  Oligonucleotide primer for the detection of SNP TSC0003291
taaacacatcac

SEQ ID NO: 273748 - DNA, 12 bp, Artificial Sequence
  Oligonucleotide primer for the detection of SNP TSC0003291
ggtttttttata

SEQ ID NO: 273749 - DNA, 12 bp, Artificial Sequence
  Oligonucleotide primer for the detection of SNP TSC0003292
aaattaaaaaat

SEQ ID NO: 273750 - DNA, 12 bp, Artificial Sequence
  Oligonucleotide primer for the detection of SNP TSC0003292
ttttgtttttta

SEQ ID NO: 273751 - DNA, 12 bp, Artificial Sequence
  Oligonucleotide primer for the detection of SNP TSC0003294
taaattaaaaaa

SEQ ID NO: 273752 - DNA, 12 bp, Artificial Sequence
  Oligonucleotide primer for the detection of SNP TSC0003294
gggaaataaggt

SEQ ID NO: 273753 - DNA, 12 bp, Artificial Sequence
  Oligonucleotide primer for the detection of SNP TSC0003294
aaaaaataaaat

SEQ ID NO: 273754 - DNA, 12 bp, Artificial Sequence
  Oligonucleotide primer for the detection of SNP TSC0003294
taggttaaagga

SEQ ID NO: 273755 - DNA, 12 bp, Artificial Sequence
  Oligonucleotide primer for the detection of SNP TSC0003295
ccaaactccctc

SEQ ID NO: 273756 - DNA, 12 bp, Artificial Sequence
  Oligonucleotide primer for the detection of SNP TSC0003296
cctactttaacc

SEQ ID NO: 273757 - DNA, 12 bp, Artificial Sequence
  Oligonucleotide primer for the detection of SNP TSC0003296
gttgtagttaag

SEQ ID NO: 273758 - DNA, 12 bp, Artificial Sequence
  Oligonucleotide primer for the detection of SNP TSC0003297
tttctctacatt

SEQ ID NO: 273759 - DNA, 12 bp, Artificial Sequence
  Oligonucleotide primer for the detection of SNP TSC0003297
gttgtattagag

SEQ ID NO: 273760 - DNA, 12 bp, Artificial Sequence
  Oligonucleotide primer for the detection of SNP TSC0003299
caccatattaac

SEQ ID NO: 273761 - DNA, 12 bp, Artificial Sequence
  Oligonucleotide primer for the detection of SNP TSC0003299
tattatgttggt

SEQ ID NO: 273762 - DNA, 12 bp, Artificial Sequence
  Oligonucleotide primer for the detection of SNP TSC0003299
tattatgttggc

SEQ ID NO: 273763 - DNA, 12 bp, Artificial Sequence
  Oligonucleotide primer for the detection of SNP TSC0003300
ataataaaaccc

SEQ ID NO: 273764 - DNA, 12 bp, Artificial Sequence
  Oligonucleotide primer for the detection of SNP TSC0003301
aaaaatttattc

SEQ ID NO: 273765 - DNA, 12 bp, Artificial Sequence
  Oligonucleotide primer for the detection of SNP TSC0003301
tttgtttattag

SEQ ID NO: 273766 - DNA, 12 bp, Artificial Sequence
  Oligonucleotide primer for the detection of SNP TSC0003302
gtttttggtttt

SEQ ID NO: 273767 - DNA, 12 bp, Artificial Sequence
  Oligonucleotide primer for the detection of SNP TSC0003302
atcaactcttaa

SEQ ID NO: 273768 - DNA, 12 bp, Artificial Sequence
  Oligonucleotide primer for the detection of SNP TSC0003302
agagtggagaat

SEQ ID NO: 273769 - DNA, 12 bp, Artificial Sequence
  Oligonucleotide primer for the detection of SNP TSC0003303
aaacacttaaat

SEQ ID NO: 273770 - DNA, 12 bp, Artificial Sequence
  Oligonucleotide primer for the detection of SNP TSC0003303
gtgtggtgaaga

SEQ ID NO: 273771 - DNA, 12 bp, Artificial Sequence
  Oligonucleotide primer for the detection of SNP TSC0003303
gtgcggtgaaga

SEQ ID NO: 273772 - DNA, 12 bp, Artificial Sequence
  Oligonucleotide primer for the detection of SNP TSC0003305
caataacttaac

SEQ ID NO: 273773 - DNA, 12 bp, Artificial Sequence
  Oligonucleotide primer for the detection of SNP TSC0003305
ttagaaatatgg

SEQ ID NO: 273774 - DNA, 12 bp, Artificial Sequence
  Oligonucleotide primer for the detection of SNP TSC0003306
tttattacttat

SEQ ID NO: 273775 - DNA, 12 bp, Artificial Sequence
  Oligonucleotide primer for the detection of SNP TSC0003306
ataagttttgaa

SEQ ID NO: 273776 - DNA, 12 bp, Artificial Sequence
  Oligonucleotide primer for the detection of SNP TSC0003307
aaacttccaacc

SEQ ID NO: 273777 - DNA, 12 bp, Artificial Sequence
  Oligonucleotide primer for the detection of SNP TSC0003307
ttttttttagag

SEQ ID NO: 273778 - DNA, 12 bp, Artificial Sequence
  Oligonucleotide primer for the detection of SNP TSC0003308
ctattcctctca

SEQ ID NO: 273779 - DNA, 12 bp, Artificial Sequence
  Oligonucleotide primer for the detection of SNP TSC0003308
ttagttgtattt

SEQ ID NO: 273780 - DNA, 12 bp, Artificial Sequence
  Oligonucleotide primer for the detection of SNP TSC0003308
taattacactta

SEQ ID NO: 273781 - DNA, 12 bp, Artificial Sequence
  Oligonucleotide primer for the detection of SNP TSC0003308
ttatttttttta

SEQ ID NO: 273782 - DNA, 12 bp, Artificial Sequence
  Oligonucleotide primer for the detection of SNP TSC0003309
aaatttatatat

SEQ ID NO: 273783 - DNA, 12 bp, Artificial Sequence
  Oligonucleotide primer for the detection of SNP TSC0003309
aaaggtattata

SEQ ID NO: 273784 - DNA, 12 bp, Artificial Sequence
  Oligonucleotide primer for the detection of SNP TSC0003310
tattaactattt

SEQ ID NO: 273785 - DNA, 12 bp, Artificial Sequence
  Oligonucleotide primer for the detection of SNP TSC0003310
tgtattaaaaaa

SEQ ID NO: 273786 - DNA, 12 bp, Artificial Sequence
  Oligonucleotide primer for the detection of SNP TSC0003314
catatactaaaa

SEQ ID NO: 273787 - DNA, 12 bp, Artificial Sequence
  Oligonucleotide primer for the detection of SNP TSC0003314
cgtatactaaaa

SEQ ID NO: 273788 - DNA, 12 bp, Artificial Sequence
  Oligonucleotide primer for the detection of SNP TSC0003314
ttttttgatttt

SEQ ID NO: 273789 - DNA, 12 bp, Artificial Sequence
  Oligonucleotide primer for the detection of SNP TSC0003314
tcctttaattct

SEQ ID NO: 273790 - DNA, 12 bp, Artificial Sequence
  Oligonucleotide primer for the detection of SNP TSC0003314
tgtgtgttggga

SEQ ID NO: 273791 - DNA, 12 bp, Artificial Sequence
  Oligonucleotide primer for the detection of SNP TSC0003314
cgtgtgttggga

SEQ ID NO: 273792 - DNA, 12 bp, Artificial Sequence
  Oligonucleotide primer for the detection of SNP TSC0003315
aaaaaataacaa

SEQ ID NO: 273793 - DNA, 12 bp, Artificial Sequence
  Oligonucleotide primer for the detection of SNP TSC0003315
ttagttttttta

SEQ ID NO: 273794 - DNA, 12 bp, Artificial Sequence
  Oligonucleotide primer for the detection of SNP TSC0003315
caacttccccaa

SEQ ID NO: 273795 - DNA, 12 bp, Artificial Sequence
  Oligonucleotide primer for the detection of SNP TSC0003315
ggaggatgatag

SEQ ID NO: 273796 - DNA, 12 bp, Artificial Sequence
  Oligonukleotid-Primer
acacccacaatc

SEQ ID NO: 273797 - DNA, 12 bp, Artificial Sequence
  Oligonucleotide primer for the detection of SNP TSC0003316
ttagttagttag

SEQ ID NO: 273798 - DNA, 12 bp, Artificial Sequence
  Oligonucleotide primer for the detection of SNP TSC0003316
tcaaccaatcaa

SEQ ID NO: 273799 - DNA, 12 bp, Artificial Sequence
  Oligonucleotide primer for the detection of SNP TSC0003316
gtatttatagtt

SEQ ID NO: 273800 - DNA, 12 bp, Artificial Sequence
  Oligonucleotide primer for the detection of SNP TSC0003317
ctcattatatat

SEQ ID NO: 273801 - DNA, 12 bp, Artificial Sequence
  Oligonucleotide primer for the detection of SNP TSC0003317
ttttttttttaa

SEQ ID NO: 273802 - DNA, 12 bp, Artificial Sequence
  Oligonucleotide primer for the detection of SNP TSC0003318
aaataatctccc

SEQ ID NO: 273803 - DNA, 12 bp, Artificial Sequence
  Oligonucleotide primer for the detection of SNP TSC0003318
ttaaaggtttga

SEQ ID NO: 273804 - DNA, 12 bp, Artificial Sequence
  Oligonucleotide primer for the detection of SNP TSC0003318
ctaaaaacttaa

SEQ ID NO: 273805 - DNA, 12 bp, Artificial Sequence
  Oligonucleotide primer for the detection of SNP TSC0003318
ggataatttttt

SEQ ID NO: 273806 - DNA, 12 bp, Artificial Sequence
  Oligonucleotide primer for the detection of SNP TSC0003319
taactattattt

SEQ ID NO: 273807 - DNA, 12 bp, Artificial Sequence
  Oligonucleotide primer for the detection of SNP TSC0003319
ttattttgttgg

SEQ ID NO: 273808 - DNA, 12 bp, Artificial Sequence
  Oligonucleotide primer for the detection of SNP TSC0003319
ttattttattaa

SEQ ID NO: 273809 - DNA, 12 bp, Artificial Sequence
  Oligonucleotide primer for the detection of SNP TSC0003319
tagttgttgttt

SEQ ID NO: 273810 - DNA, 12 bp, Artificial Sequence
  Oligonucleotide primer for the detection of SNP TSC0003320
aacaattttcat

SEQ ID NO: 273811 - DNA, 12 bp, Artificial Sequence
  Oligonucleotide primer for the detection of SNP TSC0003320
aatggaattata

SEQ ID NO: 273812 - DNA, 12 bp, Artificial Sequence
  Oligonucleotide primer for the detection of SNP TSC0003321
aattaacaaatt

SEQ ID NO: 273813 - DNA, 12 bp, Artificial Sequence
  Oligonucleotide primer for the detection of SNP TSC0003321
gattggaaattt

SEQ ID NO: 273814 - DNA, 12 bp, Artificial Sequence
  Oligonucleotide primer for the detection of SNP TSC0003321
attaataggttt

SEQ ID NO: 273815 - DNA, 12 bp, Artificial Sequence
  Oligonucleotide primer for the detection of SNP TSC0003322
atttttaaatcc

SEQ ID NO: 273816 - DNA, 12 bp, Artificial Sequence
  Oligonucleotide primer for the detection of SNP TSC0003322
gtttttaaatcc

SEQ ID NO: 273817 - DNA, 12 bp, Artificial Sequence
  Oligonucleotide primer for the detection of SNP TSC0003322
aaaataaaaatt

SEQ ID NO: 273818 - DNA, 12 bp, Artificial Sequence
  Oligonucleotide primer for the detection of SNP TSC0003322
aaataaaaatta

SEQ ID NO: 273819 - DNA, 12 bp, Artificial Sequence
  Oligonucleotide primer for the detection of SNP TSC0003322
ttttaaattttt

SEQ ID NO: 273820 - DNA, 12 bp, Artificial Sequence
  Oligonucleotide primer for the detection of SNP TSC0003323
tttacttttatt

SEQ ID NO: 273821 - DNA, 12 bp, Artificial Sequence
  Oligonucleotide primer for the detection of SNP TSC0003323
attttgggaggg

SEQ ID NO: 273822 - DNA, 12 bp, Artificial Sequence
  Oligonucleotide primer for the detection of SNP TSC0003323
actctaaaaaaa

SEQ ID NO: 273823 - DNA, 12 bp, Artificial Sequence
  Oligonucleotide primer for the detection of SNP TSC0003324
ataaaaaatttt

SEQ ID NO: 273824 - DNA, 12 bp, Artificial Sequence
  Oligonucleotide primer for the detection of SNP TSC0003324
tagaattgaaaa

SEQ ID NO: 273825 - DNA, 12 bp, Artificial Sequence
  Oligonucleotide primer for the detection of SNP TSC0003325
tacaaaactaaa

SEQ ID NO: 273826 - DNA, 12 bp, Artificial Sequence
  Oligonucleotide primer for the detection of SNP TSC0003325
tgtagagttgga

SEQ ID NO: 273827 - DNA, 12 bp, Artificial Sequence
  Oligonucleotide primer for the detection of SNP TSC0003326
ctaaaattacaa

SEQ ID NO: 273828 - DNA, 12 bp, Artificial Sequence
  Oligonucleotide primer for the detection of SNP TSC0003326
ctaaaattacga

SEQ ID NO: 273829 - DNA, 12 bp, Artificial Sequence
  Oligonucleotide primer for the detection of SNP TSC0003326
gtagtggtttat

SEQ ID NO: 273830 - DNA, 12 bp, Artificial Sequence
  Oligonucleotide primer for the detection of SNP TSC0003326
gtagtggtttac

SEQ ID NO: 273831 - DNA, 12 bp, Artificial Sequence
  Oligonucleotide primer for the detection of SNP TSC0003326
caataactcacg

SEQ ID NO: 273832 - DNA, 12 bp, Artificial Sequence
  Oligonucleotide primer for the detection of SNP TSC0003326
ttaggattatgg

SEQ ID NO: 273833 - DNA, 12 bp, Artificial Sequence
  Oligonucleotide primer for the detection of SNP TSC0003326
ttaggattacgg

SEQ ID NO: 273834 - DNA, 12 bp, Artificial Sequence
  Oligonucleotide primer for the detection of SNP TSC0003328
ttgttttttatt

SEQ ID NO: 273835 - DNA, 12 bp, Artificial Sequence
  Oligonucleotide primer for the detection of SNP TSC0003328
ctattctctatt

SEQ ID NO: 273836 - DNA, 12 bp, Artificial Sequence
  Oligonucleotide primer for the detection of SNP TSC0003328
tatagaagagaa

SEQ ID NO: 273837 - DNA, 12 bp, Artificial Sequence
  Oligonucleotide primer for the detection of SNP TSC0003330
ctaacatttact

SEQ ID NO: 273838 - DNA, 12 bp, Artificial Sequence
  Oligonucleotide primer for the detection of SNP TSC0003330
taatgattttaa

SEQ ID NO: 273839 - DNA, 12 bp, Artificial Sequence
  Oligonucleotide primer for the detection of SNP TSC0003331
ttcaaaattatt

SEQ ID NO: 273840 - DNA, 12 bp, Artificial Sequence
  Oligonucleotide primer for the detection of SNP TSC0003331
gaaatggtttta

SEQ ID NO: 273841 - DNA, 12 bp, Artificial Sequence
  Oligonucleotide primer for the detection of SNP TSC0003332
taataataacct

SEQ ID NO: 273842 - DNA, 12 bp, Artificial Sequence
  Oligonucleotide primer for the detection of SNP TSC0003332
cttccatactcc

SEQ ID NO: 273843 - DNA, 12 bp, Artificial Sequence
  Oligonucleotide primer for the detection of SNP TSC0003332
tggtgataattt

SEQ ID NO: 273844 - DNA, 12 bp, Artificial Sequence
  Oligonucleotide primer for the detection of SNP TSC0003333
ttaaaaacaaca

SEQ ID NO: 273845 - DNA, 12 bp, Artificial Sequence
  Oligonucleotide primer for the detection of SNP TSC0003333
tttttaatgagt

SEQ ID NO: 273846 - DNA, 12 bp, Artificial Sequence
  Oligonucleotide primer for the detection of SNP TSC0003333
tttttaacgagt

SEQ ID NO: 273847 - DNA, 12 bp, Artificial Sequence
  Oligonucleotide primer for the detection of SNP TSC0003333
ctcttaacaaac

SEQ ID NO: 273848 - DNA, 12 bp, Artificial Sequence
  Oligonucleotide primer for the detection of SNP TSC0003333
ctcttaacgaac

SEQ ID NO: 273849 - DNA, 12 bp, Artificial Sequence
  Oligonucleotide primer for the detection of SNP TSC0003333
tttgaaggtagt

SEQ ID NO: 273850 - DNA, 12 bp, Artificial Sequence
  Oligonucleotide primer for the detection of SNP TSC0003335
aattattaacca

SEQ ID NO: 273851 - DNA, 12 bp, Artificial Sequence
  Oligonucleotide primer for the detection of SNP TSC0003335
tatatttaatat

SEQ ID NO: 273852 - DNA, 12 bp, Artificial Sequence
  Oligonucleotide primer for the detection of SNP TSC0003335
cacattcaatac

SEQ ID NO: 273853 - DNA, 12 bp, Artificial Sequence
  Oligonucleotide primer for the detection of SNP TSC0003335
aattattggtta

SEQ ID NO: 273854 - DNA, 12 bp, Artificial Sequence
  Oligonucleotide primer for the detection of SNP TSC0003336
cataataatctt

SEQ ID NO: 273855 - DNA, 12 bp, Artificial Sequence
  Oligonucleotide primer for the detection of SNP TSC0003336
cgtaataatctt

SEQ ID NO: 273856 - DNA, 12 bp, Artificial Sequence
  Oligonucleotide primer for the detection of SNP TSC0003336
tttttattatta

SEQ ID NO: 273857 - DNA, 12 bp, Artificial Sequence
  Oligonucleotide primer for the detection of SNP TSC0003337
tacttaatacat

SEQ ID NO: 273858 - DNA, 12 bp, Artificial Sequence
  Oligonucleotide primer for the detection of SNP TSC0003337
tgtttgttagat

SEQ ID NO: 273859 - DNA, 12 bp, Artificial Sequence
  Oligonucleotide primer for the detection of SNP TSC0003337
ctacctaccaaa

SEQ ID NO: 273860 - DNA, 12 bp, Artificial Sequence
  Oligonucleotide primer for the detection of SNP TSC0003337
tgtttagtatat

SEQ ID NO: 273861 - DNA, 12 bp, Artificial Sequence
  Oligonucleotide primer for the detection of SNP TSC0003338
cttacttaatca

SEQ ID NO: 273862 - DNA, 12 bp, Artificial Sequence
  Oligonucleotide primer for the detection of SNP TSC0003338
aatttttatatt

SEQ ID NO: 273863 - DNA, 12 bp, Artificial Sequence
  Oligonucleotide primer for the detection of SNP TSC0003338
aactttcacatt

SEQ ID NO: 273864 - DNA, 12 bp, Artificial Sequence
  Oligonucleotide primer for the detection of SNP TSC0003338
tttgtttagtta

SEQ ID NO: 273865 - DNA, 12 bp, Artificial Sequence
  Oligonucleotide primer for the detection of SNP TSC0003339
aaaaaaatataa

SEQ ID NO: 273866 - DNA, 12 bp, Artificial Sequence
  Oligonucleotide primer for the detection of SNP TSC0003339
tgttttgttttt

SEQ ID NO: 273867 - DNA, 12 bp, Artificial Sequence
  Oligonucleotide primer for the detection of SNP TSC0003339
ttactctatttc

SEQ ID NO: 273868 - DNA, 12 bp, Artificial Sequence
  Oligonucleotide primer for the detection of SNP TSC0003339
aaaatataattt

SEQ ID NO: 273869 - DNA, 12 bp, Artificial Sequence
  Oligonucleotide primer for the detection of SNP TSC0003340
acttaaacatac

SEQ ID NO: 273870 - DNA, 12 bp, Artificial Sequence
  Oligonucleotide primer for the detection of SNP TSC0003340
taggtgattttg

SEQ ID NO: 273871 - DNA, 12 bp, Artificial Sequence
  Oligonucleotide primer for the detection of SNP TSC0003341
aatactatattt

SEQ ID NO: 273872 - DNA, 12 bp, Artificial Sequence
  Oligonucleotide primer for the detection of SNP TSC0003341
tagtgtttttag

SEQ ID NO: 273873 - DNA, 12 bp, Artificial Sequence
  Oligonucleotide primer for the detection of SNP TSC0003342
caccaaaaaatc

SEQ ID NO: 273874 - DNA, 12 bp, Artificial Sequence
  Oligonucleotide primer for the detection of SNP TSC0003342
gttataaatgtg

SEQ ID NO: 273875 - DNA, 12 bp, Artificial Sequence
  Oligonucleotide primer for the detection of SNP TSC0003342
gttataaatgcg

SEQ ID NO: 273876 - DNA, 12 bp, Artificial Sequence
  Oligonucleotide primer for the detection of SNP TSC0003342
attacaaataca

SEQ ID NO: 273877 - DNA, 12 bp, Artificial Sequence
  Oligonukleotid-Primer
attacaaatacg

SEQ ID NO: 273878 - DNA, 12 bp, Artificial Sequence
  Oligonucleotide primer for the detection of SNP TSC0003342
tattagggagtt

SEQ ID NO: 273879 - DNA, 12 bp, Artificial Sequence
  Oligonucleotide primer for the detection of SNP TSC0003343
taaaaaatttcc

SEQ ID NO: 273880 - DNA, 12 bp, Artificial Sequence
  Oligonucleotide primer for the detection of SNP TSC0003343
tgtttagttgta

SEQ ID NO: 273881 - DNA, 12 bp, Artificial Sequence
  Oligonukleotid-Primer
ttataatatcaa

SEQ ID NO: 273882 - DNA, 12 bp, Artificial Sequence
  Oligonucleotide primer for the detection of SNP TSC0003344
gagttttaattt

SEQ ID NO: 273883 - DNA, 12 bp, Artificial Sequence
  Oligonucleotide primer for the detection of SNP TSC0003344
aaaaactttaat

SEQ ID NO: 273884 - DNA, 12 bp, Artificial Sequence
  Oligonucleotide primer for the detection of SNP TSC0003344
tttgtaatgtta

SEQ ID NO: 273885 - DNA, 12 bp, Artificial Sequence
  Oligonucleotide primer for the detection of SNP TSC0003345
aatatcttaacc

SEQ ID NO: 273886 - DNA, 12 bp, Artificial Sequence
  Oligonucleotide primer for the detection of SNP TSC0003345
tataggttgaag

SEQ ID NO: 273887 - DNA, 12 bp, Artificial Sequence
  Oligonucleotide primer for the detection of SNP TSC0003346
ctcaacacaact

SEQ ID NO: 273888 - DNA, 12 bp, Artificial Sequence
  Oligonucleotide primer for the detection of SNP TSC0003346
tatttttaaggt

SEQ ID NO: 273889 - DNA, 12 bp, Artificial Sequence
  Oligonucleotide primer for the detection of SNP TSC0003346
tacttccaaaat

SEQ ID NO: 273890 - DNA, 12 bp, Artificial Sequence
  Oligonucleotide primer for the detection of SNP TSC0003346
tttaatatagtt

SEQ ID NO: 273891 - DNA, 12 bp, Artificial Sequence
  Oligonucleotide primer for the detection of SNP TSC0003348
taactttaatca

SEQ ID NO: 273892 - DNA, 12 bp, Artificial Sequence
  Oligonucleotide primer for the detection of SNP TSC0003348
atttgagagatt

SEQ ID NO: 273893 - DNA, 12 bp, Artificial Sequence
  Oligonucleotide primer for the detection of SNP TSC0003348
acctaaaaaact

SEQ ID NO: 273894 - DNA, 12 bp, Artificial Sequence
  Oligonucleotide primer for the detection of SNP TSC0003348
taattttggtta

SEQ ID NO: 273895 - DNA, 12 bp, Artificial Sequence
  Oligonucleotide primer for the detection of SNP TSC0003349
ttttttctcact

SEQ ID NO: 273896 - DNA, 12 bp, Artificial Sequence
  Oligonucleotide primer for the detection of SNP TSC0003349
aaaaatgaaaaa

SEQ ID NO: 273897 - DNA, 12 bp, Artificial Sequence
  Oligonucleotide primer for the detection of SNP TSC0003350
acaatattaact

SEQ ID NO: 273898 - DNA, 12 bp, Artificial Sequence
  Oligonucleotide primer for the detection of SNP TSC0003350
aagtgataggtg

SEQ ID NO: 273899 - DNA, 12 bp, Artificial Sequence
  Oligonucleotide primer for the detection of SNP TSC0003351
caataaattcaa

SEQ ID NO: 273900 - DNA, 12 bp, Artificial Sequence
  Oligonucleotide primer for the detection of SNP TSC0003351
attgggtaatta

SEQ ID NO: 273901 - DNA, 12 bp, Artificial Sequence
  Oligonucleotide primer for the detection of SNP TSC0003351
ctaaacaaccaa

SEQ ID NO: 273902 - DNA, 12 bp, Artificial Sequence
  Oligonucleotide primer for the detection of SNP TSC0003351
tagtggatttag

SEQ ID NO: 273903 - DNA, 12 bp, Artificial Sequence
  Oligonucleotide primer for the detection of SNP TSC0003352
taaaccattact

SEQ ID NO: 273904 - DNA, 12 bp, Artificial Sequence
  Oligonucleotide primer for the detection of SNP TSC0003352
ggaatattaaaa

SEQ ID NO: 273905 - DNA, 12 bp, Artificial Sequence
  Oligonucleotide primer for the detection of SNP TSC0003353
aataaaataatc

SEQ ID NO: 273906 - DNA, 12 bp, Artificial Sequence
  Oligonucleotide primer for the detection of SNP TSC0003353
gtagaatttggt

SEQ ID NO: 273907 - DNA, 12 bp, Artificial Sequence
  Oligonucleotide primer for the detection of SNP TSC0003353
aataaaataatt

SEQ ID NO: 273908 - DNA, 12 bp, Artificial Sequence
  Oligonucleotide primer for the detection of SNP TSC0003354
ctccttctccaa

SEQ ID NO: 273909 - DNA, 12 bp, Artificial Sequence
  Oligonucleotide primer for the detection of SNP TSC0003354
ttgggaagagga

SEQ ID NO: 273910 - DNA, 12 bp, Artificial Sequence
  Oligonucleotide primer for the detection of SNP TSC0003357
aatcatcctaac

SEQ ID NO: 273911 - DNA, 12 bp, Artificial Sequence
  Oligonucleotide primer for the detection of SNP TSC0003357
gttttagggttg

SEQ ID NO: 273912 - DNA, 12 bp, Artificial Sequence
  Oligonucleotide primer for the detection of SNP TSC0003358
ttataaaaattc

SEQ ID NO: 273913 - DNA, 12 bp, Artificial Sequence
  Oligonucleotide primer for the detection of SNP TSC0003358
agttgtaaggta

SEQ ID NO: 273914 - DNA, 12 bp, Artificial Sequence
  Oligonucleotide primer for the detection of SNP TSC0003360
accacaataaac

SEQ ID NO: 273915 - DNA, 12 bp, Artificial Sequence
  Oligonucleotide primer for the detection of SNP TSC0003360
accacgataaac

SEQ ID NO: 273916 - DNA, 12 bp, Artificial Sequence
  Oligonucleotide primer for the detection of SNP TSC0003360
tgttaaagttat

SEQ ID NO: 273917 - DNA, 12 bp, Artificial Sequence
  Oligonucleotide primer for the detection of SNP TSC0003361
ataatataatta

SEQ ID NO: 273918 - DNA, 12 bp, Artificial Sequence
  Oligonucleotide primer for the detection of SNP TSC0003361
atttagtatttt

SEQ ID NO: 273919 - DNA, 12 bp, Artificial Sequence
  Oligonucleotide primer for the detection of SNP TSC0003361
ttcaatatctca

SEQ ID NO: 273920 - DNA, 12 bp, Artificial Sequence
  Oligonucleotide primer for the detection of SNP TSC0003361
tatagtgtggtt

SEQ ID NO: 273921 - DNA, 12 bp, Artificial Sequence
  Oligonucleotide primer for the detection of SNP TSC0003362
tcttctaaatta

SEQ ID NO: 273922 - DNA, 12 bp, Artificial Sequence
  Oligonucleotide primer for the detection of SNP TSC0003362
ttctcttccact

SEQ ID NO: 273923 - DNA, 12 bp, Artificial Sequence
  Oligonucleotide primer for the detection of SNP TSC0003362
ttttttggattg

SEQ ID NO: 273924 - DNA, 12 bp, Artificial Sequence
  Oligonucleotide primer for the detection of SNP TSC0003363
aacatacctata

SEQ ID NO: 273925 - DNA, 12 bp, Artificial Sequence
  Oligonucleotide primer for the detection of SNP TSC0003363
atatttgaattt

SEQ ID NO: 273926 - DNA, 12 bp, Artificial Sequence
  Oligonucleotide primer for the detection of SNP TSC0003363
tatatttaaatc

SEQ ID NO: 273927 - DNA, 12 bp, Artificial Sequence
  Oligonucleotide primer for the detection of SNP TSC0003363
taatatatttgt

SEQ ID NO: 273928 - DNA, 12 bp, Artificial Sequence
  Oligonucleotide primer for the detection of SNP TSC0003364
tcttatcaaaaa

SEQ ID NO: 273929 - DNA, 12 bp, Artificial Sequence
  Oligonucleotide primer for the detection of SNP TSC0003364
atttttaaaatt

SEQ ID NO: 273930 - DNA, 12 bp, Artificial Sequence
  Oligonucleotide primer for the detection of SNP TSC0003364
atttttaaaacc

SEQ ID NO: 273931 - DNA, 12 bp, Artificial Sequence
  Oligonucleotide primer for the detection of SNP TSC0003364
ttttgttagaga

SEQ ID NO: 273932 - DNA, 12 bp, Artificial Sequence
  Oligonucleotide primer for the detection of SNP TSC0003365
tttttccaaaat

SEQ ID NO: 273933 - DNA, 12 bp, Artificial Sequence
  Oligonucleotide primer for the detection of SNP TSC0003365
agaataaagtta

SEQ ID NO: 273934 - DNA, 12 bp, Artificial Sequence
  Oligonucleotide primer for the detection of SNP TSC0003368
aaaactaaaact

SEQ ID NO: 273935 - DNA, 12 bp, Artificial Sequence
  Oligonucleotide primer for the detection of SNP TSC0003368
tagttagtggga

SEQ ID NO: 273936 - DNA, 12 bp, Artificial Sequence
  Oligonucleotide primer for the detection of SNP TSC0003369
atttattaaatt

SEQ ID NO: 273937 - DNA, 12 bp, Artificial Sequence
  Oligonucleotide primer for the detection of SNP TSC0003369
tttattttgata

SEQ ID NO: 273938 - DNA, 12 bp, Artificial Sequence
  Oligonucleotide primer for the detection of SNP TSC0003370
attttcattcat

SEQ ID NO: 273939 - DNA, 12 bp, Artificial Sequence
  Oligonucleotide primer for the detection of SNP TSC0003370
aatttatattaa

SEQ ID NO: 273940 - DNA, 12 bp, Artificial Sequence
  Oligonucleotide primer for the detection of SNP TSC0003371
taataataatat

SEQ ID NO: 273941 - DNA, 12 bp, Artificial Sequence
  Oligonucleotide primer for the detection of SNP TSC0003371
tttaaggtttaa

SEQ ID NO: 273942 - DNA, 12 bp, Artificial Sequence
  Oligonucleotide primer for the detection of SNP TSC0003372
ccaacaccaccc

SEQ ID NO: 273943 - DNA, 12 bp, Artificial Sequence
  Oligonucleotide primer for the detection of SNP TSC0003372
ttagagggagta

SEQ ID NO: 273944 - DNA, 12 bp, Artificial Sequence
  Oligonucleotide primer for the detection of SNP TSC0003373
ttcttataataa

SEQ ID NO: 273945 - DNA, 12 bp, Artificial Sequence
  Oligonucleotide primer for the detection of SNP TSC0003373
tttgatatagtt

SEQ ID NO: 273946 - DNA, 12 bp, Artificial Sequence
  Oligonucleotide primer for the detection of SNP TSC0003373
tttttatagtga

SEQ ID NO: 273947 - DNA, 12 bp, Artificial Sequence
  Oligonucleotide primer for the detection of SNP TSC0003374
tatatatacaca

SEQ ID NO: 273948 - DNA, 12 bp, Artificial Sequence
  Oligonucleotide primer for the detection of SNP TSC0003374
tatatatacacg

SEQ ID NO: 273949 - DNA, 12 bp, Artificial Sequence
  Oligonucleotide primer for the detection of SNP TSC0003374
atatatgtgtgt

SEQ ID NO: 273950 - DNA, 12 bp, Artificial Sequence
  Oligonucleotide primer for the detection of SNP TSC0003374
atatatgcgtgt

SEQ ID NO: 273951 - DNA, 12 bp, Artificial Sequence
  Oligonucleotide primer for the detection of SNP TSC0003374
atatatgtgcgt

SEQ ID NO: 273952 - DNA, 12 bp, Artificial Sequence
  Oligonucleotide primer for the detection of SNP TSC0003374
atatatgcgcgt

SEQ ID NO: 273953 - DNA, 12 bp, Artificial Sequence
  Oligonucleotide primer for the detection of SNP TSC0003374
atacatacacac

SEQ ID NO: 273954 - DNA, 12 bp, Artificial Sequence
  Oligonucleotide primer for the detection of SNP TSC0003374
atacatacacgc

SEQ ID NO: 273955 - DNA, 12 bp, Artificial Sequence
  Oligonucleotide primer for the detection of SNP TSC0003374
atacatacgcac

SEQ ID NO: 273956 - DNA, 12 bp, Artificial Sequence
  Oligonucleotide primer for the detection of SNP TSC0003374
atacatacgcgc

SEQ ID NO: 273957 - DNA, 12 bp, Artificial Sequence
  Oligonucleotide primer for the detection of SNP TSC0003374
tgtgtgtgtatg

SEQ ID NO: 273958 - DNA, 12 bp, Artificial Sequence
  Oligonucleotide primer for the detection of SNP TSC0003374
tgtgtgtgtacg

SEQ ID NO: 273959 - DNA, 12 bp, Artificial Sequence
  Oligonucleotide primer for the detection of SNP TSC0003375
ctaaaaacttta

SEQ ID NO: 273960 - DNA, 12 bp, Artificial Sequence
  Oligonucleotide primer for the detection of SNP TSC0003375
gagtttatttgg

SEQ ID NO: 273961 - DNA, 12 bp, Artificial Sequence
  Oligonucleotide primer for the detection of SNP TSC0003375
aatccatttaaa

SEQ ID NO: 273962 - DNA, 12 bp, Artificial Sequence
  Oligonucleotide primer for the detection of SNP TSC0003375
attgaagatttt

SEQ ID NO: 273963 - DNA, 12 bp, Artificial Sequence
  Oligonucleotide primer for the detection of SNP TSC0003376
aatacaaactac

SEQ ID NO: 273964 - DNA, 12 bp, Artificial Sequence
  Oligonucleotide primer for the detection of SNP TSC0003376
attgaagaatag

SEQ ID NO: 273965 - DNA, 12 bp, Artificial Sequence
  Oligonucleotide primer for the detection of SNP TSC0003377
tataaaattatc

SEQ ID NO: 273966 - DNA, 12 bp, Artificial Sequence
  Oligonucleotide primer for the detection of SNP TSC0003377
atatagaataag

SEQ ID NO: 273967 - DNA, 12 bp, Artificial Sequence
  Oligonucleotide primer for the detection of SNP TSC0003377
acataaaataaa

SEQ ID NO: 273968 - DNA, 12 bp, Artificial Sequence
  Oligonucleotide primer for the detection of SNP TSC0003377
tgtaagattgtt

SEQ ID NO: 273969 - DNA, 12 bp, Artificial Sequence
  Oligonucleotide primer for the detection of SNP TSC0003379
aatattattatt

SEQ ID NO: 273970 - DNA, 12 bp, Artificial Sequence
  Oligonukleotid-Primer
tgttaaatgagg

SEQ ID NO: 273971 - DNA, 12 bp, Artificial Sequence
  Oligonucleotide primer for the detection of SNP TSC0003379
cgttaaatgagg

SEQ ID NO: 273972 - DNA, 12 bp, Artificial Sequence
  Oligonucleotide primer for the detection of SNP TSC0003380
aaaaacatttac

SEQ ID NO: 273973 - DNA, 12 bp, Artificial Sequence
  Oligonucleotide primer for the detection of SNP TSC0003380
gaggtttaaggg

SEQ ID NO: 273974 - DNA, 12 bp, Artificial Sequence
  Oligonukleotid-Primer
acattcatcttc

SEQ ID NO: 273975 - DNA, 12 bp, Artificial Sequence
  Oligonucleotide primer for the detection of SNP TSC0003381
atatttattaaa

SEQ ID NO: 273976 - DNA, 12 bp, Artificial Sequence
  Oligonucleotide primer for the detection of SNP TSC0003382
acaaaaaaaatc

SEQ ID NO: 273977 - DNA, 12 bp, Artificial Sequence
  Oligonucleotide primer for the detection of SNP TSC0003382
tgagatattgaa

SEQ ID NO: 273978 - DNA, 12 bp, Artificial Sequence
  Oligonukleotid-Primer
acttttcttcta

SEQ ID NO: 273979 - DNA, 12 bp, Artificial Sequence
  Oligonucleotide primer for the detection of SNP TSC0003383
aaattttgaaat

SEQ ID NO: 273980 - DNA, 12 bp, Artificial Sequence
  Oligonucleotide primer for the detection of SNP TSC0003383
taaattctaaaa

SEQ ID NO: 273981 - DNA, 12 bp, Artificial Sequence
  Oligonucleotide primer for the detection of SNP TSC0003383
gttttttttttg

SEQ ID NO: 273982 - DNA, 12 bp, Artificial Sequence
  Oligonucleotide primer for the detection of SNP TSC0003384
tacaaatacaac

SEQ ID NO: 273983 - DNA, 12 bp, Artificial Sequence
  Oligonucleotide primer for the detection of SNP TSC0003384
tagaatggttat

SEQ ID NO: 273984 - DNA, 12 bp, Artificial Sequence
  Oligonucleotide primer for the detection of SNP TSC0003384
aaaataatcaca

SEQ ID NO: 273985 - DNA, 12 bp, Artificial Sequence
  Oligonucleotide primer for the detection of SNP TSC0003384
tataaatgtagt

SEQ ID NO: 273986 - DNA, 12 bp, Artificial Sequence
  Oligonucleotide primer for the detection of SNP TSC0003385
ccaaaatctact

SEQ ID NO: 273987 - DNA, 12 bp, Artificial Sequence
  Oligonucleotide primer for the detection of SNP TSC0003385
aatattatttag

SEQ ID NO: 273988 - DNA, 12 bp, Artificial Sequence
  Oligonucleotide primer for the detection of SNP TSC0003386
taaatcaaatat

SEQ ID NO: 273989 - DNA, 12 bp, Artificial Sequence
  Oligonucleotide primer for the detection of SNP TSC0003386
ttttttgtagga

SEQ ID NO: 273990 - DNA, 12 bp, Artificial Sequence
  Oligonucleotide primer for the detection of SNP TSC0003387
aaaaacctataa

SEQ ID NO: 273991 - DNA, 12 bp, Artificial Sequence
  Oligonucleotide primer for the detection of SNP TSC0003387
tccttacctaac

SEQ ID NO: 273992 - DNA, 12 bp, Artificial Sequence
  Oligonucleotide primer for the detection of SNP TSC0003387
aaggatttgtga

SEQ ID NO: 273993 - DNA, 12 bp, Artificial Sequence
  Oligonucleotide primer for the detection of SNP TSC0003388
caataacctata

SEQ ID NO: 273994 - DNA, 12 bp, Artificial Sequence
  Oligonucleotide primer for the detection of SNP TSC0003388
gtagtaaaaaag

SEQ ID NO: 273995 - DNA, 12 bp, Artificial Sequence
  Oligonucleotide primer for the detection of SNP TSC0003388
agtagtttgtat

SEQ ID NO: 273996 - DNA, 12 bp, Artificial Sequence
  Oligonucleotide primer for the detection of SNP TSC0003389
ctcatataccat

SEQ ID NO: 273997 - DNA, 12 bp, Artificial Sequence
  Oligonucleotide primer for the detection of SNP TSC0003389
ttttttagtgtg

SEQ ID NO: 273998 - DNA, 12 bp, Artificial Sequence
  Oligonucleotide primer for the detection of SNP TSC0003390
cctacatacttc

SEQ ID NO: 273999 - DNA, 12 bp, Artificial Sequence
  Oligonucleotide primer for the detection of SNP TSC0003390
tgttattgatta

SEQ ID NO: 274000 - DNA, 12 bp, Artificial Sequence
  Oligonucleotide primer for the detection of SNP TSC0003391
cttaccttcaaa

SEQ ID NO: 274001 - DNA, 12 bp, Artificial Sequence
  Oligonucleotide primer for the detection of SNP TSC0003391
tagattgagggt

SEQ ID NO: 274002 - DNA, 12 bp, Artificial Sequence
  Oligonucleotide primer for the detection of SNP TSC0003391
tagattgagggc

SEQ ID NO: 274003 - DNA, 12 bp, Artificial Sequence
  Oligonucleotide primer for the detection of SNP TSC0003391
tcaaactaaaaa

SEQ ID NO: 274004 - DNA, 12 bp, Artificial Sequence
  Oligonucleotide primer for the detection of SNP TSC0003392
aaaacactttct

SEQ ID NO: 274005 - DNA, 12 bp, Artificial Sequence
  Oligonucleotide primer for the detection of SNP TSC0003392
gtaagtgattta

SEQ ID NO: 274006 - DNA, 12 bp, Artificial Sequence
  Oligonucleotide primer for the detection of SNP TSC0003393
tatctcctcctc

SEQ ID NO: 274007 - DNA, 12 bp, Artificial Sequence
  Oligonucleotide primer for the detection of SNP TSC0003393
gaatgttttttt

SEQ ID NO: 274008 - DNA, 12 bp, Artificial Sequence
  Oligonucleotide primer for the detection of SNP TSC0003393
aaatatcttctt

SEQ ID NO: 274009 - DNA, 12 bp, Artificial Sequence
  Oligonucleotide primer for the detection of SNP TSC0003394
tcccaacctcta

SEQ ID NO: 274010 - DNA, 12 bp, Artificial Sequence
  Oligonucleotide primer for the detection of SNP TSC0003394
tgggtaagattt

SEQ ID NO: 274011 - DNA, 12 bp, Artificial Sequence
  Oligonucleotide primer for the detection of SNP TSC0003394
taaataaaattt

SEQ ID NO: 274012 - DNA, 12 bp, Artificial Sequence
  Oligonucleotide primer for the detection of SNP TSC0003394
ttttaattttta

SEQ ID NO: 274013 - DNA, 12 bp, Artificial Sequence
  Oligonucleotide primer for the detection of SNP TSC0003396
acattaataatt

SEQ ID NO: 274014 - DNA, 12 bp, Artificial Sequence
  Oligonucleotide primer for the detection of SNP TSC0003396
ttatattttttt

SEQ ID NO: 274015 - DNA, 12 bp, Artificial Sequence
  Oligonucleotide primer for the detection of SNP TSC0003396
tcacactttttt

SEQ ID NO: 274016 - DNA, 12 bp, Artificial Sequence
  Oligonucleotide primer for the detection of SNP TSC0003396
atattggtaatt

SEQ ID NO: 274017 - DNA, 12 bp, Artificial Sequence
  Oligonucleotide primer for the detection of SNP TSC0003397
aataacaaaatt

SEQ ID NO: 274018 - DNA, 12 bp, Artificial Sequence
  Oligonucleotide primer for the detection of SNP TSC0003397
ggattggagtta

SEQ ID NO: 274019 - DNA, 12 bp, Artificial Sequence
  Oligonucleotide primer for the detection of SNP TSC0003397
aaattaaaatta

SEQ ID NO: 274020 - DNA, 12 bp, Artificial Sequence
  Oligonucleotide primer for the detection of SNP TSC0003397
agtggtagagtt

SEQ ID NO: 274021 - DNA, 12 bp, Artificial Sequence
  Oligonucleotide primer for the detection of SNP TSC0003398
atttttatttct

SEQ ID NO: 274022 - DNA, 12 bp, Artificial Sequence
  Oligonucleotide primer for the detection of SNP TSC0003398
gtaggatgatta

SEQ ID NO: 274023 - DNA, 12 bp, Artificial Sequence
  Oligonucleotide primer for the detection of SNP TSC0003399
ttcctatacact

SEQ ID NO: 274024 - DNA, 12 bp, Artificial Sequence
  Oligonucleotide primer for the detection of SNP TSC0003399
gggaataaggga

SEQ ID NO: 274025 - DNA, 12 bp, Artificial Sequence
  Oligonucleotide primer for the detection of SNP TSC0003399
tttttgtatatt

SEQ ID NO: 274026 - DNA, 12 bp, Artificial Sequence
  Oligonucleotide primer for the detection of SNP TSC0003400
tcaatacttcct

SEQ ID NO: 274027 - DNA, 12 bp, Artificial Sequence
  Oligonucleotide primer for the detection of SNP TSC0003400
taagggaaagtg

SEQ ID NO: 274028 - DNA, 12 bp, Artificial Sequence
  Oligonucleotide primer for the detection of SNP TSC0003401
acaaaataatca

SEQ ID NO: 274029 - DNA, 12 bp, Artificial Sequence
  Oligonucleotide primer for the detection of SNP TSC0003401
tgaattgttttt

SEQ ID NO: 274030 - DNA, 12 bp, Artificial Sequence
  Oligonucleotide primer for the detection of SNP TSC0003401
taaattactttt

SEQ ID NO: 274031 - DNA, 12 bp, Artificial Sequence
  Oligonucleotide primer for the detection of SNP TSC0003401
ataaaataatta

SEQ ID NO: 274032 - DNA, 12 bp, Artificial Sequence
  Oligonucleotide primer for the detection of SNP TSC0003403
taaaaaatctac

SEQ ID NO: 274033 - DNA, 12 bp, Artificial Sequence
  Oligonucleotide primer for the detection of SNP TSC0003403
ttagggttaaga

SEQ ID NO: 274034 - DNA, 12 bp, Artificial Sequence
  Oligonucleotide primer for the detection of SNP TSC0003404
tttatttattta

SEQ ID NO: 274035 - DNA, 12 bp, Artificial Sequence
  Oligonucleotide primer for the detection of SNP TSC0003405
taaaaaacaatt

SEQ ID NO: 274036 - DNA, 12 bp, Artificial Sequence
  Oligonucleotide primer for the detection of SNP TSC0003405
atattattttaa

SEQ ID NO: 274037 - DNA, 12 bp, Artificial Sequence
  Oligonucleotide primer for the detection of SNP TSC0003405
acattattttaa

SEQ ID NO: 274038 - DNA, 12 bp, Artificial Sequence
  Oligonucleotide primer for the detection of SNP TSC0003405
taaagagtagtt

SEQ ID NO: 274039 - DNA, 12 bp, Artificial Sequence
  Oligonucleotide primer for the detection of SNP TSC0003406
taaaatacttac

SEQ ID NO: 274040 - DNA, 12 bp, Artificial Sequence
  Oligonucleotide primer for the detection of SNP TSC0003407
actccaaactac

SEQ ID NO: 274041 - DNA, 12 bp, Artificial Sequence
  Oligonucleotide primer for the detection of SNP TSC0003407
ggtagggggttg

SEQ ID NO: 274042 - DNA, 12 bp, Artificial Sequence
  Oligonucleotide primer for the detection of SNP TSC0003407
aacaaaaaacta

SEQ ID NO: 274043 - DNA, 12 bp, Artificial Sequence
  Oligonucleotide primer for the detection of SNP TSC0003407
attttaggttgt

SEQ ID NO: 274044 - DNA, 12 bp, Artificial Sequence
  Oligonucleotide primer for the detection of SNP TSC0003408
cactcccatcta

SEQ ID NO: 274045 - DNA, 12 bp, Artificial Sequence
  Oligonucleotide primer for the detection of SNP TSC0003408
ttatttagatta

SEQ ID NO: 274046 - DNA, 12 bp, Artificial Sequence
  Oligonucleotide primer for the detection of SNP TSC0003408
ccatccaaacta

SEQ ID NO: 274047 - DNA, 12 bp, Artificial Sequence
  Oligonucleotide primer for the detection of SNP TSC0003408
atatttttattt

SEQ ID NO: 274048 - DNA, 12 bp, Artificial Sequence
  Oligonucleotide primer for the detection of SNP TSC0003409
ccatatatcaac

SEQ ID NO: 274049 - DNA, 12 bp, Artificial Sequence
  Oligonucleotide primer for the detection of SNP TSC0003409
atggattggaat

SEQ ID NO: 274050 - DNA, 12 bp, Artificial Sequence
  Oligonucleotide primer for the detection of SNP TSC0003409
taaactaaaaca

SEQ ID NO: 274051 - DNA, 12 bp, Artificial Sequence
  Oligonucleotide primer for the detection of SNP TSC0003409
ttatgtgttagt

SEQ ID NO: 274052 - DNA, 12 bp, Artificial Sequence
  Oligonucleotide primer for the detection of SNP TSC0003410
atctttttttat

SEQ ID NO: 274053 - DNA, 12 bp, Artificial Sequence
  Oligonucleotide primer for the detection of SNP TSC0003410
ttaaaagttaaa

SEQ ID NO: 274054 - DNA, 12 bp, Artificial Sequence
  Oligonucleotide primer for the detection of SNP TSC0003411
ccaaaactactt

SEQ ID NO: 274055 - DNA, 12 bp, Artificial Sequence
  Oligonucleotide primer for the detection of SNP TSC0003411
tttttaattaaa

SEQ ID NO: 274056 - DNA, 12 bp, Artificial Sequence
  Oligonucleotide primer for the detection of SNP TSC0003411
ccttcaattaaa

SEQ ID NO: 274057 - DNA, 12 bp, Artificial Sequence
  Oligonucleotide primer for the detection of SNP TSC0003411
ttaaaattattt

SEQ ID NO: 274058 - DNA, 12 bp, Artificial Sequence
  Oligonucleotide primer for the detection of SNP TSC0003413
acacctctttcc

SEQ ID NO: 274059 - DNA, 12 bp, Artificial Sequence
  Oligonucleotide primer for the detection of SNP TSC0003413
gcacctctttcc

SEQ ID NO: 274060 - DNA, 12 bp, Artificial Sequence
  Oligonucleotide primer for the detection of SNP TSC0003413
tttaatgtgata

SEQ ID NO: 274061 - DNA, 12 bp, Artificial Sequence
  Oligonucleotide primer for the detection of SNP TSC0003413
tctaatataata

SEQ ID NO: 274062 - DNA, 12 bp, Artificial Sequence
  Oligonucleotide primer for the detection of SNP TSC0003413
gtattttttttt

SEQ ID NO: 274063 - DNA, 12 bp, Artificial Sequence
  Oligonucleotide primer for the detection of SNP TSC0003414
taatacacaact

SEQ ID NO: 274064 - DNA, 12 bp, Artificial Sequence
  Oligonucleotide primer for the detection of SNP TSC0003414
aagaaattttat

SEQ ID NO: 274065 - DNA, 12 bp, Artificial Sequence
  Oligonucleotide primer for the detection of SNP TSC0003415
acaatttaatat

SEQ ID NO: 274066 - DNA, 12 bp, Artificial Sequence
  Oligonucleotide primer for the detection of SNP TSC0003415
tgggtataataa

SEQ ID NO: 274067 - DNA, 12 bp, Artificial Sequence
  Oligonucleotide primer for the detection of SNP TSC0003416
taaataaataaa

SEQ ID NO: 274068 - DNA, 12 bp, Artificial Sequence
  Oligonucleotide primer for the detection of SNP TSC0003416
agggtttatttt

SEQ ID NO: 274069 - DNA, 12 bp, Artificial Sequence
  Oligonucleotide primer for the detection of SNP TSC0003416
aaaactcatttt

SEQ ID NO: 274070 - DNA, 12 bp, Artificial Sequence
  Oligonucleotide primer for the detection of SNP TSC0003417
aatctttaaaca

SEQ ID NO: 274071 - DNA, 12 bp, Artificial Sequence
  Oligonucleotide primer for the detection of SNP TSC0003417
cccctaaaaaaa

SEQ ID NO: 274072 - DNA, 12 bp, Artificial Sequence
  Oligonucleotide primer for the detection of SNP TSC0003417
ggtttttagata

SEQ ID NO: 274073 - DNA, 12 bp, Artificial Sequence
  Oligonucleotide primer for the detection of SNP TSC0003420
ctataaaaataa

SEQ ID NO: 274074 - DNA, 12 bp, Artificial Sequence
  Oligonucleotide primer for the detection of SNP TSC0003420
taattgtttaat

SEQ ID NO: 274075 - DNA, 12 bp, Artificial Sequence
  Oligonucleotide primer for the detection of SNP TSC0003420
taattacccaat

SEQ ID NO: 274076 - DNA, 12 bp, Artificial Sequence
  Oligonucleotide primer for the detection of SNP TSC0003420
tgtaagaatagt

SEQ ID NO: 274077 - DNA, 12 bp, Artificial Sequence
  Oligonucleotide primer for the detection of SNP TSC0003421
acataaaaaact

SEQ ID NO: 274078 - DNA, 12 bp, Artificial Sequence
  Oligonucleotide primer for the detection of SNP TSC0003421
taaagaaggtta

SEQ ID NO: 274079 - DNA, 12 bp, Artificial Sequence
  Oligonucleotide primer for the detection of SNP TSC0003421
taaaaaaaatta

SEQ ID NO: 274080 - DNA, 12 bp, Artificial Sequence
  Oligonucleotide primer for the detection of SNP TSC0003421
atataagaaatt

SEQ ID NO: 274081 - DNA, 12 bp, Artificial Sequence
  Oligonucleotide primer for the detection of SNP TSC0003422
ttttacatttac

SEQ ID NO: 274082 - DNA, 12 bp, Artificial Sequence
  Oligonucleotide primer for the detection of SNP TSC0003422
attagtgttaat

SEQ ID NO: 274083 - DNA, 12 bp, Artificial Sequence
  Oligonucleotide primer for the detection of SNP TSC0003422
caatatcaataa

SEQ ID NO: 274084 - DNA, 12 bp, Artificial Sequence
  Oligonucleotide primer for the detection of SNP TSC0003422
ttttatatttgt

SEQ ID NO: 274085 - DNA, 12 bp, Artificial Sequence
  Oligonucleotide primer for the detection of SNP TSC0003425
cataaaacattt

SEQ ID NO: 274086 - DNA, 12 bp, Artificial Sequence
  Oligonucleotide primer for the detection of SNP TSC0003425
cgtaaaacattt

SEQ ID NO: 274087 - DNA, 12 bp, Artificial Sequence
  Oligonukleotid-Primer
taaaaaaaattt

SEQ ID NO: 274088 - DNA, 12 bp, Artificial Sequence
  Oligonucleotide primer for the detection of SNP TSC0003425
ccaaaaaaaact

SEQ ID NO: 274089 - DNA, 12 bp, Artificial Sequence
  Oligonucleotide primer for the detection of SNP TSC0003425
tgtaaaatattt

SEQ ID NO: 274090 - DNA, 12 bp, Artificial Sequence
  Oligonucleotide primer for the detection of SNP TSC0003425
cgtaaaatattt

SEQ ID NO: 274091 - DNA, 12 bp, Artificial Sequence
  Oligonucleotide primer for the detection of SNP TSC0003427
aaaacaaacaat

SEQ ID NO: 274092 - DNA, 12 bp, Artificial Sequence
  Oligonucleotide primer for the detection of SNP TSC0003427
aagatttaatgg

SEQ ID NO: 274093 - DNA, 12 bp, Artificial Sequence
  Oligonucleotide primer for the detection of SNP TSC0003428
ccaataacaaat

SEQ ID NO: 274094 - DNA, 12 bp, Artificial Sequence
  Oligonucleotide primer for the detection of SNP TSC0003428
tgtagattgata

SEQ ID NO: 274095 - DNA, 12 bp, Artificial Sequence
  Oligonucleotide primer for the detection of SNP TSC0003428
tgtagatcgata

SEQ ID NO: 274096 - DNA, 12 bp, Artificial Sequence
  Oligonucleotide primer for the detection of SNP TSC0003428
tacaaaccaata

SEQ ID NO: 274097 - DNA, 12 bp, Artificial Sequence
  Oligonucleotide primer for the detection of SNP TSC0003428
tacaaaccgata

SEQ ID NO: 274098 - DNA, 12 bp, Artificial Sequence
  Oligonucleotide primer for the detection of SNP TSC0003428
ttagtggtaaat

SEQ ID NO: 274099 - DNA, 12 bp, Artificial Sequence
  Oligonucleotide primer for the detection of SNP TSC0003429
caataacataat

SEQ ID NO: 274100 - DNA, 12 bp, Artificial Sequence
  Oligonucleotide primer for the detection of SNP TSC0003429
ggttgtagtgag

SEQ ID NO: 274101 - DNA, 12 bp, Artificial Sequence
  Oligonucleotide primer for the detection of SNP TSC0003430
taaatacttatc

SEQ ID NO: 274102 - DNA, 12 bp, Artificial Sequence
  Oligonucleotide primer for the detection of SNP TSC0003430
ttagtaatttgt

SEQ ID NO: 274103 - DNA, 12 bp, Artificial Sequence
  Oligonucleotide primer for the detection of SNP TSC0003430
taataacttaca

SEQ ID NO: 274104 - DNA, 12 bp, Artificial Sequence
  Oligonucleotide primer for the detection of SNP TSC0003430
agtatttgtttt

SEQ ID NO: 274105 - DNA, 12 bp, Artificial Sequence
  Oligonucleotide primer for the detection of SNP TSC0003431
acatattaaaaa

SEQ ID NO: 274106 - DNA, 12 bp, Artificial Sequence
  Oligonucleotide primer for the detection of SNP TSC0003431
atttagtttttt

SEQ ID NO: 274107 - DNA, 12 bp, Artificial Sequence
  Oligonucleotide primer for the detection of SNP TSC0003431
ttcaacccttta

SEQ ID NO: 274108 - DNA, 12 bp, Artificial Sequence
  Oligonucleotide primer for the detection of SNP TSC0003431
gtatattaagga

SEQ ID NO: 274109 - DNA, 12 bp, Artificial Sequence
  Oligonucleotide primer for the detection of SNP TSC0003432
ttccttatcata

SEQ ID NO: 274110 - DNA, 12 bp, Artificial Sequence
  Oligonucleotide primer for the detection of SNP TSC0003432
atatgttttaat

SEQ ID NO: 274111 - DNA, 12 bp, Artificial Sequence
  Oligonucleotide primer for the detection of SNP TSC0003432
acatattttaat

SEQ ID NO: 274112 - DNA, 12 bp, Artificial Sequence
  Oligonucleotide primer for the detection of SNP TSC0003432
ttttttgttata

SEQ ID NO: 274113 - DNA, 12 bp, Artificial Sequence
  Oligonucleotide primer for the detection of SNP TSC0003433
tataaaaatact

SEQ ID NO: 274114 - DNA, 12 bp, Artificial Sequence
  Oligonucleotide primer for the detection of SNP TSC0003433
tttttaagaaga

SEQ ID NO: 274115 - DNA, 12 bp, Artificial Sequence
  Oligonucleotide primer for the detection of SNP TSC0003434
attattaaaaaa

SEQ ID NO: 274116 - DNA, 12 bp, Artificial Sequence
  Oligonucleotide primer for the detection of SNP TSC0003434
attaataaaaga

SEQ ID NO: 274117 - DNA, 12 bp, Artificial Sequence
  Oligonucleotide primer for the detection of SNP TSC0003435
acaaatataaac

SEQ ID NO: 274118 - DNA, 12 bp, Artificial Sequence
  Oligonucleotide primer for the detection of SNP TSC0003435
tttattgtgtta

SEQ ID NO: 274119 - DNA, 12 bp, Artificial Sequence
  Oligonucleotide primer for the detection of SNP TSC0003436
ctctttttcaaa

SEQ ID NO: 274120 - DNA, 12 bp, Artificial Sequence
  Oligonucleotide primer for the detection of SNP TSC0003437
aatacaatatac

SEQ ID NO: 274121 - DNA, 12 bp, Artificial Sequence
  Oligonucleotide primer for the detection of SNP TSC0003437
ttttgtttgtta

SEQ ID NO: 274122 - DNA, 12 bp, Artificial Sequence
  Oligonucleotide primer for the detection of SNP TSC0003438
tcaaataactta

SEQ ID NO: 274123 - DNA, 12 bp, Artificial Sequence
  Oligonucleotide primer for the detection of SNP TSC0003438
aaatttttgatt

SEQ ID NO: 274124 - DNA, 12 bp, Artificial Sequence
  Oligonucleotide primer for the detection of SNP TSC0003438
tcaaactcctaa

SEQ ID NO: 274125 - DNA, 12 bp, Artificial Sequence
  Oligonucleotide primer for the detection of SNP TSC0003438
gttagataattt

SEQ ID NO: 274126 - DNA, 12 bp, Artificial Sequence
  Oligonucleotide primer for the detection of SNP TSC0003439
atatatactttt

SEQ ID NO: 274127 - DNA, 12 bp, Artificial Sequence
  Oligonucleotide primer for the detection of SNP TSC0003439
ttgaaataaaag

SEQ ID NO: 274128 - DNA, 12 bp, Artificial Sequence
  Oligonucleotide primer for the detection of SNP TSC0003440
taataataataa

SEQ ID NO: 274129 - DNA, 12 bp, Artificial Sequence
  Oligonucleotide primer for the detection of SNP TSC0003440
ttcttcttcttc

SEQ ID NO: 274130 - DNA, 12 bp, Artificial Sequence
  Oligonucleotide primer for the detection of SNP TSC0003440
aataatggtaat

SEQ ID NO: 274131 - DNA, 12 bp, Artificial Sequence
  Oligonucleotide primer for the detection of SNP TSC0003441
taacataaatat

SEQ ID NO: 274132 - DNA, 12 bp, Artificial Sequence
  Oligonucleotide primer for the detection of SNP TSC0003441
aaaaaatgttta

SEQ ID NO: 274133 - DNA, 12 bp, Artificial Sequence
  Oligonucleotide primer for the detection of SNP TSC0003442
taaataaattac

SEQ ID NO: 274134 - DNA, 12 bp, Artificial Sequence
  Oligonucleotide primer for the detection of SNP TSC0003442
agtggttttaga

SEQ ID NO: 274135 - DNA, 12 bp, Artificial Sequence
  Oligonucleotide primer for the detection of SNP TSC0003443
aatattaaaaca

SEQ ID NO: 274136 - DNA, 12 bp, Artificial Sequence
  Oligonucleotide primer for the detection of SNP TSC0003443
ttaaaatttttt

SEQ ID NO: 274137 - DNA, 12 bp, Artificial Sequence
  Oligonucleotide primer for the detection of SNP TSC0003443
ttttaaaatttc

SEQ ID NO: 274138 - DNA, 12 bp, Artificial Sequence
  Oligonucleotide primer for the detection of SNP TSC0003443
aaatattgaggt

SEQ ID NO: 274139 - DNA, 12 bp, Artificial Sequence
  Oligonucleotide primer for the detection of SNP TSC0003444
aattacatttat

SEQ ID NO: 274140 - DNA, 12 bp, Artificial Sequence
  Oligonucleotide primer for the detection of SNP TSC0003444
ggaaaaaaaaaa

SEQ ID NO: 274141 - DNA, 12 bp, Artificial Sequence
  Oligonucleotide primer for the detection of SNP TSC0003444
aattgtatttat

SEQ ID NO: 274142 - DNA, 12 bp, Artificial Sequence
  Oligonucleotide primer for the detection of SNP TSC0003445
acaataaaaatc

SEQ ID NO: 274143 - DNA, 12 bp, Artificial Sequence
  Oligonucleotide primer for the detection of SNP TSC0003445
gaaagatgttta

SEQ ID NO: 274144 - DNA, 12 bp, Artificial Sequence
  Oligonucleotide primer for the detection of SNP TSC0003449
atccaactaaaa

SEQ ID NO: 274145 - DNA, 12 bp, Artificial Sequence
  Oligonucleotide primer for the detection of SNP TSC0003449
tctctctctaaa

SEQ ID NO: 274146 - DNA, 12 bp, Artificial Sequence
  Oligonucleotide primer for the detection of SNP TSC0003449
aggtttagttga

SEQ ID NO: 274147 - DNA, 12 bp, Artificial Sequence
  Oligonucleotide primer for the detection of SNP TSC0003450
cccacataataa

SEQ ID NO: 274148 - DNA, 12 bp, Artificial Sequence
  Oligonucleotide primer for the detection of SNP TSC0003450
attataggtgtt

SEQ ID NO: 274149 - DNA, 12 bp, Artificial Sequence
  Oligonucleotide primer for the detection of SNP TSC0003450
attataggcgtt

SEQ ID NO: 274150 - DNA, 12 bp, Artificial Sequence
  Oligonucleotide primer for the detection of SNP TSC0003450
actacaaacacc

SEQ ID NO: 274151 - DNA, 12 bp, Artificial Sequence
  Oligonucleotide primer for the detection of SNP TSC0003450
actacaaacgcc

SEQ ID NO: 274152 - DNA, 12 bp, Artificial Sequence
  Oligonucleotide primer for the detection of SNP TSC0003450
ttatatggtggt

SEQ ID NO: 274153 - DNA, 12 bp, Artificial Sequence
  Oligonucleotide primer for the detection of SNP TSC0003450
ttatatggtggc

SEQ ID NO: 274154 - DNA, 12 bp, Artificial Sequence
  Oligonucleotide primer for the detection of SNP TSC0003451
gagatttgtata

SEQ ID NO: 274155 - DNA, 12 bp, Artificial Sequence
  Oligonucleotide primer for the detection of SNP TSC0003451
aaaatttacaca

SEQ ID NO: 274156 - DNA, 12 bp, Artificial Sequence
  Oligonucleotide primer for the detection of SNP TSC0003451
gttttagaaaat

SEQ ID NO: 274157 - DNA, 12 bp, Artificial Sequence
  Oligonucleotide primer for the detection of SNP TSC0003452
tattattttact

SEQ ID NO: 274158 - DNA, 12 bp, Artificial Sequence
  Oligonucleotide primer for the detection of SNP TSC0003452
tttaaaataatg

SEQ ID NO: 274159 - DNA, 12 bp, Artificial Sequence
  Oligonucleotide primer for the detection of SNP TSC0003454
taaaataaacca

SEQ ID NO: 274160 - DNA, 12 bp, Artificial Sequence
  Oligonucleotide primer for the detection of SNP TSC0003454
tagttattgttt

SEQ ID NO: 274161 - DNA, 12 bp, Artificial Sequence
  Oligonucleotide primer for the detection of SNP TSC0003454
caattattaccc

SEQ ID NO: 274162 - DNA, 12 bp, Artificial Sequence
  Oligonucleotide primer for the detection of SNP TSC0003454
ttaaaatgagtt

SEQ ID NO: 274163 - DNA, 12 bp, Artificial Sequence
  Oligonucleotide primer for the detection of SNP TSC0003455
cttatttatctt

SEQ ID NO: 274164 - DNA, 12 bp, Artificial Sequence
  Oligonucleotide primer for the detection of SNP TSC0003455
tattgtttatgg

SEQ ID NO: 274165 - DNA, 12 bp, Artificial Sequence
  Oligonucleotide primer for the detection of SNP TSC0003455
tattacccataa

SEQ ID NO: 274166 - DNA, 12 bp, Artificial Sequence
  Oligonucleotide primer for the detection of SNP TSC0003456
attttaagataa

SEQ ID NO: 274167 - DNA, 12 bp, Artificial Sequence
  Oligonucleotide primer for the detection of SNP TSC0003459
aatactcacaat

SEQ ID NO: 274168 - DNA, 12 bp, Artificial Sequence
  Oligonucleotide primer for the detection of SNP TSC0003459
ttttaaaaagaa

SEQ ID NO: 274169 - DNA, 12 bp, Artificial Sequence
  Oligonucleotide primer for the detection of SNP TSC0003459
ccccaaaaaaaa

SEQ ID NO: 274170 - DNA, 12 bp, Artificial Sequence
  Oligonucleotide primer for the detection of SNP TSC0003459
agtatttatagt

SEQ ID NO: 274171 - DNA, 12 bp, Artificial Sequence
  Oligonucleotide primer for the detection of SNP TSC0003460
ctaatacacact

SEQ ID NO: 274172 - DNA, 12 bp, Artificial Sequence
  Oligonucleotide primer for the detection of SNP TSC0003460
ctaatacgcact

SEQ ID NO: 274173 - DNA, 12 bp, Artificial Sequence
  Oligonucleotide primer for the detection of SNP TSC0003460
tttggtttgaaa

SEQ ID NO: 274174 - DNA, 12 bp, Artificial Sequence
  Oligonucleotide primer for the detection of SNP TSC0003461
ctttcaataatt

SEQ ID NO: 274175 - DNA, 12 bp, Artificial Sequence
  Oligonucleotide primer for the detection of SNP TSC0003461
ataattaaaagg

SEQ ID NO: 274176 - DNA, 12 bp, Artificial Sequence
  Oligonucleotide primer for the detection of SNP TSC0003462
ttacttataact

SEQ ID NO: 274177 - DNA, 12 bp, Artificial Sequence
  Oligonucleotide primer for the detection of SNP TSC0003462
atataatagtta

SEQ ID NO: 274178 - DNA, 12 bp, Artificial Sequence
  Oligonucleotide primer for the detection of SNP TSC0003463
tataaaaattat

SEQ ID NO: 274179 - DNA, 12 bp, Artificial Sequence
  Oligonucleotide primer for the detection of SNP TSC0003463
tgtttttggaag

SEQ ID NO: 274180 - DNA, 12 bp, Artificial Sequence
  Oligonucleotide primer for the detection of SNP TSC0003464
attcaaacaaaa

SEQ ID NO: 274181 - DNA, 12 bp, Artificial Sequence
  Oligonucleotide primer for the detection of SNP TSC0003464
aattttttttag

SEQ ID NO: 274182 - DNA, 12 bp, Artificial Sequence
  Oligonucleotide primer for the detection of SNP TSC0003464
aatcctctccaa

SEQ ID NO: 274183 - DNA, 12 bp, Artificial Sequence
  Oligonucleotide primer for the detection of SNP TSC0003464
atttaggtaaga

SEQ ID NO: 274184 - DNA, 12 bp, Artificial Sequence
  Oligonucleotide primer for the detection of SNP TSC0003465
acactaaaattc

SEQ ID NO: 274185 - DNA, 12 bp, Artificial Sequence
  Oligonucleotide primer for the detection of SNP TSC0003465
tggtaattagaa

SEQ ID NO: 274186 - DNA, 12 bp, Artificial Sequence
  Oligonucleotide primer for the detection of SNP TSC0003466
aataactcatac

SEQ ID NO: 274187 - DNA, 12 bp, Artificial Sequence
  Oligonucleotide primer for the detection of SNP TSC0003466
gataactcatac

SEQ ID NO: 274188 - DNA, 12 bp, Artificial Sequence
  Oligonukleotid-Primer
gttgggattata

SEQ ID NO: 274189 - DNA, 12 bp, Artificial Sequence
  Oligonucleotide primer for the detection of SNP TSC0003467
catcctctccac

SEQ ID NO: 274190 - DNA, 12 bp, Artificial Sequence
  Oligonucleotide primer for the detection of SNP TSC0003467
gggttagtgaga

SEQ ID NO: 274191 - DNA, 12 bp, Artificial Sequence
  Oligonucleotide primer for the detection of SNP TSC0003467
aaattaataaaa

SEQ ID NO: 274192 - DNA, 12 bp, Artificial Sequence
  Oligonucleotide primer for the detection of SNP TSC0003467
tattttttttat

SEQ ID NO: 274193 - DNA, 12 bp, Artificial Sequence
  Oligonucleotide primer for the detection of SNP TSC0003468
aaaaattttaat

SEQ ID NO: 274194 - DNA, 12 bp, Artificial Sequence
  Oligonucleotide primer for the detection of SNP TSC0003468
taagatttaatg

SEQ ID NO: 274195 - DNA, 12 bp, Artificial Sequence
  Oligonucleotide primer for the detection of SNP TSC0003472
aaaccaaaattt

SEQ ID NO: 274196 - DNA, 12 bp, Artificial Sequence
  Oligonucleotide primer for the detection of SNP TSC0003472
gaaatttatata

SEQ ID NO: 274197 - DNA, 12 bp, Artificial Sequence
  Oligonucleotide primer for the detection of SNP TSC0003473
tactccaaatcc

SEQ ID NO: 274198 - DNA, 12 bp, Artificial Sequence
  Oligonucleotide primer for the detection of SNP TSC0003473
aattttggtttg

SEQ ID NO: 274199 - DNA, 12 bp, Artificial Sequence
  Oligonucleotide primer for the detection of SNP TSC0003474
tcaaacaattct

SEQ ID NO: 274200 - DNA, 12 bp, Artificial Sequence
  Oligonucleotide primer for the detection of SNP TSC0003474
aggttgaagtag

SEQ ID NO: 274201 - DNA, 12 bp, Artificial Sequence
  Oligonucleotide primer for the detection of SNP TSC0003475
ataactttactt

SEQ ID NO: 274202 - DNA, 12 bp, Artificial Sequence
  Oligonucleotide primer for the detection of SNP TSC0003475
agtatttggtaa

SEQ ID NO: 274203 - DNA, 12 bp, Artificial Sequence
  Oligonucleotide primer for the detection of SNP TSC0003475
aacatttaacaa

SEQ ID NO: 274204 - DNA, 12 bp, Artificial Sequence
  Oligonucleotide primer for the detection of SNP TSC0003475
gtgattttgttt

SEQ ID NO: 274205 - DNA, 12 bp, Artificial Sequence
  Oligonucleotide primer for the detection of SNP TSC0003476
tgtgtttttttt

SEQ ID NO: 274206 - DNA, 12 bp, Artificial Sequence
  Oligonucleotide primer for the detection of SNP TSC0003477
tacatattttct

SEQ ID NO: 274207 - DNA, 12 bp, Artificial Sequence
  Oligonucleotide primer for the detection of SNP TSC0003477
aatttttatata

SEQ ID NO: 274208 - DNA, 12 bp, Artificial Sequence
  Oligonucleotide primer for the detection of SNP TSC0003478
caccttttccct

SEQ ID NO: 274209 - DNA, 12 bp, Artificial Sequence
  Oligonucleotide primer for the detection of SNP TSC0003478
aaatagagtgta

SEQ ID NO: 274210 - DNA, 12 bp, Artificial Sequence
  Oligonucleotide primer for the detection of SNP TSC0003479
ttataaataacc

SEQ ID NO: 274211 - DNA, 12 bp, Artificial Sequence
  Oligonucleotide primer for the detection of SNP TSC0003479
attgtttgaaat

SEQ ID NO: 274212 - DNA, 12 bp, Artificial Sequence
  Oligonucleotide primer for the detection of SNP TSC0003479
attgtttgaaac

SEQ ID NO: 274213 - DNA, 12 bp, Artificial Sequence
  Oligonucleotide primer for the detection of SNP TSC0003479
aactacctaaaa

SEQ ID NO: 274214 - DNA, 12 bp, Artificial Sequence
  Oligonucleotide primer for the detection of SNP TSC0003479
tataaatgattt

SEQ ID NO: 274215 - DNA, 12 bp, Artificial Sequence
  Oligonucleotide primer for the detection of SNP TSC0003480
caccttccacca

SEQ ID NO: 274216 - DNA, 12 bp, Artificial Sequence
  Oligonucleotide primer for the detection of SNP TSC0003480
aaatttataagt

SEQ ID NO: 274217 - DNA, 12 bp, Artificial Sequence
  Oligonucleotide primer for the detection of SNP TSC0003481
acaaccttccat

SEQ ID NO: 274218 - DNA, 12 bp, Artificial Sequence
  Oligonucleotide primer for the detection of SNP TSC0003481
tttttatttatg

SEQ ID NO: 274219 - DNA, 12 bp, Artificial Sequence
  Oligonucleotide primer for the detection of SNP TSC0003483
ttattgtttttt

SEQ ID NO: 274220 - DNA, 12 bp, Artificial Sequence
  Oligonucleotide primer for the detection of SNP TSC0003483
ttattacttttt

SEQ ID NO: 274221 - DNA, 12 bp, Artificial Sequence
  Oligonucleotide primer for the detection of SNP TSC0003484
aacacaataaaa

SEQ ID NO: 274222 - DNA, 12 bp, Artificial Sequence
  Oligonucleotide primer for the detection of SNP TSC0003484
tgtatgtttagt

SEQ ID NO: 274223 - DNA, 12 bp, Artificial Sequence
  Oligonucleotide primer for the detection of SNP TSC0003484
tatatatttaat

SEQ ID NO: 274224 - DNA, 12 bp, Artificial Sequence
  Oligonucleotide primer for the detection of SNP TSC0003484
aatatagtgaaa

SEQ ID NO: 274225 - DNA, 12 bp, Artificial Sequence
  Oligonucleotide primer for the detection of SNP TSC0003485
aaaaatctataa

SEQ ID NO: 274226 - DNA, 12 bp, Artificial Sequence
  Oligonucleotide primer for the detection of SNP TSC0003485
atgtttagtttt

SEQ ID NO: 274227 - DNA, 12 bp, Artificial Sequence
  Oligonucleotide primer for the detection of SNP TSC0003485
atgtttagtttc

SEQ ID NO: 274228 - DNA, 12 bp, Artificial Sequence
  Oligonucleotide primer for the detection of SNP TSC0003485
aaatatccaatt

SEQ ID NO: 274229 - DNA, 12 bp, Artificial Sequence
  Oligonucleotide primer for the detection of SNP TSC0003485
taaggaatttat

SEQ ID NO: 274230 - DNA, 12 bp, Artificial Sequence
  Oligonucleotide primer for the detection of SNP TSC0003486
taattaaaattt

SEQ ID NO: 274231 - DNA, 12 bp, Artificial Sequence
  Oligonucleotide primer for the detection of SNP TSC0003486
tatattgatttt

SEQ ID NO: 274232 - DNA, 12 bp, Artificial Sequence
  Oligonucleotide primer for the detection of SNP TSC0003486
cacactaactct

SEQ ID NO: 274233 - DNA, 12 bp, Artificial Sequence
  Oligonucleotide primer for the detection of SNP TSC0003486
taattgaggttt

SEQ ID NO: 274234 - DNA, 12 bp, Artificial Sequence
  Oligonucleotide primer for the detection of SNP TSC0003487
actccaacctaa

SEQ ID NO: 274235 - DNA, 12 bp, Artificial Sequence
  Oligonucleotide primer for the detection of SNP TSC0003487
tttgttttgttt

SEQ ID NO: 274236 - DNA, 12 bp, Artificial Sequence
  Oligonucleotide primer for the detection of SNP TSC0003487
tcttactctacc

SEQ ID NO: 274237 - DNA, 12 bp, Artificial Sequence
  Oligonucleotide primer for the detection of SNP TSC0003487
attttagtttgg

SEQ ID NO: 274238 - DNA, 12 bp, Artificial Sequence
  Oligonucleotide primer for the detection of SNP TSC0003488
accatataacct

SEQ ID NO: 274239 - DNA, 12 bp, Artificial Sequence
  Oligonucleotide primer for the detection of SNP TSC0003488
accgtataacct

SEQ ID NO: 274240 - DNA, 12 bp, Artificial Sequence
  Oligonucleotide primer for the detection of SNP TSC0003488
aaaaaaaaagtg

SEQ ID NO: 274241 - DNA, 12 bp, Artificial Sequence
  Oligonucleotide primer for the detection of SNP TSC0003489
caaataattctc

SEQ ID NO: 274242 - DNA, 12 bp, Artificial Sequence
  Oligonucleotide primer for the detection of SNP TSC0003489
ggaggttgaggg

SEQ ID NO: 274243 - DNA, 12 bp, Artificial Sequence
  Oligonucleotide primer for the detection of SNP TSC0003490
aaattaaccaaa

SEQ ID NO: 274244 - DNA, 12 bp, Artificial Sequence
  Oligonucleotide primer for the detection of SNP TSC0003490
aaattaaccgaa

SEQ ID NO: 274245 - DNA, 12 bp, Artificial Sequence
  Oligonucleotide primer for the detection of SNP TSC0003490
gtatatgttgtt

SEQ ID NO: 274246 - DNA, 12 bp, Artificial Sequence
  Oligonucleotide primer for the detection of SNP TSC0003490
gtatacgttgtt

SEQ ID NO: 274247 - DNA, 12 bp, Artificial Sequence
  Oligonucleotide primer for the detection of SNP TSC0003490
acacacactacc

SEQ ID NO: 274248 - DNA, 12 bp, Artificial Sequence
  Oligonucleotide primer for the detection of SNP TSC0003490
acacacgctacc

SEQ ID NO: 274249 - DNA, 12 bp, Artificial Sequence
  Oligonucleotide primer for the detection of SNP TSC0003490
aaattagttggg

SEQ ID NO: 274250 - DNA, 12 bp, Artificial Sequence
  Oligonucleotide primer for the detection of SNP TSC0003490
aaattagtcggg

SEQ ID NO: 274251 - DNA, 12 bp, Artificial Sequence
  Oligonucleotide primer for the detection of SNP TSC0003491
aacaatataaaa

SEQ ID NO: 274252 - DNA, 12 bp, Artificial Sequence
  Oligonucleotide primer for the detection of SNP TSC0003491
ttggagaagaat

SEQ ID NO: 274253 - DNA, 12 bp, Artificial Sequence
  Oligonucleotide primer for the detection of SNP TSC0003491
tcggagaagaat

SEQ ID NO: 274254 - DNA, 12 bp, Artificial Sequence
  Oligonucleotide primer for the detection of SNP TSC0003491
tcgaaaaaaaat

SEQ ID NO: 274255 - DNA, 12 bp, Artificial Sequence
  Oligonucleotide primer for the detection of SNP TSC0003491
ggtagtgtgaag

SEQ ID NO: 274256 - DNA, 12 bp, Artificial Sequence
  Oligonucleotide primer for the detection of SNP TSC0003492
ctctcaacttcc

SEQ ID NO: 274257 - DNA, 12 bp, Artificial Sequence
  Oligonucleotide primer for the detection of SNP TSC0003492
gttggattttta

SEQ ID NO: 274258 - DNA, 12 bp, Artificial Sequence
  Oligonucleotide primer for the detection of SNP TSC0003493
ataaatacctaa

SEQ ID NO: 274259 - DNA, 12 bp, Artificial Sequence
  Oligonucleotide primer for the detection of SNP TSC0003493
tatttttattat

SEQ ID NO: 274260 - DNA, 12 bp, Artificial Sequence
  Oligonucleotide primer for the detection of SNP TSC0003493
tatttttattac

SEQ ID NO: 274261 - DNA, 12 bp, Artificial Sequence
  Oligonucleotide primer for the detection of SNP TSC0003493
tatctctaccac

SEQ ID NO: 274262 - DNA, 12 bp, Artificial Sequence
  Oligonucleotide primer for the detection of SNP TSC0003493
atggatgtttag

SEQ ID NO: 274263 - DNA, 12 bp, Artificial Sequence
  Oligonucleotide primer for the detection of SNP TSC0003494
aacaacttatac

SEQ ID NO: 274264 - DNA, 12 bp, Artificial Sequence
  Oligonucleotide primer for the detection of SNP TSC0003494
agatatataaag

SEQ ID NO: 274265 - DNA, 12 bp, Artificial Sequence
  Oligonucleotide primer for the detection of SNP TSC0003495
ctcaaattaaat

SEQ ID NO: 274266 - DNA, 12 bp, Artificial Sequence
  Oligonucleotide primer for the detection of SNP TSC0003495
atgtatgtaaaa

SEQ ID NO: 274267 - DNA, 12 bp, Artificial Sequence
  Oligonucleotide primer for the detection of SNP TSC0003496
attattaaatac

SEQ ID NO: 274268 - DNA, 12 bp, Artificial Sequence
  Oligonucleotide primer for the detection of SNP TSC0003496
ttatattttaat

SEQ ID NO: 274269 - DNA, 12 bp, Artificial Sequence
  Oligonucleotide primer for the detection of SNP TSC0003496
tcatattttaat

SEQ ID NO: 274270 - DNA, 12 bp, Artificial Sequence
  Oligonucleotide primer for the detection of SNP TSC0003496
gttattgggtat

SEQ ID NO: 274271 - DNA, 12 bp, Artificial Sequence
  Oligonucleotide primer for the detection of SNP TSC0003497
ccaaataaccat

SEQ ID NO: 274272 - DNA, 12 bp, Artificial Sequence
  Oligonucleotide primer for the detection of SNP TSC0003497
ccaaataaccgt

SEQ ID NO: 274273 - DNA, 12 bp, Artificial Sequence
  Oligonucleotide primer for the detection of SNP TSC0003497
ggttggggtgta

SEQ ID NO: 274274 - DNA, 12 bp, Artificial Sequence
  Oligonucleotide primer for the detection of SNP TSC0003498
cctatacacact

SEQ ID NO: 274275 - DNA, 12 bp, Artificial Sequence
  Oligonucleotide primer for the detection of SNP TSC0003498
ggttattagtag

SEQ ID NO: 274276 - DNA, 12 bp, Artificial Sequence
  Oligonucleotide primer for the detection of SNP TSC0003498
aattactaacaa

SEQ ID NO: 274277 - DNA, 12 bp, Artificial Sequence
  Oligonukleotid-Primer
tttgtatatatt

SEQ ID NO: 274278 - DNA, 12 bp, Artificial Sequence
  Oligonucleotide primer for the detection of SNP TSC0003500
ctacaaatacat

SEQ ID NO: 274279 - DNA, 12 bp, Artificial Sequence
  Oligonucleotide primer for the detection of SNP TSC0003500
gatagttattta

SEQ ID NO: 274280 - DNA, 12 bp, Artificial Sequence
  Oligonucleotide primer for the detection of SNP TSC0003501
ttacctaattaa

SEQ ID NO: 274281 - DNA, 12 bp, Artificial Sequence
  Oligonukleotid-Primer
aatggaaaattt

SEQ ID NO: 274282 - DNA, 12 bp, Artificial Sequence
  Oligonucleotide primer for the detection of SNP TSC0003501
aataaaaaattt

SEQ ID NO: 274283 - DNA, 12 bp, Artificial Sequence
  Oligonucleotide primer for the detection of SNP TSC0003501
ttgtttaattga

SEQ ID NO: 274284 - DNA, 12 bp, Artificial Sequence
  Oligonucleotide primer for the detection of SNP TSC0003502
aaacaaaatctc

SEQ ID NO: 274285 - DNA, 12 bp, Artificial Sequence
  Oligonucleotide primer for the detection of SNP TSC0003502
ttgggtaataga

SEQ ID NO: 274286 - DNA, 12 bp, Artificial Sequence
  Oligonucleotide primer for the detection of SNP TSC0003503
acaaaataaaaa

SEQ ID NO: 274287 - DNA, 12 bp, Artificial Sequence
  Oligonucleotide primer for the detection of SNP TSC0003503
ttggtgtttgaa

SEQ ID NO: 274288 - DNA, 12 bp, Artificial Sequence
  Oligonucleotide primer for the detection of SNP TSC0003503
ctaatacctaaa

SEQ ID NO: 274289 - DNA, 12 bp, Artificial Sequence
  Oligonucleotide primer for the detection of SNP TSC0003503
atataagatgag

SEQ ID NO: 274290 - DNA, 12 bp, Artificial Sequence
  Oligonucleotide primer for the detection of SNP TSC0003504
aacaacaataca

SEQ ID NO: 274291 - DNA, 12 bp, Artificial Sequence
  Oligonucleotide primer for the detection of SNP TSC0003504
gaaatttttatt

SEQ ID NO: 274292 - DNA, 12 bp, Artificial Sequence
  Oligonucleotide primer for the detection of SNP TSC0003504
gaaatttttatc

SEQ ID NO: 274293 - DNA, 12 bp, Artificial Sequence
  Oligonucleotide primer for the detection of SNP TSC0003504
taaaattctcat

SEQ ID NO: 274294 - DNA, 12 bp, Artificial Sequence
  Oligonucleotide primer for the detection of SNP TSC0003504
aataataatata

SEQ ID NO: 274295 - DNA, 12 bp, Artificial Sequence
  Oligonucleotide primer for the detection of SNP TSC0003506
aaaacaatacct

SEQ ID NO: 274296 - DNA, 12 bp, Artificial Sequence
  Oligonucleotide primer for the detection of SNP TSC0003506
aaaacgatacct

SEQ ID NO: 274297 - DNA, 12 bp, Artificial Sequence
  Oligonucleotide primer for the detection of SNP TSC0003506
gttaaagtaggg

SEQ ID NO: 274298 - DNA, 12 bp, Artificial Sequence
  Oligonucleotide primer for the detection of SNP TSC0003506
gaggtgatgttt

SEQ ID NO: 274299 - DNA, 12 bp, Artificial Sequence
  Oligonucleotide primer for the detection of SNP TSC0003506
gaggcgatgttt

SEQ ID NO: 274300 - DNA, 12 bp, Artificial Sequence
  Oligonucleotide primer for the detection of SNP TSC0003507
ttaaataataaa

SEQ ID NO: 274301 - DNA, 12 bp, Artificial Sequence
  Oligonucleotide primer for the detection of SNP TSC0003507
tataattaaata

SEQ ID NO: 274302 - DNA, 12 bp, Artificial Sequence
  Oligonucleotide primer for the detection of SNP TSC0003507
cacaattaaaca

SEQ ID NO: 274303 - DNA, 12 bp, Artificial Sequence
  Oligonucleotide primer for the detection of SNP TSC0003507
ttggataatgag

SEQ ID NO: 274304 - DNA, 12 bp, Artificial Sequence
  Oligonucleotide primer for the detection of SNP TSC0003508
tatatttttaat

SEQ ID NO: 274305 - DNA, 12 bp, Artificial Sequence
  Oligonucleotide primer for the detection of SNP TSC0003508
aagatggtgaaa

SEQ ID NO: 274306 - DNA, 12 bp, Artificial Sequence
  Oligonucleotide primer for the detection of SNP TSC0003508
tgtatttttagt

SEQ ID NO: 274307 - DNA, 12 bp, Artificial Sequence
  Oligonucleotide primer for the detection of SNP TSC0003509
aaattacaaaca

SEQ ID NO: 274308 - DNA, 12 bp, Artificial Sequence
  Oligonucleotide primer for the detection of SNP TSC0003509
gtgtggtggtag

SEQ ID NO: 274309 - DNA, 12 bp, Artificial Sequence
  Oligonucleotide primer for the detection of SNP TSC0003509
gcgtggtggtag

SEQ ID NO: 274310 - DNA, 12 bp, Artificial Sequence
  Oligonucleotide primer for the detection of SNP TSC0003509
acataataacaa

SEQ ID NO: 274311 - DNA, 12 bp, Artificial Sequence
  Oligonucleotide primer for the detection of SNP TSC0003509
acgtaataacaa

SEQ ID NO: 274312 - DNA, 12 bp, Artificial Sequence
  Oligonucleotide primer for the detection of SNP TSC0003509
ggattataggta

SEQ ID NO: 274313 - DNA, 12 bp, Artificial Sequence
  Oligonucleotide primer for the detection of SNP TSC0003510
atcccaactact

SEQ ID NO: 274314 - DNA, 12 bp, Artificial Sequence
  Oligonucleotide primer for the detection of SNP TSC0003510
ttttgttttagt

SEQ ID NO: 274315 - DNA, 12 bp, Artificial Sequence
  Oligonucleotide primer for the detection of SNP TSC0003511
ttaattcacaaa

SEQ ID NO: 274316 - DNA, 12 bp, Artificial Sequence
  Oligonucleotide primer for the detection of SNP TSC0003511
ttaattcgcaaa

SEQ ID NO: 274317 - DNA, 12 bp, Artificial Sequence
  Oligonucleotide primer for the detection of SNP TSC0003511
aatatttggaat

SEQ ID NO: 274318 - DNA, 12 bp, Artificial Sequence
  Oligonucleotide primer for the detection of SNP TSC0003511
aatacctaaaat

SEQ ID NO: 274319 - DNA, 12 bp, Artificial Sequence
  Oligonucleotide primer for the detection of SNP TSC0003511
gttggtttgtaa

SEQ ID NO: 274320 - DNA, 12 bp, Artificial Sequence
  Oligonucleotide primer for the detection of SNP TSC0003511
gttggttcgtaa

SEQ ID NO: 274321 - DNA, 12 bp, Artificial Sequence
  Oligonucleotide primer for the detection of SNP TSC0003512
tgtttttggtaa

SEQ ID NO: 274322 - DNA, 12 bp, Artificial Sequence
  Oligonucleotide primer for the detection of SNP TSC0003512
tgttttcggtaa

SEQ ID NO: 274323 - DNA, 12 bp, Artificial Sequence
  Oligonucleotide primer for the detection of SNP TSC0003513
attcctccaaac

SEQ ID NO: 274324 - DNA, 12 bp, Artificial Sequence
  Oligonucleotide primer for the detection of SNP TSC0003513
attcctccgaac

SEQ ID NO: 274325 - DNA, 12 bp, Artificial Sequence
  Oligonucleotide primer for the detection of SNP TSC0003513
attttttatggg

SEQ ID NO: 274326 - DNA, 12 bp, Artificial Sequence
  Oligonucleotide primer for the detection of SNP TSC0003513
attttttacggg

SEQ ID NO: 274327 - DNA, 12 bp, Artificial Sequence
  Oligonucleotide primer for the detection of SNP TSC0003513
acttttcacaaa

SEQ ID NO: 274328 - DNA, 12 bp, Artificial Sequence
  Oligonucleotide primer for the detection of SNP TSC0003513
acttttcacgaa

SEQ ID NO: 274329 - DNA, 12 bp, Artificial Sequence
  Oligonucleotide primer for the detection of SNP TSC0003513
gtttttttgaat

SEQ ID NO: 274330 - DNA, 12 bp, Artificial Sequence
  Oligonucleotide primer for the detection of SNP TSC0003513
gttttttcgaat

SEQ ID NO: 274331 - DNA, 12 bp, Artificial Sequence
  Oligonucleotide primer for the detection of SNP TSC0003513
gtttttttgaac

SEQ ID NO: 274332 - DNA, 12 bp, Artificial Sequence
  Oligonucleotide primer for the detection of SNP TSC0003513
gttttttcgaac

SEQ ID NO: 274333 - DNA, 12 bp, Artificial Sequence
  Oligonucleotide primer for the detection of SNP TSC0003514
ttttagtttttt

SEQ ID NO: 274334 - DNA, 12 bp, Artificial Sequence
  Oligonucleotide primer for the detection of SNP TSC0003514
cctcaacctccc

SEQ ID NO: 274335 - DNA, 12 bp, Artificial Sequence
  Oligonucleotide primer for the detection of SNP TSC0003514
ttgtaattttaa

SEQ ID NO: 274336 - DNA, 12 bp, Artificial Sequence
  Oligonucleotide primer for the detection of SNP TSC0003515
taatgaatagta

SEQ ID NO: 274337 - DNA, 12 bp, Artificial Sequence
  Oligonucleotide primer for the detection of SNP TSC0003515
taataaataata

SEQ ID NO: 274338 - DNA, 12 bp, Artificial Sequence
  Oligonucleotide primer for the detection of SNP TSC0003515
tttaaggagtag

SEQ ID NO: 274339 - DNA, 12 bp, Artificial Sequence
  Oligonucleotide primer for the detection of SNP TSC0003516
aatattaatctc

SEQ ID NO: 274340 - DNA, 12 bp, Artificial Sequence
  Oligonucleotide primer for the detection of SNP TSC0003516
atagaggagtta

SEQ ID NO: 274341 - DNA, 12 bp, Artificial Sequence
  Oligonucleotide primer for the detection of SNP TSC0003517
tttcatatctac

SEQ ID NO: 274342 - DNA, 12 bp, Artificial Sequence
  Oligonucleotide primer for the detection of SNP TSC0003517
aataaagatgat

SEQ ID NO: 274343 - DNA, 12 bp, Artificial Sequence
  Oligonucleotide primer for the detection of SNP TSC0003517
aataaagatgac

SEQ ID NO: 274344 - DNA, 12 bp, Artificial Sequence
  Oligonucleotide primer for the detection of SNP TSC0003517
aacaaaaataac

SEQ ID NO: 274345 - DNA, 12 bp, Artificial Sequence
  Oligonucleotide primer for the detection of SNP TSC0003517
tttatgtttatt

SEQ ID NO: 274346 - DNA, 12 bp, Artificial Sequence
  Oligonukleotid-Primer
acaaaaataccc

SEQ ID NO: 274347 - DNA, 12 bp, Artificial Sequence
  Oligonucleotide primer for the detection of SNP TSC0003518
agagtagtgaaa

SEQ ID NO: 274348 - DNA, 12 bp, Artificial Sequence
  Oligonucleotide primer for the detection of SNP TSC0003519
ttttttatatcc

SEQ ID NO: 274349 - DNA, 12 bp, Artificial Sequence
  Oligonucleotide primer for the detection of SNP TSC0003519
aagaaaaagaat

SEQ ID NO: 274350 - DNA, 12 bp, Artificial Sequence
  Oligonucleotide primer for the detection of SNP TSC0003519
ttttttgtattt

SEQ ID NO: 274351 - DNA, 12 bp, Artificial Sequence
  Oligonucleotide primer for the detection of SNP TSC0003520
caacatttaaaa

SEQ ID NO: 274352 - DNA, 12 bp, Artificial Sequence
  Oligonucleotide primer for the detection of SNP TSC0003520
caacgtttaaaa

SEQ ID NO: 274353 - DNA, 12 bp, Artificial Sequence
  Oligonucleotide primer for the detection of SNP TSC0003520
taaataggaaat

SEQ ID NO: 274354 - DNA, 12 bp, Artificial Sequence
  Oligonucleotide primer for the detection of SNP TSC0003520
ttaaataaaaaa

SEQ ID NO: 274355 - DNA, 12 bp, Artificial Sequence
  Oligonucleotide primer for the detection of SNP TSC0003520
gtaatgtttagg

SEQ ID NO: 274356 - DNA, 12 bp, Artificial Sequence
  Oligonucleotide primer for the detection of SNP TSC0003520
gtaacgtttagg

SEQ ID NO: 274357 - DNA, 12 bp, Artificial Sequence
  Oligonucleotide primer for the detection of SNP TSC0003521
aaaactttaaac

SEQ ID NO: 274358 - DNA, 12 bp, Artificial Sequence
  Oligonucleotide primer for the detection of SNP TSC0003521
gtagatattata

SEQ ID NO: 274359 - DNA, 12 bp, Artificial Sequence
  Oligonucleotide primer for the detection of SNP TSC0003522
aaaaactctctc

SEQ ID NO: 274360 - DNA, 12 bp, Artificial Sequence
  Oligonucleotide primer for the detection of SNP TSC0003522
atattaggtaga

SEQ ID NO: 274361 - DNA, 12 bp, Artificial Sequence
  Oligonucleotide primer for the detection of SNP TSC0003523
aataaaccactt

SEQ ID NO: 274362 - DNA, 12 bp, Artificial Sequence
  Oligonucleotide primer for the detection of SNP TSC0003523
gagggaatgagg

SEQ ID NO: 274363 - DNA, 12 bp, Artificial Sequence
  Oligonucleotide primer for the detection of SNP TSC0003524
aataaaattctt

SEQ ID NO: 274364 - DNA, 12 bp, Artificial Sequence
  Oligonucleotide primer for the detection of SNP TSC0003524
tttatagtttat

SEQ ID NO: 274365 - DNA, 12 bp, Artificial Sequence
  Oligonucleotide primer for the detection of SNP TSC0003524
ccacaatttata

SEQ ID NO: 274366 - DNA, 12 bp, Artificial Sequence
  Oligonucleotide primer for the detection of SNP TSC0003524
ggtgaagttttt

SEQ ID NO: 274367 - DNA, 12 bp, Artificial Sequence
  Oligonucleotide primer for the detection of SNP TSC0003525
ctcactcattta

SEQ ID NO: 274368 - DNA, 12 bp, Artificial Sequence
  Oligonucleotide primer for the detection of SNP TSC0003525
ctcgctcattta

SEQ ID NO: 274369 - DNA, 12 bp, Artificial Sequence
  Oligonucleotide primer for the detection of SNP TSC0003525
agtagtggaata

SEQ ID NO: 274370 - DNA, 12 bp, Artificial Sequence
  Oligonucleotide primer for the detection of SNP TSC0003525
tttgtttatttg

SEQ ID NO: 274371 - DNA, 12 bp, Artificial Sequence
  Oligonucleotide primer for the detection of SNP TSC0003525
ttcgtttatttg

SEQ ID NO: 274372 - DNA, 12 bp, Artificial Sequence
  Oligonucleotide primer for the detection of SNP TSC0003526
atacaaaaatcc

SEQ ID NO: 274373 - DNA, 12 bp, Artificial Sequence
  Oligonucleotide primer for the detection of SNP TSC0003526
tttttataagtg

SEQ ID NO: 274374 - DNA, 12 bp, Artificial Sequence
  Oligonucleotide primer for the detection of SNP TSC0003527
accaacattttt

SEQ ID NO: 274375 - DNA, 12 bp, Artificial Sequence
  Oligonucleotide primer for the detection of SNP TSC0003527
tatatagagttt

SEQ ID NO: 274376 - DNA, 12 bp, Artificial Sequence
  Oligonucleotide primer for the detection of SNP TSC0003527
catacaaaattt

SEQ ID NO: 274377 - DNA, 12 bp, Artificial Sequence
  Oligonucleotide primer for the detection of SNP TSC0003527
attaatattttt

SEQ ID NO: 274378 - DNA, 12 bp, Artificial Sequence
  Oligonucleotide primer for the detection of SNP TSC0003528
ttactatatacc

SEQ ID NO: 274379 - DNA, 12 bp, Artificial Sequence
  Oligonucleotide primer for the detection of SNP TSC0003528
ggagtatagtag

SEQ ID NO: 274380 - DNA, 12 bp, Artificial Sequence
  Oligonucleotide primer for the detection of SNP TSC0003529
taaccatttaaa

SEQ ID NO: 274381 - DNA, 12 bp, Artificial Sequence
  Oligonucleotide primer for the detection of SNP TSC0003529
tatgtttttaat

SEQ ID NO: 274382 - DNA, 12 bp, Artificial Sequence
  Oligonucleotide primer for the detection of SNP TSC0003529
tatattctcaac

SEQ ID NO: 274383 - DNA, 12 bp, Artificial Sequence
  Oligonucleotide primer for the detection of SNP TSC0003529
tggttatttagg

SEQ ID NO: 274384 - DNA, 12 bp, Artificial Sequence
  Oligonucleotide primer for the detection of SNP TSC0003530
tctcctaactcc

SEQ ID NO: 274385 - DNA, 12 bp, Artificial Sequence
  Oligonucleotide primer for the detection of SNP TSC0003530
aatgggagtgta

SEQ ID NO: 274386 - DNA, 12 bp, Artificial Sequence
  Oligonucleotide primer for the detection of SNP TSC0003531
aaaaacctatca

SEQ ID NO: 274387 - DNA, 12 bp, Artificial Sequence
  Oligonucleotide primer for the detection of SNP TSC0003531
gtattgaagtat

SEQ ID NO: 274388 - DNA, 12 bp, Artificial Sequence
  Oligonucleotide primer for the detection of SNP TSC0003531
atactaaaatac

SEQ ID NO: 274389 - DNA, 12 bp, Artificial Sequence
  Oligonucleotide primer for the detection of SNP TSC0003531
gagaatttatta

SEQ ID NO: 274390 - DNA, 12 bp, Artificial Sequence
  Oligonucleotide primer for the detection of SNP TSC0003532
aaatatttaaaa

SEQ ID NO: 274391 - DNA, 12 bp, Artificial Sequence
  Oligonucleotide primer for the detection of SNP TSC0003532
atatgtgatagg

SEQ ID NO: 274392 - DNA, 12 bp, Artificial Sequence
  Oligonucleotide primer for the detection of SNP TSC0003532
atacgtgatagg

SEQ ID NO: 274393 - DNA, 12 bp, Artificial Sequence
  Oligonucleotide primer for the detection of SNP TSC0003532
acacataataaa

SEQ ID NO: 274394 - DNA, 12 bp, Artificial Sequence
  Oligonucleotide primer for the detection of SNP TSC0003532
acacgtaataaa

SEQ ID NO: 274395 - DNA, 12 bp, Artificial Sequence
  Oligonucleotide primer for the detection of SNP TSC0003533
ttaaaaaacaaa

SEQ ID NO: 274396 - DNA, 12 bp, Artificial Sequence
  Oligonucleotide primer for the detection of SNP TSC0003533
tattgttgattt

SEQ ID NO: 274397 - DNA, 12 bp, Artificial Sequence
  Oligonucleotide primer for the detection of SNP TSC0003533
cattactaattc

SEQ ID NO: 274398 - DNA, 12 bp, Artificial Sequence
  Oligonucleotide primer for the detection of SNP TSC0003533
tttgggaaatag

SEQ ID NO: 274399 - DNA, 12 bp, Artificial Sequence
  Oligonucleotide primer for the detection of SNP TSC0003534
aacattttataa

SEQ ID NO: 274400 - DNA, 12 bp, Artificial Sequence
  Oligonucleotide primer for the detection of SNP TSC0003534
ttaaaggatagt

SEQ ID NO: 274401 - DNA, 12 bp, Artificial Sequence
  Oligonucleotide primer for the detection of SNP TSC0003534
caaaaaacaata

SEQ ID NO: 274402 - DNA, 12 bp, Artificial Sequence
  Oligonucleotide primer for the detection of SNP TSC0003534
tattttatggtt

SEQ ID NO: 274403 - DNA, 12 bp, Artificial Sequence
  Oligonucleotide primer for the detection of SNP TSC0003535
aacaataaatat

SEQ ID NO: 274404 - DNA, 12 bp, Artificial Sequence
  Oligonucleotide primer for the detection of SNP TSC0003535
attttgaagtta

SEQ ID NO: 274405 - DNA, 12 bp, Artificial Sequence
  Oligonucleotide primer for the detection of SNP TSC0003536
aaaaaattaacc

SEQ ID NO: 274406 - DNA, 12 bp, Artificial Sequence
  Oligonucleotide primer for the detection of SNP TSC0003536
gattatatatag

SEQ ID NO: 274407 - DNA, 12 bp, Artificial Sequence
  Oligonucleotide primer for the detection of SNP TSC0003537
aacaataaatca

SEQ ID NO: 274408 - DNA, 12 bp, Artificial Sequence
  Oligonucleotide primer for the detection of SNP TSC0003537
ttttttttgggg

SEQ ID NO: 274409 - DNA, 12 bp, Artificial Sequence
  Oligonucleotide primer for the detection of SNP TSC0003538
aaaaaaaatacc

SEQ ID NO: 274410 - DNA, 12 bp, Artificial Sequence
  Oligonucleotide primer for the detection of SNP TSC0003538
tttttttatggg

SEQ ID NO: 274411 - DNA, 12 bp, Artificial Sequence
  Oligonucleotide primer for the detection of SNP TSC0003538
tttttttataaa

SEQ ID NO: 274412 - DNA, 12 bp, Artificial Sequence
  Oligonucleotide primer for the detection of SNP TSC0003538
aaaaaggtattt

SEQ ID NO: 274413 - DNA, 12 bp, Artificial Sequence
  Oligonucleotide primer for the detection of SNP TSC0003539
ctccttatcctc

SEQ ID NO: 274414 - DNA, 12 bp, Artificial Sequence
  Oligonucleotide primer for the detection of SNP TSC0003539
gtgaaggtggga

SEQ ID NO: 274415 - DNA, 12 bp, Artificial Sequence
  Oligonucleotide primer for the detection of SNP TSC0003540
aattaaatattt

SEQ ID NO: 274416 - DNA, 12 bp, Artificial Sequence
  Oligonucleotide primer for the detection of SNP TSC0003540
gattaagaaaga

SEQ ID NO: 274417 - DNA, 12 bp, Artificial Sequence
  Oligonucleotide primer for the detection of SNP TSC0003540
aaccaaaaaaaa

SEQ ID NO: 274418 - DNA, 12 bp, Artificial Sequence
  Oligonucleotide primer for the detection of SNP TSC0003540
gttgaatatttt

SEQ ID NO: 274419 - DNA, 12 bp, Artificial Sequence
  Oligonucleotide primer for the detection of SNP TSC0003541
aaaaaattaaca

SEQ ID NO: 274420 - DNA, 12 bp, Artificial Sequence
  Oligonucleotide primer for the detection of SNP TSC0003541
tataagtagata

SEQ ID NO: 274421 - DNA, 12 bp, Artificial Sequence
  Oligonucleotide primer for the detection of SNP TSC0003541
cataaataaaca

SEQ ID NO: 274422 - DNA, 12 bp, Artificial Sequence
  Oligonucleotide primer for the detection of SNP TSC0003541
gagagttgatat

SEQ ID NO: 274423 - DNA, 12 bp, Artificial Sequence
  Oligonucleotide primer for the detection of SNP TSC0003541
gagagttgatac

SEQ ID NO: 274424 - DNA, 12 bp, Artificial Sequence
  Oligonucleotide primer for the detection of SNP TSC0003542
aataatttatta

SEQ ID NO: 274425 - DNA, 12 bp, Artificial Sequence
  Oligonucleotide primer for the detection of SNP TSC0003542
ttaccctttcct

SEQ ID NO: 274426 - DNA, 12 bp, Artificial Sequence
  Oligonucleotide primer for the detection of SNP TSC0003542
ggtgatttgtta

SEQ ID NO: 274427 - DNA, 12 bp, Artificial Sequence
  Oligonucleotide primer for the detection of SNP TSC0003543
cataaacacaat

SEQ ID NO: 274428 - DNA, 12 bp, Artificial Sequence
  Oligonucleotide primer for the detection of SNP TSC0003543
agttttatttta

SEQ ID NO: 274429 - DNA, 12 bp, Artificial Sequence
  Oligonucleotide primer for the detection of SNP TSC0003544
tttatatacaat

SEQ ID NO: 274430 - DNA, 12 bp, Artificial Sequence
  Oligonucleotide primer for the detection of SNP TSC0003544
ataatattttta

SEQ ID NO: 274431 - DNA, 12 bp, Artificial Sequence
  Oligonucleotide primer for the detection of SNP TSC0003545
tttctatactct

SEQ ID NO: 274432 - DNA, 12 bp, Artificial Sequence
  Oligonucleotide primer for the detection of SNP TSC0003545
aggtggatttta

SEQ ID NO: 274433 - DNA, 12 bp, Artificial Sequence
  Oligonucleotide primer for the detection of SNP TSC0003545
ataaattccaaa

SEQ ID NO: 274434 - DNA, 12 bp, Artificial Sequence
  Oligonucleotide primer for the detection of SNP TSC0003545
tttttgtatttt

SEQ ID NO: 274435 - DNA, 12 bp, Artificial Sequence
  Oligonukleotid-Primer
cattccatactt

SEQ ID NO: 274436 - DNA, 12 bp, Artificial Sequence
  Oligonucleotide primer for the detection of SNP TSC0003546
gattataaagta

SEQ ID NO: 274437 - DNA, 12 bp, Artificial Sequence
  Oligonucleotide primer for the detection of SNP TSC0003547
ccaaaacccata

SEQ ID NO: 274438 - DNA, 12 bp, Artificial Sequence
  Oligonucleotide primer for the detection of SNP TSC0003547
tattttataaat

SEQ ID NO: 274439 - DNA, 12 bp, Artificial Sequence
  Oligonucleotide primer for the detection of SNP TSC0003547
ctatttcacaaa

SEQ ID NO: 274440 - DNA, 12 bp, Artificial Sequence
  Oligonucleotide primer for the detection of SNP TSC0003547
ttaaaatttata

SEQ ID NO: 274441 - DNA, 12 bp, Artificial Sequence
  Oligonucleotide primer for the detection of SNP TSC0003548
aaaaaaaaccaa

SEQ ID NO: 274442 - DNA, 12 bp, Artificial Sequence
  Oligonucleotide primer for the detection of SNP TSC0003550
cgaaattaaact

SEQ ID NO: 274443 - DNA, 12 bp, Artificial Sequence
  Oligonukleotid-Primer
ggtatgaaataa

SEQ ID NO: 274444 - DNA, 12 bp, Artificial Sequence
  Oligonucleotide primer for the detection of SNP TSC0003551
atatattttagg

SEQ ID NO: 274445 - DNA, 12 bp, Artificial Sequence
  Oligonucleotide primer for the detection of SNP TSC0003552
taaaatacacaa

SEQ ID NO: 274446 - DNA, 12 bp, Artificial Sequence
  Oligonucleotide primer for the detection of SNP TSC0003552
taaaatacacga

SEQ ID NO: 274447 - DNA, 12 bp, Artificial Sequence
  Oligonukleotid-Primer
taaaatacgcaa

SEQ ID NO: 274448 - DNA, 12 bp, Artificial Sequence
  Oligonucleotide primer for the detection of SNP TSC0003552
taaaatacgcga

SEQ ID NO: 274449 - DNA, 12 bp, Artificial Sequence
  Oligonucleotide primer for the detection of SNP TSC0003552
gttttagtgagt

SEQ ID NO: 274450 - DNA, 12 bp, Artificial Sequence
  Oligonucleotide primer for the detection of SNP TSC0003552
attccaataaac

SEQ ID NO: 274451 - DNA, 12 bp, Artificial Sequence
  Oligonucleotide primer for the detection of SNP TSC0003552
tggagtgtgtga

SEQ ID NO: 274452 - DNA, 12 bp, Artificial Sequence
  Oligonucleotide primer for the detection of SNP TSC0003552
tggagtgcgtga

SEQ ID NO: 274453 - DNA, 12 bp, Artificial Sequence
  Oligonucleotide primer for the detection of SNP TSC0003552
tggagtgtgcga

SEQ ID NO: 274454 - DNA, 12 bp, Artificial Sequence
  Oligonucleotide primer for the detection of SNP TSC0003552
tggagtgcgcga

SEQ ID NO: 274455 - DNA, 12 bp, Artificial Sequence
  Oligonucleotide primer for the detection of SNP TSC0003553
aattcaaattct

SEQ ID NO: 274456 - DNA, 12 bp, Artificial Sequence
  Oligonucleotide primer for the detection of SNP TSC0003553
atataagaaaaa

SEQ ID NO: 274457 - DNA, 12 bp, Artificial Sequence
  Oligonucleotide primer for the detection of SNP TSC0003556
attaaaaaccac

SEQ ID NO: 274458 - DNA, 12 bp, Artificial Sequence
  Oligonucleotide primer for the detection of SNP TSC0003556
taaatattttag

SEQ ID NO: 274459 - DNA, 12 bp, Artificial Sequence
  Oligonucleotide primer for the detection of SNP TSC0003558
tatggtgaaatt

SEQ ID NO: 274460 - DNA, 12 bp, Artificial Sequence
  Oligonucleotide primer for the detection of SNP TSC0003558
cataataaaacc

SEQ ID NO: 274461 - DNA, 12 bp, Artificial Sequence
  Oligonucleotide primer for the detection of SNP TSC0003559
tatatgtatgtt

SEQ ID NO: 274462 - DNA, 12 bp, Artificial Sequence
  Oligonucleotide primer for the detection of SNP TSC0003559
tacatatatatt

SEQ ID NO: 274463 - DNA, 12 bp, Artificial Sequence
  Oligonucleotide primer for the detection of SNP TSC0003560
ctaaactaaatc

SEQ ID NO: 274464 - DNA, 12 bp, Artificial Sequence
  Oligonucleotide primer for the detection of SNP TSC0003560
taggtaattgag

SEQ ID NO: 274465 - DNA, 12 bp, Artificial Sequence
  Oligonucleotide primer for the detection of SNP TSC0003561
aaccatataaaa

SEQ ID NO: 274466 - DNA, 12 bp, Artificial Sequence
  Oligonucleotide primer for the detection of SNP TSC0003561
tattaaaagtat

SEQ ID NO: 274467 - DNA, 12 bp, Artificial Sequence
  Oligonucleotide primer for the detection of SNP TSC0003561
caccaaaaatat

SEQ ID NO: 274468 - DNA, 12 bp, Artificial Sequence
  Oligonucleotide primer for the detection of SNP TSC0003561
agttatatagga

SEQ ID NO: 274469 - DNA, 12 bp, Artificial Sequence
  Oligonucleotide primer for the detection of SNP TSC0003562
tcatctttcatt

SEQ ID NO: 274470 - DNA, 12 bp, Artificial Sequence
  Oligonucleotide primer for the detection of SNP TSC0003562
aatgttttataa

SEQ ID NO: 274471 - DNA, 12 bp, Artificial Sequence
  Oligonucleotide primer for the detection of SNP TSC0003563
atcccataaaat

SEQ ID NO: 274472 - DNA, 12 bp, Artificial Sequence
  Oligonucleotide primer for the detection of SNP TSC0003563
gtaggggtagtg

SEQ ID NO: 274473 - DNA, 12 bp, Artificial Sequence
  Oligonucleotide primer for the detection of SNP TSC0003564
ataacattttac

SEQ ID NO: 274474 - DNA, 12 bp, Artificial Sequence
  Oligonucleotide primer for the detection of SNP TSC0003564
aaatatttataa

SEQ ID NO: 274475 - DNA, 12 bp, Artificial Sequence
  Oligonucleotide primer for the detection of SNP TSC0003564
aaatacctataa

SEQ ID NO: 274476 - DNA, 12 bp, Artificial Sequence
  Oligonucleotide primer for the detection of SNP TSC0003564
atgatattttat

SEQ ID NO: 274477 - DNA, 12 bp, Artificial Sequence
  Oligonucleotide primer for the detection of SNP TSC0003565
acaatctaaaat

SEQ ID NO: 274478 - DNA, 12 bp, Artificial Sequence
  Oligonucleotide primer for the detection of SNP TSC0003565
ttagatttttaa

SEQ ID NO: 274479 - DNA, 12 bp, Artificial Sequence
  Oligonucleotide primer for the detection of SNP TSC0003566
ttattacttata

SEQ ID NO: 274480 - DNA, 12 bp, Artificial Sequence
  Oligonucleotide primer for the detection of SNP TSC0003566
gattgaaaatga

SEQ ID NO: 274481 - DNA, 12 bp, Artificial Sequence
  Oligonucleotide primer for the detection of SNP TSC0003566
aactaaaaataa

SEQ ID NO: 274482 - DNA, 12 bp, Artificial Sequence
  Oligonucleotide primer for the detection of SNP TSC0003566
ttattgtttgta

SEQ ID NO: 274483 - DNA, 12 bp, Artificial Sequence
  Oligonucleotide primer for the detection of SNP TSC0003567
acttttttcaaa

SEQ ID NO: 274484 - DNA, 12 bp, Artificial Sequence
  Oligonucleotide primer for the detection of SNP TSC0003567
tagtattaaaat

SEQ ID NO: 274485 - DNA, 12 bp, Artificial Sequence
  Oligonucleotide primer for the detection of SNP TSC0003567
caatactaaaac

SEQ ID NO: 274486 - DNA, 12 bp, Artificial Sequence
  Oligonucleotide primer for the detection of SNP TSC0003567
gttttttttaag

SEQ ID NO: 274487 - DNA, 12 bp, Artificial Sequence
  Oligonucleotide primer for the detection of SNP TSC0003568
aatatattaata

SEQ ID NO: 274488 - DNA, 12 bp, Artificial Sequence
  Oligonucleotide primer for the detection of SNP TSC0003568
gatagtttttta

SEQ ID NO: 274489 - DNA, 12 bp, Artificial Sequence
  Oligonucleotide primer for the detection of SNP TSC0003568
aacaactttcta

SEQ ID NO: 274490 - DNA, 12 bp, Artificial Sequence
  Oligonucleotide primer for the detection of SNP TSC0003568
aatatgttgata

SEQ ID NO: 274491 - DNA, 12 bp, Artificial Sequence
  Oligonucleotide primer for the detection of SNP TSC0003570
aaacttacccca

SEQ ID NO: 274492 - DNA, 12 bp, Artificial Sequence
  Oligonucleotide primer for the detection of SNP TSC0003570
tgtataaattat

SEQ ID NO: 274493 - DNA, 12 bp, Artificial Sequence
  Oligonucleotide primer for the detection of SNP TSC0003570
tatataaactat

SEQ ID NO: 274494 - DNA, 12 bp, Artificial Sequence
  Oligonucleotide primer for the detection of SNP TSC0003570
gggtttatttta

SEQ ID NO: 274495 - DNA, 12 bp, Artificial Sequence
  Oligonucleotide primer for the detection of SNP TSC0003571
aaaataataatt

SEQ ID NO: 274496 - DNA, 12 bp, Artificial Sequence
  Oligonucleotide primer for the detection of SNP TSC0003571
tattaaaattaa

SEQ ID NO: 274497 - DNA, 12 bp, Artificial Sequence
  Oligonucleotide primer for the detection of SNP TSC0003573
tctcctttccat

SEQ ID NO: 274498 - DNA, 12 bp, Artificial Sequence
  Oligonucleotide primer for the detection of SNP TSC0003573
agtgttagagta

SEQ ID NO: 274499 - DNA, 12 bp, Artificial Sequence
  Oligonucleotide primer for the detection of SNP TSC0003573
atcaaaacaaaa

SEQ ID NO: 274500 - DNA, 12 bp, Artificial Sequence
  Oligonucleotide primer for the detection of SNP TSC0003574
atcttattcttc

SEQ ID NO: 274501 - DNA, 12 bp, Artificial Sequence
  Oligonucleotide primer for the detection of SNP TSC0003574
gtcttattcttc

SEQ ID NO: 274502 - DNA, 12 bp, Artificial Sequence
  Oligonucleotide primer for the detection of SNP TSC0003574
ttattttttgcg

SEQ ID NO: 274503 - DNA, 12 bp, Artificial Sequence
  Oligonucleotide primer for the detection of SNP TSC0003574
tcaccctctaca

SEQ ID NO: 274504 - DNA, 12 bp, Artificial Sequence
  Oligonucleotide primer for the detection of SNP TSC0003574
tcaccctctacg

SEQ ID NO: 274505 - DNA, 12 bp, Artificial Sequence
  Oligonucleotide primer for the detection of SNP TSC0003574
gttttgtttttt

SEQ ID NO: 274506 - DNA, 12 bp, Artificial Sequence
  Oligonucleotide primer for the detection of SNP TSC0003574
gttttgtttttc

SEQ ID NO: 274507 - DNA, 12 bp, Artificial Sequence
  Oligonucleotide primer for the detection of SNP TSC0003575
tccctctacaaa

SEQ ID NO: 274508 - DNA, 12 bp, Artificial Sequence
  Oligonucleotide primer for the detection of SNP TSC0003575
aattttaggtgt

SEQ ID NO: 274509 - DNA, 12 bp, Artificial Sequence
  Oligonucleotide primer for the detection of SNP TSC0003575
atcccaaataca

SEQ ID NO: 274510 - DNA, 12 bp, Artificial Sequence
  Oligonucleotide primer for the detection of SNP TSC0003575
tttttttgtagg

SEQ ID NO: 274511 - DNA, 12 bp, Artificial Sequence
  Oligonucleotide primer for the detection of SNP TSC0003576
aacaataaaaat

SEQ ID NO: 274512 - DNA, 12 bp, Artificial Sequence
  Oligonucleotide primer for the detection of SNP TSC0003576
tgttttaattag

SEQ ID NO: 274513 - DNA, 12 bp, Artificial Sequence
  Oligonucleotide primer for the detection of SNP TSC0003577
acaaaatcaaac

SEQ ID NO: 274514 - DNA, 12 bp, Artificial Sequence
  Oligonucleotide primer for the detection of SNP TSC0003577
ttttggttgtgg

SEQ ID NO: 274515 - DNA, 12 bp, Artificial Sequence
  Oligonucleotide primer for the detection of SNP TSC0003578
aatccctaaaac

SEQ ID NO: 274516 - DNA, 12 bp, Artificial Sequence
  Oligonucleotide primer for the detection of SNP TSC0003578
tgtttaaatttg

SEQ ID NO: 274517 - DNA, 12 bp, Artificial Sequence
  Oligonucleotide primer for the detection of SNP TSC0003579
attgtaattttt

SEQ ID NO: 274518 - DNA, 12 bp, Artificial Sequence
  Oligonucleotide primer for the detection of SNP TSC0003579
actacaatctcc

SEQ ID NO: 274519 - DNA, 12 bp, Artificial Sequence
  Oligonucleotide primer for the detection of SNP TSC0003579
gaatttaggagg

SEQ ID NO: 274520 - DNA, 12 bp, Artificial Sequence
  Oligonucleotide primer for the detection of SNP TSC0003580
tttatacctaaa

SEQ ID NO: 274521 - DNA, 12 bp, Artificial Sequence
  Oligonucleotide primer for the detection of SNP TSC0003580
taaataaaaata

SEQ ID NO: 274522 - DNA, 12 bp, Artificial Sequence
  Oligonucleotide primer for the detection of SNP TSC0003580
tttgtgtttgaa

SEQ ID NO: 274523 - DNA, 12 bp, Artificial Sequence
  Oligonucleotide primer for the detection of SNP TSC0003581
caaaataaccct

SEQ ID NO: 274524 - DNA, 12 bp, Artificial Sequence
  Oligonucleotide primer for the detection of SNP TSC0003581
gtgaggtgtaga

SEQ ID NO: 274525 - DNA, 12 bp, Artificial Sequence
  Oligonucleotide primer for the detection of SNP TSC0003582
aaaataaataca

SEQ ID NO: 274526 - DNA, 12 bp, Artificial Sequence
  Oligonucleotide primer for the detection of SNP TSC0003582
ttattttattga

SEQ ID NO: 274527 - DNA, 12 bp, Artificial Sequence
  Oligonucleotide primer for the detection of SNP TSC0003582
cattttactaaa

SEQ ID NO: 274528 - DNA, 12 bp, Artificial Sequence
  Oligonucleotide primer for the detection of SNP TSC0003582
agtaagtatatt

SEQ ID NO: 274529 - DNA, 12 bp, Artificial Sequence
  Oligonucleotide primer for the detection of SNP TSC0003582
agtaagtatatc

SEQ ID NO: 274530 - DNA, 12 bp, Artificial Sequence
  Oligonucleotide primer for the detection of SNP TSC0003583
tccccaactaaa

SEQ ID NO: 274531 - DNA, 12 bp, Artificial Sequence
  Oligonucleotide primer for the detection of SNP TSC0003583
gtgtttaaattt

SEQ ID NO: 274532 - DNA, 12 bp, Artificial Sequence
  Oligonukleotid-Primer
atatccaaactc

SEQ ID NO: 274533 - DNA, 12 bp, Artificial Sequence
  Oligonucleotide primer for the detection of SNP TSC0003583
tttttaattgag

SEQ ID NO: 274534 - DNA, 12 bp, Artificial Sequence
  Oligonucleotide primer for the detection of SNP TSC0003584
aaaacccttctc

SEQ ID NO: 274535 - DNA, 12 bp, Artificial Sequence
  Oligonucleotide primer for the detection of SNP TSC0003584
tatttttgtggt

SEQ ID NO: 274536 - DNA, 12 bp, Artificial Sequence
  Oligonucleotide primer for the detection of SNP TSC0003584
cactcctataat

SEQ ID NO: 274537 - DNA, 12 bp, Artificial Sequence
  Oligonucleotide primer for the detection of SNP TSC0003585
ggatttgtttta

SEQ ID NO: 274538 - DNA, 12 bp, Artificial Sequence
  Oligonucleotide primer for the detection of SNP TSC0003586
atataattcact

SEQ ID NO: 274539 - DNA, 12 bp, Artificial Sequence
  Oligonucleotide primer for the detection of SNP TSC0003586
taattttaggaa

SEQ ID NO: 274540 - DNA, 12 bp, Artificial Sequence
  Oligonucleotide primer for the detection of SNP TSC0003588
taaaaataaata

SEQ ID NO: 274541 - DNA, 12 bp, Artificial Sequence
  Oligonucleotide primer for the detection of SNP TSC0003588
aaatgttgtgaa

SEQ ID NO: 274542 - DNA, 12 bp, Artificial Sequence
  Oligonucleotide primer for the detection of SNP TSC0003588
aaatactataaa

SEQ ID NO: 274543 - DNA, 12 bp, Artificial Sequence
  Oligonucleotide primer for the detection of SNP TSC0003588
tagaaataaata

SEQ ID NO: 274544 - DNA, 12 bp, Artificial Sequence
  Oligonukleotid-Primer
ttcccataactt

SEQ ID NO: 274545 - DNA, 12 bp, Artificial Sequence
  Oligonucleotide primer for the detection of SNP TSC0003589
gtttttatttta

SEQ ID NO: 274546 - DNA, 12 bp, Artificial Sequence
  Oligonucleotide primer for the detection of SNP TSC0003590
caattaaatcaa

SEQ ID NO: 274547 - DNA, 12 bp, Artificial Sequence
  Oligonucleotide primer for the detection of SNP TSC0003590
ttaggagttggt

SEQ ID NO: 274548 - DNA, 12 bp, Artificial Sequence
  Oligonucleotide primer for the detection of SNP TSC0003590
caaaaattaaca

SEQ ID NO: 274549 - DNA, 12 bp, Artificial Sequence
  Oligonucleotide primer for the detection of SNP TSC0003590
tagttgggttag

SEQ ID NO: 274550 - DNA, 12 bp, Artificial Sequence
  Oligonucleotide primer for the detection of SNP TSC0003591
aaaaaacataaa

SEQ ID NO: 274551 - DNA, 12 bp, Artificial Sequence
  Oligonucleotide primer for the detection of SNP TSC0003591
taggtgataaaa

SEQ ID NO: 274552 - DNA, 12 bp, Artificial Sequence
  Oligonucleotide primer for the detection of SNP TSC0003591
caaataataaaa

SEQ ID NO: 274553 - DNA, 12 bp, Artificial Sequence
  Oligonucleotide primer for the detection of SNP TSC0003591
ggaagaaatatg

SEQ ID NO: 274554 - DNA, 12 bp, Artificial Sequence
  Oligonucleotide primer for the detection of SNP TSC0003594
actcattcacac

SEQ ID NO: 274555 - DNA, 12 bp, Artificial Sequence
  Oligonucleotide primer for the detection of SNP TSC0003594
actcattcacgc

SEQ ID NO: 274556 - DNA, 12 bp, Artificial Sequence
  Oligonucleotide primer for the detection of SNP TSC0003594
gttaatgaatga

SEQ ID NO: 274557 - DNA, 12 bp, Artificial Sequence
  Oligonucleotide primer for the detection of SNP TSC0003595
ttattatttcac

SEQ ID NO: 274558 - DNA, 12 bp, Artificial Sequence
  Oligonucleotide primer for the detection of SNP TSC0003595
ttttaaatgtta

SEQ ID NO: 274559 - DNA, 12 bp, Artificial Sequence
  Oligonucleotide primer for the detection of SNP TSC0003595
tttcaaatatta

SEQ ID NO: 274560 - DNA, 12 bp, Artificial Sequence
  Oligonucleotide primer for the detection of SNP TSC0003595
ttgttattttat

SEQ ID NO: 274561 - DNA, 12 bp, Artificial Sequence
  Oligonucleotide primer for the detection of SNP TSC0003596
atataaaccaaa

SEQ ID NO: 274562 - DNA, 12 bp, Artificial Sequence
  Oligonucleotide primer for the detection of SNP TSC0003596
tagtttttggtt

SEQ ID NO: 274563 - DNA, 12 bp, Artificial Sequence
  Oligonucleotide primer for the detection of SNP TSC0003596
tagtttttggtc

SEQ ID NO: 274564 - DNA, 12 bp, Artificial Sequence
  Oligonucleotide primer for the detection of SNP TSC0003596
taactcttaatc

SEQ ID NO: 274565 - DNA, 12 bp, Artificial Sequence
  Oligonucleotide primer for the detection of SNP TSC0003596
ttgatgtgagtt

SEQ ID NO: 274566 - DNA, 12 bp, Artificial Sequence
  Oligonucleotide primer for the detection of SNP TSC0003597
cctattataatt

SEQ ID NO: 274567 - DNA, 12 bp, Artificial Sequence
  Oligonucleotide primer for the detection of SNP TSC0003597
gtgtgtagaaag

SEQ ID NO: 274568 - DNA, 12 bp, Artificial Sequence
  Oligonucleotide primer for the detection of SNP TSC0003598
aaaataaaatat

SEQ ID NO: 274569 - DNA, 12 bp, Artificial Sequence
  Oligonucleotide primer for the detection of SNP TSC0003598
gggatattttaa

SEQ ID NO: 274570 - DNA, 12 bp, Artificial Sequence
  Oligonucleotide primer for the detection of SNP TSC0003598
aaaataccttaa

SEQ ID NO: 274571 - DNA, 12 bp, Artificial Sequence
  Oligonucleotide primer for the detection of SNP TSC0003598
aaagtgaggtat

SEQ ID NO: 274572 - DNA, 12 bp, Artificial Sequence
  Oligonucleotide primer for the detection of SNP TSC0003599
acccaaaaacaa

SEQ ID NO: 274573 - DNA, 12 bp, Artificial Sequence
  Oligonucleotide primer for the detection of SNP TSC0003599
ggatggtttttg

SEQ ID NO: 274574 - DNA, 12 bp, Artificial Sequence
  Oligonucleotide primer for the detection of SNP TSC0003599
ggatggttttcg

SEQ ID NO: 274575 - DNA, 12 bp, Artificial Sequence
  Oligonucleotide primer for the detection of SNP TSC0003599
aataatcttcaa

SEQ ID NO: 274576 - DNA, 12 bp, Artificial Sequence
  Oligonucleotide primer for the detection of SNP TSC0003599
aataatcttcga

SEQ ID NO: 274577 - DNA, 12 bp, Artificial Sequence
  Oligonucleotide primer for the detection of SNP TSC0003599
gtttaagagtag

SEQ ID NO: 274578 - DNA, 12 bp, Artificial Sequence
  Oligonucleotide primer for the detection of SNP TSC0003600
taaaataacaac

SEQ ID NO: 274579 - DNA, 12 bp, Artificial Sequence
  Oligonucleotide primer for the detection of SNP TSC0003600
ttttttggtgat

SEQ ID NO: 274580 - DNA, 12 bp, Artificial Sequence
  Oligonucleotide primer for the detection of SNP TSC0003600
ttttttggtgac

SEQ ID NO: 274581 - DNA, 12 bp, Artificial Sequence
  Oligonucleotide primer for the detection of SNP TSC0003600
ctttctaataac

SEQ ID NO: 274582 - DNA, 12 bp, Artificial Sequence
  Oligonucleotide primer for the detection of SNP TSC0003600
aggatggtagtt

SEQ ID NO: 274583 - DNA, 12 bp, Artificial Sequence
  Oligonucleotide primer for the detection of SNP TSC0003601
tatttttaatac

SEQ ID NO: 274584 - DNA, 12 bp, Artificial Sequence
  Oligonucleotide primer for the detection of SNP TSC0003601
tatttttagtat

SEQ ID NO: 274585 - DNA, 12 bp, Artificial Sequence
  Oligonucleotide primer for the detection of SNP TSC0003602
tttcaataaata

SEQ ID NO: 274586 - DNA, 12 bp, Artificial Sequence
  Oligonucleotide primer for the detection of SNP TSC0003602
tgaaatattatt

SEQ ID NO: 274587 - DNA, 12 bp, Artificial Sequence
  Oligonucleotide primer for the detection of SNP TSC0003602
taaaatactatt

SEQ ID NO: 274588 - DNA, 12 bp, Artificial Sequence
  Oligonucleotide primer for the detection of SNP TSC0003602
ttttaataggtg

SEQ ID NO: 274589 - DNA, 12 bp, Artificial Sequence
  Oligonucleotide primer for the detection of SNP TSC0003603
taactcacattt

SEQ ID NO: 274590 - DNA, 12 bp, Artificial Sequence
  Oligonucleotide primer for the detection of SNP TSC0003603
aaagtgttggaa

SEQ ID NO: 274591 - DNA, 12 bp, Artificial Sequence
  Oligonucleotide primer for the detection of SNP TSC0003606
tatataacatca

SEQ ID NO: 274592 - DNA, 12 bp, Artificial Sequence
  Oligonucleotide primer for the detection of SNP TSC0003606
ttgatttgttta

SEQ ID NO: 274593 - DNA, 12 bp, Artificial Sequence
  Oligonucleotide primer for the detection of SNP TSC0003607
ccctacatacat

SEQ ID NO: 274594 - DNA, 12 bp, Artificial Sequence
  Oligonucleotide primer for the detection of SNP TSC0003607
agaggaatttta

SEQ ID NO: 274595 - DNA, 12 bp, Artificial Sequence
  Oligonucleotide primer for the detection of SNP TSC0003607
ttttgtatgtat

SEQ ID NO: 274596 - DNA, 12 bp, Artificial Sequence
  Oligonucleotide primer for the detection of SNP TSC0003608
tcaaccaaatac

SEQ ID NO: 274597 - DNA, 12 bp, Artificial Sequence
  Oligonucleotide primer for the detection of SNP TSC0003608
ttgggtattagg

SEQ ID NO: 274598 - DNA, 12 bp, Artificial Sequence
  Oligonucleotide primer for the detection of SNP TSC0003609
tttataaatatt

SEQ ID NO: 274599 - DNA, 12 bp, Artificial Sequence
  Oligonucleotide primer for the detection of SNP TSC0003609
ttttttaatgag

SEQ ID NO: 274600 - DNA, 12 bp, Artificial Sequence
  Oligonucleotide primer for the detection of SNP TSC0003610
ttcctattcaac

SEQ ID NO: 274601 - DNA, 12 bp, Artificial Sequence
  Oligonucleotide primer for the detection of SNP TSC0003610
ggagaagaaaag

SEQ ID NO: 274602 - DNA, 12 bp, Artificial Sequence
  Oligonucleotide primer for the detection of SNP TSC0003611
tttatttctttc

SEQ ID NO: 274603 - DNA, 12 bp, Artificial Sequence
  Oligonucleotide primer for the detection of SNP TSC0003611
tattgaaaaatg

SEQ ID NO: 274604 - DNA, 12 bp, Artificial Sequence
  Oligonucleotide primer for the detection of SNP TSC0003611
tattgaaaaacg

SEQ ID NO: 274605 - DNA, 12 bp, Artificial Sequence
  Oligonucleotide primer for the detection of SNP TSC0003612
aaaaattacctt

SEQ ID NO: 274606 - DNA, 12 bp, Artificial Sequence
  Oligonucleotide primer for the detection of SNP TSC0003612
tttaaaatttta

SEQ ID NO: 274607 - DNA, 12 bp, Artificial Sequence
  Oligonucleotide primer for the detection of SNP TSC0003613
atcataatctat

SEQ ID NO: 274608 - DNA, 12 bp, Artificial Sequence
  Oligonucleotide primer for the detection of SNP TSC0003613
agtaattgttta

SEQ ID NO: 274609 - DNA, 12 bp, Artificial Sequence
  Oligonucleotide primer for the detection of SNP TSC0003613
agtaatcgttta

SEQ ID NO: 274610 - DNA, 12 bp, Artificial Sequence
  Oligonucleotide primer for the detection of SNP TSC0003614
tataaacccaat

SEQ ID NO: 274611 - DNA, 12 bp, Artificial Sequence
  Oligonucleotide primer for the detection of SNP TSC0003614
ggtgtatttagg

SEQ ID NO: 274612 - DNA, 12 bp, Artificial Sequence
  Oligonucleotide primer for the detection of SNP TSC0003615
ttttcttctttt

SEQ ID NO: 274613 - DNA, 12 bp, Artificial Sequence
  Oligonucleotide primer for the detection of SNP TSC0003615
tgttttttatta

SEQ ID NO: 274614 - DNA, 12 bp, Artificial Sequence
  Oligonucleotide primer for the detection of SNP TSC0003616
ttatttaaaata

SEQ ID NO: 274615 - DNA, 12 bp, Artificial Sequence
  Oligonucleotide primer for the detection of SNP TSC0003616
aatgtgatatat

SEQ ID NO: 274616 - DNA, 12 bp, Artificial Sequence
  Oligonucleotide primer for the detection of SNP TSC0003616
atataacacata

SEQ ID NO: 274617 - DNA, 12 bp, Artificial Sequence
  Oligonucleotide primer for the detection of SNP TSC0003616
ttatttaaaatg

SEQ ID NO: 274618 - DNA, 12 bp, Artificial Sequence
  Oligonucleotide primer for the detection of SNP TSC0003617
acttaaataaaa

SEQ ID NO: 274619 - DNA, 12 bp, Artificial Sequence
  Oligonucleotide primer for the detection of SNP TSC0003617
gtaagtgtatgg

SEQ ID NO: 274620 - DNA, 12 bp, Artificial Sequence
  Oligonucleotide primer for the detection of SNP TSC0003617
taaatacataaa

SEQ ID NO: 274621 - DNA, 12 bp, Artificial Sequence
  Oligonucleotide primer for the detection of SNP TSC0003617
tttgatttaagt

SEQ ID NO: 274622 - DNA, 12 bp, Artificial Sequence
  Oligonucleotide primer for the detection of SNP TSC0003618
tttacccttttt

SEQ ID NO: 274623 - DNA, 12 bp, Artificial Sequence
  Oligonucleotide primer for the detection of SNP TSC0003618
agattttttttt

SEQ ID NO: 274624 - DNA, 12 bp, Artificial Sequence
  Oligonucleotide primer for the detection of SNP TSC0003618
aaatcttttttt

SEQ ID NO: 274625 - DNA, 12 bp, Artificial Sequence
  Oligonucleotide primer for the detection of SNP TSC0003619
ctcaaaaaaaaa

SEQ ID NO: 274626 - DNA, 12 bp, Artificial Sequence
  Oligonucleotide primer for the detection of SNP TSC0003619
attattattatt

SEQ ID NO: 274627 - DNA, 12 bp, Artificial Sequence
  Oligonucleotide primer for the detection of SNP TSC0003620
aataacactcat

SEQ ID NO: 274628 - DNA, 12 bp, Artificial Sequence
  Oligonucleotide primer for the detection of SNP TSC0003620
ggtaataggata

SEQ ID NO: 274629 - DNA, 12 bp, Artificial Sequence
  Oligonucleotide primer for the detection of SNP TSC0003621
ccattttttttt

SEQ ID NO: 274630 - DNA, 12 bp, Artificial Sequence
  Oligonucleotide primer for the detection of SNP TSC0003621
aattttatttta

SEQ ID NO: 274631 - DNA, 12 bp, Artificial Sequence
  Oligonucleotide primer for the detection of SNP TSC0003622
taattttttaaa

SEQ ID NO: 274632 - DNA, 12 bp, Artificial Sequence
  Oligonucleotide primer for the detection of SNP TSC0003622
gttattttagtt

SEQ ID NO: 274633 - DNA, 12 bp, Artificial Sequence
  Oligonucleotide primer for the detection of SNP TSC0003622
ctactatttcaa

SEQ ID NO: 274634 - DNA, 12 bp, Artificial Sequence
  Oligonucleotide primer for the detection of SNP TSC0003622
agataatttttt

SEQ ID NO: 274635 - DNA, 12 bp, Artificial Sequence
  Oligonucleotide primer for the detection of SNP TSC0003623
aatataataaac

SEQ ID NO: 274636 - DNA, 12 bp, Artificial Sequence
  Oligonucleotide primer for the detection of SNP TSC0003623
tgttttgtattt

SEQ ID NO: 274637 - DNA, 12 bp, Artificial Sequence
  Oligonucleotide primer for the detection of SNP TSC0003624
aaaacacaacat

SEQ ID NO: 274638 - DNA, 12 bp, Artificial Sequence
  Oligonucleotide primer for the detection of SNP TSC0003624
aaaacacaacgt

SEQ ID NO: 274639 - DNA, 12 bp, Artificial Sequence
  Oligonucleotide primer for the detection of SNP TSC0003624
aaaacacgacat

SEQ ID NO: 274640 - DNA, 12 bp, Artificial Sequence
  Oligonucleotide primer for the detection of SNP TSC0003624
aaaacacgacgt

SEQ ID NO: 274641 - DNA, 12 bp, Artificial Sequence
  Oligonucleotide primer for the detection of SNP TSC0003624
ataatgtaggta

SEQ ID NO: 274642 - DNA, 12 bp, Artificial Sequence
  Oligonucleotide primer for the detection of SNP TSC0003624
acaatacaaaca

SEQ ID NO: 274643 - DNA, 12 bp, Artificial Sequence
  Oligonucleotide primer for the detection of SNP TSC0003624
gaagtatgatgt

SEQ ID NO: 274644 - DNA, 12 bp, Artificial Sequence
  Oligonucleotide primer for the detection of SNP TSC0003624
gaagtacgatgt

SEQ ID NO: 274645 - DNA, 12 bp, Artificial Sequence
  Oligonucleotide primer for the detection of SNP TSC0003624
gaagtatgacgt

SEQ ID NO: 274646 - DNA, 12 bp, Artificial Sequence
  Oligonucleotide primer for the detection of SNP TSC0003624
gaagtacgacgt

SEQ ID NO: 274647 - DNA, 12 bp, Artificial Sequence
  Oligonucleotide primer for the detection of SNP TSC0003625
ttttacataaaa

SEQ ID NO: 274648 - DNA, 12 bp, Artificial Sequence
  Oligonucleotide primer for the detection of SNP TSC0003625
ttttacgtaaaa

SEQ ID NO: 274649 - DNA, 12 bp, Artificial Sequence
  Oligonucleotide primer for the detection of SNP TSC0003625
aagtttagattt

SEQ ID NO: 274650 - DNA, 12 bp, Artificial Sequence
  Oligonucleotide primer for the detection of SNP TSC0003625
aaacccaaattc

SEQ ID NO: 274651 - DNA, 12 bp, Artificial Sequence
  Oligonucleotide primer for the detection of SNP TSC0003625
ttttgtgtgggg

SEQ ID NO: 274652 - DNA, 12 bp, Artificial Sequence
  Oligonucleotide primer for the detection of SNP TSC0003625
ttttgcgtgggg

SEQ ID NO: 274653 - DNA, 12 bp, Artificial Sequence
  Oligonucleotide primer for the detection of SNP TSC0003626
ctaaaacaaaac

SEQ ID NO: 274654 - DNA, 12 bp, Artificial Sequence
  Oligonucleotide primer for the detection of SNP TSC0003626
tgagtttaagtg

SEQ ID NO: 274655 - DNA, 12 bp, Artificial Sequence
  Oligonucleotide primer for the detection of SNP TSC0003627
taatttcaaact

SEQ ID NO: 274656 - DNA, 12 bp, Artificial Sequence
  Oligonucleotide primer for the detection of SNP TSC0003627
taatttcgaact

SEQ ID NO: 274657 - DNA, 12 bp, Artificial Sequence
  Oligonucleotide primer for the detection of SNP TSC0003627
atttgaggttag

SEQ ID NO: 274658 - DNA, 12 bp, Artificial Sequence
  Oligonucleotide primer for the detection of SNP TSC0003628
taattatcttta

SEQ ID NO: 274659 - DNA, 12 bp, Artificial Sequence
  Oligonucleotide primer for the detection of SNP TSC0003628
tggttttttatt

SEQ ID NO: 274660 - DNA, 12 bp, Artificial Sequence
  Oligonucleotide primer for the detection of SNP TSC0003628
actaacttttca

SEQ ID NO: 274661 - DNA, 12 bp, Artificial Sequence
  Oligonucleotide primer for the detection of SNP TSC0003628
ttggttgttttt

SEQ ID NO: 274662 - DNA, 12 bp, Artificial Sequence
  Oligonucleotide primer for the detection of SNP TSC0003629
tcaaaattccat

SEQ ID NO: 274663 - DNA, 12 bp, Artificial Sequence
  Oligonucleotide primer for the detection of SNP TSC0003629
aattgatgtaaa

SEQ ID NO: 274664 - DNA, 12 bp, Artificial Sequence
  Oligonucleotide primer for the detection of SNP TSC0003630
catttaaatact

SEQ ID NO: 274665 - DNA, 12 bp, Artificial Sequence
  Oligonucleotide primer for the detection of SNP TSC0003630
attgaaatatag

SEQ ID NO: 274666 - DNA, 12 bp, Artificial Sequence
  Oligonucleotide primer for the detection of SNP TSC0003631
aaaaataccaac

SEQ ID NO: 274667 - DNA, 12 bp, Artificial Sequence
  Oligonucleotide primer for the detection of SNP TSC0003631
ggttgtatggag

SEQ ID NO: 274668 - DNA, 12 bp, Artificial Sequence
  Oligonucleotide primer for the detection of SNP TSC0003631
ggttgtacggag

SEQ ID NO: 274669 - DNA, 12 bp, Artificial Sequence
  Oligonucleotide primer for the detection of SNP TSC0003632
tcaacttttttt

SEQ ID NO: 274670 - DNA, 12 bp, Artificial Sequence
  Oligonucleotide primer for the detection of SNP TSC0003632
ttttttaaagtt

SEQ ID NO: 274671 - DNA, 12 bp, Artificial Sequence
  Oligonucleotide primer for the detection of SNP TSC0003632
ttttttaaaatt

SEQ ID NO: 274672 - DNA, 12 bp, Artificial Sequence
  Oligonucleotide primer for the detection of SNP TSC0003633
cacccaatttat

SEQ ID NO: 274673 - DNA, 12 bp, Artificial Sequence
  Oligonucleotide primer for the detection of SNP TSC0003633
tttattttagta

SEQ ID NO: 274674 - DNA, 12 bp, Artificial Sequence
  Oligonucleotide primer for the detection of SNP TSC0003634
attatccaccta

SEQ ID NO: 274675 - DNA, 12 bp, Artificial Sequence
  Oligonucleotide primer for the detection of SNP TSC0003634
gttatttatttg

SEQ ID NO: 274676 - DNA, 12 bp, Artificial Sequence
  Oligonucleotide primer for the detection of SNP TSC0003635
ctaacctcaaat

SEQ ID NO: 274677 - DNA, 12 bp, Artificial Sequence
  Oligonucleotide primer for the detection of SNP TSC0003635
aggtaggtggat

SEQ ID NO: 274678 - DNA, 12 bp, Artificial Sequence
  Oligonucleotide primer for the detection of SNP TSC0003635
gaaacaaataaa

SEQ ID NO: 274679 - DNA, 12 bp, Artificial Sequence
  Oligonucleotide primer for the detection of SNP TSC0003635
ttgattttaggt

SEQ ID NO: 274680 - DNA, 12 bp, Artificial Sequence
  Oligonucleotide primer for the detection of SNP TSC0003636
tttttatatttt

SEQ ID NO: 274681 - DNA, 12 bp, Artificial Sequence
  Oligonucleotide primer for the detection of SNP TSC0003636
attttgttttta

SEQ ID NO: 274682 - DNA, 12 bp, Artificial Sequence
  Oligonucleotide primer for the detection of SNP TSC0003638
aattatactaaa

SEQ ID NO: 274683 - DNA, 12 bp, Artificial Sequence
  Oligonucleotide primer for the detection of SNP TSC0003638
cacctcctttct

SEQ ID NO: 274684 - DNA, 12 bp, Artificial Sequence
  Oligonucleotide primer for the detection of SNP TSC0003638
aattgtgttagg

SEQ ID NO: 274685 - DNA, 12 bp, Artificial Sequence
  Oligonucleotide primer for the detection of SNP TSC0003639
aaatttaaaatc

SEQ ID NO: 274686 - DNA, 12 bp, Artificial Sequence
  Oligonucleotide primer for the detection of SNP TSC0003639
tatgttagttag

SEQ ID NO: 274687 - DNA, 12 bp, Artificial Sequence
  Oligonucleotide primer for the detection of SNP TSC0003640
aaacacctaaac

SEQ ID NO: 274688 - DNA, 12 bp, Artificial Sequence
  Oligonucleotide primer for the detection of SNP TSC0003640
tttgtttaggta

SEQ ID NO: 274689 - DNA, 12 bp, Artificial Sequence
  Oligonucleotide primer for the detection of SNP TSC0003641
ttattcctaaat

SEQ ID NO: 274690 - DNA, 12 bp, Artificial Sequence
  Oligonucleotide primer for the detection of SNP TSC0003641
tagtatttttaa

SEQ ID NO: 274691 - DNA, 12 bp, Artificial Sequence
  Oligonucleotide primer for the detection of SNP TSC0003643
ctttaccattac

SEQ ID NO: 274692 - DNA, 12 bp, Artificial Sequence
  Oligonucleotide primer for the detection of SNP TSC0003643
ggattgttttgg

SEQ ID NO: 274693 - DNA, 12 bp, Artificial Sequence
  Oligonucleotide primer for the detection of SNP TSC0003644
ttacacatcatt

SEQ ID NO: 274694 - DNA, 12 bp, Artificial Sequence
  Oligonucleotide primer for the detection of SNP TSC0003644
gaaatgagaatt

SEQ ID NO: 274695 - DNA, 12 bp, Artificial Sequence
  Oligonucleotide primer for the detection of SNP TSC0003644
gaaacgagaatt

SEQ ID NO: 274696 - DNA, 12 bp, Artificial Sequence
  Oligonucleotide primer for the detection of SNP TSC0003644
ataaaacaaaaa

SEQ ID NO: 274697 - DNA, 12 bp, Artificial Sequence
  Oligonucleotide primer for the detection of SNP TSC0003644
ataaaacgaaaa

SEQ ID NO: 274698 - DNA, 12 bp, Artificial Sequence
  Oligonucleotide primer for the detection of SNP TSC0003644
ttgtatattatt

SEQ ID NO: 274699 - DNA, 12 bp, Artificial Sequence
  Oligonucleotide primer for the detection of SNP TSC0003647
aataatactatc

SEQ ID NO: 274700 - DNA, 12 bp, Artificial Sequence
  Oligonucleotide primer for the detection of SNP TSC0003647
aaagtaattatg

SEQ ID NO: 274701 - DNA, 12 bp, Artificial Sequence
  Oligonucleotide primer for the detection of SNP TSC0003648
aatccaattatt

SEQ ID NO: 274702 - DNA, 12 bp, Artificial Sequence
  Oligonucleotide primer for the detection of SNP TSC0003648
tttattagaaag

SEQ ID NO: 274703 - DNA, 12 bp, Artificial Sequence
  Oligonucleotide primer for the detection of SNP TSC0003649
atctttatctcc

SEQ ID NO: 274704 - DNA, 12 bp, Artificial Sequence
  Oligonucleotide primer for the detection of SNP TSC0003649
aagtagggagag

SEQ ID NO: 274705 - DNA, 12 bp, Artificial Sequence
  Oligonucleotide primer for the detection of SNP TSC0003650
tattttctttaa

SEQ ID NO: 274706 - DNA, 12 bp, Artificial Sequence
  Oligonucleotide primer for the detection of SNP TSC0003650
tagagtttgatg

SEQ ID NO: 274707 - DNA, 12 bp, Artificial Sequence
  Oligonucleotide primer for the detection of SNP TSC0003650
tagagtttgacg

SEQ ID NO: 274708 - DNA, 12 bp, Artificial Sequence
  Oligonucleotide primer for the detection of SNP TSC0003650
caaaatttaaca

SEQ ID NO: 274709 - DNA, 12 bp, Artificial Sequence
  Oligonucleotide primer for the detection of SNP TSC0003650
caaaatttaacg

SEQ ID NO: 274710 - DNA, 12 bp, Artificial Sequence
  Oligonucleotide primer for the detection of SNP TSC0003650
tgttttttttag

SEQ ID NO: 274711 - DNA, 12 bp, Artificial Sequence
  Oligonucleotide primer for the detection of SNP TSC0003651
aaaatacacatt

SEQ ID NO: 274712 - DNA, 12 bp, Artificial Sequence
  Oligonucleotide primer for the detection of SNP TSC0003651
aaaatacgcatt

SEQ ID NO: 274713 - DNA, 12 bp, Artificial Sequence
  Oligonucleotide primer for the detection of SNP TSC0003651
taaagatgttta

SEQ ID NO: 274714 - DNA, 12 bp, Artificial Sequence
  Oligonucleotide primer for the detection of SNP TSC0003652
aaaaataaaatt

SEQ ID NO: 274715 - DNA, 12 bp, Artificial Sequence
  Oligonucleotide primer for the detection of SNP TSC0003652
aaaattgaaata

SEQ ID NO: 274716 - DNA, 12 bp, Artificial Sequence
  Oligonucleotide primer for the detection of SNP TSC0003653
aaatctaataac

SEQ ID NO: 274717 - DNA, 12 bp, Artificial Sequence
  Oligonucleotide primer for the detection of SNP TSC0003653
taatatttttag

SEQ ID NO: 274718 - DNA, 12 bp, Artificial Sequence
  Oligonucleotide primer for the detection of SNP TSC0003654
ctacaaatacac

SEQ ID NO: 274719 - DNA, 12 bp, Artificial Sequence
  Oligonucleotide primer for the detection of SNP TSC0003654
ctacaaatacgc

SEQ ID NO: 274720 - DNA, 12 bp, Artificial Sequence
  Oligonucleotide primer for the detection of SNP TSC0003654
tttagtgtggtg

SEQ ID NO: 274721 - DNA, 12 bp, Artificial Sequence
  Oligonucleotide primer for the detection of SNP TSC0003655
ccccaaaacaaa

SEQ ID NO: 274722 - DNA, 12 bp, Artificial Sequence
  Oligonucleotide primer for the detection of SNP TSC0003655
tcaaaaatttat

SEQ ID NO: 274723 - DNA, 12 bp, Artificial Sequence
  Oligonucleotide primer for the detection of SNP TSC0003655
ttttaagataaa

SEQ ID NO: 274724 - DNA, 12 bp, Artificial Sequence
  Oligonucleotide primer for the detection of SNP TSC0003656
gtttaattaaag

SEQ ID NO: 274725 - DNA, 12 bp, Artificial Sequence
  Oligonucleotide primer for the detection of SNP TSC0003656
atccaatcaaaa

SEQ ID NO: 274726 - DNA, 12 bp, Artificial Sequence
  Oligonucleotide primer for the detection of SNP TSC0003656
taatgagataga

SEQ ID NO: 274727 - DNA, 12 bp, Artificial Sequence
  Oligonucleotide primer for the detection of SNP TSC0003657
aatataattcaa

SEQ ID NO: 274728 - DNA, 12 bp, Artificial Sequence
  Oligonucleotide primer for the detection of SNP TSC0003657
ttgaatttggag

SEQ ID NO: 274729 - DNA, 12 bp, Artificial Sequence
  Oligonucleotide primer for the detection of SNP TSC0003660
tcctacctcaac

SEQ ID NO: 274730 - DNA, 12 bp, Artificial Sequence
  Oligonucleotide primer for the detection of SNP TSC0003660
attttagttatt

SEQ ID NO: 274731 - DNA, 12 bp, Artificial Sequence
  Oligonucleotide primer for the detection of SNP TSC0003661
aataattctttc

SEQ ID NO: 274732 - DNA, 12 bp, Artificial Sequence
  Oligonucleotide primer for the detection of SNP TSC0003661
ttgttaaaaaaa

SEQ ID NO: 274733 - DNA, 12 bp, Artificial Sequence
  Oligonucleotide primer for the detection of SNP TSC0003662
atttttggtttt

SEQ ID NO: 274734 - DNA, 12 bp, Artificial Sequence
  Oligonucleotide primer for the detection of SNP TSC0003662
actcctaacctc

SEQ ID NO: 274735 - DNA, 12 bp, Artificial Sequence
  Oligonucleotide primer for the detection of SNP TSC0003662
aaggtgggtgga

SEQ ID NO: 274736 - DNA, 12 bp, Artificial Sequence
  Oligonucleotide primer for the detection of SNP TSC0003663
ctaatttctcct

SEQ ID NO: 274737 - DNA, 12 bp, Artificial Sequence
  Oligonucleotide primer for the detection of SNP TSC0003663
ttaaggagagag

SEQ ID NO: 274738 - DNA, 12 bp, Artificial Sequence
  Oligonucleotide primer for the detection of SNP TSC0003664
aaataaaacaaa

SEQ ID NO: 274739 - DNA, 12 bp, Artificial Sequence
  Oligonucleotide primer for the detection of SNP TSC0003664
taaggttttttt

SEQ ID NO: 274740 - DNA, 12 bp, Artificial Sequence
  Oligonucleotide primer for the detection of SNP TSC0003664
caaaacctttct

SEQ ID NO: 274741 - DNA, 12 bp, Artificial Sequence
  Oligonucleotide primer for the detection of SNP TSC0003664
gggtgaggtaga

SEQ ID NO: 274742 - DNA, 12 bp, Artificial Sequence
  Oligonukleotid-Primer
aattccacacta

SEQ ID NO: 274743 - DNA, 12 bp, Artificial Sequence
  Oligonucleotide primer for the detection of SNP TSC0003665
aattccacgcta

SEQ ID NO: 274744 - DNA, 12 bp, Artificial Sequence
  Oligonucleotide primer for the detection of SNP TSC0003665
gataaataaaat

SEQ ID NO: 274745 - DNA, 12 bp, Artificial Sequence
  Oligonucleotide primer for the detection of SNP TSC0003665
ataaataaaata

SEQ ID NO: 274746 - DNA, 12 bp, Artificial Sequence
  Oligonucleotide primer for the detection of SNP TSC0003665
taattttatgtt

SEQ ID NO: 274747 - DNA, 12 bp, Artificial Sequence
  Oligonucleotide primer for the detection of SNP TSC0003665
taattttacgtt

SEQ ID NO: 274748 - DNA, 12 bp, Artificial Sequence
  Oligonucleotide primer for the detection of SNP TSC0003666
ataatcatttta

SEQ ID NO: 274749 - DNA, 12 bp, Artificial Sequence
  Oligonucleotide primer for the detection of SNP TSC0003666
taagatatatat

SEQ ID NO: 274750 - DNA, 12 bp, Artificial Sequence
  Oligonucleotide primer for the detection of SNP TSC0003666
taaaacacatat

SEQ ID NO: 274751 - DNA, 12 bp, Artificial Sequence
  Oligonucleotide primer for the detection of SNP TSC0003666
gtaattatttta

SEQ ID NO: 274752 - DNA, 12 bp, Artificial Sequence
  Oligonucleotide primer for the detection of SNP TSC0003667
aactatactaaa

SEQ ID NO: 274753 - DNA, 12 bp, Artificial Sequence
  Oligonucleotide primer for the detection of SNP TSC0003667
taatatattatt

SEQ ID NO: 274754 - DNA, 12 bp, Artificial Sequence
  Oligonucleotide primer for the detection of SNP TSC0003667
caatacactatt

SEQ ID NO: 274755 - DNA, 12 bp, Artificial Sequence
  Oligonucleotide primer for the detection of SNP TSC0003667
gattatattgaa

SEQ ID NO: 274756 - DNA, 12 bp, Artificial Sequence
  Oligonucleotide primer for the detection of SNP TSC0003668
aacttcaactaa

SEQ ID NO: 274757 - DNA, 12 bp, Artificial Sequence
  Oligonucleotide primer for the detection of SNP TSC0003668
aacttcgactaa

SEQ ID NO: 274758 - DNA, 12 bp, Artificial Sequence
  Oligonucleotide primer for the detection of SNP TSC0003668
aagagagtgttt

SEQ ID NO: 274759 - DNA, 12 bp, Artificial Sequence
  Oligonucleotide primer for the detection of SNP TSC0003668
aaaaaaaatatc

SEQ ID NO: 274760 - DNA, 12 bp, Artificial Sequence
  Oligonucleotide primer for the detection of SNP TSC0003668
tgattttggttg

SEQ ID NO: 274761 - DNA, 12 bp, Artificial Sequence
  Oligonucleotide primer for the detection of SNP TSC0003668
tgatttcggttg

SEQ ID NO: 274762 - DNA, 12 bp, Artificial Sequence
  Oligonucleotide primer for the detection of SNP TSC0003669
tacaattttaat

SEQ ID NO: 274763 - DNA, 12 bp, Artificial Sequence
  Oligonucleotide primer for the detection of SNP TSC0003669
aatgttatagta

SEQ ID NO: 274764 - DNA, 12 bp, Artificial Sequence
  Oligonucleotide primer for the detection of SNP TSC0003670
tatccactaaaa

SEQ ID NO: 274765 - DNA, 12 bp, Artificial Sequence
  Oligonucleotide primer for the detection of SNP TSC0003670
ggtattttagtt

SEQ ID NO: 274766 - DNA, 12 bp, Artificial Sequence
  Oligonucleotide primer for the detection of SNP TSC0003670
aacacctcaact

SEQ ID NO: 274767 - DNA, 12 bp, Artificial Sequence
  Oligonucleotide primer for the detection of SNP TSC0003670
tatttattaaga

SEQ ID NO: 274768 - DNA, 12 bp, Artificial Sequence
  Oligonucleotide primer for the detection of SNP TSC0003671
aaactaaaatat

SEQ ID NO: 274769 - DNA, 12 bp, Artificial Sequence
  Oligonucleotide primer for the detection of SNP TSC0003671
agttagggtata

SEQ ID NO: 274770 - DNA, 12 bp, Artificial Sequence
  Oligonucleotide primer for the detection of SNP TSC0003671
aatcaaaatata

SEQ ID NO: 274771 - DNA, 12 bp, Artificial Sequence
  Oligonucleotide primer for the detection of SNP TSC0003671
aaattgagatat

SEQ ID NO: 274772 - DNA, 12 bp, Artificial Sequence
  Oligonucleotide primer for the detection of SNP TSC0003672
aaatacaactca

SEQ ID NO: 274773 - DNA, 12 bp, Artificial Sequence
  Oligonucleotide primer for the detection of SNP TSC0003672
aaatacaactcg

SEQ ID NO: 274774 - DNA, 12 bp, Artificial Sequence
  Oligonucleotide primer for the detection of SNP TSC0003672
cacatccttact

SEQ ID NO: 274775 - DNA, 12 bp, Artificial Sequence
  Oligonucleotide primer for the detection of SNP TSC0003672
aaaatgtaattt

SEQ ID NO: 274776 - DNA, 12 bp, Artificial Sequence
  Oligonucleotide primer for the detection of SNP TSC0003672
aaaatgtaattc

SEQ ID NO: 274777 - DNA, 12 bp, Artificial Sequence
  Oligonucleotide primer for the detection of SNP TSC0003673
attaactcctct

SEQ ID NO: 274778 - DNA, 12 bp, Artificial Sequence
  Oligonucleotide primer for the detection of SNP TSC0003673
tatattaaatat

SEQ ID NO: 274779 - DNA, 12 bp, Artificial Sequence
  Oligonucleotide primer for the detection of SNP TSC0003673
cacattaaacat

SEQ ID NO: 274780 - DNA, 12 bp, Artificial Sequence
  Oligonucleotide primer for the detection of SNP TSC0003673
gttggttttttt

SEQ ID NO: 274781 - DNA, 12 bp, Artificial Sequence
  Oligonucleotide primer for the detection of SNP TSC0003674
aaaaaacataac

SEQ ID NO: 274782 - DNA, 12 bp, Artificial Sequence
  Oligonucleotide primer for the detection of SNP TSC0003674
ttgttttgaatt

SEQ ID NO: 274783 - DNA, 12 bp, Artificial Sequence
  Oligonucleotide primer for the detection of SNP TSC0003675
taaacaataaac

SEQ ID NO: 274784 - DNA, 12 bp, Artificial Sequence
  Oligonucleotide primer for the detection of SNP TSC0003675
ttttttttaaaa

SEQ ID NO: 274785 - DNA, 12 bp, Artificial Sequence
  Oligonucleotide primer for the detection of SNP TSC0003676
ttaagtatttta

SEQ ID NO: 274786 - DNA, 12 bp, Artificial Sequence
  Oligonucleotide primer for the detection of SNP TSC0003677
cacctcaacctc

SEQ ID NO: 274787 - DNA, 12 bp, Artificial Sequence
  Oligonucleotide primer for the detection of SNP TSC0003677
tttagttattta

SEQ ID NO: 274788 - DNA, 12 bp, Artificial Sequence
  Oligonucleotide primer for the detection of SNP TSC0003678
attatcttatac

SEQ ID NO: 274789 - DNA, 12 bp, Artificial Sequence
  Oligonucleotide primer for the detection of SNP TSC0003678
gttaattttata

SEQ ID NO: 274790 - DNA, 12 bp, Artificial Sequence
  Oligonucleotide primer for the detection of SNP TSC0003679
tttaaattcaat

SEQ ID NO: 274791 - DNA, 12 bp, Artificial Sequence
  Oligonucleotide primer for the detection of SNP TSC0003679
tggtatatgtat

SEQ ID NO: 274792 - DNA, 12 bp, Artificial Sequence
  Oligonucleotide primer for the detection of SNP TSC0003679
taacacatatac

SEQ ID NO: 274793 - DNA, 12 bp, Artificial Sequence
  Oligonucleotide primer for the detection of SNP TSC0003679
tttaagtttagt

SEQ ID NO: 274794 - DNA, 12 bp, Artificial Sequence
  Oligonucleotide primer for the detection of SNP TSC0003680
tattttaaattc

SEQ ID NO: 274795 - DNA, 12 bp, Artificial Sequence
  Oligonucleotide primer for the detection of SNP TSC0003680
ggtatatgtata

SEQ ID NO: 274796 - DNA, 12 bp, Artificial Sequence
  Oligonucleotide primer for the detection of SNP TSC0003682
cattaacatcac

SEQ ID NO: 274797 - DNA, 12 bp, Artificial Sequence
  Oligonucleotide primer for the detection of SNP TSC0003682
cattaacatcgc

SEQ ID NO: 274798 - DNA, 12 bp, Artificial Sequence
  Oligonucleotide primer for the detection of SNP TSC0003682
cgttaacatcac

SEQ ID NO: 274799 - DNA, 12 bp, Artificial Sequence
  Oligonucleotide primer for the detection of SNP TSC0003682
cgttaacatcgc

SEQ ID NO: 274800 - DNA, 12 bp, Artificial Sequence
  Oligonucleotide primer for the detection of SNP TSC0003682
tggtttggtgag

SEQ ID NO: 274801 - DNA, 12 bp, Artificial Sequence
  Oligonucleotide primer for the detection of SNP TSC0003682
cggtttggtgag

SEQ ID NO: 274802 - DNA, 12 bp, Artificial Sequence
  Oligonucleotide primer for the detection of SNP TSC0003682
tggtttggcgag

SEQ ID NO: 274803 - DNA, 12 bp, Artificial Sequence
  Oligonucleotide primer for the detection of SNP TSC0003682
cggtttggcgag

SEQ ID NO: 274804 - DNA, 12 bp, Artificial Sequence
  Oligonucleotide primer for the detection of SNP TSC0003683
aaatataaaaaa

SEQ ID NO: 274805 - DNA, 12 bp, Artificial Sequence
  Oligonucleotide primer for the detection of SNP TSC0003683
agtatatgtgag

SEQ ID NO: 274806 - DNA, 12 bp, Artificial Sequence
  Oligonucleotide primer for the detection of SNP TSC0003683
aacacatataaa

SEQ ID NO: 274807 - DNA, 12 bp, Artificial Sequence
  Oligonucleotide primer for the detection of SNP TSC0003683
aaatgtggagag

SEQ ID NO: 274808 - DNA, 12 bp, Artificial Sequence
  Oligonucleotide primer for the detection of SNP TSC0003684
acctttaactct

SEQ ID NO: 274809 - DNA, 12 bp, Artificial Sequence
  Oligonucleotide primer for the detection of SNP TSC0003684
tttgtagtggta

SEQ ID NO: 274810 - DNA, 12 bp, Artificial Sequence
  Oligonucleotide primer for the detection of SNP TSC0003684
tctacaataaca

SEQ ID NO: 274811 - DNA, 12 bp, Artificial Sequence
  Oligonucleotide primer for the detection of SNP TSC0003685
atcaatttacca

SEQ ID NO: 274812 - DNA, 12 bp, Artificial Sequence
  Oligonucleotide primer for the detection of SNP TSC0003685
ttgtatttttag

SEQ ID NO: 274813 - DNA, 12 bp, Artificial Sequence
  Oligonucleotide primer for the detection of SNP TSC0003686
ccaaataaaatc

SEQ ID NO: 274814 - DNA, 12 bp, Artificial Sequence
  Oligonucleotide primer for the detection of SNP TSC0003686
agttggaaaatg

SEQ ID NO: 274815 - DNA, 12 bp, Artificial Sequence
  Oligonukleotid-Primer
ttaaatgaaatt

SEQ ID NO: 274816 - DNA, 12 bp, Artificial Sequence
  Oligonucleotide primer for the detection of SNP TSC0003687
ctaaaaacaatc

SEQ ID NO: 274817 - DNA, 12 bp, Artificial Sequence
  Oligonucleotide primer for the detection of SNP TSC0003687
agtgtaggttta

SEQ ID NO: 274818 - DNA, 12 bp, Artificial Sequence
  Oligonucleotide primer for the detection of SNP TSC0003688
cccttcccaccc

SEQ ID NO: 274819 - DNA, 12 bp, Artificial Sequence
  Oligonukleotid-Primer
ttagaaatatag

SEQ ID NO: 274820 - DNA, 12 bp, Artificial Sequence
  Oligonucleotide primer for the detection of SNP TSC0003690
taataatatatt

SEQ ID NO: 274821 - DNA, 12 bp, Artificial Sequence
  Oligonucleotide primer for the detection of SNP TSC0003690
tgtgagtagtaa

SEQ ID NO: 274822 - DNA, 12 bp, Artificial Sequence
  Oligonucleotide primer for the detection of SNP TSC0003691
tcttaaataaaa

SEQ ID NO: 274823 - DNA, 12 bp, Artificial Sequence
  Oligonukleotid-Primer
attagggattgt

SEQ ID NO: 274824 - DNA, 12 bp, Artificial Sequence
  Oligonucleotide primer for the detection of SNP TSC0003691
accaaaaattac

SEQ ID NO: 274825 - DNA, 12 bp, Artificial Sequence
  Oligonucleotide primer for the detection of SNP TSC0003691
ttttagatggag

SEQ ID NO: 274826 - DNA, 12 bp, Artificial Sequence
  Oligonucleotide primer for the detection of SNP TSC0003692
tccaataattta

SEQ ID NO: 274827 - DNA, 12 bp, Artificial Sequence
  Oligonucleotide primer for the detection of SNP TSC0003692
tttagtgatttg

SEQ ID NO: 274828 - DNA, 12 bp, Artificial Sequence
  Oligonucleotide primer for the detection of SNP TSC0003693
ttaacctctaaa

SEQ ID NO: 274829 - DNA, 12 bp, Artificial Sequence
  Oligonucleotide primer for the detection of SNP TSC0003693
attgagtgagat

SEQ ID NO: 274830 - DNA, 12 bp, Artificial Sequence
  Oligonucleotide primer for the detection of SNP TSC0003693
actaaataaaat

SEQ ID NO: 274831 - DNA, 12 bp, Artificial Sequence
  Oligonucleotide primer for the detection of SNP TSC0003693
ttggtttttggg

SEQ ID NO: 274832 - DNA, 12 bp, Artificial Sequence
  Oligonucleotide primer for the detection of SNP TSC0003694
aactaattacca

SEQ ID NO: 274833 - DNA, 12 bp, Artificial Sequence
  Oligonucleotide primer for the detection of SNP TSC0003694
gttttttatttg

SEQ ID NO: 274834 - DNA, 12 bp, Artificial Sequence
  Oligonucleotide primer for the detection of SNP TSC0003694
tccctatctaaa

SEQ ID NO: 274835 - DNA, 12 bp, Artificial Sequence
  Oligonucleotide primer for the detection of SNP TSC0003694
ttggttattatt

SEQ ID NO: 274836 - DNA, 12 bp, Artificial Sequence
  Oligonucleotide primer for the detection of SNP TSC0003695
tacaatattcca

SEQ ID NO: 274837 - DNA, 12 bp, Artificial Sequence
  Oligonucleotide primer for the detection of SNP TSC0003695
ttttatgataag

SEQ ID NO: 274838 - DNA, 12 bp, Artificial Sequence
  Oligonucleotide primer for the detection of SNP TSC0003695
ttccataataaa

SEQ ID NO: 274839 - DNA, 12 bp, Artificial Sequence
  Oligonucleotide primer for the detection of SNP TSC0003695
gtaatattttat

SEQ ID NO: 274840 - DNA, 12 bp, Artificial Sequence
  Oligonucleotide primer for the detection of SNP TSC0003696
aataaaaaaata

SEQ ID NO: 274841-274842 - skipped (2 entries)

SEQ ID NO: 274843 - DNA, 12 bp, Artificial Sequence
  Oligonucleotide primer for the detection of SNP TSC0003696
gagtagaagaat

SEQ ID NO: 274844 - DNA, 12 bp, Artificial Sequence
  Oligonucleotide primer for the detection of SNP TSC0003698
aatccacaaaac

SEQ ID NO: 274845 - DNA, 12 bp, Artificial Sequence
  Oligonucleotide primer for the detection of SNP TSC0003698
aatccacgaaac

SEQ ID NO: 274846 - DNA, 12 bp, Artificial Sequence
  Oligonucleotide primer for the detection of SNP TSC0003698
tagtgtagtaag

SEQ ID NO: 274847 - DNA, 12 bp, Artificial Sequence
  Oligonucleotide primer for the detection of SNP TSC0003699
ttaggggtttta

SEQ ID NO: 274848 - DNA, 12 bp, Artificial Sequence
  Oligonucleotide primer for the detection of SNP TSC0003699
ccaaaaatttta

SEQ ID NO: 274849 - DNA, 12 bp, Artificial Sequence
  Oligonucleotide primer for the detection of SNP TSC0003700
aacctcccgaaa

SEQ ID NO: 274850 - DNA, 12 bp, Artificial Sequence
  Oligonucleotide primer for the detection of SNP TSC0003700
gacctcccgaaa

SEQ ID NO: 274851 - DNA, 12 bp, Artificial Sequence
  Oligonucleotide primer for the detection of SNP TSC0003700
tttatttggtgt

SEQ ID NO: 274852 - DNA, 12 bp, Artificial Sequence
  Oligonucleotide primer for the detection of SNP TSC0003700
tttattcggtgt

SEQ ID NO: 274853 - DNA, 12 bp, Artificial Sequence
  Oligonucleotide primer for the detection of SNP TSC0003700
cccactcaatat

SEQ ID NO: 274854 - DNA, 12 bp, Artificial Sequence
  Oligonucleotide primer for the detection of SNP TSC0003700
cccactcgatat

SEQ ID NO: 274855 - DNA, 12 bp, Artificial Sequence
  Oligonucleotide primer for the detection of SNP TSC0003700
gattttttgaaa

SEQ ID NO: 274856 - DNA, 12 bp, Artificial Sequence
  Oligonucleotide primer for the detection of SNP TSC0003700
gatttttcgaaa

SEQ ID NO: 274857 - DNA, 12 bp, Artificial Sequence
  Oligonucleotide primer for the detection of SNP TSC0003702
ccctaataccct

SEQ ID NO: 274858 - DNA, 12 bp, Artificial Sequence
  Oligonucleotide primer for the detection of SNP TSC0003702
gtgtaggagaga

SEQ ID NO: 274859 - DNA, 12 bp, Artificial Sequence
  Oligonucleotide primer for the detection of SNP TSC0003704
cccaataaaaac

SEQ ID NO: 274860 - DNA, 12 bp, Artificial Sequence
  Oligonucleotide primer for the detection of SNP TSC0003704
tgatattttttt

SEQ ID NO: 274861 - DNA, 12 bp, Artificial Sequence
  Oligonucleotide primer for the detection of SNP TSC0003704
tgatattttttc

SEQ ID NO: 274862 - DNA, 12 bp, Artificial Sequence
  Oligonucleotide primer for the detection of SNP TSC0003704
aacctaacactt

SEQ ID NO: 274863 - DNA, 12 bp, Artificial Sequence
  Oligonucleotide primer for the detection of SNP TSC0003704
tttagtagaaat

SEQ ID NO: 274864 - DNA, 12 bp, Artificial Sequence
  Oligonucleotide primer for the detection of SNP TSC0003706
aattctctttcc

SEQ ID NO: 274865 - DNA, 12 bp, Artificial Sequence
  Oligonucleotide primer for the detection of SNP TSC0003706
gaggtgatatga

SEQ ID NO: 274866 - DNA, 12 bp, Artificial Sequence
  Oligonucleotide primer for the detection of SNP TSC0003707
tttatccacttt

SEQ ID NO: 274867 - DNA, 12 bp, Artificial Sequence
  Oligonucleotide primer for the detection of SNP TSC0003707
ttaagggtttag

SEQ ID NO: 274868 - DNA, 12 bp, Artificial Sequence
  Oligonucleotide primer for the detection of SNP TSC0003707
ccaaaaacctaa

SEQ ID NO: 274869 - DNA, 12 bp, Artificial Sequence
  Oligonucleotide primer for the detection of SNP TSC0003707
tttgtttatttt

SEQ ID NO: 274870 - DNA, 12 bp, Artificial Sequence
  Oligonucleotide primer for the detection of SNP TSC0003708
ttcaaaaaaaac

SEQ ID NO: 274871 - DNA, 12 bp, Artificial Sequence
  Oligonucleotide primer for the detection of SNP TSC0003708
attagataatag

SEQ ID NO: 274872 - DNA, 12 bp, Artificial Sequence
  Oligonucleotide primer for the detection of SNP TSC0003709
tacactaaacca

SEQ ID NO: 274873 - DNA, 12 bp, Artificial Sequence
  Oligonucleotide primer for the detection of SNP TSC0003709
ttgagggtaatt

SEQ ID NO: 274874 - DNA, 12 bp, Artificial Sequence
  Oligonucleotide primer for the detection of SNP TSC0003709
tcgagggtaatt

SEQ ID NO: 274875 - DNA, 12 bp, Artificial Sequence
  Oligonucleotide primer for the detection of SNP TSC0003709
ccaaaaataacc

SEQ ID NO: 274876 - DNA, 12 bp, Artificial Sequence
  Oligonucleotide primer for the detection of SNP TSC0003709
ccgaaaataacc

SEQ ID NO: 274877 - DNA, 12 bp, Artificial Sequence
  Oligonucleotide primer for the detection of SNP TSC0003709
tatattgggtta

SEQ ID NO: 274878 - DNA, 12 bp, Artificial Sequence
  Oligonucleotide primer for the detection of SNP TSC0003710
atataaatcatc

SEQ ID NO: 274879 - DNA, 12 bp, Artificial Sequence
  Oligonucleotide primer for the detection of SNP TSC0003710
attttaataaga

SEQ ID NO: 274880 - DNA, 12 bp, Artificial Sequence
  Oligonucleotide primer for the detection of SNP TSC0003710
attttaacaaaa

SEQ ID NO: 274881 - DNA, 12 bp, Artificial Sequence
  Oligonucleotide primer for the detection of SNP TSC0003710
atatgaattatt

SEQ ID NO: 274882 - DNA, 12 bp, Artificial Sequence
  Oligonucleotide primer for the detection of SNP TSC0003712
tataaacaaatt

SEQ ID NO: 274883 - DNA, 12 bp, Artificial Sequence
  Oligonucleotide primer for the detection of SNP TSC0003712
tttttcgtttta

SEQ ID NO: 274884 - DNA, 12 bp, Artificial Sequence
  Oligonucleotide primer for the detection of SNP TSC0003713
ataatccctcac

SEQ ID NO: 274885 - DNA, 12 bp, Artificial Sequence
  Oligonucleotide primer for the detection of SNP TSC0003713
tattgggttttg

SEQ ID NO: 274886 - DNA, 12 bp, Artificial Sequence
  Oligonucleotide primer for the detection of SNP TSC0003713
tactaaatccta

SEQ ID NO: 274887 - DNA, 12 bp, Artificial Sequence
  Oligonucleotide primer for the detection of SNP TSC0003713
gtaattttttat

SEQ ID NO: 274888 - DNA, 12 bp, Artificial Sequence
  Oligonucleotide primer for the detection of SNP TSC0003714
gtggatttttaa

SEQ ID NO: 274889 - DNA, 12 bp, Artificial Sequence
  Oligonucleotide primer for the detection of SNP TSC0003716
ctcaaaataaat

SEQ ID NO: 274890 - DNA, 12 bp, Artificial Sequence
  Oligonucleotide primer for the detection of SNP TSC0003716
ggatgaagttta

SEQ ID NO: 274891 - DNA, 12 bp, Artificial Sequence
  Oligonucleotide primer for the detection of SNP TSC0003717
taaaaaacaact

SEQ ID NO: 274892 - DNA, 12 bp, Artificial Sequence
  Oligonucleotide primer for the detection of SNP TSC0003717
aggtttatttta

SEQ ID NO: 274893 - DNA, 12 bp, Artificial Sequence
  Oligonucleotide primer for the detection of SNP TSC0003719
atttaatcaaaa

SEQ ID NO: 274894 - DNA, 12 bp, Artificial Sequence
  Oligonucleotide primer for the detection of SNP TSC0003719
ttgggataagtt

SEQ ID NO: 274895 - DNA, 12 bp, Artificial Sequence
  Oligonucleotide primer for the detection of SNP TSC0003719
taaaacaaatca

SEQ ID NO: 274896 - DNA, 12 bp, Artificial Sequence
  Oligonucleotide primer for the detection of SNP TSC0003719
gttaggattttt

SEQ ID NO: 274897 - DNA, 12 bp, Artificial Sequence
  Oligonucleotide primer for the detection of SNP TSC0003720
ctacatcctaac

SEQ ID NO: 274898 - DNA, 12 bp, Artificial Sequence
  Oligonucleotide primer for the detection of SNP TSC0003720
gagattttttta

SEQ ID NO: 274899 - DNA, 12 bp, Artificial Sequence
  Oligonucleotide primer for the detection of SNP TSC0003720
aaaaccctccca

SEQ ID NO: 274900 - DNA, 12 bp, Artificial Sequence
  Oligonucleotide primer for the detection of SNP TSC0003720
ttgtattttgat

SEQ ID NO: 274901 - DNA, 12 bp, Artificial Sequence
  Oligonucleotide primer for the detection of SNP TSC0003721
tataaagttata

SEQ ID NO: 274902 - DNA, 12 bp, Artificial Sequence
  Oligonucleotide primer for the detection of SNP TSC0003721
attaaaagaata

SEQ ID NO: 274903 - DNA, 12 bp, Artificial Sequence
  Oligonucleotide primer for the detection of SNP TSC0003723
aattaaaacttt

SEQ ID NO: 274904 - DNA, 12 bp, Artificial Sequence
  Oligonucleotide primer for the detection of SNP TSC0003723
agattgagaatg

SEQ ID NO: 274905 - DNA, 12 bp, Artificial Sequence
  Oligonucleotide primer for the detection of SNP TSC0003724
tttttaatactc

SEQ ID NO: 274906 - DNA, 12 bp, Artificial Sequence
  Oligonucleotide primer for the detection of SNP TSC0003724
ttgagtttttta

SEQ ID NO: 274907 - DNA, 12 bp, Artificial Sequence
  Oligonucleotide primer for the detection of SNP TSC0003725
ccttttactcta

SEQ ID NO: 274908 - DNA, 12 bp, Artificial Sequence
  Oligonucleotide primer for the detection of SNP TSC0003725
ttttatgtggtt

SEQ ID NO: 274909 - DNA, 12 bp, Artificial Sequence
  Oligonucleotide primer for the detection of SNP TSC0003725
ttttacgtggtt

SEQ ID NO: 274910 - DNA, 12 bp, Artificial Sequence
  Oligonucleotide primer for the detection of SNP TSC0003725
atctctacataa

SEQ ID NO: 274911 - DNA, 12 bp, Artificial Sequence
  Oligonucleotide primer for the detection of SNP TSC0003725
atctctacgtaa

SEQ ID NO: 274912 - DNA, 12 bp, Artificial Sequence
  Oligonucleotide primer for the detection of SNP TSC0003725
ttttttgttttg

SEQ ID NO: 274913 - DNA, 12 bp, Artificial Sequence
  Oligonucleotide primer for the detection of SNP TSC0003727
aaatcctcttcc

SEQ ID NO: 274914 - DNA, 12 bp, Artificial Sequence
  Oligonucleotide primer for the detection of SNP TSC0003727
tatttagatttg

SEQ ID NO: 274915 - DNA, 12 bp, Artificial Sequence
  Oligonucleotide primer for the detection of SNP TSC0003727
tacctaaatcta

SEQ ID NO: 274916 - DNA, 12 bp, Artificial Sequence
  Oligonucleotide primer for the detection of SNP TSC0003727
gaattttttttt

SEQ ID NO: 274917 - DNA, 12 bp, Artificial Sequence
  Oligonucleotide primer for the detection of SNP TSC0003728
acgtaaaccacc

SEQ ID NO: 274918 - DNA, 12 bp, Artificial Sequence
  Oligonucleotide primer for the detection of SNP TSC0003728
tattaggttagg

SEQ ID NO: 274919 - DNA, 12 bp, Artificial Sequence
  Oligonucleotide primer for the detection of SNP TSC0003728
taccaaaccaaa

SEQ ID NO: 274920 - DNA, 12 bp, Artificial Sequence
  Oligonucleotide primer for the detection of SNP TSC0003728
gtgtgagttatt

SEQ ID NO: 274921 - DNA, 12 bp, Artificial Sequence
  Oligonucleotide primer for the detection of SNP TSC0003728
gcgtgagttatt

SEQ ID NO: 274922 - DNA, 12 bp, Artificial Sequence
  Oligonucleotide primer for the detection of SNP TSC0003728
gtgtgagttatc

SEQ ID NO: 274923 - DNA, 12 bp, Artificial Sequence
  Oligonucleotide primer for the detection of SNP TSC0003728
gcgtgagttatc

SEQ ID NO: 274924 - DNA, 12 bp, Artificial Sequence
  Oligonucleotide primer for the detection of SNP TSC0003729
tataaaccacta

SEQ ID NO: 274925 - DNA, 12 bp, Artificial Sequence
  Oligonucleotide primer for the detection of SNP TSC0003729
ataaatttggtt

SEQ ID NO: 274926 - DNA, 12 bp, Artificial Sequence
  Oligonucleotide primer for the detection of SNP TSC0003729
ataaacctaact

SEQ ID NO: 274927 - DNA, 12 bp, Artificial Sequence
  Oligonucleotide primer for the detection of SNP TSC0003732
tccaaaattcac

SEQ ID NO: 274928 - DNA, 12 bp, Artificial Sequence
  Oligonucleotide primer for the detection of SNP TSC0003732
tccgaaattcac

SEQ ID NO: 274929 - DNA, 12 bp, Artificial Sequence
  Oligonucleotide primer for the detection of SNP TSC0003732
gtaggagaatgg

SEQ ID NO: 274930 - DNA, 12 bp, Artificial Sequence
  Oligonucleotide primer for the detection of SNP TSC0003733
acccccaataaa

SEQ ID NO: 274931 - DNA, 12 bp, Artificial Sequence
  Oligonucleotide primer for the detection of SNP TSC0003733
tggggtataggt

SEQ ID NO: 274932 - DNA, 12 bp, Artificial Sequence
  Oligonucleotide primer for the detection of SNP TSC0003733
taaaacataaat

SEQ ID NO: 274933 - DNA, 12 bp, Artificial Sequence
  Oligonucleotide primer for the detection of SNP TSC0003733
gaagtttttagt

SEQ ID NO: 274934 - DNA, 12 bp, Artificial Sequence
  Oligonucleotide primer for the detection of SNP TSC0003734
ctactaacttaa

SEQ ID NO: 274935 - DNA, 12 bp, Artificial Sequence
  Oligonucleotide primer for the detection of SNP TSC0003734
taattttgttaa

SEQ ID NO: 274936 - DNA, 12 bp, Artificial Sequence
  Oligonucleotide primer for the detection of SNP TSC0003734
taatttcgttaa

SEQ ID NO: 274937 - DNA, 12 bp, Artificial Sequence
  Oligonucleotide primer for the detection of SNP TSC0003734
caactccaccaa

SEQ ID NO: 274938 - DNA, 12 bp, Artificial Sequence
  Oligonucleotide primer for the detection of SNP TSC0003734
caactccgccaa

SEQ ID NO: 274939 - DNA, 12 bp, Artificial Sequence
  Oligonucleotide primer for the detection of SNP TSC0003734
gttggtttagtt

SEQ ID NO: 274940 - DNA, 12 bp, Artificial Sequence
  Oligonucleotide primer for the detection of SNP TSC0003734
gttggtttagtc

SEQ ID NO: 274941 - DNA, 12 bp, Artificial Sequence
  Oligonucleotide primer for the detection of SNP TSC0003735
ttaacgaaaaat

SEQ ID NO: 274942 - DNA, 12 bp, Artificial Sequence
  Oligonucleotide primer for the detection of SNP TSC0003735
gggagaggttta

SEQ ID NO: 274943 - DNA, 12 bp, Artificial Sequence
  Oligonucleotide primer for the detection of SNP TSC0003735
aaaaaatccaaa

SEQ ID NO: 274944 - DNA, 12 bp, Artificial Sequence
  Oligonucleotide primer for the detection of SNP TSC0003735
ttggtgaggagt

SEQ ID NO: 274945 - DNA, 12 bp, Artificial Sequence
  Oligonucleotide primer for the detection of SNP TSC0003735
ttggcgaggagt

SEQ ID NO: 274946 - DNA, 12 bp, Artificial Sequence
  Oligonucleotide primer for the detection of SNP TSC0003736
tacaacctccac

SEQ ID NO: 274947 - DNA, 12 bp, Artificial Sequence
  Oligonucleotide primer for the detection of SNP TSC0003736
tacaacctccgc

SEQ ID NO: 274948 - DNA, 12 bp, Artificial Sequence
  Oligonucleotide primer for the detection of SNP TSC0003736
ttgaattaggga

SEQ ID NO: 274949 - DNA, 12 bp, Artificial Sequence
  Oligonucleotide primer for the detection of SNP TSC0003737
ataaaaaataac

SEQ ID NO: 274950 - DNA, 12 bp, Artificial Sequence
  Oligonucleotide primer for the detection of SNP TSC0003737
gtttttattagg

SEQ ID NO: 274951 - DNA, 12 bp, Artificial Sequence
  Oligonucleotide primer for the detection of SNP TSC0003738
ttataataatta

SEQ ID NO: 274952 - DNA, 12 bp, Artificial Sequence
  Oligonucleotide primer for the detection of SNP TSC0003738
ttgtggtgattg

SEQ ID NO: 274953 - DNA, 12 bp, Artificial Sequence
  Oligonucleotide primer for the detection of SNP TSC0003739
attttataatct

SEQ ID NO: 274954 - DNA, 12 bp, Artificial Sequence
  Oligonucleotide primer for the detection of SNP TSC0003741
aatttaaaaaaa

SEQ ID NO: 274955 - DNA, 12 bp, Artificial Sequence
  Oligonucleotide primer for the detection of SNP TSC0003741
gtatatggttgg

SEQ ID NO: 274956 - DNA, 12 bp, Artificial Sequence
  Oligonucleotide primer for the detection of SNP TSC0003741
gtatatggtcgg

SEQ ID NO: 274957 - DNA, 12 bp, Artificial Sequence
  Oligonucleotide primer for the detection of SNP TSC0003741
atatataaccaa

SEQ ID NO: 274958 - DNA, 12 bp, Artificial Sequence
  Oligonucleotide primer for the detection of SNP TSC0003741
atatataaccga

SEQ ID NO: 274959 - DNA, 12 bp, Artificial Sequence
  Oligonucleotide primer for the detection of SNP TSC0003741
tagtttgaggag

SEQ ID NO: 274960 - DNA, 12 bp, Artificial Sequence
  Oligonucleotide primer for the detection of SNP TSC0003742
ctaacatctaac

SEQ ID NO: 274961 - DNA, 12 bp, Artificial Sequence
  Oligonucleotide primer for the detection of SNP TSC0003742
atataatgttga

SEQ ID NO: 274962 - DNA, 12 bp, Artificial Sequence
  Oligonucleotide primer for the detection of SNP TSC0003742
atataacgttga

SEQ ID NO: 274963 - DNA, 12 bp, Artificial Sequence
  Oligonucleotide primer for the detection of SNP TSC0003742
acacaacattaa

SEQ ID NO: 274964 - DNA, 12 bp, Artificial Sequence
  Oligonucleotide primer for the detection of SNP TSC0003742
acacaacgttaa

SEQ ID NO: 274965 - DNA, 12 bp, Artificial Sequence
  Oligonucleotide primer for the detection of SNP TSC0003742
ttggtatttggt

SEQ ID NO: 274966 - DNA, 12 bp, Artificial Sequence
  Oligonucleotide primer for the detection of SNP TSC0003746
acatatctacct

SEQ ID NO: 274967 - DNA, 12 bp, Artificial Sequence
  Oligonucleotide primer for the detection of SNP TSC0003746
aagttatttaaa

SEQ ID NO: 274968 - DNA, 12 bp, Artificial Sequence
  Oligonucleotide primer for the detection of SNP TSC0003747
ttatttttttaa

SEQ ID NO: 274969 - DNA, 12 bp, Artificial Sequence
  Oligonucleotide primer for the detection of SNP TSC0003747
atgtgtattggt

SEQ ID NO: 274970 - DNA, 12 bp, Artificial Sequence
  Oligonucleotide primer for the detection of SNP TSC0003747
atatatattaat

SEQ ID NO: 274971 - DNA, 12 bp, Artificial Sequence
  Oligonucleotide primer for the detection of SNP TSC0003748
cacaaacctact

SEQ ID NO: 274972 - DNA, 12 bp, Artificial Sequence
  Oligonucleotide primer for the detection of SNP TSC0003748
cacgaacctact

SEQ ID NO: 274973 - DNA, 12 bp, Artificial Sequence
  Oligonucleotide primer for the detection of SNP TSC0003748
cgcaaacctact

SEQ ID NO: 274974 - DNA, 12 bp, Artificial Sequence
  Oligonucleotide primer for the detection of SNP TSC0003748
cgcgaacctact

SEQ ID NO: 274975 - DNA, 12 bp, Artificial Sequence
  Oligonucleotide primer for the detection of SNP TSC0003748
atgtgtgagaga

SEQ ID NO: 274976 - DNA, 12 bp, Artificial Sequence
  Oligonucleotide primer for the detection of SNP TSC0003748
acgtgtgagaga

SEQ ID NO: 274977 - DNA, 12 bp, Artificial Sequence
  Oligonucleotide primer for the detection of SNP TSC0003748
atgcgtgagaga

SEQ ID NO: 274978 - DNA, 12 bp, Artificial Sequence
  Oligonucleotide primer for the detection of SNP TSC0003748
atgtgcgagaga

SEQ ID NO: 274979 - DNA, 12 bp, Artificial Sequence
  Oligonucleotide primer for the detection of SNP TSC0003748
acgcgtgagaga

SEQ ID NO: 274980 - DNA, 12 bp, Artificial Sequence
  Oligonucleotide primer for the detection of SNP TSC0003748
acgtgcgagaga

SEQ ID NO: 274981 - DNA, 12 bp, Artificial Sequence
  Oligonucleotide primer for the detection of SNP TSC0003748
atgcgcgagaga

SEQ ID NO: 274982 - DNA, 12 bp, Artificial Sequence
  Oligonucleotide primer for the detection of SNP TSC0003748
acgcgcgagaga

SEQ ID NO: 274983 - DNA, 12 bp, Artificial Sequence
  Oligonucleotide primer for the detection of SNP TSC0003750
accataaaaaaa

SEQ ID NO: 274984 - DNA, 12 bp, Artificial Sequence
  Oligonucleotide primer for the detection of SNP TSC0003750
accgtaaaaaaa

SEQ ID NO: 274985 - DNA, 12 bp, Artificial Sequence
  Oligonucleotide primer for the detection of SNP TSC0003750
tttttgttttat

SEQ ID NO: 274986 - DNA, 12 bp, Artificial Sequence
  Oligonucleotide primer for the detection of SNP TSC0003750
cctctacttcat

SEQ ID NO: 274987 - DNA, 12 bp, Artificial Sequence
  Oligonucleotide primer for the detection of SNP TSC0003750
gttgtggaagaa

SEQ ID NO: 274988 - DNA, 12 bp, Artificial Sequence
  Oligonucleotide primer for the detection of SNP TSC0003750
gtcgtggaagaa

SEQ ID NO: 274989 - DNA, 12 bp, Artificial Sequence
  Oligonucleotide primer for the detection of SNP TSC0003752
aaaaaaattccc

SEQ ID NO: 274990 - DNA, 12 bp, Artificial Sequence
  Oligonucleotide primer for the detection of SNP TSC0003752
ttagtttagtga

SEQ ID NO: 274991 - DNA, 12 bp, Artificial Sequence
  Oligonucleotide primer for the detection of SNP TSC0003754
tcaaaattacat

SEQ ID NO: 274992 - DNA, 12 bp, Artificial Sequence
  Oligonucleotide primer for the detection of SNP TSC0003754
ttaaaatatgta

SEQ ID NO: 274993 - DNA, 12 bp, Artificial Sequence
  Oligonucleotide primer for the detection of SNP TSC0003756
aaaattcctaaa

SEQ ID NO: 274994 - DNA, 12 bp, Artificial Sequence
  Oligonucleotide primer for the detection of SNP TSC0003756
attataaaattt

SEQ ID NO: 274995 - DNA, 12 bp, Artificial Sequence
  Oligonucleotide primer for the detection of SNP TSC0003756
attataaaatct

SEQ ID NO: 274996 - DNA, 12 bp, Artificial Sequence
  Oligonucleotide primer for the detection of SNP TSC0003756
gggatttttaaa

SEQ ID NO: 274997 - DNA, 12 bp, Artificial Sequence
  Oligonucleotide primer for the detection of SNP TSC0003758
aaataaaacatt

SEQ ID NO: 274998 - DNA, 12 bp, Artificial Sequence
  Oligonucleotide primer for the detection of SNP TSC0003758
ttttgtttgata

SEQ ID NO: 274999 - DNA, 12 bp, Artificial Sequence
  Oligonucleotide primer for the detection of SNP TSC0003758
ttttgttcgata

SEQ ID NO: 275000 - DNA, 12 bp, Artificial Sequence
  Oligonucleotide primer for the detection of SNP TSC0003761
taaaaatactca

SEQ ID NO: 275001 - DNA, 12 bp, Artificial Sequence
  Oligonucleotide primer for the detection of SNP TSC0003761
taaaaatactcg

SEQ ID NO: 275002 - DNA, 12 bp, Artificial Sequence
  Oligonucleotide primer for the detection of SNP TSC0003761
gatatttttaat

SEQ ID NO: 275003 - DNA, 12 bp, Artificial Sequence
  Oligonucleotide primer for the detection of SNP TSC0003761
aatattcctaac

SEQ ID NO: 275004 - DNA, 12 bp, Artificial Sequence
  Oligonucleotide primer for the detection of SNP TSC0003761
tgagggtgtttg

SEQ ID NO: 275005 - DNA, 12 bp, Artificial Sequence
  Oligonucleotide primer for the detection of SNP TSC0003761
tgagggtgttcg

SEQ ID NO: 275006 - DNA, 12 bp, Artificial Sequence
  Oligonucleotide primer for the detection of SNP TSC0003762
ctcttcaactat

SEQ ID NO: 275007 - DNA, 12 bp, Artificial Sequence
  Oligonucleotide primer for the detection of SNP TSC0003762
aatattgtagga

SEQ ID NO: 275008 - DNA, 12 bp, Artificial Sequence
  Oligonucleotide primer for the detection of SNP TSC0003763
ttaaataaatac

SEQ ID NO: 275009 - DNA, 12 bp, Artificial Sequence
  Oligonucleotide primer for the detection of SNP TSC0003763
gggtttttttaa

SEQ ID NO: 275010 - DNA, 12 bp, Artificial Sequence
  Oligonucleotide primer for the detection of SNP TSC0003764
tatcatctaata

SEQ ID NO: 275011 - DNA, 12 bp, Artificial Sequence
  Oligonucleotide primer for the detection of SNP TSC0003764
tagttagttagt

SEQ ID NO: 275012 - DNA, 12 bp, Artificial Sequence
  Oligonucleotide primer for the detection of SNP TSC0003764
caatcaatcaac

SEQ ID NO: 275013 - DNA, 12 bp, Artificial Sequence
  Oligonucleotide primer for the detection of SNP TSC0003764
ttattatttaat

SEQ ID NO: 275014 - DNA, 12 bp, Artificial Sequence
  Oligonucleotide primer for the detection of SNP TSC0003765
tatcaactctac

SEQ ID NO: 275015 - DNA, 12 bp, Artificial Sequence
  Oligonucleotide primer for the detection of SNP TSC0003765
tttttaaattta

SEQ ID NO: 275016 - DNA, 12 bp, Artificial Sequence
  Oligonucleotide primer for the detection of SNP TSC0003766
taaccctcccca

SEQ ID NO: 275017 - DNA, 12 bp, Artificial Sequence
  Oligonucleotide primer for the detection of SNP TSC0003766
tggatggtttgt

SEQ ID NO: 275018 - DNA, 12 bp, Artificial Sequence
  Oligonucleotide primer for the detection of SNP TSC0003766
cggatggtttgt

SEQ ID NO: 275019 - DNA, 12 bp, Artificial Sequence
  Oligonucleotide primer for the detection of SNP TSC0003766
tggatggttcgt

SEQ ID NO: 275020 - DNA, 12 bp, Artificial Sequence
  Oligonucleotide primer for the detection of SNP TSC0003766
tggatggtttgc

SEQ ID NO: 275021 - DNA, 12 bp, Artificial Sequence
  Oligonukleotid-Primer
cggatggttcgt

SEQ ID NO: 275022 - DNA, 12 bp, Artificial Sequence
  Oligonucleotide primer for the detection of SNP TSC0003766
cggatggtttgc

SEQ ID NO: 275023 - DNA, 12 bp, Artificial Sequence
  Oligonucleotide primer for the detection of SNP TSC0003766
tggatggttcgc

SEQ ID NO: 275024 - DNA, 12 bp, Artificial Sequence
  Oligonucleotide primer for the detection of SNP TSC0003766
cggatggttcgc

SEQ ID NO: 275025 - DNA, 12 bp, Artificial Sequence
  Oligonucleotide primer for the detection of SNP TSC0003766
aataacccacaa

SEQ ID NO: 275026 - DNA, 12 bp, Artificial Sequence
  Oligonucleotide primer for the detection of SNP TSC0003766
aataacccacga

SEQ ID NO: 275027 - DNA, 12 bp, Artificial Sequence
  Oligonucleotide primer for the detection of SNP TSC0003766
aataacccgcaa

SEQ ID NO: 275028 - DNA, 12 bp, Artificial Sequence
  Oligonucleotide primer for the detection of SNP TSC0003766
aataacccgcga

SEQ ID NO: 275029 - DNA, 12 bp, Artificial Sequence
  Oligonucleotide primer for the detection of SNP TSC0003766
ttgatttttttt

SEQ ID NO: 275030 - DNA, 12 bp, Artificial Sequence
  Oligonucleotide primer for the detection of SNP TSC0003768
tcaaaataaaat

SEQ ID NO: 275031 - DNA, 12 bp, Artificial Sequence
  Oligonucleotide primer for the detection of SNP TSC0003768
atagaaatttaa

SEQ ID NO: 275032 - DNA, 12 bp, Artificial Sequence
  Oligonucleotide primer for the detection of SNP TSC0003769
cttctaaaccca

SEQ ID NO: 275033 - DNA, 12 bp, Artificial Sequence
  Oligonucleotide primer for the detection of SNP TSC0003769
cttctaaacccg

SEQ ID NO: 275034 - DNA, 12 bp, Artificial Sequence
  Oligonucleotide primer for the detection of SNP TSC0003769
tttatgtttgtt

SEQ ID NO: 275035 - DNA, 12 bp, Artificial Sequence
  Oligonucleotide primer for the detection of SNP TSC0003769
tttacgtttgtt

SEQ ID NO: 275036 - DNA, 12 bp, Artificial Sequence
  Oligonucleotide primer for the detection of SNP TSC0003769
tttatgttcgtt

SEQ ID NO: 275037 - DNA, 12 bp, Artificial Sequence
  Oligonucleotide primer for the detection of SNP TSC0003769
tttacgttcgtt

SEQ ID NO: 275038 - DNA, 12 bp, Artificial Sequence
  Oligonucleotide primer for the detection of SNP TSC0003769
tttatgtttgtc

SEQ ID NO: 275039 - DNA, 12 bp, Artificial Sequence
  Oligonucleotide primer for the detection of SNP TSC0003769
tttacgtttgtc

SEQ ID NO: 275040 - DNA, 12 bp, Artificial Sequence
  Oligonucleotide primer for the detection of SNP TSC0003769
tttatgttcgtc

SEQ ID NO: 275041 - DNA, 12 bp, Artificial Sequence
  Oligonucleotide primer for the detection of SNP TSC0003769
tttacgttcgtc

SEQ ID NO: 275042 - DNA, 12 bp, Artificial Sequence
  Oligonucleotide primer for the detection of SNP TSC0003769
accccacaccca

SEQ ID NO: 275043 - DNA, 12 bp, Artificial Sequence
  Oligonucleotide primer for the detection of SNP TSC0003769
accccacacccg

SEQ ID NO: 275044 - DNA, 12 bp, Artificial Sequence
  Oligonucleotide primer for the detection of SNP TSC0003769
accccacgccca

SEQ ID NO: 275045 - DNA, 12 bp, Artificial Sequence
  Oligonucleotide primer for the detection of SNP TSC0003769
accccacgcccg

SEQ ID NO: 275046 - DNA, 12 bp, Artificial Sequence
  Oligonucleotide primer for the detection of SNP TSC0003769
gtttttgggttc

SEQ ID NO: 275047 - DNA, 12 bp, Artificial Sequence
  Oligonucleotide primer for the detection of SNP TSC0003770
caccaaaaataa

SEQ ID NO: 275048 - DNA, 12 bp, Artificial Sequence
  Oligonucleotide primer for the detection of SNP TSC0003770
caccgaaaataa

SEQ ID NO: 275049 - DNA, 12 bp, Artificial Sequence
  Oligonucleotide primer for the detection of SNP TSC0003770
ttgatttttgtt

SEQ ID NO: 275050 - DNA, 12 bp, Artificial Sequence
  Oligonucleotide primer for the detection of SNP TSC0003770
tcgatttttgtt

SEQ ID NO: 275051 - DNA, 12 bp, Artificial Sequence
  Oligonucleotide primer for the detection of SNP TSC0003770
ccaatctttact

SEQ ID NO: 275052 - DNA, 12 bp, Artificial Sequence
  Oligonucleotide primer for the detection of SNP TSC0003770
ccgatctttact

SEQ ID NO: 275053 - DNA, 12 bp, Artificial Sequence
  Oligonucleotide primer for the detection of SNP TSC0003770
tattgaagatga

SEQ ID NO: 275054 - DNA, 12 bp, Artificial Sequence
  Oligonucleotide primer for the detection of SNP TSC0003770
tatcgaagatga

SEQ ID NO: 275055 - DNA, 12 bp, Artificial Sequence
  Oligonucleotide primer for the detection of SNP TSC0003771
tttcttctcttc

SEQ ID NO: 275056 - DNA, 12 bp, Artificial Sequence
  Oligonucleotide primer for the detection of SNP TSC0003771
agagaagagaag

SEQ ID NO: 275057 - DNA, 12 bp, Artificial Sequence
  Oligonucleotide primer for the detection of SNP TSC0003772
ccaaaaaaaaca

SEQ ID NO: 275058 - DNA, 12 bp, Artificial Sequence
  Oligonucleotide primer for the detection of SNP TSC0003772
ccaaaaaaaacg

SEQ ID NO: 275059 - DNA, 12 bp, Artificial Sequence
  Oligonucleotide primer for the detection of SNP TSC0003772
tttggagtgttt

SEQ ID NO: 275060 - DNA, 12 bp, Artificial Sequence
  Oligonucleotide primer for the detection of SNP TSC0003772
tttggagcgttt

SEQ ID NO: 275061 - DNA, 12 bp, Artificial Sequence
  Oligonucleotide primer for the detection of SNP TSC0003772
tttggagtgttc

SEQ ID NO: 275062 - DNA, 12 bp, Artificial Sequence
  Oligonucleotide primer for the detection of SNP TSC0003772
tttggagcgttc

SEQ ID NO: 275063 - DNA, 12 bp, Artificial Sequence
  Oligonucleotide primer for the detection of SNP TSC0003772
tttaaaacactc

SEQ ID NO: 275064 - DNA, 12 bp, Artificial Sequence
  Oligonucleotide primer for the detection of SNP TSC0003772
tttaaaacgctc

SEQ ID NO: 275065 - DNA, 12 bp, Artificial Sequence
  Oligonucleotide primer for the detection of SNP TSC0003772
ttaggaagagtg

SEQ ID NO: 275066 - DNA, 12 bp, Artificial Sequence
  Oligonucleotide primer for the detection of SNP TSC0003772
ttaggaagagcg

SEQ ID NO: 275067 - DNA, 12 bp, Artificial Sequence
  Oligonucleotide primer for the detection of SNP TSC0003773
ctctatacattc

SEQ ID NO: 275068 - DNA, 12 bp, Artificial Sequence
  Oligonucleotide primer for the detection of SNP TSC0003773
ataatgagggag

SEQ ID NO: 275069 - DNA, 12 bp, Artificial Sequence
  Oligonucleotide primer for the detection of SNP TSC0003773
ataataaaaaaa

SEQ ID NO: 275070 - DNA, 12 bp, Artificial Sequence
  Oligonucleotide primer for the detection of SNP TSC0003773
ttttatatattt

SEQ ID NO: 275071 - DNA, 12 bp, Artificial Sequence
  Oligonucleotide primer for the detection of SNP TSC0003777
ataaaaaactct

SEQ ID NO: 275072 - DNA, 12 bp, Artificial Sequence
  Oligonucleotide primer for the detection of SNP TSC0003777
agggtttttatt

SEQ ID NO: 275073 - DNA, 12 bp, Artificial Sequence
  Oligonucleotide primer for the detection of SNP TSC0003777
aaatttccacta

SEQ ID NO: 275074 - DNA, 12 bp, Artificial Sequence
  Oligonucleotide primer for the detection of SNP TSC0003777
gtgaggaatttt

SEQ ID NO: 275075 - DNA, 12 bp, Artificial Sequence
  Oligonucleotide primer for the detection of SNP TSC0003778
atctaacaaaac

SEQ ID NO: 275076 - DNA, 12 bp, Artificial Sequence
  Oligonucleotide primer for the detection of SNP TSC0003778
aggttttatgtg

SEQ ID NO: 275077 - DNA, 12 bp, Artificial Sequence
  Oligonucleotide primer for the detection of SNP TSC0003779
catctaacaaaa

SEQ ID NO: 275078 - DNA, 12 bp, Artificial Sequence
  Oligonucleotide primer for the detection of SNP TSC0003779
ggttttatgtga

SEQ ID NO: 275079 - DNA, 12 bp, Artificial Sequence
  Oligonucleotide primer for the detection of SNP TSC0003779
aatcctatataa

SEQ ID NO: 275080 - DNA, 12 bp, Artificial Sequence
  Oligonucleotide primer for the detection of SNP TSC0003779
atttggtaaggt

SEQ ID NO: 275081 - DNA, 12 bp, Artificial Sequence
  Oligonucleotide primer for the detection of SNP TSC0003779
atttggtaaggc

SEQ ID NO: 275082 - DNA, 12 bp, Artificial Sequence
  Oligonucleotide primer for the detection of SNP TSC0003780
aattatactcat

SEQ ID NO: 275083 - DNA, 12 bp, Artificial Sequence
  Oligonucleotide primer for the detection of SNP TSC0003780
gaattttaaaat

SEQ ID NO: 275084 - DNA, 12 bp, Artificial Sequence
  Oligonucleotide primer for the detection of SNP TSC0003780
gttatgtttatt

SEQ ID NO: 275085 - DNA, 12 bp, Artificial Sequence
  Oligonucleotide primer for the detection of SNP TSC0003780
gttatgtttatc

SEQ ID NO: 275086 - DNA, 12 bp, Artificial Sequence
  Oligonucleotide primer for the detection of SNP TSC0003782
tccaaatactaa

SEQ ID NO: 275087 - DNA, 12 bp, Artificial Sequence
  Oligonucleotide primer for the detection of SNP TSC0003782
atgtgtttgtgt

SEQ ID NO: 275088 - DNA, 12 bp, Artificial Sequence
  Oligonucleotide primer for the detection of SNP TSC0003782
tatatctatata

SEQ ID NO: 275089 - DNA, 12 bp, Artificial Sequence
  Oligonucleotide primer for the detection of SNP TSC0003782
tttaggtgttgg

SEQ ID NO: 275090 - DNA, 12 bp, Artificial Sequence
  Oligonucleotide primer for the detection of SNP TSC0003783
ttacatccaacc

SEQ ID NO: 275091 - DNA, 12 bp, Artificial Sequence
  Oligonucleotide primer for the detection of SNP TSC0003783
ttacatccgacc

SEQ ID NO: 275092 - DNA, 12 bp, Artificial Sequence
  Oligonucleotide primer for the detection of SNP TSC0003783
ttacgtccaacc

SEQ ID NO: 275093 - DNA, 12 bp, Artificial Sequence
  Oligonucleotide primer for the detection of SNP TSC0003783
ttacgtccgacc

SEQ ID NO: 275094 - DNA, 12 bp, Artificial Sequence
  Oligonucleotide primer for the detection of SNP TSC0003783
aatataaattgt

SEQ ID NO: 275095 - DNA, 12 bp, Artificial Sequence
  Oligonucleotide primer for the detection of SNP TSC0003783
aacataaactat

SEQ ID NO: 275096 - DNA, 12 bp, Artificial Sequence
  Oligonucleotide primer for the detection of SNP TSC0003783
gtgtttggtttt

SEQ ID NO: 275097 - DNA, 12 bp, Artificial Sequence
  Oligonucleotide primer for the detection of SNP TSC0003783
gcgtttggtttt

SEQ ID NO: 275098 - DNA, 12 bp, Artificial Sequence
  Oligonucleotide primer for the detection of SNP TSC0003783
gtgttcggtttt

SEQ ID NO: 275099 - DNA, 12 bp, Artificial Sequence
  Oligonucleotide primer for the detection of SNP TSC0003783
gcgttcggtttt

SEQ ID NO: 275100 - DNA, 12 bp, Artificial Sequence
  Oligonucleotide primer for the detection of SNP TSC0003784
ctcaaaaaattt

SEQ ID NO: 275101-275102 - skipped (2 entries)

SEQ ID NO: 275103 - DNA, 12 bp, Artificial Sequence
  Oligonucleotide primer for the detection of SNP TSC0003785
ttaaagtggggt

SEQ ID NO: 275104 - DNA, 12 bp, Artificial Sequence
  Oligonucleotide primer for the detection of SNP TSC0003785
ttaaagtggggc

SEQ ID NO: 275105 - DNA, 12 bp, Artificial Sequence
  Oligonucleotide primer for the detection of SNP TSC0003785
ccaaaataaaac

SEQ ID NO: 275106-275107 - skipped (2 entries)

SEQ ID NO: 275108 - DNA, 12 bp, Artificial Sequence
  Oligonucleotide primer for the detection of SNP TSC0003786
tctactctaaat

SEQ ID NO: 275109 - DNA, 12 bp, Artificial Sequence
  Oligonucleotide primer for the detection of SNP TSC0003786
tttaaagtttta

SEQ ID NO: 275110 - DNA, 12 bp, Artificial Sequence
  Oligonucleotide primer for the detection of SNP TSC0003787
cccccatcacaa

SEQ ID NO: 275111 - DNA, 12 bp, Artificial Sequence
  Oligonucleotide primer for the detection of SNP TSC0003787
cccccgtcacaa

SEQ ID NO: 275112 - DNA, 12 bp, Artificial Sequence
  Oligonucleotide primer for the detection of SNP TSC0003787
tgtgatataggt

SEQ ID NO: 275113 - DNA, 12 bp, Artificial Sequence
  Oligonucleotide primer for the detection of SNP TSC0003787
aacataaataaa

SEQ ID NO: 275114 - DNA, 12 bp, Artificial Sequence
  Oligonucleotide primer for the detection of SNP TSC0003787
tatttttgttat

SEQ ID NO: 275115 - DNA, 12 bp, Artificial Sequence
  Oligonucleotide primer for the detection of SNP TSC0003787
tattttcgttat

SEQ ID NO: 275116 - DNA, 12 bp, Artificial Sequence
  Oligonucleotide primer for the detection of SNP TSC0003790
cattaaaaaaca

SEQ ID NO: 275117 - DNA, 12 bp, Artificial Sequence
  Oligonucleotide primer for the detection of SNP TSC0003790
tttttttttagt

SEQ ID NO: 275118 - DNA, 12 bp, Artificial Sequence
  Oligonucleotide primer for the detection of SNP TSC0003790
ctttcttccaac

SEQ ID NO: 275119 - DNA, 12 bp, Artificial Sequence
  Oligonucleotide primer for the detection of SNP TSC0003790
tattaaagaata

SEQ ID NO: 275120 - DNA, 12 bp, Artificial Sequence
  Oligonucleotide primer for the detection of SNP TSC0003791
aaccctatccat

SEQ ID NO: 275121 - DNA, 12 bp, Artificial Sequence
  Oligonucleotide primer for the detection of SNP TSC0003791
aaccctatccgt

SEQ ID NO: 275122 - DNA, 12 bp, Artificial Sequence
  Oligonucleotide primer for the detection of SNP TSC0003791
tatttgagatag

SEQ ID NO: 275123 - DNA, 12 bp, Artificial Sequence
  Oligonucleotide primer for the detection of SNP TSC0003792
ctctctaaaccc

SEQ ID NO: 275124 - DNA, 12 bp, Artificial Sequence
  Oligonucleotide primer for the detection of SNP TSC0003792
agtttggtattt

SEQ ID NO: 275125 - DNA, 12 bp, Artificial Sequence
  Oligonucleotide primer for the detection of SNP TSC0003792
agttcggtattt

SEQ ID NO: 275126 - DNA, 12 bp, Artificial Sequence
  Oligonucleotide primer for the detection of SNP TSC0003792
agtttggtattc

SEQ ID NO: 275127 - DNA, 12 bp, Artificial Sequence
  Oligonukleotid-Primer
agttcggtattc

SEQ ID NO: 275128 - DNA, 12 bp, Artificial Sequence
  Oligonucleotide primer for the detection of SNP TSC0003792
tcaaactcaata

SEQ ID NO: 275129 - DNA, 12 bp, Artificial Sequence
  Oligonucleotide primer for the detection of SNP TSC0003792
tcaaactcgata

SEQ ID NO: 275130 - DNA, 12 bp, Artificial Sequence
  Oligonucleotide primer for the detection of SNP TSC0003792
tcgaactcaata

SEQ ID NO: 275131 - DNA, 12 bp, Artificial Sequence
  Oligonucleotide primer for the detection of SNP TSC0003792
tcgaactcgata

SEQ ID NO: 275132 - DNA, 12 bp, Artificial Sequence
  Oligonucleotide primer for the detection of SNP TSC0003792
ttttttagattt

SEQ ID NO: 275133 - DNA, 12 bp, Artificial Sequence
  Oligonucleotide primer for the detection of SNP TSC0003795
tcaacctcaact

SEQ ID NO: 275134 - DNA, 12 bp, Artificial Sequence
  Oligonucleotide primer for the detection of SNP TSC0003795
aattaagttagg

SEQ ID NO: 275135 - DNA, 12 bp, Artificial Sequence
  Oligonukleotid-Primer
tataaacctcca

SEQ ID NO: 275136 - DNA, 12 bp, Artificial Sequence
  Oligonucleotide primer for the detection of SNP TSC0003796
atatgattagtt

SEQ ID NO: 275137 - DNA, 12 bp, Artificial Sequence
  Oligonucleotide primer for the detection of SNP TSC0003796
atatgattagtc

SEQ ID NO: 275138 - DNA, 12 bp, Artificial Sequence
  Oligonucleotide primer for the detection of SNP TSC0003796
acataatcaacc

SEQ ID NO: 275139 - DNA, 12 bp, Artificial Sequence
  Oligonucleotide primer for the detection of SNP TSC0003796
tgtgagttttta

SEQ ID NO: 275140 - DNA, 12 bp, Artificial Sequence
  Oligonucleotide primer for the detection of SNP TSC0003797
aaacaaatttta

SEQ ID NO: 275141 - DNA, 12 bp, Artificial Sequence
  Oligonucleotide primer for the detection of SNP TSC0003797
aggaggtaagta

SEQ ID NO: 275142 - DNA, 12 bp, Artificial Sequence
  Oligonucleotide primer for the detection of SNP TSC0003797
aaaaaataaaca

SEQ ID NO: 275143 - DNA, 12 bp, Artificial Sequence
  Oligonucleotide primer for the detection of SNP TSC0003797
tagattttattt

SEQ ID NO: 275144 - DNA, 12 bp, Artificial Sequence
  Oligonucleotide primer for the detection of SNP TSC0003798
aacactctaaat

SEQ ID NO: 275145 - DNA, 12 bp, Artificial Sequence
  Oligonucleotide primer for the detection of SNP TSC0003798
ttttttttgttg

SEQ ID NO: 275146 - DNA, 12 bp, Artificial Sequence
  Oligonucleotide primer for the detection of SNP TSC0003798
tttttttcgttg

SEQ ID NO: 275147 - DNA, 12 bp, Artificial Sequence
  Oligonucleotide primer for the detection of SNP TSC0003798
ttttttttgtcg

SEQ ID NO: 275148 - DNA, 12 bp, Artificial Sequence
  Oligonucleotide primer for the detection of SNP TSC0003798
tttttttcgtcg

SEQ ID NO: 275149 - DNA, 12 bp, Artificial Sequence
  Oligonucleotide primer for the detection of SNP TSC0003800
aaaaaattctat

SEQ ID NO: 275150 - DNA, 12 bp, Artificial Sequence
  Oligonucleotide primer for the detection of SNP TSC0003801
aaatttaaaata

SEQ ID NO: 275151 - DNA, 12 bp, Artificial Sequence
  Oligonucleotide primer for the detection of SNP TSC0003801
atgtttgttttt

SEQ ID NO: 275152 - DNA, 12 bp, Artificial Sequence
  Oligonucleotide primer for the detection of SNP TSC0003801
atatctatctct

SEQ ID NO: 275153 - DNA, 12 bp, Artificial Sequence
  Oligonucleotide primer for the detection of SNP TSC0003801
aggtttggaatg

SEQ ID NO: 275154 - DNA, 12 bp, Artificial Sequence
  Oligonucleotide primer for the detection of SNP TSC0003802
cacttacacaca

SEQ ID NO: 275155 - DNA, 12 bp, Artificial Sequence
  Oligonucleotide primer for the detection of SNP TSC0003802
cacttacacacg

SEQ ID NO: 275156 - DNA, 12 bp, Artificial Sequence
  Oligonucleotide primer for the detection of SNP TSC0003802
cacttacacgca

SEQ ID NO: 275157 - DNA, 12 bp, Artificial Sequence
  Oligonucleotide primer for the detection of SNP TSC0003802
cacttacgcaca

SEQ ID NO: 275158 - DNA, 12 bp, Artificial Sequence
  Oligonucleotide primer for the detection of SNP TSC0003802
cacttacacgcg

SEQ ID NO: 275159 - DNA, 12 bp, Artificial Sequence
  Oligonucleotide primer for the detection of SNP TSC0003802
cacttacgcacg

SEQ ID NO: 275160 - DNA, 12 bp, Artificial Sequence
  Oligonucleotide primer for the detection of SNP TSC0003802
cacttacgcgca

SEQ ID NO: 275161 - DNA, 12 bp, Artificial Sequence
  Oligonucleotide primer for the detection of SNP TSC0003802
cacttacgcgcg

SEQ ID NO: 275162 - DNA, 12 bp, Artificial Sequence
  Oligonucleotide primer for the detection of SNP TSC0003802
tatttgtgtgtg

SEQ ID NO: 275163 - DNA, 12 bp, Artificial Sequence
  Oligonucleotide primer for the detection of SNP TSC0003802
tatttgcgtgtg

SEQ ID NO: 275164 - DNA, 12 bp, Artificial Sequence
  Oligonucleotide primer for the detection of SNP TSC0003802
tatttgtgcgtg

SEQ ID NO: 275165 - DNA, 12 bp, Artificial Sequence
  Oligonucleotide primer for the detection of SNP TSC0003802
tatttgtgtgcg

SEQ ID NO: 275166 - DNA, 12 bp, Artificial Sequence
  Oligonucleotide primer for the detection of SNP TSC0003802
tatttgcgcgtg

SEQ ID NO: 275167 - DNA, 12 bp, Artificial Sequence
  Oligonucleotide primer for the detection of SNP TSC0003802
tatttgcgtgcg

SEQ ID NO: 275168 - DNA, 12 bp, Artificial Sequence
  Oligonucleotide primer for the detection of SNP TSC0003802
tatttgtgcgcg

SEQ ID NO: 275169 - DNA, 12 bp, Artificial Sequence
  Oligonucleotide primer for the detection of SNP TSC0003802
tatttgcgcgcg

SEQ ID NO: 275170 - DNA, 12 bp, Artificial Sequence
  Oligonucleotide primer for the detection of SNP TSC0003807
taaaatttattt

SEQ ID NO: 275171 - DNA, 12 bp, Artificial Sequence
  Oligonucleotide primer for the detection of SNP TSC0003807
agtttgtgtatt

SEQ ID NO: 275172 - DNA, 12 bp, Artificial Sequence
  Oligonucleotide primer for the detection of SNP TSC0003807
aatctatacacc

SEQ ID NO: 275173 - DNA, 12 bp, Artificial Sequence
  Oligonucleotide primer for the detection of SNP TSC0003807
tggaatttattt

SEQ ID NO: 275174 - DNA, 12 bp, Artificial Sequence
  Oligonucleotide primer for the detection of SNP TSC0003809
caaaaaccacca

SEQ ID NO: 275175 - DNA, 12 bp, Artificial Sequence
  Oligonucleotide primer for the detection of SNP TSC0003809
caaaaaccaccg

SEQ ID NO: 275176 - DNA, 12 bp, Artificial Sequence
  Oligonucleotide primer for the detection of SNP TSC0003809
cgaaaaccacca

SEQ ID NO: 275177 - DNA, 12 bp, Artificial Sequence
  Oligonucleotide primer for the detection of SNP TSC0003809
cgaaaaccaccg

SEQ ID NO: 275178 - DNA, 12 bp, Artificial Sequence
  Oligonucleotide primer for the detection of SNP TSC0003809
ggagaagtgggt

SEQ ID NO: 275179 - DNA, 12 bp, Artificial Sequence
  Oligonucleotide primer for the detection of SNP TSC0003809
tggagattattg

SEQ ID NO: 275180 - DNA, 12 bp, Artificial Sequence
  Oligonucleotide primer for the detection of SNP TSC0003809
cggagattattg

SEQ ID NO: 275181 - DNA, 12 bp, Artificial Sequence
  Oligonucleotide primer for the detection of SNP TSC0003809
tggagattatcg

SEQ ID NO: 275182 - DNA, 12 bp, Artificial Sequence
  Oligonucleotide primer for the detection of SNP TSC0003809
cggagattatcg

SEQ ID NO: 275183 - DNA, 12 bp, Artificial Sequence
  Oligonucleotide primer for the detection of SNP TSC0003811
caaattactttt

SEQ ID NO: 275184 - DNA, 12 bp, Artificial Sequence
  Oligonucleotide primer for the detection of SNP TSC0003811
aaaattttagat

SEQ ID NO: 275185 - DNA, 12 bp, Artificial Sequence
  Oligonucleotide primer for the detection of SNP TSC0003811
aaaatttcaaat

SEQ ID NO: 275186 - DNA, 12 bp, Artificial Sequence
  Oligonucleotide primer for the detection of SNP TSC0003811
tagattgttttt

SEQ ID NO: 275187 - DNA, 12 bp, Artificial Sequence
  Oligonucleotide primer for the detection of SNP TSC0003815
gtgttttataag

SEQ ID NO: 275188 - DNA, 12 bp, Artificial Sequence
  Oligonucleotide primer for the detection of SNP TSC0003816
actaacatttct

SEQ ID NO: 275189 - DNA, 12 bp, Artificial Sequence
  Oligonucleotide primer for the detection of SNP TSC0003816
gatttattattg

SEQ ID NO: 275190 - DNA, 12 bp, Artificial Sequence
  Oligonucleotide primer for the detection of SNP TSC0003816
gatttattatcg

SEQ ID NO: 275191 - DNA, 12 bp, Artificial Sequence
  Oligonucleotide primer for the detection of SNP TSC0003817
aaataactaaat

SEQ ID NO: 275192 - DNA, 12 bp, Artificial Sequence
  Oligonucleotide primer for the detection of SNP TSC0003817
aggtttatgtga

SEQ ID NO: 275193 - DNA, 12 bp, Artificial Sequence
  Oligonucleotide primer for the detection of SNP TSC0003817
aggtttatgcga

SEQ ID NO: 275194 - DNA, 12 bp, Artificial Sequence
  Oligonucleotide primer for the detection of SNP TSC0003818
ataaaaaaatac

SEQ ID NO: 275195 - DNA, 12 bp, Artificial Sequence
  Oligonucleotide primer for the detection of SNP TSC0003818
gttaagtttatg

SEQ ID NO: 275196 - DNA, 12 bp, Artificial Sequence
  Oligonucleotide primer for the detection of SNP TSC0003819
actaaatttata

SEQ ID NO: 275197 - DNA, 12 bp, Artificial Sequence
  Oligonucleotide primer for the detection of SNP TSC0003819
tttaaatgaaat

SEQ ID NO: 275198 - DNA, 12 bp, Artificial Sequence
  Oligonucleotide primer for the detection of SNP TSC0003819
ttctaaataaaa

SEQ ID NO: 275199 - DNA, 12 bp, Artificial Sequence
  Oligonucleotide primer for the detection of SNP TSC0003819
attgagtttatg

SEQ ID NO: 275200 - DNA, 12 bp, Artificial Sequence
  Oligonucleotide primer for the detection of SNP TSC0003821
attgtgtttttt

SEQ ID NO: 275201 - DNA, 12 bp, Artificial Sequence
  Oligonucleotide primer for the detection of SNP TSC0003821
taataattatac

SEQ ID NO: 275202 - DNA, 12 bp, Artificial Sequence
  Oligonucleotide primer for the detection of SNP TSC0003821
gttgaggaagag

SEQ ID NO: 275203 - DNA, 12 bp, Artificial Sequence
  Oligonucleotide primer for the detection of SNP TSC0003822
tttttttaaatc

SEQ ID NO: 275204 - DNA, 12 bp, Artificial Sequence
  Oligonucleotide primer for the detection of SNP TSC0003823
aaataacataaa

SEQ ID NO: 275205 - DNA, 12 bp, Artificial Sequence
  Oligonucleotide primer for the detection of SNP TSC0003823
agttttgttttt

SEQ ID NO: 275206 - DNA, 12 bp, Artificial Sequence
  Oligonucleotide primer for the detection of SNP TSC0003823
aattttacctcc

SEQ ID NO: 275207 - DNA, 12 bp, Artificial Sequence
  Oligonucleotide primer for the detection of SNP TSC0003823
gaatggtatgaa

SEQ ID NO: 275208 - DNA, 12 bp, Artificial Sequence
  Oligonucleotide primer for the detection of SNP TSC0003824
acaatcttcaac

SEQ ID NO: 275209 - DNA, 12 bp, Artificial Sequence
  Oligonucleotide primer for the detection of SNP TSC0003824
taattttttaag

SEQ ID NO: 275210 - DNA, 12 bp, Artificial Sequence
  Oligonucleotide primer for the detection of SNP TSC0003825
tcctcaccttcc

SEQ ID NO: 275211 - DNA, 12 bp, Artificial Sequence
  Oligonucleotide primer for the detection of SNP TSC0003825
atggaaatggga

SEQ ID NO: 275212 - DNA, 12 bp, Artificial Sequence
  Oligonucleotide primer for the detection of SNP TSC0003825
acggaaatggga

SEQ ID NO: 275213 - DNA, 12 bp, Artificial Sequence
  Oligonucleotide primer for the detection of SNP TSC0003826
ttaaaaaataat

SEQ ID NO: 275214 - DNA, 12 bp, Artificial Sequence
  Oligonucleotide primer for the detection of SNP TSC0003826
tccaccctccta

SEQ ID NO: 275215 - DNA, 12 bp, Artificial Sequence
  Oligonucleotide primer for the detection of SNP TSC0003826
ttgggaggtgat

SEQ ID NO: 275216 - DNA, 12 bp, Artificial Sequence
  Oligonucleotide primer for the detection of SNP TSC0003827
tctacaaaaaaa

SEQ ID NO: 275217 - DNA, 12 bp, Artificial Sequence
  Oligonucleotide primer for the detection of SNP TSC0003827
ttatttaaaaaa

SEQ ID NO: 275218 - DNA, 12 bp, Artificial Sequence
  Oligonucleotide primer for the detection of SNP TSC0003828
ttatttcttctt

SEQ ID NO: 275219 - DNA, 12 bp, Artificial Sequence
  Oligonucleotide primer for the detection of SNP TSC0003828
aatattatttaa

SEQ ID NO: 275220 - DNA, 12 bp, Artificial Sequence
  Oligonucleotide primer for the detection of SNP TSC0003829
ttaaaaaaatct

SEQ ID NO: 275221 - DNA, 12 bp, Artificial Sequence
  Oligonucleotide primer for the detection of SNP TSC0003829
tagagagttaga

SEQ ID NO: 275222 - DNA, 12 bp, Artificial Sequence
  Oligonucleotide primer for the detection of SNP TSC0003829
aaaaaatcaaaa

SEQ ID NO: 275223 - DNA, 12 bp, Artificial Sequence
  Oligonucleotide primer for the detection of SNP TSC0003829
ttgagagggttt

SEQ ID NO: 275224 - DNA, 12 bp, Artificial Sequence
  Oligonucleotide primer for the detection of SNP TSC0003830
aactaataccac

SEQ ID NO: 275225 - DNA, 12 bp, Artificial Sequence
  Oligonucleotide primer for the detection of SNP TSC0003830
agtatttttgtg

SEQ ID NO: 275226 - DNA, 12 bp, Artificial Sequence
  Oligonucleotide primer for the detection of SNP TSC0003830
aacacctctata

SEQ ID NO: 275227 - DNA, 12 bp, Artificial Sequence
  Oligonucleotide primer for the detection of SNP TSC0003830
ggttggtgttat

SEQ ID NO: 275228 - DNA, 12 bp, Artificial Sequence
  Oligonucleotide primer for the detection of SNP TSC0003831
tccactactaaa

SEQ ID NO: 275229 - DNA, 12 bp, Artificial Sequence
  Oligonucleotide primer for the detection of SNP TSC0003831
aatttagatgta

SEQ ID NO: 275230 - DNA, 12 bp, Artificial Sequence
  Oligonucleotide primer for the detection of SNP TSC0003831
attcaaatataa

SEQ ID NO: 275231 - DNA, 12 bp, Artificial Sequence
  Oligonucleotide primer for the detection of SNP TSC0003831
gtttattgttga

SEQ ID NO: 275232 - DNA, 12 bp, Artificial Sequence
  Oligonucleotide primer for the detection of SNP TSC0003832
aaataaactaac

SEQ ID NO: 275233 - DNA, 12 bp, Artificial Sequence
  Oligonucleotide primer for the detection of SNP TSC0003832
ggagatttgatg

SEQ ID NO: 275234 - DNA, 12 bp, Artificial Sequence
  Oligonucleotide primer for the detection of SNP TSC0003833
tataaacaaaca

SEQ ID NO: 275235 - DNA, 12 bp, Artificial Sequence
  Oligonucleotide primer for the detection of SNP TSC0003833
tgataggagttt

SEQ ID NO: 275236 - DNA, 12 bp, Artificial Sequence
  Oligonukleotid-Primer
taataaaaaccc

SEQ ID NO: 275237 - DNA, 12 bp, Artificial Sequence
  Oligonucleotide primer for the detection of SNP TSC0003833
tgtggatagata

SEQ ID NO: 275238 - DNA, 12 bp, Artificial Sequence
  Oligonucleotide primer for the detection of SNP TSC0003834
aatctccttcta

SEQ ID NO: 275239 - DNA, 12 bp, Artificial Sequence
  Oligonucleotide primer for the detection of SNP TSC0003834
agtttttttttg

SEQ ID NO: 275240 - DNA, 12 bp, Artificial Sequence
  Oligonukleotid-Primer
tagaaaattgaa

SEQ ID NO: 275241 - DNA, 12 bp, Artificial Sequence
  Oligonucleotide primer for the detection of SNP TSC0003835
tagaaaatcgaa

SEQ ID NO: 275242 - DNA, 12 bp, Artificial Sequence
  Oligonucleotide primer for the detection of SNP TSC0003835
taaaaaaccgaa

SEQ ID NO: 275243 - DNA, 12 bp, Artificial Sequence
  Oligonucleotide primer for the detection of SNP TSC0003835
tgtgaggaaaat

SEQ ID NO: 275244 - DNA, 12 bp, Artificial Sequence
  Oligonucleotide primer for the detection of SNP TSC0003836
ttcctacttcta

SEQ ID NO: 275245 - DNA, 12 bp, Artificial Sequence
  Oligonucleotide primer for the detection of SNP TSC0003836
tagtttatagat

SEQ ID NO: 275246 - DNA, 12 bp, Artificial Sequence
  Oligonucleotide primer for the detection of SNP TSC0003836
taactcacaaac

SEQ ID NO: 275247 - DNA, 12 bp, Artificial Sequence
  Oligonucleotide primer for the detection of SNP TSC0003837
aattataaaaat

SEQ ID NO: 275248 - DNA, 12 bp, Artificial Sequence
  Oligonucleotide primer for the detection of SNP TSC0003837
tttgttttttta

SEQ ID NO: 275249 - DNA, 12 bp, Artificial Sequence
  Oligonucleotide primer for the detection of SNP TSC0003839
accacactaaac

SEQ ID NO: 275250 - DNA, 12 bp, Artificial Sequence
  Oligonucleotide primer for the detection of SNP TSC0003839
ttataagtgttg

SEQ ID NO: 275251 - DNA, 12 bp, Artificial Sequence
  Oligonucleotide primer for the detection of SNP TSC0003839
ccacaaatacta

SEQ ID NO: 275252 - DNA, 12 bp, Artificial Sequence
  Oligonucleotide primer for the detection of SNP TSC0003839
attatattgagt

SEQ ID NO: 275253 - DNA, 12 bp, Artificial Sequence
  Oligonucleotide primer for the detection of SNP TSC0003840
atcaacaaatct

SEQ ID NO: 275254 - DNA, 12 bp, Artificial Sequence
  Oligonucleotide primer for the detection of SNP TSC0003840
tagaagttttta

SEQ ID NO: 275255 - DNA, 12 bp, Artificial Sequence
  Oligonucleotide primer for the detection of SNP TSC0003841
catttataatct

SEQ ID NO: 275256 - DNA, 12 bp, Artificial Sequence
  Oligonucleotide primer for the detection of SNP TSC0003841
atttatgggaat

SEQ ID NO: 275257 - DNA, 12 bp, Artificial Sequence
  Oligonucleotide primer for the detection of SNP TSC0003841
aatccataaaaa

SEQ ID NO: 275258 - DNA, 12 bp, Artificial Sequence
  Oligonucleotide primer for the detection of SNP TSC0003841
tatttatggttt

SEQ ID NO: 275259 - DNA, 12 bp, Artificial Sequence
  Oligonucleotide primer for the detection of SNP TSC0003842
caaaacaaaaat

SEQ ID NO: 275260 - DNA, 12 bp, Artificial Sequence
  Oligonucleotide primer for the detection of SNP TSC0003842
ttattttttagg

SEQ ID NO: 275261 - DNA, 12 bp, Artificial Sequence
  Oligonucleotide primer for the detection of SNP TSC0003843
accaacaaccct

SEQ ID NO: 275262 - DNA, 12 bp, Artificial Sequence
  Oligonucleotide primer for the detection of SNP TSC0003843
accgacaaccct

SEQ ID NO: 275263 - DNA, 12 bp, Artificial Sequence
  Oligonucleotide primer for the detection of SNP TSC0003843
ggaggagtgagg

SEQ ID NO: 275264 - DNA, 12 bp, Artificial Sequence
  Oligonucleotide primer for the detection of SNP TSC0003844
atcaaaaataaa

SEQ ID NO: 275265 - DNA, 12 bp, Artificial Sequence
  Oligonucleotide primer for the detection of SNP TSC0003844
taaatttttttt

SEQ ID NO: 275266 - DNA, 12 bp, Artificial Sequence
  Oligonucleotide primer for the detection of SNP TSC0003844
atcataaacccc

SEQ ID NO: 275267 - DNA, 12 bp, Artificial Sequence
  Oligonucleotide primer for the detection of SNP TSC0003844
tgtgttaaaaat

SEQ ID NO: 275268 - DNA, 12 bp, Artificial Sequence
  Oligonucleotide primer for the detection of SNP TSC0003845
tttcccaaataa

SEQ ID NO: 275269 - DNA, 12 bp, Artificial Sequence
  Oligonucleotide primer for the detection of SNP TSC0003845
taaagattaaaa

SEQ ID NO: 275270 - DNA, 12 bp, Artificial Sequence
  Oligonucleotide primer for the detection of SNP TSC0003845
caaaaatcaaaa

SEQ ID NO: 275271 - DNA, 12 bp, Artificial Sequence
  Oligonucleotide primer for the detection of SNP TSC0003845
tttaaataattt

SEQ ID NO: 275272 - DNA, 12 bp, Artificial Sequence
  Oligonucleotide primer for the detection of SNP TSC0003845
tttaaataattc

SEQ ID NO: 275273 - DNA, 12 bp, Artificial Sequence
  Oligonucleotide primer for the detection of SNP TSC0003846
tatattaaaaac

SEQ ID NO: 275274 - DNA, 12 bp, Artificial Sequence
  Oligonucleotide primer for the detection of SNP TSC0003846
ttttattagaga

SEQ ID NO: 275275 - DNA, 12 bp, Artificial Sequence
  Oligonucleotide primer for the detection of SNP TSC0003847
atacaaatcttt

SEQ ID NO: 275276 - DNA, 12 bp, Artificial Sequence
  Oligonucleotide primer for the detection of SNP TSC0003847
ttgaggataagg

SEQ ID NO: 275277 - DNA, 12 bp, Artificial Sequence
  Oligonucleotide primer for the detection of SNP TSC0003848
cattaacaaata

SEQ ID NO: 275278 - DNA, 12 bp, Artificial Sequence
  Oligonucleotide primer for the detection of SNP TSC0003848
tttgtttttagg

SEQ ID NO: 275279 - DNA, 12 bp, Artificial Sequence
  Oligonucleotide primer for the detection of SNP TSC0003848
ttcgtttttagg

SEQ ID NO: 275280 - DNA, 12 bp, Artificial Sequence
  Oligonucleotide primer for the detection of SNP TSC0003849
acaaatatacca

SEQ ID NO: 275281 - DNA, 12 bp, Artificial Sequence
  Oligonucleotide primer for the detection of SNP TSC0003849
acgaatatacca

SEQ ID NO: 275282 - DNA, 12 bp, Artificial Sequence
  Oligonucleotide primer for the detection of SNP TSC0003849
gataaatataat

SEQ ID NO: 275283 - DNA, 12 bp, Artificial Sequence
  Oligonucleotide primer for the detection of SNP TSC0003849
aaataaacacaa

SEQ ID NO: 275284 - DNA, 12 bp, Artificial Sequence
  Oligonucleotide primer for the detection of SNP TSC0003849
gtggatgtatta

SEQ ID NO: 275285 - DNA, 12 bp, Artificial Sequence
  Oligonucleotide primer for the detection of SNP TSC0003849
gcggatgtatta

SEQ ID NO: 275286 - DNA, 12 bp, Artificial Sequence
  Oligonucleotide primer for the detection of SNP TSC0003850
aatacctataac

SEQ ID NO: 275287 - DNA, 12 bp, Artificial Sequence
  Oligonucleotide primer for the detection of SNP TSC0003852
ttaaccatcctc

SEQ ID NO: 275288 - DNA, 12 bp, Artificial Sequence
  Oligonucleotide primer for the detection of SNP TSC0003852
gggagattgagg

SEQ ID NO: 275289 - DNA, 12 bp, Artificial Sequence
  Oligonucleotide primer for the detection of SNP TSC0003853
ttaatcaaacta

SEQ ID NO: 275290 - DNA, 12 bp, Artificial Sequence
  Oligonucleotide primer for the detection of SNP TSC0003853
agattaggagtt

SEQ ID NO: 275291 - DNA, 12 bp, Artificial Sequence
  Oligonucleotide primer for the detection of SNP TSC0003853
aaatcaaaaatc

SEQ ID NO: 275292 - DNA, 12 bp, Artificial Sequence
  Oligonucleotide primer for the detection of SNP TSC0003853
ttggttaggttg

SEQ ID NO: 275293 - DNA, 12 bp, Artificial Sequence
  Oligonucleotide primer for the detection of SNP TSC0003854
caccatacccaa

SEQ ID NO: 275294 - DNA, 12 bp, Artificial Sequence
  Oligonucleotide primer for the detection of SNP TSC0003854
caccatacccga

SEQ ID NO: 275295 - DNA, 12 bp, Artificial Sequence
  Oligonucleotide primer for the detection of SNP TSC0003854
ataaaattattt

SEQ ID NO: 275296 - DNA, 12 bp, Artificial Sequence
  Oligonucleotide primer for the detection of SNP TSC0003854
ataaaatcattt

SEQ ID NO: 275297 - DNA, 12 bp, Artificial Sequence
  Oligonucleotide primer for the detection of SNP TSC0003854
tattatgtttgg

SEQ ID NO: 275298 - DNA, 12 bp, Artificial Sequence
  Oligonucleotide primer for the detection of SNP TSC0003854
tattatgttcgg

SEQ ID NO: 275299 - DNA, 12 bp, Artificial Sequence
  Oligonucleotide primer for the detection of SNP TSC0003855
aaaatatataaa

SEQ ID NO: 275300 - DNA, 12 bp, Artificial Sequence
  Oligonucleotide primer for the detection of SNP TSC0003855
tttgaatatttt

SEQ ID NO: 275301 - DNA, 12 bp, Artificial Sequence
  Oligonucleotide primer for the detection of SNP TSC0003855
tcccctaaatac

SEQ ID NO: 275302 - DNA, 12 bp, Artificial Sequence
  Oligonucleotide primer for the detection of SNP TSC0003855
gtaaaatgtatg

SEQ ID NO: 275303 - DNA, 12 bp, Artificial Sequence
  Oligonucleotide primer for the detection of SNP TSC0003856
attatataaaca

SEQ ID NO: 275304 - DNA, 12 bp, Artificial Sequence
  Oligonucleotide primer for the detection of SNP TSC0003856
aaataaaaatgt

SEQ ID NO: 275305 - DNA, 12 bp, Artificial Sequence
  Oligonucleotide primer for the detection of SNP TSC0003856
aaataaaaacgt

SEQ ID NO: 275306 - DNA, 12 bp, Artificial Sequence
  Oligonucleotide primer for the detection of SNP TSC0003856
aaataaaaatgc

SEQ ID NO: 275307 - DNA, 12 bp, Artificial Sequence
  Oligonucleotide primer for the detection of SNP TSC0003856
aaataaaaacgc

SEQ ID NO: 275308 - DNA, 12 bp, Artificial Sequence
  Oligonucleotide primer for the detection of SNP TSC0003856
aaaataaaaaca

SEQ ID NO: 275309 - DNA, 12 bp, Artificial Sequence
  Oligonucleotide primer for the detection of SNP TSC0003856
aaaataaaaacg

SEQ ID NO: 275310 - DNA, 12 bp, Artificial Sequence
  Oligonucleotide primer for the detection of SNP TSC0003856
attatgtggata

SEQ ID NO: 275311 - DNA, 12 bp, Artificial Sequence
  Oligonucleotide primer for the detection of SNP TSC0003857
ctacaactaaaa

SEQ ID NO: 275312 - DNA, 12 bp, Artificial Sequence
  Oligonucleotide primer for the detection of SNP TSC0003857
gatttgttttag

SEQ ID NO: 275313 - DNA, 12 bp, Artificial Sequence
  Oligonukleotid-Primer
gattcgttttag

SEQ ID NO: 275314 - DNA, 12 bp, Artificial Sequence
  Oligonucleotide primer for the detection of SNP TSC0003857
aactcatcctaa

SEQ ID NO: 275315 - DNA, 12 bp, Artificial Sequence
  Oligonucleotide primer for the detection of SNP TSC0003857
aactcgtcctaa

SEQ ID NO: 275316 - DNA, 12 bp, Artificial Sequence
  Oligonucleotide primer for the detection of SNP TSC0003857
tttgtagttagg

SEQ ID NO: 275317 - DNA, 12 bp, Artificial Sequence
  Oligonucleotide primer for the detection of SNP TSC0003858
ttaaaaaaatat

SEQ ID NO: 275318 - DNA, 12 bp, Artificial Sequence
  Oligonucleotide primer for the detection of SNP TSC0003858
ttgtatgtataa

SEQ ID NO: 275319 - DNA, 12 bp, Artificial Sequence
  Oligonucleotide primer for the detection of SNP TSC0003859
attccctaactc

SEQ ID NO: 275320 - DNA, 12 bp, Artificial Sequence
  Oligonucleotide primer for the detection of SNP TSC0003859
tggggagatgtg

SEQ ID NO: 275321 - DNA, 12 bp, Artificial Sequence
  Oligonucleotide primer for the detection of SNP TSC0003859
tggggagatgcg

SEQ ID NO: 275322 - DNA, 12 bp, Artificial Sequence
  Oligonucleotide primer for the detection of SNP TSC0003860
ctactcacattc

SEQ ID NO: 275323 - DNA, 12 bp, Artificial Sequence
  Oligonucleotide primer for the detection of SNP TSC0003860
ctactcgcattc

SEQ ID NO: 275324 - DNA, 12 bp, Artificial Sequence
  Oligonucleotide primer for the detection of SNP TSC0003860
tgattttggtta

SEQ ID NO: 275325 - DNA, 12 bp, Artificial Sequence
  Oligonucleotide primer for the detection of SNP TSC0003861
tcaaaactcaac

SEQ ID NO: 275326 - DNA, 12 bp, Artificial Sequence
  Oligonucleotide primer for the detection of SNP TSC0003861
ttttgttgtttg

SEQ ID NO: 275327 - DNA, 12 bp, Artificial Sequence
  Oligonucleotide primer for the detection of SNP TSC0003861
ttctattactta

SEQ ID NO: 275328 - DNA, 12 bp, Artificial Sequence
  Oligonucleotide primer for the detection of SNP TSC0003861
ttagggtttagt

SEQ ID NO: 275329 - DNA, 12 bp, Artificial Sequence
  Oligonucleotide primer for the detection of SNP TSC0003862
ttttaataaaat

SEQ ID NO: 275330 - DNA, 12 bp, Artificial Sequence
  Oligonucleotide primer for the detection of SNP TSC0003862
ggtaatagagag

SEQ ID NO: 275331 - DNA, 12 bp, Artificial Sequence
  Oligonucleotide primer for the detection of SNP TSC0003863
atacacaattac

SEQ ID NO: 275332 - DNA, 12 bp, Artificial Sequence
  Oligonucleotide primer for the detection of SNP TSC0003863
tttgttttagtg

SEQ ID NO: 275333 - DNA, 12 bp, Artificial Sequence
  Oligonucleotide primer for the detection of SNP TSC0003864
attatccaaaat

SEQ ID NO: 275334 - DNA, 12 bp, Artificial Sequence
  Oligonucleotide primer for the detection of SNP TSC0003865
ctttctacactc

SEQ ID NO: 275335 - DNA, 12 bp, Artificial Sequence
  Oligonucleotide primer for the detection of SNP TSC0003865
tagtattttaaa

SEQ ID NO: 275336 - DNA, 12 bp, Artificial Sequence
  Oligonucleotide primer for the detection of SNP TSC0003866
cttctccctatt

SEQ ID NO: 275337 - DNA, 12 bp, Artificial Sequence
  Oligonucleotide primer for the detection of SNP TSC0003866
ggaaatgggttg

SEQ ID NO: 275338 - DNA, 12 bp, Artificial Sequence
  Oligonucleotide primer for the detection of SNP TSC0003867
aataatccccaa

SEQ ID NO: 275339 - DNA, 12 bp, Artificial Sequence
  Oligonucleotide primer for the detection of SNP TSC0003867
tggtgttaaaaa

SEQ ID NO: 275340 - DNA, 12 bp, Artificial Sequence
  Oligonucleotide primer for the detection of SNP TSC0003867
taataccaaaaa

SEQ ID NO: 275341 - DNA, 12 bp, Artificial Sequence
  Oligonucleotide primer for the detection of SNP TSC0003867
tggtttttagtt

SEQ ID NO: 275342 - DNA, 12 bp, Artificial Sequence
  Oligonucleotide primer for the detection of SNP TSC0003867
tggtttttagtc

SEQ ID NO: 275343 - DNA, 12 bp, Artificial Sequence
  Oligonucleotide primer for the detection of SNP TSC0003868
gtgtgtgttatt

SEQ ID NO: 275344 - DNA, 12 bp, Artificial Sequence
  Oligonucleotide primer for the detection of SNP TSC0003868
gtgcgtgttatt

SEQ ID NO: 275345 - DNA, 12 bp, Artificial Sequence
  Oligonucleotide primer for the detection of SNP TSC0003868
gtgtgcgttatt

SEQ ID NO: 275346 - DNA, 12 bp, Artificial Sequence
  Oligonucleotide primer for the detection of SNP TSC0003868
gtgcgcgttatt

SEQ ID NO: 275347 - DNA, 12 bp, Artificial Sequence
  Oligonucleotide primer for the detection of SNP TSC0003868
atacacaccacc

SEQ ID NO: 275348 - DNA, 12 bp, Artificial Sequence
  Oligonucleotide primer for the detection of SNP TSC0003868
atacacgccacc

SEQ ID NO: 275349 - DNA, 12 bp, Artificial Sequence
  Oligonucleotide primer for the detection of SNP TSC0003868
atacgcaccacc

SEQ ID NO: 275350 - DNA, 12 bp, Artificial Sequence
  Oligonucleotide primer for the detection of SNP TSC0003868
atacgcgccacc

SEQ ID NO: 275351 - DNA, 12 bp, Artificial Sequence
  Oligonucleotide primer for the detection of SNP TSC0003868
aagttagttggg

SEQ ID NO: 275352 - DNA, 12 bp, Artificial Sequence
  Oligonucleotide primer for the detection of SNP TSC0003869
attatatgttta

SEQ ID NO: 275353 - DNA, 12 bp, Artificial Sequence
  Oligonucleotide primer for the detection of SNP TSC0003869
attatatactca

SEQ ID NO: 275354 - DNA, 12 bp, Artificial Sequence
  Oligonucleotide primer for the detection of SNP TSC0003871
cacccaccacca

SEQ ID NO: 275355 - DNA, 12 bp, Artificial Sequence
  Oligonucleotide primer for the detection of SNP TSC0003871
cacccgccacca

SEQ ID NO: 275356 - DNA, 12 bp, Artificial Sequence
  Oligonucleotide primer for the detection of SNP TSC0003871
cgcccaccacca

SEQ ID NO: 275357 - DNA, 12 bp, Artificial Sequence
  Oligonucleotide primer for the detection of SNP TSC0003871
cgcccgccacca

SEQ ID NO: 275358 - DNA, 12 bp, Artificial Sequence
  Oligonucleotide primer for the detection of SNP TSC0003871
aaaattagttga

SEQ ID NO: 275359 - DNA, 12 bp, Artificial Sequence
  Oligonucleotide primer for the detection of SNP TSC0003871
gtttgttattat

SEQ ID NO: 275360 - DNA, 12 bp, Artificial Sequence
  Oligonucleotide primer for the detection of SNP TSC0003871
gttcgttattat

SEQ ID NO: 275361 - DNA, 12 bp, Artificial Sequence
  Oligonucleotide primer for the detection of SNP TSC0003871
gtttgttattac

SEQ ID NO: 275362 - DNA, 12 bp, Artificial Sequence
  Oligonucleotide primer for the detection of SNP TSC0003871
gttcgttattac

SEQ ID NO: 275363 - DNA, 12 bp, Artificial Sequence
  Oligonucleotide primer for the detection of SNP TSC0003872
taattctaatat

SEQ ID NO: 275364 - DNA, 12 bp, Artificial Sequence
  Oligonucleotide primer for the detection of SNP TSC0003872
ttatttttaaag

SEQ ID NO: 275365 - DNA, 12 bp, Artificial Sequence
  Oligonucleotide primer for the detection of SNP TSC0003873
ctatcaaaataa

SEQ ID NO: 275366 - DNA, 12 bp, Artificial Sequence
  Oligonucleotide primer for the detection of SNP TSC0003873
gtaaaattgaat

SEQ ID NO: 275367 - DNA, 12 bp, Artificial Sequence
  Oligonucleotide primer for the detection of SNP TSC0003873
ataaaactaaac

SEQ ID NO: 275368 - DNA, 12 bp, Artificial Sequence
  Oligonucleotide primer for the detection of SNP TSC0003873
ttgttagagtaa

SEQ ID NO: 275369 - DNA, 12 bp, Artificial Sequence
  Oligonucleotide primer for the detection of SNP TSC0003874
ataattcataaa

SEQ ID NO: 275370 - DNA, 12 bp, Artificial Sequence
  Oligonucleotide primer for the detection of SNP TSC0003874
aagtgattttaa

SEQ ID NO: 275371 - DNA, 12 bp, Artificial Sequence
  Oligonucleotide primer for the detection of SNP TSC0003874
aaataaccctaa

SEQ ID NO: 275372 - DNA, 12 bp, Artificial Sequence
  Oligonucleotide primer for the detection of SNP TSC0003874
ataatttataga

SEQ ID NO: 275373 - DNA, 12 bp, Artificial Sequence
  Oligonucleotide primer for the detection of SNP TSC0003875
ctctatctccct

SEQ ID NO: 275374 - DNA, 12 bp, Artificial Sequence
  Oligonucleotide primer for the detection of SNP TSC0003875
gagaaagagaaa

SEQ ID NO: 275375 - DNA, 12 bp, Artificial Sequence
  Oligonucleotide primer for the detection of SNP TSC0003876
caaccaaaaaac

SEQ ID NO: 275376 - DNA, 12 bp, Artificial Sequence
  Oligonucleotide primer for the detection of SNP TSC0003876
ggttatttttga

SEQ ID NO: 275377 - DNA, 12 bp, Artificial Sequence
  Oligonucleotide primer for the detection of SNP TSC0003876
aatcatttctaa

SEQ ID NO: 275378 - DNA, 12 bp, Artificial Sequence
  Oligonucleotide primer for the detection of SNP TSC0003876
gatcatttctaa

SEQ ID NO: 275379 - DNA, 12 bp, Artificial Sequence
  Oligonucleotide primer for the detection of SNP TSC0003876
tagttaaaggat

SEQ ID NO: 275380 - DNA, 12 bp, Artificial Sequence
  Oligonucleotide primer for the detection of SNP TSC0003877
ataaaactatct

SEQ ID NO: 275381 - DNA, 12 bp, Artificial Sequence
  Oligonucleotide primer for the detection of SNP TSC0003877
gtgagattgttt

SEQ ID NO: 275382 - DNA, 12 bp, Artificial Sequence
  Oligonucleotide primer for the detection of SNP TSC0003878
aacctaaaaata

SEQ ID NO: 275383 - DNA, 12 bp, Artificial Sequence
  Oligonucleotide primer for the detection of SNP TSC0003878
ctataatttcct

SEQ ID NO: 275384 - DNA, 12 bp, Artificial Sequence
  Oligonucleotide primer for the detection of SNP TSC0003878
agtttggggatg

SEQ ID NO: 275385 - DNA, 12 bp, Artificial Sequence
  Oligonucleotide primer for the detection of SNP TSC0003879
tttccttttttt

SEQ ID NO: 275386 - DNA, 12 bp, Artificial Sequence
  Oligonucleotide primer for the detection of SNP TSC0003879
tgttttagaaaa

SEQ ID NO: 275387 - DNA, 12 bp, Artificial Sequence
  Oligonucleotide primer for the detection of SNP TSC0003879
tatctcaaaaaa

SEQ ID NO: 275388 - DNA, 12 bp, Artificial Sequence
  Oligonucleotide primer for the detection of SNP TSC0003880
aacaaaaacaaa

SEQ ID NO: 275389 - DNA, 12 bp, Artificial Sequence
  Oligonucleotide primer for the detection of SNP TSC0003880
gggttttgtttt

SEQ ID NO: 275390 - DNA, 12 bp, Artificial Sequence
  Oligonukleotid-Primer
aaatcctacctt

SEQ ID NO: 275391 - DNA, 12 bp, Artificial Sequence
  Oligonucleotide primer for the detection of SNP TSC0003880
aataaaaataaa

SEQ ID NO: 275392 - DNA, 12 bp, Artificial Sequence
  Oligonucleotide primer for the detection of SNP TSC0003882
aacaaacaacta

SEQ ID NO: 275393 - DNA, 12 bp, Artificial Sequence
  Oligonucleotide primer for the detection of SNP TSC0003882
tattttattatt

SEQ ID NO: 275394 - DNA, 12 bp, Artificial Sequence
  Oligonukleotid-Primer
cattttatcatt

SEQ ID NO: 275395 - DNA, 12 bp, Artificial Sequence
  Oligonucleotide primer for the detection of SNP TSC0003882
aatagatagtta

SEQ ID NO: 275396 - DNA, 12 bp, Artificial Sequence
  Oligonucleotide primer for the detection of SNP TSC0003883
attttatttact

SEQ ID NO: 275397 - DNA, 12 bp, Artificial Sequence
  Oligonucleotide primer for the detection of SNP TSC0003883
attagggaaaga

SEQ ID NO: 275398 - DNA, 12 bp, Artificial Sequence
  Oligonukleotid-Primer
ctatatctatac

SEQ ID NO: 275399 - DNA, 12 bp, Artificial Sequence
  Oligonucleotide primer for the detection of SNP TSC0003884
ttaatgtttatg

SEQ ID NO: 275400 - DNA, 12 bp, Artificial Sequence
  Oligonucleotide primer for the detection of SNP TSC0003884
ttaacgtttatg

SEQ ID NO: 275401 - DNA, 12 bp, Artificial Sequence
  Oligonucleotide primer for the detection of SNP TSC0003884
ttaatgtttacg

SEQ ID NO: 275402 - DNA, 12 bp, Artificial Sequence
  Oligonucleotide primer for the detection of SNP TSC0003884
ttaacgtttacg

SEQ ID NO: 275403 - DNA, 12 bp, Artificial Sequence
  Oligonucleotide primer for the detection of SNP TSC0003884
ccaacatccaca

SEQ ID NO: 275404 - DNA, 12 bp, Artificial Sequence
  Oligonucleotide primer for the detection of SNP TSC0003884
ccaacatccacg

SEQ ID NO: 275405 - DNA, 12 bp, Artificial Sequence
  Oligonucleotide primer for the detection of SNP TSC0003884
ccaacgtccaca

SEQ ID NO: 275406 - DNA, 12 bp, Artificial Sequence
  Oligonucleotide primer for the detection of SNP TSC0003884
ccaacgtccacg

SEQ ID NO: 275407 - DNA, 12 bp, Artificial Sequence
  Oligonucleotide primer for the detection of SNP TSC0003884
ttgtatttatgt

SEQ ID NO: 275408 - DNA, 12 bp, Artificial Sequence
  Oligonucleotide primer for the detection of SNP TSC0003884
ttgtatttatgc

SEQ ID NO: 275409 - DNA, 12 bp, Artificial Sequence
  Oligonucleotide primer for the detection of SNP TSC0003885
ttaaaaaaaata

SEQ ID NO: 275410 - DNA, 12 bp, Artificial Sequence
  Oligonucleotide primer for the detection of SNP TSC0003885
tttggttaaatg

SEQ ID NO: 275411 - DNA, 12 bp, Artificial Sequence
  Oligonucleotide primer for the detection of SNP TSC0003885
ttcggttaaatg

SEQ ID NO: 275412 - DNA, 12 bp, Artificial Sequence
  Oligonucleotide primer for the detection of SNP TSC0003885
cccaaccaaata

SEQ ID NO: 275413 - DNA, 12 bp, Artificial Sequence
  Oligonucleotide primer for the detection of SNP TSC0003885
cccgaccaaata

SEQ ID NO: 275414 - DNA, 12 bp, Artificial Sequence
  Oligonucleotide primer for the detection of SNP TSC0003885
tttaaaaagaat

SEQ ID NO: 275415 - DNA, 12 bp, Artificial Sequence
  Oligonucleotide primer for the detection of SNP TSC0003886
caaacacatatt

SEQ ID NO: 275416 - DNA, 12 bp, Artificial Sequence
  Oligonucleotide primer for the detection of SNP TSC0003886
tattttgttttg

SEQ ID NO: 275417 - DNA, 12 bp, Artificial Sequence
  Oligonucleotide primer for the detection of SNP TSC0003886
caccttacccta

SEQ ID NO: 275418 - DNA, 12 bp, Artificial Sequence
  Oligonucleotide primer for the detection of SNP TSC0003886
taaatatatgtt

SEQ ID NO: 275419 - DNA, 12 bp, Artificial Sequence
  Oligonucleotide primer for the detection of SNP TSC0003887
tatttattctat

SEQ ID NO: 275420 - DNA, 12 bp, Artificial Sequence
  Oligonucleotide primer for the detection of SNP TSC0003887
tttagtgatata

SEQ ID NO: 275421 - DNA, 12 bp, Artificial Sequence
  Oligonucleotide primer for the detection of SNP TSC0003888
aattaaaaacac

SEQ ID NO: 275422 - DNA, 12 bp, Artificial Sequence
  Oligonucleotide primer for the detection of SNP TSC0003888
ttattttgaaag

SEQ ID NO: 275423 - DNA, 12 bp, Artificial Sequence
  Oligonucleotide primer for the detection of SNP TSC0003888
tcaccctaaaaa

SEQ ID NO: 275424 - DNA, 12 bp, Artificial Sequence
  Oligonucleotide primer for the detection of SNP TSC0003888
agttaaagatat

SEQ ID NO: 275425 - DNA, 12 bp, Artificial Sequence
  Oligonucleotide primer for the detection of SNP TSC0003889
ccctaaaataac

SEQ ID NO: 275426 - DNA, 12 bp, Artificial Sequence
  Oligonucleotide primer for the detection of SNP TSC0003889
aagtttgtttta

SEQ ID NO: 275427 - DNA, 12 bp, Artificial Sequence
  Oligonucleotide primer for the detection of SNP TSC0003889
aagttcgtttta

SEQ ID NO: 275428 - DNA, 12 bp, Artificial Sequence
  Oligonucleotide primer for the detection of SNP TSC0003890
ttaaaaataaaa

SEQ ID NO: 275429 - DNA, 12 bp, Artificial Sequence
  Oligonucleotide primer for the detection of SNP TSC0003890
ctacccttttcc

SEQ ID NO: 275430 - DNA, 12 bp, Artificial Sequence
  Oligonucleotide primer for the detection of SNP TSC0003890
ttggaaatgggg

SEQ ID NO: 275431 - DNA, 12 bp, Artificial Sequence
  Oligonucleotide primer for the detection of SNP TSC0003891
aataatacaatc

SEQ ID NO: 275432 - DNA, 12 bp, Artificial Sequence
  Oligonucleotide primer for the detection of SNP TSC0003891
tgtagtgagtta

SEQ ID NO: 275433 - DNA, 12 bp, Artificial Sequence
  Oligonucleotide primer for the detection of SNP TSC0003892
tccttccttcct

SEQ ID NO: 275434 - DNA, 12 bp, Artificial Sequence
  Oligonucleotide primer for the detection of SNP TSC0003892
gagggaggaagg

SEQ ID NO: 275435 - DNA, 12 bp, Artificial Sequence
  Oligonucleotide primer for the detection of SNP TSC0003893
tcctatttttac

SEQ ID NO: 275436 - DNA, 12 bp, Artificial Sequence
  Oligonucleotide primer for the detection of SNP TSC0003893
tcatactaaata

SEQ ID NO: 275437 - DNA, 12 bp, Artificial Sequence
  Oligonucleotide primer for the detection of SNP TSC0003894
caaactattaat

SEQ ID NO: 275438 - DNA, 12 bp, Artificial Sequence
  Oligonucleotide primer for the detection of SNP TSC0003894
ggtagattattt

SEQ ID NO: 275439 - DNA, 12 bp, Artificial Sequence
  Oligonucleotide primer for the detection of SNP TSC0003894
acaaatcaccta

SEQ ID NO: 275440 - DNA, 12 bp, Artificial Sequence
  Oligonucleotide primer for the detection of SNP TSC0003894
aaattattgatt

SEQ ID NO: 275441 - DNA, 12 bp, Artificial Sequence
  Oligonucleotide primer for the detection of SNP TSC0003896
tatactctcctc

SEQ ID NO: 275442 - DNA, 12 bp, Artificial Sequence
  Oligonucleotide primer for the detection of SNP TSC0003896
agttttttggtg

SEQ ID NO: 275443 - DNA, 12 bp, Artificial Sequence
  Oligonucleotide primer for the detection of SNP TSC0003896
agtttttcggtg

SEQ ID NO: 275444 - DNA, 12 bp, Artificial Sequence
  Oligonucleotide primer for the detection of SNP TSC0003896
agttttttggcg

SEQ ID NO: 275445 - DNA, 12 bp, Artificial Sequence
  Oligonucleotide primer for the detection of SNP TSC0003896
agtttttcggcg

SEQ ID NO: 275446 - DNA, 12 bp, Artificial Sequence
  Oligonucleotide primer for the detection of SNP TSC0003897
tactcaaaaaac

SEQ ID NO: 275447 - DNA, 12 bp, Artificial Sequence
  Oligonucleotide primer for the detection of SNP TSC0003897
gatgatatagaa

SEQ ID NO: 275448 - DNA, 12 bp, Artificial Sequence
  Oligonucleotide primer for the detection of SNP TSC0003897
aataacacaaaa

SEQ ID NO: 275449 - DNA, 12 bp, Artificial Sequence
  Oligonucleotide primer for the detection of SNP TSC0003897
tgtttagggagt

SEQ ID NO: 275450 - DNA, 12 bp, Artificial Sequence
  Oligonucleotide primer for the detection of SNP TSC0003898
aatataccaaaa

SEQ ID NO: 275451 - DNA, 12 bp, Artificial Sequence
  Oligonucleotide primer for the detection of SNP TSC0003898
gtttttgttgtt

SEQ ID NO: 275452 - DNA, 12 bp, Artificial Sequence
  Oligonucleotide primer for the detection of SNP TSC0003898
atccttattatt

SEQ ID NO: 275453 - DNA, 12 bp, Artificial Sequence
  Oligonucleotide primer for the detection of SNP TSC0003898
taagtatattaa

SEQ ID NO: 275454 - DNA, 12 bp, Artificial Sequence
  Oligonucleotide primer for the detection of SNP TSC0003899
tctaaataataa

SEQ ID NO: 275455 - DNA, 12 bp, Artificial Sequence
  Oligonucleotide primer for the detection of SNP TSC0003899
attttttatgtt

SEQ ID NO: 275456 - DNA, 12 bp, Artificial Sequence
  Oligonucleotide primer for the detection of SNP TSC0003899
tatttcttatac

SEQ ID NO: 275457 - DNA, 12 bp, Artificial Sequence
  Oligonucleotide primer for the detection of SNP TSC0003899
ttttggataatg

SEQ ID NO: 275458 - DNA, 12 bp, Artificial Sequence
  Oligonucleotide primer for the detection of SNP TSC0003900
aaaacacccaac

SEQ ID NO: 275459 - DNA, 12 bp, Artificial Sequence
  Oligonucleotide primer for the detection of SNP TSC0003900
ttttgttggttt

SEQ ID NO: 275460 - DNA, 12 bp, Artificial Sequence
  Oligonucleotide primer for the detection of SNP TSC0003900
ttttgtcggttt

SEQ ID NO: 275461 - DNA, 12 bp, Artificial Sequence
  Oligonucleotide primer for the detection of SNP TSC0003900
tctatcaactca

SEQ ID NO: 275462 - DNA, 12 bp, Artificial Sequence
  Oligonucleotide primer for the detection of SNP TSC0003900
tctatcgactca

SEQ ID NO: 275463 - DNA, 12 bp, Artificial Sequence
  Oligonucleotide primer for the detection of SNP TSC0003900
aaatatttagtt

SEQ ID NO: 275464 - DNA, 12 bp, Artificial Sequence
  Oligonucleotide primer for the detection of SNP TSC0003901
ttaaaaaaataa

SEQ ID NO: 275465 - DNA, 12 bp, Artificial Sequence
  Oligonucleotide primer for the detection of SNP TSC0003901
taaatttttatt

SEQ ID NO: 275466 - DNA, 12 bp, Artificial Sequence
  Oligonucleotide primer for the detection of SNP TSC0003901
caaactttcacc

SEQ ID NO: 275467 - DNA, 12 bp, Artificial Sequence
  Oligonucleotide primer for the detection of SNP TSC0003901
ttgaagaagtaa

SEQ ID NO: 275468 - DNA, 12 bp, Artificial Sequence
  Oligonucleotide primer for the detection of SNP TSC0003902
aataaataaatt

SEQ ID NO: 275469 - DNA, 12 bp, Artificial Sequence
  Oligonucleotide primer for the detection of SNP TSC0003902
attattataatg

SEQ ID NO: 275470 - DNA, 12 bp, Artificial Sequence
  Oligonucleotide primer for the detection of SNP TSC0003902
attattataacg

SEQ ID NO: 275471 - DNA, 12 bp, Artificial Sequence
  Oligonucleotide primer for the detection of SNP TSC0003903
cccaacctataa

SEQ ID NO: 275472 - DNA, 12 bp, Artificial Sequence
  Oligonucleotide primer for the detection of SNP TSC0003903
cccgacctataa

SEQ ID NO: 275473 - DNA, 12 bp, Artificial Sequence
  Oligonucleotide primer for the detection of SNP TSC0003903
agtaaataaaat

SEQ ID NO: 275474 - DNA, 12 bp, Artificial Sequence
  Oligonucleotide primer for the detection of SNP TSC0003903
aacaaacaaaac

SEQ ID NO: 275475 - DNA, 12 bp, Artificial Sequence
  Oligonucleotide primer for the detection of SNP TSC0003903
tttggtttgtga

SEQ ID NO: 275476 - DNA, 12 bp, Artificial Sequence
  Oligonucleotide primer for the detection of SNP TSC0003903
ttcggtttgtga

SEQ ID NO: 275477 - DNA, 12 bp, Artificial Sequence
  Oligonucleotide primer for the detection of SNP TSC0003904
tatttctattac

SEQ ID NO: 275478 - DNA, 12 bp, Artificial Sequence
  Oligonucleotide primer for the detection of SNP TSC0003904
ttaagtttaatg

SEQ ID NO: 275479 - DNA, 12 bp, Artificial Sequence
  Oligonucleotide primer for the detection of SNP TSC0003904
ccaaacccaata

SEQ ID NO: 275480 - DNA, 12 bp, Artificial Sequence
  Oligonucleotide primer for the detection of SNP TSC0003904
tgtttttgttgt

SEQ ID NO: 275481 - DNA, 12 bp, Artificial Sequence
  Oligonucleotide primer for the detection of SNP TSC0003905
aactccatctca

SEQ ID NO: 275482 - DNA, 12 bp, Artificial Sequence
  Oligonucleotide primer for the detection of SNP TSC0003906
ataatcaactac

SEQ ID NO: 275483 - DNA, 12 bp, Artificial Sequence
  Oligonucleotide primer for the detection of SNP TSC0003906
tttttttatttg

SEQ ID NO: 275484 - DNA, 12 bp, Artificial Sequence
  Oligonucleotide primer for the detection of SNP TSC0003906
tttttttattcg

SEQ ID NO: 275485 - DNA, 12 bp, Artificial Sequence
  Oligonucleotide primer for the detection of SNP TSC0003907
aacattaaacca

SEQ ID NO: 275486 - DNA, 12 bp, Artificial Sequence
  Oligonucleotide primer for the detection of SNP TSC0003907
aacgttaaacca

SEQ ID NO: 275487 - DNA, 12 bp, Artificial Sequence
  Oligonucleotide primer for the detection of SNP TSC0003907
attgaggaagat

SEQ ID NO: 275488 - DNA, 12 bp, Artificial Sequence
  Oligonucleotide primer for the detection of SNP TSC0003907
atcgaggaagat

SEQ ID NO: 275489 - DNA, 12 bp, Artificial Sequence
  Oligonucleotide primer for the detection of SNP TSC0003907
accaaaaaaaac

SEQ ID NO: 275490 - DNA, 12 bp, Artificial Sequence
  Oligonucleotide primer for the detection of SNP TSC0003907
accgaaaaaaac

SEQ ID NO: 275491 - DNA, 12 bp, Artificial Sequence
  Oligonucleotide primer for the detection of SNP TSC0003907
aatgttaagtta

SEQ ID NO: 275492 - DNA, 12 bp, Artificial Sequence
  Oligonucleotide primer for the detection of SNP TSC0003907
aacgttaagtta

SEQ ID NO: 275493 - DNA, 12 bp, Artificial Sequence
  Oligonucleotide primer for the detection of SNP TSC0003908
aattatatttca

SEQ ID NO: 275494 - DNA, 12 bp, Artificial Sequence
  Oligonucleotide primer for the detection of SNP TSC0003908
tagttttattat

SEQ ID NO: 275495 - DNA, 12 bp, Artificial Sequence
  Oligonucleotide primer for the detection of SNP TSC0003908
taattccattac

SEQ ID NO: 275496 - DNA, 12 bp, Artificial Sequence
  Oligonucleotide primer for the detection of SNP TSC0003908
agttgtatttta

SEQ ID NO: 275497 - DNA, 12 bp, Artificial Sequence
  Oligonucleotide primer for the detection of SNP TSC0003909
ccattaatcaaa

SEQ ID NO: 275498 - DNA, 12 bp, Artificial Sequence
  Oligonucleotide primer for the detection of SNP TSC0003909
ttagaaggaatt

SEQ ID NO: 275499 - DNA, 12 bp, Artificial Sequence
  Oligonucleotide primer for the detection of SNP TSC0003909
tcaaaaaaaacc

SEQ ID NO: 275500 - DNA, 12 bp, Artificial Sequence
  Oligonucleotide primer for the detection of SNP TSC0003909
ttattggttagg

SEQ ID NO: 275501 - DNA, 12 bp, Artificial Sequence
  Oligonucleotide primer for the detection of SNP TSC0003910
ttttagttgtat

SEQ ID NO: 275502 - DNA, 12 bp, Artificial Sequence
  Oligonucleotide primer for the detection of SNP TSC0003910
cttcaactatac

SEQ ID NO: 275503 - DNA, 12 bp, Artificial Sequence
  Oligonucleotide primer for the detection of SNP TSC0003910
gtttatgaaatg

SEQ ID NO: 275504 - DNA, 12 bp, Artificial Sequence
  Oligonucleotide primer for the detection of SNP TSC0003912
ttcaattaaaac

SEQ ID NO: 275505 - DNA, 12 bp, Artificial Sequence
  Oligonucleotide primer for the detection of SNP TSC0003912
agtgttttaggt

SEQ ID NO: 275506 - DNA, 12 bp, Artificial Sequence
  Oligonucleotide primer for the detection of SNP TSC0003912
agcgttttaggt

SEQ ID NO: 275507 - DNA, 12 bp, Artificial Sequence
  Oligonucleotide primer for the detection of SNP TSC0003912
catcccaaacaa

SEQ ID NO: 275508 - DNA, 12 bp, Artificial Sequence
  Oligonucleotide primer for the detection of SNP TSC0003912
cgtcccaaacaa

SEQ ID NO: 275509 - DNA, 12 bp, Artificial Sequence
  Oligonucleotide primer for the detection of SNP TSC0003912
tttagttaaaat

SEQ ID NO: 275510 - DNA, 12 bp, Artificial Sequence
  Oligonucleotide primer for the detection of SNP TSC0003912
tttagttaaaac

SEQ ID NO: 275511 - DNA, 12 bp, Artificial Sequence
  Oligonucleotide primer for the detection of SNP TSC0003913
aactctcttatc

SEQ ID NO: 275512 - DNA, 12 bp, Artificial Sequence
  Oligonucleotide primer for the detection of SNP TSC0003913
atattatgatag

SEQ ID NO: 275513 - DNA, 12 bp, Artificial Sequence
  Oligonucleotide primer for the detection of SNP TSC0003914
aacaaaaaaccc

SEQ ID NO: 275514 - DNA, 12 bp, Artificial Sequence
  Oligonucleotide primer for the detection of SNP TSC0003914
ttatagttgttt

SEQ ID NO: 275515 - DNA, 12 bp, Artificial Sequence
  Oligonucleotide primer for the detection of SNP TSC0003914
tcataactaccc

SEQ ID NO: 275516 - DNA, 12 bp, Artificial Sequence
  Oligonucleotide primer for the detection of SNP TSC0003914
gatagggagttt

SEQ ID NO: 275517 - DNA, 12 bp, Artificial Sequence
  Oligonucleotide primer for the detection of SNP TSC0003915
tctataaataat

SEQ ID NO: 275518 - DNA, 12 bp, Artificial Sequence
  Oligonucleotide primer for the detection of SNP TSC0003915
tattttttttcg

SEQ ID NO: 275519 - DNA, 12 bp, Artificial Sequence
  Oligonucleotide primer for the detection of SNP TSC0003915
cactttcttcca

SEQ ID NO: 275520 - DNA, 12 bp, Artificial Sequence
  Oligonucleotide primer for the detection of SNP TSC0003915
cactttcttccg

SEQ ID NO: 275521 - DNA, 12 bp, Artificial Sequence
  Oligonucleotide primer for the detection of SNP TSC0003915
tttgtaggtgat

SEQ ID NO: 275522 - DNA, 12 bp, Artificial Sequence
  Oligonucleotide primer for the detection of SNP TSC0003916
cttttaacacaa

SEQ ID NO: 275523 - DNA, 12 bp, Artificial Sequence
  Oligonucleotide primer for the detection of SNP TSC0003916
gggattaaaaat

SEQ ID NO: 275524 - DNA, 12 bp, Artificial Sequence
  Oligonucleotide primer for the detection of SNP TSC0003916
aaatcaaaaata

SEQ ID NO: 275525 - DNA, 12 bp, Artificial Sequence
  Oligonucleotide primer for the detection of SNP TSC0003916
tttttttggtat

SEQ ID NO: 275526 - DNA, 12 bp, Artificial Sequence
  Oligonucleotide primer for the detection of SNP TSC0003917
atatacataaat

SEQ ID NO: 275527 - DNA, 12 bp, Artificial Sequence
  Oligonucleotide primer for the detection of SNP TSC0003917
atatacgtaaat

SEQ ID NO: 275528 - DNA, 12 bp, Artificial Sequence
  Oligonukleotid-Primer
atattttgttaa

SEQ ID NO: 275529 - DNA, 12 bp, Artificial Sequence
  Oligonucleotide primer for the detection of SNP TSC0003917
atattttaccaa

SEQ ID NO: 275530 - DNA, 12 bp, Artificial Sequence
  Oligonucleotide primer for the detection of SNP TSC0003917
gtgtatgtaaat

SEQ ID NO: 275531 - DNA, 12 bp, Artificial Sequence
  Oligonucleotide primer for the detection of SNP TSC0003917
gtgtacgtaaat

SEQ ID NO: 275532 - DNA, 12 bp, Artificial Sequence
  Oligonucleotide primer for the detection of SNP TSC0003918
atttttaatcaa

SEQ ID NO: 275533 - DNA, 12 bp, Artificial Sequence
  Oligonucleotide primer for the detection of SNP TSC0003918
tatggggtattt

SEQ ID NO: 275534 - DNA, 12 bp, Artificial Sequence
  Oligonucleotide primer for the detection of SNP TSC0003918
ataaaacaccca

SEQ ID NO: 275535 - DNA, 12 bp, Artificial Sequence
  Oligonucleotide primer for the detection of SNP TSC0003919
tagtataagtta

SEQ ID NO: 275536 - DNA, 12 bp, Artificial Sequence
  Oligonucleotide primer for the detection of SNP TSC0003919
caacataaatca

SEQ ID NO: 275537 - DNA, 12 bp, Artificial Sequence
  Oligonucleotide primer for the detection of SNP TSC0003919
gggatggggagt

SEQ ID NO: 275538 - DNA, 12 bp, Artificial Sequence
  Oligonucleotide primer for the detection of SNP TSC0003919
gggatggggagc

SEQ ID NO: 275539 - DNA, 12 bp, Artificial Sequence
  Oligonucleotide primer for the detection of SNP TSC0003921
acccacctcaac

SEQ ID NO: 275540 - DNA, 12 bp, Artificial Sequence
  Oligonucleotide primer for the detection of SNP TSC0003921
acccacctcgac

SEQ ID NO: 275541 - DNA, 12 bp, Artificial Sequence
  Oligonucleotide primer for the detection of SNP TSC0003921
attttagtattt

SEQ ID NO: 275542 - DNA, 12 bp, Artificial Sequence
  Oligonucleotide primer for the detection of SNP TSC0003921
atcccaacactt

SEQ ID NO: 275543 - DNA, 12 bp, Artificial Sequence
  Oligonucleotide primer for the detection of SNP TSC0003921
gtttattttggt

SEQ ID NO: 275544 - DNA, 12 bp, Artificial Sequence
  Oligonucleotide primer for the detection of SNP TSC0003921
gtttatttcggt

SEQ ID NO: 275545 - DNA, 12 bp, Artificial Sequence
  Oligonucleotide primer for the detection of SNP TSC0003922
tactaataaatt

SEQ ID NO: 275546 - DNA, 12 bp, Artificial Sequence
  Oligonucleotide primer for the detection of SNP TSC0003922
attagtataaag

SEQ ID NO: 275547 - DNA, 12 bp, Artificial Sequence
  Oligonucleotide primer for the detection of SNP TSC0003923
tcatctttaccc

SEQ ID NO: 275548 - DNA, 12 bp, Artificial Sequence
  Oligonucleotide primer for the detection of SNP TSC0003923
tttgagtaaggg

SEQ ID NO: 275549 - DNA, 12 bp, Artificial Sequence
  Oligonucleotide primer for the detection of SNP TSC0003923
tttaaacaaaaa

SEQ ID NO: 275550 - DNA, 12 bp, Artificial Sequence
  Oligonucleotide primer for the detection of SNP TSC0003925
cccctaaaattc

SEQ ID NO: 275551 - DNA, 12 bp, Artificial Sequence
  Oligonucleotide primer for the detection of SNP TSC0003925
tgagaattttaa

SEQ ID NO: 275552 - DNA, 12 bp, Artificial Sequence
  Oligonucleotide primer for the detection of SNP TSC0003925
tttttaaagttt

SEQ ID NO: 275553 - DNA, 12 bp, Artificial Sequence
  Oligonucleotide primer for the detection of SNP TSC0003926
taatctaaaccc

SEQ ID NO: 275554 - DNA, 12 bp, Artificial Sequence
  Oligonucleotide primer for the detection of SNP TSC0003926
gatattattatg

SEQ ID NO: 275555 - DNA, 12 bp, Artificial Sequence
  Oligonucleotide primer for the detection of SNP TSC0003927
aggaaagaaggt

SEQ ID NO: 275556 - DNA, 12 bp, Artificial Sequence
  Oligonucleotide primer for the detection of SNP TSC0003928
cccaaaacctaa

SEQ ID NO: 275557 - DNA, 12 bp, Artificial Sequence
  Oligonucleotide primer for the detection of SNP TSC0003928
cccgaaacctaa

SEQ ID NO: 275558 - DNA, 12 bp, Artificial Sequence
  Oligonucleotide primer for the detection of SNP TSC0003928
agttagtagttt

SEQ ID NO: 275559 - DNA, 12 bp, Artificial Sequence
  Oligonucleotide primer for the detection of SNP TSC0003928
aaccaacaaccc

SEQ ID NO: 275560 - DNA, 12 bp, Artificial Sequence
  Oligonucleotide primer for the detection of SNP TSC0003928
tttggggtttgg

SEQ ID NO: 275561 - DNA, 12 bp, Artificial Sequence
  Oligonucleotide primer for the detection of SNP TSC0003928
ttcggggtttgg

SEQ ID NO: 275562 - DNA, 12 bp, Artificial Sequence
  Oligonucleotide primer for the detection of SNP TSC0003929
ggttttttttta

SEQ ID NO: 275563 - DNA, 12 bp, Artificial Sequence
  Oligonucleotide primer for the detection of SNP TSC0003930
acataaaaaaac

SEQ ID NO: 275564 - DNA, 12 bp, Artificial Sequence
  Oligonucleotide primer for the detection of SNP TSC0003930
tagtagagatag

SEQ ID NO: 275565 - DNA, 12 bp, Artificial Sequence
  Oligonucleotide primer for the detection of SNP TSC0003930
taataaaaacaa

SEQ ID NO: 275566 - DNA, 12 bp, Artificial Sequence
  Oligonucleotide primer for the detection of SNP TSC0003930
atatggagaaat

SEQ ID NO: 275567 - DNA, 12 bp, Artificial Sequence
  Oligonucleotide primer for the detection of SNP TSC0003931
atctaattattc

SEQ ID NO: 275568 - DNA, 12 bp, Artificial Sequence
  Oligonucleotide primer for the detection of SNP TSC0003931
tgttttttaaaa

SEQ ID NO: 275569 - DNA, 12 bp, Artificial Sequence
  Oligonucleotide primer for the detection of SNP TSC0003931
cgttttttaaaa

SEQ ID NO: 275570 - DNA, 12 bp, Artificial Sequence
  Oligonucleotide primer for the detection of SNP TSC0003932
taacaacaaata

SEQ ID NO: 275571 - DNA, 12 bp, Artificial Sequence
  Oligonucleotide primer for the detection of SNP TSC0003932
gtagtttaaaat

SEQ ID NO: 275572 - DNA, 12 bp, Artificial Sequence
  Oligonucleotide primer for the detection of SNP TSC0003932
acaactcaaaac

SEQ ID NO: 275573 - DNA, 12 bp, Artificial Sequence
  Oligonucleotide primer for the detection of SNP TSC0003932
tgatagtaaatg

SEQ ID NO: 275574 - DNA, 12 bp, Artificial Sequence
  Oligonucleotide primer for the detection of SNP TSC0003933
ctactaaaaatt

SEQ ID NO: 275575 - DNA, 12 bp, Artificial Sequence
  Oligonucleotide primer for the detection of SNP TSC0003933
aagataattata

SEQ ID NO: 275576 - DNA, 12 bp, Artificial Sequence
  Oligonucleotide primer for the detection of SNP TSC0003934
aaatatttcctc

SEQ ID NO: 275577 - DNA, 12 bp, Artificial Sequence
  Oligonucleotide primer for the detection of SNP TSC0003934
attgttttatat

SEQ ID NO: 275578 - DNA, 12 bp, Artificial Sequence
  Oligonucleotide primer for the detection of SNP TSC0003934
ttactttatata

SEQ ID NO: 275579 - DNA, 12 bp, Artificial Sequence
  Oligonucleotide primer for the detection of SNP TSC0003934
aagtgttttttt

SEQ ID NO: 275580 - DNA, 12 bp, Artificial Sequence
  Oligonucleotide primer for the detection of SNP TSC0003935
ttttataactac

SEQ ID NO: 275581 - DNA, 12 bp, Artificial Sequence
  Oligonucleotide primer for the detection of SNP TSC0003935
gtaattttattt

SEQ ID NO: 275582 - DNA, 12 bp, Artificial Sequence
  Oligonucleotide primer for the detection of SNP TSC0003935
caatcccattca

SEQ ID NO: 275583 - DNA, 12 bp, Artificial Sequence
  Oligonucleotide primer for the detection of SNP TSC0003935
tttgtggttatt

SEQ ID NO: 275584 - DNA, 12 bp, Artificial Sequence
  Oligonucleotide primer for the detection of SNP TSC0003936
atatcaaaactc

SEQ ID NO: 275585 - DNA, 12 bp, Artificial Sequence
  Oligonucleotide primer for the detection of SNP TSC0003936
gattttttttta

SEQ ID NO: 275586 - DNA, 12 bp, Artificial Sequence
  Oligonucleotide primer for the detection of SNP TSC0003937
caccataatacc

SEQ ID NO: 275587 - DNA, 12 bp, Artificial Sequence
  Oligonucleotide primer for the detection of SNP TSC0003937
caccgtaatacc

SEQ ID NO: 275588 - DNA, 12 bp, Artificial Sequence
  Oligonucleotide primer for the detection of SNP TSC0003937
gtttttaggtgg

SEQ ID NO: 275589 - DNA, 12 bp, Artificial Sequence
  Oligonucleotide primer for the detection of SNP TSC0003937
gtttttaggcgg

SEQ ID NO: 275590 - DNA, 12 bp, Artificial Sequence
  Oligonucleotide primer for the detection of SNP TSC0003938
tcaccataatac

SEQ ID NO: 275591 - DNA, 12 bp, Artificial Sequence
  Oligonucleotide primer for the detection of SNP TSC0003938
tcaccgtaatac

SEQ ID NO: 275592 - DNA, 12 bp, Artificial Sequence
  Oligonucleotide primer for the detection of SNP TSC0003938
tttttaggtgga

SEQ ID NO: 275593 - DNA, 12 bp, Artificial Sequence
  Oligonucleotide primer for the detection of SNP TSC0003938
tttttaggcgga

SEQ ID NO: 275594 - DNA, 12 bp, Artificial Sequence
  Oligonucleotide primer for the detection of SNP TSC0003940
ataatccactca

SEQ ID NO: 275595 - DNA, 12 bp, Artificial Sequence
  Oligonucleotide primer for the detection of SNP TSC0003940
ataatccactcg

SEQ ID NO: 275596 - DNA, 12 bp, Artificial Sequence
  Oligonucleotide primer for the detection of SNP TSC0003940
ataatccgctca

SEQ ID NO: 275597 - DNA, 12 bp, Artificial Sequence
  Oligonucleotide primer for the detection of SNP TSC0003940
ataatccgctcg

SEQ ID NO: 275598 - DNA, 12 bp, Artificial Sequence
  Oligonucleotide primer for the detection of SNP TSC0003940
attgtgggaggt

SEQ ID NO: 275599 - DNA, 12 bp, Artificial Sequence
  Oligonucleotide primer for the detection of SNP TSC0003940
actataaaaaac

SEQ ID NO: 275600 - DNA, 12 bp, Artificial Sequence
  Oligonucleotide primer for the detection of SNP TSC0003940
gtgattcgtttg

SEQ ID NO: 275601 - DNA, 12 bp, Artificial Sequence
  Oligonucleotide primer for the detection of SNP TSC0003940
gtgatttgttcg

SEQ ID NO: 275602 - DNA, 12 bp, Artificial Sequence
  Oligonucleotide primer for the detection of SNP TSC0003940
gtgattcgttcg

SEQ ID NO: 275603 - DNA, 12 bp, Artificial Sequence
  Oligonucleotide primer for the detection of SNP TSC0003941
atataaaaaccc

SEQ ID NO: 275604 - DNA, 12 bp, Artificial Sequence
  Oligonucleotide primer for the detection of SNP TSC0003941
ttttgttgtgtt

SEQ ID NO: 275605 - DNA, 12 bp, Artificial Sequence
  Oligonukleotid-Primer
tctattatacta

SEQ ID NO: 275606 - DNA, 12 bp, Artificial Sequence
  Oligonucleotide primer for the detection of SNP TSC0003941
atgtaaaggttt

SEQ ID NO: 275607 - DNA, 12 bp, Artificial Sequence
  Oligonucleotide primer for the detection of SNP TSC0003941
atgtaaaggttc

SEQ ID NO: 275608 - DNA, 12 bp, Artificial Sequence
  Oligonucleotide primer for the detection of SNP TSC0003942
gatggaaaaaat

SEQ ID NO: 275609 - DNA, 12 bp, Artificial Sequence
  Oligonucleotide primer for the detection of SNP TSC0003942
taggggatatta

SEQ ID NO: 275610 - DNA, 12 bp, Artificial Sequence
  Oligonucleotide primer for the detection of SNP TSC0003943
tacaaataaata

SEQ ID NO: 275611 - DNA, 12 bp, Artificial Sequence
  Oligonucleotide primer for the detection of SNP TSC0003943
aatatttttttt

SEQ ID NO: 275612 - DNA, 12 bp, Artificial Sequence
  Oligonucleotide primer for the detection of SNP TSC0003943
aatacttcttcc

SEQ ID NO: 275613 - DNA, 12 bp, Artificial Sequence
  Oligonucleotide primer for the detection of SNP TSC0003943
tgtaaatgagta

SEQ ID NO: 275614 - DNA, 12 bp, Artificial Sequence
  Oligonucleotide primer for the detection of SNP TSC0003944
cctaactcaacc

SEQ ID NO: 275615 - DNA, 12 bp, Artificial Sequence
  Oligonucleotide primer for the detection of SNP TSC0003944
ttaagatagtta

SEQ ID NO: 275616 - DNA, 12 bp, Artificial Sequence
  Oligonucleotide primer for the detection of SNP TSC0003944
ccaaaacaacca

SEQ ID NO: 275617 - DNA, 12 bp, Artificial Sequence
  Oligonucleotide primer for the detection of SNP TSC0003944
tttggtttagtt

SEQ ID NO: 275618 - DNA, 12 bp, Artificial Sequence
  Oligonucleotide primer for the detection of SNP TSC0003945
ttaaaatcaacc

SEQ ID NO: 275619 - DNA, 12 bp, Artificial Sequence
  Oligonucleotide primer for the detection of SNP TSC0003945
ttttgttattgg

SEQ ID NO: 275620 - DNA, 12 bp, Artificial Sequence
  Oligonucleotide primer for the detection of SNP TSC0003946
ggaaagaaggtt

SEQ ID NO: 275621 - DNA, 12 bp, Artificial Sequence
  Oligonucleotide primer for the detection of SNP TSC0003946
aaaaaaaaaact

SEQ ID NO: 275622 - DNA, 12 bp, Artificial Sequence
  Oligonucleotide primer for the detection of SNP TSC0003947
acacacacacac

SEQ ID NO: 275623 - DNA, 12 bp, Artificial Sequence
  Oligonucleotide primer for the detection of SNP TSC0003948
taatttaaaatc

SEQ ID NO: 275624 - DNA, 12 bp, Artificial Sequence
  Oligonucleotide primer for the detection of SNP TSC0003948
tttaagaaaaaa

SEQ ID NO: 275625 - DNA, 12 bp, Artificial Sequence
  Oligonucleotide primer for the detection of SNP TSC0003949
tcttatctattt

SEQ ID NO: 275626 - DNA, 12 bp, Artificial Sequence
  Oligonucleotide primer for the detection of SNP TSC0003949
tattttttgagg

SEQ ID NO: 275627 - DNA, 12 bp, Artificial Sequence
  Oligonucleotide primer for the detection of SNP TSC0003950
atcttatctatt

SEQ ID NO: 275628 - DNA, 12 bp, Artificial Sequence
  Oligonucleotide primer for the detection of SNP TSC0003950
tttattttttga

SEQ ID NO: 275629 - DNA, 12 bp, Artificial Sequence
  Oligonucleotide primer for the detection of SNP TSC0003950
attctctaaaaa

SEQ ID NO: 275630 - DNA, 12 bp, Artificial Sequence
  Oligonucleotide primer for the detection of SNP TSC0003950
gttttgtttatt

SEQ ID NO: 275631 - DNA, 12 bp, Artificial Sequence
  Oligonucleotide primer for the detection of SNP TSC0003951
ataaactaaaca

SEQ ID NO: 275632 - DNA, 12 bp, Artificial Sequence
  Oligonucleotide primer for the detection of SNP TSC0003951
tttgtgtagaat

SEQ ID NO: 275633 - DNA, 12 bp, Artificial Sequence
  Oligonucleotide primer for the detection of SNP TSC0003951
ttcgtgtagaat

SEQ ID NO: 275634 - DNA, 12 bp, Artificial Sequence
  Oligonucleotide primer for the detection of SNP TSC0003951
ccatataaaata

SEQ ID NO: 275635 - DNA, 12 bp, Artificial Sequence
  Oligonucleotide primer for the detection of SNP TSC0003951
ccgtataaaata

SEQ ID NO: 275636 - DNA, 12 bp, Artificial Sequence
  Oligonucleotide primer for the detection of SNP TSC0003951
tatgaattaggt

SEQ ID NO: 275637 - DNA, 12 bp, Artificial Sequence
  Oligonucleotide primer for the detection of SNP TSC0003952
actctcaacaat

SEQ ID NO: 275638 - DNA, 12 bp, Artificial Sequence
  Oligonucleotide primer for the detection of SNP TSC0003952
gagagaggagta

SEQ ID NO: 275639 - DNA, 12 bp, Artificial Sequence
  Oligonucleotide primer for the detection of SNP TSC0003953
tataattaacaa

SEQ ID NO: 275640 - DNA, 12 bp, Artificial Sequence
  Oligonucleotide primer for the detection of SNP TSC0003953
atatttatattt

SEQ ID NO: 275641 - DNA, 12 bp, Artificial Sequence
  Oligonucleotide primer for the detection of SNP TSC0003953
atatttataccc

SEQ ID NO: 275642 - DNA, 12 bp, Artificial Sequence
  Oligonucleotide primer for the detection of SNP TSC0003953
tataattagtag

SEQ ID NO: 275643 - DNA, 12 bp, Artificial Sequence
  Oligonucleotide primer for the detection of SNP TSC0003954
aaaacatcctta

SEQ ID NO: 275644 - DNA, 12 bp, Artificial Sequence
  Oligonucleotide primer for the detection of SNP TSC0003954
aaaacgtcctta

SEQ ID NO: 275645 - DNA, 12 bp, Artificial Sequence
  Oligonucleotide primer for the detection of SNP TSC0003954
gttttaaaattt

SEQ ID NO: 275646 - DNA, 12 bp, Artificial Sequence
  Oligonucleotide primer for the detection of SNP TSC0003954
accctaaaactt

SEQ ID NO: 275647 - DNA, 12 bp, Artificial Sequence
  Oligonucleotide primer for the detection of SNP TSC0003954
gaaagtgttttt

SEQ ID NO: 275648 - DNA, 12 bp, Artificial Sequence
  Oligonucleotide primer for the detection of SNP TSC0003954
gaaagcgttttt

SEQ ID NO: 275649 - DNA, 12 bp, Artificial Sequence
  Oligonucleotide primer for the detection of SNP TSC0003955
acaccctccccc

SEQ ID NO: 275650 - DNA, 12 bp, Artificial Sequence
  Oligonucleotide primer for the detection of SNP TSC0003955
atattgttttta

SEQ ID NO: 275651 - DNA, 12 bp, Artificial Sequence
  Oligonucleotide primer for the detection of SNP TSC0003956
ataactactata

SEQ ID NO: 275652-275653 - skipped (2 entries)

SEQ ID NO: 275654 - DNA, 12 bp, Artificial Sequence
  Oligonucleotide primer for the detection of SNP TSC0003956
gtgattgttgta

SEQ ID NO: 275655 - DNA, 12 bp, Artificial Sequence
  Oligonucleotide primer for the detection of SNP TSC0003957
aaaaaaaaatcc

SEQ ID NO: 275656 - DNA, 12 bp, Artificial Sequence
  Oligonucleotide primer for the detection of SNP TSC0003957
ttttaggggata

SEQ ID NO: 275657 - DNA, 12 bp, Artificial Sequence
  Oligonucleotide primer for the detection of SNP TSC0003958
atctataaacta

SEQ ID NO: 275658 - DNA, 12 bp, Artificial Sequence
  Oligonucleotide primer for the detection of SNP TSC0003958
gaatatttgtag

SEQ ID NO: 275659 - DNA, 12 bp, Artificial Sequence
  Oligonucleotide primer for the detection of SNP TSC0003958
gaatattcgtag

SEQ ID NO: 275660 - DNA, 12 bp, Artificial Sequence
  Oligonucleotide primer for the detection of SNP TSC0003958
acatccataaaa

SEQ ID NO: 275661 - DNA, 12 bp, Artificial Sequence
  Oligonucleotide primer for the detection of SNP TSC0003958
acatccgtaaaa

SEQ ID NO: 275662 - DNA, 12 bp, Artificial Sequence
  Oligonucleotide primer for the detection of SNP TSC0003958
tgtttgtgagtt

SEQ ID NO: 275663 - DNA, 12 bp, Artificial Sequence
  Oligonucleotide primer for the detection of SNP TSC0003959
ctattctctctc

SEQ ID NO: 275664 - DNA, 12 bp, Artificial Sequence
  Oligonucleotide primer for the detection of SNP TSC0003959
ttggatgagaag

SEQ ID NO: 275665 - DNA, 12 bp, Artificial Sequence
  Oligonucleotide primer for the detection of SNP TSC0003959
ctaaataaaaaa

SEQ ID NO: 275666 - DNA, 12 bp, Artificial Sequence
  Oligonucleotide primer for the detection of SNP TSC0003960
aaaaaaaatcat

SEQ ID NO: 275667 - DNA, 12 bp, Artificial Sequence
  Oligonucleotide primer for the detection of SNP TSC0003960
ggggtttaaatg

SEQ ID NO: 275668 - DNA, 12 bp, Artificial Sequence
  Oligonucleotide primer for the detection of SNP TSC0003960
aaaactcaaata

SEQ ID NO: 275669 - DNA, 12 bp, Artificial Sequence
  Oligonucleotide primer for the detection of SNP TSC0003960
agagggggttat

SEQ ID NO: 275670 - DNA, 12 bp, Artificial Sequence
  Oligonucleotide primer for the detection of SNP TSC0003961
ttacccctaaat

SEQ ID NO: 275671 - DNA, 12 bp, Artificial Sequence
  Oligonucleotide primer for the detection of SNP TSC0003961
ctactactcatt

SEQ ID NO: 275672 - DNA, 12 bp, Artificial Sequence
  Oligonucleotide primer for the detection of SNP TSC0003961
ttgtttttagat

SEQ ID NO: 275673 - DNA, 12 bp, Artificial Sequence
  Oligonucleotide primer for the detection of SNP TSC0003962
ccaaaaaattcc

SEQ ID NO: 275674 - DNA, 12 bp, Artificial Sequence
  Oligonucleotide primer for the detection of SNP TSC0003962
tatatagatgta

SEQ ID NO: 275675 - DNA, 12 bp, Artificial Sequence
  Oligonucleotide primer for the detection of SNP TSC0003962
tatacaaataca

SEQ ID NO: 275676 - DNA, 12 bp, Artificial Sequence
  Oligonucleotide primer for the detection of SNP TSC0003962
ttaaaaagtttt

SEQ ID NO: 275677 - DNA, 12 bp, Artificial Sequence
  Oligonucleotide primer for the detection of SNP TSC0003963
actacaaaattc

SEQ ID NO: 275678 - DNA, 12 bp, Artificial Sequence
  Oligonucleotide primer for the detection of SNP TSC0003963
tagtattaatta

SEQ ID NO: 275679 - DNA, 12 bp, Artificial Sequence
  Oligonucleotide primer for the detection of SNP TSC0003964
tttaactaaata

SEQ ID NO: 275680 - DNA, 12 bp, Artificial Sequence
  Oligonucleotide primer for the detection of SNP TSC0003964
ggtatgaattat

SEQ ID NO: 275681 - DNA, 12 bp, Artificial Sequence
  Oligonucleotide primer for the detection of SNP TSC0003964
tttggttgggtg

SEQ ID NO: 275682 - DNA, 12 bp, Artificial Sequence
  Oligonucleotide primer for the detection of SNP TSC0003965
ctatccaccata

SEQ ID NO: 275683 - DNA, 12 bp, Artificial Sequence
  Oligonucleotide primer for the detection of SNP TSC0003965
ttttgtgttttt

SEQ ID NO: 275684 - DNA, 12 bp, Artificial Sequence
  Oligonucleotide primer for the detection of SNP TSC0003965
tctctatatcct

SEQ ID NO: 275685 - DNA, 12 bp, Artificial Sequence
  Oligonucleotide primer for the detection of SNP TSC0003965
tttgtttattat

SEQ ID NO: 275686 - DNA, 12 bp, Artificial Sequence
  Oligonucleotide primer for the detection of SNP TSC0003966
cactatcatctt

SEQ ID NO: 275687 - DNA, 12 bp, Artificial Sequence
  Oligonucleotide primer for the detection of SNP TSC0003966
aaaagtattttt

SEQ ID NO: 275688 - DNA, 12 bp, Artificial Sequence
  Oligonucleotide primer for the detection of SNP TSC0003967
ttcaaacccaat

SEQ ID NO: 275689 - DNA, 12 bp, Artificial Sequence
  Oligonucleotide primer for the detection of SNP TSC0003967
attgaaattaaa

SEQ ID NO: 275690 - DNA, 12 bp, Artificial Sequence
  Oligonukleotid-Primer
attaaaactaaa

SEQ ID NO: 275691 - DNA, 12 bp, Artificial Sequence
  Oligonucleotide primer for the detection of SNP TSC0003967
tttaaatttagt

SEQ ID NO: 275692 - DNA, 12 bp, Artificial Sequence
  Oligonucleotide primer for the detection of SNP TSC0003968
tcaccctacaat

SEQ ID NO: 275693 - DNA, 12 bp, Artificial Sequence
  Oligonucleotide primer for the detection of SNP TSC0003968
gatagggtatta

SEQ ID NO: 275694 - DNA, 12 bp, Artificial Sequence
  Oligonukleotid-Primer
tcactataactc

SEQ ID NO: 275695 - DNA, 12 bp, Artificial Sequence
  Oligonucleotide primer for the detection of SNP TSC0003969
ggtttgatgttt

SEQ ID NO: 275696 - DNA, 12 bp, Artificial Sequence
  Oligonucleotide primer for the detection of SNP TSC0003969
aacttaataccc

SEQ ID NO: 275697 - DNA, 12 bp, Artificial Sequence
  Oligonucleotide primer for the detection of SNP TSC0003969
ttattataattt

SEQ ID NO: 275698 - DNA, 12 bp, Artificial Sequence
  Oligonucleotide primer for the detection of SNP TSC0003970
aaacccaaaaac

SEQ ID NO: 275699 - DNA, 12 bp, Artificial Sequence
  Oligonucleotide primer for the detection of SNP TSC0003970
gtggttaggatg

SEQ ID NO: 275700 - DNA, 12 bp, Artificial Sequence
  Oligonucleotide primer for the detection of SNP TSC0003970
ataaccaaaata

SEQ ID NO: 275701 - DNA, 12 bp, Artificial Sequence
  Oligonucleotide primer for the detection of SNP TSC0003970
gaatttagaggt

SEQ ID NO: 275702 - DNA, 12 bp, Artificial Sequence
  Oligonucleotide primer for the detection of SNP TSC0003971
taaacaaatcac

SEQ ID NO: 275703 - DNA, 12 bp, Artificial Sequence
  Oligonucleotide primer for the detection of SNP TSC0003971
taaacgaatcac

SEQ ID NO: 275704 - DNA, 12 bp, Artificial Sequence
  Oligonucleotide primer for the detection of SNP TSC0003971
tttttgatttaa

SEQ ID NO: 275705 - DNA, 12 bp, Artificial Sequence
  Oligonucleotide primer for the detection of SNP TSC0003973
ttaaaaacttac

SEQ ID NO: 275706 - DNA, 12 bp, Artificial Sequence
  Oligonucleotide primer for the detection of SNP TSC0003973
ttgaaggttgta

SEQ ID NO: 275707 - DNA, 12 bp, Artificial Sequence
  Oligonucleotide primer for the detection of SNP TSC0003974
aatatcaccatt

SEQ ID NO: 275708 - DNA, 12 bp, Artificial Sequence
  Oligonucleotide primer for the detection of SNP TSC0003974
aatatcaccgtt

SEQ ID NO: 275709 - DNA, 12 bp, Artificial Sequence
  Oligonucleotide primer for the detection of SNP TSC0003974
ggtaatttttag

SEQ ID NO: 275710 - DNA, 12 bp, Artificial Sequence
  Oligonucleotide primer for the detection of SNP TSC0003975
ccctttacaaat

SEQ ID NO: 275711 - DNA, 12 bp, Artificial Sequence
  Oligonucleotide primer for the detection of SNP TSC0003975
atagtttttttg

SEQ ID NO: 275712 - DNA, 12 bp, Artificial Sequence
  Oligonucleotide primer for the detection of SNP TSC0003975
atagttttttcg

SEQ ID NO: 275713 - DNA, 12 bp, Artificial Sequence
  Oligonucleotide primer for the detection of SNP TSC0003976
aaattcaaacta

SEQ ID NO: 275714 - DNA, 12 bp, Artificial Sequence
  Oligonucleotide primer for the detection of SNP TSC0003976
tttgataatgtt

SEQ ID NO: 275715 - DNA, 12 bp, Artificial Sequence
  Oligonucleotide primer for the detection of SNP TSC0003976
tctaacaatatt

SEQ ID NO: 275716 - DNA, 12 bp, Artificial Sequence
  Oligonucleotide primer for the detection of SNP TSC0003976
aggtttaggtta

SEQ ID NO: 275717 - DNA, 12 bp, Artificial Sequence
  Oligonucleotide primer for the detection of SNP TSC0003977
acatccacttat

SEQ ID NO: 275718 - DNA, 12 bp, Artificial Sequence
  Oligonucleotide primer for the detection of SNP TSC0003977
acatccgcttat

SEQ ID NO: 275719 - DNA, 12 bp, Artificial Sequence
  Oligonucleotide primer for the detection of SNP TSC0003977
ttttttggatga

SEQ ID NO: 275720 - DNA, 12 bp, Artificial Sequence
  Oligonucleotide primer for the detection of SNP TSC0003977
ctctctaaataa

SEQ ID NO: 275721 - DNA, 12 bp, Artificial Sequence
  Oligonucleotide primer for the detection of SNP TSC0003977
gtatttgtttgt

SEQ ID NO: 275722 - DNA, 12 bp, Artificial Sequence
  Oligonucleotide primer for the detection of SNP TSC0003977
gtattcgtttgt

SEQ ID NO: 275723 - DNA, 12 bp, Artificial Sequence
  Oligonucleotide primer for the detection of SNP TSC0003978
ataaacaaacta

SEQ ID NO: 275724 - DNA, 12 bp, Artificial Sequence
  Oligonucleotide primer for the detection of SNP TSC0003978
gaagaatagaat

SEQ ID NO: 275725 - DNA, 12 bp, Artificial Sequence
  Oligonucleotide primer for the detection of SNP TSC0003978
gtagataggtta

SEQ ID NO: 275726 - DNA, 12 bp, Artificial Sequence
  Oligonucleotide primer for the detection of SNP TSC0003979
ataccaaaaaca

SEQ ID NO: 275727 - DNA, 12 bp, Artificial Sequence
  Oligonucleotide primer for the detection of SNP TSC0003979
atgtattttttt

SEQ ID NO: 275728 - DNA, 12 bp, Artificial Sequence
  Oligonucleotide primer for the detection of SNP TSC0003979
acgtattttttt

SEQ ID NO: 275729 - DNA, 12 bp, Artificial Sequence
  Oligonucleotide primer for the detection of SNP TSC0003979
aacacatttttc

SEQ ID NO: 275730 - DNA, 12 bp, Artificial Sequence
  Oligonucleotide primer for the detection of SNP TSC0003979
aacgcatttttc

SEQ ID NO: 275731 - DNA, 12 bp, Artificial Sequence
  Oligonucleotide primer for the detection of SNP TSC0003979
tgtgttagaggt

SEQ ID NO: 275732 - DNA, 12 bp, Artificial Sequence
  Oligonucleotide primer for the detection of SNP TSC0003980
acttaaacacac

SEQ ID NO: 275733 - DNA, 12 bp, Artificial Sequence
  Oligonucleotide primer for the detection of SNP TSC0003980
aagtttattaat

SEQ ID NO: 275734 - DNA, 12 bp, Artificial Sequence
  Oligonucleotide primer for the detection of SNP TSC0003980
aaaattcatcaa

SEQ ID NO: 275735 - DNA, 12 bp, Artificial Sequence
  Oligonucleotide primer for the detection of SNP TSC0003980
tttagatatatt

SEQ ID NO: 275736 - DNA, 12 bp, Artificial Sequence
  Oligonucleotide primer for the detection of SNP TSC0003981
aaaaaataacac

SEQ ID NO: 275737 - DNA, 12 bp, Artificial Sequence
  Oligonucleotide primer for the detection of SNP TSC0003981
ctcattttttca

SEQ ID NO: 275738 - DNA, 12 bp, Artificial Sequence
  Oligonucleotide primer for the detection of SNP TSC0003981
agaaaatggtat

SEQ ID NO: 275739 - DNA, 12 bp, Artificial Sequence
  Oligonucleotide primer for the detection of SNP TSC0003981
agaaaatggtac

SEQ ID NO: 275740 - DNA, 12 bp, Artificial Sequence
  Oligonucleotide primer for the detection of SNP TSC0003983
aaaaacatttca

SEQ ID NO: 275741 - DNA, 12 bp, Artificial Sequence
  Oligonucleotide primer for the detection of SNP TSC0003983
aatgtgggtttt

SEQ ID NO: 275742 - DNA, 12 bp, Artificial Sequence
  Oligonucleotide primer for the detection of SNP TSC0003983
aatataaatcct

SEQ ID NO: 275743 - DNA, 12 bp, Artificial Sequence
  Oligonucleotide primer for the detection of SNP TSC0003983
gaaagtatttta

SEQ ID NO: 275744 - DNA, 12 bp, Artificial Sequence
  Oligonucleotide primer for the detection of SNP TSC0003984
aaatataatcac

SEQ ID NO: 275745 - DNA, 12 bp, Artificial Sequence
  Oligonucleotide primer for the detection of SNP TSC0003984
gtttagttttta

SEQ ID NO: 275746 - DNA, 12 bp, Artificial Sequence
  Oligonucleotide primer for the detection of SNP TSC0003985
aaacaataaatt

SEQ ID NO: 275747 - DNA, 12 bp, Artificial Sequence
  Oligonucleotide primer for the detection of SNP TSC0003985
tgaagaatttta

SEQ ID NO: 275748 - DNA, 12 bp, Artificial Sequence
  Oligonucleotide primer for the detection of SNP TSC0003986
atatctccaccc

SEQ ID NO: 275749 - DNA, 12 bp, Artificial Sequence
  Oligonucleotide primer for the detection of SNP TSC0003986
agtggaagagag

SEQ ID NO: 275750 - DNA, 12 bp, Artificial Sequence
  Oligonucleotide primer for the detection of SNP TSC0003987
ttttggtaaggg

SEQ ID NO: 275751 - DNA, 12 bp, Artificial Sequence
  Oligonucleotide primer for the detection of SNP TSC0003988
aataaatacaaa

SEQ ID NO: 275752 - DNA, 12 bp, Artificial Sequence
  Oligonucleotide primer for the detection of SNP TSC0003988
ttttctttaatc

SEQ ID NO: 275753 - DNA, 12 bp, Artificial Sequence
  Oligonucleotide primer for the detection of SNP TSC0003988
atagatataaat

SEQ ID NO: 275754 - DNA, 12 bp, Artificial Sequence
  Oligonucleotide primer for the detection of SNP TSC0003988
atagatataaac

SEQ ID NO: 275755 - DNA, 12 bp, Artificial Sequence
  Oligonucleotide primer for the detection of SNP TSC0003991
tttaaaaacaat

SEQ ID NO: 275756 - DNA, 12 bp, Artificial Sequence
  Oligonucleotide primer for the detection of SNP TSC0003991
gatgatatgaaa

SEQ ID NO: 275757 - DNA, 12 bp, Artificial Sequence
  Oligonucleotide primer for the detection of SNP TSC0003991
gatgatacgaaa

SEQ ID NO: 275758 - DNA, 12 bp, Artificial Sequence
  Oligonucleotide primer for the detection of SNP TSC0003991
aataatacaaaa

SEQ ID NO: 275759 - DNA, 12 bp, Artificial Sequence
  Oligonucleotide primer for the detection of SNP TSC0003991
aataatacgaaa

SEQ ID NO: 275760 - DNA, 12 bp, Artificial Sequence
  Oligonucleotide primer for the detection of SNP TSC0003991
ttggaaatagtt

SEQ ID NO: 275761 - DNA, 12 bp, Artificial Sequence
  Oligonucleotide primer for the detection of SNP TSC0003991
ttggaaatagtc

SEQ ID NO: 275762 - DNA, 12 bp, Artificial Sequence
  Oligonucleotide primer for the detection of SNP TSC0003993
aaacaaaactta

SEQ ID NO: 275763 - DNA, 12 bp, Artificial Sequence
  Oligonucleotide primer for the detection of SNP TSC0003993
atttgtaggtat

SEQ ID NO: 275764 - DNA, 12 bp, Artificial Sequence
  Oligonucleotide primer for the detection of SNP TSC0003993
acctacaaacat

SEQ ID NO: 275765 - DNA, 12 bp, Artificial Sequence
  Oligonucleotide primer for the detection of SNP TSC0003993
ggaataaagttt

SEQ ID NO: 275766 - DNA, 12 bp, Artificial Sequence
  Oligonucleotide primer for the detection of SNP TSC0003995
cctaacccatca

SEQ ID NO: 275767 - DNA, 12 bp, Artificial Sequence
  Oligonucleotide primer for the detection of SNP TSC0003995
aggtagggtaga

SEQ ID NO: 275768 - DNA, 12 bp, Artificial Sequence
  Oligonucleotide primer for the detection of SNP TSC0003995
aacaaaacaaaa

SEQ ID NO: 275769 - DNA, 12 bp, Artificial Sequence
  Oligonucleotide primer for the detection of SNP TSC0003995
ggtttattattt

SEQ ID NO: 275770 - DNA, 12 bp, Artificial Sequence
  Oligonucleotide primer for the detection of SNP TSC0003995
ggtttattattc

SEQ ID NO: 275771 - DNA, 12 bp, Artificial Sequence
  Oligonukleotid-Primer
acatcacacaca

SEQ ID NO: 275772 - DNA, 12 bp, Artificial Sequence
  Oligonucleotide primer for the detection of SNP TSC0003997
acatcacacacg

SEQ ID NO: 275773 - DNA, 12 bp, Artificial Sequence
  Oligonucleotide primer for the detection of SNP TSC0003997
acatcgcacaca

SEQ ID NO: 275774 - DNA, 12 bp, Artificial Sequence
  Oligonucleotide primer for the detection of SNP TSC0003997
acatcgcacacg

SEQ ID NO: 275775 - DNA, 12 bp, Artificial Sequence
  Oligonucleotide primer for the detection of SNP TSC0003997
tttttttgtttt

SEQ ID NO: 275776 - DNA, 12 bp, Artificial Sequence
  Oligonucleotide primer for the detection of SNP TSC0003997
ttttcctatctc

SEQ ID NO: 275777 - DNA, 12 bp, Artificial Sequence
  Oligonucleotide primer for the detection of SNP TSC0003997
gtattgtatatg

SEQ ID NO: 275778 - DNA, 12 bp, Artificial Sequence
  Oligonucleotide primer for the detection of SNP TSC0003997
gtatcgtatatg

SEQ ID NO: 275779 - DNA, 12 bp, Artificial Sequence
  Oligonucleotide primer for the detection of SNP TSC0003997
gtattgtatacg

SEQ ID NO: 275780 - DNA, 12 bp, Artificial Sequence
  Oligonucleotide primer for the detection of SNP TSC0003997
gtatcgtatacg

SEQ ID NO: 275781 - DNA, 12 bp, Artificial Sequence
  Oligonucleotide primer for the detection of SNP TSC0003998
ataaaaatatca

SEQ ID NO: 275782 - DNA, 12 bp, Artificial Sequence
  Oligonucleotide primer for the detection of SNP TSC0003998
gagaaaattttt

SEQ ID NO: 275783 - DNA, 12 bp, Artificial Sequence
  Oligonucleotide primer for the detection of SNP TSC0003998
aaaaaaactctt

SEQ ID NO: 275784 - DNA, 12 bp, Artificial Sequence
  Oligonucleotide primer for the detection of SNP TSC0003998
tggaaatgttat

SEQ ID NO: 275785 - DNA, 12 bp, Artificial Sequence
  Oligonucleotide primer for the detection of SNP TSC0004000
acctaatattaa

SEQ ID NO: 275786 - DNA, 12 bp, Artificial Sequence
  Oligonucleotide primer for the detection of SNP TSC0004000
attggggtgatt

SEQ ID NO: 275787 - DNA, 12 bp, Artificial Sequence
  Oligonucleotide primer for the detection of SNP TSC0004000
ttaaaataatca

SEQ ID NO: 275788 - DNA, 12 bp, Artificial Sequence
  Oligonucleotide primer for the detection of SNP TSC0004000
ttggtgttggtt

SEQ ID NO: 275789 - DNA, 12 bp, Artificial Sequence
  Oligonucleotide primer for the detection of SNP TSC0004001
ccaactcctatt

SEQ ID NO: 275790 - DNA, 12 bp, Artificial Sequence
  Oligonucleotide primer for the detection of SNP TSC0004001
ggatagaataat

SEQ ID NO: 275791 - DNA, 12 bp, Artificial Sequence
  Oligonucleotide primer for the detection of SNP TSC0004001
aaacaaaacaac

SEQ ID NO: 275792 - DNA, 12 bp, Artificial Sequence
  Oligonucleotide primer for the detection of SNP TSC0004002
taccccacaccc

SEQ ID NO: 275793 - DNA, 12 bp, Artificial Sequence
  Oligonucleotide primer for the detection of SNP TSC0004002
gtaggtgttttt

SEQ ID NO: 275794 - DNA, 12 bp, Artificial Sequence
  Oligonucleotide primer for the detection of SNP TSC0004002
tataaatatttc

SEQ ID NO: 275795 - DNA, 12 bp, Artificial Sequence
  Oligonucleotide primer for the detection of SNP TSC0004002
tattttatattt

SEQ ID NO: 275796 - DNA, 12 bp, Artificial Sequence
  Oligonucleotide primer for the detection of SNP TSC0004005
aatacttcctct

SEQ ID NO: 275797 - DNA, 12 bp, Artificial Sequence
  Oligonucleotide primer for the detection of SNP TSC0004005
ggaagaattttg

SEQ ID NO: 275798 - DNA, 12 bp, Artificial Sequence
  Oligonucleotide primer for the detection of SNP TSC0004005
aaaaaaactcta

SEQ ID NO: 275799 - DNA, 12 bp, Artificial Sequence
  Oligonucleotide primer for the detection of SNP TSC0004006
actatacttatc

SEQ ID NO: 275800 - DNA, 12 bp, Artificial Sequence
  Oligonucleotide primer for the detection of SNP TSC0004006
tgttggttaata

SEQ ID NO: 275801 - DNA, 12 bp, Artificial Sequence
  Oligonucleotide primer for the detection of SNP TSC0004007
ttccaaaatact

SEQ ID NO: 275802 - DNA, 12 bp, Artificial Sequence
  Oligonucleotide primer for the detection of SNP TSC0004007
tgattgaaattt

SEQ ID NO: 275803 - DNA, 12 bp, Artificial Sequence
  Oligonucleotide primer for the detection of SNP TSC0004007
ataactaaaact

SEQ ID NO: 275804 - DNA, 12 bp, Artificial Sequence
  Oligonucleotide primer for the detection of SNP TSC0004008
aaacaaaaaaat

SEQ ID NO: 275805 - DNA, 12 bp, Artificial Sequence
  Oligonucleotide primer for the detection of SNP TSC0004008
ttttgggtttaa

SEQ ID NO: 275806 - DNA, 12 bp, Artificial Sequence
  Oligonucleotide primer for the detection of SNP TSC0004008
cctaaattcaaa

SEQ ID NO: 275807 - DNA, 12 bp, Artificial Sequence
  Oligonucleotide primer for the detection of SNP TSC0004008
ggtagaagaatt

SEQ ID NO: 275808 - DNA, 12 bp, Artificial Sequence
  Oligonucleotide primer for the detection of SNP TSC0004008
ggtagaagaatc

SEQ ID NO: 275809 - DNA, 12 bp, Artificial Sequence
  Oligonucleotide primer for the detection of SNP TSC0004009
taaactaataat

SEQ ID NO: 275810 - DNA, 12 bp, Artificial Sequence
  Oligonucleotide primer for the detection of SNP TSC0004009
gaggattttagg

SEQ ID NO: 275811 - DNA, 12 bp, Artificial Sequence
  Oligonucleotide primer for the detection of SNP TSC0004010
caacatccccac

SEQ ID NO: 275812 - DNA, 12 bp, Artificial Sequence
  Oligonucleotide primer for the detection of SNP TSC0004010
caacgtccccac

SEQ ID NO: 275813 - DNA, 12 bp, Artificial Sequence
  Oligonucleotide primer for the detection of SNP TSC0004010
tagggatgttgg

SEQ ID NO: 275814 - DNA, 12 bp, Artificial Sequence
  Oligonucleotide primer for the detection of SNP TSC0004010
tagggatgtcgg

SEQ ID NO: 275815 - DNA, 12 bp, Artificial Sequence
  Oligonucleotide primer for the detection of SNP TSC0004010
caaaaataccaa

SEQ ID NO: 275816 - DNA, 12 bp, Artificial Sequence
  Oligonucleotide primer for the detection of SNP TSC0004010
caaaaataccga

SEQ ID NO: 275817 - DNA, 12 bp, Artificial Sequence
  Oligonucleotide primer for the detection of SNP TSC0004010
tagtgtttttat

SEQ ID NO: 275818 - DNA, 12 bp, Artificial Sequence
  Oligonucleotide primer for the detection of SNP TSC0004010
tagcgtttttat

SEQ ID NO: 275819 - DNA, 12 bp, Artificial Sequence
  Oligonucleotide primer for the detection of SNP TSC0004011
aaaataacaata

SEQ ID NO: 275820 - DNA, 12 bp, Artificial Sequence
  Oligonucleotide primer for the detection of SNP TSC0004011
ttggtagggtat

SEQ ID NO: 275821 - DNA, 12 bp, Artificial Sequence
  Oligonucleotide primer for the detection of SNP TSC0004011
cctaataaaaca

SEQ ID NO: 275822 - DNA, 12 bp, Artificial Sequence
  Oligonucleotide primer for the detection of SNP TSC0004011
agtggtaatgtt

SEQ ID NO: 275823 - DNA, 12 bp, Artificial Sequence
  Oligonucleotide primer for the detection of SNP TSC0004012
aaaccccctcac

SEQ ID NO: 275824 - DNA, 12 bp, Artificial Sequence
  Oligonucleotide primer for the detection of SNP TSC0004012
tttttttatatg

SEQ ID NO: 275825 - DNA, 12 bp, Artificial Sequence
  Oligonucleotide primer for the detection of SNP TSC0004013
tatggttagtta

SEQ ID NO: 275826 - DNA, 12 bp, Artificial Sequence
  Oligonucleotide primer for the detection of SNP TSC0004013
cataaccaacta

SEQ ID NO: 275827 - DNA, 12 bp, Artificial Sequence
  Oligonucleotide primer for the detection of SNP TSC0004014
ttaaacctcaaa

SEQ ID NO: 275828 - DNA, 12 bp, Artificial Sequence
  Oligonucleotide primer for the detection of SNP TSC0004014
tgtgtgtttgtt

SEQ ID NO: 275829 - DNA, 12 bp, Artificial Sequence
  Oligonucleotide primer for the detection of SNP TSC0004014
tatatacctatc

SEQ ID NO: 275830 - DNA, 12 bp, Artificial Sequence
  Oligonucleotide primer for the detection of SNP TSC0004014
ttgagttttaag

SEQ ID NO: 275831 - DNA, 12 bp, Artificial Sequence
  Oligonucleotide primer for the detection of SNP TSC0004015
caaaaacatttt

SEQ ID NO: 275832 - DNA, 12 bp, Artificial Sequence
  Oligonucleotide primer for the detection of SNP TSC0004015
atagtgtgataa

SEQ ID NO: 275833 - DNA, 12 bp, Artificial Sequence
  Oligonucleotide primer for the detection of SNP TSC0004015
acaatataacaa

SEQ ID NO: 275834 - DNA, 12 bp, Artificial Sequence
  Oligonucleotide primer for the detection of SNP TSC0004015
tagagatatttt

SEQ ID NO: 275835 - DNA, 12 bp, Artificial Sequence
  Oligonucleotide primer for the detection of SNP TSC0004016
tattaaaatact

SEQ ID NO: 275836 - DNA, 12 bp, Artificial Sequence
  Oligonucleotide primer for the detection of SNP TSC0004016
tttagtttagag

SEQ ID NO: 275837 - DNA, 12 bp, Artificial Sequence
  Oligonucleotide primer for the detection of SNP TSC0004017
caaaaattatac

SEQ ID NO: 275838 - DNA, 12 bp, Artificial Sequence
  Oligonucleotide primer for the detection of SNP TSC0004017
cgaaaattatac

SEQ ID NO: 275839 - DNA, 12 bp, Artificial Sequence
  Oligonucleotide primer for the detection of SNP TSC0004017
tgttagttttta

SEQ ID NO: 275840 - DNA, 12 bp, Artificial Sequence
  Oligonucleotide primer for the detection of SNP TSC0004017
cgttagttttta

SEQ ID NO: 275841 - DNA, 12 bp, Artificial Sequence
  Oligonucleotide primer for the detection of SNP TSC0004018
ctatcacccccc

SEQ ID NO: 275842 - DNA, 12 bp, Artificial Sequence
  Oligonucleotide primer for the detection of SNP TSC0004018
ataccttttttt

SEQ ID NO: 275843 - DNA, 12 bp, Artificial Sequence
  Oligonucleotide primer for the detection of SNP TSC0004018
ttgttatttttt

SEQ ID NO: 275844 - DNA, 12 bp, Artificial Sequence
  Oligonucleotide primer for the detection of SNP TSC0004019
acctctataatt

SEQ ID NO: 275845 - DNA, 12 bp, Artificial Sequence
  Oligonucleotide primer for the detection of SNP TSC0004019
ttattaggattg

SEQ ID NO: 275846 - DNA, 12 bp, Artificial Sequence
  Oligonucleotide primer for the detection of SNP TSC0004020
ccattacacccc

SEQ ID NO: 275847 - DNA, 12 bp, Artificial Sequence
  Oligonucleotide primer for the detection of SNP TSC0004020
ttttatttaggt

SEQ ID NO: 275848 - DNA, 12 bp, Artificial Sequence
  Oligonukleotid-Primer
ttttatttaggc

SEQ ID NO: 275849 - DNA, 12 bp, Artificial Sequence
  Oligonucleotide primer for the detection of SNP TSC0004020
ctctcacccaaa

SEQ ID NO: 275850 - DNA, 12 bp, Artificial Sequence
  Oligonucleotide primer for the detection of SNP TSC0004020
ttattgtatttt

SEQ ID NO: 275851 - DNA, 12 bp, Artificial Sequence
  Oligonucleotide primer for the detection of SNP TSC0004021
aatcataccatt

SEQ ID NO: 275852 - DNA, 12 bp, Artificial Sequence
  Oligonucleotide primer for the detection of SNP TSC0004021
tttttaggttgg

SEQ ID NO: 275853 - DNA, 12 bp, Artificial Sequence
  Oligonucleotide primer for the detection of SNP TSC0004021
ctcccaaactaa

SEQ ID NO: 275854 - DNA, 12 bp, Artificial Sequence
  Oligonucleotide primer for the detection of SNP TSC0004021
gattatattatt

SEQ ID NO: 275855 - DNA, 12 bp, Artificial Sequence
  Oligonucleotide primer for the detection of SNP TSC0004023
atatccttcccc

SEQ ID NO: 275856 - DNA, 12 bp, Artificial Sequence
  Oligonucleotide primer for the detection of SNP TSC0004023
atgtggataaag

SEQ ID NO: 275857 - DNA, 12 bp, Artificial Sequence
  Oligonucleotide primer for the detection of SNP TSC0004023
atgcggataaag

SEQ ID NO: 275858 - DNA, 12 bp, Artificial Sequence
  Oligonucleotide primer for the detection of SNP TSC0004023
atacgaacaaaa

SEQ ID NO: 275859 - DNA, 12 bp, Artificial Sequence
  Oligonucleotide primer for the detection of SNP TSC0004023
gtgttttttttt

SEQ ID NO: 275860 - DNA, 12 bp, Artificial Sequence
  Oligonucleotide primer for the detection of SNP TSC0004024
taaatacaatac

SEQ ID NO: 275861 - DNA, 12 bp, Artificial Sequence
  Oligonucleotide primer for the detection of SNP TSC0004024
tgttaaatgaaa

SEQ ID NO: 275862 - DNA, 12 bp, Artificial Sequence
  Oligonucleotide primer for the detection of SNP TSC0004025
ctttatcctaac

SEQ ID NO: 275863 - DNA, 12 bp, Artificial Sequence
  Oligonucleotide primer for the detection of SNP TSC0004025
ttattttggttt

SEQ ID NO: 275864 - DNA, 12 bp, Artificial Sequence
  Oligonucleotide primer for the detection of SNP TSC0004025
ctatcttaactt

SEQ ID NO: 275865 - DNA, 12 bp, Artificial Sequence
  Oligonucleotide primer for the detection of SNP TSC0004025
ttttattttgat

SEQ ID NO: 275866 - DNA, 12 bp, Artificial Sequence
  Oligonucleotide primer for the detection of SNP TSC0004026
aaatcacttttc

SEQ ID NO: 275867 - DNA, 12 bp, Artificial Sequence
  Oligonucleotide primer for the detection of SNP TSC0004026
tatttaaagtta

SEQ ID NO: 275868 - DNA, 12 bp, Artificial Sequence
  Oligonucleotide primer for the detection of SNP TSC0004027
acacccaccacc

SEQ ID NO: 275869 - DNA, 12 bp, Artificial Sequence
  Oligonucleotide primer for the detection of SNP TSC0004027
acacccgccacc

SEQ ID NO: 275870 - DNA, 12 bp, Artificial Sequence
  Oligonucleotide primer for the detection of SNP TSC0004027
acgcccaccacc

SEQ ID NO: 275871 - DNA, 12 bp, Artificial Sequence
  Oligonucleotide primer for the detection of SNP TSC0004027
acgcccgccacc

SEQ ID NO: 275872 - DNA, 12 bp, Artificial Sequence
  Oligonucleotide primer for the detection of SNP TSC0004027
gtgtttgttatt

SEQ ID NO: 275873 - DNA, 12 bp, Artificial Sequence
  Oligonucleotide primer for the detection of SNP TSC0004027
gcgtttgttatt

SEQ ID NO: 275874 - DNA, 12 bp, Artificial Sequence
  Oligonucleotide primer for the detection of SNP TSC0004027
gtgttcgttatt

SEQ ID NO: 275875 - DNA, 12 bp, Artificial Sequence
  Oligonucleotide primer for the detection of SNP TSC0004027
gcgttcgttatt

SEQ ID NO: 275876 - DNA, 12 bp, Artificial Sequence
  Oligonucleotide primer for the detection of SNP TSC0004028
aaaaaacaatac

SEQ ID NO: 275877 - DNA, 12 bp, Artificial Sequence
  Oligonucleotide primer for the detection of SNP TSC0004028
gatattattaga

SEQ ID NO: 275878 - DNA, 12 bp, Artificial Sequence
  Oligonucleotide primer for the detection of SNP TSC0004029
agatgagatttt

SEQ ID NO: 275879 - DNA, 12 bp, Artificial Sequence
  Oligonucleotide primer for the detection of SNP TSC0004029
aaataaaacttc

SEQ ID NO: 275880 - DNA, 12 bp, Artificial Sequence
  Oligonucleotide primer for the detection of SNP TSC0004029
gaatgagtagag

SEQ ID NO: 275881 - DNA, 12 bp, Artificial Sequence
  Oligonucleotide primer for the detection of SNP TSC0004030
aaaccaaacata

SEQ ID NO: 275882 - DNA, 12 bp, Artificial Sequence
  Oligonucleotide primer for the detection of SNP TSC0004030
tggagggtttgt

SEQ ID NO: 275883 - DNA, 12 bp, Artificial Sequence
  Oligonucleotide primer for the detection of SNP TSC0004030
cggagggtttgt

SEQ ID NO: 275884 - DNA, 12 bp, Artificial Sequence
  Oligonucleotide primer for the detection of SNP TSC0004030
aaaaaacctaca

SEQ ID NO: 275885 - DNA, 12 bp, Artificial Sequence
  Oligonucleotide primer for the detection of SNP TSC0004030
gaaaaacctaca

SEQ ID NO: 275886 - DNA, 12 bp, Artificial Sequence
  Oligonucleotide primer for the detection of SNP TSC0004030
gaggttagatat

SEQ ID NO: 275887 - DNA, 12 bp, Artificial Sequence
  Oligonucleotide primer for the detection of SNP TSC0004031
cctcctcctcct

SEQ ID NO: 275888 - DNA, 12 bp, Artificial Sequence
  Oligonucleotide primer for the detection of SNP TSC0004031
aagaagaagaag

SEQ ID NO: 275889 - DNA, 12 bp, Artificial Sequence
  Oligonucleotide primer for the detection of SNP TSC0004032
caaaaattatcc

SEQ ID NO: 275890 - DNA, 12 bp, Artificial Sequence
  Oligonucleotide primer for the detection of SNP TSC0004032
agtttgttataa

SEQ ID NO: 275891 - DNA, 12 bp, Artificial Sequence
  Oligonucleotide primer for the detection of SNP TSC0004032
aacttatcataa

SEQ ID NO: 275892 - DNA, 12 bp, Artificial Sequence
  Oligonucleotide primer for the detection of SNP TSC0004032
tagaagttgttt

SEQ ID NO: 275893 - DNA, 12 bp, Artificial Sequence
  Oligonucleotide primer for the detection of SNP TSC0004033
taacacctcact

SEQ ID NO: 275894 - DNA, 12 bp, Artificial Sequence
  Oligonucleotide primer for the detection of SNP TSC0004033
ggatttaatgaa

SEQ ID NO: 275895 - DNA, 12 bp, Artificial Sequence
  Oligonucleotide primer for the detection of SNP TSC0004034
aaattttcaaat

SEQ ID NO: 275896 - DNA, 12 bp, Artificial Sequence
  Oligonucleotide primer for the detection of SNP TSC0004034
gtataatttttt

SEQ ID NO: 275897 - DNA, 12 bp, Artificial Sequence
  Oligonucleotide primer for the detection of SNP TSC0004034
acataattcctt

SEQ ID NO: 275898 - DNA, 12 bp, Artificial Sequence
  Oligonucleotide primer for the detection of SNP TSC0004034
agatttttaaat

SEQ ID NO: 275899 - DNA, 12 bp, Artificial Sequence
  Oligonucleotide primer for the detection of SNP TSC0004035
attaaacatcac

SEQ ID NO: 275900 - DNA, 12 bp, Artificial Sequence
  Oligonucleotide primer for the detection of SNP TSC0004035
ttgtaacgttgt

SEQ ID NO: 275901 - DNA, 12 bp, Artificial Sequence
  Oligonucleotide primer for the detection of SNP TSC0004035
ttacaacattat

SEQ ID NO: 275902 - DNA, 12 bp, Artificial Sequence
  Oligonucleotide primer for the detection of SNP TSC0004035
ttacaacgttat

SEQ ID NO: 275903 - DNA, 12 bp, Artificial Sequence
  Oligonucleotide primer for the detection of SNP TSC0004035
attaaatattat

SEQ ID NO: 275904 - DNA, 12 bp, Artificial Sequence
  Oligonucleotide primer for the detection of SNP TSC0004036
tatgattgggtt

SEQ ID NO: 275905 - DNA, 12 bp, Artificial Sequence
  Oligonucleotide primer for the detection of SNP TSC0004036
tatgatcgggtt

SEQ ID NO: 275906 - DNA, 12 bp, Artificial Sequence
  Oligonucleotide primer for the detection of SNP TSC0004036
tataatcaaatt

SEQ ID NO: 275907 - DNA, 12 bp, Artificial Sequence
  Oligonucleotide primer for the detection of SNP TSC0004036
tataatcgaatt

SEQ ID NO: 275908 - DNA, 12 bp, Artificial Sequence
  Oligonucleotide primer for the detection of SNP TSC0004036
tgttttggtgta

SEQ ID NO: 275909 - DNA, 12 bp, Artificial Sequence
  Oligonucleotide primer for the detection of SNP TSC0004037
ccaaacccctac

SEQ ID NO: 275910 - DNA, 12 bp, Artificial Sequence
  Oligonucleotide primer for the detection of SNP TSC0004037
tttgtggttttt

SEQ ID NO: 275911 - DNA, 12 bp, Artificial Sequence
  Oligonucleotide primer for the detection of SNP TSC0004037
tttgcggttttt

SEQ ID NO: 275912 - DNA, 12 bp, Artificial Sequence
  Oligonucleotide primer for the detection of SNP TSC0004037
cttacaactttc

SEQ ID NO: 275913 - DNA, 12 bp, Artificial Sequence
  Oligonukleotid-Primer
cttacgactttc

SEQ ID NO: 275914 - DNA, 12 bp, Artificial Sequence
  Oligonucleotide primer for the detection of SNP TSC0004037
ttagatttttgt

SEQ ID NO: 275915 - DNA, 12 bp, Artificial Sequence
  Oligonucleotide primer for the detection of SNP TSC0004038
ccatccaactct

SEQ ID NO: 275916 - DNA, 12 bp, Artificial Sequence
  Oligonucleotide primer for the detection of SNP TSC0004038
ccgtccaactct

SEQ ID NO: 275917 - DNA, 12 bp, Artificial Sequence
  Oligonucleotide primer for the detection of SNP TSC0004038
gagaattggaag

SEQ ID NO: 275918 - DNA, 12 bp, Artificial Sequence
  Oligonucleotide primer for the detection of SNP TSC0004038
aaaaactaaaaa

SEQ ID NO: 275919 - DNA, 12 bp, Artificial Sequence
  Oligonucleotide primer for the detection of SNP TSC0004038
ttgtttagtttt

SEQ ID NO: 275920 - DNA, 12 bp, Artificial Sequence
  Oligonucleotide primer for the detection of SNP TSC0004038
tcgtttagtttt

SEQ ID NO: 275921 - DNA, 12 bp, Artificial Sequence
  Oligonucleotide primer for the detection of SNP TSC0004039
ttaaaaataata

SEQ ID NO: 275922 - DNA, 12 bp, Artificial Sequence
  Oligonucleotide primer for the detection of SNP TSC0004039
ggtaagttaata

SEQ ID NO: 275923 - DNA, 12 bp, Artificial Sequence
  Oligonucleotide primer for the detection of SNP TSC0004039
aacaaattaata

SEQ ID NO: 275924 - DNA, 12 bp, Artificial Sequence
  Oligonucleotide primer for the detection of SNP TSC0004039
tttagggatgat

SEQ ID NO: 275925 - DNA, 12 bp, Artificial Sequence
  Oligonucleotide primer for the detection of SNP TSC0004040
cattcccacacc

SEQ ID NO: 275926 - DNA, 12 bp, Artificial Sequence
  Oligonucleotide primer for the detection of SNP TSC0004040
aagatagatatg

SEQ ID NO: 275927 - DNA, 12 bp, Artificial Sequence
  Oligonucleotide primer for the detection of SNP TSC0004041
aacaaaaaaaaa

SEQ ID NO: 275928 - DNA, 12 bp, Artificial Sequence
  Oligonucleotide primer for the detection of SNP TSC0004041
atggaggttagg

SEQ ID NO: 275929 - DNA, 12 bp, Artificial Sequence
  Oligonucleotide primer for the detection of SNP TSC0004041
ataaaaaccaaa

SEQ ID NO: 275930 - DNA, 12 bp, Artificial Sequence
  Oligonucleotide primer for the detection of SNP TSC0004041
gtgaggtaagga

SEQ ID NO: 275931 - DNA, 12 bp, Artificial Sequence
  Oligonucleotide primer for the detection of SNP TSC0004042
taccccataatc

SEQ ID NO: 275932 - DNA, 12 bp, Artificial Sequence
  Oligonucleotide primer for the detection of SNP TSC0004042
tatatgtggtta

SEQ ID NO: 275933 - DNA, 12 bp, Artificial Sequence
  Oligonucleotide primer for the detection of SNP TSC0004042
tatacgtggtta

SEQ ID NO: 275934 - DNA, 12 bp, Artificial Sequence
  Oligonucleotide primer for the detection of SNP TSC0004043
aaaccaacctaa

SEQ ID NO: 275935 - DNA, 12 bp, Artificial Sequence
  Oligonucleotide primer for the detection of SNP TSC0004043
tttattatgttt

SEQ ID NO: 275936 - DNA, 12 bp, Artificial Sequence
  Oligonucleotide primer for the detection of SNP TSC0004043
tttattatgttc

SEQ ID NO: 275937 - DNA, 12 bp, Artificial Sequence
  Oligonucleotide primer for the detection of SNP TSC0004043
tttcaccatatt

SEQ ID NO: 275938 - DNA, 12 bp, Artificial Sequence
  Oligonucleotide primer for the detection of SNP TSC0004043
cgagattagttt

SEQ ID NO: 275939 - DNA, 12 bp, Artificial Sequence
  Oligonucleotide primer for the detection of SNP TSC0004044
attatcttaaac

SEQ ID NO: 275940 - DNA, 12 bp, Artificial Sequence
  Oligonucleotide primer for the detection of SNP TSC0004045
tacattcattta

SEQ ID NO: 275941 - DNA, 12 bp, Artificial Sequence
  Oligonucleotide primer for the detection of SNP TSC0004045
ttttatgtatgt

SEQ ID NO: 275942 - DNA, 12 bp, Artificial Sequence
  Oligonucleotide primer for the detection of SNP TSC0004045
ttctatatatat

SEQ ID NO: 275943 - DNA, 12 bp, Artificial Sequence
  Oligonucleotide primer for the detection of SNP TSC0004045
tatatttattta

SEQ ID NO: 275944 - DNA, 12 bp, Artificial Sequence
  Oligonucleotide primer for the detection of SNP TSC0004046
aaattacaaact

SEQ ID NO: 275945 - DNA, 12 bp, Artificial Sequence
  Oligonucleotide primer for the detection of SNP TSC0004046
tgatttttatag

SEQ ID NO: 275946 - DNA, 12 bp, Artificial Sequence
  Oligonucleotide primer for the detection of SNP TSC0004047
aaactacatata

SEQ ID NO: 275947 - DNA, 12 bp, Artificial Sequence
  Oligonucleotide primer for the detection of SNP TSC0004047
ttatatataagt

SEQ ID NO: 275948 - DNA, 12 bp, Artificial Sequence
  Oligonucleotide primer for the detection of SNP TSC0004047
acatataaataa

SEQ ID NO: 275949 - DNA, 12 bp, Artificial Sequence
  Oligonucleotide primer for the detection of SNP TSC0004047
gagttgtatgta

SEQ ID NO: 275950 - DNA, 12 bp, Artificial Sequence
  Oligonucleotide primer for the detection of SNP TSC0004049
accttcccataa

SEQ ID NO: 275951 - DNA, 12 bp, Artificial Sequence
  Oligonucleotide primer for the detection of SNP TSC0004049
tagttttgttgt

SEQ ID NO: 275952 - DNA, 12 bp, Artificial Sequence
  Oligonucleotide primer for the detection of SNP TSC0004049
tagttttgtcgt

SEQ ID NO: 275953 - DNA, 12 bp, Artificial Sequence
  Oligonucleotide primer for the detection of SNP TSC0004049
caactctaccac

SEQ ID NO: 275954 - DNA, 12 bp, Artificial Sequence
  Oligonucleotide primer for the detection of SNP TSC0004049
caactctaccgc

SEQ ID NO: 275955 - DNA, 12 bp, Artificial Sequence
  Oligonucleotide primer for the detection of SNP TSC0004049
gtttttttatag

SEQ ID NO: 275956 - DNA, 12 bp, Artificial Sequence
  Oligonucleotide primer for the detection of SNP TSC0004050
ctatacaccacc

SEQ ID NO: 275957 - DNA, 12 bp, Artificial Sequence
  Oligonucleotide primer for the detection of SNP TSC0004050
gtgttaggatgg

SEQ ID NO: 275958 - DNA, 12 bp, Artificial Sequence
  Oligonucleotide primer for the detection of SNP TSC0004051
taaaaacaaaaa

SEQ ID NO: 275959 - DNA, 12 bp, Artificial Sequence
  Oligonucleotide primer for the detection of SNP TSC0004051
ggttttttattt

SEQ ID NO: 275960 - DNA, 12 bp, Artificial Sequence
  Oligonucleotide primer for the detection of SNP TSC0004051
ggttttttattc

SEQ ID NO: 275961 - DNA, 12 bp, Artificial Sequence
  Oligonucleotide primer for the detection of SNP TSC0004051
aacttcccaccc

SEQ ID NO: 275962 - DNA, 12 bp, Artificial Sequence
  Oligonucleotide primer for the detection of SNP TSC0004051
gacttcccaccc

SEQ ID NO: 275963 - DNA, 12 bp, Artificial Sequence
  Oligonucleotide primer for the detection of SNP TSC0004051
gggagtaggggt

SEQ ID NO: 275964 - DNA, 12 bp, Artificial Sequence
  Oligonucleotide primer for the detection of SNP TSC0004052
tataaccatttt

SEQ ID NO: 275965 - DNA, 12 bp, Artificial Sequence
  Oligonucleotide primer for the detection of SNP TSC0004052
tgtttttttgga

SEQ ID NO: 275966 - DNA, 12 bp, Artificial Sequence
  Oligonucleotide primer for the detection of SNP TSC0004052
attttcttaaaa

SEQ ID NO: 275967 - DNA, 12 bp, Artificial Sequence
  Oligonucleotide primer for the detection of SNP TSC0004052
tgtggttatttt

SEQ ID NO: 275968 - DNA, 12 bp, Artificial Sequence
  Oligonucleotide primer for the detection of SNP TSC0004053
ttttcaaatttt

SEQ ID NO: 275969 - DNA, 12 bp, Artificial Sequence
  Oligonucleotide primer for the detection of SNP TSC0004053
tatatttttttg

SEQ ID NO: 275970 - DNA, 12 bp, Artificial Sequence
  Oligonucleotide primer for the detection of SNP TSC0004053
tacactttccta

SEQ ID NO: 275971 - DNA, 12 bp, Artificial Sequence
  Oligonucleotide primer for the detection of SNP TSC0004053
tttttaaatttt

SEQ ID NO: 275972 - DNA, 12 bp, Artificial Sequence
  Oligonucleotide primer for the detection of SNP TSC0004055
aaaactttctct

SEQ ID NO: 275973 - DNA, 12 bp, Artificial Sequence
  Oligonucleotide primer for the detection of SNP TSC0004055
tgtatttagtgg

SEQ ID NO: 275974 - DNA, 12 bp, Artificial Sequence
  Oligonucleotide primer for the detection of SNP TSC0004056
ttcttttaatcc

SEQ ID NO: 275975 - DNA, 12 bp, Artificial Sequence
  Oligonucleotide primer for the detection of SNP TSC0004056
aagtgaaggagg

SEQ ID NO: 275976 - DNA, 12 bp, Artificial Sequence
  Oligonucleotide primer for the detection of SNP TSC0004057
ctctaccttcta

SEQ ID NO: 275977 - DNA, 12 bp, Artificial Sequence
  Oligonucleotide primer for the detection of SNP TSC0004057
tttttttagaaa

SEQ ID NO: 275978 - DNA, 12 bp, Artificial Sequence
  Oligonucleotide primer for the detection of SNP TSC0004058
atcaaacccaaa

SEQ ID NO: 275979 - DNA, 12 bp, Artificial Sequence
  Oligonucleotide primer for the detection of SNP TSC0004058
gattagttaggt

SEQ ID NO: 275980 - DNA, 12 bp, Artificial Sequence
  Oligonucleotide primer for the detection of SNP TSC0004058
aaccaactaaac

SEQ ID NO: 275981 - DNA, 12 bp, Artificial Sequence
  Oligonucleotide primer for the detection of SNP TSC0004058
attagatttagg

SEQ ID NO: 275982 - DNA, 12 bp, Artificial Sequence
  Oligonucleotide primer for the detection of SNP TSC0004059
aagtatttattg

SEQ ID NO: 275983 - DNA, 12 bp, Artificial Sequence
  Oligonucleotide primer for the detection of SNP TSC0004059
aacacccattaa

SEQ ID NO: 275984 - DNA, 12 bp, Artificial Sequence
  Oligonucleotide primer for the detection of SNP TSC0004059
atttggaaagaa

SEQ ID NO: 275985 - DNA, 12 bp, Artificial Sequence
  Oligonucleotide primer for the detection of SNP TSC0004060
aaaaactctaaa

SEQ ID NO: 275986 - DNA, 12 bp, Artificial Sequence
  Oligonucleotide primer for the detection of SNP TSC0004060
gaaaactctaaa

SEQ ID NO: 275987 - DNA, 12 bp, Artificial Sequence
  Oligonucleotide primer for the detection of SNP TSC0004060
tgtggtttgggt

SEQ ID NO: 275988 - DNA, 12 bp, Artificial Sequence
  Oligonucleotide primer for the detection of SNP TSC0004060
tgcggtttgggt

SEQ ID NO: 275989 - DNA, 12 bp, Artificial Sequence
  Oligonucleotide primer for the detection of SNP TSC0004060
atacaacctaaa

SEQ ID NO: 275990 - DNA, 12 bp, Artificial Sequence
  Oligonucleotide primer for the detection of SNP TSC0004060
atacgacctaaa

SEQ ID NO: 275991 - DNA, 12 bp, Artificial Sequence
  Oligonucleotide primer for the detection of SNP TSC0004060
gaaggttttggg

SEQ ID NO: 275992 - DNA, 12 bp, Artificial Sequence
  Oligonucleotide primer for the detection of SNP TSC0004061
atctcctaacct

SEQ ID NO: 275993 - DNA, 12 bp, Artificial Sequence
  Oligonucleotide primer for the detection of SNP TSC0004061
aagggtggatta

SEQ ID NO: 275994 - DNA, 12 bp, Artificial Sequence
  Oligonucleotide primer for the detection of SNP TSC0004061
aagggcggatta

SEQ ID NO: 275995 - DNA, 12 bp, Artificial Sequence
  Oligonucleotide primer for the detection of SNP TSC0004062
tcccaccacacc

SEQ ID NO: 275996 - DNA, 12 bp, Artificial Sequence
  Oligonucleotide primer for the detection of SNP TSC0004062
tcccaccgcacc

SEQ ID NO: 275997 - DNA, 12 bp, Artificial Sequence
  Oligonucleotide primer for the detection of SNP TSC0004062
aggtgttgatgg

SEQ ID NO: 275998 - DNA, 12 bp, Artificial Sequence
  Oligonucleotide primer for the detection of SNP TSC0004062
aggcgttgatgg

SEQ ID NO: 275999 - DNA, 12 bp, Artificial Sequence
  Oligonucleotide primer for the detection of SNP TSC0004063
ctctcaacccca

SEQ ID NO: 276000 - DNA, 12 bp, Artificial Sequence
  Oligonucleotide primer for the detection of SNP TSC0004063
ctctcaaccccg

SEQ ID NO: 276001 - DNA, 12 bp, Artificial Sequence
  Oligonucleotide primer for the detection of SNP TSC0004063
ttatttggtagt

SEQ ID NO: 276002 - DNA, 12 bp, Artificial Sequence
  Oligonucleotide primer for the detection of SNP TSC0004063
ccacctaacaat

SEQ ID NO: 276003 - DNA, 12 bp, Artificial Sequence
  Oligonucleotide primer for the detection of SNP TSC0004063
tttttagttttg

SEQ ID NO: 276004 - DNA, 12 bp, Artificial Sequence
  Oligonucleotide primer for the detection of SNP TSC0004063
tttttagtttcg

SEQ ID NO: 276005 - DNA, 12 bp, Artificial Sequence
  Oligonucleotide primer for the detection of SNP TSC0004064
ctacattttttt

SEQ ID NO: 276006 - DNA, 12 bp, Artificial Sequence
  Oligonucleotide primer for the detection of SNP TSC0004064
ctacgttttttt

SEQ ID NO: 276007 - DNA, 12 bp, Artificial Sequence
  Oligonucleotide primer for the detection of SNP TSC0004064
aagattaagaag

SEQ ID NO: 276008 - DNA, 12 bp, Artificial Sequence
  Oligonucleotide primer for the detection of SNP TSC0004065
aactttttaaca

SEQ ID NO: 276009 - DNA, 12 bp, Artificial Sequence
  Oligonucleotide primer for the detection of SNP TSC0004065
aggatgtttgtt

SEQ ID NO: 276010 - DNA, 12 bp, Artificial Sequence
  Oligonucleotide primer for the detection of SNP TSC0004065
atatttatcaaa

SEQ ID NO: 276011 - DNA, 12 bp, Artificial Sequence
  Oligonucleotide primer for the detection of SNP TSC0004065
gttttttaatat

SEQ ID NO: 276012 - DNA, 12 bp, Artificial Sequence
  Oligonucleotide primer for the detection of SNP TSC0004066
aaaaaaaaacat

SEQ ID NO: 276013 - DNA, 12 bp, Artificial Sequence
  Oligonucleotide primer for the detection of SNP TSC0004066
aataaatctttt

SEQ ID NO: 276014 - DNA, 12 bp, Artificial Sequence
  Oligonucleotide primer for the detection of SNP TSC0004066
ggaaaaaaatat

SEQ ID NO: 276015 - DNA, 12 bp, Artificial Sequence
  Oligonucleotide primer for the detection of SNP TSC0004067
acattaaaataa

SEQ ID NO: 276016 - DNA, 12 bp, Artificial Sequence
  Oligonucleotide primer for the detection of SNP TSC0004067
tttaatgagtga

SEQ ID NO: 276017 - DNA, 12 bp, Artificial Sequence
  Oligonucleotide primer for the detection of SNP TSC0004067
tttaatgagcga

SEQ ID NO: 276018 - DNA, 12 bp, Artificial Sequence
  Oligonucleotide primer for the detection of SNP TSC0004067
cctaataaacaa

SEQ ID NO: 276019 - DNA, 12 bp, Artificial Sequence
  Oligonucleotide primer for the detection of SNP TSC0004067
cctaataaacga

SEQ ID NO: 276020 - DNA, 12 bp, Artificial Sequence
  Oligonucleotide primer for the detection of SNP TSC0004067
tattgaaatggt

SEQ ID NO: 276021 - DNA, 12 bp, Artificial Sequence
  Oligonucleotide primer for the detection of SNP TSC0004067
tattgaaatggc

SEQ ID NO: 276022 - DNA, 12 bp, Artificial Sequence
  Oligonucleotide primer for the detection of SNP TSC0004068
aatcactaaaaa

SEQ ID NO: 276023 - DNA, 12 bp, Artificial Sequence
  Oligonucleotide primer for the detection of SNP TSC0004068
aaagattttata

SEQ ID NO: 276024 - DNA, 12 bp, Artificial Sequence
  Oligonucleotide primer for the detection of SNP TSC0004068
aaaattttacaa

SEQ ID NO: 276025 - DNA, 12 bp, Artificial Sequence
  Oligonucleotide primer for the detection of SNP TSC0004068
aattattggaag

SEQ ID NO: 276026 - DNA, 12 bp, Artificial Sequence
  Oligonucleotide primer for the detection of SNP TSC0004069
aaactaaaactc

SEQ ID NO: 276027 - DNA, 12 bp, Artificial Sequence
  Oligonucleotide primer for the detection of SNP TSC0004069
atttaatttttt

SEQ ID NO: 276028 - DNA, 12 bp, Artificial Sequence
  Oligonucleotide primer for the detection of SNP TSC0004069
atttaatttttc

SEQ ID NO: 276029 - DNA, 12 bp, Artificial Sequence
  Oligonucleotide primer for the detection of SNP TSC0004069
tacttaacctct

SEQ ID NO: 276030 - DNA, 12 bp, Artificial Sequence
  Oligonucleotide primer for the detection of SNP TSC0004069
aaattaaaattt

SEQ ID NO: 276031 - DNA, 12 bp, Artificial Sequence
  Oligonucleotide primer for the detection of SNP TSC0004070
ccaaatcctctc

SEQ ID NO: 276032 - DNA, 12 bp, Artificial Sequence
  Oligonucleotide primer for the detection of SNP TSC0004070
ggaaggaaataa

SEQ ID NO: 276033 - DNA, 12 bp, Artificial Sequence
  Oligonucleotide primer for the detection of SNP TSC0004071
aaataacaatat

SEQ ID NO: 276034 - DNA, 12 bp, Artificial Sequence
  Oligonucleotide primer for the detection of SNP TSC0004071
taaatttgttaa

SEQ ID NO: 276035 - DNA, 12 bp, Artificial Sequence
  Oligonucleotide primer for the detection of SNP TSC0004072
cttctttccccc

SEQ ID NO: 276036 - DNA, 12 bp, Artificial Sequence
  Oligonucleotide primer for the detection of SNP TSC0004072
gtgaggttggag

SEQ ID NO: 276037 - DNA, 12 bp, Artificial Sequence
  Oligonucleotide primer for the detection of SNP TSC0004072
ataaaattaaaa

SEQ ID NO: 276038 - DNA, 12 bp, Artificial Sequence
  Oligonucleotide primer for the detection of SNP TSC0004073
aattcaaatctt

SEQ ID NO: 276039 - DNA, 12 bp, Artificial Sequence
  Oligonucleotide primer for the detection of SNP TSC0004073
gggggttggatg

SEQ ID NO: 276040 - DNA, 12 bp, Artificial Sequence
  Oligonucleotide primer for the detection of SNP TSC0004073
gggggttggacg

SEQ ID NO: 276041 - DNA, 12 bp, Artificial Sequence
  Oligonucleotide primer for the detection of SNP TSC0004073
aaaaactaaaca

SEQ ID NO: 276042 - DNA, 12 bp, Artificial Sequence
  Oligonucleotide primer for the detection of SNP TSC0004073
aaaaactaaacg

SEQ ID NO: 276043 - DNA, 12 bp, Artificial Sequence
  Oligonucleotide primer for the detection of SNP TSC0004073
ggtttagatttt

SEQ ID NO: 276044 - DNA, 12 bp, Artificial Sequence
  Oligonucleotide primer for the detection of SNP TSC0004074
aaaaaatactat

SEQ ID NO: 276045 - DNA, 12 bp, Artificial Sequence
  Oligonucleotide primer for the detection of SNP TSC0004074
taatttttttga

SEQ ID NO: 276046 - DNA, 12 bp, Artificial Sequence
  Oligonucleotide primer for the detection of SNP TSC0004075
aataaatacact

SEQ ID NO: 276047 - DNA, 12 bp, Artificial Sequence
  Oligonucleotide primer for the detection of SNP TSC0004075
aatggggtttta

SEQ ID NO: 276048 - DNA, 12 bp, Artificial Sequence
  Oligonucleotide primer for the detection of SNP TSC0004075
aacggggtttta

SEQ ID NO: 276049 - DNA, 12 bp, Artificial Sequence
  Oligonucleotide primer for the detection of SNP TSC0004076
tatatatataac

SEQ ID NO: 276050 - DNA, 12 bp, Artificial Sequence
  Oligonucleotide primer for the detection of SNP TSC0004076
ttttatatatga

SEQ ID NO: 276051 - DNA, 12 bp, Artificial Sequence
  Oligonucleotide primer for the detection of SNP TSC0004076
ttttatatacga

SEQ ID NO: 276052 - DNA, 12 bp, Artificial Sequence
  Oligonucleotide primer for the detection of SNP TSC0004077
aaaaccaaaaaa

SEQ ID NO: 276053 - DNA, 12 bp, Artificial Sequence
  Oligonucleotide primer for the detection of SNP TSC0004077
tggggaggtttt

SEQ ID NO: 276054 - DNA, 12 bp, Artificial Sequence
  Oligonucleotide primer for the detection of SNP TSC0004077
taaaaaaacctt

SEQ ID NO: 276055 - DNA, 12 bp, Artificial Sequence
  Oligonukleotid-Primer
gggattagggga

SEQ ID NO: 276056 - DNA, 12 bp, Artificial Sequence
  Oligonucleotide primer for the detection of SNP TSC0004078
ccacctccataa

SEQ ID NO: 276057 - DNA, 12 bp, Artificial Sequence
  Oligonucleotide primer for the detection of SNP TSC0004078
agtaagaaagtt

SEQ ID NO: 276058 - DNA, 12 bp, Artificial Sequence
  Oligonucleotide primer for the detection of SNP TSC0004078
acaaaaaaatca

SEQ ID NO: 276059 - DNA, 12 bp, Artificial Sequence
  Oligonucleotide primer for the detection of SNP TSC0004078
ttatttttataa

SEQ ID NO: 276060 - DNA, 12 bp, Artificial Sequence
  Oligonucleotide primer for the detection of SNP TSC0004079
taaataacaaaa

SEQ ID NO: 276061 - DNA, 12 bp, Artificial Sequence
  Oligonucleotide primer for the detection of SNP TSC0004079
gagatggagttt

SEQ ID NO: 276062 - DNA, 12 bp, Artificial Sequence
  Oligonucleotide primer for the detection of SNP TSC0004079
gagacggagttt

SEQ ID NO: 276063 - DNA, 12 bp, Artificial Sequence
  Oligonucleotide primer for the detection of SNP TSC0004079
aaaacaaaatct

SEQ ID NO: 276064 - DNA, 12 bp, Artificial Sequence
  Oligonucleotide primer for the detection of SNP TSC0004079
aaaacgaaatct

SEQ ID NO: 276065 - DNA, 12 bp, Artificial Sequence
  Oligonucleotide primer for the detection of SNP TSC0004079
tgggtgatagag

SEQ ID NO: 276066 - DNA, 12 bp, Artificial Sequence
  Oligonucleotide primer for the detection of SNP TSC0004080
aaacaaatataa

SEQ ID NO: 276067 - DNA, 12 bp, Artificial Sequence
  Oligonucleotide primer for the detection of SNP TSC0004080
tttataacttct

SEQ ID NO: 276068 - DNA, 12 bp, Artificial Sequence
  Oligonucleotide primer for the detection of SNP TSC0004080
aggtaaatatga

SEQ ID NO: 276069 - DNA, 12 bp, Artificial Sequence
  Oligonucleotide primer for the detection of SNP TSC0004081
atcttttcttaa

SEQ ID NO: 276070 - DNA, 12 bp, Artificial Sequence
  Oligonucleotide primer for the detection of SNP TSC0004081
ttttttaatttt

SEQ ID NO: 276071 - DNA, 12 bp, Artificial Sequence
  Oligonucleotide primer for the detection of SNP TSC0004081
tttctaatctca

SEQ ID NO: 276072 - DNA, 12 bp, Artificial Sequence
  Oligonucleotide primer for the detection of SNP TSC0004081
gtttttttttgg

SEQ ID NO: 276073 - DNA, 12 bp, Artificial Sequence
  Oligonucleotide primer for the detection of SNP TSC0004082
tattaaccaata

SEQ ID NO: 276074 - DNA, 12 bp, Artificial Sequence
  Oligonucleotide primer for the detection of SNP TSC0004082
gttgtgtttgtt

SEQ ID NO: 276075 - DNA, 12 bp, Artificial Sequence
  Oligonucleotide primer for the detection of SNP TSC0004082
ttgttggttaat

SEQ ID NO: 276076 - DNA, 12 bp, Artificial Sequence
  Oligonucleotide primer for the detection of SNP TSC0004083
acactatatcaa

SEQ ID NO: 276077 - DNA, 12 bp, Artificial Sequence
  Oligonucleotide primer for the detection of SNP TSC0004083
atataagttagt

SEQ ID NO: 276078 - DNA, 12 bp, Artificial Sequence
  Oligonucleotide primer for the detection of SNP TSC0004083
atataagttagc

SEQ ID NO: 276079 - DNA, 12 bp, Artificial Sequence
  Oligonucleotide primer for the detection of SNP TSC0004083
aacataaattaa

SEQ ID NO: 276080 - DNA, 12 bp, Artificial Sequence
  Oligonucleotide primer for the detection of SNP TSC0004083
gatattgtgtta

SEQ ID NO: 276081 - DNA, 12 bp, Artificial Sequence
  Oligonucleotide primer for the detection of SNP TSC0004085
cactcttcacaa

SEQ ID NO: 276082 - DNA, 12 bp, Artificial Sequence
  Oligonucleotide primer for the detection of SNP TSC0004085
atatatatttta

SEQ ID NO: 276083 - DNA, 12 bp, Artificial Sequence
  Oligonucleotide primer for the detection of SNP TSC0004085
acatatacctca

SEQ ID NO: 276084 - DNA, 12 bp, Artificial Sequence
  Oligonucleotide primer for the detection of SNP TSC0004085
tattttttataa

SEQ ID NO: 276085 - DNA, 12 bp, Artificial Sequence
  Oligonucleotide primer for the detection of SNP TSC0004086
aatcttataaac

SEQ ID NO: 276086 - DNA, 12 bp, Artificial Sequence
  Oligonucleotide primer for the detection of SNP TSC0004087
aaacaaatatat

SEQ ID NO: 276087 - DNA, 12 bp, Artificial Sequence
  Oligonucleotide primer for the detection of SNP TSC0004087
aaacgaatatat

SEQ ID NO: 276088 - DNA, 12 bp, Artificial Sequence
  Oligonucleotide primer for the detection of SNP TSC0004087
gattattgttta

SEQ ID NO: 276089 - DNA, 12 bp, Artificial Sequence
  Oligonucleotide primer for the detection of SNP TSC0004089
ttctttcctaaa

SEQ ID NO: 276090 - DNA, 12 bp, Artificial Sequence
  Oligonucleotide primer for the detection of SNP TSC0004089
aagtttttgggt

SEQ ID NO: 276091 - DNA, 12 bp, Artificial Sequence
  Oligonucleotide primer for the detection of SNP TSC0004089
aagtttttgggc

SEQ ID NO: 276092 - DNA, 12 bp, Artificial Sequence
  Oligonucleotide primer for the detection of SNP TSC0004089
aaacttctaaac

SEQ ID NO: 276093 - DNA, 12 bp, Artificial Sequence
  Oligonucleotide primer for the detection of SNP TSC0004089
ggtttttttttg

SEQ ID NO: 276094 - DNA, 12 bp, Artificial Sequence
  Oligonucleotide primer for the detection of SNP TSC0004090
ttataaaaatta

SEQ ID NO: 276095 - DNA, 12 bp, Artificial Sequence
  Oligonucleotide primer for the detection of SNP TSC0004090
ttgggaattgat

SEQ ID NO: 276096 - DNA, 12 bp, Artificial Sequence
  Oligonucleotide primer for the detection of SNP TSC0004090
tcgggaattgat

SEQ ID NO: 276097 - DNA, 12 bp, Artificial Sequence
  Oligonucleotide primer for the detection of SNP TSC0004090
ccaaaaactaat

SEQ ID NO: 276098 - DNA, 12 bp, Artificial Sequence
  Oligonucleotide primer for the detection of SNP TSC0004090
ccgaaaactaat

SEQ ID NO: 276099 - DNA, 12 bp, Artificial Sequence
  Oligonucleotide primer for the detection of SNP TSC0004091
accaactctact

SEQ ID NO: 276100 - DNA, 12 bp, Artificial Sequence
  Oligonucleotide primer for the detection of SNP TSC0004091
gccaactctact

SEQ ID NO: 276101 - DNA, 12 bp, Artificial Sequence
  Oligonucleotide primer for the detection of SNP TSC0004091
tttaaaggttag

SEQ ID NO: 276102 - DNA, 12 bp, Artificial Sequence
  Oligonucleotide primer for the detection of SNP TSC0004092
taaccataaact

SEQ ID NO: 276103 - DNA, 12 bp, Artificial Sequence
  Oligonucleotide primer for the detection of SNP TSC0004092
ttttttattgta

SEQ ID NO: 276104 - DNA, 12 bp, Artificial Sequence
  Oligonucleotide primer for the detection of SNP TSC0004092
ttttttatcgta

SEQ ID NO: 276105 - DNA, 12 bp, Artificial Sequence
  Oligonucleotide primer for the detection of SNP TSC0004093
actaacatcaat

SEQ ID NO: 276106 - DNA, 12 bp, Artificial Sequence
  Oligonucleotide primer for the detection of SNP TSC0004093
actaacatcgat

SEQ ID NO: 276107 - DNA, 12 bp, Artificial Sequence
  Oligonucleotide primer for the detection of SNP TSC0004093
ttaggatcgtag

SEQ ID NO: 276108 - DNA, 12 bp, Artificial Sequence
  Oligonucleotide primer for the detection of SNP TSC0004093
ccaaaatcacaa

SEQ ID NO: 276109 - DNA, 12 bp, Artificial Sequence
  Oligonucleotide primer for the detection of SNP TSC0004093
ccaaaatcgcaa

SEQ ID NO: 276110 - DNA, 12 bp, Artificial Sequence
  Oligonucleotide primer for the detection of SNP TSC0004093
attggtattgat

SEQ ID NO: 276111 - DNA, 12 bp, Artificial Sequence
  Oligonucleotide primer for the detection of SNP TSC0004093
attggtatcgat

SEQ ID NO: 276112 - DNA, 12 bp, Artificial Sequence
  Oligonucleotide primer for the detection of SNP TSC0004094
ctaacaaaaaaa

SEQ ID NO: 276113 - DNA, 12 bp, Artificial Sequence
  Oligonucleotide primer for the detection of SNP TSC0004094
tctctactctcc

SEQ ID NO: 276114 - DNA, 12 bp, Artificial Sequence
  Oligonucleotide primer for the detection of SNP TSC0004094
ttagtaaggaag

SEQ ID NO: 276115 - DNA, 12 bp, Artificial Sequence
  Oligonucleotide primer for the detection of SNP TSC0004095
tcaaataataca

SEQ ID NO: 276116 - DNA, 12 bp, Artificial Sequence
  Oligonucleotide primer for the detection of SNP TSC0004095
ttttgtgaggtt

SEQ ID NO: 276117 - DNA, 12 bp, Artificial Sequence
  Oligonucleotide primer for the detection of SNP TSC0004095
ttttgtgaggtc

SEQ ID NO: 276118 - DNA, 12 bp, Artificial Sequence
  Oligonucleotide primer for the detection of SNP TSC0004095
ctttataaaacc

SEQ ID NO: 276119 - DNA, 12 bp, Artificial Sequence
  Oligonucleotide primer for the detection of SNP TSC0004095
ttaagtgatata

SEQ ID NO: 276120 - DNA, 12 bp, Artificial Sequence
  Oligonucleotide primer for the detection of SNP TSC0004097
cacaaacaaccc

SEQ ID NO: 276121 - DNA, 12 bp, Artificial Sequence
  Oligonucleotide primer for the detection of SNP TSC0004097
cacaaacgaccc

SEQ ID NO: 276122 - DNA, 12 bp, Artificial Sequence
  Oligonucleotide primer for the detection of SNP TSC0004097
aattaggatgta

SEQ ID NO: 276123 - DNA, 12 bp, Artificial Sequence
  Oligonucleotide primer for the detection of SNP TSC0004098
caaaacaatatc

SEQ ID NO: 276124 - DNA, 12 bp, Artificial Sequence
  Oligonucleotide primer for the detection of SNP TSC0004098
ttggtattttta

SEQ ID NO: 276125 - DNA, 12 bp, Artificial Sequence
  Oligonucleotide primer for the detection of SNP TSC0004098
tcggtattttta

SEQ ID NO: 276126 - DNA, 12 bp, Artificial Sequence
  Oligonucleotide primer for the detection of SNP TSC0004099
aatacctcactc

SEQ ID NO: 276127 - DNA, 12 bp, Artificial Sequence
  Oligonucleotide primer for the detection of SNP TSC0004099
gttagttgtgtg

SEQ ID NO: 276128 - DNA, 12 bp, Artificial Sequence
  Oligonucleotide primer for the detection of SNP TSC0004100
ctaaaaacaaaa

SEQ ID NO: 276129 - DNA, 12 bp, Artificial Sequence
  Oligonucleotide primer for the detection of SNP TSC0004100
ctaaaaacgaaa

SEQ ID NO: 276130 - DNA, 12 bp, Artificial Sequence
  Oligonucleotide primer for the detection of SNP TSC0004100
agtttgttgtaa

SEQ ID NO: 276131 - DNA, 12 bp, Artificial Sequence
  Oligonucleotide primer for the detection of SNP TSC0004100
aacttactacaa

SEQ ID NO: 276132 - DNA, 12 bp, Artificial Sequence
  Oligonucleotide primer for the detection of SNP TSC0004100
ttggaggtggag

SEQ ID NO: 276133 - DNA, 12 bp, Artificial Sequence
  Oligonucleotide primer for the detection of SNP TSC0004100
ttggaggcggag

SEQ ID NO: 276134 - DNA, 12 bp, Artificial Sequence
  Oligonucleotide primer for the detection of SNP TSC0004101
cataaactacta

SEQ ID NO: 276135 - DNA, 12 bp, Artificial Sequence
  Oligonucleotide primer for the detection of SNP TSC0004101
cgtaaactacta

SEQ ID NO: 276136 - DNA, 12 bp, Artificial Sequence
  Oligonukleotid-Primer
gtgttaagggtt

SEQ ID NO: 276137 - DNA, 12 bp, Artificial Sequence
  Oligonucleotide primer for the detection of SNP TSC0004101
gtgttaagggtc

SEQ ID NO: 276138 - DNA, 12 bp, Artificial Sequence
  Oligonucleotide primer for the detection of SNP TSC0004101
atatcaaaaacc

SEQ ID NO: 276139 - DNA, 12 bp, Artificial Sequence
  Oligonucleotide primer for the detection of SNP TSC0004101
tgtaagttattg

SEQ ID NO: 276140 - DNA, 12 bp, Artificial Sequence
  Oligonucleotide primer for the detection of SNP TSC0004101
cgtaagttattg

SEQ ID NO: 276141 - DNA, 12 bp, Artificial Sequence
  Oligonucleotide primer for the detection of SNP TSC0004102
tcaaacactaac

SEQ ID NO: 276142 - DNA, 12 bp, Artificial Sequence
  Oligonucleotide primer for the detection of SNP TSC0004102
tcaaacgctaac

SEQ ID NO: 276143 - DNA, 12 bp, Artificial Sequence
  Oligonucleotide primer for the detection of SNP TSC0004102
tgtggtggttag

SEQ ID NO: 276144 - DNA, 12 bp, Artificial Sequence
  Oligonucleotide primer for the detection of SNP TSC0004102
cgtggtggttag

SEQ ID NO: 276145 - DNA, 12 bp, Artificial Sequence
  Oligonucleotide primer for the detection of SNP TSC0004102
tgcggtggttag

SEQ ID NO: 276146 - DNA, 12 bp, Artificial Sequence
  Oligonucleotide primer for the detection of SNP TSC0004102
cgcggtggttag

SEQ ID NO: 276147 - DNA, 12 bp, Artificial Sequence
  Oligonucleotide primer for the detection of SNP TSC0004102
cacaataaccaa

SEQ ID NO: 276148 - DNA, 12 bp, Artificial Sequence
  Oligonucleotide primer for the detection of SNP TSC0004102
cacgataaccaa

SEQ ID NO: 276149 - DNA, 12 bp, Artificial Sequence
  Oligonucleotide primer for the detection of SNP TSC0004102
cgcaataaccaa

SEQ ID NO: 276150 - DNA, 12 bp, Artificial Sequence
  Oligonucleotide primer for the detection of SNP TSC0004102
cgcgataaccaa

SEQ ID NO: 276151 - DNA, 12 bp, Artificial Sequence
  Oligonucleotide primer for the detection of SNP TSC0004102
ttaaatgttgat

SEQ ID NO: 276152 - DNA, 12 bp, Artificial Sequence
  Oligonucleotide primer for the detection of SNP TSC0004102
ttaaacgttgat

SEQ ID NO: 276153 - DNA, 12 bp, Artificial Sequence
  Oligonucleotide primer for the detection of SNP TSC0004102
ttaaatgttgac

SEQ ID NO: 276154 - DNA, 12 bp, Artificial Sequence
  Oligonucleotide primer for the detection of SNP TSC0004102
ttaaacgttgac

SEQ ID NO: 276155 - DNA, 12 bp, Artificial Sequence
  Oligonucleotide primer for the detection of SNP TSC0004103
attaaaaaatct

SEQ ID NO: 276156 - DNA, 12 bp, Artificial Sequence
  Oligonucleotide primer for the detection of SNP TSC0004103
tggatttatgag

SEQ ID NO: 276157 - DNA, 12 bp, Artificial Sequence
  Oligonucleotide primer for the detection of SNP TSC0004104
tcaaacataata

SEQ ID NO: 276158 - DNA, 12 bp, Artificial Sequence
  Oligonucleotide primer for the detection of SNP TSC0004104
ttttaaatttat

SEQ ID NO: 276159 - DNA, 12 bp, Artificial Sequence
  Oligonucleotide primer for the detection of SNP TSC0004104
tcctaaattcat

SEQ ID NO: 276160 - DNA, 12 bp, Artificial Sequence
  Oligonucleotide primer for the detection of SNP TSC0004104
ttaagtatggta

SEQ ID NO: 276161 - DNA, 12 bp, Artificial Sequence
  Oligonucleotide primer for the detection of SNP TSC0004105
taccataaaaca

SEQ ID NO: 276162 - DNA, 12 bp, Artificial Sequence
  Oligonucleotide primer for the detection of SNP TSC0004105
ttatttttttat

SEQ ID NO: 276163 - DNA, 12 bp, Artificial Sequence
  Oligonucleotide primer for the detection of SNP TSC0004105
ccaccttcttac

SEQ ID NO: 276164 - DNA, 12 bp, Artificial Sequence
  Oligonucleotide primer for the detection of SNP TSC0004105
tgttataggata

SEQ ID NO: 276165 - DNA, 12 bp, Artificial Sequence
  Oligonucleotide primer for the detection of SNP TSC0004106
taaattacccaa

SEQ ID NO: 276166 - DNA, 12 bp, Artificial Sequence
  Oligonucleotide primer for the detection of SNP TSC0004106
taaaggaatatt

SEQ ID NO: 276167 - DNA, 12 bp, Artificial Sequence
  Oligonucleotide primer for the detection of SNP TSC0004106
taaaaaaatacc

SEQ ID NO: 276168 - DNA, 12 bp, Artificial Sequence
  Oligonucleotide primer for the detection of SNP TSC0004106
taaattatttag

SEQ ID NO: 276169 - DNA, 12 bp, Artificial Sequence
  Oligonucleotide primer for the detection of SNP TSC0004107
actacttccacc

SEQ ID NO: 276170 - DNA, 12 bp, Artificial Sequence
  Oligonucleotide primer for the detection of SNP TSC0004107
ataatggttaga

SEQ ID NO: 276171 - DNA, 12 bp, Artificial Sequence
  Oligonucleotide primer for the detection of SNP TSC0004107
ataacggttaga

SEQ ID NO: 276172 - DNA, 12 bp, Artificial Sequence
  Oligonucleotide primer for the detection of SNP TSC0004108
tagtttatttat

SEQ ID NO: 276173 - DNA, 12 bp, Artificial Sequence
  Oligonucleotide primer for the detection of SNP TSC0004108
taacccattcac

SEQ ID NO: 276174 - DNA, 12 bp, Artificial Sequence
  Oligonucleotide primer for the detection of SNP TSC0004108
aaagtggggtgg

SEQ ID NO: 276175 - DNA, 12 bp, Artificial Sequence
  Oligonucleotide primer for the detection of SNP TSC0004109
aaaaaaaattac

SEQ ID NO: 276176 - DNA, 12 bp, Artificial Sequence
  Oligonucleotide primer for the detection of SNP TSC0004109
gtatggaggaaa

SEQ ID NO: 276177 - DNA, 12 bp, Artificial Sequence
  Oligonucleotide primer for the detection of SNP TSC0004110
caactcacccaa

SEQ ID NO: 276178 - DNA, 12 bp, Artificial Sequence
  Oligonucleotide primer for the detection of SNP TSC0004110
ttgttaaaattt

SEQ ID NO: 276179 - DNA, 12 bp, Artificial Sequence
  Oligonucleotide primer for the detection of SNP TSC0004110
ctattaaaactc

SEQ ID NO: 276180 - DNA, 12 bp, Artificial Sequence
  Oligonucleotide primer for the detection of SNP TSC0004110
tagtttatttag

SEQ ID NO: 276181 - DNA, 12 bp, Artificial Sequence
  Oligonucleotide primer for the detection of SNP TSC0004111
aaaaattctaac

SEQ ID NO: 276182 - DNA, 12 bp, Artificial Sequence
  Oligonucleotide primer for the detection of SNP TSC0004111
gtttagattatt

SEQ ID NO: 276183 - DNA, 12 bp, Artificial Sequence
  Oligonucleotide primer for the detection of SNP TSC0004111
gtttagattatc

SEQ ID NO: 276184 - DNA, 12 bp, Artificial Sequence
  Oligonucleotide primer for the detection of SNP TSC0004111
atccaaatcatc

SEQ ID NO: 276185 - DNA, 12 bp, Artificial Sequence
  Oligonucleotide primer for the detection of SNP TSC0004111
gtccaaatcatc

SEQ ID NO: 276186 - DNA, 12 bp, Artificial Sequence
  Oligonucleotide primer for the detection of SNP TSC0004111
agattttgattt

SEQ ID NO: 276187 - DNA, 12 bp, Artificial Sequence
  Oligonucleotide primer for the detection of SNP TSC0004112
taatacaatttc

SEQ ID NO: 276188 - DNA, 12 bp, Artificial Sequence
  Oligonucleotide primer for the detection of SNP TSC0004112
taatacgatttc

SEQ ID NO: 276189 - DNA, 12 bp, Artificial Sequence
  Oligonucleotide primer for the detection of SNP TSC0004112
aggatgtagtga

SEQ ID NO: 276190 - DNA, 12 bp, Artificial Sequence
  Oligonucleotide primer for the detection of SNP TSC0004112
aggatgtagcga

SEQ ID NO: 276191 - DNA, 12 bp, Artificial Sequence
  Oligonucleotide primer for the detection of SNP TSC0004113
cttaaaaaaaat

SEQ ID NO: 276192 - DNA, 12 bp, Artificial Sequence
  Oligonucleotide primer for the detection of SNP TSC0004113
ttagagtaagta

SEQ ID NO: 276193 - DNA, 12 bp, Artificial Sequence
  Oligonucleotide primer for the detection of SNP TSC0004114
ccttaccttcct

SEQ ID NO: 276194 - DNA, 12 bp, Artificial Sequence
  Oligonucleotide primer for the detection of SNP TSC0004114
ttgggaaaggaa

SEQ ID NO: 276195 - DNA, 12 bp, Artificial Sequence
  Oligonucleotide primer for the detection of SNP TSC0004115
acacccacaaaa

SEQ ID NO: 276196 - DNA, 12 bp, Artificial Sequence
  Oligonucleotide primer for the detection of SNP TSC0004115
catcttcatcac

SEQ ID NO: 276197 - DNA, 12 bp, Artificial Sequence
  Oligonukleotid-Primer
atatttataaga

SEQ ID NO: 276198 - DNA, 12 bp, Artificial Sequence
  Oligonucleotide primer for the detection of SNP TSC0004116
cataatcaccat

SEQ ID NO: 276199 - DNA, 12 bp, Artificial Sequence
  Oligonucleotide primer for the detection of SNP TSC0004116
cgtaatcaccat

SEQ ID NO: 276200 - DNA, 12 bp, Artificial Sequence
  Oligonucleotide primer for the detection of SNP TSC0004116
atttgtttgagg

SEQ ID NO: 276201 - DNA, 12 bp, Artificial Sequence
  Oligonukleotid-Primer
caaccacctcca

SEQ ID NO: 276202 - DNA, 12 bp, Artificial Sequence
  Oligonucleotide primer for the detection of SNP TSC0004117
ttgatggtgggg

SEQ ID NO: 276203 - DNA, 12 bp, Artificial Sequence
  Oligonucleotide primer for the detection of SNP TSC0004117
ttaataataaaa

SEQ ID NO: 276204 - DNA, 12 bp, Artificial Sequence
  Oligonucleotide primer for the detection of SNP TSC0004117
ttagttattttt

SEQ ID NO: 276205 - DNA, 12 bp, Artificial Sequence
  Oligonucleotide primer for the detection of SNP TSC0004118
cacatttcaaaa

SEQ ID NO: 276206 - DNA, 12 bp, Artificial Sequence
  Oligonucleotide primer for the detection of SNP TSC0004118
tgttttgagttt

SEQ ID NO: 276207 - DNA, 12 bp, Artificial Sequence
  Oligonucleotide primer for the detection of SNP TSC0004118
tgtttcgagttt

SEQ ID NO: 276208 - DNA, 12 bp, Artificial Sequence
  Oligonucleotide primer for the detection of SNP TSC0004118
tacttcaaattt

SEQ ID NO: 276209 - DNA, 12 bp, Artificial Sequence
  Oligonucleotide primer for the detection of SNP TSC0004118
tacttcgaattt

SEQ ID NO: 276210 - DNA, 12 bp, Artificial Sequence
  Oligonucleotide primer for the detection of SNP TSC0004118
atattttaaagt

SEQ ID NO: 276211 - DNA, 12 bp, Artificial Sequence
  Oligonucleotide primer for the detection of SNP TSC0004119
atttatttgttt

SEQ ID NO: 276212 - DNA, 12 bp, Artificial Sequence
  Oligonucleotide primer for the detection of SNP TSC0004119
atttattcgttt

SEQ ID NO: 276213 - DNA, 12 bp, Artificial Sequence
  Oligonucleotide primer for the detection of SNP TSC0004119
aatctattcatc

SEQ ID NO: 276214 - DNA, 12 bp, Artificial Sequence
  Oligonucleotide primer for the detection of SNP TSC0004119
aatctattcgtc

SEQ ID NO: 276215 - DNA, 12 bp, Artificial Sequence
  Oligonucleotide primer for the detection of SNP TSC0004119
tattggagaaat

SEQ ID NO: 276216 - DNA, 12 bp, Artificial Sequence
  Oligonucleotide primer for the detection of SNP TSC0004121
aaaacccctctc

SEQ ID NO: 276217 - DNA, 12 bp, Artificial Sequence
  Oligonucleotide primer for the detection of SNP TSC0004121
ggttttggttag

SEQ ID NO: 276218 - DNA, 12 bp, Artificial Sequence
  Oligonucleotide primer for the detection of SNP TSC0004121
ggtttcggttag

SEQ ID NO: 276219 - DNA, 12 bp, Artificial Sequence
  Oligonucleotide primer for the detection of SNP TSC0004121
aacctcaaccaa

SEQ ID NO: 276220 - DNA, 12 bp, Artificial Sequence
  Oligonucleotide primer for the detection of SNP TSC0004121
aacctcgaccaa

SEQ ID NO: 276221 - DNA, 12 bp, Artificial Sequence
  Oligonucleotide primer for the detection of SNP TSC0004121
gacctcaaccaa

SEQ ID NO: 276222 - DNA, 12 bp, Artificial Sequence
  Oligonucleotide primer for the detection of SNP TSC0004121
gacctcgaccaa

SEQ ID NO: 276223 - DNA, 12 bp, Artificial Sequence
  Oligonucleotide primer for the detection of SNP TSC0004122
aaccattatacc

SEQ ID NO: 276224 - DNA, 12 bp, Artificial Sequence
  Oligonucleotide primer for the detection of SNP TSC0004122
aaaatatttaaa

SEQ ID NO: 276225 - DNA, 12 bp, Artificial Sequence
  Oligonucleotide primer for the detection of SNP TSC0004123
tctaaaaattca

SEQ ID NO: 276226 - DNA, 12 bp, Artificial Sequence
  Oligonucleotide primer for the detection of SNP TSC0004123
tatttagtagaa

SEQ ID NO: 276227 - DNA, 12 bp, Artificial Sequence
  Oligonucleotide primer for the detection of SNP TSC0004123
cacctaacaaaa

SEQ ID NO: 276228 - DNA, 12 bp, Artificial Sequence
  Oligonucleotide primer for the detection of SNP TSC0004123
tttaggaattta

SEQ ID NO: 276229 - DNA, 12 bp, Artificial Sequence
  Oligonucleotide primer for the detection of SNP TSC0004124
ctctaaaaaaaa

SEQ ID NO: 276230 - DNA, 12 bp, Artificial Sequence
  Oligonucleotide primer for the detection of SNP TSC0004124
ttgagtgttagg

SEQ ID NO: 276231 - DNA, 12 bp, Artificial Sequence
  Oligonucleotide primer for the detection of SNP TSC0004124
ttaaatactaaa

SEQ ID NO: 276232 - DNA, 12 bp, Artificial Sequence
  Oligonucleotide primer for the detection of SNP TSC0004124
tttaaaaggggt

SEQ ID NO: 276233 - DNA, 12 bp, Artificial Sequence
  Oligonucleotide primer for the detection of SNP TSC0004125
accaattcccca

SEQ ID NO: 276234 - DNA, 12 bp, Artificial Sequence
  Oligonucleotide primer for the detection of SNP TSC0004125
accaattccccg

SEQ ID NO: 276235 - DNA, 12 bp, Artificial Sequence
  Oligonucleotide primer for the detection of SNP TSC0004125
ttggttttttta

SEQ ID NO: 276236 - DNA, 12 bp, Artificial Sequence
  Oligonucleotide primer for the detection of SNP TSC0004125
ttaattttctta

SEQ ID NO: 276237 - DNA, 12 bp, Artificial Sequence
  Oligonucleotide primer for the detection of SNP TSC0004125
attaattttttg

SEQ ID NO: 276238 - DNA, 12 bp, Artificial Sequence
  Oligonucleotide primer for the detection of SNP TSC0004125
attaatttttcg

SEQ ID NO: 276239 - DNA, 12 bp, Artificial Sequence
  Oligonucleotide primer for the detection of SNP TSC0004126
tccctatcttat

SEQ ID NO: 276240 - DNA, 12 bp, Artificial Sequence
  Oligonucleotide primer for the detection of SNP TSC0004126
tttgaaaataaa

SEQ ID NO: 276241 - DNA, 12 bp, Artificial Sequence
  Oligonucleotide primer for the detection of SNP TSC0004127
ccaaaaccataa

SEQ ID NO: 276242 - DNA, 12 bp, Artificial Sequence
  Oligonucleotide primer for the detection of SNP TSC0004127
agaatagttata

SEQ ID NO: 276243 - DNA, 12 bp, Artificial Sequence
  Oligonucleotide primer for the detection of SNP TSC0004127
aaaacaattata

SEQ ID NO: 276244 - DNA, 12 bp, Artificial Sequence
  Oligonucleotide primer for the detection of SNP TSC0004127
agttagagttat

SEQ ID NO: 276245 - DNA, 12 bp, Artificial Sequence
  Oligonucleotide primer for the detection of SNP TSC0004128
ccaaaaaaccta

SEQ ID NO: 276246 - DNA, 12 bp, Artificial Sequence
  Oligonucleotide primer for the detection of SNP TSC0004128
ccgaaaaaccta

SEQ ID NO: 276247 - DNA, 12 bp, Artificial Sequence
  Oligonucleotide primer for the detection of SNP TSC0004128
gagggggtgagg

SEQ ID NO: 276248 - DNA, 12 bp, Artificial Sequence
  Oligonucleotide primer for the detection of SNP TSC0004128
gagggggcgagg

SEQ ID NO: 276249 - DNA, 12 bp, Artificial Sequence
  Oligonucleotide primer for the detection of SNP TSC0004128
aaaaaaacgaaa

SEQ ID NO: 276250 - DNA, 12 bp, Artificial Sequence
  Oligonucleotide primer for the detection of SNP TSC0004128
ttgggggatttg

SEQ ID NO: 276251 - DNA, 12 bp, Artificial Sequence
  Oligonucleotide primer for the detection of SNP TSC0004128
tcgggggatttg

SEQ ID NO: 276252 - DNA, 12 bp, Artificial Sequence
  Oligonucleotide primer for the detection of SNP TSC0004129
actcccaaacca

SEQ ID NO: 276253 - DNA, 12 bp, Artificial Sequence
  Oligonucleotide primer for the detection of SNP TSC0004129
actcccaaaccg

SEQ ID NO: 276254 - DNA, 12 bp, Artificial Sequence
  Oligonucleotide primer for the detection of SNP TSC0004129
agaatttttttt

SEQ ID NO: 276255 - DNA, 12 bp, Artificial Sequence
  Oligonucleotide primer for the detection of SNP TSC0004129
tcaaaattctcc

SEQ ID NO: 276256 - DNA, 12 bp, Artificial Sequence
  Oligonucleotide primer for the detection of SNP TSC0004129
tttttaaattgt

SEQ ID NO: 276257 - DNA, 12 bp, Artificial Sequence
  Oligonucleotide primer for the detection of SNP TSC0004129
tttttaaatcgt

SEQ ID NO: 276258 - DNA, 12 bp, Artificial Sequence
  Oligonukleotid-Primer
tttttaaattgc

SEQ ID NO: 276259 - DNA, 12 bp, Artificial Sequence
  Oligonucleotide primer for the detection of SNP TSC0004129
tttttaaatcgc

SEQ ID NO: 276260 - DNA, 12 bp, Artificial Sequence
  Oligonucleotide primer for the detection of SNP TSC0004132
acaaaatccata

SEQ ID NO: 276261 - DNA, 12 bp, Artificial Sequence
  Oligonucleotide primer for the detection of SNP TSC0004132
gattagggatat

SEQ ID NO: 276262 - DNA, 12 bp, Artificial Sequence
  Oligonukleotid-Primer
aactaaaaacac

SEQ ID NO: 276263 - DNA, 12 bp, Artificial Sequence
  Oligonucleotide primer for the detection of SNP TSC0004132
gtagagtttatg

SEQ ID NO: 276264 - DNA, 12 bp, Artificial Sequence
  Oligonucleotide primer for the detection of SNP TSC0004133
caactcaaaact

SEQ ID NO: 276265 - DNA, 12 bp, Artificial Sequence
  Oligonucleotide primer for the detection of SNP TSC0004133
tttttaggtata

SEQ ID NO: 276266 - DNA, 12 bp, Artificial Sequence
  Oligonukleotid-Primer
aaaaaatacaac

SEQ ID NO: 276267 - DNA, 12 bp, Artificial Sequence
  Oligonucleotide primer for the detection of SNP TSC0004134
gtgcgattttag

SEQ ID NO: 276268 - DNA, 12 bp, Artificial Sequence
  Oligonucleotide primer for the detection of SNP TSC0004135
ttccttaaactc

SEQ ID NO: 276269 - DNA, 12 bp, Artificial Sequence
  Oligonucleotide primer for the detection of SNP TSC0004135
atggggtgattg

SEQ ID NO: 276270 - DNA, 12 bp, Artificial Sequence
  Oligonukleotid-Primer
cttccttcactc

SEQ ID NO: 276271 - DNA, 12 bp, Artificial Sequence
  Oligonucleotide primer for the detection of SNP TSC0004136
gggagttagggt

SEQ ID NO: 276272 - DNA, 12 bp, Artificial Sequence
  Oligonucleotide primer for the detection of SNP TSC0004136
aaaaccaaaaca

SEQ ID NO: 276273 - DNA, 12 bp, Artificial Sequence
  Oligonucleotide primer for the detection of SNP TSC0004136
ttttttttattt

SEQ ID NO: 276274 - DNA, 12 bp, Artificial Sequence
  Oligonucleotide primer for the detection of SNP TSC0004137
caaaacctaaac

SEQ ID NO: 276275 - DNA, 12 bp, Artificial Sequence
  Oligonucleotide primer for the detection of SNP TSC0004137
ttgggattggat

SEQ ID NO: 276276 - DNA, 12 bp, Artificial Sequence
  Oligonucleotide primer for the detection of SNP TSC0004137
taaaattaaaca

SEQ ID NO: 276277 - DNA, 12 bp, Artificial Sequence
  Oligonucleotide primer for the detection of SNP TSC0004137
agagtttgggtt

SEQ ID NO: 276278 - DNA, 12 bp, Artificial Sequence
  Oligonucleotide primer for the detection of SNP TSC0004138
aaaaaataaaac

SEQ ID NO: 276279 - DNA, 12 bp, Artificial Sequence
  Oligonucleotide primer for the detection of SNP TSC0004138
gtgtttttatta

SEQ ID NO: 276280 - DNA, 12 bp, Artificial Sequence
  Oligonucleotide primer for the detection of SNP TSC0004138
atatcttcatta

SEQ ID NO: 276281 - DNA, 12 bp, Artificial Sequence
  Oligonucleotide primer for the detection of SNP TSC0004138
aagaaatgaagt

SEQ ID NO: 276282 - DNA, 12 bp, Artificial Sequence
  Oligonucleotide primer for the detection of SNP TSC0004139
aaataaaaaatc

SEQ ID NO: 276283 - DNA, 12 bp, Artificial Sequence
  Oligonucleotide primer for the detection of SNP TSC0004139
attatttattta

SEQ ID NO: 276284 - DNA, 12 bp, Artificial Sequence
  Oligonucleotide primer for the detection of SNP TSC0004139
actactcattca

SEQ ID NO: 276285 - DNA, 12 bp, Artificial Sequence
  Oligonucleotide primer for the detection of SNP TSC0004139
gaatgaaagatt

SEQ ID NO: 276286 - DNA, 12 bp, Artificial Sequence
  Oligonucleotide primer for the detection of SNP TSC0004140
tctcatcacccc

SEQ ID NO: 276287 - DNA, 12 bp, Artificial Sequence
  Oligonucleotide primer for the detection of SNP TSC0004140
tattagaatttg

SEQ ID NO: 276288 - DNA, 12 bp, Artificial Sequence
  Oligonucleotide primer for the detection of SNP TSC0004141
atattaacaaaa

SEQ ID NO: 276289 - DNA, 12 bp, Artificial Sequence
  Oligonucleotide primer for the detection of SNP TSC0004142
aaaaaaaataat

SEQ ID NO: 276290 - DNA, 12 bp, Artificial Sequence
  Oligonucleotide primer for the detection of SNP TSC0004142
attagatggatt

SEQ ID NO: 276291 - DNA, 12 bp, Artificial Sequence
  Oligonucleotide primer for the detection of SNP TSC0004142
attagacggatt

SEQ ID NO: 276292 - DNA, 12 bp, Artificial Sequence
  Oligonucleotide primer for the detection of SNP TSC0004142
atcaaacaaact

SEQ ID NO: 276293 - DNA, 12 bp, Artificial Sequence
  Oligonucleotide primer for the detection of SNP TSC0004142
atcaaacgaact

SEQ ID NO: 276294 - DNA, 12 bp, Artificial Sequence
  Oligonucleotide primer for the detection of SNP TSC0004142
aaagaaagtaat

SEQ ID NO: 276295 - DNA, 12 bp, Artificial Sequence
  Oligonucleotide primer for the detection of SNP TSC0004143
ctttcccacctc

SEQ ID NO: 276296 - DNA, 12 bp, Artificial Sequence
  Oligonucleotide primer for the detection of SNP TSC0004143
tggattttgagg

SEQ ID NO: 276297 - DNA, 12 bp, Artificial Sequence
  Oligonucleotide primer for the detection of SNP TSC0004144
actcaactcccc

SEQ ID NO: 276298 - DNA, 12 bp, Artificial Sequence
  Oligonucleotide primer for the detection of SNP TSC0004144
tggaattttatg

SEQ ID NO: 276299 - DNA, 12 bp, Artificial Sequence
  Oligonucleotide primer for the detection of SNP TSC0004144
taaaaccccata

SEQ ID NO: 276300 - DNA, 12 bp, Artificial Sequence
  Oligonucleotide primer for the detection of SNP TSC0004144
gtttagtttttt

SEQ ID NO: 276301 - DNA, 12 bp, Artificial Sequence
  Oligonucleotide primer for the detection of SNP TSC0004145
ctataaaacttc

SEQ ID NO: 276302 - DNA, 12 bp, Artificial Sequence
  Oligonucleotide primer for the detection of SNP TSC0004145
gaatattttaag

SEQ ID NO: 276303 - DNA, 12 bp, Artificial Sequence
  Oligonucleotide primer for the detection of SNP TSC0004145
aaacattttaaa

SEQ ID NO: 276304 - DNA, 12 bp, Artificial Sequence
  Oligonucleotide primer for the detection of SNP TSC0004145
ttatgaaatttt

SEQ ID NO: 276305 - DNA, 12 bp, Artificial Sequence
  Oligonucleotide primer for the detection of SNP TSC0004146
tttaataaatcc

SEQ ID NO: 276306 - DNA, 12 bp, Artificial Sequence
  Oligonucleotide primer for the detection of SNP TSC0004146
ttttttttaatc

SEQ ID NO: 276307 - DNA, 12 bp, Artificial Sequence
  Oligonucleotide primer for the detection of SNP TSC0004146
tcccttctaacc

SEQ ID NO: 276308 - DNA, 12 bp, Artificial Sequence
  Oligonucleotide primer for the detection of SNP TSC0004146
ttgatgaatttt

SEQ ID NO: 276309 - DNA, 12 bp, Artificial Sequence
  Oligonucleotide primer for the detection of SNP TSC0004147
tataggtttttt

SEQ ID NO: 276310 - DNA, 12 bp, Artificial Sequence
  Oligonucleotide primer for the detection of SNP TSC0004147
ttacaaactctc

SEQ ID NO: 276311 - DNA, 12 bp, Artificial Sequence
  Oligonucleotide primer for the detection of SNP TSC0004148
aatcaaaatcta

SEQ ID NO: 276312 - DNA, 12 bp, Artificial Sequence
  Oligonucleotide primer for the detection of SNP TSC0004148
tagatttagaat

SEQ ID NO: 276313 - DNA, 12 bp, Artificial Sequence
  Oligonucleotide primer for the detection of SNP TSC0004148
caaatccaaaac

SEQ ID NO: 276314 - DNA, 12 bp, Artificial Sequence
  Oligonucleotide primer for the detection of SNP TSC0004148
aattagaatttg

SEQ ID NO: 276315 - DNA, 12 bp, Artificial Sequence
  Oligonucleotide primer for the detection of SNP TSC0004150
actaaaaattct

SEQ ID NO: 276316 - DNA, 12 bp, Artificial Sequence
  Oligonucleotide primer for the detection of SNP TSC0004150
gaggaggtgata

SEQ ID NO: 276317 - DNA, 12 bp, Artificial Sequence
  Oligonucleotide primer for the detection of SNP TSC0004151
aaataaaaataa

SEQ ID NO: 276318 - DNA, 12 bp, Artificial Sequence
  Oligonucleotide primer for the detection of SNP TSC0004151
ggatttggttag

SEQ ID NO: 276319 - DNA, 12 bp, Artificial Sequence
  Oligonucleotide primer for the detection of SNP TSC0004151
aaacttaatcaa

SEQ ID NO: 276320 - DNA, 12 bp, Artificial Sequence
  Oligonucleotide primer for the detection of SNP TSC0004151
agatagaggtgg

SEQ ID NO: 276321 - DNA, 12 bp, Artificial Sequence
  Oligonucleotide primer for the detection of SNP TSC0004152
acaaaatttata

SEQ ID NO: 276322 - DNA, 12 bp, Artificial Sequence
  Oligonucleotide primer for the detection of SNP TSC0004152
gataaaatttat

SEQ ID NO: 276323 - DNA, 12 bp, Artificial Sequence
  Oligonucleotide primer for the detection of SNP TSC0004152
aataaaatttat

SEQ ID NO: 276324 - DNA, 12 bp, Artificial Sequence
  Oligonucleotide primer for the detection of SNP TSC0004152
gtaaagtttgta

SEQ ID NO: 276325 - DNA, 12 bp, Artificial Sequence
  Oligonucleotide primer for the detection of SNP TSC0004153
aatacaatatct

SEQ ID NO: 276326 - DNA, 12 bp, Artificial Sequence
  Oligonucleotide primer for the detection of SNP TSC0004153
gtttgaatgagg

SEQ ID NO: 276327 - DNA, 12 bp, Artificial Sequence
  Oligonucleotide primer for the detection of SNP TSC0004154
ctcccatctaat

SEQ ID NO: 276328 - DNA, 12 bp, Artificial Sequence
  Oligonucleotide primer for the detection of SNP TSC0004154
ttagaaggtagg

SEQ ID NO: 276329 - DNA, 12 bp, Artificial Sequence
  Oligonucleotide primer for the detection of SNP TSC0004155
atcttatcaata

SEQ ID NO: 276330 - DNA, 12 bp, Artificial Sequence
  Oligonucleotide primer for the detection of SNP TSC0004155
tttttattttat

SEQ ID NO: 276331 - DNA, 12 bp, Artificial Sequence
  Oligonucleotide primer for the detection of SNP TSC0004155
ctttcatcttac

SEQ ID NO: 276332 - DNA, 12 bp, Artificial Sequence
  Oligonucleotide primer for the detection of SNP TSC0004155
ttttgttagtgt

SEQ ID NO: 276333 - DNA, 12 bp, Artificial Sequence
  Oligonucleotide primer for the detection of SNP TSC0004155
ttttgttagtgc

SEQ ID NO: 276334 - DNA, 12 bp, Artificial Sequence
  Oligonucleotide primer for the detection of SNP TSC0004156
aataatctccta

SEQ ID NO: 276335 - DNA, 12 bp, Artificial Sequence
  Oligonucleotide primer for the detection of SNP TSC0004156
tttagttgtaat

SEQ ID NO: 276336 - DNA, 12 bp, Artificial Sequence
  Oligonucleotide primer for the detection of SNP TSC0004156
tcaactataata

SEQ ID NO: 276337 - DNA, 12 bp, Artificial Sequence
  Oligonucleotide primer for the detection of SNP TSC0004156
ataattttttat

SEQ ID NO: 276338 - DNA, 12 bp, Artificial Sequence
  Oligonucleotide primer for the detection of SNP TSC0004157
cactaaaaattc

SEQ ID NO: 276339 - DNA, 12 bp, Artificial Sequence
  Oligonucleotide primer for the detection of SNP TSC0004157
ttaaaattgtta

SEQ ID NO: 276340 - DNA, 12 bp, Artificial Sequence
  Oligonucleotide primer for the detection of SNP TSC0004158
ttccatcacctc

SEQ ID NO: 276341 - DNA, 12 bp, Artificial Sequence
  Oligonucleotide primer for the detection of SNP TSC0004158
gtatagtttagg

SEQ ID NO: 276342 - DNA, 12 bp, Artificial Sequence
  Oligonucleotide primer for the detection of SNP TSC0004159
gtattattgatg

SEQ ID NO: 276343 - DNA, 12 bp, Artificial Sequence
  Oligonucleotide primer for the detection of SNP TSC0004159
gtattattgacg

SEQ ID NO: 276344 - DNA, 12 bp, Artificial Sequence
  Oligonucleotide primer for the detection of SNP TSC0004160
tataaggatttt

SEQ ID NO: 276345 - DNA, 12 bp, Artificial Sequence
  Oligonucleotide primer for the detection of SNP TSC0004160
ccacaaaaaccc

SEQ ID NO: 276346 - DNA, 12 bp, Artificial Sequence
  Oligonucleotide primer for the detection of SNP TSC0004160
gttgaatatatg

SEQ ID NO: 276347 - DNA, 12 bp, Artificial Sequence
  Oligonucleotide primer for the detection of SNP TSC0004161
taaccctaaata

SEQ ID NO: 276348 - DNA, 12 bp, Artificial Sequence
  Oligonucleotide primer for the detection of SNP TSC0004161
gaggaggtaatt

SEQ ID NO: 276349 - DNA, 12 bp, Artificial Sequence
  Oligonucleotide primer for the detection of SNP TSC0004161
caaaaaaaacaa

SEQ ID NO: 276350 - DNA, 12 bp, Artificial Sequence
  Oligonucleotide primer for the detection of SNP TSC0004161
aattttgagtgt

SEQ ID NO: 276351 - DNA, 12 bp, Artificial Sequence
  Oligonucleotide primer for the detection of SNP TSC0004162
taaaactaaatc

SEQ ID NO: 276352 - DNA, 12 bp, Artificial Sequence
  Oligonucleotide primer for the detection of SNP TSC0004162
attcctatttta

SEQ ID NO: 276353 - DNA, 12 bp, Artificial Sequence
  Oligonucleotide primer for the detection of SNP TSC0004162
tgagattgaatt

SEQ ID NO: 276354 - DNA, 12 bp, Artificial Sequence
  Oligonucleotide primer for the detection of SNP TSC0004162
tgagattgaatc

SEQ ID NO: 276355 - DNA, 12 bp, Artificial Sequence
  Oligonukleotid-Primer
cctcaaaaaaat

SEQ ID NO: 276356 - DNA, 12 bp, Artificial Sequence
  Oligonucleotide primer for the detection of SNP TSC0004163
cataacaaaaca

SEQ ID NO: 276357 - DNA, 12 bp, Artificial Sequence
  Oligonucleotide primer for the detection of SNP TSC0004163
ttttaaaagagt

SEQ ID NO: 276358 - DNA, 12 bp, Artificial Sequence
  Oligonucleotide primer for the detection of SNP TSC0004166
aaaacaaatata

SEQ ID NO: 276359 - DNA, 12 bp, Artificial Sequence
  Oligonukleotid-Primer
aaaacgaatata

SEQ ID NO: 276360 - DNA, 12 bp, Artificial Sequence
  Oligonucleotide primer for the detection of SNP TSC0004166
tattttttgtat

SEQ ID NO: 276361 - DNA, 12 bp, Artificial Sequence
  Oligonucleotide primer for the detection of SNP TSC0004166
cattccctatac

SEQ ID NO: 276362 - DNA, 12 bp, Artificial Sequence
  Oligonucleotide primer for the detection of SNP TSC0004166
ggagtgaatgtg

SEQ ID NO: 276363 - DNA, 12 bp, Artificial Sequence
  Oligonucleotide primer for the detection of SNP TSC0004166
ggagcgaatgtg

SEQ ID NO: 276364 - DNA, 12 bp, Artificial Sequence
  Oligonucleotide primer for the detection of SNP TSC0004167
ataaatacctct

SEQ ID NO: 276365 - DNA, 12 bp, Artificial Sequence
  Oligonucleotide primer for the detection of SNP TSC0004167
atagatgttttt

SEQ ID NO: 276366 - DNA, 12 bp, Artificial Sequence
  Oligonucleotide primer for the detection of SNP TSC0004168
acacttccctac

SEQ ID NO: 276367 - DNA, 12 bp, Artificial Sequence
  Oligonucleotide primer for the detection of SNP TSC0004168
gcacttccctac

SEQ ID NO: 276368 - DNA, 12 bp, Artificial Sequence
  Oligonucleotide primer for the detection of SNP TSC0004168
ttagtgtttagg

SEQ ID NO: 276369 - DNA, 12 bp, Artificial Sequence
  Oligonucleotide primer for the detection of SNP TSC0004169
caatctaaaatc

SEQ ID NO: 276370 - DNA, 12 bp, Artificial Sequence
  Oligonucleotide primer for the detection of SNP TSC0004169
aaagggtaaagt

SEQ ID NO: 276371 - DNA, 12 bp, Artificial Sequence
  Oligonucleotide primer for the detection of SNP TSC0004169
aaaaacaaaaca

SEQ ID NO: 276372 - DNA, 12 bp, Artificial Sequence
  Oligonucleotide primer for the detection of SNP TSC0004169
aatttaaaattt

SEQ ID NO: 276373 - DNA, 12 bp, Artificial Sequence
  Oligonucleotide primer for the detection of SNP TSC0004170
ccttctttcctt

SEQ ID NO: 276374 - DNA, 12 bp, Artificial Sequence
  Oligonucleotide primer for the detection of SNP TSC0004170
tttttggaagtt

SEQ ID NO: 276375 - DNA, 12 bp, Artificial Sequence
  Oligonucleotide primer for the detection of SNP TSC0004170
ttcctaaaaatc

SEQ ID NO: 276376 - DNA, 12 bp, Artificial Sequence
  Oligonucleotide primer for the detection of SNP TSC0004171
aaaataatcact

SEQ ID NO: 276377 - DNA, 12 bp, Artificial Sequence
  Oligonucleotide primer for the detection of SNP TSC0004171
ttaaatgtaatg

SEQ ID NO: 276378 - DNA, 12 bp, Artificial Sequence
  Oligonucleotide primer for the detection of SNP TSC0004172
cctacctcaacc

SEQ ID NO: 276379 - DNA, 12 bp, Artificial Sequence
  Oligonucleotide primer for the detection of SNP TSC0004172
tagaattttggg

SEQ ID NO: 276380 - DNA, 12 bp, Artificial Sequence
  Oligonucleotide primer for the detection of SNP TSC0004173
ttaaatataaat

SEQ ID NO: 276381 - DNA, 12 bp, Artificial Sequence
  Oligonucleotide primer for the detection of SNP TSC0004173
tttgtaattgtg

SEQ ID NO: 276382 - DNA, 12 bp, Artificial Sequence
  Oligonucleotide primer for the detection of SNP TSC0004173
tttacaactata

SEQ ID NO: 276383 - DNA, 12 bp, Artificial Sequence
  Oligonucleotide primer for the detection of SNP TSC0004173
ttggatgtgggt

SEQ ID NO: 276384 - DNA, 12 bp, Artificial Sequence
  Oligonucleotide primer for the detection of SNP TSC0004174
aaagatattgtg

SEQ ID NO: 276385 - DNA, 12 bp, Artificial Sequence
  Oligonucleotide primer for the detection of SNP TSC0004174
aaaaacactata

SEQ ID NO: 276386 - DNA, 12 bp, Artificial Sequence
  Oligonucleotide primer for the detection of SNP TSC0004174
gtagggaagaag

SEQ ID NO: 276387 - DNA, 12 bp, Artificial Sequence
  Oligonucleotide primer for the detection of SNP TSC0004175
tataattcttac

SEQ ID NO: 276388 - DNA, 12 bp, Artificial Sequence
  Oligonucleotide primer for the detection of SNP TSC0004175
aattgaaaggat

SEQ ID NO: 276389 - DNA, 12 bp, Artificial Sequence
  Oligonucleotide primer for the detection of SNP TSC0004175
attaaaaaaaca

SEQ ID NO: 276390 - DNA, 12 bp, Artificial Sequence
  Oligonucleotide primer for the detection of SNP TSC0004175
tatgatttttat

SEQ ID NO: 276391 - DNA, 12 bp, Artificial Sequence
  Oligonucleotide primer for the detection of SNP TSC0004176
gtggtgtaattt

SEQ ID NO: 276392 - DNA, 12 bp, Artificial Sequence
  Oligonucleotide primer for the detection of SNP TSC0004176
gtggcgtaattt

SEQ ID NO: 276393 - DNA, 12 bp, Artificial Sequence
  Oligonucleotide primer for the detection of SNP TSC0004176
ataacacaatct

SEQ ID NO: 276394 - DNA, 12 bp, Artificial Sequence
  Oligonucleotide primer for the detection of SNP TSC0004176
ataacgcaatct

SEQ ID NO: 276395 - DNA, 12 bp, Artificial Sequence
  Oligonucleotide primer for the detection of SNP TSC0004176
gattgtagtgag

SEQ ID NO: 276396 - DNA, 12 bp, Artificial Sequence
  Oligonucleotide primer for the detection of SNP TSC0004177
tataaatttctt

SEQ ID NO: 276397 - DNA, 12 bp, Artificial Sequence
  Oligonucleotide primer for the detection of SNP TSC0004177
tttattattgta

SEQ ID NO: 276398 - DNA, 12 bp, Artificial Sequence
  Oligonucleotide primer for the detection of SNP TSC0004178
aacccaaaaatc

SEQ ID NO: 276399 - DNA, 12 bp, Artificial Sequence
  Oligonucleotide primer for the detection of SNP TSC0004178
tttttttaggaa

SEQ ID NO: 276400 - DNA, 12 bp, Artificial Sequence
  Oligonucleotide primer for the detection of SNP TSC0004178
cctttccaaaaa

SEQ ID NO: 276401 - DNA, 12 bp, Artificial Sequence
  Oligonucleotide primer for the detection of SNP TSC0004178
aatttagaggtt

SEQ ID NO: 276402 - DNA, 12 bp, Artificial Sequence
  Oligonucleotide primer for the detection of SNP TSC0004179
atctcaaactcc

SEQ ID NO: 276403 - DNA, 12 bp, Artificial Sequence
  Oligonucleotide primer for the detection of SNP TSC0004179
atctcgaactcc

SEQ ID NO: 276404 - DNA, 12 bp, Artificial Sequence
  Oligonucleotide primer for the detection of SNP TSC0004179
aattatttgagg

SEQ ID NO: 276405 - DNA, 12 bp, Artificial Sequence
  Oligonucleotide primer for the detection of SNP TSC0004179
aatcacttaaaa

SEQ ID NO: 276406 - DNA, 12 bp, Artificial Sequence
  Oligonucleotide primer for the detection of SNP TSC0004179
gttttgaatttt

SEQ ID NO: 276407 - DNA, 12 bp, Artificial Sequence
  Oligonucleotide primer for the detection of SNP TSC0004179
gtttcgaatttt

SEQ ID NO: 276408 - DNA, 12 bp, Artificial Sequence
  Oligonucleotide primer for the detection of SNP TSC0004180
aaccaaaaccca

SEQ ID NO: 276409 - DNA, 12 bp, Artificial Sequence
  Oligonucleotide primer for the detection of SNP TSC0004180
ggaagttgtaat

SEQ ID NO: 276410 - DNA, 12 bp, Artificial Sequence
  Oligonucleotide primer for the detection of SNP TSC0004180
aaaaactacaac

SEQ ID NO: 276411 - DNA, 12 bp, Artificial Sequence
  Oligonucleotide primer for the detection of SNP TSC0004180
aattagaattta

SEQ ID NO: 276412 - DNA, 12 bp, Artificial Sequence
  Oligonucleotide primer for the detection of SNP TSC0004181
attaaacctatt

SEQ ID NO: 276413 - DNA, 12 bp, Artificial Sequence
  Oligonucleotide primer for the detection of SNP TSC0004181
atgaaattttta

SEQ ID NO: 276414 - DNA, 12 bp, Artificial Sequence
  Oligonucleotide primer for the detection of SNP TSC0004182
aacctactaaaa

SEQ ID NO: 276415 - DNA, 12 bp, Artificial Sequence
  Oligonucleotide primer for the detection of SNP TSC0004182
ttatgaggagta

SEQ ID NO: 276416 - DNA, 12 bp, Artificial Sequence
  Oligonucleotide primer for the detection of SNP TSC0004182
tcataaaaaaca

SEQ ID NO: 276417 - DNA, 12 bp, Artificial Sequence
  Oligonucleotide primer for the detection of SNP TSC0004182
gatttattgaag

SEQ ID NO: 276418 - DNA, 12 bp, Artificial Sequence
  Oligonucleotide primer for the detection of SNP TSC0004183
caaaaccattct

SEQ ID NO: 276419 - DNA, 12 bp, Artificial Sequence
  Oligonucleotide primer for the detection of SNP TSC0004183
cgaaaccattct

SEQ ID NO: 276420 - DNA, 12 bp, Artificial Sequence
  Oligonucleotide primer for the detection of SNP TSC0004183
ttaaataaattt

SEQ ID NO: 276421 - DNA, 12 bp, Artificial Sequence
  Oligonucleotide primer for the detection of SNP TSC0004183
cccaaacaaatc

SEQ ID NO: 276422 - DNA, 12 bp, Artificial Sequence
  Oligonucleotide primer for the detection of SNP TSC0004183
tggaattatttt

SEQ ID NO: 276423 - DNA, 12 bp, Artificial Sequence
  Oligonucleotide primer for the detection of SNP TSC0004183
cggaattatttt

SEQ ID NO: 276424 - DNA, 12 bp, Artificial Sequence
  Oligonucleotide primer for the detection of SNP TSC0004184
aatcccacacaa

SEQ ID NO: 276425 - DNA, 12 bp, Artificial Sequence
  Oligonucleotide primer for the detection of SNP TSC0004184
aatcccacacga

SEQ ID NO: 276426 - DNA, 12 bp, Artificial Sequence
  Oligonucleotide primer for the detection of SNP TSC0004184
aatcccgcacaa

SEQ ID NO: 276427 - DNA, 12 bp, Artificial Sequence
  Oligonucleotide primer for the detection of SNP TSC0004184
aatcccgcacga

SEQ ID NO: 276428 - DNA, 12 bp, Artificial Sequence
  Oligonukleotid-Primer
gtcgttgttaga

SEQ ID NO: 276429 - DNA, 12 bp, Artificial Sequence
  Oligonucleotide primer for the detection of SNP TSC0004184
accactactaaa

SEQ ID NO: 276430 - DNA, 12 bp, Artificial Sequence
  Oligonucleotide primer for the detection of SNP TSC0004184
accgctactaaa

SEQ ID NO: 276431 - DNA, 12 bp, Artificial Sequence
  Oligonucleotide primer for the detection of SNP TSC0004184
ttaattttgtat

SEQ ID NO: 276432 - DNA, 12 bp, Artificial Sequence
  Oligonucleotide primer for the detection of SNP TSC0004184
ttaatttcgtat

SEQ ID NO: 276433 - DNA, 12 bp, Artificial Sequence
  Oligonucleotide primer for the detection of SNP TSC0004184
ttaattttgtac

SEQ ID NO: 276434 - DNA, 12 bp, Artificial Sequence
  Oligonucleotide primer for the detection of SNP TSC0004184
ttaatttcgtac

SEQ ID NO: 276435 - DNA, 12 bp, Artificial Sequence
  Oligonucleotide primer for the detection of SNP TSC0004185
tattaaaataca

SEQ ID NO: 276436 - DNA, 12 bp, Artificial Sequence
  Oligonucleotide primer for the detection of SNP TSC0004185
agggttttttgt

SEQ ID NO: 276437 - DNA, 12 bp, Artificial Sequence
  Oligonucleotide primer for the detection of SNP TSC0004185
caaaatttttta

SEQ ID NO: 276438 - DNA, 12 bp, Artificial Sequence
  Oligonucleotide primer for the detection of SNP TSC0004185
gtgttgaaatgt

SEQ ID NO: 276439 - DNA, 12 bp, Artificial Sequence
  Oligonucleotide primer for the detection of SNP TSC0004186
aatattatcctc

SEQ ID NO: 276440 - DNA, 12 bp, Artificial Sequence
  Oligonucleotide primer for the detection of SNP TSC0004186
ggtatttagtgt

SEQ ID NO: 276441 - DNA, 12 bp, Artificial Sequence
  Oligonucleotide primer for the detection of SNP TSC0004186
ggtatttagcgt

SEQ ID NO: 276442 - DNA, 12 bp, Artificial Sequence
  Oligonucleotide primer for the detection of SNP TSC0004186
aaacacttaaca

SEQ ID NO: 276443 - DNA, 12 bp, Artificial Sequence
  Oligonucleotide primer for the detection of SNP TSC0004186
aaacacttaacg

SEQ ID NO: 276444 - DNA, 12 bp, Artificial Sequence
  Oligonucleotide primer for the detection of SNP TSC0004186
attatttttttt

SEQ ID NO: 276445 - DNA, 12 bp, Artificial Sequence
  Oligonucleotide primer for the detection of SNP TSC0004187
ctcactatcctc

SEQ ID NO: 276446 - DNA, 12 bp, Artificial Sequence
  Oligonucleotide primer for the detection of SNP TSC0004187
taatagggatga

SEQ ID NO: 276447 - DNA, 12 bp, Artificial Sequence
  Oligonucleotide primer for the detection of SNP TSC0004188
ataaatttaaat

SEQ ID NO: 276448 - DNA, 12 bp, Artificial Sequence
  Oligonucleotide primer for the detection of SNP TSC0004188
gttatatttata

SEQ ID NO: 276449 - DNA, 12 bp, Artificial Sequence
  Oligonucleotide primer for the detection of SNP TSC0004188
atcacatttaca

SEQ ID NO: 276450 - DNA, 12 bp, Artificial Sequence
  Oligonucleotide primer for the detection of SNP TSC0004188
gtgaatttgaat

SEQ ID NO: 276451 - DNA, 12 bp, Artificial Sequence
  Oligonucleotide primer for the detection of SNP TSC0004189
attaatacattc

SEQ ID NO: 276452 - DNA, 12 bp, Artificial Sequence
  Oligonucleotide primer for the detection of SNP TSC0004189
ttttttagtagg

SEQ ID NO: 276453 - DNA, 12 bp, Artificial Sequence
  Oligonucleotide primer for the detection of SNP TSC0004190
tcattttaatcc

SEQ ID NO: 276454 - DNA, 12 bp, Artificial Sequence
  Oligonucleotide primer for the detection of SNP TSC0004190
tttatttaaaaa

SEQ ID NO: 276455 - DNA, 12 bp, Artificial Sequence
  Oligonucleotide primer for the detection of SNP TSC0004191
ccctcaaaatct

SEQ ID NO: 276456 - DNA, 12 bp, Artificial Sequence
  Oligonucleotide primer for the detection of SNP TSC0004191
tattggattttt

SEQ ID NO: 276457 - DNA, 12 bp, Artificial Sequence
  Oligonucleotide primer for the detection of SNP TSC0004191
attaaattttta

SEQ ID NO: 276458 - DNA, 12 bp, Artificial Sequence
  Oligonucleotide primer for the detection of SNP TSC0004191
ttttaaggtttt

SEQ ID NO: 276459 - DNA, 12 bp, Artificial Sequence
  Oligonucleotide primer for the detection of SNP TSC0004192
atgtgtaagtgt

SEQ ID NO: 276460 - DNA, 12 bp, Artificial Sequence
  Oligonucleotide primer for the detection of SNP TSC0004193
ccaaaataccct

SEQ ID NO: 276461 - DNA, 12 bp, Artificial Sequence
  Oligonucleotide primer for the detection of SNP TSC0004193
ccgaaataccct

SEQ ID NO: 276462 - DNA, 12 bp, Artificial Sequence
  Oligonucleotide primer for the detection of SNP TSC0004193
agtaagttgagg

SEQ ID NO: 276463 - DNA, 12 bp, Artificial Sequence
  Oligonucleotide primer for the detection of SNP TSC0004194
aactaaaactaa

SEQ ID NO: 276464 - DNA, 12 bp, Artificial Sequence
  Oligonucleotide primer for the detection of SNP TSC0004194
ttaaattaaagt

SEQ ID NO: 276465 - DNA, 12 bp, Artificial Sequence
  Oligonucleotide primer for the detection of SNP TSC0004194
ctaaactaaaac

SEQ ID NO: 276466 - DNA, 12 bp, Artificial Sequence
  Oligonucleotide primer for the detection of SNP TSC0004194
gattgagattga

SEQ ID NO: 276467 - DNA, 12 bp, Artificial Sequence
  Oligonucleotide primer for the detection of SNP TSC0004195
aattctctaatc

SEQ ID NO: 276468 - DNA, 12 bp, Artificial Sequence
  Oligonucleotide primer for the detection of SNP TSC0004195
ttaagaatttaa

SEQ ID NO: 276469 - DNA, 12 bp, Artificial Sequence
  Oligonucleotide primer for the detection of SNP TSC0004195
ttaaaaatttaa

SEQ ID NO: 276470 - DNA, 12 bp, Artificial Sequence
  Oligonucleotide primer for the detection of SNP TSC0004195
gattttttggtt

SEQ ID NO: 276471 - DNA, 12 bp, Artificial Sequence
  Oligonucleotide primer for the detection of SNP TSC0004196
ataaataaacct

SEQ ID NO: 276472 - DNA, 12 bp, Artificial Sequence
  Oligonucleotide primer for the detection of SNP TSC0004196
ggttttaaggta

SEQ ID NO: 276473 - DNA, 12 bp, Artificial Sequence
  Oligonucleotide primer for the detection of SNP TSC0004197
atttggtattaa

SEQ ID NO: 276474 - DNA, 12 bp, Artificial Sequence
  Oligonucleotide primer for the detection of SNP TSC0004198
cctaactccttc

SEQ ID NO: 276475 - DNA, 12 bp, Artificial Sequence
  Oligonucleotide primer for the detection of SNP TSC0004198
atgttagggaga

SEQ ID NO: 276476 - DNA, 12 bp, Artificial Sequence
  Oligonucleotide primer for the detection of SNP TSC0004199
actcactaccac

SEQ ID NO: 276477 - DNA, 12 bp, Artificial Sequence
  Oligonucleotide primer for the detection of SNP TSC0004199
gtgagtgaattg

SEQ ID NO: 276478 - DNA, 12 bp, Artificial Sequence
  Oligonucleotide primer for the detection of SNP TSC0004199
ataaataaacta

SEQ ID NO: 276479 - DNA, 12 bp, Artificial Sequence
  Oligonucleotide primer for the detection of SNP TSC0004199
gtttattgttat

SEQ ID NO: 276480 - DNA, 12 bp, Artificial Sequence
  Oligonucleotide primer for the detection of SNP TSC0004200
tgttattttttt

SEQ ID NO: 276481 - DNA, 12 bp, Artificial Sequence
  Oligonucleotide primer for the detection of SNP TSC0004200
ctatcatttccc

SEQ ID NO: 276482 - DNA, 12 bp, Artificial Sequence
  Oligonucleotide primer for the detection of SNP TSC0004200
atggataataat

SEQ ID NO: 276483 - DNA, 12 bp, Artificial Sequence
  Oligonucleotide primer for the detection of SNP TSC0004200
atggataataac

SEQ ID NO: 276484 - DNA, 12 bp, Artificial Sequence
  Oligonucleotide primer for the detection of SNP TSC0004201
aatccctatatc

SEQ ID NO: 276485 - DNA, 12 bp, Artificial Sequence
  Oligonucleotide primer for the detection of SNP TSC0004201
ttagagtggaaa

SEQ ID NO: 276486 - DNA, 12 bp, Artificial Sequence
  Oligonucleotide primer for the detection of SNP TSC0004202
tttaacacctat

SEQ ID NO: 276487 - DNA, 12 bp, Artificial Sequence
  Oligonucleotide primer for the detection of SNP TSC0004202
atgatttttaga

SEQ ID NO: 276488 - DNA, 12 bp, Artificial Sequence
  Oligonucleotide primer for the detection of SNP TSC0004202
ataacccttaaa

SEQ ID NO: 276489 - DNA, 12 bp, Artificial Sequence
  Oligonucleotide primer for the detection of SNP TSC0004203
tttttaagtaga

SEQ ID NO: 276490 - DNA, 12 bp, Artificial Sequence
  Oligonucleotide primer for the detection of SNP TSC0004203
ctcccaaacaaa

SEQ ID NO: 276491 - DNA, 12 bp, Artificial Sequence
  Oligonucleotide primer for the detection of SNP TSC0004203
tgggtggggaat

SEQ ID NO: 276492 - DNA, 12 bp, Artificial Sequence
  Oligonucleotide primer for the detection of SNP TSC0004204
gatatattgata

SEQ ID NO: 276493 - DNA, 12 bp, Artificial Sequence
  Oligonucleotide primer for the detection of SNP TSC0004205
aaaatatactcc

SEQ ID NO: 276494 - DNA, 12 bp, Artificial Sequence
  Oligonucleotide primer for the detection of SNP TSC0004205
tattagatagtg

SEQ ID NO: 276495 - DNA, 12 bp, Artificial Sequence
  Oligonucleotide primer for the detection of SNP TSC0004206
aataaaaattat

SEQ ID NO: 276496 - DNA, 12 bp, Artificial Sequence
  Oligonucleotide primer for the detection of SNP TSC0004206
attaagggttaa

SEQ ID NO: 276497 - DNA, 12 bp, Artificial Sequence
  Oligonucleotide primer for the detection of SNP TSC0004207
acaaacataaac

SEQ ID NO: 276498 - DNA, 12 bp, Artificial Sequence
  Oligonucleotide primer for the detection of SNP TSC0004207
acaaacgtaaac

SEQ ID NO: 276499 - DNA, 12 bp, Artificial Sequence
  Oligonucleotide primer for the detection of SNP TSC0004207
gattgggtgtag

SEQ ID NO: 276500 - DNA, 12 bp, Artificial Sequence
  Oligonucleotide primer for the detection of SNP TSC0004207
gatcgggtgtag

SEQ ID NO: 276501 - DNA, 12 bp, Artificial Sequence
  Oligonucleotide primer for the detection of SNP TSC0004207
gattgggcgtag

SEQ ID NO: 276502 - DNA, 12 bp, Artificial Sequence
  Oligonucleotide primer for the detection of SNP TSC0004207
gatcgggcgtag

SEQ ID NO: 276503 - DNA, 12 bp, Artificial Sequence
  Oligonucleotide primer for the detection of SNP TSC0004208
acaatacaaata

SEQ ID NO: 276504 - DNA, 12 bp, Artificial Sequence
  Oligonucleotide primer for the detection of SNP TSC0004208
aaatttttaagt

SEQ ID NO: 276505 - DNA, 12 bp, Artificial Sequence
  Oligonucleotide primer for the detection of SNP TSC0004208
aaatttttaaac

SEQ ID NO: 276506 - DNA, 12 bp, Artificial Sequence
  Oligonucleotide primer for the detection of SNP TSC0004208
tatagtgtaaat

SEQ ID NO: 276507 - DNA, 12 bp, Artificial Sequence
  Oligonucleotide primer for the detection of SNP TSC0004209
agttgttattat

SEQ ID NO: 276508 - DNA, 12 bp, Artificial Sequence
  Oligonucleotide primer for the detection of SNP TSC0004209
aattatcattac

SEQ ID NO: 276509 - DNA, 12 bp, Artificial Sequence
  Oligonucleotide primer for the detection of SNP TSC0004209
ggaaggaaatag

SEQ ID NO: 276510 - DNA, 12 bp, Artificial Sequence
  Oligonucleotide primer for the detection of SNP TSC0004210
tttaaaaggtaa

SEQ ID NO: 276511 - DNA, 12 bp, Artificial Sequence
  Oligonucleotide primer for the detection of SNP TSC0004211
cctccttcaaac

SEQ ID NO: 276512 - DNA, 12 bp, Artificial Sequence
  Oligonucleotide primer for the detection of SNP TSC0004211
aataggtttgta

SEQ ID NO: 276513 - DNA, 12 bp, Artificial Sequence
  Oligonucleotide primer for the detection of SNP TSC0004212
taattctattcc

SEQ ID NO: 276514 - DNA, 12 bp, Artificial Sequence
  Oligonucleotide primer for the detection of SNP TSC0004212
tttttatggtaa

SEQ ID NO: 276515 - DNA, 12 bp, Artificial Sequence
  Oligonucleotide primer for the detection of SNP TSC0004213
tttggtcgggtg

SEQ ID NO: 276516 - DNA, 12 bp, Artificial Sequence
  Oligonucleotide primer for the detection of SNP TSC0004213
tttggttgggcg

SEQ ID NO: 276517 - DNA, 12 bp, Artificial Sequence
  Oligonucleotide primer for the detection of SNP TSC0004213
tttggtcgggcg

SEQ ID NO: 276518 - DNA, 12 bp, Artificial Sequence
  Oligonucleotide primer for the detection of SNP TSC0004213
cctaaccaaaca

SEQ ID NO: 276519 - DNA, 12 bp, Artificial Sequence
  Oligonucleotide primer for the detection of SNP TSC0004213
cctaaccaaacg

SEQ ID NO: 276520 - DNA, 12 bp, Artificial Sequence
  Oligonucleotide primer for the detection of SNP TSC0004213
cctaaccgaaca

SEQ ID NO: 276521 - DNA, 12 bp, Artificial Sequence
  Oligonucleotide primer for the detection of SNP TSC0004213
cctaaccgaacg

SEQ ID NO: 276522 - DNA, 12 bp, Artificial Sequence
  Oligonucleotide primer for the detection of SNP TSC0004213
ggcgtgagttat

SEQ ID NO: 276523 - DNA, 12 bp, Artificial Sequence
  Oligonucleotide primer for the detection of SNP TSC0004214
ccctccctccct

SEQ ID NO: 276524 - DNA, 12 bp, Artificial Sequence
  Oligonucleotide primer for the detection of SNP TSC0004214
aaagaagggagg

SEQ ID NO: 276525 - DNA, 12 bp, Artificial Sequence
  Oligonucleotide primer for the detection of SNP TSC0004215
cattaatttcat

SEQ ID NO: 276526 - DNA, 12 bp, Artificial Sequence
  Oligonucleotide primer for the detection of SNP TSC0004215
cgttaatttcat

SEQ ID NO: 276527 - DNA, 12 bp, Artificial Sequence
  Oligonucleotide primer for the detection of SNP TSC0004215
tttaaattatta

SEQ ID NO: 276528 - DNA, 12 bp, Artificial Sequence
  Oligonucleotide primer for the detection of SNP TSC0004215
cctaaattacca

SEQ ID NO: 276529 - DNA, 12 bp, Artificial Sequence
  Oligonucleotide primer for the detection of SNP TSC0004215
tgttaattttat

SEQ ID NO: 276530 - DNA, 12 bp, Artificial Sequence
  Oligonucleotide primer for the detection of SNP TSC0004215
cgttaattttat

SEQ ID NO: 276531 - DNA, 12 bp, Artificial Sequence
  Oligonucleotide primer for the detection of SNP TSC0004216
aaacccaacact

SEQ ID NO: 276532 - DNA, 12 bp, Artificial Sequence
  Oligonucleotide primer for the detection of SNP TSC0004216
ttttttagggtg

SEQ ID NO: 276533 - DNA, 12 bp, Artificial Sequence
  Oligonucleotide primer for the detection of SNP TSC0004216
ttttttagggcg

SEQ ID NO: 276534 - DNA, 12 bp, Artificial Sequence
  Oligonucleotide primer for the detection of SNP TSC0004217
taacactactac

SEQ ID NO: 276535 - DNA, 12 bp, Artificial Sequence
  Oligonucleotide primer for the detection of SNP TSC0004217
taacgctactac

SEQ ID NO: 276536 - DNA, 12 bp, Artificial Sequence
  Oligonucleotide primer for the detection of SNP TSC0004219
ttcaacaaaata

SEQ ID NO: 276537 - DNA, 12 bp, Artificial Sequence
  Oligonucleotide primer for the detection of SNP TSC0004219
tggtgaaatgtt

SEQ ID NO: 276538 - DNA, 12 bp, Artificial Sequence
  Oligonucleotide primer for the detection of SNP TSC0004219
tggtgaaatgtc

SEQ ID NO: 276539 - DNA, 12 bp, Artificial Sequence
  Oligonucleotide primer for the detection of SNP TSC0004219
taataaaatatc

SEQ ID NO: 276540 - DNA, 12 bp, Artificial Sequence
  Oligonucleotide primer for the detection of SNP TSC0004219
tttagtaaaatg

SEQ ID NO: 276541 - DNA, 12 bp, Artificial Sequence
  Oligonucleotide primer for the detection of SNP TSC0004220
aaactccctacc

SEQ ID NO: 276542 - DNA, 12 bp, Artificial Sequence
  Oligonucleotide primer for the detection of SNP TSC0004220
ggtagtggtagg

SEQ ID NO: 276543 - DNA, 12 bp, Artificial Sequence
  Oligonucleotide primer for the detection of SNP TSC0004220
ggtagcggtagg

SEQ ID NO: 276544 - DNA, 12 bp, Artificial Sequence
  Oligonucleotide primer for the detection of SNP TSC0004220
acaacaacaaaa

SEQ ID NO: 276545 - DNA, 12 bp, Artificial Sequence
  Oligonucleotide primer for the detection of SNP TSC0004220
acaacgacaaaa

SEQ ID NO: 276546 - DNA, 12 bp, Artificial Sequence
  Oligonucleotide primer for the detection of SNP TSC0004220
aggttttttgtt

SEQ ID NO: 276547 - DNA, 12 bp, Artificial Sequence
  Oligonucleotide primer for the detection of SNP TSC0004220
aggttttttgtc

SEQ ID NO: 276548 - DNA, 12 bp, Artificial Sequence
  Oligonucleotide primer for the detection of SNP TSC0004221
ggtttagaaaga

SEQ ID NO: 276549 - DNA, 12 bp, Artificial Sequence
  Oligonucleotide primer for the detection of SNP TSC0004222
cttaccatataa

SEQ ID NO: 276550 - DNA, 12 bp, Artificial Sequence
  Oligonucleotide primer for the detection of SNP TSC0004222
ggtttttgattt

SEQ ID NO: 276551 - DNA, 12 bp, Artificial Sequence
  Oligonucleotide primer for the detection of SNP TSC0004222
aacctttaactt

SEQ ID NO: 276552 - DNA, 12 bp, Artificial Sequence
  Oligonucleotide primer for the detection of SNP TSC0004222
tttgttatgtgg

SEQ ID NO: 276553 - DNA, 12 bp, Artificial Sequence
  Oligonucleotide primer for the detection of SNP TSC0004223
tcaataaatata

SEQ ID NO: 276554 - DNA, 12 bp, Artificial Sequence
  Oligonucleotide primer for the detection of SNP TSC0004223
aaattgtgatgg

SEQ ID NO: 276555 - DNA, 12 bp, Artificial Sequence
  Oligonucleotide primer for the detection of SNP TSC0004223
aaatcgtgatgg

SEQ ID NO: 276556 - DNA, 12 bp, Artificial Sequence
  Oligonucleotide primer for the detection of SNP TSC0004223
atcataataaaa

SEQ ID NO: 276557 - DNA, 12 bp, Artificial Sequence
  Oligonucleotide primer for the detection of SNP TSC0004223
atcgtaataaaa

SEQ ID NO: 276558 - DNA, 12 bp, Artificial Sequence
  Oligonucleotide primer for the detection of SNP TSC0004223
gttagtaagtgt

SEQ ID NO: 276559 - DNA, 12 bp, Artificial Sequence
  Oligonucleotide primer for the detection of SNP TSC0004224
atcatataaatt

SEQ ID NO: 276560 - DNA, 12 bp, Artificial Sequence
  Oligonucleotide primer for the detection of SNP TSC0004224
attaattattta

SEQ ID NO: 276561 - DNA, 12 bp, Artificial Sequence
  Oligonucleotide primer for the detection of SNP TSC0004225
tctcactcaata

SEQ ID NO: 276562 - DNA, 12 bp, Artificial Sequence
  Oligonucleotide primer for the detection of SNP TSC0004225
tctcgctcaata

SEQ ID NO: 276563 - DNA, 12 bp, Artificial Sequence
  Oligonucleotide primer for the detection of SNP TSC0004225
gtggttttttat

SEQ ID NO: 276564 - DNA, 12 bp, Artificial Sequence
  Oligonucleotide primer for the detection of SNP TSC0004225
ttttgtttaata

SEQ ID NO: 276565 - DNA, 12 bp, Artificial Sequence
  Oligonucleotide primer for the detection of SNP TSC0004225
tttcgtttaata

SEQ ID NO: 276566 - DNA, 12 bp, Artificial Sequence
  Oligonucleotide primer for the detection of SNP TSC0004226
cctaaactccta

SEQ ID NO: 276567 - DNA, 12 bp, Artificial Sequence
  Oligonucleotide primer for the detection of SNP TSC0004226
ttatagggagtt

SEQ ID NO: 276568 - DNA, 12 bp, Artificial Sequence
  Oligonucleotide primer for the detection of SNP TSC0004226
ccacaaaaaatc

SEQ ID NO: 276569 - DNA, 12 bp, Artificial Sequence
  Oligonucleotide primer for the detection of SNP TSC0004226
tttgggtttttg

SEQ ID NO: 276570 - DNA, 12 bp, Artificial Sequence
  Oligonucleotide primer for the detection of SNP TSC0004228
cccattaatcct

SEQ ID NO: 276571 - DNA, 12 bp, Artificial Sequence
  Oligonucleotide primer for the detection of SNP TSC0004228
tattatgatagg

SEQ ID NO: 276572 - DNA, 12 bp, Artificial Sequence
  Oligonucleotide primer for the detection of SNP TSC0004229
ctcttaatttca

SEQ ID NO: 276573 - DNA, 12 bp, Artificial Sequence
  Oligonucleotide primer for the detection of SNP TSC0004229
gtttgggatagt

SEQ ID NO: 276574 - DNA, 12 bp, Artificial Sequence
  Oligonucleotide primer for the detection of SNP TSC0004229
acctaaaataat

SEQ ID NO: 276575 - DNA, 12 bp, Artificial Sequence
  Oligonucleotide primer for the detection of SNP TSC0004229
tttttaatttta

SEQ ID NO: 276576 - DNA, 12 bp, Artificial Sequence
  Oligonucleotide primer for the detection of SNP TSC0004230
taaaaaataact

SEQ ID NO: 276577 - DNA, 12 bp, Artificial Sequence
  Oligonucleotide primer for the detection of SNP TSC0004230
taatggatttta

SEQ ID NO: 276578 - DNA, 12 bp, Artificial Sequence
  Oligonucleotide primer for the detection of SNP TSC0004231
attaacaaaaaa

SEQ ID NO: 276579 - DNA, 12 bp, Artificial Sequence
  Oligonucleotide primer for the detection of SNP TSC0004231
tatattaagttt

SEQ ID NO: 276580 - DNA, 12 bp, Artificial Sequence
  Oligonucleotide primer for the detection of SNP TSC0004231
cacatcaaattc

SEQ ID NO: 276581 - DNA, 12 bp, Artificial Sequence
  Oligonucleotide primer for the detection of SNP TSC0004231
attaataagaga

SEQ ID NO: 276582 - DNA, 12 bp, Artificial Sequence
  Oligonucleotide primer for the detection of SNP TSC0004232
accacaattact

SEQ ID NO: 276583 - DNA, 12 bp, Artificial Sequence
  Oligonucleotide primer for the detection of SNP TSC0004232
accgcaattact

SEQ ID NO: 276584 - DNA, 12 bp, Artificial Sequence
  Oligonucleotide primer for the detection of SNP TSC0004232
gccacaattact

SEQ ID NO: 276585 - DNA, 12 bp, Artificial Sequence
  Oligonucleotide primer for the detection of SNP TSC0004232
gccgcaattact

SEQ ID NO: 276586 - DNA, 12 bp, Artificial Sequence
  Oligonukleotid-Primer
tttttagtaagg

SEQ ID NO: 276587 - DNA, 12 bp, Artificial Sequence
  Oligonucleotide primer for the detection of SNP TSC0004233
acaaacaaataa

SEQ ID NO: 276588 - DNA, 12 bp, Artificial Sequence
  Oligonucleotide primer for the detection of SNP TSC0004233
tgatttatttat

SEQ ID NO: 276589 - DNA, 12 bp, Artificial Sequence
  Oligonucleotide primer for the detection of SNP TSC0004233
taacttattcat

SEQ ID NO: 276590 - DNA, 12 bp, Artificial Sequence
  Oligonucleotide primer for the detection of SNP TSC0004233
gtaggtaggtga

SEQ ID NO: 276591 - DNA, 12 bp, Artificial Sequence
  Oligonucleotide primer for the detection of SNP TSC0004234
ccatttttatcc

SEQ ID NO: 276592 - DNA, 12 bp, Artificial Sequence
  Oligonucleotide primer for the detection of SNP TSC0004234
ttaagttgtaga

SEQ ID NO: 276593 - DNA, 12 bp, Artificial Sequence
  Oligonucleotide primer for the detection of SNP TSC0004234
ttaagtcgtaga

SEQ ID NO: 276594 - DNA, 12 bp, Artificial Sequence
  Oligonucleotide primer for the detection of SNP TSC0004235
ccctcccattcc

SEQ ID NO: 276595 - DNA, 12 bp, Artificial Sequence
  Oligonucleotide primer for the detection of SNP TSC0004235
tttttggaggaa

SEQ ID NO: 276596 - DNA, 12 bp, Artificial Sequence
  Oligonucleotide primer for the detection of SNP TSC0004235
ttttcggaggaa

SEQ ID NO: 276597 - DNA, 12 bp, Artificial Sequence
  Oligonucleotide primer for the detection of SNP TSC0004236
atggttgttatg

SEQ ID NO: 276598 - DNA, 12 bp, Artificial Sequence
  Oligonucleotide primer for the detection of SNP TSC0004236
ataactattata

SEQ ID NO: 276599 - DNA, 12 bp, Artificial Sequence
  Oligonucleotide primer for the detection of SNP TSC0004236
ggaggaaagtgt

SEQ ID NO: 276600 - DNA, 12 bp, Artificial Sequence
  Oligonucleotide primer for the detection of SNP TSC0004237
aaaaaaactatc

SEQ ID NO: 276601 - DNA, 12 bp, Artificial Sequence
  Oligonucleotide primer for the detection of SNP TSC0004237
ggtaatatttta

SEQ ID NO: 276602 - DNA, 12 bp, Artificial Sequence
  Oligonucleotide primer for the detection of SNP TSC0004238
caaaaccaaaac

SEQ ID NO: 276603 - DNA, 12 bp, Artificial Sequence
  Oligonucleotide primer for the detection of SNP TSC0004238
cataactttaca

SEQ ID NO: 276604 - DNA, 12 bp, Artificial Sequence
  Oligonucleotide primer for the detection of SNP TSC0004238
tagggttagggt

SEQ ID NO: 276605 - DNA, 12 bp, Artificial Sequence
  Oligonucleotide primer for the detection of SNP TSC0004239
aaaatcataacc

SEQ ID NO: 276606 - DNA, 12 bp, Artificial Sequence
  Oligonucleotide primer for the detection of SNP TSC0004239
ttaggtaaatta

SEQ ID NO: 276607 - DNA, 12 bp, Artificial Sequence
  Oligonucleotide primer for the detection of SNP TSC0004240
tcactaaactct

SEQ ID NO: 276608 - DNA, 12 bp, Artificial Sequence
  Oligonucleotide primer for the detection of SNP TSC0004240
gtaggaagtata

SEQ ID NO: 276609 - DNA, 12 bp, Artificial Sequence
  Oligonucleotide primer for the detection of SNP TSC0004240
caaaaaatacaa

SEQ ID NO: 276610 - DNA, 12 bp, Artificial Sequence
  Oligonucleotide primer for the detection of SNP TSC0004240
tattgagttttt

SEQ ID NO: 276611 - DNA, 12 bp, Artificial Sequence
  Oligonucleotide primer for the detection of SNP TSC0004240
tattgagttttc

SEQ ID NO: 276612 - DNA, 12 bp, Artificial Sequence
  Oligonucleotide primer for the detection of SNP TSC0004241
cacacaacattc

SEQ ID NO: 276613 - DNA, 12 bp, Artificial Sequence
  Oligonucleotide primer for the detection of SNP TSC0004241
cacacaacgttc

SEQ ID NO: 276614 - DNA, 12 bp, Artificial Sequence
  Oligonucleotide primer for the detection of SNP TSC0004241
cacacgacattc

SEQ ID NO: 276615 - DNA, 12 bp, Artificial Sequence
  Oligonucleotide primer for the detection of SNP TSC0004241
cacacgacgttc

SEQ ID NO: 276616 - DNA, 12 bp, Artificial Sequence
  Oligonucleotide primer for the detection of SNP TSC0004241
tttggtgttttg

SEQ ID NO: 276617 - DNA, 12 bp, Artificial Sequence
  Oligonucleotide primer for the detection of SNP TSC0004242
attaatacctaa

SEQ ID NO: 276618 - DNA, 12 bp, Artificial Sequence
  Oligonucleotide primer for the detection of SNP TSC0004242
ggatatttagtt

SEQ ID NO: 276619 - DNA, 12 bp, Artificial Sequence
  Oligonucleotide primer for the detection of SNP TSC0004242
tggttgatgttt

SEQ ID NO: 276620 - DNA, 12 bp, Artificial Sequence
  Oligonucleotide primer for the detection of SNP TSC0004243
taaatcaaacaa

SEQ ID NO: 276621 - DNA, 12 bp, Artificial Sequence
  Oligonucleotide primer for the detection of SNP TSC0004243
ttatttattgta

SEQ ID NO: 276622 - DNA, 12 bp, Artificial Sequence
  Oligonucleotide primer for the detection of SNP TSC0004243
ttatttatcgta

SEQ ID NO: 276623 - DNA, 12 bp, Artificial Sequence
  Oligonucleotide primer for the detection of SNP TSC0004243
ttacccaccaca

SEQ ID NO: 276624 - DNA, 12 bp, Artificial Sequence
  Oligonucleotide primer for the detection of SNP TSC0004243
ttacccaccgca

SEQ ID NO: 276625 - DNA, 12 bp, Artificial Sequence
  Oligonucleotide primer for the detection of SNP TSC0004243
ggtggattaggt

SEQ ID NO: 276626 - DNA, 12 bp, Artificial Sequence
  Oligonucleotide primer for the detection of SNP TSC0004244
aaaaaattttaa

SEQ ID NO: 276627 - DNA, 12 bp, Artificial Sequence
  Oligonucleotide primer for the detection of SNP TSC0004244
ttttttttgatt

SEQ ID NO: 276628 - DNA, 12 bp, Artificial Sequence
  Oligonucleotide primer for the detection of SNP TSC0004245
caacatctactc

SEQ ID NO: 276629 - DNA, 12 bp, Artificial Sequence
  Oligonucleotide primer for the detection of SNP TSC0004245
gttaattgaatg

SEQ ID NO: 276630 - DNA, 12 bp, Artificial Sequence
  Oligonucleotide primer for the detection of SNP TSC0004246
ataactcctatc

SEQ ID NO: 276631 - DNA, 12 bp, Artificial Sequence
  Oligonucleotide primer for the detection of SNP TSC0004246
ggagtagtagga

SEQ ID NO: 276632 - DNA, 12 bp, Artificial Sequence
  Oligonucleotide primer for the detection of SNP TSC0004247
aaaaattactta

SEQ ID NO: 276633 - DNA, 12 bp, Artificial Sequence
  Oligonucleotide primer for the detection of SNP TSC0004247
tgttttttgggt

SEQ ID NO: 276634 - DNA, 12 bp, Artificial Sequence
  Oligonucleotide primer for the detection of SNP TSC0004247
tgtttttcgggt

SEQ ID NO: 276635 - DNA, 12 bp, Artificial Sequence
  Oligonucleotide primer for the detection of SNP TSC0004247
tacttcccaaat

SEQ ID NO: 276636 - DNA, 12 bp, Artificial Sequence
  Oligonucleotide primer for the detection of SNP TSC0004247
tacttcccgaat

SEQ ID NO: 276637 - DNA, 12 bp, Artificial Sequence
  Oligonucleotide primer for the detection of SNP TSC0004247
ggagaattattt

SEQ ID NO: 276638 - DNA, 12 bp, Artificial Sequence
  Oligonucleotide primer for the detection of SNP TSC0004248
accaatttttat

SEQ ID NO: 276639 - DNA, 12 bp, Artificial Sequence
  Oligonucleotide primer for the detection of SNP TSC0004248
tgaaattttaga

SEQ ID NO: 276640 - DNA, 12 bp, Artificial Sequence
  Oligonucleotide primer for the detection of SNP TSC0004250
atccacaaaaaa

SEQ ID NO: 276641 - DNA, 12 bp, Artificial Sequence
  Oligonucleotide primer for the detection of SNP TSC0004250
ttaataaatatt

SEQ ID NO: 276642 - DNA, 12 bp, Artificial Sequence
  Oligonucleotide primer for the detection of SNP TSC0004250
tcaacaaacatt

SEQ ID NO: 276643 - DNA, 12 bp, Artificial Sequence
  Oligonucleotide primer for the detection of SNP TSC0004250
gtttataggaag

SEQ ID NO: 276644 - DNA, 12 bp, Artificial Sequence
  Oligonucleotide primer for the detection of SNP TSC0004251
atccttcaaacc

SEQ ID NO: 276645 - DNA, 12 bp, Artificial Sequence
  Oligonucleotide primer for the detection of SNP TSC0004251
gggttggattaa

SEQ ID NO: 276646 - DNA, 12 bp, Artificial Sequence
  Oligonucleotide primer for the detection of SNP TSC0004252
aaataaaaacat

SEQ ID NO: 276647 - DNA, 12 bp, Artificial Sequence
  Oligonucleotide primer for the detection of SNP TSC0004252
atttaattaaaa

SEQ ID NO: 276648 - DNA, 12 bp, Artificial Sequence
  Oligonucleotide primer for the detection of SNP TSC0004252
aaataagaatgt

SEQ ID NO: 276649 - DNA, 12 bp, Artificial Sequence
  Oligonucleotide primer for the detection of SNP TSC0004252
aaataagaacgt

SEQ ID NO: 276650 - DNA, 12 bp, Artificial Sequence
  Oligonucleotide primer for the detection of SNP TSC0004253
ataaacaaaatc

SEQ ID NO: 276651 - DNA, 12 bp, Artificial Sequence
  Oligonucleotide primer for the detection of SNP TSC0004253
ttttttttttcg

SEQ ID NO: 276652 - DNA, 12 bp, Artificial Sequence
  Oligonucleotide primer for the detection of SNP TSC0004253
ttttttcttcca

SEQ ID NO: 276653 - DNA, 12 bp, Artificial Sequence
  Oligonucleotide primer for the detection of SNP TSC0004253
ttttttcttccg

SEQ ID NO: 276654 - DNA, 12 bp, Artificial Sequence
  Oligonucleotide primer for the detection of SNP TSC0004253
ataaatagggtt

SEQ ID NO: 276655 - DNA, 12 bp, Artificial Sequence
  Oligonucleotide primer for the detection of SNP TSC0004254
attttttaactt

SEQ ID NO: 276656 - DNA, 12 bp, Artificial Sequence
  Oligonucleotide primer for the detection of SNP TSC0004254
attttgaattta

SEQ ID NO: 276657 - DNA, 12 bp, Artificial Sequence
  Oligonucleotide primer for the detection of SNP TSC0004255
tcatataacttt

SEQ ID NO: 276658 - DNA, 12 bp, Artificial Sequence
  Oligonucleotide primer for the detection of SNP TSC0004255
atgtaagtatag

SEQ ID NO: 276659 - DNA, 12 bp, Artificial Sequence
  Oligonucleotide primer for the detection of SNP TSC0004256
accaattaatta

SEQ ID NO: 276660 - DNA, 12 bp, Artificial Sequence
  Oligonucleotide primer for the detection of SNP TSC0004256
accgattaatta

SEQ ID NO: 276661 - DNA, 12 bp, Artificial Sequence
  Oligonucleotide primer for the detection of SNP TSC0004256
gagtttgtagtt

SEQ ID NO: 276662 - DNA, 12 bp, Artificial Sequence
  Oligonucleotide primer for the detection of SNP TSC0004256
aaatctacaact

SEQ ID NO: 276663 - DNA, 12 bp, Artificial Sequence
  Oligonucleotide primer for the detection of SNP TSC0004256
attgattgattg

SEQ ID NO: 276664 - DNA, 12 bp, Artificial Sequence
  Oligonucleotide primer for the detection of SNP TSC0004256
atcgattgattg

SEQ ID NO: 276665 - DNA, 12 bp, Artificial Sequence
  Oligonucleotide primer for the detection of SNP TSC0004257
aaatcccactac

SEQ ID NO: 276666 - DNA, 12 bp, Artificial Sequence
  Oligonucleotide primer for the detection of SNP TSC0004257
ttggttttttaa

SEQ ID NO: 276667 - DNA, 12 bp, Artificial Sequence
  Oligonucleotide primer for the detection of SNP TSC0004257
tcggttttttaa

SEQ ID NO: 276668 - DNA, 12 bp, Artificial Sequence
  Oligonucleotide primer for the detection of SNP TSC0004258
tttaattattac

SEQ ID NO: 276669 - DNA, 12 bp, Artificial Sequence
  Oligonucleotide primer for the detection of SNP TSC0004258
taaataaagtaa

SEQ ID NO: 276670 - DNA, 12 bp, Artificial Sequence
  Oligonucleotide primer for the detection of SNP TSC0004259
acctactctaat

SEQ ID NO: 276671 - DNA, 12 bp, Artificial Sequence
  Oligonucleotide primer for the detection of SNP TSC0004259
gaggtgaagata

SEQ ID NO: 276672 - DNA, 12 bp, Artificial Sequence
  Oligonucleotide primer for the detection of SNP TSC0004259
gtttgttttaat

SEQ ID NO: 276673 - DNA, 12 bp, Artificial Sequence
  Oligonucleotide primer for the detection of SNP TSC0004260
aaacaacataat

SEQ ID NO: 276674 - DNA, 12 bp, Artificial Sequence
  Oligonucleotide primer for the detection of SNP TSC0004260
tgtagagatggg

SEQ ID NO: 276675 - DNA, 12 bp, Artificial Sequence
  Oligonucleotide primer for the detection of SNP TSC0004261
aattcaaaaatt

SEQ ID NO: 276676 - DNA, 12 bp, Artificial Sequence
  Oligonucleotide primer for the detection of SNP TSC0004261
aattcgaaaatt

SEQ ID NO: 276677 - DNA, 12 bp, Artificial Sequence
  Oligonucleotide primer for the detection of SNP TSC0004261
tttttaatatta

SEQ ID NO: 276678 - DNA, 12 bp, Artificial Sequence
  Oligonucleotide primer for the detection of SNP TSC0004261
tccccaacatca

SEQ ID NO: 276679 - DNA, 12 bp, Artificial Sequence
  Oligonucleotide primer for the detection of SNP TSC0004261
ggtttgagggtt

SEQ ID NO: 276680 - DNA, 12 bp, Artificial Sequence
  Oligonucleotide primer for the detection of SNP TSC0004261
ggttcgagggtt

SEQ ID NO: 276681 - DNA, 12 bp, Artificial Sequence
  Oligonucleotide primer for the detection of SNP TSC0004262
aacattataact

SEQ ID NO: 276682 - DNA, 12 bp, Artificial Sequence
  Oligonucleotide primer for the detection of SNP TSC0004262
aacgttataact

SEQ ID NO: 276683 - DNA, 12 bp, Artificial Sequence
  Oligonucleotide primer for the detection of SNP TSC0004262
tagattttttaa

SEQ ID NO: 276684 - DNA, 12 bp, Artificial Sequence
  Oligonucleotide primer for the detection of SNP TSC0004263
attctctttacc

SEQ ID NO: 276685 - DNA, 12 bp, Artificial Sequence
  Oligonucleotide primer for the detection of SNP TSC0004263
atagaatatttc

SEQ ID NO: 276686 - DNA, 12 bp, Artificial Sequence
  Oligonucleotide primer for the detection of SNP TSC0004263
acaaaatacccc

SEQ ID NO: 276687 - DNA, 12 bp, Artificial Sequence
  Oligonucleotide primer for the detection of SNP TSC0004263
gttttttttgtt

SEQ ID NO: 276688 - DNA, 12 bp, Artificial Sequence
  Oligonucleotide primer for the detection of SNP TSC0004263
gttttttttgtc

SEQ ID NO: 276689 - DNA, 12 bp, Artificial Sequence
  Oligonucleotide primer for the detection of SNP TSC0004264
tattttaatcct

SEQ ID NO: 276690 - DNA, 12 bp, Artificial Sequence
  Oligonucleotide primer for the detection of SNP TSC0004264
gaagtagtaaaa

SEQ ID NO: 276691 - DNA, 12 bp, Artificial Sequence
  Oligonucleotide primer for the detection of SNP TSC0004264
aaaacaataaaa

SEQ ID NO: 276692 - DNA, 12 bp, Artificial Sequence
  Oligonucleotide primer for the detection of SNP TSC0004264
tattttaatttt

SEQ ID NO: 276693 - DNA, 12 bp, Artificial Sequence
  Oligonucleotide primer for the detection of SNP TSC0004265
taatacctaacc

SEQ ID NO: 276694 - DNA, 12 bp, Artificial Sequence
  Oligonucleotide primer for the detection of SNP TSC0004265
ttttggaggtat

SEQ ID NO: 276695 - DNA, 12 bp, Artificial Sequence
  Oligonucleotide primer for the detection of SNP TSC0004265
cctaaaaacaca

SEQ ID NO: 276696 - DNA, 12 bp, Artificial Sequence
  Oligonucleotide primer for the detection of SNP TSC0004265
tggtgtttggtt

SEQ ID NO: 276697 - DNA, 12 bp, Artificial Sequence
  Oligonucleotide primer for the detection of SNP TSC0004265
tggtgtttggtc

SEQ ID NO: 276698 - DNA, 12 bp, Artificial Sequence
  Oligonucleotide primer for the detection of SNP TSC0004266
aaaaaaataaca

SEQ ID NO: 276699 - DNA, 12 bp, Artificial Sequence
  Oligonucleotide primer for the detection of SNP TSC0004266
tgtatgtgtatt

SEQ ID NO: 276700 - DNA, 12 bp, Artificial Sequence
  Oligonucleotide primer for the detection of SNP TSC0004266
tgtacgtgtatt

SEQ ID NO: 276701 - DNA, 12 bp, Artificial Sequence
  Oligonucleotide primer for the detection of SNP TSC0004266
ctatacatacac

SEQ ID NO: 276702 - DNA, 12 bp, Artificial Sequence
  Oligonucleotide primer for the detection of SNP TSC0004266
ctatacgtacac

SEQ ID NO: 276703 - DNA, 12 bp, Artificial Sequence
  Oligonucleotide primer for the detection of SNP TSC0004266
taaggagatgat

SEQ ID NO: 276704 - DNA, 12 bp, Artificial Sequence
  Oligonucleotide primer for the detection of SNP TSC0004267
aaacacaaacac

SEQ ID NO: 276705 - DNA, 12 bp, Artificial Sequence
  Oligonucleotide primer for the detection of SNP TSC0004267
aaacgcaaacac

SEQ ID NO: 276706 - DNA, 12 bp, Artificial Sequence
  Oligonucleotide primer for the detection of SNP TSC0004267
gattgatatttg

SEQ ID NO: 276707 - DNA, 12 bp, Artificial Sequence
  Oligonucleotide primer for the detection of SNP TSC0004267
gatcgatatttg

SEQ ID NO: 276708 - DNA, 12 bp, Artificial Sequence
  Oligonucleotide primer for the detection of SNP TSC0004267
gattgatattcg

SEQ ID NO: 276709 - DNA, 12 bp, Artificial Sequence
  Oligonucleotide primer for the detection of SNP TSC0004267
gatcgatattcg

SEQ ID NO: 276710 - DNA, 12 bp, Artificial Sequence
  Oligonucleotide primer for the detection of SNP TSC0004267
aatcaacattca

SEQ ID NO: 276711 - DNA, 12 bp, Artificial Sequence
  Oligonucleotide primer for the detection of SNP TSC0004267
aatcaacattcg

SEQ ID NO: 276712 - DNA, 12 bp, Artificial Sequence
  Oligonucleotide primer for the detection of SNP TSC0004267
aatcgacattca

SEQ ID NO: 276713 - DNA, 12 bp, Artificial Sequence
  Oligonucleotide primer for the detection of SNP TSC0004267
aatcgacattcg

SEQ ID NO: 276714 - DNA, 12 bp, Artificial Sequence
  Oligonucleotide primer for the detection of SNP TSC0004267
gagtgtaagtat

SEQ ID NO: 276715 - DNA, 12 bp, Artificial Sequence
  Oligonucleotide primer for the detection of SNP TSC0004267
gagcgtaagtat

SEQ ID NO: 276716 - DNA, 12 bp, Artificial Sequence
  Oligonucleotide primer for the detection of SNP TSC0004267
gagtgtaagtac

SEQ ID NO: 276717 - DNA, 12 bp, Artificial Sequence
  Oligonucleotide primer for the detection of SNP TSC0004267
gagcgtaagtac

SEQ ID NO: 276718 - DNA, 12 bp, Artificial Sequence
  Oligonucleotide primer for the detection of SNP TSC0004268
caaaactcaaca

SEQ ID NO: 276719 - DNA, 12 bp, Artificial Sequence
  Oligonucleotide primer for the detection of SNP TSC0004268
atttttttgagg

SEQ ID NO: 276720 - DNA, 12 bp, Artificial Sequence
  Oligonucleotide primer for the detection of SNP TSC0004268
acttccttaaaa

SEQ ID NO: 276721 - DNA, 12 bp, Artificial Sequence
  Oligonucleotide primer for the detection of SNP TSC0004268
ttaaggtttagt

SEQ ID NO: 276722 - DNA, 12 bp, Artificial Sequence
  Oligonucleotide primer for the detection of SNP TSC0004269
caacaaacacca

SEQ ID NO: 276723 - DNA, 12 bp, Artificial Sequence
  Oligonucleotide primer for the detection of SNP TSC0004269
ttagtgaattat

SEQ ID NO: 276724 - DNA, 12 bp, Artificial Sequence
  Oligonucleotide primer for the detection of SNP TSC0004269
ccaataaatcac

SEQ ID NO: 276725 - DNA, 12 bp, Artificial Sequence
  Oligonucleotide primer for the detection of SNP TSC0004269
tagtaggtatta

SEQ ID NO: 276726 - DNA, 12 bp, Artificial Sequence
  Oligonucleotide primer for the detection of SNP TSC0004270
ccccataaatat

SEQ ID NO: 276727 - DNA, 12 bp, Artificial Sequence
  Oligonucleotide primer for the detection of SNP TSC0004270
gtaataattgta

SEQ ID NO: 276728 - DNA, 12 bp, Artificial Sequence
  Oligonukleotid-Primer
ataataattata

SEQ ID NO: 276729 - DNA, 12 bp, Artificial Sequence
  Oligonucleotide primer for the detection of SNP TSC0004270
ttttataaatat

SEQ ID NO: 276730 - DNA, 12 bp, Artificial Sequence
  Oligonucleotide primer for the detection of SNP TSC0004271
ctacctatacaa

SEQ ID NO: 276731 - DNA, 12 bp, Artificial Sequence
  Oligonucleotide primer for the detection of SNP TSC0004271
attttataggtg

SEQ ID NO: 276732 - DNA, 12 bp, Artificial Sequence
  Oligonucleotide primer for the detection of SNP TSC0004271
ctccacaaataa

SEQ ID NO: 276733 - DNA, 12 bp, Artificial Sequence
  Oligonucleotide primer for the detection of SNP TSC0004271
gttgtttatgta

SEQ ID NO: 276734 - DNA, 12 bp, Artificial Sequence
  Oligonucleotide primer for the detection of SNP TSC0004272
aaaaataaaata

SEQ ID NO: 276735 - DNA, 12 bp, Artificial Sequence
  Oligonucleotide primer for the detection of SNP TSC0004272
gtgagagtttaa

SEQ ID NO: 276736 - DNA, 12 bp, Artificial Sequence
  Oligonucleotide primer for the detection of SNP TSC0004272
ataaaaacccaa

SEQ ID NO: 276737 - DNA, 12 bp, Artificial Sequence
  Oligonucleotide primer for the detection of SNP TSC0004272
gggggtagggtg

SEQ ID NO: 276738 - DNA, 12 bp, Artificial Sequence
  Oligonucleotide primer for the detection of SNP TSC0004273
aaaaccctaaac

SEQ ID NO: 276739 - DNA, 12 bp, Artificial Sequence
  Oligonucleotide primer for the detection of SNP TSC0004273
tttgtaggtatg

SEQ ID NO: 276740 - DNA, 12 bp, Artificial Sequence
  Oligonucleotide primer for the detection of SNP TSC0004273
cctacaaacata

SEQ ID NO: 276741 - DNA, 12 bp, Artificial Sequence
  Oligonucleotide primer for the detection of SNP TSC0004273
ggttttaagttt

SEQ ID NO: 276742 - DNA, 12 bp, Artificial Sequence
  Oligonucleotide primer for the detection of SNP TSC0004274
tagagtatatta

SEQ ID NO: 276743 - DNA, 12 bp, Artificial Sequence
  Oligonucleotide primer for the detection of SNP TSC0004275
ttaaaacatcca

SEQ ID NO: 276744 - DNA, 12 bp, Artificial Sequence
  Oligonucleotide primer for the detection of SNP TSC0004275
ttaaaacgtcca

SEQ ID NO: 276745 - DNA, 12 bp, Artificial Sequence
  Oligonucleotide primer for the detection of SNP TSC0004275
tttatttttggg

SEQ ID NO: 276746 - DNA, 12 bp, Artificial Sequence
  Oligonucleotide primer for the detection of SNP TSC0004275
cccatccctaaa

SEQ ID NO: 276747 - DNA, 12 bp, Artificial Sequence
  Oligonucleotide primer for the detection of SNP TSC0004275
tggagtgtttat

SEQ ID NO: 276748 - DNA, 12 bp, Artificial Sequence
  Oligonucleotide primer for the detection of SNP TSC0004275
tggagcgtttat

SEQ ID NO: 276749 - DNA, 12 bp, Artificial Sequence
  Oligonucleotide primer for the detection of SNP TSC0004276
acacaatcccat

SEQ ID NO: 276750 - DNA, 12 bp, Artificial Sequence
  Oligonucleotide primer for the detection of SNP TSC0004276
acacaatcccgt

SEQ ID NO: 276751 - DNA, 12 bp, Artificial Sequence
  Oligonucleotide primer for the detection of SNP TSC0004276
acgcaatcccat

SEQ ID NO: 276752 - DNA, 12 bp, Artificial Sequence
  Oligonucleotide primer for the detection of SNP TSC0004276
acgcaatcccgt

SEQ ID NO: 276753 - DNA, 12 bp, Artificial Sequence
  Oligonucleotide primer for the detection of SNP TSC0004276
tagtgtgagagt

SEQ ID NO: 276754 - DNA, 12 bp, Artificial Sequence
  Oligonucleotide primer for the detection of SNP TSC0004276
tagcgtgagagt

SEQ ID NO: 276755 - DNA, 12 bp, Artificial Sequence
  Oligonucleotide primer for the detection of SNP TSC0004276
caacataaaaac

SEQ ID NO: 276756 - DNA, 12 bp, Artificial Sequence
  Oligonucleotide primer for the detection of SNP TSC0004276
caacgtaaaaac

SEQ ID NO: 276757 - DNA, 12 bp, Artificial Sequence
  Oligonucleotide primer for the detection of SNP TSC0004276
tagttttgtttt

SEQ ID NO: 276758 - DNA, 12 bp, Artificial Sequence
  Oligonucleotide primer for the detection of SNP TSC0004276
tagtttcgtttt

SEQ ID NO: 276759 - DNA, 12 bp, Artificial Sequence
  Oligonucleotide primer for the detection of SNP TSC0004276
tagttttgtttc

SEQ ID NO: 276760 - DNA, 12 bp, Artificial Sequence
  Oligonucleotide primer for the detection of SNP TSC0004276
tagtttcgtttc

SEQ ID NO: 276761 - DNA, 12 bp, Artificial Sequence
  Oligonucleotide primer for the detection of SNP TSC0004277
ggtattgaataa

SEQ ID NO: 276762 - DNA, 12 bp, Artificial Sequence
  Oligonucleotide primer for the detection of SNP TSC0004277
aacactaaacaa

SEQ ID NO: 276763 - DNA, 12 bp, Artificial Sequence
  Oligonucleotide primer for the detection of SNP TSC0004277
tataaatggaat

SEQ ID NO: 276764 - DNA, 12 bp, Artificial Sequence
  Oligonucleotide primer for the detection of SNP TSC0004278
gaggttttttta

SEQ ID NO: 276765 - DNA, 12 bp, Artificial Sequence
  Oligonucleotide primer for the detection of SNP TSC0004279
aaaatatttaca

SEQ ID NO: 276766 - DNA, 12 bp, Artificial Sequence
  Oligonucleotide primer for the detection of SNP TSC0004279
gttaatttttgt

SEQ ID NO: 276767 - DNA, 12 bp, Artificial Sequence
  Oligonucleotide primer for the detection of SNP TSC0004279
accaatttctat

SEQ ID NO: 276768 - DNA, 12 bp, Artificial Sequence
  Oligonucleotide primer for the detection of SNP TSC0004279
gaaatatttata

SEQ ID NO: 276769 - DNA, 12 bp, Artificial Sequence
  Oligonucleotide primer for the detection of SNP TSC0004280
ttccttaacttc

SEQ ID NO: 276770 - DNA, 12 bp, Artificial Sequence
  Oligonucleotide primer for the detection of SNP TSC0004280
attgatgtatag

SEQ ID NO: 276771 - DNA, 12 bp, Artificial Sequence
  Oligonucleotide primer for the detection of SNP TSC0004281
cccaaaatcacc

SEQ ID NO: 276772 - DNA, 12 bp, Artificial Sequence
  Oligonucleotide primer for the detection of SNP TSC0004281
atttagattata

SEQ ID NO: 276773 - DNA, 12 bp, Artificial Sequence
  Oligonucleotide primer for the detection of SNP TSC0004282
cacttaaaacta

SEQ ID NO: 276774 - DNA, 12 bp, Artificial Sequence
  Oligonucleotide primer for the detection of SNP TSC0004282
agtttttataat

SEQ ID NO: 276775 - DNA, 12 bp, Artificial Sequence
  Oligonucleotide primer for the detection of SNP TSC0004282
aaccttcataac

SEQ ID NO: 276776 - DNA, 12 bp, Artificial Sequence
  Oligonucleotide primer for the detection of SNP TSC0004282
tttggggttgtt

SEQ ID NO: 276777 - DNA, 12 bp, Artificial Sequence
  Oligonucleotide primer for the detection of SNP TSC0004282
tttggggttgtc

SEQ ID NO: 276778 - DNA, 12 bp, Artificial Sequence
  Oligonucleotide primer for the detection of SNP TSC0004283
actctccaatta

SEQ ID NO: 276779 - DNA, 12 bp, Artificial Sequence
  Oligonucleotide primer for the detection of SNP TSC0004283
ttccactatcct

SEQ ID NO: 276780 - DNA, 12 bp, Artificial Sequence
  Oligonucleotide primer for the detection of SNP TSC0004283
gttttttagttg

SEQ ID NO: 276781 - DNA, 12 bp, Artificial Sequence
  Oligonucleotide primer for the detection of SNP TSC0004284
aaataatccacc

SEQ ID NO: 276782 - DNA, 12 bp, Artificial Sequence
  Oligonucleotide primer for the detection of SNP TSC0004284
gggaggtcgagg

SEQ ID NO: 276783 - DNA, 12 bp, Artificial Sequence
  Oligonucleotide primer for the detection of SNP TSC0004284
aaaaaaccaaaa

SEQ ID NO: 276784 - DNA, 12 bp, Artificial Sequence
  Oligonucleotide primer for the detection of SNP TSC0004284
aaaaaaccgaaa

SEQ ID NO: 276785 - DNA, 12 bp, Artificial Sequence
  Oligonucleotide primer for the detection of SNP TSC0004284
aggtgatttatt

SEQ ID NO: 276786 - DNA, 12 bp, Artificial Sequence
  Oligonucleotide primer for the detection of SNP TSC0004285
aataaaatctcc

SEQ ID NO: 276787 - DNA, 12 bp, Artificial Sequence
  Oligonucleotide primer for the detection of SNP TSC0004285
ttggatggatga

SEQ ID NO: 276788 - DNA, 12 bp, Artificial Sequence
  Oligonucleotide primer for the detection of SNP TSC0004286
agttgttttata

SEQ ID NO: 276789 - DNA, 12 bp, Artificial Sequence
  Oligonucleotide primer for the detection of SNP TSC0004287
tttcaccaattc

SEQ ID NO: 276790 - DNA, 12 bp, Artificial Sequence
  Oligonucleotide primer for the detection of SNP TSC0004287
tttcaccgattc

SEQ ID NO: 276791 - DNA, 12 bp, Artificial Sequence
  Oligonucleotide primer for the detection of SNP TSC0004287
aatatggtgata

SEQ ID NO: 276792 - DNA, 12 bp, Artificial Sequence
  Oligonucleotide primer for the detection of SNP TSC0004287
aatatggcgata

SEQ ID NO: 276793 - DNA, 12 bp, Artificial Sequence
  Oligonucleotide primer for the detection of SNP TSC0004288
aaaacctacaaa

SEQ ID NO: 276794 - DNA, 12 bp, Artificial Sequence
  Oligonucleotide primer for the detection of SNP TSC0004288
ttgggtttgggt

SEQ ID NO: 276795 - DNA, 12 bp, Artificial Sequence
  Oligonucleotide primer for the detection of SNP TSC0004288
actaaacctaaa

SEQ ID NO: 276796 - DNA, 12 bp, Artificial Sequence
  Oligonucleotide primer for the detection of SNP TSC0004288
gggtttgtagat

SEQ ID NO: 276797 - DNA, 12 bp, Artificial Sequence
  Oligonucleotide primer for the detection of SNP TSC0004289
ctacctcaacct

SEQ ID NO: 276798 - DNA, 12 bp, Artificial Sequence
  Oligonucleotide primer for the detection of SNP TSC0004289
tttagttattcg

SEQ ID NO: 276799 - DNA, 12 bp, Artificial Sequence
  Oligonucleotide primer for the detection of SNP TSC0004290
acatacaaaaac

SEQ ID NO: 276800 - DNA, 12 bp, Artificial Sequence
  Oligonucleotide primer for the detection of SNP TSC0004290
ttaaaggttaaa

SEQ ID NO: 276801 - DNA, 12 bp, Artificial Sequence
  Oligonucleotide primer for the detection of SNP TSC0004291
taacaattcaat

SEQ ID NO: 276802 - DNA, 12 bp, Artificial Sequence
  Oligonucleotide primer for the detection of SNP TSC0004291
gttaatttttta

SEQ ID NO: 276803 - DNA, 12 bp, Artificial Sequence
  Oligonucleotide primer for the detection of SNP TSC0004292
caactattcatc

SEQ ID NO: 276804 - DNA, 12 bp, Artificial Sequence
  Oligonucleotide primer for the detection of SNP TSC0004292
tgatagagttgg

SEQ ID NO: 276805 - DNA, 12 bp, Artificial Sequence
  Oligonucleotide primer for the detection of SNP TSC0004293
aaaataatcttc

SEQ ID NO: 276806 - DNA, 12 bp, Artificial Sequence
  Oligonucleotide primer for the detection of SNP TSC0004293
ttttaggtagag

SEQ ID NO: 276807 - DNA, 12 bp, Artificial Sequence
  Oligonucleotide primer for the detection of SNP TSC0004294
ccaccattacta

SEQ ID NO: 276808 - DNA, 12 bp, Artificial Sequence
  Oligonucleotide primer for the detection of SNP TSC0004294
ttaaggttggtt

SEQ ID NO: 276809 - DNA, 12 bp, Artificial Sequence
  Oligonukleotid-Primer
ccaaaactaact

SEQ ID NO: 276810 - DNA, 12 bp, Artificial Sequence
  Oligonucleotide primer for the detection of SNP TSC0004294
ttattattattg

SEQ ID NO: 276811 - DNA, 12 bp, Artificial Sequence
  Oligonucleotide primer for the detection of SNP TSC0004295
cacaaaacaaaa

SEQ ID NO: 276812 - DNA, 12 bp, Artificial Sequence
  Oligonucleotide primer for the detection of SNP TSC0004295
ggttgtaggttt

SEQ ID NO: 276813 - DNA, 12 bp, Artificial Sequence
  Oligonucleotide primer for the detection of SNP TSC0004295
aactacaaatcc

SEQ ID NO: 276814 - DNA, 12 bp, Artificial Sequence
  Oligonucleotide primer for the detection of SNP TSC0004295
tatagggtaggg

SEQ ID NO: 276815 - DNA, 12 bp, Artificial Sequence
  Oligonucleotide primer for the detection of SNP TSC0004296
actcctaataac

SEQ ID NO: 276816 - DNA, 12 bp, Artificial Sequence
  Oligonucleotide primer for the detection of SNP TSC0004296
gaatgatggtaa

SEQ ID NO: 276817 - DNA, 12 bp, Artificial Sequence
  Oligonucleotide primer for the detection of SNP TSC0004297
ttttatgttagt

SEQ ID NO: 276818 - DNA, 12 bp, Artificial Sequence
  Oligonucleotide primer for the detection of SNP TSC0004297
ttttacgttagt

SEQ ID NO: 276819 - DNA, 12 bp, Artificial Sequence
  Oligonucleotide primer for the detection of SNP TSC0004297
cctcacaccaac

SEQ ID NO: 276820 - DNA, 12 bp, Artificial Sequence
  Oligonucleotide primer for the detection of SNP TSC0004297
cctcacgccaac

SEQ ID NO: 276821 - DNA, 12 bp, Artificial Sequence
  Oligonucleotide primer for the detection of SNP TSC0004297
ttaggagaaagg

SEQ ID NO: 276822 - DNA, 12 bp, Artificial Sequence
  Oligonucleotide primer for the detection of SNP TSC0004298
aaattactaccc

SEQ ID NO: 276823 - DNA, 12 bp, Artificial Sequence
  Oligonucleotide primer for the detection of SNP TSC0004298
ctttttccttcc

SEQ ID NO: 276824 - DNA, 12 bp, Artificial Sequence
  Oligonucleotide primer for the detection of SNP TSC0004298
ggattattgttt

SEQ ID NO: 276825 - DNA, 12 bp, Artificial Sequence
  Oligonucleotide primer for the detection of SNP TSC0004298
ggattattgttc

SEQ ID NO: 276826 - DNA, 12 bp, Artificial Sequence
  Oligonucleotide primer for the detection of SNP TSC0004299
aaatactttact

SEQ ID NO: 276827 - DNA, 12 bp, Artificial Sequence
  Oligonucleotide primer for the detection of SNP TSC0004299
atatttggtata

SEQ ID NO: 276828 - DNA, 12 bp, Artificial Sequence
  Oligonucleotide primer for the detection of SNP TSC0004300
ttacatataaac

SEQ ID NO: 276829 - DNA, 12 bp, Artificial Sequence
  Oligonucleotide primer for the detection of SNP TSC0004300
ggagaatgtggg

SEQ ID NO: 276830 - DNA, 12 bp, Artificial Sequence
  Oligonucleotide primer for the detection of SNP TSC0004300
ggagaatgcggg

SEQ ID NO: 276831 - DNA, 12 bp, Artificial Sequence
  Oligonucleotide primer for the detection of SNP TSC0004301
catatataaaat

SEQ ID NO: 276832 - DNA, 12 bp, Artificial Sequence
  Oligonucleotide primer for the detection of SNP TSC0004301
ttaggtagtggg

SEQ ID NO: 276833 - DNA, 12 bp, Artificial Sequence
  Oligonucleotide primer for the detection of SNP TSC0004302
cctacccttata

SEQ ID NO: 276834 - DNA, 12 bp, Artificial Sequence
  Oligonucleotide primer for the detection of SNP TSC0004302
ggtgtgggaggt

SEQ ID NO: 276835 - DNA, 12 bp, Artificial Sequence
  Oligonucleotide primer for the detection of SNP TSC0004302
ggtgcgggaggt

SEQ ID NO: 276836 - DNA, 12 bp, Artificial Sequence
  Oligonucleotide primer for the detection of SNP TSC0004302
tttgtttttgtg

SEQ ID NO: 276837 - DNA, 12 bp, Artificial Sequence
  Oligonucleotide primer for the detection of SNP TSC0004303
ccttctaaaaac

SEQ ID NO: 276838 - DNA, 12 bp, Artificial Sequence
  Oligonucleotide primer for the detection of SNP TSC0004303
ggaaaattttaa

SEQ ID NO: 276839 - DNA, 12 bp, Artificial Sequence
  Oligonucleotide primer for the detection of SNP TSC0004303
aaaaaacttcaa

SEQ ID NO: 276840 - DNA, 12 bp, Artificial Sequence
  Oligonucleotide primer for the detection of SNP TSC0004303
ttttttgagaat

SEQ ID NO: 276841 - DNA, 12 bp, Artificial Sequence
  Oligonucleotide primer for the detection of SNP TSC0004304
aataataatatc

SEQ ID NO: 276842 - DNA, 12 bp, Artificial Sequence
  Oligonucleotide primer for the detection of SNP TSC0004304
ttttaaaaagtg

SEQ ID NO: 276843 - DNA, 12 bp, Artificial Sequence
  Oligonucleotide primer for the detection of SNP TSC0004305
cttcaattttat

SEQ ID NO: 276844 - DNA, 12 bp, Artificial Sequence
  Oligonucleotide primer for the detection of SNP TSC0004305
cttcgattttat

SEQ ID NO: 276845 - DNA, 12 bp, Artificial Sequence
  Oligonucleotide primer for the detection of SNP TSC0004305
ataatagattaa

SEQ ID NO: 276846 - DNA, 12 bp, Artificial Sequence
  Oligonucleotide primer for the detection of SNP TSC0004306
accttccctacc

SEQ ID NO: 276847 - DNA, 12 bp, Artificial Sequence
  Oligonucleotide primer for the detection of SNP TSC0004306
ggttattgatta

SEQ ID NO: 276848 - DNA, 12 bp, Artificial Sequence
  Oligonucleotide primer for the detection of SNP TSC0004308
tataaaatcaac

SEQ ID NO: 276849 - DNA, 12 bp, Artificial Sequence
  Oligonucleotide primer for the detection of SNP TSC0004308
tttgatttttta

SEQ ID NO: 276850 - DNA, 12 bp, Artificial Sequence
  Oligonucleotide primer for the detection of SNP TSC0004310
aaattacaaaaa

SEQ ID NO: 276851 - DNA, 12 bp, Artificial Sequence
  Oligonucleotide primer for the detection of SNP TSC0004310
gaattacaaaaa

SEQ ID NO: 276852 - DNA, 12 bp, Artificial Sequence
  Oligonucleotide primer for the detection of SNP TSC0004310
tatagtttatgt

SEQ ID NO: 276853 - DNA, 12 bp, Artificial Sequence
  Oligonucleotide primer for the detection of SNP TSC0004310
cacaatctatac

SEQ ID NO: 276854 - DNA, 12 bp, Artificial Sequence
  Oligonucleotide primer for the detection of SNP TSC0004310
gggttgtaggag

SEQ ID NO: 276855 - DNA, 12 bp, Artificial Sequence
  Oligonucleotide primer for the detection of SNP TSC0004311
ctcctatttctc

SEQ ID NO: 276856 - DNA, 12 bp, Artificial Sequence
  Oligonucleotide primer for the detection of SNP TSC0004311
tggggagagagg

SEQ ID NO: 276857 - DNA, 12 bp, Artificial Sequence
  Oligonucleotide primer for the detection of SNP TSC0004312
aaattataataa

SEQ ID NO: 276858 - DNA, 12 bp, Artificial Sequence
  Oligonucleotide primer for the detection of SNP TSC0004312
gtatgattatgg

SEQ ID NO: 276859 - DNA, 12 bp, Artificial Sequence
  Oligonucleotide primer for the detection of SNP TSC0004312
gtatgattacgg

SEQ ID NO: 276860 - DNA, 12 bp, Artificial Sequence
  Oligonucleotide primer for the detection of SNP TSC0004312
acataatcacaa

SEQ ID NO: 276861 - DNA, 12 bp, Artificial Sequence
  Oligonucleotide primer for the detection of SNP TSC0004312
acataatcacga

SEQ ID NO: 276862 - DNA, 12 bp, Artificial Sequence
  Oligonucleotide primer for the detection of SNP TSC0004312
aggttgtagtga

SEQ ID NO: 276863 - DNA, 12 bp, Artificial Sequence
  Oligonucleotide primer for the detection of SNP TSC0004313
ttacaaaaacct

SEQ ID NO: 276864 - DNA, 12 bp, Artificial Sequence
  Oligonucleotide primer for the detection of SNP TSC0004313
ttatagtttatg

SEQ ID NO: 276865 - DNA, 12 bp, Artificial Sequence
  Oligonucleotide primer for the detection of SNP TSC0004314
ggaattaagttt

SEQ ID NO: 276866 - DNA, 12 bp, Artificial Sequence
  Oligonucleotide primer for the detection of SNP TSC0004315
taaggtttagta

SEQ ID NO: 276867 - DNA, 12 bp, Artificial Sequence
  Oligonucleotide primer for the detection of SNP TSC0004316
agtatatttatt

SEQ ID NO: 276868 - DNA, 12 bp, Artificial Sequence
  Oligonucleotide primer for the detection of SNP TSC0004316
aacacattcatt

SEQ ID NO: 276869 - DNA, 12 bp, Artificial Sequence
  Oligonucleotide primer for the detection of SNP TSC0004316
agttagtataga

SEQ ID NO: 276870 - DNA, 12 bp, Artificial Sequence
  Oligonucleotide primer for the detection of SNP TSC0004317
aattttaattga

SEQ ID NO: 276871 - DNA, 12 bp, Artificial Sequence
  Oligonucleotide primer for the detection of SNP TSC0004317
aattttaatcga

SEQ ID NO: 276872 - DNA, 12 bp, Artificial Sequence
  Oligonucleotide primer for the detection of SNP TSC0004318
aacaaaaaaact

SEQ ID NO: 276873 - DNA, 12 bp, Artificial Sequence
  Oligonucleotide primer for the detection of SNP TSC0004318
gatttttttgag

SEQ ID NO: 276874 - DNA, 12 bp, Artificial Sequence
  Oligonucleotide primer for the detection of SNP TSC0004318
gattttttcgag

SEQ ID NO: 276875 - DNA, 12 bp, Artificial Sequence
  Oligonucleotide primer for the detection of SNP TSC0004319
aaaataaaaaaa

SEQ ID NO: 276876 - DNA, 12 bp, Artificial Sequence
  Oligonucleotide primer for the detection of SNP TSC0004319
tatgtttagtta

SEQ ID NO: 276877 - DNA, 12 bp, Artificial Sequence
  Oligonucleotide primer for the detection of SNP TSC0004319
catacccaacta

SEQ ID NO: 276878 - DNA, 12 bp, Artificial Sequence
  Oligonucleotide primer for the detection of SNP TSC0004320
ttcctaatttac

SEQ ID NO: 276879 - DNA, 12 bp, Artificial Sequence
  Oligonucleotide primer for the detection of SNP TSC0004320
aggaattgtttt

SEQ ID NO: 276880 - DNA, 12 bp, Artificial Sequence
  Oligonucleotide primer for the detection of SNP TSC0004320
aaattaccccaa

SEQ ID NO: 276881 - DNA, 12 bp, Artificial Sequence
  Oligonucleotide primer for the detection of SNP TSC0004320
tttgatttgttt

SEQ ID NO: 276882 - DNA, 12 bp, Artificial Sequence
  Oligonucleotide primer for the detection of SNP TSC0004321
tataaacatttc

SEQ ID NO: 276883 - DNA, 12 bp, Artificial Sequence
  Oligonucleotide primer for the detection of SNP TSC0004321
agtaatagggta

SEQ ID NO: 276884 - DNA, 12 bp, Artificial Sequence
  Oligonucleotide primer for the detection of SNP TSC0004322
aaactactaaac

SEQ ID NO: 276885 - DNA, 12 bp, Artificial Sequence
  Oligonucleotide primer for the detection of SNP TSC0004322
ttgggggttggg

SEQ ID NO: 276886 - DNA, 12 bp, Artificial Sequence
  Oligonucleotide primer for the detection of SNP TSC0004322
ctaaaaactaaa

SEQ ID NO: 276887 - DNA, 12 bp, Artificial Sequence
  Oligonucleotide primer for the detection of SNP TSC0004322
ggattgttggat

SEQ ID NO: 276888 - DNA, 12 bp, Artificial Sequence
  Oligonucleotide primer for the detection of SNP TSC0004322
ggattgttggac

SEQ ID NO: 276889 - DNA, 12 bp, Artificial Sequence
  Oligonucleotide primer for the detection of SNP TSC0004323
aacaaaaatttc

SEQ ID NO: 276890 - DNA, 12 bp, Artificial Sequence
  Oligonucleotide primer for the detection of SNP TSC0004323
gagtaaaataga

SEQ ID NO: 276891 - DNA, 12 bp, Artificial Sequence
  Oligonucleotide primer for the detection of SNP TSC0004323
aaacaaaacaaa

SEQ ID NO: 276892 - DNA, 12 bp, Artificial Sequence
  Oligonucleotide primer for the detection of SNP TSC0004323
ggtaagggtttt

SEQ ID NO: 276893 - DNA, 12 bp, Artificial Sequence
  Oligonucleotide primer for the detection of SNP TSC0004324
aaattaattata

SEQ ID NO: 276894 - DNA, 12 bp, Artificial Sequence
  Oligonucleotide primer for the detection of SNP TSC0004324
taatacccaaaa

SEQ ID NO: 276895 - DNA, 12 bp, Artificial Sequence
  Oligonucleotide primer for the detection of SNP TSC0004324
gagttagttatg

SEQ ID NO: 276896 - DNA, 12 bp, Artificial Sequence
  Oligonucleotide primer for the detection of SNP TSC0004325
ccttaaaaacat

SEQ ID NO: 276897 - DNA, 12 bp, Artificial Sequence
  Oligonucleotide primer for the detection of SNP TSC0004325
gggttttggttg

SEQ ID NO: 276898 - DNA, 12 bp, Artificial Sequence
  Oligonucleotide primer for the detection of SNP TSC0004327
gaaatatttttg

SEQ ID NO: 276899 - DNA, 12 bp, Artificial Sequence
  Oligonucleotide primer for the detection of SNP TSC0004327
aaatacccttaa

SEQ ID NO: 276900 - DNA, 12 bp, Artificial Sequence
  Oligonucleotide primer for the detection of SNP TSC0004327
gttggagagagg

SEQ ID NO: 276901 - DNA, 12 bp, Artificial Sequence
  Oligonucleotide primer for the detection of SNP TSC0004328
aaaaacattact

SEQ ID NO: 276902 - DNA, 12 bp, Artificial Sequence
  Oligonucleotide primer for the detection of SNP TSC0004329
aacaacaaaatt

SEQ ID NO: 276903 - DNA, 12 bp, Artificial Sequence
  Oligonucleotide primer for the detection of SNP TSC0004329
ttgttttttgtg

SEQ ID NO: 276904 - DNA, 12 bp, Artificial Sequence
  Oligonucleotide primer for the detection of SNP TSC0004329
ttgttttttgcg

SEQ ID NO: 276905 - DNA, 12 bp, Artificial Sequence
  Oligonucleotide primer for the detection of SNP TSC0004330
taattaaaaaaa

SEQ ID NO: 276906 - DNA, 12 bp, Artificial Sequence
  Oligonucleotide primer for the detection of SNP TSC0004330
ttttattttttc

SEQ ID NO: 276907 - DNA, 12 bp, Artificial Sequence
  Oligonucleotide primer for the detection of SNP TSC0004330
accttatccttt

SEQ ID NO: 276908 - DNA, 12 bp, Artificial Sequence
  Oligonucleotide primer for the detection of SNP TSC0004330
tagttggaaaga

SEQ ID NO: 276909 - DNA, 12 bp, Artificial Sequence
  Oligonucleotide primer for the detection of SNP TSC0004331
ataaaatcacct

SEQ ID NO: 276910 - DNA, 12 bp, Artificial Sequence
  Oligonucleotide primer for the detection of SNP TSC0004331
gaaatttagata

SEQ ID NO: 276911 - DNA, 12 bp, Artificial Sequence
  Oligonucleotide primer for the detection of SNP TSC0004331
aaaacttaaata

SEQ ID NO: 276912 - DNA, 12 bp, Artificial Sequence
  Oligonucleotide primer for the detection of SNP TSC0004331
atagaattattt

SEQ ID NO: 276913 - DNA, 12 bp, Artificial Sequence
  Oligonucleotide primer for the detection of SNP TSC0004332
aattaccttata

SEQ ID NO: 276914 - DNA, 12 bp, Artificial Sequence
  Oligonucleotide primer for the detection of SNP TSC0004332
ttattttattat

SEQ ID NO: 276915 - DNA, 12 bp, Artificial Sequence
  Oligonucleotide primer for the detection of SNP TSC0004332
tttatcttatta

SEQ ID NO: 276916 - DNA, 12 bp, Artificial Sequence
  Oligonucleotide primer for the detection of SNP TSC0004332
gattattttatg

SEQ ID NO: 276917 - DNA, 12 bp, Artificial Sequence
  Oligonucleotide primer for the detection of SNP TSC0004333
cttctaaactta

SEQ ID NO: 276918 - DNA, 12 bp, Artificial Sequence
  Oligonukleotid-Primer
gatttgtaggta

SEQ ID NO: 276919 - DNA, 12 bp, Artificial Sequence
  Oligonucleotide primer for the detection of SNP TSC0004333
aacctacaaaca

SEQ ID NO: 276920 - DNA, 12 bp, Artificial Sequence
  Oligonucleotide primer for the detection of SNP TSC0004333
gacctacaaaca

SEQ ID NO: 276921 - DNA, 12 bp, Artificial Sequence
  Oligonucleotide primer for the detection of SNP TSC0004333
ttttaagtttgt

SEQ ID NO: 276922 - DNA, 12 bp, Artificial Sequence
  Oligonucleotide primer for the detection of SNP TSC0004334
caaaaaataaaa

SEQ ID NO: 276923 - DNA, 12 bp, Artificial Sequence
  Oligonucleotide primer for the detection of SNP TSC0004334
cgaaaaataaaa

SEQ ID NO: 276924 - DNA, 12 bp, Artificial Sequence
  Oligonucleotide primer for the detection of SNP TSC0004334
ttttatattttc

SEQ ID NO: 276925 - DNA, 12 bp, Artificial Sequence
  Oligonucleotide primer for the detection of SNP TSC0004334
cttttatatttt

SEQ ID NO: 276926 - DNA, 12 bp, Artificial Sequence
  Oligonucleotide primer for the detection of SNP TSC0004334
tgaaaagtaaaa

SEQ ID NO: 276927 - DNA, 12 bp, Artificial Sequence
  Oligonucleotide primer for the detection of SNP TSC0004334
cgaaaagtaaaa

SEQ ID NO: 276928 - DNA, 12 bp, Artificial Sequence
  Oligonucleotide primer for the detection of SNP TSC0004335
ttaaacccctat

SEQ ID NO: 276929 - DNA, 12 bp, Artificial Sequence
  Oligonucleotide primer for the detection of SNP TSC0004335
gagtagttagga

SEQ ID NO: 276930 - DNA, 12 bp, Artificial Sequence
  Oligonucleotide primer for the detection of SNP TSC0004336
caaaactcactt

SEQ ID NO: 276931 - DNA, 12 bp, Artificial Sequence
  Oligonucleotide primer for the detection of SNP TSC0004336
tttgttttaaag

SEQ ID NO: 276932 - DNA, 12 bp, Artificial Sequence
  Oligonucleotide primer for the detection of SNP TSC0004337
taaaataacact

SEQ ID NO: 276933 - DNA, 12 bp, Artificial Sequence
  Oligonucleotide primer for the detection of SNP TSC0004337
tttattttatga

SEQ ID NO: 276934 - DNA, 12 bp, Artificial Sequence
  Oligonucleotide primer for the detection of SNP TSC0004337
tttatcccataa

SEQ ID NO: 276935 - DNA, 12 bp, Artificial Sequence
  Oligonucleotide primer for the detection of SNP TSC0004337
tgaaataatatt

SEQ ID NO: 276936 - DNA, 12 bp, Artificial Sequence
  Oligonucleotide primer for the detection of SNP TSC0004338
tatcaactcata

SEQ ID NO: 276937 - DNA, 12 bp, Artificial Sequence
  Oligonucleotide primer for the detection of SNP TSC0004338
tatcaactcgta

SEQ ID NO: 276938 - DNA, 12 bp, Artificial Sequence
  Oligonucleotide primer for the detection of SNP TSC0004338
gaaatttttttt

SEQ ID NO: 276939 - DNA, 12 bp, Artificial Sequence
  Oligonucleotide primer for the detection of SNP TSC0004338
ataaaacttctc

SEQ ID NO: 276940 - DNA, 12 bp, Artificial Sequence
  Oligonucleotide primer for the detection of SNP TSC0004338
ttagtttgtatt

SEQ ID NO: 276941 - DNA, 12 bp, Artificial Sequence
  Oligonucleotide primer for the detection of SNP TSC0004338
ttagttcgtatt

SEQ ID NO: 276942 - DNA, 12 bp, Artificial Sequence
  Oligonucleotide primer for the detection of SNP TSC0004339
accatttccacc

SEQ ID NO: 276943 - DNA, 12 bp, Artificial Sequence
  Oligonucleotide primer for the detection of SNP TSC0004339
tagtattatttg

SEQ ID NO: 276944 - DNA, 12 bp, Artificial Sequence
  Oligonucleotide primer for the detection of SNP TSC0004339
taacactattta

SEQ ID NO: 276945 - DNA, 12 bp, Artificial Sequence
  Oligonucleotide primer for the detection of SNP TSC0004339
gttatttttatt

SEQ ID NO: 276946 - DNA, 12 bp, Artificial Sequence
  Oligonucleotide primer for the detection of SNP TSC0004339
gttatttttatc

SEQ ID NO: 276947 - DNA, 12 bp, Artificial Sequence
  Oligonucleotide primer for the detection of SNP TSC0004340
tctcaatctcct

SEQ ID NO: 276948 - DNA, 12 bp, Artificial Sequence
  Oligonucleotide primer for the detection of SNP TSC0004340
gtggattatgaa

SEQ ID NO: 276949 - DNA, 12 bp, Artificial Sequence
  Oligonucleotide primer for the detection of SNP TSC0004340
gcggattatgaa

SEQ ID NO: 276950 - DNA, 12 bp, Artificial Sequence
  Oligonucleotide primer for the detection of SNP TSC0004340
gtggattacgaa

SEQ ID NO: 276951 - DNA, 12 bp, Artificial Sequence
  Oligonucleotide primer for the detection of SNP TSC0004340
gcggattacgaa

SEQ ID NO: 276952 - DNA, 12 bp, Artificial Sequence
  Oligonucleotide primer for the detection of SNP TSC0004341
acatctatactc

SEQ ID NO: 276953 - DNA, 12 bp, Artificial Sequence
  Oligonucleotide primer for the detection of SNP TSC0004341
ttaataatttga

SEQ ID NO: 276954 - DNA, 12 bp, Artificial Sequence
  Oligonucleotide primer for the detection of SNP TSC0004341
ttaataattcga

SEQ ID NO: 276955 - DNA, 12 bp, Artificial Sequence
  Oligonucleotide primer for the detection of SNP TSC0004342
caattatattcc

SEQ ID NO: 276956 - DNA, 12 bp, Artificial Sequence
  Oligonucleotide primer for the detection of SNP TSC0004342
gagaagagttag

SEQ ID NO: 276957 - DNA, 12 bp, Artificial Sequence
  Oligonucleotide primer for the detection of SNP TSC0004342
tagttgtgtttt

SEQ ID NO: 276958 - DNA, 12 bp, Artificial Sequence
  Oligonucleotide primer for the detection of SNP TSC0004343
ccattaataaat

SEQ ID NO: 276959 - DNA, 12 bp, Artificial Sequence
  Oligonucleotide primer for the detection of SNP TSC0004343
agtttttaaaaa

SEQ ID NO: 276960 - DNA, 12 bp, Artificial Sequence
  Oligonucleotide primer for the detection of SNP TSC0004344
taaaacaaaaat

SEQ ID NO: 276961 - DNA, 12 bp, Artificial Sequence
  Oligonucleotide primer for the detection of SNP TSC0004344
gattttagagga

SEQ ID NO: 276962 - DNA, 12 bp, Artificial Sequence
  Oligonucleotide primer for the detection of SNP TSC0004344
aactttaaaaaa

SEQ ID NO: 276963 - DNA, 12 bp, Artificial Sequence
  Oligonucleotide primer for the detection of SNP TSC0004344
gactttaaaaaa

SEQ ID NO: 276964 - DNA, 12 bp, Artificial Sequence
  Oligonucleotide primer for the detection of SNP TSC0004344
tgaggtaggggt

SEQ ID NO: 276965 - DNA, 12 bp, Artificial Sequence
  Oligonucleotide primer for the detection of SNP TSC0004345
gataaagtttgt

SEQ ID NO: 276966 - DNA, 12 bp, Artificial Sequence
  Oligonucleotide primer for the detection of SNP TSC0004345
gataaagtttgc

SEQ ID NO: 276967 - DNA, 12 bp, Artificial Sequence
  Oligonucleotide primer for the detection of SNP TSC0004346
tctaaaaaatcc

SEQ ID NO: 276968 - DNA, 12 bp, Artificial Sequence
  Oligonucleotide primer for the detection of SNP TSC0004346
gatgatgagtta

SEQ ID NO: 276969 - DNA, 12 bp, Artificial Sequence
  Oligonucleotide primer for the detection of SNP TSC0004346
gatgacgagtta

SEQ ID NO: 276970 - DNA, 12 bp, Artificial Sequence
  Oligonucleotide primer for the detection of SNP TSC0004347
aaattaaaaaca

SEQ ID NO: 276971 - DNA, 12 bp, Artificial Sequence
  Oligonucleotide primer for the detection of SNP TSC0004347
gagttgggggta

SEQ ID NO: 276972 - DNA, 12 bp, Artificial Sequence
  Oligonucleotide primer for the detection of SNP TSC0004348
aaaaaaaataac

SEQ ID NO: 276973 - DNA, 12 bp, Artificial Sequence
  Oligonucleotide primer for the detection of SNP TSC0004348
tgttattatgtc

SEQ ID NO: 276974 - DNA, 12 bp, Artificial Sequence
  Oligonucleotide primer for the detection of SNP TSC0004348
aaaaaaatagtt

SEQ ID NO: 276975 - DNA, 12 bp, Artificial Sequence
  Oligonucleotide primer for the detection of SNP TSC0004349
caaattaatctc

SEQ ID NO: 276976 - DNA, 12 bp, Artificial Sequence
  Oligonucleotide primer for the detection of SNP TSC0004349
aggttaggagtt

SEQ ID NO: 276977 - DNA, 12 bp, Artificial Sequence
  Oligonucleotide primer for the detection of SNP TSC0004349
taggttggtttt

SEQ ID NO: 276978 - DNA, 12 bp, Artificial Sequence
  Oligonucleotide primer for the detection of SNP TSC0004349
taggttggtttc

SEQ ID NO: 276979 - DNA, 12 bp, Artificial Sequence
  Oligonucleotide primer for the detection of SNP TSC0004351
aattattataaa

SEQ ID NO: 276980 - DNA, 12 bp, Artificial Sequence
  Oligonucleotide primer for the detection of SNP TSC0004351
ttgtagaatgtt

SEQ ID NO: 276981 - DNA, 12 bp, Artificial Sequence
  Oligonucleotide primer for the detection of SNP TSC0004351
ctacaaaatact

SEQ ID NO: 276982 - DNA, 12 bp, Artificial Sequence
  Oligonucleotide primer for the detection of SNP TSC0004351
gattattatagg

SEQ ID NO: 276983 - DNA, 12 bp, Artificial Sequence
  Oligonucleotide primer for the detection of SNP TSC0004352
caattctacaaa

SEQ ID NO: 276984 - DNA, 12 bp, Artificial Sequence
  Oligonucleotide primer for the detection of SNP TSC0004352
aaattttgagga

SEQ ID NO: 276985 - DNA, 12 bp, Artificial Sequence
  Oligonucleotide primer for the detection of SNP TSC0004352
aaatttcgagga

SEQ ID NO: 276986 - DNA, 12 bp, Artificial Sequence
  Oligonucleotide primer for the detection of SNP TSC0004352
aaatctcaaaaa

SEQ ID NO: 276987 - DNA, 12 bp, Artificial Sequence
  Oligonukleotid-Primer
aaatctcgaaaa

SEQ ID NO: 276988 - DNA, 12 bp, Artificial Sequence
  Oligonucleotide primer for the detection of SNP TSC0004352
taattttgtaaa

SEQ ID NO: 276989 - DNA, 12 bp, Artificial Sequence
  Oligonucleotide primer for the detection of SNP TSC0004353
ataactaaacat

SEQ ID NO: 276990 - DNA, 12 bp, Artificial Sequence
  Oligonucleotide primer for the detection of SNP TSC0004353
aggtatgtgtta

SEQ ID NO: 276991 - DNA, 12 bp, Artificial Sequence
  Oligonucleotide primer for the detection of SNP TSC0004353
aggtacgtgtta

SEQ ID NO: 276992 - DNA, 12 bp, Artificial Sequence
  Oligonucleotide primer for the detection of SNP TSC0004353
aaacacatacca

SEQ ID NO: 276993 - DNA, 12 bp, Artificial Sequence
  Oligonucleotide primer for the detection of SNP TSC0004353
aaacacgtacca

SEQ ID NO: 276994 - DNA, 12 bp, Artificial Sequence
  Oligonucleotide primer for the detection of SNP TSC0004353
atagttgggtat

SEQ ID NO: 276995 - DNA, 12 bp, Artificial Sequence
  Oligonucleotide primer for the detection of SNP TSC0004354
ttaaactcctaa

SEQ ID NO: 276996 - DNA, 12 bp, Artificial Sequence
  Oligonucleotide primer for the detection of SNP TSC0004354
ggttggtaaatt

SEQ ID NO: 276997 - DNA, 12 bp, Artificial Sequence
  Oligonucleotide primer for the detection of SNP TSC0004354
aactaacaaatc

SEQ ID NO: 276998 - DNA, 12 bp, Artificial Sequence
  Oligonucleotide primer for the detection of SNP TSC0004354
ttgaatttttga

SEQ ID NO: 276999 - DNA, 12 bp, Artificial Sequence
  Oligonucleotide primer for the detection of SNP TSC0004355
ttgtggagtgtt

SEQ ID NO: 277000 - DNA, 12 bp, Artificial Sequence
  Oligonucleotide primer for the detection of SNP TSC0004355
tataaaatacta

SEQ ID NO: 277001 - DNA, 12 bp, Artificial Sequence
  Oligonucleotide primer for the detection of SNP TSC0004356
aatcaaaactac

SEQ ID NO: 277002 - DNA, 12 bp, Artificial Sequence
  Oligonucleotide primer for the detection of SNP TSC0004356
attaaaaattga

SEQ ID NO: 277003 - DNA, 12 bp, Artificial Sequence
  Oligonucleotide primer for the detection of SNP TSC0004356
attaaaaatcga

SEQ ID NO: 277004 - DNA, 12 bp, Artificial Sequence
  Oligonucleotide primer for the detection of SNP TSC0004357
caaaaacttcac

SEQ ID NO: 277005 - DNA, 12 bp, Artificial Sequence
  Oligonucleotide primer for the detection of SNP TSC0004357
ggaaataaaggt

SEQ ID NO: 277006 - DNA, 12 bp, Artificial Sequence
  Oligonucleotide primer for the detection of SNP TSC0004357
taaaaattttat

SEQ ID NO: 277007 - DNA, 12 bp, Artificial Sequence
  Oligonucleotide primer for the detection of SNP TSC0004358
aatcatcctttt

SEQ ID NO: 277008 - DNA, 12 bp, Artificial Sequence
  Oligonucleotide primer for the detection of SNP TSC0004358
tagaggaggttt

SEQ ID NO: 277009 - DNA, 12 bp, Artificial Sequence
  Oligonucleotide primer for the detection of SNP TSC0004358
caaaaaaaattc

SEQ ID NO: 277010 - DNA, 12 bp, Artificial Sequence
  Oligonucleotide primer for the detection of SNP TSC0004358
agttattttttt

SEQ ID NO: 277011 - DNA, 12 bp, Artificial Sequence
  Oligonucleotide primer for the detection of SNP TSC0004359
atttccccaaaa

SEQ ID NO: 277012 - DNA, 12 bp, Artificial Sequence
  Oligonucleotide primer for the detection of SNP TSC0004359
tttgtttattgt

SEQ ID NO: 277013 - DNA, 12 bp, Artificial Sequence
  Oligonucleotide primer for the detection of SNP TSC0004359
cctacttactac

SEQ ID NO: 277014 - DNA, 12 bp, Artificial Sequence
  Oligonucleotide primer for the detection of SNP TSC0004359
gtttttttaagg

SEQ ID NO: 277015 - DNA, 12 bp, Artificial Sequence
  Oligonucleotide primer for the detection of SNP TSC0004360
taaaccactaca

SEQ ID NO: 277016 - DNA, 12 bp, Artificial Sequence
  Oligonucleotide primer for the detection of SNP TSC0004360
taaaccactacg

SEQ ID NO: 277017 - DNA, 12 bp, Artificial Sequence
  Oligonucleotide primer for the detection of SNP TSC0004360
aaaattttggtt

SEQ ID NO: 277018 - DNA, 12 bp, Artificial Sequence
  Oligonucleotide primer for the detection of SNP TSC0004360
aaaattttaacc

SEQ ID NO: 277019 - DNA, 12 bp, Artificial Sequence
  Oligonucleotide primer for the detection of SNP TSC0004360
tgagttattgtg

SEQ ID NO: 277020 - DNA, 12 bp, Artificial Sequence
  Oligonucleotide primer for the detection of SNP TSC0004360
tgagttattgcg

SEQ ID NO: 277021 - DNA, 12 bp, Artificial Sequence
  Oligonucleotide primer for the detection of SNP TSC0004361
aataatttacta

SEQ ID NO: 277022 - DNA, 12 bp, Artificial Sequence
  Oligonucleotide primer for the detection of SNP TSC0004361
aggttgttaggt

SEQ ID NO: 277023 - DNA, 12 bp, Artificial Sequence
  Oligonucleotide primer for the detection of SNP TSC0004361
aaattattaaat

SEQ ID NO: 277024 - DNA, 12 bp, Artificial Sequence
  Oligonucleotide primer for the detection of SNP TSC0004361
tggtggtttgtt

SEQ ID NO: 277025 - DNA, 12 bp, Artificial Sequence
  Oligonucleotide primer for the detection of SNP TSC0004362
caaaacaccata

SEQ ID NO: 277026 - DNA, 12 bp, Artificial Sequence
  Oligonucleotide primer for the detection of SNP TSC0004362
gaggattttaat

SEQ ID NO: 277027 - DNA, 12 bp, Artificial Sequence
  Oligonucleotide primer for the detection of SNP TSC0004362
aaaactctaata

SEQ ID NO: 277028 - DNA, 12 bp, Artificial Sequence
  Oligonucleotide primer for the detection of SNP TSC0004362
tagggtattatg

SEQ ID NO: 277029 - DNA, 12 bp, Artificial Sequence
  Oligonucleotide primer for the detection of SNP TSC0004363
aattttataaag

SEQ ID NO: 277030 - DNA, 12 bp, Artificial Sequence
  Oligonucleotide primer for the detection of SNP TSC0004364
acatactacata

SEQ ID NO: 277031 - DNA, 12 bp, Artificial Sequence
  Oligonucleotide primer for the detection of SNP TSC0004364
acatactacgta

SEQ ID NO: 277032 - DNA, 12 bp, Artificial Sequence
  Oligonucleotide primer for the detection of SNP TSC0004364
acgtactacata

SEQ ID NO: 277033 - DNA, 12 bp, Artificial Sequence
  Oligonucleotide primer for the detection of SNP TSC0004364
acgtactacgta

SEQ ID NO: 277034 - DNA, 12 bp, Artificial Sequence
  Oligonucleotide primer for the detection of SNP TSC0004364
aatgagtaattt

SEQ ID NO: 277035 - DNA, 12 bp, Artificial Sequence
  Oligonucleotide primer for the detection of SNP TSC0004364
aataaacaattc

SEQ ID NO: 277036 - DNA, 12 bp, Artificial Sequence
  Oligonucleotide primer for the detection of SNP TSC0004364
atgtgttgtgtg

SEQ ID NO: 277037 - DNA, 12 bp, Artificial Sequence
  Oligonucleotide primer for the detection of SNP TSC0004364
acgtgttgtgtg

SEQ ID NO: 277038 - DNA, 12 bp, Artificial Sequence
  Oligonucleotide primer for the detection of SNP TSC0004364
atgtgttgcgtg

SEQ ID NO: 277039 - DNA, 12 bp, Artificial Sequence
  Oligonucleotide primer for the detection of SNP TSC0004364
acgtgttgcgtg

SEQ ID NO: 277040 - DNA, 12 bp, Artificial Sequence
  Oligonucleotide primer for the detection of SNP TSC0004365
tcccatcactcc

SEQ ID NO: 277041 - DNA, 12 bp, Artificial Sequence
  Oligonucleotide primer for the detection of SNP TSC0004365
tcccgtcactcc

SEQ ID NO: 277042 - DNA, 12 bp, Artificial Sequence
  Oligonucleotide primer for the detection of SNP TSC0004365
gaattagagtag

SEQ ID NO: 277043 - DNA, 12 bp, Artificial Sequence
  Oligonucleotide primer for the detection of SNP TSC0004365
ttttgttatttt

SEQ ID NO: 277044 - DNA, 12 bp, Artificial Sequence
  Oligonucleotide primer for the detection of SNP TSC0004365
tttcgttatttt

SEQ ID NO: 277045 - DNA, 12 bp, Artificial Sequence
  Oligonucleotide primer for the detection of SNP TSC0004366
taatttatacct

SEQ ID NO: 277046 - DNA, 12 bp, Artificial Sequence
  Oligonucleotide primer for the detection of SNP TSC0004366
tttaggattgaa

SEQ ID NO: 277047 - DNA, 12 bp, Artificial Sequence
  Oligonucleotide primer for the detection of SNP TSC0004367
taactacctact

SEQ ID NO: 277048 - DNA, 12 bp, Artificial Sequence
  Oligonucleotide primer for the detection of SNP TSC0004368
aatttaaccttc

SEQ ID NO: 277049 - DNA, 12 bp, Artificial Sequence
  Oligonucleotide primer for the detection of SNP TSC0004368
tggagagtaata

SEQ ID NO: 277050 - DNA, 12 bp, Artificial Sequence
  Oligonucleotide primer for the detection of SNP TSC0004369
acattaaaaaaa

SEQ ID NO: 277051 - DNA, 12 bp, Artificial Sequence
  Oligonucleotide primer for the detection of SNP TSC0004369
acgttaaaaaaa

SEQ ID NO: 277052 - DNA, 12 bp, Artificial Sequence
  Oligonucleotide primer for the detection of SNP TSC0004369
ttttattgtaat

SEQ ID NO: 277053 - DNA, 12 bp, Artificial Sequence
  Oligonucleotide primer for the detection of SNP TSC0004369
ttctattacaat

SEQ ID NO: 277054 - DNA, 12 bp, Artificial Sequence
  Oligonucleotide primer for the detection of SNP TSC0004369
gtgttggggaaa

SEQ ID NO: 277055 - DNA, 12 bp, Artificial Sequence
  Oligonucleotide primer for the detection of SNP TSC0004369
gcgttggggaaa

SEQ ID NO: 277056 - DNA, 12 bp, Artificial Sequence
  Oligonukleotid-Primer
acaaacaaaaac

SEQ ID NO: 277057 - DNA, 12 bp, Artificial Sequence
  Oligonucleotide primer for the detection of SNP TSC0004370
attggagttaga

SEQ ID NO: 277058 - DNA, 12 bp, Artificial Sequence
  Oligonucleotide primer for the detection of SNP TSC0004370
actaaaattaaa

SEQ ID NO: 277059 - DNA, 12 bp, Artificial Sequence
  Oligonucleotide primer for the detection of SNP TSC0004370
gtaaataaaggt

SEQ ID NO: 277060 - DNA, 12 bp, Artificial Sequence
  Oligonucleotide primer for the detection of SNP TSC0004371
catcaaaaatct

SEQ ID NO: 277061 - DNA, 12 bp, Artificial Sequence
  Oligonucleotide primer for the detection of SNP TSC0004371
cgtcaaaaatct

SEQ ID NO: 277062 - DNA, 12 bp, Artificial Sequence
  Oligonucleotide primer for the detection of SNP TSC0004371
tattttaagttg

SEQ ID NO: 277063 - DNA, 12 bp, Artificial Sequence
  Oligonucleotide primer for the detection of SNP TSC0004372
tccccaaaccta

SEQ ID NO: 277064 - DNA, 12 bp, Artificial Sequence
  Oligonucleotide primer for the detection of SNP TSC0004372
ttttttaaggtt

SEQ ID NO: 277065 - DNA, 12 bp, Artificial Sequence
  Oligonucleotide primer for the detection of SNP TSC0004372
tcccaaaactaa

SEQ ID NO: 277066 - DNA, 12 bp, Artificial Sequence
  Oligonucleotide primer for the detection of SNP TSC0004372
tttttaggtttg

SEQ ID NO: 277067 - DNA, 12 bp, Artificial Sequence
  Oligonucleotide primer for the detection of SNP TSC0004373
taatacaataca

SEQ ID NO: 277068 - DNA, 12 bp, Artificial Sequence
  Oligonucleotide primer for the detection of SNP TSC0004373
gtattaaatttt

SEQ ID NO: 277069 - DNA, 12 bp, Artificial Sequence
  Oligonucleotide primer for the detection of SNP TSC0004373
tatattaaattc

SEQ ID NO: 277070 - DNA, 12 bp, Artificial Sequence
  Oligonucleotide primer for the detection of SNP TSC0004373
atgatataatat

SEQ ID NO: 277071 - DNA, 12 bp, Artificial Sequence
  Oligonucleotide primer for the detection of SNP TSC0004374
aaaataaaaaac

SEQ ID NO: 277072 - DNA, 12 bp, Artificial Sequence
  Oligonucleotide primer for the detection of SNP TSC0004374
tattaggtaaga

SEQ ID NO: 277073 - DNA, 12 bp, Artificial Sequence
  Oligonucleotide primer for the detection of SNP TSC0004375
aattaaattttt

SEQ ID NO: 277074 - DNA, 12 bp, Artificial Sequence
  Oligonucleotide primer for the detection of SNP TSC0004375
tatattgtggaa

SEQ ID NO: 277075 - DNA, 12 bp, Artificial Sequence
  Oligonucleotide primer for the detection of SNP TSC0004376
catattccattt

SEQ ID NO: 277076 - DNA, 12 bp, Artificial Sequence
  Oligonucleotide primer for the detection of SNP TSC0004376
aggggataataa

SEQ ID NO: 277077 - DNA, 12 bp, Artificial Sequence
  Oligonucleotide primer for the detection of SNP TSC0004377
tcattccaactc

SEQ ID NO: 277078 - DNA, 12 bp, Artificial Sequence
  Oligonucleotide primer for the detection of SNP TSC0004377
tcgttccaactc

SEQ ID NO: 277079 - DNA, 12 bp, Artificial Sequence
  Oligonucleotide primer for the detection of SNP TSC0004377
tttattgattaa

SEQ ID NO: 277080 - DNA, 12 bp, Artificial Sequence
  Oligonucleotide primer for the detection of SNP TSC0004378
cccaaaattcat

SEQ ID NO: 277081 - DNA, 12 bp, Artificial Sequence
  Oligonucleotide primer for the detection of SNP TSC0004378
tgtaagttttag

SEQ ID NO: 277082 - DNA, 12 bp, Artificial Sequence
  Oligonucleotide primer for the detection of SNP TSC0004378
tacaaacttcaa

SEQ ID NO: 277083 - DNA, 12 bp, Artificial Sequence
  Oligonucleotide primer for the detection of SNP TSC0004378
tttaaaatttat

SEQ ID NO: 277084 - DNA, 12 bp, Artificial Sequence
  Oligonucleotide primer for the detection of SNP TSC0004380
accaccccaaac

SEQ ID NO: 277085 - DNA, 12 bp, Artificial Sequence
  Oligonucleotide primer for the detection of SNP TSC0004380
ttttaataagga

SEQ ID NO: 277086 - DNA, 12 bp, Artificial Sequence
  Oligonucleotide primer for the detection of SNP TSC0004380
cttcaacaaaaa

SEQ ID NO: 277087 - DNA, 12 bp, Artificial Sequence
  Oligonucleotide primer for the detection of SNP TSC0004380
attattttaaat

SEQ ID NO: 277088 - DNA, 12 bp, Artificial Sequence
  Oligonucleotide primer for the detection of SNP TSC0004381
actcaacttccc

SEQ ID NO: 277089 - DNA, 12 bp, Artificial Sequence
  Oligonucleotide primer for the detection of SNP TSC0004381
tgagtggaagtg

SEQ ID NO: 277090 - DNA, 12 bp, Artificial Sequence
  Oligonucleotide primer for the detection of SNP TSC0004381
tgagcggaagtg

SEQ ID NO: 277091 - DNA, 12 bp, Artificial Sequence
  Oligonucleotide primer for the detection of SNP TSC0004382
atacctccccta

SEQ ID NO: 277092 - DNA, 12 bp, Artificial Sequence
  Oligonucleotide primer for the detection of SNP TSC0004382
tgtttgggatga

SEQ ID NO: 277093 - DNA, 12 bp, Artificial Sequence
  Oligonucleotide primer for the detection of SNP TSC0004382
cctaaaataaaa

SEQ ID NO: 277094 - DNA, 12 bp, Artificial Sequence
  Oligonucleotide primer for the detection of SNP TSC0004382
gtgtttttttta

SEQ ID NO: 277095 - DNA, 12 bp, Artificial Sequence
  Oligonucleotide primer for the detection of SNP TSC0004383
attcccttacta

SEQ ID NO: 277096 - DNA, 12 bp, Artificial Sequence
  Oligonucleotide primer for the detection of SNP TSC0004383
gtagagtgatgt

SEQ ID NO: 277097 - DNA, 12 bp, Artificial Sequence
  Oligonucleotide primer for the detection of SNP TSC0004383
gtagagtgacgt

SEQ ID NO: 277098 - DNA, 12 bp, Artificial Sequence
  Oligonucleotide primer for the detection of SNP TSC0004383
acaaaataacac

SEQ ID NO: 277099 - DNA, 12 bp, Artificial Sequence
  Oligonucleotide primer for the detection of SNP TSC0004383
acaaaataacgc

SEQ ID NO: 277100 - DNA, 12 bp, Artificial Sequence
  Oligonucleotide primer for the detection of SNP TSC0004383
gtttttttattg

SEQ ID NO: 277101 - DNA, 12 bp, Artificial Sequence
  Oligonucleotide primer for the detection of SNP TSC0004384
tcactcctctct

SEQ ID NO: 277102 - DNA, 12 bp, Artificial Sequence
  Oligonucleotide primer for the detection of SNP TSC0004384
aagggattgtta

SEQ ID NO: 277103 - DNA, 12 bp, Artificial Sequence
  Oligonucleotide primer for the detection of SNP TSC0004384
aaaaaattacca

SEQ ID NO: 277104 - DNA, 12 bp, Artificial Sequence
  Oligonucleotide primer for the detection of SNP TSC0004385
aaaataaacata

SEQ ID NO: 277105 - DNA, 12 bp, Artificial Sequence
  Oligonucleotide primer for the detection of SNP TSC0004385
aagtaagatttt

SEQ ID NO: 277106 - DNA, 12 bp, Artificial Sequence
  Oligonucleotide primer for the detection of SNP TSC0004385
aaacaaaactct

SEQ ID NO: 277107 - DNA, 12 bp, Artificial Sequence
  Oligonucleotide primer for the detection of SNP TSC0004385
gagaataagtat

SEQ ID NO: 277108 - DNA, 12 bp, Artificial Sequence
  Oligonucleotide primer for the detection of SNP TSC0004386
tttggtttattg

SEQ ID NO: 277109 - DNA, 12 bp, Artificial Sequence
  Oligonucleotide primer for the detection of SNP TSC0004386
ttcggtttattg

SEQ ID NO: 277110 - DNA, 12 bp, Artificial Sequence
  Oligonucleotide primer for the detection of SNP TSC0004387
aacaaacatatt

SEQ ID NO: 277111 - DNA, 12 bp, Artificial Sequence
  Oligonucleotide primer for the detection of SNP TSC0004387
taatagaggtta

SEQ ID NO: 277112 - DNA, 12 bp, Artificial Sequence
  Oligonucleotide primer for the detection of SNP TSC0004388
acaaacttaaaa

SEQ ID NO: 277113 - DNA, 12 bp, Artificial Sequence
  Oligonucleotide primer for the detection of SNP TSC0004388
ttaaattagtta

SEQ ID NO: 277114 - DNA, 12 bp, Artificial Sequence
  Oligonucleotide primer for the detection of SNP TSC0004388
tcaaactaacca

SEQ ID NO: 277115 - DNA, 12 bp, Artificial Sequence
  Oligonucleotide primer for the detection of SNP TSC0004388
gtaggtttagga

SEQ ID NO: 277116 - DNA, 12 bp, Artificial Sequence
  Oligonucleotide primer for the detection of SNP TSC0004389
acctcatatccc

SEQ ID NO: 277117 - DNA, 12 bp, Artificial Sequence
  Oligonucleotide primer for the detection of SNP TSC0004389
tggatttttaaa

SEQ ID NO: 277118 - DNA, 12 bp, Artificial Sequence
  Oligonucleotide primer for the detection of SNP TSC0004389
cggatttttaaa

SEQ ID NO: 277119 - DNA, 12 bp, Artificial Sequence
  Oligonucleotide primer for the detection of SNP TSC0004390
tcaccaaattat

SEQ ID NO: 277120 - DNA, 12 bp, Artificial Sequence
  Oligonucleotide primer for the detection of SNP TSC0004390
tttattgtatat

SEQ ID NO: 277121 - DNA, 12 bp, Artificial Sequence
  Oligonucleotide primer for the detection of SNP TSC0004390
cccattatacat

SEQ ID NO: 277122 - DNA, 12 bp, Artificial Sequence
  Oligonucleotide primer for the detection of SNP TSC0004390
ttattagattat

SEQ ID NO: 277123 - DNA, 12 bp, Artificial Sequence
  Oligonucleotide primer for the detection of SNP TSC0004391
aaaaaacaaaca

SEQ ID NO: 277124 - DNA, 12 bp, Artificial Sequence
  Oligonucleotide primer for the detection of SNP TSC0004391
aaaaaacaaacg

SEQ ID NO: 277125 - DNA, 12 bp, Artificial Sequence
  Oligonucleotide primer for the detection of SNP TSC0004391
aaaaaacgaaca

SEQ ID NO: 277126 - DNA, 12 bp, Artificial Sequence
  Oligonucleotide primer for the detection of SNP TSC0004391
aaaaaacgaacg

SEQ ID NO: 277127 - DNA, 12 bp, Artificial Sequence
  Oligonucleotide primer for the detection of SNP TSC0004391
cccctttccaaa

SEQ ID NO: 277128 - DNA, 12 bp, Artificial Sequence
  Oligonucleotide primer for the detection of SNP TSC0004391
ggggatggatgt

SEQ ID NO: 277129 - DNA, 12 bp, Artificial Sequence
  Oligonukleotid-Primer
ggggacggatgt

SEQ ID NO: 277130 - DNA, 12 bp, Artificial Sequence
  Oligonucleotide primer for the detection of SNP TSC0004391
ggggatggacgt

SEQ ID NO: 277131 - DNA, 12 bp, Artificial Sequence
  Oligonucleotide primer for the detection of SNP TSC0004391
ggggacggacgt

SEQ ID NO: 277132 - DNA, 12 bp, Artificial Sequence
  Oligonucleotide primer for the detection of SNP TSC0004392
aaaaatatattt

SEQ ID NO: 277133 - DNA, 12 bp, Artificial Sequence
  Oligonucleotide primer for the detection of SNP TSC0004392
ttatattgtatg

SEQ ID NO: 277134 - DNA, 12 bp, Artificial Sequence
  Oligonucleotide primer for the detection of SNP TSC0004393
actataaaaaat

SEQ ID NO: 277135 - DNA, 12 bp, Artificial Sequence
  Oligonucleotide primer for the detection of SNP TSC0004393
ggttggtgtgta

SEQ ID NO: 277136 - DNA, 12 bp, Artificial Sequence
  Oligonucleotide primer for the detection of SNP TSC0004393
ggttggcgtgta

SEQ ID NO: 277137 - DNA, 12 bp, Artificial Sequence
  Oligonucleotide primer for the detection of SNP TSC0004393
ggttggtgcgta

SEQ ID NO: 277138 - DNA, 12 bp, Artificial Sequence
  Oligonucleotide primer for the detection of SNP TSC0004393
ggttggcgcgta

SEQ ID NO: 277139 - DNA, 12 bp, Artificial Sequence
  Oligonucleotide primer for the detection of SNP TSC0004393
aactaacacata

SEQ ID NO: 277140 - DNA, 12 bp, Artificial Sequence
  Oligonucleotide primer for the detection of SNP TSC0004393
aactaacacgta

SEQ ID NO: 277141 - DNA, 12 bp, Artificial Sequence
  Oligonucleotide primer for the detection of SNP TSC0004393
aactaacgcata

SEQ ID NO: 277142 - DNA, 12 bp, Artificial Sequence
  Oligonucleotide primer for the detection of SNP TSC0004393
aactaacgcgta

SEQ ID NO: 277143 - DNA, 12 bp, Artificial Sequence
  Oligonucleotide primer for the detection of SNP TSC0004393
gttgtggggggt

SEQ ID NO: 277144 - DNA, 12 bp, Artificial Sequence
  Oligonucleotide primer for the detection of SNP TSC0004394
aatcaaatactc

SEQ ID NO: 277145 - DNA, 12 bp, Artificial Sequence
  Oligonucleotide primer for the detection of SNP TSC0004394
ttgggttttaga

SEQ ID NO: 277146 - DNA, 12 bp, Artificial Sequence
  Oligonucleotide primer for the detection of SNP TSC0004395
aaaaatacacat

SEQ ID NO: 277147 - DNA, 12 bp, Artificial Sequence
  Oligonucleotide primer for the detection of SNP TSC0004395
aaaaatacacgt

SEQ ID NO: 277148 - DNA, 12 bp, Artificial Sequence
  Oligonucleotide primer for the detection of SNP TSC0004395
agttttttattg

SEQ ID NO: 277149 - DNA, 12 bp, Artificial Sequence
  Oligonucleotide primer for the detection of SNP TSC0004396
ctcatccccacc

SEQ ID NO: 277150 - DNA, 12 bp, Artificial Sequence
  Oligonucleotide primer for the detection of SNP TSC0004396
tggttgagaagg

SEQ ID NO: 277151 - DNA, 12 bp, Artificial Sequence
  Oligonucleotide primer for the detection of SNP TSC0004397
taatcaaatact

SEQ ID NO: 277152 - DNA, 12 bp, Artificial Sequence
  Oligonucleotide primer for the detection of SNP TSC0004397
tgggttttagag

SEQ ID NO: 277153 - DNA, 12 bp, Artificial Sequence
  Oligonucleotide primer for the detection of SNP TSC0004397
taaactccaaaa

SEQ ID NO: 277154 - DNA, 12 bp, Artificial Sequence
  Oligonucleotide primer for the detection of SNP TSC0004397
tggttaagtgtt

SEQ ID NO: 277155 - DNA, 12 bp, Artificial Sequence
  Oligonucleotide primer for the detection of SNP TSC0004398
taccccaaatcc

SEQ ID NO: 277156 - DNA, 12 bp, Artificial Sequence
  Oligonucleotide primer for the detection of SNP TSC0004398
ataattttttta

SEQ ID NO: 277157 - DNA, 12 bp, Artificial Sequence
  Oligonucleotide primer for the detection of SNP TSC0004399
aaacaaatacta

SEQ ID NO: 277158 - DNA, 12 bp, Artificial Sequence
  Oligonucleotide primer for the detection of SNP TSC0004399
ggggatatatgt

SEQ ID NO: 277159 - DNA, 12 bp, Artificial Sequence
  Oligonucleotide primer for the detection of SNP TSC0004399
ggggatatacgt

SEQ ID NO: 277160 - DNA, 12 bp, Artificial Sequence
  Oligonucleotide primer for the detection of SNP TSC0004399
aaaaacacacac

SEQ ID NO: 277161 - DNA, 12 bp, Artificial Sequence
  Oligonucleotide primer for the detection of SNP TSC0004399
aaaaacacacgc

SEQ ID NO: 277162 - DNA, 12 bp, Artificial Sequence
  Oligonucleotide primer for the detection of SNP TSC0004399
aggtaggtgttg

SEQ ID NO: 277163 - DNA, 12 bp, Artificial Sequence
  Oligonucleotide primer for the detection of SNP TSC0004400
caaccacacgca

SEQ ID NO: 277164 - DNA, 12 bp, Artificial Sequence
  Oligonucleotide primer for the detection of SNP TSC0004400
caaccacgcaca

SEQ ID NO: 277165 - DNA, 12 bp, Artificial Sequence
  Oligonucleotide primer for the detection of SNP TSC0004400
cgaccacacaca

SEQ ID NO: 277166 - DNA, 12 bp, Artificial Sequence
  Oligonucleotide primer for the detection of SNP TSC0004400
caaccacacgcg

SEQ ID NO: 277167 - DNA, 12 bp, Artificial Sequence
  Oligonucleotide primer for the detection of SNP TSC0004400
caaccacgcacg

SEQ ID NO: 277168 - DNA, 12 bp, Artificial Sequence
  Oligonucleotide primer for the detection of SNP TSC0004400
cgaccacacacg

SEQ ID NO: 277169 - DNA, 12 bp, Artificial Sequence
  Oligonucleotide primer for the detection of SNP TSC0004400
caaccacgcgca

SEQ ID NO: 277170 - DNA, 12 bp, Artificial Sequence
  Oligonucleotide primer for the detection of SNP TSC0004400
cgaccacacgca

SEQ ID NO: 277171 - DNA, 12 bp, Artificial Sequence
  Oligonucleotide primer for the detection of SNP TSC0004400
cgaccacgcaca

SEQ ID NO: 277172 - DNA, 12 bp, Artificial Sequence
  Oligonucleotide primer for the detection of SNP TSC0004400
caaccacgcgcg

SEQ ID NO: 277173 - DNA, 12 bp, Artificial Sequence
  Oligonucleotide primer for the detection of SNP TSC0004400
cgaccacacgcg

SEQ ID NO: 277174 - DNA, 12 bp, Artificial Sequence
  Oligonucleotide primer for the detection of SNP TSC0004400
cgaccacgcacg

SEQ ID NO: 277175 - DNA, 12 bp, Artificial Sequence
  Oligonucleotide primer for the detection of SNP TSC0004400
cgaccacgcgca

SEQ ID NO: 277176 - DNA, 12 bp, Artificial Sequence
  Oligonucleotide primer for the detection of SNP TSC0004400
cgaccacgcgcg

SEQ ID NO: 277177 - DNA, 12 bp, Artificial Sequence
  Oligonucleotide primer for the detection of SNP TSC0004400
tagttagtttta

SEQ ID NO: 277178 - DNA, 12 bp, Artificial Sequence
  Oligonucleotide primer for the detection of SNP TSC0004400
aaccaactctaa

SEQ ID NO: 277179 - DNA, 12 bp, Artificial Sequence
  Oligonucleotide primer for the detection of SNP TSC0004400
gttatgtgtgtt

SEQ ID NO: 277180 - DNA, 12 bp, Artificial Sequence
  Oligonucleotide primer for the detection of SNP TSC0004400
gttacgtgtgtt

SEQ ID NO: 277181 - DNA, 12 bp, Artificial Sequence
  Oligonucleotide primer for the detection of SNP TSC0004400
gttatgcgtgtt

SEQ ID NO: 277182 - DNA, 12 bp, Artificial Sequence
  Oligonucleotide primer for the detection of SNP TSC0004400
gttatgtgcgtt

SEQ ID NO: 277183 - DNA, 12 bp, Artificial Sequence
  Oligonucleotide primer for the detection of SNP TSC0004400
gttacgcgtgtt

SEQ ID NO: 277184 - DNA, 12 bp, Artificial Sequence
  Oligonucleotide primer for the detection of SNP TSC0004400
gttacgtgcgtt

SEQ ID NO: 277185 - DNA, 12 bp, Artificial Sequence
  Oligonucleotide primer for the detection of SNP TSC0004400
gttatgcgcgtt

SEQ ID NO: 277186 - DNA, 12 bp, Artificial Sequence
  Oligonucleotide primer for the detection of SNP TSC0004400
gttacgcgcgtt

SEQ ID NO: 277187 - DNA, 12 bp, Artificial Sequence
  Oligonucleotide primer for the detection of SNP TSC0004400
gttatgtgtgtc

SEQ ID NO: 277188 - DNA, 12 bp, Artificial Sequence
  Oligonucleotide primer for the detection of SNP TSC0004400
gttacgtgtgtc

SEQ ID NO: 277189 - DNA, 12 bp, Artificial Sequence
  Oligonucleotide primer for the detection of SNP TSC0004400
gttatgcgtgtc

SEQ ID NO: 277190 - DNA, 12 bp, Artificial Sequence
  Oligonucleotide primer for the detection of SNP TSC0004400
gttatgtgcgtc

SEQ ID NO: 277191 - DNA, 12 bp, Artificial Sequence
  Oligonucleotide primer for the detection of SNP TSC0004400
gttacgcgtgtc

SEQ ID NO: 277192 - DNA, 12 bp, Artificial Sequence
  Oligonucleotide primer for the detection of SNP TSC0004400
gttacgtgcgtc

SEQ ID NO: 277193 - DNA, 12 bp, Artificial Sequence
  Oligonucleotide primer for the detection of SNP TSC0004400
gttatgcgcgtc

SEQ ID NO: 277194 - DNA, 12 bp, Artificial Sequence
  Oligonucleotide primer for the detection of SNP TSC0004400
gttacgcgcgtc

SEQ ID NO: 277195 - DNA, 12 bp, Artificial Sequence
  Oligonucleotide primer for the detection of SNP TSC0004401
ataatacctaat

SEQ ID NO: 277196 - DNA, 12 bp, Artificial Sequence
  Oligonucleotide primer for the detection of SNP TSC0004401
ttttattaggta

SEQ ID NO: 277197 - DNA, 12 bp, Artificial Sequence
  Oligonucleotide primer for the detection of SNP TSC0004402
aaccctaatacc

SEQ ID NO: 277198 - DNA, 12 bp, Artificial Sequence
  Oligonucleotide primer for the detection of SNP TSC0004402
taatggtagttg

SEQ ID NO: 277199 - DNA, 12 bp, Artificial Sequence
  Oligonucleotide primer for the detection of SNP TSC0004403
ctacccaaatct

SEQ ID NO: 277200 - DNA, 12 bp, Artificial Sequence
  Oligonucleotide primer for the detection of SNP TSC0004403
tataatttaata

SEQ ID NO: 277201 - DNA, 12 bp, Artificial Sequence
  Oligonucleotide primer for the detection of SNP TSC0004403
tacaatttaaca

SEQ ID NO: 277202 - DNA, 12 bp, Artificial Sequence
  Oligonucleotide primer for the detection of SNP TSC0004403
tgtttaaatttt

SEQ ID NO: 277203 - DNA, 12 bp, Artificial Sequence
  Oligonucleotide primer for the detection of SNP TSC0004405
atataatatata

SEQ ID NO: 277204 - DNA, 12 bp, Artificial Sequence
  Oligonucleotide primer for the detection of SNP TSC0004405
gtataatatata

SEQ ID NO: 277205 - DNA, 12 bp, Artificial Sequence
  Oligonucleotide primer for the detection of SNP TSC0004405
atttatatatat

SEQ ID NO: 277206 - DNA, 12 bp, Artificial Sequence
  Oligonucleotide primer for the detection of SNP TSC0004405
attcacacatat

SEQ ID NO: 277207 - DNA, 12 bp, Artificial Sequence
  Oligonucleotide primer for the detection of SNP TSC0004405
tgtataatgtat

SEQ ID NO: 277208 - DNA, 12 bp, Artificial Sequence
  Oligonucleotide primer for the detection of SNP TSC0004405
cgtataatgtat

SEQ ID NO: 277209 - DNA, 12 bp, Artificial Sequence
  Oligonucleotide primer for the detection of SNP TSC0004406
actaatatttat

SEQ ID NO: 277210 - DNA, 12 bp, Artificial Sequence
  Oligonucleotide primer for the detection of SNP TSC0004406
aaagtaagattg

SEQ ID NO: 277211 - DNA, 12 bp, Artificial Sequence
  Oligonucleotide primer for the detection of SNP TSC0004407
ataatttaaatt

SEQ ID NO: 277212 - DNA, 12 bp, Artificial Sequence
  Oligonucleotide primer for the detection of SNP TSC0004407
taattaatgtta

SEQ ID NO: 277213 - DNA, 12 bp, Artificial Sequence
  Oligonucleotide primer for the detection of SNP TSC0004408
aatcccaactac

SEQ ID NO: 277214 - DNA, 12 bp, Artificial Sequence
  Oligonucleotide primer for the detection of SNP TSC0004408
aaatttggttaa

SEQ ID NO: 277215 - DNA, 12 bp, Artificial Sequence
  Oligonucleotide primer for the detection of SNP TSC0004408
aaattcggttaa

SEQ ID NO: 277216 - DNA, 12 bp, Artificial Sequence
  Oligonucleotide primer for the detection of SNP TSC0004409
actaaaactcta

SEQ ID NO: 277217 - DNA, 12 bp, Artificial Sequence
  Oligonucleotide primer for the detection of SNP TSC0004409
ttaatgtataat

SEQ ID NO: 277218 - DNA, 12 bp, Artificial Sequence
  Oligonucleotide primer for the detection of SNP TSC0004409
ttaatacacaat

SEQ ID NO: 277219 - DNA, 12 bp, Artificial Sequence
  Oligonucleotide primer for the detection of SNP TSC0004409
attgaaattttg

SEQ ID NO: 277220 - DNA, 12 bp, Artificial Sequence
  Oligonucleotide primer for the detection of SNP TSC0004410
tattatttaata

SEQ ID NO: 277221 - DNA, 12 bp, Artificial Sequence
  Oligonucleotide primer for the detection of SNP TSC0004411
ccttcatcaact

SEQ ID NO: 277222 - DNA, 12 bp, Artificial Sequence
  Oligonucleotide primer for the detection of SNP TSC0004411
ccttcatcgact

SEQ ID NO: 277223 - DNA, 12 bp, Artificial Sequence
  Oligonucleotide primer for the detection of SNP TSC0004411
attttgaatgtg

SEQ ID NO: 277224 - DNA, 12 bp, Artificial Sequence
  Oligonucleotide primer for the detection of SNP TSC0004411
attttgaacgtg

SEQ ID NO: 277225 - DNA, 12 bp, Artificial Sequence
  Oligonucleotide primer for the detection of SNP TSC0004412
taaaatttaaat

SEQ ID NO: 277226 - DNA, 12 bp, Artificial Sequence
  Oligonucleotide primer for the detection of SNP TSC0004412
ggtagggataaa

SEQ ID NO: 277227 - DNA, 12 bp, Artificial Sequence
  Oligonucleotide primer for the detection of SNP TSC0004412
aacaaaaataaa

SEQ ID NO: 277228 - DNA, 12 bp, Artificial Sequence
  Oligonucleotide primer for the detection of SNP TSC0004412
tagagtttggat

SEQ ID NO: 277229 - DNA, 12 bp, Artificial Sequence
  Oligonucleotide primer for the detection of SNP TSC0004413
gttggtttagaa

SEQ ID NO: 277230 - DNA, 12 bp, Artificial Sequence
  Oligonucleotide primer for the detection of SNP TSC0004414
cacaaacttaca

SEQ ID NO: 277231 - DNA, 12 bp, Artificial Sequence
  Oligonucleotide primer for the detection of SNP TSC0004414
cgcaaacttaca

SEQ ID NO: 277232 - DNA, 12 bp, Artificial Sequence
  Oligonucleotide primer for the detection of SNP TSC0004414
ttgatttgtagg

SEQ ID NO: 277233 - DNA, 12 bp, Artificial Sequence
  Oligonucleotide primer for the detection of SNP TSC0004414
tcgatttgtagg

SEQ ID NO: 277234 - DNA, 12 bp, Artificial Sequence
  Oligonucleotide primer for the detection of SNP TSC0004414
tcaacctacaaa

SEQ ID NO: 277235 - DNA, 12 bp, Artificial Sequence
  Oligonucleotide primer for the detection of SNP TSC0004414
tcgacctacaaa

SEQ ID NO: 277236 - DNA, 12 bp, Artificial Sequence
  Oligonucleotide primer for the detection of SNP TSC0004414
gtaagtttgtat

SEQ ID NO: 277237 - DNA, 12 bp, Artificial Sequence
  Oligonucleotide primer for the detection of SNP TSC0004415
aacaattctcct

SEQ ID NO: 277238 - DNA, 12 bp, Artificial Sequence
  Oligonucleotide primer for the detection of SNP TSC0004415
aacgattctcct

SEQ ID NO: 277239 - DNA, 12 bp, Artificial Sequence
  Oligonucleotide primer for the detection of SNP TSC0004415
aggaggttgagg

SEQ ID NO: 277240 - DNA, 12 bp, Artificial Sequence
  Oligonucleotide primer for the detection of SNP TSC0004416
aaaatataaaac

SEQ ID NO: 277241 - DNA, 12 bp, Artificial Sequence
  Oligonucleotide primer for the detection of SNP TSC0004416
aatgtaaagttt

SEQ ID NO: 277242 - DNA, 12 bp, Artificial Sequence
  Oligonucleotide primer for the detection of SNP TSC0004417
aacacaaactta

SEQ ID NO: 277243 - DNA, 12 bp, Artificial Sequence
  Oligonucleotide primer for the detection of SNP TSC0004417
aacgcaaactta

SEQ ID NO: 277244 - DNA, 12 bp, Artificial Sequence
  Oligonucleotide primer for the detection of SNP TSC0004417
ggtgtaagtttg

SEQ ID NO: 277245 - DNA, 12 bp, Artificial Sequence
  Oligonucleotide primer for the detection of SNP TSC0004417
ggcgtaagtttg

SEQ ID NO: 277246 - DNA, 12 bp, Artificial Sequence
  Oligonucleotide primer for the detection of SNP TSC0004418
aactataaacat

SEQ ID NO: 277247 - DNA, 12 bp, Artificial Sequence
  Oligonukleotid-Primer
gttttgttttag

SEQ ID NO: 277248 - DNA, 12 bp, Artificial Sequence
  Oligonucleotide primer for the detection of SNP TSC0004419
tatttacttatt

SEQ ID NO: 277249 - DNA, 12 bp, Artificial Sequence
  Oligonucleotide primer for the detection of SNP TSC0004419
ttgttggtattt

SEQ ID NO: 277250 - DNA, 12 bp, Artificial Sequence
  Oligonucleotide primer for the detection of SNP TSC0004419
ttcctactaaca

SEQ ID NO: 277251 - DNA, 12 bp, Artificial Sequence
  Oligonucleotide primer for the detection of SNP TSC0004419
tatttgtttatt

SEQ ID NO: 277252 - DNA, 12 bp, Artificial Sequence
  Oligonucleotide primer for the detection of SNP TSC0004420
ttaaaaaatcat

SEQ ID NO: 277253 - DNA, 12 bp, Artificial Sequence
  Oligonucleotide primer for the detection of SNP TSC0004420
tgggtttttttt

SEQ ID NO: 277254 - DNA, 12 bp, Artificial Sequence
  Oligonucleotide primer for the detection of SNP TSC0004420
ttaaaaaattat

SEQ ID NO: 277255 - DNA, 12 bp, Artificial Sequence
  Oligonucleotide primer for the detection of SNP TSC0004421
ataaaaataatc

SEQ ID NO: 277256 - DNA, 12 bp, Artificial Sequence
  Oligonucleotide primer for the detection of SNP TSC0004421
gtttatgtatag

SEQ ID NO: 277257 - DNA, 12 bp, Artificial Sequence
  Oligonucleotide primer for the detection of SNP TSC0004422
acaacaactccc

SEQ ID NO: 277258 - DNA, 12 bp, Artificial Sequence
  Oligonucleotide primer for the detection of SNP TSC0004422
acgacaactccc

SEQ ID NO: 277259 - DNA, 12 bp, Artificial Sequence
  Oligonucleotide primer for the detection of SNP TSC0004422
tagatgttattg

SEQ ID NO: 277260 - DNA, 12 bp, Artificial Sequence
  Oligonucleotide primer for the detection of SNP TSC0004422
tagatgttatcg

SEQ ID NO: 277261 - DNA, 12 bp, Artificial Sequence
  Oligonucleotide primer for the detection of SNP TSC0004423
taaatcaaaaat

SEQ ID NO: 277262 - DNA, 12 bp, Artificial Sequence
  Oligonucleotide primer for the detection of SNP TSC0004423
ttggttttggtt

SEQ ID NO: 277263 - DNA, 12 bp, Artificial Sequence
  Oligonucleotide primer for the detection of SNP TSC0004423
ttggtttcggtt

SEQ ID NO: 277264 - DNA, 12 bp, Artificial Sequence
  Oligonucleotide primer for the detection of SNP TSC0004424
aaaataattcat

SEQ ID NO: 277265 - DNA, 12 bp, Artificial Sequence
  Oligonucleotide primer for the detection of SNP TSC0004424
atttagtgtaaa

SEQ ID NO: 277266 - DNA, 12 bp, Artificial Sequence
  Oligonucleotide primer for the detection of SNP TSC0004425
actcacaaaata

SEQ ID NO: 277267 - DNA, 12 bp, Artificial Sequence
  Oligonucleotide primer for the detection of SNP TSC0004425
tagtttttatat

SEQ ID NO: 277268 - DNA, 12 bp, Artificial Sequence
  Oligonucleotide primer for the detection of SNP TSC0004425
tcaatcctcaca

SEQ ID NO: 277269 - DNA, 12 bp, Artificial Sequence
  Oligonucleotide primer for the detection of SNP TSC0004425
agtttataggat

SEQ ID NO: 277270 - DNA, 12 bp, Artificial Sequence
  Oligonucleotide primer for the detection of SNP TSC0004426
tttcctaaaaat

SEQ ID NO: 277271 - DNA, 12 bp, Artificial Sequence
  Oligonucleotide primer for the detection of SNP TSC0004426
tgggtaattttt

SEQ ID NO: 277272 - DNA, 12 bp, Artificial Sequence
  Oligonucleotide primer for the detection of SNP TSC0004426
cgggtaattttt

SEQ ID NO: 277273 - DNA, 12 bp, Artificial Sequence
  Oligonucleotide primer for the detection of SNP TSC0004426
aaataattttta

SEQ ID NO: 277274 - DNA, 12 bp, Artificial Sequence
  Oligonucleotide primer for the detection of SNP TSC0004426
gaataattttta

SEQ ID NO: 277275 - DNA, 12 bp, Artificial Sequence
  Oligonucleotide primer for the detection of SNP TSC0004426
ttttttaaaaat

SEQ ID NO: 277276 - DNA, 12 bp, Artificial Sequence
  Oligonucleotide primer for the detection of SNP TSC0004427
aaaaccacaatc

SEQ ID NO: 277277 - DNA, 12 bp, Artificial Sequence
  Oligonucleotide primer for the detection of SNP TSC0004427
tgtttggtattg

SEQ ID NO: 277278 - DNA, 12 bp, Artificial Sequence
  Oligonucleotide primer for the detection of SNP TSC0004427
tgttcggtattg

SEQ ID NO: 277279 - DNA, 12 bp, Artificial Sequence
  Oligonucleotide primer for the detection of SNP TSC0004427
tacccaacatta

SEQ ID NO: 277280 - DNA, 12 bp, Artificial Sequence
  Oligonucleotide primer for the detection of SNP TSC0004427
tacccgacatta

SEQ ID NO: 277281 - DNA, 12 bp, Artificial Sequence
  Oligonucleotide primer for the detection of SNP TSC0004427
gaggttatagtt

SEQ ID NO: 277282 - DNA, 12 bp, Artificial Sequence
  Oligonucleotide primer for the detection of SNP TSC0004428
aataaaactaaa

SEQ ID NO: 277283 - DNA, 12 bp, Artificial Sequence
  Oligonucleotide primer for the detection of SNP TSC0004428
tggttagggata

SEQ ID NO: 277284 - DNA, 12 bp, Artificial Sequence
  Oligonucleotide primer for the detection of SNP TSC0004428
taaccaaaaata

SEQ ID NO: 277285 - DNA, 12 bp, Artificial Sequence
  Oligonucleotide primer for the detection of SNP TSC0004428
agtgggattgaa

SEQ ID NO: 277286 - DNA, 12 bp, Artificial Sequence
  Oligonucleotide primer for the detection of SNP TSC0004429
acaaacattcta

SEQ ID NO: 277287 - DNA, 12 bp, Artificial Sequence
  Oligonucleotide primer for the detection of SNP TSC0004429
acaaacgttcta

SEQ ID NO: 277288 - DNA, 12 bp, Artificial Sequence
  Oligonucleotide primer for the detection of SNP TSC0004429
aagttatatagt

SEQ ID NO: 277289 - DNA, 12 bp, Artificial Sequence
  Oligonucleotide primer for the detection of SNP TSC0004429
aaactacataat

SEQ ID NO: 277290 - DNA, 12 bp, Artificial Sequence
  Oligonucleotide primer for the detection of SNP TSC0004429
ataaatgtttta

SEQ ID NO: 277291 - DNA, 12 bp, Artificial Sequence
  Oligonucleotide primer for the detection of SNP TSC0004429
ataaacgtttta

SEQ ID NO: 277292 - DNA, 12 bp, Artificial Sequence
  Oligonucleotide primer for the detection of SNP TSC0004430
aaaaccttttcc

SEQ ID NO: 277293 - DNA, 12 bp, Artificial Sequence
  Oligonucleotide primer for the detection of SNP TSC0004430
agatgatgtttg

SEQ ID NO: 277294 - DNA, 12 bp, Artificial Sequence
  Oligonucleotide primer for the detection of SNP TSC0004431
atcccctcaact

SEQ ID NO: 277295 - DNA, 12 bp, Artificial Sequence
  Oligonucleotide primer for the detection of SNP TSC0004431
tgttggttttta

SEQ ID NO: 277296 - DNA, 12 bp, Artificial Sequence
  Oligonucleotide primer for the detection of SNP TSC0004431
cgttggttttta

SEQ ID NO: 277297 - DNA, 12 bp, Artificial Sequence
  Oligonucleotide primer for the detection of SNP TSC0004432
aacctactccca

SEQ ID NO: 277298 - DNA, 12 bp, Artificial Sequence
  Oligonucleotide primer for the detection of SNP TSC0004432
aacctactcccg

SEQ ID NO: 277299 - DNA, 12 bp, Artificial Sequence
  Oligonucleotide primer for the detection of SNP TSC0004432
gtttgttgggga

SEQ ID NO: 277300 - DNA, 12 bp, Artificial Sequence
  Oligonucleotide primer for the detection of SNP TSC0004432
ctactaaaaaaa

SEQ ID NO: 277301 - DNA, 12 bp, Artificial Sequence
  Oligonucleotide primer for the detection of SNP TSC0004432
gggtttgttttt

SEQ ID NO: 277302 - DNA, 12 bp, Artificial Sequence
  Oligonucleotide primer for the detection of SNP TSC0004432
gggtttgttttc

SEQ ID NO: 277303 - DNA, 12 bp, Artificial Sequence
  Oligonucleotide primer for the detection of SNP TSC0004433
aaaacccaacaa

SEQ ID NO: 277304 - DNA, 12 bp, Artificial Sequence
  Oligonucleotide primer for the detection of SNP TSC0004433
tttattttttgg

SEQ ID NO: 277305 - DNA, 12 bp, Artificial Sequence
  Oligonucleotide primer for the detection of SNP TSC0004433
tccacctcctaa

SEQ ID NO: 277306 - DNA, 12 bp, Artificial Sequence
  Oligonucleotide primer for the detection of SNP TSC0004433
aaaggtttagta

SEQ ID NO: 277307 - DNA, 12 bp, Artificial Sequence
  Oligonucleotide primer for the detection of SNP TSC0004434
atacataaaacc

SEQ ID NO: 277308 - DNA, 12 bp, Artificial Sequence
  Oligonucleotide primer for the detection of SNP TSC0004434
tgagaggttttt

SEQ ID NO: 277309 - DNA, 12 bp, Artificial Sequence
  Oligonucleotide primer for the detection of SNP TSC0004434
aaaaaaccccta

SEQ ID NO: 277310 - DNA, 12 bp, Artificial Sequence
  Oligonucleotide primer for the detection of SNP TSC0004434
atgtatggagtt

SEQ ID NO: 277311 - DNA, 12 bp, Artificial Sequence
  Oligonucleotide primer for the detection of SNP TSC0004434
atgtatggagtc

SEQ ID NO: 277312 - DNA, 12 bp, Artificial Sequence
  Oligonucleotide primer for the detection of SNP TSC0004435
aggtatgtaagt

SEQ ID NO: 277313 - DNA, 12 bp, Artificial Sequence
  Oligonucleotide primer for the detection of SNP TSC0004435
gagagaggagag

SEQ ID NO: 277314 - DNA, 12 bp, Artificial Sequence
  Oligonucleotide primer for the detection of SNP TSC0004436
tcctaaaacaat

SEQ ID NO: 277315 - DNA, 12 bp, Artificial Sequence
  Oligonucleotide primer for the detection of SNP TSC0004437
aaacatctttct

SEQ ID NO: 277316 - DNA, 12 bp, Artificial Sequence
  Oligonucleotide primer for the detection of SNP TSC0004437
agggttttgaaa

SEQ ID NO: 277317 - DNA, 12 bp, Artificial Sequence
  Oligonucleotide primer for the detection of SNP TSC0004438
tcctacaaaaca

SEQ ID NO: 277318 - DNA, 12 bp, Artificial Sequence
  Oligonucleotide primer for the detection of SNP TSC0004438
tcctacgaaaca

SEQ ID NO: 277319 - DNA, 12 bp, Artificial Sequence
  Oligonucleotide primer for the detection of SNP TSC0004438
gagattttgtat

SEQ ID NO: 277320 - DNA, 12 bp, Artificial Sequence
  Oligonukleotid-Primer
gagatttcgtat

SEQ ID NO: 277321 - DNA, 12 bp, Artificial Sequence
  Oligonucleotide primer for the detection of SNP TSC0004438
gagattttgtac

SEQ ID NO: 277322 - DNA, 12 bp, Artificial Sequence
  Oligonucleotide primer for the detection of SNP TSC0004438
gagatttcgtac

SEQ ID NO: 277323 - DNA, 12 bp, Artificial Sequence
  Oligonucleotide primer for the detection of SNP TSC0004438
aaaactccatac

SEQ ID NO: 277324 - DNA, 12 bp, Artificial Sequence
  Oligonucleotide primer for the detection of SNP TSC0004438
aaaactccgtac

SEQ ID NO: 277325 - DNA, 12 bp, Artificial Sequence
  Oligonucleotide primer for the detection of SNP TSC0004438
ttttgtggggta

SEQ ID NO: 277326 - DNA, 12 bp, Artificial Sequence
  Oligonucleotide primer for the detection of SNP TSC0004438
ttttgcggggta

SEQ ID NO: 277327 - DNA, 12 bp, Artificial Sequence
  Oligonucleotide primer for the detection of SNP TSC0004439
aacaccatctct

SEQ ID NO: 277328 - DNA, 12 bp, Artificial Sequence
  Oligonucleotide primer for the detection of SNP TSC0004440
tatctaaaaaca

SEQ ID NO: 277329 - DNA, 12 bp, Artificial Sequence
  Oligonucleotide primer for the detection of SNP TSC0004440
gaaaaattatgt

SEQ ID NO: 277330 - DNA, 12 bp, Artificial Sequence
  Oligonucleotide primer for the detection of SNP TSC0004440
gaaaaattacgt

SEQ ID NO: 277331 - DNA, 12 bp, Artificial Sequence
  Oligonucleotide primer for the detection of SNP TSC0004440
aaaaaattacac

SEQ ID NO: 277332 - DNA, 12 bp, Artificial Sequence
  Oligonucleotide primer for the detection of SNP TSC0004440
aaaaaattacgc

SEQ ID NO: 277333 - DNA, 12 bp, Artificial Sequence
  Oligonucleotide primer for the detection of SNP TSC0004440
tgtttgaggata

SEQ ID NO: 277334 - DNA, 12 bp, Artificial Sequence
  Oligonucleotide primer for the detection of SNP TSC0004441
ggagaaattttg

SEQ ID NO: 277335 - DNA, 12 bp, Artificial Sequence
  Oligonucleotide primer for the detection of SNP TSC0004442
aactaaacaccc

SEQ ID NO: 277336 - DNA, 12 bp, Artificial Sequence
  Oligonucleotide primer for the detection of SNP TSC0004442
ttttctcaccta

SEQ ID NO: 277337 - DNA, 12 bp, Artificial Sequence
  Oligonucleotide primer for the detection of SNP TSC0004442
ggttgggtattt

SEQ ID NO: 277338 - DNA, 12 bp, Artificial Sequence
  Oligonucleotide primer for the detection of SNP TSC0004443
aaaattcaaccc

SEQ ID NO: 277339 - DNA, 12 bp, Artificial Sequence
  Oligonucleotide primer for the detection of SNP TSC0004443
attatttttagt

SEQ ID NO: 277340 - DNA, 12 bp, Artificial Sequence
  Oligonucleotide primer for the detection of SNP TSC0004443
atcatttctaat

SEQ ID NO: 277341 - DNA, 12 bp, Artificial Sequence
  Oligonucleotide primer for the detection of SNP TSC0004443
agaatttagttt

SEQ ID NO: 277342 - DNA, 12 bp, Artificial Sequence
  Oligonucleotide primer for the detection of SNP TSC0004444
ttaccaaaaatt

SEQ ID NO: 277343 - DNA, 12 bp, Artificial Sequence
  Oligonucleotide primer for the detection of SNP TSC0004444
tataaatgttta

SEQ ID NO: 277344 - DNA, 12 bp, Artificial Sequence
  Oligonucleotide primer for the detection of SNP TSC0004444
tataaacgttta

SEQ ID NO: 277345 - DNA, 12 bp, Artificial Sequence
  Oligonucleotide primer for the detection of SNP TSC0004445
gaaaatgataga

SEQ ID NO: 277346 - DNA, 12 bp, Artificial Sequence
  Oligonucleotide primer for the detection of SNP TSC0004446
aactcactacaa

SEQ ID NO: 277347 - DNA, 12 bp, Artificial Sequence
  Oligonucleotide primer for the detection of SNP TSC0004446
gactcactacaa

SEQ ID NO: 277348 - DNA, 12 bp, Artificial Sequence
  Oligonucleotide primer for the detection of SNP TSC0004446
accctaaaaaac

SEQ ID NO: 277349 - DNA, 12 bp, Artificial Sequence
  Oligonucleotide primer for the detection of SNP TSC0004446
ggtttattgtaa

SEQ ID NO: 277350 - DNA, 12 bp, Artificial Sequence
  Oligonucleotide primer for the detection of SNP TSC0004447
atcttactaata

SEQ ID NO: 277351 - DNA, 12 bp, Artificial Sequence
  Oligonucleotide primer for the detection of SNP TSC0004447
atttagggtttt

SEQ ID NO: 277352 - DNA, 12 bp, Artificial Sequence
  Oligonucleotide primer for the detection of SNP TSC0004447
atccaaaactct

SEQ ID NO: 277353 - DNA, 12 bp, Artificial Sequence
  Oligonucleotide primer for the detection of SNP TSC0004447
attttgttggtg

SEQ ID NO: 277354 - DNA, 12 bp, Artificial Sequence
  Oligonucleotide primer for the detection of SNP TSC0004448
ctaaacccatcc

SEQ ID NO: 277355 - DNA, 12 bp, Artificial Sequence
  Oligonucleotide primer for the detection of SNP TSC0004448
agatgggagtgg

SEQ ID NO: 277356 - DNA, 12 bp, Artificial Sequence
  Oligonucleotide primer for the detection of SNP TSC0004448
agacgggagtgg

SEQ ID NO: 277357 - DNA, 12 bp, Artificial Sequence
  Oligonucleotide primer for the detection of SNP TSC0004449
cctccctctaat

SEQ ID NO: 277358 - DNA, 12 bp, Artificial Sequence
  Oligonucleotide primer for the detection of SNP TSC0004449
ttgaaaattttg

SEQ ID NO: 277359 - DNA, 12 bp, Artificial Sequence
  Oligonucleotide primer for the detection of SNP TSC0004450
attaaaaactta

SEQ ID NO: 277360 - DNA, 12 bp, Artificial Sequence
  Oligonucleotide primer for the detection of SNP TSC0004450
gttgaaggttgt

SEQ ID NO: 277361 - DNA, 12 bp, Artificial Sequence
  Oligonucleotide primer for the detection of SNP TSC0004450
actaaaaactac

SEQ ID NO: 277362 - DNA, 12 bp, Artificial Sequence
  Oligonucleotide primer for the detection of SNP TSC0004450
gttggaaattta

SEQ ID NO: 277363 - DNA, 12 bp, Artificial Sequence
  Oligonucleotide primer for the detection of SNP TSC0004451
aacctaaccaat

SEQ ID NO: 277364 - DNA, 12 bp, Artificial Sequence
  Oligonucleotide primer for the detection of SNP TSC0004451
ggggttttatta

SEQ ID NO: 277365 - DNA, 12 bp, Artificial Sequence
  Oligonucleotide primer for the detection of SNP TSC0004452
ataatataaaca

SEQ ID NO: 277366 - DNA, 12 bp, Artificial Sequence
  Oligonucleotide primer for the detection of SNP TSC0004452
gttgttggtttg

SEQ ID NO: 277367 - DNA, 12 bp, Artificial Sequence
  Oligonucleotide primer for the detection of SNP TSC0004452
actactaaccta

SEQ ID NO: 277368 - DNA, 12 bp, Artificial Sequence
  Oligonucleotide primer for the detection of SNP TSC0004452
gctactaaccta

SEQ ID NO: 277369 - DNA, 12 bp, Artificial Sequence
  Oligonucleotide primer for the detection of SNP TSC0004452
ggtggtgtgggt

SEQ ID NO: 277370 - DNA, 12 bp, Artificial Sequence
  Oligonucleotide primer for the detection of SNP TSC0004453
aaattaccaatc

SEQ ID NO: 277371 - DNA, 12 bp, Artificial Sequence
  Oligonucleotide primer for the detection of SNP TSC0004453
gtgataattaaa

SEQ ID NO: 277372 - DNA, 12 bp, Artificial Sequence
  Oligonucleotide primer for the detection of SNP TSC0004454
cctaaatatcaa

SEQ ID NO: 277373 - DNA, 12 bp, Artificial Sequence
  Oligonucleotide primer for the detection of SNP TSC0004454
tggagttttatt

SEQ ID NO: 277374 - DNA, 12 bp, Artificial Sequence
  Oligonucleotide primer for the detection of SNP TSC0004454
ataaaatttcac

SEQ ID NO: 277375 - DNA, 12 bp, Artificial Sequence
  Oligonucleotide primer for the detection of SNP TSC0004454
agtttgggtgtt

SEQ ID NO: 277376 - DNA, 12 bp, Artificial Sequence
  Oligonucleotide primer for the detection of SNP TSC0004455
ccaaaaacaccc

SEQ ID NO: 277377 - DNA, 12 bp, Artificial Sequence
  Oligonucleotide primer for the detection of SNP TSC0004455
ggaagatgagtg

SEQ ID NO: 277378 - DNA, 12 bp, Artificial Sequence
  Oligonucleotide primer for the detection of SNP TSC0004455
ggaagacgagtg

SEQ ID NO: 277379 - DNA, 12 bp, Artificial Sequence
  Oligonucleotide primer for the detection of SNP TSC0004456
aaaacaaaataa

SEQ ID NO: 277380 - DNA, 12 bp, Artificial Sequence
  Oligonucleotide primer for the detection of SNP TSC0004456
gatttttatatt

SEQ ID NO: 277381 - DNA, 12 bp, Artificial Sequence
  Oligonucleotide primer for the detection of SNP TSC0004456
gatttttatatc

SEQ ID NO: 277382 - DNA, 12 bp, Artificial Sequence
  Oligonucleotide primer for the detection of SNP TSC0004456
aatctctatacc

SEQ ID NO: 277383 - DNA, 12 bp, Artificial Sequence
  Oligonucleotide primer for the detection of SNP TSC0004456
taaagtaggatg

SEQ ID NO: 277384 - DNA, 12 bp, Artificial Sequence
  Oligonucleotide primer for the detection of SNP TSC0004457
ttttattaaaaa

SEQ ID NO: 277385 - DNA, 12 bp, Artificial Sequence
  Oligonucleotide primer for the detection of SNP TSC0004457
ctttactaaaaa

SEQ ID NO: 277386 - DNA, 12 bp, Artificial Sequence
  Oligonucleotide primer for the detection of SNP TSC0004457
tattttttttgt

SEQ ID NO: 277387 - DNA, 12 bp, Artificial Sequence
  Oligonucleotide primer for the detection of SNP TSC0004458
tcaacctcccta

SEQ ID NO: 277388 - DNA, 12 bp, Artificial Sequence
  Oligonucleotide primer for the detection of SNP TSC0004458
attttagttgta

SEQ ID NO: 277389 - DNA, 12 bp, Artificial Sequence
  Oligonucleotide primer for the detection of SNP TSC0004458
actttaattata

SEQ ID NO: 277390 - DNA, 12 bp, Artificial Sequence
  Oligonucleotide primer for the detection of SNP TSC0004459
caaatatttaat

SEQ ID NO: 277391 - DNA, 12 bp, Artificial Sequence
  Oligonucleotide primer for the detection of SNP TSC0004459
attggagataaa

SEQ ID NO: 277392 - DNA, 12 bp, Artificial Sequence
  Oligonucleotide primer for the detection of SNP TSC0004460
ccaaaatatccc

SEQ ID NO: 277393 - DNA, 12 bp, Artificial Sequence
  Oligonucleotide primer for the detection of SNP TSC0004461
tcaaaacaataa

SEQ ID NO: 277394 - DNA, 12 bp, Artificial Sequence
  Oligonucleotide primer for the detection of SNP TSC0004461
tcaaaacgataa

SEQ ID NO: 277395 - DNA, 12 bp, Artificial Sequence
  Oligonucleotide primer for the detection of SNP TSC0004461
tcgaaacaataa

SEQ ID NO: 277396 - DNA, 12 bp, Artificial Sequence
  Oligonucleotide primer for the detection of SNP TSC0004461
tcgaaacgataa

SEQ ID NO: 277397 - DNA, 12 bp, Artificial Sequence
  Oligonucleotide primer for the detection of SNP TSC0004461
cctcctcccaca

SEQ ID NO: 277398 - DNA, 12 bp, Artificial Sequence
  Oligonucleotide primer for the detection of SNP TSC0004461
ttgagatggtgg

SEQ ID NO: 277399 - DNA, 12 bp, Artificial Sequence
  Oligonucleotide primer for the detection of SNP TSC0004461
tcgagatggtgg

SEQ ID NO: 277400 - DNA, 12 bp, Artificial Sequence
  Oligonucleotide primer for the detection of SNP TSC0004461
ttgagacggtgg

SEQ ID NO: 277401 - DNA, 12 bp, Artificial Sequence
  Oligonucleotide primer for the detection of SNP TSC0004461
tcgagacggtgg

SEQ ID NO: 277402 - DNA, 12 bp, Artificial Sequence
  Oligonucleotide primer for the detection of SNP TSC0004462
acactctaatcc

SEQ ID NO: 277403 - DNA, 12 bp, Artificial Sequence
  Oligonucleotide primer for the detection of SNP TSC0004462
acgctctaatcc

SEQ ID NO: 277404 - DNA, 12 bp, Artificial Sequence
  Oligonucleotide primer for the detection of SNP TSC0004462
ttaatattgagt

SEQ ID NO: 277405 - DNA, 12 bp, Artificial Sequence
  Oligonucleotide primer for the detection of SNP TSC0004462
ttaatatcgagt

SEQ ID NO: 277406 - DNA, 12 bp, Artificial Sequence
  Oligonucleotide primer for the detection of SNP TSC0004462
ccaacaccaaac

SEQ ID NO: 277407 - DNA, 12 bp, Artificial Sequence
  Oligonucleotide primer for the detection of SNP TSC0004462
ccaacaccgaac

SEQ ID NO: 277408 - DNA, 12 bp, Artificial Sequence
  Oligonucleotide primer for the detection of SNP TSC0004462
atgttttgattt

SEQ ID NO: 277409 - DNA, 12 bp, Artificial Sequence
  Oligonucleotide primer for the detection of SNP TSC0004462
acgttttgattt

SEQ ID NO: 277410 - DNA, 12 bp, Artificial Sequence
  Oligonucleotide primer for the detection of SNP TSC0004463
catctaccttct

SEQ ID NO: 277411 - DNA, 12 bp, Artificial Sequence
  Oligonucleotide primer for the detection of SNP TSC0004463
aatttataaaga

SEQ ID NO: 277412 - DNA, 12 bp, Artificial Sequence
  Oligonucleotide primer for the detection of SNP TSC0004464
tataaaactaaa

SEQ ID NO: 277413 - DNA, 12 bp, Artificial Sequence
  Oligonucleotide primer for the detection of SNP TSC0004464
tgttttataata

SEQ ID NO: 277414 - DNA, 12 bp, Artificial Sequence
  Oligonucleotide primer for the detection of SNP TSC0004464
tatctcataaca

SEQ ID NO: 277415 - DNA, 12 bp, Artificial Sequence
  Oligonucleotide primer for the detection of SNP TSC0004464
tgtggagttgaa

SEQ ID NO: 277416 - DNA, 12 bp, Artificial Sequence
  Oligonucleotide primer for the detection of SNP TSC0004465
ataacacgatct

SEQ ID NO: 277417 - DNA, 12 bp, Artificial Sequence
  Oligonucleotide primer for the detection of SNP TSC0004465
ggttatagtgag

SEQ ID NO: 277418 - DNA, 12 bp, Artificial Sequence
  Oligonucleotide primer for the detection of SNP TSC0004465
atggtatgattt

SEQ ID NO: 277419 - DNA, 12 bp, Artificial Sequence
  Oligonucleotide primer for the detection of SNP TSC0004465
atggtacgattt

SEQ ID NO: 277420 - DNA, 12 bp, Artificial Sequence
  Oligonucleotide primer for the detection of SNP TSC0004466
ccacctaaaaaa

SEQ ID NO: 277421 - DNA, 12 bp, Artificial Sequence
  Oligonucleotide primer for the detection of SNP TSC0004466
ccgcctaaaaaa

SEQ ID NO: 277422 - DNA, 12 bp, Artificial Sequence
  Oligonucleotide primer for the detection of SNP TSC0004466
gtggagagggga

SEQ ID NO: 277423 - DNA, 12 bp, Artificial Sequence
  Oligonucleotide primer for the detection of SNP TSC0004466
gcggagagggga

SEQ ID NO: 277424 - DNA, 12 bp, Artificial Sequence
  Oligonucleotide primer for the detection of SNP TSC0004466
acgaaaaaaaaa

SEQ ID NO: 277425 - DNA, 12 bp, Artificial Sequence
  Oligonucleotide primer for the detection of SNP TSC0004466
gcaaaaaaaaaa

SEQ ID NO: 277426 - DNA, 12 bp, Artificial Sequence
  Oligonucleotide primer for the detection of SNP TSC0004466
gcgaaaaaaaaa

SEQ ID NO: 277427 - DNA, 12 bp, Artificial Sequence
  Oligonucleotide primer for the detection of SNP TSC0004466
ttgtttgggaag

SEQ ID NO: 277428 - DNA, 12 bp, Artificial Sequence
  Oligonucleotide primer for the detection of SNP TSC0004466
tcgtttgggaag

SEQ ID NO: 277429 - DNA, 12 bp, Artificial Sequence
  Oligonucleotide primer for the detection of SNP TSC0004467
ttaaaattcact

SEQ ID NO: 277430 - DNA, 12 bp, Artificial Sequence
  Oligonucleotide primer for the detection of SNP TSC0004467
ttaaaattcgct

SEQ ID NO: 277431 - DNA, 12 bp, Artificial Sequence
  Oligonucleotide primer for the detection of SNP TSC0004467
tgattttttata

SEQ ID NO: 277432 - DNA, 12 bp, Artificial Sequence
  Oligonucleotide primer for the detection of SNP TSC0004467
taattccccaca

SEQ ID NO: 277433 - DNA, 12 bp, Artificial Sequence
  Oligonucleotide primer for the detection of SNP TSC0004467
ttgaagtttgtt

SEQ ID NO: 277434 - DNA, 12 bp, Artificial Sequence
  Oligonucleotide primer for the detection of SNP TSC0004467
ttgaagttcgtt

SEQ ID NO: 277435 - DNA, 12 bp, Artificial Sequence
  Oligonucleotide primer for the detection of SNP TSC0004468
actacactccac

SEQ ID NO: 277436 - DNA, 12 bp, Artificial Sequence
  Oligonucleotide primer for the detection of SNP TSC0004468
tttgttgtttag

SEQ ID NO: 277437 - DNA, 12 bp, Artificial Sequence
  Oligonucleotide primer for the detection of SNP TSC0004469
ctacacatcttt

SEQ ID NO: 277438 - DNA, 12 bp, Artificial Sequence
  Oligonucleotide primer for the detection of SNP TSC0004469
ctacgcatcttt

SEQ ID NO: 277439 - DNA, 12 bp, Artificial Sequence
  Oligonucleotide primer for the detection of SNP TSC0004469
gaaaaaagaaaa

SEQ ID NO: 277440 - DNA, 12 bp, Artificial Sequence
  Oligonucleotide primer for the detection of SNP TSC0004470
ataatttctcat

SEQ ID NO: 277441 - DNA, 12 bp, Artificial Sequence
  Oligonucleotide primer for the detection of SNP TSC0004470
gtgttttttaaa

SEQ ID NO: 277442 - DNA, 12 bp, Artificial Sequence
  Oligonucleotide primer for the detection of SNP TSC0004472
acaatatcaacc

SEQ ID NO: 277443 - DNA, 12 bp, Artificial Sequence
  Oligonucleotide primer for the detection of SNP TSC0004472
ttttgtagtatg

SEQ ID NO: 277444 - DNA, 12 bp, Artificial Sequence
  Oligonucleotide primer for the detection of SNP TSC0004472
cctacaacataa

SEQ ID NO: 277445 - DNA, 12 bp, Artificial Sequence
  Oligonucleotide primer for the detection of SNP TSC0004472
ataatgttagtt

SEQ ID NO: 277446 - DNA, 12 bp, Artificial Sequence
  Oligonucleotide primer for the detection of SNP TSC0004473
caactcacccca

SEQ ID NO: 277447 - DNA, 12 bp, Artificial Sequence
  Oligonucleotide primer for the detection of SNP TSC0004473
caactcgcccca

SEQ ID NO: 277448 - DNA, 12 bp, Artificial Sequence
  Oligonucleotide primer for the detection of SNP TSC0004473
gagttgtgtgga

SEQ ID NO: 277449 - DNA, 12 bp, Artificial Sequence
  Oligonucleotide primer for the detection of SNP TSC0004473
gagttgcgtgga

SEQ ID NO: 277450 - DNA, 12 bp, Artificial Sequence
  Oligonucleotide primer for the detection of SNP TSC0004473
aaattacataaa

SEQ ID NO: 277451 - DNA, 12 bp, Artificial Sequence
  Oligonucleotide primer for the detection of SNP TSC0004473
aaattacgtaaa

SEQ ID NO: 277452 - DNA, 12 bp, Artificial Sequence
  Oligonucleotide primer for the detection of SNP TSC0004473
ttagtttgtttt

SEQ ID NO: 277453 - DNA, 12 bp, Artificial Sequence
  Oligonucleotide primer for the detection of SNP TSC0004473
ttagttcgtttt

SEQ ID NO: 277454 - DNA, 12 bp, Artificial Sequence
  Oligonucleotide primer for the detection of SNP TSC0004474
gatattaaaggt

SEQ ID NO: 277455 - DNA, 12 bp, Artificial Sequence
  Oligonucleotide primer for the detection of SNP TSC0004474
aaacatcaaaaa

SEQ ID NO: 277456 - DNA, 12 bp, Artificial Sequence
  Oligonucleotide primer for the detection of SNP TSC0004474
aagaggtagata

SEQ ID NO: 277457 - DNA, 12 bp, Artificial Sequence
  Oligonucleotide primer for the detection of SNP TSC0004475
caatactaataa

SEQ ID NO: 277458 - DNA, 12 bp, Artificial Sequence
  Oligonukleotid-Primer
ttttgatgtttt

SEQ ID NO: 277459 - DNA, 12 bp, Artificial Sequence
  Oligonucleotide primer for the detection of SNP TSC0004475
ttctaatatttc

SEQ ID NO: 277460 - DNA, 12 bp, Artificial Sequence
  Oligonucleotide primer for the detection of SNP TSC0004475
taatgttggtga

SEQ ID NO: 277461 - DNA, 12 bp, Artificial Sequence
  Oligonucleotide primer for the detection of SNP TSC0004476
aaaccaacaacc

SEQ ID NO: 277462 - DNA, 12 bp, Artificial Sequence
  Oligonucleotide primer for the detection of SNP TSC0004476
atttggggagga

SEQ ID NO: 277463 - DNA, 12 bp, Artificial Sequence
  Oligonucleotide primer for the detection of SNP TSC0004476
attcggggagga

SEQ ID NO: 277464 - DNA, 12 bp, Artificial Sequence
  Oligonucleotide primer for the detection of SNP TSC0004477
tccaaacaaaac

SEQ ID NO: 277465 - DNA, 12 bp, Artificial Sequence
  Oligonucleotide primer for the detection of SNP TSC0004477
tggtagaaaggg

SEQ ID NO: 277466 - DNA, 12 bp, Artificial Sequence
  Oligonucleotide primer for the detection of SNP TSC0004477
tttaagtaaagt

SEQ ID NO: 277467 - DNA, 12 bp, Artificial Sequence
  Oligonucleotide primer for the detection of SNP TSC0004477
tttaagtaaagc

SEQ ID NO: 277468 - DNA, 12 bp, Artificial Sequence
  Oligonucleotide primer for the detection of SNP TSC0004478
tcttacaaaact

SEQ ID NO: 277469 - DNA, 12 bp, Artificial Sequence
  Oligonucleotide primer for the detection of SNP TSC0004478
agaaggttaggg

SEQ ID NO: 277470 - DNA, 12 bp, Artificial Sequence
  Oligonucleotide primer for the detection of SNP TSC0004479
gtacggtggttt

SEQ ID NO: 277471 - DNA, 12 bp, Artificial Sequence
  Oligonucleotide primer for the detection of SNP TSC0004479
acacaataactc

SEQ ID NO: 277472 - DNA, 12 bp, Artificial Sequence
  Oligonucleotide primer for the detection of SNP TSC0004479
acacgataactc

SEQ ID NO: 277473 - DNA, 12 bp, Artificial Sequence
  Oligonucleotide primer for the detection of SNP TSC0004480
ttaacatcttaa

SEQ ID NO: 277474 - DNA, 12 bp, Artificial Sequence
  Oligonucleotide primer for the detection of SNP TSC0004480
ttttttcttcaa

SEQ ID NO: 277475 - DNA, 12 bp, Artificial Sequence
  Oligonucleotide primer for the detection of SNP TSC0004480
ttaatattttaa

SEQ ID NO: 277476 - DNA, 12 bp, Artificial Sequence
  Oligonucleotide primer for the detection of SNP TSC0004481
ttcaaaaaaaat

SEQ ID NO: 277477 - DNA, 12 bp, Artificial Sequence
  Oligonucleotide primer for the detection of SNP TSC0004481
ttgttttaatga

SEQ ID NO: 277478 - DNA, 12 bp, Artificial Sequence
  Oligonucleotide primer for the detection of SNP TSC0004482
cactaaaaaaaa

SEQ ID NO: 277479 - DNA, 12 bp, Artificial Sequence
  Oligonucleotide primer for the detection of SNP TSC0004482
cgctaaaaaaaa

SEQ ID NO: 277480 - DNA, 12 bp, Artificial Sequence
  Oligonucleotide primer for the detection of SNP TSC0004482
ggttggattttt

SEQ ID NO: 277481 - DNA, 12 bp, Artificial Sequence
  Oligonucleotide primer for the detection of SNP TSC0004482
actaaaccctca

SEQ ID NO: 277482 - DNA, 12 bp, Artificial Sequence
  Oligonucleotide primer for the detection of SNP TSC0004482
ttaaggagaatt

SEQ ID NO: 277483 - DNA, 12 bp, Artificial Sequence
  Oligonucleotide primer for the detection of SNP TSC0004483
taaccatcctac

SEQ ID NO: 277484 - DNA, 12 bp, Artificial Sequence
  Oligonucleotide primer for the detection of SNP TSC0004483
taaccgtcctac

SEQ ID NO: 277485 - DNA, 12 bp, Artificial Sequence
  Oligonucleotide primer for the detection of SNP TSC0004483
tgattgttttgt

SEQ ID NO: 277486 - DNA, 12 bp, Artificial Sequence
  Oligonucleotide primer for the detection of SNP TSC0004483
tgatcgttttgt

SEQ ID NO: 277487 - DNA, 12 bp, Artificial Sequence
  Oligonucleotide primer for the detection of SNP TSC0004484
taaaaataccac

SEQ ID NO: 277488 - DNA, 12 bp, Artificial Sequence
  Oligonucleotide primer for the detection of SNP TSC0004484
taaaaataccgc

SEQ ID NO: 277489 - DNA, 12 bp, Artificial Sequence
  Oligonucleotide primer for the detection of SNP TSC0004484
tgtaggttaatg

SEQ ID NO: 277490 - DNA, 12 bp, Artificial Sequence
  Oligonucleotide primer for the detection of SNP TSC0004485
ttctaacaatcc

SEQ ID NO: 277491 - DNA, 12 bp, Artificial Sequence
  Oligonucleotide primer for the detection of SNP TSC0004485
ataattatattg

SEQ ID NO: 277492 - DNA, 12 bp, Artificial Sequence
  Oligonucleotide primer for the detection of SNP TSC0004486
acatataaacct

SEQ ID NO: 277493 - DNA, 12 bp, Artificial Sequence
  Oligonucleotide primer for the detection of SNP TSC0004486
tgggaggaggga

SEQ ID NO: 277494 - DNA, 12 bp, Artificial Sequence
  Oligonucleotide primer for the detection of SNP TSC0004487
actcacatacca

SEQ ID NO: 277495 - DNA, 12 bp, Artificial Sequence
  Oligonucleotide primer for the detection of SNP TSC0004487
actcacgtacca

SEQ ID NO: 277496 - DNA, 12 bp, Artificial Sequence
  Oligonucleotide primer for the detection of SNP TSC0004487
tagttttgattt

SEQ ID NO: 277497 - DNA, 12 bp, Artificial Sequence
  Oligonucleotide primer for the detection of SNP TSC0004487
tagttttgattc

SEQ ID NO: 277498 - DNA, 12 bp, Artificial Sequence
  Oligonucleotide primer for the detection of SNP TSC0004487
aaccctaactca

SEQ ID NO: 277499 - DNA, 12 bp, Artificial Sequence
  Oligonucleotide primer for the detection of SNP TSC0004487
aaccctaactcg

SEQ ID NO: 277500 - DNA, 12 bp, Artificial Sequence
  Oligonucleotide primer for the detection of SNP TSC0004487
tgtttatgtgtt

SEQ ID NO: 277501 - DNA, 12 bp, Artificial Sequence
  Oligonucleotide primer for the detection of SNP TSC0004487
tgtttacgtgtt

SEQ ID NO: 277502 - DNA, 12 bp, Artificial Sequence
  Oligonucleotide primer for the detection of SNP TSC0004488
caaaaatcctcc

SEQ ID NO: 277503 - DNA, 12 bp, Artificial Sequence
  Oligonucleotide primer for the detection of SNP TSC0004488
taagttttggga

SEQ ID NO: 277504 - DNA, 12 bp, Artificial Sequence
  Oligonucleotide primer for the detection of SNP TSC0004488
taaaccctaaaa

SEQ ID NO: 277505 - DNA, 12 bp, Artificial Sequence
  Oligonucleotide primer for the detection of SNP TSC0004488
taggaatttttt

SEQ ID NO: 277506 - DNA, 12 bp, Artificial Sequence
  Oligonucleotide primer for the detection of SNP TSC0004489
aaactcaaaata

SEQ ID NO: 277507 - DNA, 12 bp, Artificial Sequence
  Oligonucleotide primer for the detection of SNP TSC0004489
atgtttggagtt

SEQ ID NO: 277508 - DNA, 12 bp, Artificial Sequence
  Oligonucleotide primer for the detection of SNP TSC0004489
atgttcggagtt

SEQ ID NO: 277509 - DNA, 12 bp, Artificial Sequence
  Oligonucleotide primer for the detection of SNP TSC0004489
tatccaaaatca

SEQ ID NO: 277510 - DNA, 12 bp, Artificial Sequence
  Oligonucleotide primer for the detection of SNP TSC0004489
tatccgaaatca

SEQ ID NO: 277511 - DNA, 12 bp, Artificial Sequence
  Oligonucleotide primer for the detection of SNP TSC0004489
agtttagaatgt

SEQ ID NO: 277512 - DNA, 12 bp, Artificial Sequence
  Oligonucleotide primer for the detection of SNP TSC0004490
atcaaactaact

SEQ ID NO: 277513 - DNA, 12 bp, Artificial Sequence
  Oligonucleotide primer for the detection of SNP TSC0004490
ttttgaatataa

SEQ ID NO: 277514 - DNA, 12 bp, Artificial Sequence
  Oligonucleotide primer for the detection of SNP TSC0004491
aatattacaaaa

SEQ ID NO: 277515 - DNA, 12 bp, Artificial Sequence
  Oligonucleotide primer for the detection of SNP TSC0004491
agttttataatt

SEQ ID NO: 277516 - DNA, 12 bp, Artificial Sequence
  Oligonucleotide primer for the detection of SNP TSC0004491
aactttataact

SEQ ID NO: 277517 - DNA, 12 bp, Artificial Sequence
  Oligonucleotide primer for the detection of SNP TSC0004491
aatattgtaaga

SEQ ID NO: 277518 - DNA, 12 bp, Artificial Sequence
  Oligonucleotide primer for the detection of SNP TSC0004492
attcaaacaatt

SEQ ID NO: 277519 - DNA, 12 bp, Artificial Sequence
  Oligonucleotide primer for the detection of SNP TSC0004492
gttgaggtagga

SEQ ID NO: 277520 - DNA, 12 bp, Artificial Sequence
  Oligonucleotide primer for the detection of SNP TSC0004493
catatcttattt

SEQ ID NO: 277521 - DNA, 12 bp, Artificial Sequence
  Oligonucleotide primer for the detection of SNP TSC0004493
cgtatcttattt

SEQ ID NO: 277522 - DNA, 12 bp, Artificial Sequence
  Oligonucleotide primer for the detection of SNP TSC0004493
tgttttaaataa

SEQ ID NO: 277523 - DNA, 12 bp, Artificial Sequence
  Oligonucleotide primer for the detection of SNP TSC0004495
cctcccacctac

SEQ ID NO: 277524 - DNA, 12 bp, Artificial Sequence
  Oligonucleotide primer for the detection of SNP TSC0004495
gttatgtttaag

SEQ ID NO: 277525 - DNA, 12 bp, Artificial Sequence
  Oligonucleotide primer for the detection of SNP TSC0004497
aacaccataaaa

SEQ ID NO: 277526 - DNA, 12 bp, Artificial Sequence
  Oligonucleotide primer for the detection of SNP TSC0004497
aacaccgtaaaa

SEQ ID NO: 277527 - DNA, 12 bp, Artificial Sequence
  Oligonucleotide primer for the detection of SNP TSC0004497
atttatttgagt

SEQ ID NO: 277528 - DNA, 12 bp, Artificial Sequence
  Oligonucleotide primer for the detection of SNP TSC0004497
aatctacctaaa

SEQ ID NO: 277529 - DNA, 12 bp, Artificial Sequence
  Oligonucleotide primer for the detection of SNP TSC0004497
gatattgtaagg

SEQ ID NO: 277530 - DNA, 12 bp, Artificial Sequence
  Oligonucleotide primer for the detection of SNP TSC0004497
gatatcgtaagg

SEQ ID NO: 277531 - DNA, 12 bp, Artificial Sequence
  Oligonucleotide primer for the detection of SNP TSC0004498
aataactaaaac

SEQ ID NO: 277532 - DNA, 12 bp, Artificial Sequence
  Oligonucleotide primer for the detection of SNP TSC0004498
ggtatatgtttg

SEQ ID NO: 277533 - DNA, 12 bp, Artificial Sequence
  Oligonucleotide primer for the detection of SNP TSC0004498
aacacataccta

SEQ ID NO: 277534 - DNA, 12 bp, Artificial Sequence
  Oligonucleotide primer for the detection of SNP TSC0004498
gtagttgggatt

SEQ ID NO: 277535 - DNA, 12 bp, Artificial Sequence
  Oligonukleotid-Primer
ataccattcccc

SEQ ID NO: 277536 - DNA, 12 bp, Artificial Sequence
  Oligonucleotide primer for the detection of SNP TSC0004499
ataccgttcccc

SEQ ID NO: 277537 - DNA, 12 bp, Artificial Sequence
  Oligonucleotide primer for the detection of SNP TSC0004499
ggtatttaatta

SEQ ID NO: 277538 - DNA, 12 bp, Artificial Sequence
  Oligonucleotide primer for the detection of SNP TSC0004500
tctacctcccaa

SEQ ID NO: 277539 - DNA, 12 bp, Artificial Sequence
  Oligonucleotide primer for the detection of SNP TSC0004500
aaattacttaaa

SEQ ID NO: 277540 - DNA, 12 bp, Artificial Sequence
  Oligonucleotide primer for the detection of SNP TSC0004500
tttgttttttag

SEQ ID NO: 277541 - DNA, 12 bp, Artificial Sequence
  Oligonucleotide primer for the detection of SNP TSC0004501
cttaaaacaaat

SEQ ID NO: 277542 - DNA, 12 bp, Artificial Sequence
  Oligonucleotide primer for the detection of SNP TSC0004501
atgtattatatg

SEQ ID NO: 277543 - DNA, 12 bp, Artificial Sequence
  Oligonucleotide primer for the detection of SNP TSC0004502
ctcaatccaaaa

SEQ ID NO: 277544 - DNA, 12 bp, Artificial Sequence
  Oligonucleotide primer for the detection of SNP TSC0004502
ctcgatccaaaa

SEQ ID NO: 277545 - DNA, 12 bp, Artificial Sequence
  Oligonucleotide primer for the detection of SNP TSC0004502
agtaattttttt

SEQ ID NO: 277546 - DNA, 12 bp, Artificial Sequence
  Oligonucleotide primer for the detection of SNP TSC0004502
aataattttttc

SEQ ID NO: 277547 - DNA, 12 bp, Artificial Sequence
  Oligonucleotide primer for the detection of SNP TSC0004502
tttggtttaaaa

SEQ ID NO: 277548 - DNA, 12 bp, Artificial Sequence
  Oligonucleotide primer for the detection of SNP TSC0004502
ttcggtttaaaa

SEQ ID NO: 277549 - DNA, 12 bp, Artificial Sequence
  Oligonucleotide primer for the detection of SNP TSC0004503
ttcctttaatac

SEQ ID NO: 277550 - DNA, 12 bp, Artificial Sequence
  Oligonucleotide primer for the detection of SNP TSC0004503
ttttataaggtt

SEQ ID NO: 277551 - DNA, 12 bp, Artificial Sequence
  Oligonucleotide primer for the detection of SNP TSC0004503
cctacaaaatta

SEQ ID NO: 277552 - DNA, 12 bp, Artificial Sequence
  Oligonucleotide primer for the detection of SNP TSC0004505
tttttatgagat

SEQ ID NO: 277553 - DNA, 12 bp, Artificial Sequence
  Oligonucleotide primer for the detection of SNP TSC0004505
cttccataaaac

SEQ ID NO: 277554 - DNA, 12 bp, Artificial Sequence
  Oligonucleotide primer for the detection of SNP TSC0004505
gggaatatatag

SEQ ID NO: 277555 - DNA, 12 bp, Artificial Sequence
  Oligonucleotide primer for the detection of SNP TSC0004506
aaacaaaaactc

SEQ ID NO: 277556 - DNA, 12 bp, Artificial Sequence
  Oligonucleotide primer for the detection of SNP TSC0004506
aaacgaaaactc

SEQ ID NO: 277557 - DNA, 12 bp, Artificial Sequence
  Oligonucleotide primer for the detection of SNP TSC0004506
aggagaggttta

SEQ ID NO: 277558 - DNA, 12 bp, Artificial Sequence
  Oligonucleotide primer for the detection of SNP TSC0004506
aagtggagattt

SEQ ID NO: 277559 - DNA, 12 bp, Artificial Sequence
  Oligonucleotide primer for the detection of SNP TSC0004506
aagcggagattt

SEQ ID NO: 277560 - DNA, 12 bp, Artificial Sequence
  Oligonucleotide primer for the detection of SNP TSC0004507
ctatctaaatac

SEQ ID NO: 277561 - DNA, 12 bp, Artificial Sequence
  Oligonucleotide primer for the detection of SNP TSC0004507
tggttaggagtg

SEQ ID NO: 277562 - DNA, 12 bp, Artificial Sequence
  Oligonucleotide primer for the detection of SNP TSC0004508
aaaaatattacc

SEQ ID NO: 277563 - DNA, 12 bp, Artificial Sequence
  Oligonucleotide primer for the detection of SNP TSC0004509
attttaatacat

SEQ ID NO: 277564 - DNA, 12 bp, Artificial Sequence
  Oligonucleotide primer for the detection of SNP TSC0004509
ttgggattatag

SEQ ID NO: 277565 - DNA, 12 bp, Artificial Sequence
  Oligonucleotide primer for the detection of SNP TSC0004510
aaccaaaacccc

SEQ ID NO: 277566 - DNA, 12 bp, Artificial Sequence
  Oligonucleotide primer for the detection of SNP TSC0004510
tttttttagggg

SEQ ID NO: 277567 - DNA, 12 bp, Artificial Sequence
  Oligonucleotide primer for the detection of SNP TSC0004511
gagagattgtag

SEQ ID NO: 277568 - DNA, 12 bp, Artificial Sequence
  Oligonucleotide primer for the detection of SNP TSC0004512
cttttaccacat

SEQ ID NO: 277569 - DNA, 12 bp, Artificial Sequence
  Oligonucleotide primer for the detection of SNP TSC0004512
tttgattaatag

SEQ ID NO: 277570 - DNA, 12 bp, Artificial Sequence
  Oligonucleotide primer for the detection of SNP TSC0004513
atttactaaaac

SEQ ID NO: 277571 - DNA, 12 bp, Artificial Sequence
  Oligonucleotide primer for the detection of SNP TSC0004513
aattttttttta

SEQ ID NO: 277572 - DNA, 12 bp, Artificial Sequence
  Oligonucleotide primer for the detection of SNP TSC0004514
tcaaatcataaa

SEQ ID NO: 277573 - DNA, 12 bp, Artificial Sequence
  Oligonucleotide primer for the detection of SNP TSC0004514
tttgttgagtaa

SEQ ID NO: 277574 - DNA, 12 bp, Artificial Sequence
  Oligonucleotide primer for the detection of SNP TSC0004514
ttactaaataaa

SEQ ID NO: 277575 - DNA, 12 bp, Artificial Sequence
  Oligonucleotide primer for the detection of SNP TSC0004514
taaattatagat

SEQ ID NO: 277576 - DNA, 12 bp, Artificial Sequence
  Oligonucleotide primer for the detection of SNP TSC0004516
tcccttccctaa

SEQ ID NO: 277577 - DNA, 12 bp, Artificial Sequence
  Oligonucleotide primer for the detection of SNP TSC0004516
tggttgtttgtg

SEQ ID NO: 277578 - DNA, 12 bp, Artificial Sequence
  Oligonucleotide primer for the detection of SNP TSC0004516
tggtcgtttgtg

SEQ ID NO: 277579 - DNA, 12 bp, Artificial Sequence
  Oligonucleotide primer for the detection of SNP TSC0004516
tggttgttcgtg

SEQ ID NO: 277580 - DNA, 12 bp, Artificial Sequence
  Oligonucleotide primer for the detection of SNP TSC0004516
tggtcgttcgtg

SEQ ID NO: 277581 - DNA, 12 bp, Artificial Sequence
  Oligonucleotide primer for the detection of SNP TSC0004516
taatcattcata

SEQ ID NO: 277582 - DNA, 12 bp, Artificial Sequence
  Oligonucleotide primer for the detection of SNP TSC0004516
taatcattcgta

SEQ ID NO: 277583 - DNA, 12 bp, Artificial Sequence
  Oligonucleotide primer for the detection of SNP TSC0004516
taatcgttcata

SEQ ID NO: 277584 - DNA, 12 bp, Artificial Sequence
  Oligonucleotide primer for the detection of SNP TSC0004516
taatcgttcgta

SEQ ID NO: 277585 - DNA, 12 bp, Artificial Sequence
  Oligonucleotide primer for the detection of SNP TSC0004517
tctcactttcct

SEQ ID NO: 277586 - DNA, 12 bp, Artificial Sequence
  Oligonucleotide primer for the detection of SNP TSC0004517
aattactcctac

SEQ ID NO: 277587 - DNA, 12 bp, Artificial Sequence
  Oligonucleotide primer for the detection of SNP TSC0004517
tttatttttttt

SEQ ID NO: 277588 - DNA, 12 bp, Artificial Sequence
  Oligonucleotide primer for the detection of SNP TSC0004517
tttatttttttc

SEQ ID NO: 277589 - DNA, 12 bp, Artificial Sequence
  Oligonucleotide primer for the detection of SNP TSC0004518
attatcacaaat

SEQ ID NO: 277590 - DNA, 12 bp, Artificial Sequence
  Oligonucleotide primer for the detection of SNP TSC0004518
ttgatgaattaa

SEQ ID NO: 277591 - DNA, 12 bp, Artificial Sequence
  Oligonucleotide primer for the detection of SNP TSC0004518
ctaataaatcaa

SEQ ID NO: 277592 - DNA, 12 bp, Artificial Sequence
  Oligonucleotide primer for the detection of SNP TSC0004518
ttgttataagtt

SEQ ID NO: 277593 - DNA, 12 bp, Artificial Sequence
  Oligonucleotide primer for the detection of SNP TSC0004520
taaaaaaacaac

SEQ ID NO: 277594 - DNA, 12 bp, Artificial Sequence
  Oligonucleotide primer for the detection of SNP TSC0004520
taaaaaaacgac

SEQ ID NO: 277595 - DNA, 12 bp, Artificial Sequence
  Oligonucleotide primer for the detection of SNP TSC0004520
taggatttatag

SEQ ID NO: 277596 - DNA, 12 bp, Artificial Sequence
  Oligonucleotide primer for the detection of SNP TSC0004520
caaaacccacaa

SEQ ID NO: 277597 - DNA, 12 bp, Artificial Sequence
  Oligonucleotide primer for the detection of SNP TSC0004520
tgggagggtggt

SEQ ID NO: 277598 - DNA, 12 bp, Artificial Sequence
  Oligonucleotide primer for the detection of SNP TSC0004520
tgggagggcggt

SEQ ID NO: 277599 - DNA, 12 bp, Artificial Sequence
  Oligonucleotide primer for the detection of SNP TSC0004520
tgggagggtggc

SEQ ID NO: 277600 - DNA, 12 bp, Artificial Sequence
  Oligonucleotide primer for the detection of SNP TSC0004520
tgggagggcggc

SEQ ID NO: 277601 - DNA, 12 bp, Artificial Sequence
  Oligonucleotide primer for the detection of SNP TSC0004521
catatcacataa

SEQ ID NO: 277602 - DNA, 12 bp, Artificial Sequence
  Oligonucleotide primer for the detection of SNP TSC0004521
aggttattgttt

SEQ ID NO: 277603 - DNA, 12 bp, Artificial Sequence
  Oligonucleotide primer for the detection of SNP TSC0004521
aaattattactt

SEQ ID NO: 277604 - DNA, 12 bp, Artificial Sequence
  Oligonucleotide primer for the detection of SNP TSC0004522
caaaataatata

SEQ ID NO: 277605 - DNA, 12 bp, Artificial Sequence
  Oligonucleotide primer for the detection of SNP TSC0004522
gatgtatttttt

SEQ ID NO: 277606 - DNA, 12 bp, Artificial Sequence
  Oligonucleotide primer for the detection of SNP TSC0004522
aatacacttttc

SEQ ID NO: 277607 - DNA, 12 bp, Artificial Sequence
  Oligonucleotide primer for the detection of SNP TSC0004522
ataagatggtgt

SEQ ID NO: 277608 - DNA, 12 bp, Artificial Sequence
  Oligonucleotide primer for the detection of SNP TSC0004523
ttctcttcctca

SEQ ID NO: 277609 - DNA, 12 bp, Artificial Sequence
  Oligonucleotide primer for the detection of SNP TSC0004523
ttctcttcctcg

SEQ ID NO: 277610 - DNA, 12 bp, Artificial Sequence
  Oligonucleotide primer for the detection of SNP TSC0004523
gtttttgtagat

SEQ ID NO: 277611 - DNA, 12 bp, Artificial Sequence
  Oligonucleotide primer for the detection of SNP TSC0004523
atccctacaaac

SEQ ID NO: 277612 - DNA, 12 bp, Artificial Sequence
  Oligonucleotide primer for the detection of SNP TSC0004524
cactaacaacca

SEQ ID NO: 277613 - DNA, 12 bp, Artificial Sequence
  Oligonucleotide primer for the detection of SNP TSC0004524
tttagttttatt

SEQ ID NO: 277614 - DNA, 12 bp, Artificial Sequence
  Oligonucleotide primer for the detection of SNP TSC0004524
tccaatttcacc

SEQ ID NO: 277615 - DNA, 12 bp, Artificial Sequence
  Oligonucleotide primer for the detection of SNP TSC0004524
tattggtaatta

SEQ ID NO: 277616 - DNA, 12 bp, Artificial Sequence
  Oligonucleotide primer for the detection of SNP TSC0004548
attcctccactt

SEQ ID NO: 277617 - DNA, 12 bp, Artificial Sequence
  Oligonucleotide primer for the detection of SNP TSC0004548
gtttagatgtaa

SEQ ID NO: 277618 - DNA, 12 bp, Artificial Sequence
  Oligonucleotide primer for the detection of SNP TSC0004551
cttacccaaaat

SEQ ID NO: 277619 - DNA, 12 bp, Artificial Sequence
  Oligonucleotide primer for the detection of SNP TSC0004551
tatgagttataa

SEQ ID NO: 277620 - DNA, 12 bp, Artificial Sequence
  Oligonucleotide primer for the detection of SNP TSC0004557
tcttctaacaat

SEQ ID NO: 277621 - DNA, 12 bp, Artificial Sequence
  Oligonucleotide primer for the detection of SNP TSC0004557
gtagttgaggga

SEQ ID NO: 277622 - DNA, 12 bp, Artificial Sequence
  Oligonucleotide primer for the detection of SNP TSC0004562
ccccatctttat

SEQ ID NO: 277623 - DNA, 12 bp, Artificial Sequence
  Oligonucleotide primer for the detection of SNP TSC0004562
aaggtagatgaa

SEQ ID NO: 277624 - DNA, 12 bp, Artificial Sequence
  Oligonucleotide primer for the detection of SNP TSC0004583
actaatccataa

SEQ ID NO: 277625 - DNA, 12 bp, Artificial Sequence
  Oligonucleotide primer for the detection of SNP TSC0004583
ttgtgggagata

SEQ ID NO: 277626 - DNA, 12 bp, Artificial Sequence
  Oligonucleotide primer for the detection of SNP TSC0004605
tggataatattt

SEQ ID NO: 277627 - DNA, 12 bp, Artificial Sequence
  Oligonucleotide primer for the detection of SNP TSC0004605
ttaaacaacatt

SEQ ID NO: 277628 - DNA, 12 bp, Artificial Sequence
  Oligonukleotid-Primer
agagggtataaa

SEQ ID NO: 277629 - DNA, 12 bp, Artificial Sequence
  Oligonucleotide primer for the detection of SNP TSC0004614
tacaaaaaaaat

SEQ ID NO: 277630 - DNA, 12 bp, Artificial Sequence
  Oligonucleotide primer for the detection of SNP TSC0004614
taaaattaagga

SEQ ID NO: 277631 - DNA, 12 bp, Artificial Sequence
  Oligonucleotide primer for the detection of SNP TSC0004615
actacccattcc

SEQ ID NO: 277632 - DNA, 12 bp, Artificial Sequence
  Oligonukleotid-Primer
ttttgattttag

SEQ ID NO: 277633 - DNA, 12 bp, Artificial Sequence
  Oligonucleotide primer for the detection of SNP TSC0004615
ctaactccaaaa

SEQ ID NO: 277634 - DNA, 12 bp, Artificial Sequence
  Oligonucleotide primer for the detection of SNP TSC0004615
ttgtttattttt

SEQ ID NO: 277635 - DNA, 12 bp, Artificial Sequence
  Oligonucleotide primer for the detection of SNP TSC0004617
ataacaaaaaat

SEQ ID NO: 277636 - DNA, 12 bp, Artificial Sequence
  Oligonucleotide primer for the detection of SNP TSC0004617
tagttgaaatga

SEQ ID NO: 277637 - DNA, 12 bp, Artificial Sequence
  Oligonucleotide primer for the detection of SNP TSC0004617
caattaaaataa

SEQ ID NO: 277638 - DNA, 12 bp, Artificial Sequence
  Oligonucleotide primer for the detection of SNP TSC0004617
ataataagaaat

SEQ ID NO: 277639 - DNA, 12 bp, Artificial Sequence
  Oligonucleotide primer for the detection of SNP TSC0004618
ataaaaacaact

SEQ ID NO: 277640 - DNA, 12 bp, Artificial Sequence
  Oligonucleotide primer for the detection of SNP TSC0004618
tttgaattttag

SEQ ID NO: 277641 - DNA, 12 bp, Artificial Sequence
  Oligonucleotide primer for the detection of SNP TSC0004618
ttcgaattttag

SEQ ID NO: 277642 - DNA, 12 bp, Artificial Sequence
  Oligonucleotide primer for the detection of SNP TSC0004620
actacataaact

SEQ ID NO: 277643 - DNA, 12 bp, Artificial Sequence
  Oligonucleotide primer for the detection of SNP TSC0004620
aattttttaatg

SEQ ID NO: 277644 - DNA, 12 bp, Artificial Sequence
  Oligonucleotide primer for the detection of SNP TSC0004638
taataatcctaa

SEQ ID NO: 277645 - DNA, 12 bp, Artificial Sequence
  Oligonucleotide primer for the detection of SNP TSC0004638
ttttggtttttt

SEQ ID NO: 277646 - DNA, 12 bp, Artificial Sequence
  Oligonucleotide primer for the detection of SNP TSC0004638
tttcggtttttt

SEQ ID NO: 277647 - DNA, 12 bp, Artificial Sequence
  Oligonucleotide primer for the detection of SNP TSC0004638
cctcgacctccc

SEQ ID NO: 277648 - DNA, 12 bp, Artificial Sequence
  Oligonucleotide primer for the detection of SNP TSC0004638
tggtaattttag

SEQ ID NO: 277649 - DNA, 12 bp, Artificial Sequence
  Oligonucleotide primer for the detection of SNP TSC0004650
ttctaataaatt

SEQ ID NO: 277650 - DNA, 12 bp, Artificial Sequence
  Oligonucleotide primer for the detection of SNP TSC0004650
tagtgagattag

SEQ ID NO: 277651 - DNA, 12 bp, Artificial Sequence
  Oligonucleotide primer for the detection of SNP TSC0004650
tagcgagattag

SEQ ID NO: 277652 - DNA, 12 bp, Artificial Sequence
  Oligonucleotide primer for the detection of SNP TSC0004662
aatctcaatctc

SEQ ID NO: 277653 - DNA, 12 bp, Artificial Sequence
  Oligonucleotide primer for the detection of SNP TSC0004662
aatctcgatctc

SEQ ID NO: 277654 - DNA, 12 bp, Artificial Sequence
  Oligonucleotide primer for the detection of SNP TSC0004662
attatgaggttg

SEQ ID NO: 277655 - DNA, 12 bp, Artificial Sequence
  Oligonucleotide primer for the detection of SNP TSC0004662
attacgaggttg

SEQ ID NO: 277656 - DNA, 12 bp, Artificial Sequence
  Oligonucleotide primer for the detection of SNP TSC0004662
attatgaggtcg

SEQ ID NO: 277657 - DNA, 12 bp, Artificial Sequence
  Oligonucleotide primer for the detection of SNP TSC0004662
attacgaggtcg

SEQ ID NO: 277658 - DNA, 12 bp, Artificial Sequence
  Oligonucleotide primer for the detection of SNP TSC0004664
attccactctat

SEQ ID NO: 277659 - DNA, 12 bp, Artificial Sequence
  Oligonucleotide primer for the detection of SNP TSC0004664
gtgagaagagta

SEQ ID NO: 277660 - DNA, 12 bp, Artificial Sequence
  Oligonucleotide primer for the detection of SNP TSC0004664
ataaaaaaaaca

SEQ ID NO: 277661 - DNA, 12 bp, Artificial Sequence
  Oligonucleotide primer for the detection of SNP TSC0004664
attttattttgt

SEQ ID NO: 277662 - DNA, 12 bp, Artificial Sequence
  Oligonucleotide primer for the detection of SNP TSC0004665
aaaaaactatta

SEQ ID NO: 277663 - DNA, 12 bp, Artificial Sequence
  Oligonucleotide primer for the detection of SNP TSC0004665
ttggtttgtaat

SEQ ID NO: 277664 - DNA, 12 bp, Artificial Sequence
  Oligonucleotide primer for the detection of SNP TSC0004665
ctaacttataac

SEQ ID NO: 277665 - DNA, 12 bp, Artificial Sequence
  Oligonucleotide primer for the detection of SNP TSC0004665
gagaggttgttg

SEQ ID NO: 277666 - DNA, 12 bp, Artificial Sequence
  Oligonucleotide primer for the detection of SNP TSC0004667
attaataaaaaa

SEQ ID NO: 277667 - DNA, 12 bp, Artificial Sequence
  Oligonucleotide primer for the detection of SNP TSC0004667
tttattattttt

SEQ ID NO: 277668 - DNA, 12 bp, Artificial Sequence
  Oligonucleotide primer for the detection of SNP TSC0004667
tcttatcacctc

SEQ ID NO: 277669 - DNA, 12 bp, Artificial Sequence
  Oligonucleotide primer for the detection of SNP TSC0004667
agattaataggg

SEQ ID NO: 277670 - DNA, 12 bp, Artificial Sequence
  Oligonucleotide primer for the detection of SNP TSC0004670
acttctaatccc

SEQ ID NO: 277671 - DNA, 12 bp, Artificial Sequence
  Oligonucleotide primer for the detection of SNP TSC0004672
aaatatcaaact

SEQ ID NO: 277672 - DNA, 12 bp, Artificial Sequence
  Oligonucleotide primer for the detection of SNP TSC0004672
ttttttggttgt

SEQ ID NO: 277673 - DNA, 12 bp, Artificial Sequence
  Oligonucleotide primer for the detection of SNP TSC0004672
ttccttaactac

SEQ ID NO: 277674 - DNA, 12 bp, Artificial Sequence
  Oligonucleotide primer for the detection of SNP TSC0004672
aagtattagatt

SEQ ID NO: 277675 - DNA, 12 bp, Artificial Sequence
  Oligonucleotide primer for the detection of SNP TSC0004680
tggtagagatgg

SEQ ID NO: 277676 - DNA, 12 bp, Artificial Sequence
  Oligonucleotide primer for the detection of SNP TSC0004688
cctcattttaaa

SEQ ID NO: 277677 - DNA, 12 bp, Artificial Sequence
  Oligonucleotide primer for the detection of SNP TSC0004688
aatggatttaag

SEQ ID NO: 277678 - DNA, 12 bp, Artificial Sequence
  Oligonucleotide primer for the detection of SNP TSC0004715
aaaaattaaagt

SEQ ID NO: 277679 - DNA, 12 bp, Artificial Sequence
  Oligonucleotide primer for the detection of SNP TSC0004715
aaaaccaaaata

SEQ ID NO: 277680 - DNA, 12 bp, Artificial Sequence
  Oligonucleotide primer for the detection of SNP TSC0004715
ggaggagaagag

SEQ ID NO: 277681 - DNA, 12 bp, Artificial Sequence
  Oligonucleotide primer for the detection of SNP TSC0004716
ctacaaataaaa

SEQ ID NO: 277682 - DNA, 12 bp, Artificial Sequence
  Oligonucleotide primer for the detection of SNP TSC0004716
aaggatatttat

SEQ ID NO: 277683 - DNA, 12 bp, Artificial Sequence
  Oligonucleotide primer for the detection of SNP TSC0004716
aaacatccacaa

SEQ ID NO: 277684 - DNA, 12 bp, Artificial Sequence
  Oligonucleotide primer for the detection of SNP TSC0004716
agatgggatttt

SEQ ID NO: 277685 - DNA, 12 bp, Artificial Sequence
  Oligonucleotide primer for the detection of SNP TSC0004717
tataaatatcct

SEQ ID NO: 277686 - DNA, 12 bp, Artificial Sequence
  Oligonucleotide primer for the detection of SNP TSC0004717
aatattaataaa

SEQ ID NO: 277687 - DNA, 12 bp, Artificial Sequence
  Oligonucleotide primer for the detection of SNP TSC0004717
aacatcaacaaa

SEQ ID NO: 277688 - DNA, 12 bp, Artificial Sequence
  Oligonucleotide primer for the detection of SNP TSC0004717
tgtggatgtttt

SEQ ID NO: 277689 - DNA, 12 bp, Artificial Sequence
  Oligonucleotide primer for the detection of SNP TSC0004720
ataaatcaaaat

SEQ ID NO: 277690 - DNA, 12 bp, Artificial Sequence
  Oligonucleotide primer for the detection of SNP TSC0004720
aaattaagaaga

SEQ ID NO: 277691 - DNA, 12 bp, Artificial Sequence
  Oligonucleotide primer for the detection of SNP TSC0004720
aaaccaaaaaaa

SEQ ID NO: 277692 - DNA, 12 bp, Artificial Sequence
  Oligonucleotide primer for the detection of SNP TSC0004720
gtaaattaggat

SEQ ID NO: 277693 - DNA, 12 bp, Artificial Sequence
  Oligonucleotide primer for the detection of SNP TSC0004721
acaaaatcctat

SEQ ID NO: 277694 - DNA, 12 bp, Artificial Sequence
  Oligonucleotide primer for the detection of SNP TSC0004721
atagatggttta

SEQ ID NO: 277695 - DNA, 12 bp, Artificial Sequence
  Oligonucleotide primer for the detection of SNP TSC0004721
ataaataattca

SEQ ID NO: 277696 - DNA, 12 bp, Artificial Sequence
  Oligonucleotide primer for the detection of SNP TSC0004721
atagagttttgt

SEQ ID NO: 277697 - DNA, 12 bp, Artificial Sequence
  Oligonucleotide primer for the detection of SNP TSC0004726
accaaacctata

SEQ ID NO: 277698 - DNA, 12 bp, Artificial Sequence
  Oligonucleotide primer for the detection of SNP TSC0004726
gtttgattagtt

SEQ ID NO: 277699 - DNA, 12 bp, Artificial Sequence
  Oligonucleotide primer for the detection of SNP TSC0004726
ctaatcaatcaa

SEQ ID NO: 277700 - DNA, 12 bp, Artificial Sequence
  Oligonucleotide primer for the detection of SNP TSC0004726
ttaggtttatgt

SEQ ID NO: 277701 - DNA, 12 bp, Artificial Sequence
  Oligonucleotide primer for the detection of SNP TSC0004727
tagtttggaagt

SEQ ID NO: 277702 - DNA, 12 bp, Artificial Sequence
  Oligonucleotide primer for the detection of SNP TSC0004727
caatctaaaaat

SEQ ID NO: 277703 - DNA, 12 bp, Artificial Sequence
  Oligonucleotide primer for the detection of SNP TSC0004727
aaaaaatgttaa

SEQ ID NO: 277704 - DNA, 12 bp, Artificial Sequence
  Oligonucleotide primer for the detection of SNP TSC0004733
cactacacaaaa

SEQ ID NO: 277705 - DNA, 12 bp, Artificial Sequence
  Oligonucleotide primer for the detection of SNP TSC0004733
cactacacgaaa

SEQ ID NO: 277706 - DNA, 12 bp, Artificial Sequence
  Oligonucleotide primer for the detection of SNP TSC0004733
ggtgttgaggtt

SEQ ID NO: 277707 - DNA, 12 bp, Artificial Sequence
  Oligonucleotide primer for the detection of SNP TSC0004733
aatactaaaacc

SEQ ID NO: 277708 - DNA, 12 bp, Artificial Sequence
  Oligonucleotide primer for the detection of SNP TSC0004733
tattgtatggaa

SEQ ID NO: 277709 - DNA, 12 bp, Artificial Sequence
  Oligonucleotide primer for the detection of SNP TSC0004733
tattgtacggaa

SEQ ID NO: 277710 - DNA, 12 bp, Artificial Sequence
  Oligonucleotide primer for the detection of SNP TSC0004746
aaataatataaa

SEQ ID NO: 277711 - DNA, 12 bp, Artificial Sequence
  Oligonucleotide primer for the detection of SNP TSC0004746
agtttcgttttt

SEQ ID NO: 277712 - DNA, 12 bp, Artificial Sequence
  Oligonucleotide primer for the detection of SNP TSC0004746
aactccacctcc

SEQ ID NO: 277713 - DNA, 12 bp, Artificial Sequence
  Oligonucleotide primer for the detection of SNP TSC0004746
aactccgcctcc

SEQ ID NO: 277714 - DNA, 12 bp, Artificial Sequence
  Oligonucleotide primer for the detection of SNP TSC0004746
gaatggtgtgaa

SEQ ID NO: 277715 - DNA, 12 bp, Artificial Sequence
  Oligonucleotide primer for the detection of SNP TSC0004747
actaaaaataca

SEQ ID NO: 277716 - DNA, 12 bp, Artificial Sequence
  Oligonucleotide primer for the detection of SNP TSC0004747
atattttggtta

SEQ ID NO: 277717 - DNA, 12 bp, Artificial Sequence
  Oligonucleotide primer for the detection of SNP TSC0004747
atatttcggtta

SEQ ID NO: 277718 - DNA, 12 bp, Artificial Sequence
  Oligonucleotide primer for the detection of SNP TSC0004759
ttaacttaaatt

SEQ ID NO: 277719 - DNA, 12 bp, Artificial Sequence
  Oligonucleotide primer for the detection of SNP TSC0004759
atggtagtttag

SEQ ID NO: 277720 - DNA, 12 bp, Artificial Sequence
  Oligonucleotide primer for the detection of SNP TSC0004760
tttctaaactac

SEQ ID NO: 277721 - DNA, 12 bp, Artificial Sequence
  Oligonucleotide primer for the detection of SNP TSC0004760
ctccaataaaat

SEQ ID NO: 277722 - DNA, 12 bp, Artificial Sequence
  Oligonucleotide primer for the detection of SNP TSC0004760
tttttgagttgt

SEQ ID NO: 277723 - DNA, 12 bp, Artificial Sequence
  Oligonucleotide primer for the detection of SNP TSC0004766
ccaaactaaaaa

SEQ ID NO: 277724 - DNA, 12 bp, Artificial Sequence
  Oligonucleotide primer for the detection of SNP TSC0004766
tttaaagttagt

SEQ ID NO: 277725 - DNA, 12 bp, Artificial Sequence
  Oligonucleotide primer for the detection of SNP TSC0004766
cctaaaaccaac

SEQ ID NO: 277726 - DNA, 12 bp, Artificial Sequence
  Oligonucleotide primer for the detection of SNP TSC0004766
ttaaattggagg

SEQ ID NO: 277727 - DNA, 12 bp, Artificial Sequence
  Oligonucleotide primer for the detection of SNP TSC0004780
taataccactac

SEQ ID NO: 277728 - DNA, 12 bp, Artificial Sequence
  Oligonucleotide primer for the detection of SNP TSC0004780
gtttaggttgga

SEQ ID NO: 277729 - DNA, 12 bp, Artificial Sequence
  Oligonucleotide primer for the detection of SNP TSC0004783
ttactccaatca

SEQ ID NO: 277730 - DNA, 12 bp, Artificial Sequence
  Oligonucleotide primer for the detection of SNP TSC0004783
tggtaagatgat

SEQ ID NO: 277731 - DNA, 12 bp, Artificial Sequence
  Oligonucleotide primer for the detection of SNP TSC0004783
aataaaataata

SEQ ID NO: 277732 - DNA, 12 bp, Artificial Sequence
  Oligonucleotide primer for the detection of SNP TSC0004783
tattttagttat

SEQ ID NO: 277733 - DNA, 12 bp, Artificial Sequence
  Oligonucleotide primer for the detection of SNP TSC0004788
ctcaatacacat

SEQ ID NO: 277734 - DNA, 12 bp, Artificial Sequence
  Oligonucleotide primer for the detection of SNP TSC0004788
tgatttttttag

SEQ ID NO: 277735 - DNA, 12 bp, Artificial Sequence
  Oligonucleotide primer for the detection of SNP TSC0004788
taacttccccaa

SEQ ID NO: 277736 - DNA, 12 bp, Artificial Sequence
  Oligonucleotide primer for the detection of SNP TSC0004788
tttaatatatat

SEQ ID NO: 277737 - DNA, 12 bp, Artificial Sequence
  Oligonucleotide primer for the detection of SNP TSC0004820
ccatatacaaac

SEQ ID NO: 277738 - DNA, 12 bp, Artificial Sequence
  Oligonucleotide primer for the detection of SNP TSC0004820
ttttgaatagta

SEQ ID NO: 277739 - DNA, 12 bp, Artificial Sequence
  Oligonucleotide primer for the detection of SNP TSC0004821
caaaacacctat

SEQ ID NO: 277740 - DNA, 12 bp, Artificial Sequence
  Oligonucleotide primer for the detection of SNP TSC0004821
tattgaagtaga

SEQ ID NO: 277741 - DNA, 12 bp, Artificial Sequence
  Oligonucleotide primer for the detection of SNP TSC0004828
ccacaaacaaac

SEQ ID NO: 277742 - DNA, 12 bp, Artificial Sequence
  Oligonucleotide primer for the detection of SNP TSC0004829
aaactatcattt

SEQ ID NO: 277743 - DNA, 12 bp, Artificial Sequence
  Oligonucleotide primer for the detection of SNP TSC0004829
tagaataggtga

SEQ ID NO: 277744 - DNA, 12 bp, Artificial Sequence
  Oligonucleotide primer for the detection of SNP TSC0004830
ttcttcatctac

SEQ ID NO: 277745 - DNA, 12 bp, Artificial Sequence
  Oligonucleotide primer for the detection of SNP TSC0004830
ttgttgttttta

SEQ ID NO: 277746 - DNA, 12 bp, Artificial Sequence
  Oligonucleotide primer for the detection of SNP TSC0004830
tcgttgttttta

SEQ ID NO: 277747 - DNA, 12 bp, Artificial Sequence
  Oligonucleotide primer for the detection of SNP TSC0004830
ccattattccta

SEQ ID NO: 277748 - DNA, 12 bp, Artificial Sequence
  Oligonucleotide primer for the detection of SNP TSC0004830
ccgttattccta

SEQ ID NO: 277749 - DNA, 12 bp, Artificial Sequence
  Oligonucleotide primer for the detection of SNP TSC0004830
ttttttatttgt

SEQ ID NO: 277750 - DNA, 12 bp, Artificial Sequence
  Oligonucleotide primer for the detection of SNP TSC0004831
ctattctaaaaa

SEQ ID NO: 277751 - DNA, 12 bp, Artificial Sequence
  Oligonucleotide primer for the detection of SNP TSC0004831
ggaataatggta

SEQ ID NO: 277752 - DNA, 12 bp, Artificial Sequence
  Oligonucleotide primer for the detection of SNP TSC0004831
ggaataacggta

SEQ ID NO: 277753 - DNA, 12 bp, Artificial Sequence
  Oligonucleotide primer for the detection of SNP TSC0004835
tttattatatat

SEQ ID NO: 277754 - DNA, 12 bp, Artificial Sequence
  Oligonucleotide primer for the detection of SNP TSC0004835
tttattatatac

SEQ ID NO: 277755 - DNA, 12 bp, Artificial Sequence
  Oligonucleotide primer for the detection of SNP TSC0004835
ttccattacaca

SEQ ID NO: 277756 - DNA, 12 bp, Artificial Sequence
  Oligonucleotide primer for the detection of SNP TSC0004835
gagaaagagaat

SEQ ID NO: 277757 - DNA, 12 bp, Artificial Sequence
  Oligonucleotide primer for the detection of SNP TSC0004837
aattactttttt

SEQ ID NO: 277758 - DNA, 12 bp, Artificial Sequence
  Oligonucleotide primer for the detection of SNP TSC0004837
gattttttaagg

SEQ ID NO: 277759 - DNA, 12 bp, Artificial Sequence
  Oligonucleotide primer for the detection of SNP TSC0004838
attttttttttc

SEQ ID NO: 277760 - DNA, 12 bp, Artificial Sequence
  Oligonucleotide primer for the detection of SNP TSC0004838
ttttgttatgtg

SEQ ID NO: 277761 - DNA, 12 bp, Artificial Sequence
  Oligonucleotide primer for the detection of SNP TSC0004839
taaaacaatacc

SEQ ID NO: 277762 - DNA, 12 bp, Artificial Sequence
  Oligonucleotide primer for the detection of SNP TSC0004839
ggaaaagtttgt

SEQ ID NO: 277763 - DNA, 12 bp, Artificial Sequence
  Oligonucleotide primer for the detection of SNP TSC0004839
ggaaaagtttgc

SEQ ID NO: 277764 - DNA, 12 bp, Artificial Sequence
  Oligonucleotide primer for the detection of SNP TSC0004839
aaaaaaaattta

SEQ ID NO: 277765 - DNA, 12 bp, Artificial Sequence
  Oligonucleotide primer for the detection of SNP TSC0004839
tgaaataatgtt

SEQ ID NO: 277766 - DNA, 12 bp, Artificial Sequence
  Oligonucleotide primer for the detection of SNP TSC0004847
cttattaatctt

SEQ ID NO: 277767 - DNA, 12 bp, Artificial Sequence
  Oligonucleotide primer for the detection of SNP TSC0004847
aataataaaata

SEQ ID NO: 277768 - DNA, 12 bp, Artificial Sequence
  Oligonucleotide primer for the detection of SNP TSC0004885
acataaaaacca

SEQ ID NO: 277769 - DNA, 12 bp, Artificial Sequence
  Oligonucleotide primer for the detection of SNP TSC0004885
acgtaaaaacca

SEQ ID NO: 277770 - DNA, 12 bp, Artificial Sequence
  Oligonucleotide primer for the detection of SNP TSC0004885
gtaattatatat

SEQ ID NO: 277771 - DNA, 12 bp, Artificial Sequence
  Oligonucleotide primer for the detection of SNP TSC0004885
acaattatatat

SEQ ID NO: 277772 - DNA, 12 bp, Artificial Sequence
  Oligonucleotide primer for the detection of SNP TSC0004885
gtgtgagaatta

SEQ ID NO: 277773 - DNA, 12 bp, Artificial Sequence
  Oligonucleotide primer for the detection of SNP TSC0004885
gcgtgagaatta

SEQ ID NO: 277774 - DNA, 12 bp, Artificial Sequence
  Oligonucleotide primer for the detection of SNP TSC0004900
caaatcctcata

SEQ ID NO: 277775 - DNA, 12 bp, Artificial Sequence
  Oligonucleotide primer for the detection of SNP TSC0004900
caaatcctcgta

SEQ ID NO: 277776 - DNA, 12 bp, Artificial Sequence
  Oligonucleotide primer for the detection of SNP TSC0004900
aaaatattttta

SEQ ID NO: 277777 - DNA, 12 bp, Artificial Sequence
  Oligonucleotide primer for the detection of SNP TSC0004900
aaaatattccta

SEQ ID NO: 277778 - DNA, 12 bp, Artificial Sequence
  Oligonucleotide primer for the detection of SNP TSC0004900
ataaatttttgt

SEQ ID NO: 277779 - DNA, 12 bp, Artificial Sequence
  Oligonucleotide primer for the detection of SNP TSC0004900
ataaattttcgt

SEQ ID NO: 277780 - DNA, 12 bp, Artificial Sequence
  Oligonucleotide primer for the detection of SNP TSC0004906
ctttataatctt

SEQ ID NO: 277781 - DNA, 12 bp, Artificial Sequence
  Oligonucleotide primer for the detection of SNP TSC0004906
tttaaaagttaa

SEQ ID NO: 277782 - DNA, 12 bp, Artificial Sequence
  Oligonucleotide primer for the detection of SNP TSC0004907
aaacctaaatac

SEQ ID NO: 277783 - DNA, 12 bp, Artificial Sequence
  Oligonucleotide primer for the detection of SNP TSC0004907
aaggaattgggt

SEQ ID NO: 277784 - DNA, 12 bp, Artificial Sequence
  Oligonucleotide primer for the detection of SNP TSC0004907
agatttaggtat

SEQ ID NO: 277785 - DNA, 12 bp, Artificial Sequence
  Oligonucleotide primer for the detection of SNP TSC0004908
tacatatattcc

SEQ ID NO: 277786 - DNA, 12 bp, Artificial Sequence
  Oligonucleotide primer for the detection of SNP TSC0004908
tacgtatattcc

SEQ ID NO: 277787 - DNA, 12 bp, Artificial Sequence
  Oligonucleotide primer for the detection of SNP TSC0004908
gataagaattta

SEQ ID NO: 277788 - DNA, 12 bp, Artificial Sequence
  Oligonucleotide primer for the detection of SNP TSC0004908
aacaaaaattta

SEQ ID NO: 277789 - DNA, 12 bp, Artificial Sequence
  Oligonucleotide primer for the detection of SNP TSC0004908
tatgtgtgtttt

SEQ ID NO: 277790 - DNA, 12 bp, Artificial Sequence
  Oligonucleotide primer for the detection of SNP TSC0004908
tacgtgtgtttt

SEQ ID NO: 277791 - DNA, 12 bp, Artificial Sequence
  Oligonucleotide primer for the detection of SNP TSC0004909
ctcaaacttccc

SEQ ID NO: 277792 - DNA, 12 bp, Artificial Sequence
  Oligonucleotide primer for the detection of SNP TSC0004909
gtggagtgggta

SEQ ID NO: 277793 - DNA, 12 bp, Artificial Sequence
  Oligonucleotide primer for the detection of SNP TSC0004909
ataaaataaaca

SEQ ID NO: 277794 - DNA, 12 bp, Artificial Sequence
  Oligonucleotide primer for the detection of SNP TSC0004921
aaaaacaaccca

SEQ ID NO: 277795 - DNA, 12 bp, Artificial Sequence
  Oligonucleotide primer for the detection of SNP TSC0004921
agagagatataa

SEQ ID NO: 277796 - DNA, 12 bp, Artificial Sequence
  Oligonucleotide primer for the detection of SNP TSC0004921
aaaaaaacacaa

SEQ ID NO: 277797 - DNA, 12 bp, Artificial Sequence
  Oligonucleotide primer for the detection of SNP TSC0004921
taggagtagttt

SEQ ID NO: 277798 - DNA, 12 bp, Artificial Sequence
  Oligonucleotide primer for the detection of SNP TSC0004929
ccaataccacaa

SEQ ID NO: 277799 - DNA, 12 bp, Artificial Sequence
  Oligonucleotide primer for the detection of SNP TSC0004929
tgaattaattat

SEQ ID NO: 277800 - DNA, 12 bp, Artificial Sequence
  Oligonucleotide primer for the detection of SNP TSC0004929
ccaattataaaa

SEQ ID NO: 277801 - DNA, 12 bp, Artificial Sequence
  Oligonucleotide primer for the detection of SNP TSC0004929
aatgttataatt

SEQ ID NO: 277802 - DNA, 12 bp, Artificial Sequence
  Oligonucleotide primer for the detection of SNP TSC0004936
actacaataaac

SEQ ID NO: 277803 - DNA, 12 bp, Artificial Sequence
  Oligonucleotide primer for the detection of SNP TSC0004936
ttagtggtatga

SEQ ID NO: 277804 - DNA, 12 bp, Artificial Sequence
  Oligonucleotide primer for the detection of SNP TSC0004936
ttagtggtacga

SEQ ID NO: 277805 - DNA, 12 bp, Artificial Sequence
  Oligonucleotide primer for the detection of SNP TSC0004940
caaaaatttttc

SEQ ID NO: 277806 - DNA, 12 bp, Artificial Sequence
  Oligonucleotide primer for the detection of SNP TSC0004940
attataagagta

SEQ ID NO: 277807 - DNA, 12 bp, Artificial Sequence
  Oligonucleotide primer for the detection of SNP TSC0004976
cccccaataaaa

SEQ ID NO: 277808 - DNA, 12 bp, Artificial Sequence
  Oligonucleotide primer for the detection of SNP TSC0004976
cccccgataaaa

SEQ ID NO: 277809 - DNA, 12 bp, Artificial Sequence
  Oligonucleotide primer for the detection of SNP TSC0004976
tgtaattagaaa

SEQ ID NO: 277810 - DNA, 12 bp, Artificial Sequence
  Oligonucleotide primer for the detection of SNP TSC0004976
tacaactaaaaa

SEQ ID NO: 277811 - DNA, 12 bp, Artificial Sequence
  Oligonucleotide primer for the detection of SNP TSC0004976
ttttgatgggat

SEQ ID NO: 277812 - DNA, 12 bp, Artificial Sequence
  Oligonucleotide primer for the detection of SNP TSC0004976
tttcgatgggat

SEQ ID NO: 277813 - DNA, 12 bp, Artificial Sequence
  Oligonucleotide primer for the detection of SNP TSC0004977
ttacactataat

SEQ ID NO: 277814 - DNA, 12 bp, Artificial Sequence
  Oligonucleotide primer for the detection of SNP TSC0004977
ataattatttta

SEQ ID NO: 277815 - DNA, 12 bp, Artificial Sequence
  Oligonucleotide primer for the detection of SNP TSC0004978
aaacttatcttc

SEQ ID NO: 277816 - DNA, 12 bp, Artificial Sequence
  Oligonucleotide primer for the detection of SNP TSC0004978
attagggattag

SEQ ID NO: 277817 - DNA, 12 bp, Artificial Sequence
  Oligonucleotide primer for the detection of SNP TSC0004978
accaaaaactaa

SEQ ID NO: 277818 - DNA, 12 bp, Artificial Sequence
  Oligonucleotide primer for the detection of SNP TSC0004978
aaatttgttttt

SEQ ID NO: 277819 - DNA, 12 bp, Artificial Sequence
  Oligonucleotide primer for the detection of SNP TSC0004979
tatatattctat

SEQ ID NO: 277820 - DNA, 12 bp, Artificial Sequence
  Oligonucleotide primer for the detection of SNP TSC0004979
tatgggttttta

SEQ ID NO: 277821 - DNA, 12 bp, Artificial Sequence
  Oligonucleotide primer for the detection of SNP TSC0004987
tataataatctt

SEQ ID NO: 277822 - DNA, 12 bp, Artificial Sequence
  Oligonucleotide primer for the detection of SNP TSC0004987
gttatggatata

SEQ ID NO: 277823 - DNA, 12 bp, Artificial Sequence
  Oligonucleotide primer for the detection of SNP TSC0005008
aaaataccacac

SEQ ID NO: 277824 - DNA, 12 bp, Artificial Sequence
  Oligonucleotide primer for the detection of SNP TSC0005008
atttaataaata

SEQ ID NO: 277825 - DNA, 12 bp, Artificial Sequence
  Oligonucleotide primer for the detection of SNP TSC0005011
atcaaaatcaca

SEQ ID NO: 277826 - DNA, 12 bp, Artificial Sequence
  Oligonucleotide primer for the detection of SNP TSC0005011
gtgtatgtgtgt

SEQ ID NO: 277827 - DNA, 12 bp, Artificial Sequence
  Oligonucleotide primer for the detection of SNP TSC0005011
gcgtatgtgtgt

SEQ ID NO: 277828 - DNA, 12 bp, Artificial Sequence
  Oligonucleotide primer for the detection of SNP TSC0005011
gtgtacgtgtgt

SEQ ID NO: 277829 - DNA, 12 bp, Artificial Sequence
  Oligonucleotide primer for the detection of SNP TSC0005011
gcgtacgtgtgt

SEQ ID NO: 277830 - DNA, 12 bp, Artificial Sequence
  Oligonucleotide primer for the detection of SNP TSC0005011
acacacgtatat

SEQ ID NO: 277831 - DNA, 12 bp, Artificial Sequence
  Oligonucleotide primer for the detection of SNP TSC0005011
acgcacatatat

SEQ ID NO: 277832 - DNA, 12 bp, Artificial Sequence
  Oligonucleotide primer for the detection of SNP TSC0005011
acgcacgtatat

SEQ ID NO: 277833 - DNA, 12 bp, Artificial Sequence
  Oligonucleotide primer for the detection of SNP TSC0005011
attagaattata

SEQ ID NO: 277834 - DNA, 12 bp, Artificial Sequence
  Oligonucleotide primer for the detection of SNP TSC0005012
tcattacaacaa

SEQ ID NO: 277835 - DNA, 12 bp, Artificial Sequence
  Oligonucleotide primer for the detection of SNP TSC0005012
tcattacgacaa

SEQ ID NO: 277836 - DNA, 12 bp, Artificial Sequence
  Oligonucleotide primer for the detection of SNP TSC0005012
ttgtgttttagt

SEQ ID NO: 277837 - DNA, 12 bp, Artificial Sequence
  Oligonucleotide primer for the detection of SNP TSC0005012
ctatatcctaat

SEQ ID NO: 277838 - DNA, 12 bp, Artificial Sequence
  Oligonucleotide primer for the detection of SNP TSC0005012
ttattgcggtaa

SEQ ID NO: 277839 - DNA, 12 bp, Artificial Sequence
  Oligonucleotide primer for the detection of SNP TSC0005018
taaatttaatac

SEQ ID NO: 277840 - DNA, 12 bp, Artificial Sequence
  Oligonucleotide primer for the detection of SNP TSC0005018
ttatttttgtta

SEQ ID NO: 277841 - DNA, 12 bp, Artificial Sequence
  Oligonucleotide primer for the detection of SNP TSC0005038
ttttaaggaaat

SEQ ID NO: 277842 - DNA, 12 bp, Artificial Sequence
  Oligonucleotide primer for the detection of SNP TSC0005038
ccccaaaaaaac

SEQ ID NO: 277843 - DNA, 12 bp, Artificial Sequence
  Oligonucleotide primer for the detection of SNP TSC0005038
gtgttggttaat

SEQ ID NO: 277844 - DNA, 12 bp, Artificial Sequence
  Oligonucleotide primer for the detection of SNP TSC0005047
aaacttaaaata

SEQ ID NO: 277845 - DNA, 12 bp, Artificial Sequence
  Oligonucleotide primer for the detection of SNP TSC0005047
gttattgaagtt

SEQ ID NO: 277846 - DNA, 12 bp, Artificial Sequence
  Oligonucleotide primer for the detection of SNP TSC0005047
atcactaaaatt

SEQ ID NO: 277847 - DNA, 12 bp, Artificial Sequence
  Oligonucleotide primer for the detection of SNP TSC0005047
aaatttgagata

SEQ ID NO: 277848 - DNA, 12 bp, Artificial Sequence
  Oligonucleotide primer for the detection of SNP TSC0005080
cttataacaacc

SEQ ID NO: 277849 - DNA, 12 bp, Artificial Sequence
  Oligonucleotide primer for the detection of SNP TSC0005080
tggagaatttag

SEQ ID NO: 277850 - DNA, 12 bp, Artificial Sequence
  Oligonucleotide primer for the detection of SNP TSC0005080
aaaaaacttaaa

SEQ ID NO: 277851 - DNA, 12 bp, Artificial Sequence
  Oligonucleotide primer for the detection of SNP TSC0005080
tttataatagtt

SEQ ID NO: 277852 - DNA, 12 bp, Artificial Sequence
  Oligonucleotide primer for the detection of SNP TSC0005080
tttataatagtc

SEQ ID NO: 277853 - DNA, 12 bp, Artificial Sequence
  Oligonucleotide primer for the detection of SNP TSC0005084
aattaatttcta

SEQ ID NO: 277854 - DNA, 12 bp, Artificial Sequence
  Oligonucleotide primer for the detection of SNP TSC0005084
aaaataatttgt

SEQ ID NO: 277855 - DNA, 12 bp, Artificial Sequence
  Oligonucleotide primer for the detection of SNP TSC0005084
aaaacaacttat

SEQ ID NO: 277856 - DNA, 12 bp, Artificial Sequence
  Oligonucleotide primer for the detection of SNP TSC0005084
agttaatttttg

SEQ ID NO: 277857 - DNA, 12 bp, Artificial Sequence
  Oligonucleotide primer for the detection of SNP TSC0005085
ccatataaaaaa

SEQ ID NO: 277858 - DNA, 12 bp, Artificial Sequence
  Oligonucleotide primer for the detection of SNP TSC0005085
tatatgttttag

SEQ ID NO: 277859 - DNA, 12 bp, Artificial Sequence
  Oligonukleotid-Primer
cacatatcccaa

SEQ ID NO: 277860 - DNA, 12 bp, Artificial Sequence
  Oligonucleotide primer for the detection of SNP TSC0005085
ttatgtagaaaa

SEQ ID NO: 277861 - DNA, 12 bp, Artificial Sequence
  Oligonucleotide primer for the detection of SNP TSC0005098
ttaatacattaa

SEQ ID NO: 277862 - DNA, 12 bp, Artificial Sequence
  Oligonucleotide primer for the detection of SNP TSC0005098
ttaatacgttaa

SEQ ID NO: 277863 - DNA, 12 bp, Artificial Sequence
  Oligonucleotide primer for the detection of SNP TSC0005098
atttatgatagt

SEQ ID NO: 277864 - DNA, 12 bp, Artificial Sequence
  Oligonucleotide primer for the detection of SNP TSC0005098
catctataacaa

SEQ ID NO: 277865 - DNA, 12 bp, Artificial Sequence
  Oligonucleotide primer for the detection of SNP TSC0005098
tttaatgtgttg

SEQ ID NO: 277866 - DNA, 12 bp, Artificial Sequence
  Oligonucleotide primer for the detection of SNP TSC0005098
tttaatgcgttg

SEQ ID NO: 277867 - DNA, 12 bp, Artificial Sequence
  Oligonucleotide primer for the detection of SNP TSC0005109
taccacaaactc

SEQ ID NO: 277868 - DNA, 12 bp, Artificial Sequence
  Oligonucleotide primer for the detection of SNP TSC0005109
aatttatggtta

SEQ ID NO: 277869 - DNA, 12 bp, Artificial Sequence
  Oligonucleotide primer for the detection of SNP TSC0005110
ttggggttttta

SEQ ID NO: 277870 - DNA, 12 bp, Artificial Sequence
  Oligonucleotide primer for the detection of SNP TSC0005111
caacaaaattta

SEQ ID NO: 277871 - DNA, 12 bp, Artificial Sequence
  Oligonucleotide primer for the detection of SNP TSC0005111
cgacaaaattta

SEQ ID NO: 277872 - DNA, 12 bp, Artificial Sequence
  Oligonucleotide primer for the detection of SNP TSC0005111
catctactcctc

SEQ ID NO: 277873 - DNA, 12 bp, Artificial Sequence
  Oligonucleotide primer for the detection of SNP TSC0005111
tggtaggatttg

SEQ ID NO: 277874 - DNA, 12 bp, Artificial Sequence
  Oligonucleotide primer for the detection of SNP TSC0005111
cggtaggatttg

SEQ ID NO: 277875 - DNA, 12 bp, Artificial Sequence
  Oligonucleotide primer for the detection of SNP TSC0005138
tctatcacccaa

SEQ ID NO: 277876 - DNA, 12 bp, Artificial Sequence
  Oligonucleotide primer for the detection of SNP TSC0005138
tattgtattata

SEQ ID NO: 277877 - DNA, 12 bp, Artificial Sequence
  Oligonucleotide primer for the detection of SNP TSC0005138
attacactacaa

SEQ ID NO: 277878 - DNA, 12 bp, Artificial Sequence
  Oligonucleotide primer for the detection of SNP TSC0005138
ttttgttattta

SEQ ID NO: 277879 - DNA, 12 bp, Artificial Sequence
  Oligonucleotide primer for the detection of SNP TSC0005139
tcccaaaatatt

SEQ ID NO: 277880 - DNA, 12 bp, Artificial Sequence
  Oligonucleotide primer for the detection of SNP TSC0005139
ttatgtttgtaa

SEQ ID NO: 277881 - DNA, 12 bp, Artificial Sequence
  Oligonucleotide primer for the detection of SNP TSC0005140
tataccatacac

SEQ ID NO: 277882 - DNA, 12 bp, Artificial Sequence
  Oligonucleotide primer for the detection of SNP TSC0005141
tacctcccaaac

SEQ ID NO: 277883 - DNA, 12 bp, Artificial Sequence
  Oligonucleotide primer for the detection of SNP TSC0005141
gaggattggttg

SEQ ID NO: 277884 - DNA, 12 bp, Artificial Sequence
  Oligonucleotide primer for the detection of SNP TSC0005141
aaaaattaatta

SEQ ID NO: 277885 - DNA, 12 bp, Artificial Sequence
  Oligonucleotide primer for the detection of SNP TSC0005141
tgttttttaggt

SEQ ID NO: 277886 - DNA, 12 bp, Artificial Sequence
  Oligonucleotide primer for the detection of SNP TSC0005146
aaactactatca

SEQ ID NO: 277887 - DNA, 12 bp, Artificial Sequence
  Oligonucleotide primer for the detection of SNP TSC0005146
tttatatggttt

SEQ ID NO: 277888 - DNA, 12 bp, Artificial Sequence
  Oligonucleotide primer for the detection of SNP TSC0005146
tttatacggttt

SEQ ID NO: 277889 - DNA, 12 bp, Artificial Sequence
  Oligonucleotide primer for the detection of SNP TSC0005146
tctacacaattt

SEQ ID NO: 277890 - DNA, 12 bp, Artificial Sequence
  Oligonucleotide primer for the detection of SNP TSC0005146
tctacacgattt

SEQ ID NO: 277891 - DNA, 12 bp, Artificial Sequence
  Oligonucleotide primer for the detection of SNP TSC0005146
aaattattgtta

SEQ ID NO: 277892 - DNA, 12 bp, Artificial Sequence
  Oligonucleotide primer for the detection of SNP TSC0005165
aattaattcaat

SEQ ID NO: 277893 - DNA, 12 bp, Artificial Sequence
  Oligonucleotide primer for the detection of SNP TSC0005165
atgtaattgata

SEQ ID NO: 277894 - DNA, 12 bp, Artificial Sequence
  Oligonucleotide primer for the detection of SNP TSC0005169
ttataatacata

SEQ ID NO: 277895 - DNA, 12 bp, Artificial Sequence
  Oligonucleotide primer for the detection of SNP TSC0005169
gtaaaaataaat

SEQ ID NO: 277896 - DNA, 12 bp, Artificial Sequence
  Oligonucleotide primer for the detection of SNP TSC0005169
gtaaaaataaac

SEQ ID NO: 277897 - DNA, 12 bp, Artificial Sequence
  Oligonucleotide primer for the detection of SNP TSC0005169
tacaaaaataaa

SEQ ID NO: 277898 - DNA, 12 bp, Artificial Sequence
  Oligonucleotide primer for the detection of SNP TSC0005169
attatggtatat

SEQ ID NO: 277899 - DNA, 12 bp, Artificial Sequence
  Oligonucleotide primer for the detection of SNP TSC0005170
ttcaataaaatt

SEQ ID NO: 277900 - DNA, 12 bp, Artificial Sequence
  Oligonucleotide primer for the detection of SNP TSC0005170
agattttgatag

SEQ ID NO: 277901 - DNA, 12 bp, Artificial Sequence
  Oligonucleotide primer for the detection of SNP TSC0005171
aaatcacatcac

SEQ ID NO: 277902 - DNA, 12 bp, Artificial Sequence
  Oligonucleotide primer for the detection of SNP TSC0005171
gtattattgtgg

SEQ ID NO: 277903 - DNA, 12 bp, Artificial Sequence
  Oligonucleotide primer for the detection of SNP TSC0005185
aaccatatactt

SEQ ID NO: 277904 - DNA, 12 bp, Artificial Sequence
  Oligonucleotide primer for the detection of SNP TSC0005185
aaccgtatactt

SEQ ID NO: 277905 - DNA, 12 bp, Artificial Sequence
  Oligonucleotide primer for the detection of SNP TSC0005185
gttgtatattta

SEQ ID NO: 277906 - DNA, 12 bp, Artificial Sequence
  Oligonucleotide primer for the detection of SNP TSC0005199
ctatccaacttt

SEQ ID NO: 277907 - DNA, 12 bp, Artificial Sequence
  Oligonucleotide primer for the detection of SNP TSC0005199
gttagtaatgga

SEQ ID NO: 277908 - DNA, 12 bp, Artificial Sequence
  Oligonucleotide primer for the detection of SNP TSC0005200
tttaaacccatc

SEQ ID NO: 277909 - DNA, 12 bp, Artificial Sequence
  Oligonucleotide primer for the detection of SNP TSC0005200
aggtttttagtt

SEQ ID NO: 277910 - DNA, 12 bp, Artificial Sequence
  Oligonucleotide primer for the detection of SNP TSC0005204
ttacatacaact

SEQ ID NO: 277911 - DNA, 12 bp, Artificial Sequence
  Oligonucleotide primer for the detection of SNP TSC0005204
gtgtaagtggaa

SEQ ID NO: 277912 - DNA, 12 bp, Artificial Sequence
  Oligonucleotide primer for the detection of SNP TSC0005204
gtgtaagcggaa

SEQ ID NO: 277913 - DNA, 12 bp, Artificial Sequence
  Oligonucleotide primer for the detection of SNP TSC0005231
ctataaattctt

SEQ ID NO: 277914 - DNA, 12 bp, Artificial Sequence
  Oligonucleotide primer for the detection of SNP TSC0005231
ttgtagattttt

SEQ ID NO: 277915 - DNA, 12 bp, Artificial Sequence
  Oligonucleotide primer for the detection of SNP TSC0005232
ataactctaatt

SEQ ID NO: 277916 - DNA, 12 bp, Artificial Sequence
  Oligonucleotide primer for the detection of SNP TSC0005232
atttttagatat

SEQ ID NO: 277917 - DNA, 12 bp, Artificial Sequence
  Oligonucleotide primer for the detection of SNP TSC0005232
atttccaaacat

SEQ ID NO: 277918 - DNA, 12 bp, Artificial Sequence
  Oligonucleotide primer for the detection of SNP TSC0005232
gtagttttagtt

SEQ ID NO: 277919 - DNA, 12 bp, Artificial Sequence
  Oligonucleotide primer for the detection of SNP TSC0005234
ctctctcccttc

SEQ ID NO: 277920 - DNA, 12 bp, Artificial Sequence
  Oligonucleotide primer for the detection of SNP TSC0005234
ggaaagaaggaa

SEQ ID NO: 277921 - DNA, 12 bp, Artificial Sequence
  Oligonucleotide primer for the detection of SNP TSC0005244
caacctacaaat

SEQ ID NO: 277922 - DNA, 12 bp, Artificial Sequence
  Oligonucleotide primer for the detection of SNP TSC0005244
tttttgaaatat

SEQ ID NO: 277923 - DNA, 12 bp, Artificial Sequence
  Oligonucleotide primer for the detection of SNP TSC0005244
atccctaaaaca

SEQ ID NO: 277924 - DNA, 12 bp, Artificial Sequence
  Oligonucleotide primer for the detection of SNP TSC0005244
tagtttgtaggt

SEQ ID NO: 277925 - DNA, 12 bp, Artificial Sequence
  Oligonucleotide primer for the detection of SNP TSC0005255
tattaaaccaac

SEQ ID NO: 277926 - DNA, 12 bp, Artificial Sequence
  Oligonucleotide primer for the detection of SNP TSC0005255
tatatttttaaa

SEQ ID NO: 277927 - DNA, 12 bp, Artificial Sequence
  Oligonucleotide primer for the detection of SNP TSC0005276
ctatataactca

SEQ ID NO: 277928 - DNA, 12 bp, Artificial Sequence
  Oligonucleotide primer for the detection of SNP TSC0005276
gggaagtagaag

SEQ ID NO: 277929 - DNA, 12 bp, Artificial Sequence
  Oligonucleotide primer for the detection of SNP TSC0005276
tttgtatggttt

SEQ ID NO: 277930 - DNA, 12 bp, Artificial Sequence
  Oligonucleotide primer for the detection of SNP TSC0005288
aaaaactcaaaa

SEQ ID NO: 277931 - DNA, 12 bp, Artificial Sequence
  Oligonucleotide primer for the detection of SNP TSC0005288
tttttatgtatt

SEQ ID NO: 277932 - DNA, 12 bp, Artificial Sequence
  Oligonucleotide primer for the detection of SNP TSC0005289
ctacaaatttca

SEQ ID NO: 277933 - DNA, 12 bp, Artificial Sequence
  Oligonucleotide primer for the detection of SNP TSC0005289
ggttagtttaat

SEQ ID NO: 277934 - DNA, 12 bp, Artificial Sequence
  Oligonucleotide primer for the detection of SNP TSC0005289
aaccaatttaat

SEQ ID NO: 277935 - DNA, 12 bp, Artificial Sequence
  Oligonucleotide primer for the detection of SNP TSC0005289
ttataggtttta

SEQ ID NO: 277936 - DNA, 12 bp, Artificial Sequence
  Oligonucleotide primer for the detection of SNP TSC0005290
ctatctttattt

SEQ ID NO: 277937 - DNA, 12 bp, Artificial Sequence
  Oligonucleotide primer for the detection of SNP TSC0005290
atttaaaggttg

SEQ ID NO: 277938 - DNA, 12 bp, Artificial Sequence
  Oligonucleotide primer for the detection of SNP TSC0005290
atccaaaaacta

SEQ ID NO: 277939 - DNA, 12 bp, Artificial Sequence
  Oligonucleotide primer for the detection of SNP TSC0005290
ttgtttttattt

SEQ ID NO: 277940 - DNA, 12 bp, Artificial Sequence
  Oligonucleotide primer for the detection of SNP TSC0005295
actaaacctcaa

SEQ ID NO: 277941 - DNA, 12 bp, Artificial Sequence
  Oligonucleotide primer for the detection of SNP TSC0005295
ggttataggtat

SEQ ID NO: 277942 - DNA, 12 bp, Artificial Sequence
  Oligonucleotide primer for the detection of SNP TSC0005295
aactacaaacat

SEQ ID NO: 277943 - DNA, 12 bp, Artificial Sequence
  Oligonucleotide primer for the detection of SNP TSC0005295
tattgggtttta

SEQ ID NO: 277944 - DNA, 12 bp, Artificial Sequence
  Oligonucleotide primer for the detection of SNP TSC0005296
taaaaaattaaa

SEQ ID NO: 277945 - DNA, 12 bp, Artificial Sequence
  Oligonucleotide primer for the detection of SNP TSC0005296
attgattaaata

SEQ ID NO: 277946 - DNA, 12 bp, Artificial Sequence
  Oligonucleotide primer for the detection of SNP TSC0005296
attaattaaaca

SEQ ID NO: 277947 - DNA, 12 bp, Artificial Sequence
  Oligonucleotide primer for the detection of SNP TSC0005296
tggagggttaag

SEQ ID NO: 277948 - DNA, 12 bp, Artificial Sequence
  Oligonucleotide primer for the detection of SNP TSC0005298
ttttaattattt

SEQ ID NO: 277949 - DNA, 12 bp, Artificial Sequence
  Oligonucleotide primer for the detection of SNP TSC0005298
taaattagatag

SEQ ID NO: 277950 - DNA, 12 bp, Artificial Sequence
  Oligonucleotide primer for the detection of SNP TSC0005307
cctactaattac

SEQ ID NO: 277951 - DNA, 12 bp, Artificial Sequence
  Oligonucleotide primer for the detection of SNP TSC0005307
tggttttttgtg

SEQ ID NO: 277952 - DNA, 12 bp, Artificial Sequence
  Oligonukleotid-Primer
taactttctata

SEQ ID NO: 277953 - DNA, 12 bp, Artificial Sequence
  Oligonucleotide primer for the detection of SNP TSC0005307
tttgttggttgt

SEQ ID NO: 277954 - DNA, 12 bp, Artificial Sequence
  Oligonucleotide primer for the detection of SNP TSC0005308
tatcttcaaaat

SEQ ID NO: 277955 - DNA, 12 bp, Artificial Sequence
  Oligonucleotide primer for the detection of SNP TSC0005308
gattttattgta

SEQ ID NO: 277956 - DNA, 12 bp, Artificial Sequence
  Oligonukleotid-Primer
tcatttacctat

SEQ ID NO: 277957 - DNA, 12 bp, Artificial Sequence
  Oligonucleotide primer for the detection of SNP TSC0005311
ggtggtttattt

SEQ ID NO: 277958 - DNA, 12 bp, Artificial Sequence
  Oligonucleotide primer for the detection of SNP TSC0005311
ttaataattcac

SEQ ID NO: 277959 - DNA, 12 bp, Artificial Sequence
  Oligonucleotide primer for the detection of SNP TSC0005311
ttagattataag

SEQ ID NO: 277960 - DNA, 12 bp, Artificial Sequence
  Oligonukleotid-Primer
caaactttataa

SEQ ID NO: 277961 - DNA, 12 bp, Artificial Sequence
  Oligonucleotide primer for the detection of SNP TSC0005323
ttagaattttag

SEQ ID NO: 277962 - DNA, 12 bp, Artificial Sequence
  Oligonucleotide primer for the detection of SNP TSC0005323
ttaaaatctcaa

SEQ ID NO: 277963 - DNA, 12 bp, Artificial Sequence
  Oligonucleotide primer for the detection of SNP TSC0005323
taaattttgtaa

SEQ ID NO: 277964 - DNA, 12 bp, Artificial Sequence
  Oligonucleotide primer for the detection of SNP TSC0005324
taaactaatatc

SEQ ID NO: 277965 - DNA, 12 bp, Artificial Sequence
  Oligonucleotide primer for the detection of SNP TSC0005324
ttgttgattgta

SEQ ID NO: 277966 - DNA, 12 bp, Artificial Sequence
  Oligonucleotide primer for the detection of SNP TSC0005324
tcgttgattgta

SEQ ID NO: 277967 - DNA, 12 bp, Artificial Sequence
  Oligonucleotide primer for the detection of SNP TSC0005330
ataatatattct

SEQ ID NO: 277968 - DNA, 12 bp, Artificial Sequence
  Oligonucleotide primer for the detection of SNP TSC0005330
ggttttaggatt

SEQ ID NO: 277969 - DNA, 12 bp, Artificial Sequence
  Oligonucleotide primer for the detection of SNP TSC0005330
aaatctcaaaac

SEQ ID NO: 277970 - DNA, 12 bp, Artificial Sequence
  Oligonucleotide primer for the detection of SNP TSC0005330
tgatatgttttt

SEQ ID NO: 277971 - DNA, 12 bp, Artificial Sequence
  Oligonucleotide primer for the detection of SNP TSC0005330
tgatatgttttc

SEQ ID NO: 277972 - DNA, 12 bp, Artificial Sequence
  Oligonucleotide primer for the detection of SNP TSC0005331
taataaaactca

SEQ ID NO: 277973 - DNA, 12 bp, Artificial Sequence
  Oligonucleotide primer for the detection of SNP TSC0005331
aaaagttttatt

SEQ ID NO: 277974 - DNA, 12 bp, Artificial Sequence
  Oligonucleotide primer for the detection of SNP TSC0005331
aaaaacttcatc

SEQ ID NO: 277975 - DNA, 12 bp, Artificial Sequence
  Oligonucleotide primer for the detection of SNP TSC0005331
ttggtgaaattt

SEQ ID NO: 277976 - DNA, 12 bp, Artificial Sequence
  Oligonucleotide primer for the detection of SNP TSC0005332
acatttcttatc

SEQ ID NO: 277977 - DNA, 12 bp, Artificial Sequence
  Oligonucleotide primer for the detection of SNP TSC0005332
gtaaagattaaa

SEQ ID NO: 277978 - DNA, 12 bp, Artificial Sequence
  Oligonucleotide primer for the detection of SNP TSC0005333
cctcccaatacc

SEQ ID NO: 277979 - DNA, 12 bp, Artificial Sequence
  Oligonucleotide primer for the detection of SNP TSC0005333
aatttaagattg

SEQ ID NO: 277980 - DNA, 12 bp, Artificial Sequence
  Oligonucleotide primer for the detection of SNP TSC0005334
ctaactctcata

SEQ ID NO: 277981 - DNA, 12 bp, Artificial Sequence
  Oligonucleotide primer for the detection of SNP TSC0005334
ctaactctcgta

SEQ ID NO: 277982 - DNA, 12 bp, Artificial Sequence
  Oligonucleotide primer for the detection of SNP TSC0005334
aattgagaaaag

SEQ ID NO: 277983 - DNA, 12 bp, Artificial Sequence
  Oligonucleotide primer for the detection of SNP TSC0005334
tgatttttgtat

SEQ ID NO: 277984 - DNA, 12 bp, Artificial Sequence
  Oligonucleotide primer for the detection of SNP TSC0005334
tgattttcgtat

SEQ ID NO: 277985 - DNA, 12 bp, Artificial Sequence
  Oligonucleotide primer for the detection of SNP TSC0005373
aattattttatg

SEQ ID NO: 277986 - DNA, 12 bp, Artificial Sequence
  Oligonucleotide primer for the detection of SNP TSC0005413
taaaattaatac

SEQ ID NO: 277987 - DNA, 12 bp, Artificial Sequence
  Oligonucleotide primer for the detection of SNP TSC0005413
tatatatttaaa

SEQ ID NO: 277988 - DNA, 12 bp, Artificial Sequence
  Oligonucleotide primer for the detection of SNP TSC0005414
atacaactctta

SEQ ID NO: 277989 - DNA, 12 bp, Artificial Sequence
  Oligonucleotide primer for the detection of SNP TSC0005414
aaatattagaag

SEQ ID NO: 277990 - DNA, 12 bp, Artificial Sequence
  Oligonucleotide primer for the detection of SNP TSC0005414
aaatatcaaaaa

SEQ ID NO: 277991 - DNA, 12 bp, Artificial Sequence
  Oligonucleotide primer for the detection of SNP TSC0005414
tataatttttat

SEQ ID NO: 277992 - DNA, 12 bp, Artificial Sequence
  Oligonucleotide primer for the detection of SNP TSC0005417
tatgtttgtaat

SEQ ID NO: 277993 - DNA, 12 bp, Artificial Sequence
  Oligonucleotide primer for the detection of SNP TSC0005417
tacgtttgtaat

SEQ ID NO: 277994 - DNA, 12 bp, Artificial Sequence
  Oligonucleotide primer for the detection of SNP TSC0005417
tcacacctataa

SEQ ID NO: 277995 - DNA, 12 bp, Artificial Sequence
  Oligonucleotide primer for the detection of SNP TSC0005417
tcacgcctataa

SEQ ID NO: 277996 - DNA, 12 bp, Artificial Sequence
  Oligonucleotide primer for the detection of SNP TSC0005417
taaagtattggg

SEQ ID NO: 277997 - DNA, 12 bp, Artificial Sequence
  Oligonucleotide primer for the detection of SNP TSC0005443
caaaaacatcct

SEQ ID NO: 277998 - DNA, 12 bp, Artificial Sequence
  Oligonucleotide primer for the detection of SNP TSC0005443
tttattgtattg

SEQ ID NO: 277999 - DNA, 12 bp, Artificial Sequence
  Oligonucleotide primer for the detection of SNP TSC0005447
tacaattttttt

SEQ ID NO: 278000 - DNA, 12 bp, Artificial Sequence
  Oligonucleotide primer for the detection of SNP TSC0005447
gatagttgatga

SEQ ID NO: 278001 - DNA, 12 bp, Artificial Sequence
  Oligonucleotide primer for the detection of SNP TSC0005468
aataaaaatatt

SEQ ID NO: 278002 - DNA, 12 bp, Artificial Sequence
  Oligonucleotide primer for the detection of SNP TSC0005468
attttttgttta

SEQ ID NO: 278003 - DNA, 12 bp, Artificial Sequence
  Oligonucleotide primer for the detection of SNP TSC0005468
atttcttaccta

SEQ ID NO: 278004 - DNA, 12 bp, Artificial Sequence
  Oligonucleotide primer for the detection of SNP TSC0005468
ggtggaaatgtt

SEQ ID NO: 278005 - DNA, 12 bp, Artificial Sequence
  Oligonucleotide primer for the detection of SNP TSC0005469
tttaaataataa

SEQ ID NO: 278006 - DNA, 12 bp, Artificial Sequence
  Oligonucleotide primer for the detection of SNP TSC0005469
aagttatttttt

SEQ ID NO: 278007 - DNA, 12 bp, Artificial Sequence
  Oligonucleotide primer for the detection of SNP TSC0005469
aaaatcacttct

SEQ ID NO: 278008 - DNA, 12 bp, Artificial Sequence
  Oligonucleotide primer for the detection of SNP TSC0005469
tttgaataataa

SEQ ID NO: 278009 - DNA, 12 bp, Artificial Sequence
  Oligonucleotide primer for the detection of SNP TSC0005470
atcaaaattaat

SEQ ID NO: 278010 - DNA, 12 bp, Artificial Sequence
  Oligonucleotide primer for the detection of SNP TSC0005470
gtaagaaatgaa

SEQ ID NO: 278011 - DNA, 12 bp, Artificial Sequence
  Oligonucleotide primer for the detection of SNP TSC0005489
ttaaacattttc

SEQ ID NO: 278012 - DNA, 12 bp, Artificial Sequence
  Oligonucleotide primer for the detection of SNP TSC0005489
ttttttatggtt

SEQ ID NO: 278013 - DNA, 12 bp, Artificial Sequence
  Oligonucleotide primer for the detection of SNP TSC0005489
attctccataac

SEQ ID NO: 278014 - DNA, 12 bp, Artificial Sequence
  Oligonucleotide primer for the detection of SNP TSC0005489
tgggtatttttt

SEQ ID NO: 278015 - DNA, 12 bp, Artificial Sequence
  Oligonucleotide primer for the detection of SNP TSC0005490
tttaaactctta

SEQ ID NO: 278016 - DNA, 12 bp, Artificial Sequence
  Oligonucleotide primer for the detection of SNP TSC0005490
agaatttaagat

SEQ ID NO: 278017 - DNA, 12 bp, Artificial Sequence
  Oligonucleotide primer for the detection of SNP TSC0005490
aaaacttaaaat

SEQ ID NO: 278018 - DNA, 12 bp, Artificial Sequence
  Oligonucleotide primer for the detection of SNP TSC0005501
aaaatcttctct

SEQ ID NO: 278019 - DNA, 12 bp, Artificial Sequence
  Oligonucleotide primer for the detection of SNP TSC0005501
tagaataaatgg

SEQ ID NO: 278020 - DNA, 12 bp, Artificial Sequence
  Oligonucleotide primer for the detection of SNP TSC0005501
tagaataaacgg

SEQ ID NO: 278021 - DNA, 12 bp, Artificial Sequence
  Oligonucleotide primer for the detection of SNP TSC0005501
taaaataaacaa

SEQ ID NO: 278022 - DNA, 12 bp, Artificial Sequence
  Oligonucleotide primer for the detection of SNP TSC0005501
taaaataaacga

SEQ ID NO: 278023 - DNA, 12 bp, Artificial Sequence
  Oligonucleotide primer for the detection of SNP TSC0005501
aaggtttttttt

SEQ ID NO: 278024 - DNA, 12 bp, Artificial Sequence
  Oligonucleotide primer for the detection of SNP TSC0005505
taacaattaaat

SEQ ID NO: 278025 - DNA, 12 bp, Artificial Sequence
  Oligonucleotide primer for the detection of SNP TSC0005505
tttatagagaaa

SEQ ID NO: 278026 - DNA, 12 bp, Artificial Sequence
  Oligonucleotide primer for the detection of SNP TSC0005512
cttatttcaaat

SEQ ID NO: 278027 - DNA, 12 bp, Artificial Sequence
  Oligonucleotide primer for the detection of SNP TSC0005512
ggtagagggtga

SEQ ID NO: 278028 - DNA, 12 bp, Artificial Sequence
  Oligonucleotide primer for the detection of SNP TSC0005512
tttgttttaagt

SEQ ID NO: 278029 - DNA, 12 bp, Artificial Sequence
  Oligonucleotide primer for the detection of SNP TSC0005520
tacaaaaaaaac

SEQ ID NO: 278030 - DNA, 12 bp, Artificial Sequence
  Oligonucleotide primer for the detection of SNP TSC0005520
ggttttatttag

SEQ ID NO: 278031 - DNA, 12 bp, Artificial Sequence
  Oligonucleotide primer for the detection of SNP TSC0005521
taatatttccaa

SEQ ID NO: 278032 - DNA, 12 bp, Artificial Sequence
  Oligonucleotide primer for the detection of SNP TSC0005521
ttgatgtagtag

SEQ ID NO: 278033 - DNA, 12 bp, Artificial Sequence
  Oligonucleotide primer for the detection of SNP TSC0005521
ttaatacaacaa

SEQ ID NO: 278034 - DNA, 12 bp, Artificial Sequence
  Oligonucleotide primer for the detection of SNP TSC0005521
tagtgtttttaa

SEQ ID NO: 278035 - DNA, 12 bp, Artificial Sequence
  Oligonucleotide primer for the detection of SNP TSC0005544
aaacaactcaca

SEQ ID NO: 278036 - DNA, 12 bp, Artificial Sequence
  Oligonucleotide primer for the detection of SNP TSC0005544
ttttagatgagt

SEQ ID NO: 278037 - DNA, 12 bp, Artificial Sequence
  Oligonucleotide primer for the detection of SNP TSC0005544
accccaaataaa

SEQ ID NO: 278038 - DNA, 12 bp, Artificial Sequence
  Oligonucleotide primer for the detection of SNP TSC0005544
gccccaaataaa

SEQ ID NO: 278039 - DNA, 12 bp, Artificial Sequence
  Oligonucleotide primer for the detection of SNP TSC0005544
gataatttatat

SEQ ID NO: 278040 - DNA, 12 bp, Artificial Sequence
  Oligonucleotide primer for the detection of SNP TSC0005549
actcatattcta

SEQ ID NO: 278041 - DNA, 12 bp, Artificial Sequence
  Oligonukleotid-Primer
tatttatatgga

SEQ ID NO: 278042 - DNA, 12 bp, Artificial Sequence
  Oligonucleotide primer for the detection of SNP TSC0005549
catccacataaa

SEQ ID NO: 278043 - DNA, 12 bp, Artificial Sequence
  Oligonucleotide primer for the detection of SNP TSC0005549
agtttatgtttt

SEQ ID NO: 278044 - DNA, 12 bp, Artificial Sequence
  Oligonucleotide primer for the detection of SNP TSC0005552
caaatccaaaat

SEQ ID NO: 278045 - DNA, 12 bp, Artificial Sequence
  Oligonucleotide primer for the detection of SNP TSC0005552
tgttttagatga

SEQ ID NO: 278046 - DNA, 12 bp, Artificial Sequence
  Oligonucleotide primer for the detection of SNP TSC0005553
ttaaaaaaccaa

SEQ ID NO: 278047 - DNA, 12 bp, Artificial Sequence
  Oligonucleotide primer for the detection of SNP TSC0005553
taagttatttgt

SEQ ID NO: 278048 - DNA, 12 bp, Artificial Sequence
  Oligonucleotide primer for the detection of SNP TSC0005553
taagttattcgt

SEQ ID NO: 278049 - DNA, 12 bp, Artificial Sequence
  Oligonucleotide primer for the detection of SNP TSC0005553
taagttatttgc

SEQ ID NO: 278050 - DNA, 12 bp, Artificial Sequence
  Oligonucleotide primer for the detection of SNP TSC0005553
taagttattcgc

SEQ ID NO: 278051 - DNA, 12 bp, Artificial Sequence
  Oligonucleotide primer for the detection of SNP TSC0005553
caaaccacccac

SEQ ID NO: 278052 - DNA, 12 bp, Artificial Sequence
  Oligonucleotide primer for the detection of SNP TSC0005553
caaaccacccgc

SEQ ID NO: 278053 - DNA, 12 bp, Artificial Sequence
  Oligonucleotide primer for the detection of SNP TSC0005553
ttttggaaggtt

SEQ ID NO: 278054 - DNA, 12 bp, Artificial Sequence
  Oligonucleotide primer for the detection of SNP TSC0005554
cccatataatct

SEQ ID NO: 278055 - DNA, 12 bp, Artificial Sequence
  Oligonucleotide primer for the detection of SNP TSC0005554
aggttaaggtgg

SEQ ID NO: 278056 - DNA, 12 bp, Artificial Sequence
  Oligonucleotide primer for the detection of SNP TSC0005555
tggagtagtggt

SEQ ID NO: 278057 - DNA, 12 bp, Artificial Sequence
  Oligonucleotide primer for the detection of SNP TSC0005555
tggagtagtggc

SEQ ID NO: 278058 - DNA, 12 bp, Artificial Sequence
  Oligonucleotide primer for the detection of SNP TSC0005555
taaaataataac

SEQ ID NO: 278059 - DNA, 12 bp, Artificial Sequence
  Oligonucleotide primer for the detection of SNP TSC0005555
gtgagtagagat

SEQ ID NO: 278060 - DNA, 12 bp, Artificial Sequence
  Oligonucleotide primer for the detection of SNP TSC0005556
aatacctcatac

SEQ ID NO: 278061 - DNA, 12 bp, Artificial Sequence
  Oligonucleotide primer for the detection of SNP TSC0005556
gtcgggattata

SEQ ID NO: 278062 - DNA, 12 bp, Artificial Sequence
  Oligonucleotide primer for the detection of SNP TSC0005557
caaaaattaacc

SEQ ID NO: 278063 - DNA, 12 bp, Artificial Sequence
  Oligonucleotide primer for the detection of SNP TSC0005557
tatgtattatta

SEQ ID NO: 278064 - DNA, 12 bp, Artificial Sequence
  Oligonucleotide primer for the detection of SNP TSC0005557
catacaccacca

SEQ ID NO: 278065 - DNA, 12 bp, Artificial Sequence
  Oligonucleotide primer for the detection of SNP TSC0005557
taaaaattagtt

SEQ ID NO: 278066 - DNA, 12 bp, Artificial Sequence
  Oligonucleotide primer for the detection of SNP TSC0005558
aataattctcat

SEQ ID NO: 278067 - DNA, 12 bp, Artificial Sequence
  Oligonucleotide primer for the detection of SNP TSC0005572
atttaaaataaa

SEQ ID NO: 278068 - DNA, 12 bp, Artificial Sequence
  Oligonucleotide primer for the detection of SNP TSC0005572
tttttttgtgtt

SEQ ID NO: 278069 - DNA, 12 bp, Artificial Sequence
  Oligonucleotide primer for the detection of SNP TSC0005572
tttcttatatta

SEQ ID NO: 278070 - DNA, 12 bp, Artificial Sequence
  Oligonucleotide primer for the detection of SNP TSC0005572
atttaaagtaag

SEQ ID NO: 278071 - DNA, 12 bp, Artificial Sequence
  Oligonucleotide primer for the detection of SNP TSC0005573
aaatctaacata

SEQ ID NO: 278072 - DNA, 12 bp, Artificial Sequence
  Oligonucleotide primer for the detection of SNP TSC0005573
taaatatttttt

SEQ ID NO: 278073 - DNA, 12 bp, Artificial Sequence
  Oligonucleotide primer for the detection of SNP TSC0005573
taaatatttctc

SEQ ID NO: 278074 - DNA, 12 bp, Artificial Sequence
  Oligonucleotide primer for the detection of SNP TSC0005573
gagtttgatata

SEQ ID NO: 278075 - DNA, 12 bp, Artificial Sequence
  Oligonucleotide primer for the detection of SNP TSC0005574
acctttaaaatt

SEQ ID NO: 278076 - DNA, 12 bp, Artificial Sequence
  Oligonucleotide primer for the detection of SNP TSC0005574
atattaagtttg

SEQ ID NO: 278077 - DNA, 12 bp, Artificial Sequence
  Oligonucleotide primer for the detection of SNP TSC0005575
aagatttttttg

SEQ ID NO: 278078 - DNA, 12 bp, Artificial Sequence
  Oligonucleotide primer for the detection of SNP TSC0005575
aaaattttctta

SEQ ID NO: 278079 - DNA, 12 bp, Artificial Sequence
  Oligonucleotide primer for the detection of SNP TSC0005575
aagtaagttaat

SEQ ID NO: 278080 - DNA, 12 bp, Artificial Sequence
  Oligonucleotide primer for the detection of SNP TSC0005589
acctaaaatcaa

SEQ ID NO: 278081 - DNA, 12 bp, Artificial Sequence
  Oligonucleotide primer for the detection of SNP TSC0005589
tggttttgaatt

SEQ ID NO: 278082 - DNA, 12 bp, Artificial Sequence
  Oligonucleotide primer for the detection of SNP TSC0005589
tggtttcgaatt

SEQ ID NO: 278083 - DNA, 12 bp, Artificial Sequence
  Oligonucleotide primer for the detection of SNP TSC0005589
ctaatctcaaac

SEQ ID NO: 278084 - DNA, 12 bp, Artificial Sequence
  Oligonucleotide primer for the detection of SNP TSC0005589
ctaatctcgaac

SEQ ID NO: 278085 - DNA, 12 bp, Artificial Sequence
  Oligonucleotide primer for the detection of SNP TSC0005590
aaatacaaaaac

SEQ ID NO: 278086 - DNA, 12 bp, Artificial Sequence
  Oligonucleotide primer for the detection of SNP TSC0005590
tattatatttgg

SEQ ID NO: 278087 - DNA, 12 bp, Artificial Sequence
  Oligonucleotide primer for the detection of SNP TSC0005591
ttttgtatttta

SEQ ID NO: 278088 - DNA, 12 bp, Artificial Sequence
  Oligonucleotide primer for the detection of SNP TSC0005592
aatcttactcta

SEQ ID NO: 278089 - DNA, 12 bp, Artificial Sequence
  Oligonucleotide primer for the detection of SNP TSC0005593
aaaatcaccaaa

SEQ ID NO: 278090 - DNA, 12 bp, Artificial Sequence
  Oligonucleotide primer for the detection of SNP TSC0005593
gtaaggtttaga

SEQ ID NO: 278091 - DNA, 12 bp, Artificial Sequence
  Oligonucleotide primer for the detection of SNP TSC0005593
caaaacctaaaa

SEQ ID NO: 278092 - DNA, 12 bp, Artificial Sequence
  Oligonucleotide primer for the detection of SNP TSC0005593
aattattaggtt

SEQ ID NO: 278093 - DNA, 12 bp, Artificial Sequence
  Oligonucleotide primer for the detection of SNP TSC0005594
aaaccactaaaa

SEQ ID NO: 278094 - DNA, 12 bp, Artificial Sequence
  Oligonucleotide primer for the detection of SNP TSC0005594
tttgagatgtga

SEQ ID NO: 278095 - DNA, 12 bp, Artificial Sequence
  Oligonucleotide primer for the detection of SNP TSC0005594
taaaatataaaa

SEQ ID NO: 278096 - DNA, 12 bp, Artificial Sequence
  Oligonucleotide primer for the detection of SNP TSC0005594
gggattattggg

SEQ ID NO: 278097 - DNA, 12 bp, Artificial Sequence
  Oligonucleotide primer for the detection of SNP TSC0005595
ttatttttaaca

SEQ ID NO: 278098 - DNA, 12 bp, Artificial Sequence
  Oligonucleotide primer for the detection of SNP TSC0005595
aaagtttatgtg

SEQ ID NO: 278099 - DNA, 12 bp, Artificial Sequence
  Oligonucleotide primer for the detection of SNP TSC0005596
actttaaattaa

SEQ ID NO: 278100 - DNA, 12 bp, Artificial Sequence
  Oligonucleotide primer for the detection of SNP TSC0005596
ttttatgaaaga

SEQ ID NO: 278101 - DNA, 12 bp, Artificial Sequence
  Oligonucleotide primer for the detection of SNP TSC0005596
ccttataaaaaa

SEQ ID NO: 278102 - DNA, 12 bp, Artificial Sequence
  Oligonucleotide primer for the detection of SNP TSC0005596
tgattttggatt

SEQ ID NO: 278103 - DNA, 12 bp, Artificial Sequence
  Oligonucleotide primer for the detection of SNP TSC0005603
ataaaataacac

SEQ ID NO: 278104 - DNA, 12 bp, Artificial Sequence
  Oligonucleotide primer for the detection of SNP TSC0005603
ttgagttggttg

SEQ ID NO: 278105 - DNA, 12 bp, Artificial Sequence
  Oligonucleotide primer for the detection of SNP TSC0005603
ctaaactaacta

SEQ ID NO: 278106 - DNA, 12 bp, Artificial Sequence
  Oligonucleotide primer for the detection of SNP TSC0005603
atgagatagtat

SEQ ID NO: 278107 - DNA, 12 bp, Artificial Sequence
  Oligonucleotide primer for the detection of SNP TSC0005613
aaatacataaca

SEQ ID NO: 278108 - DNA, 12 bp, Artificial Sequence
  Oligonucleotide primer for the detection of SNP TSC0005613
aaatacataacg

SEQ ID NO: 278109 - DNA, 12 bp, Artificial Sequence
  Oligonucleotide primer for the detection of SNP TSC0005613
agtatatatgtg

SEQ ID NO: 278110 - DNA, 12 bp, Artificial Sequence
  Oligonucleotide primer for the detection of SNP TSC0005613
agtatatacgtg

SEQ ID NO: 278111 - DNA, 12 bp, Artificial Sequence
  Oligonucleotide primer for the detection of SNP TSC0005613
aacacatacata

SEQ ID NO: 278112 - DNA, 12 bp, Artificial Sequence
  Oligonucleotide primer for the detection of SNP TSC0005613
aacacatacgta

SEQ ID NO: 278113 - DNA, 12 bp, Artificial Sequence
  Oligonucleotide primer for the detection of SNP TSC0005613
aatgtataatgt

SEQ ID NO: 278114 - DNA, 12 bp, Artificial Sequence
  Oligonucleotide primer for the detection of SNP TSC0005613
aatgtataacgt

SEQ ID NO: 278115 - DNA, 12 bp, Artificial Sequence
  Oligonucleotide primer for the detection of SNP TSC0005636
atttattatatt

SEQ ID NO: 278116 - DNA, 12 bp, Artificial Sequence
  Oligonucleotide primer for the detection of SNP TSC0005636
gtatgagaatga

SEQ ID NO: 278117 - DNA, 12 bp, Artificial Sequence
  Oligonucleotide primer for the detection of SNP TSC0005637
tacaattcaaca

SEQ ID NO: 278118 - DNA, 12 bp, Artificial Sequence
  Oligonucleotide primer for the detection of SNP TSC0005637
tatttaaatttt

SEQ ID NO: 278119 - DNA, 12 bp, Artificial Sequence
  Oligonucleotide primer for the detection of SNP TSC0005637
ccatccaaatct

SEQ ID NO: 278120 - DNA, 12 bp, Artificial Sequence
  Oligonucleotide primer for the detection of SNP TSC0005640
taaataaactac

SEQ ID NO: 278121 - DNA, 12 bp, Artificial Sequence
  Oligonucleotide primer for the detection of SNP TSC0005640
tttttttttaga

SEQ ID NO: 278122 - DNA, 12 bp, Artificial Sequence
  Oligonucleotide primer for the detection of SNP TSC0005644
ctctataaaaat

SEQ ID NO: 278123 - DNA, 12 bp, Artificial Sequence
  Oligonucleotide primer for the detection of SNP TSC0005644
ttgttgtattag

SEQ ID NO: 278124 - DNA, 12 bp, Artificial Sequence
  Oligonucleotide primer for the detection of SNP TSC0005660
caatatttacta

SEQ ID NO: 278125 - DNA, 12 bp, Artificial Sequence
  Oligonucleotide primer for the detection of SNP TSC0005660
ttagtggaggtt

SEQ ID NO: 278126 - DNA, 12 bp, Artificial Sequence
  Oligonukleotid-Primer
ccaataaaaact

SEQ ID NO: 278127 - DNA, 12 bp, Artificial Sequence
  Oligonucleotide primer for the detection of SNP TSC0005660
taatatttgttg

SEQ ID NO: 278128 - DNA, 12 bp, Artificial Sequence
  Oligonucleotide primer for the detection of SNP TSC0005661
taaaactaaaaa

SEQ ID NO: 278129 - DNA, 12 bp, Artificial Sequence
  Oligonucleotide primer for the detection of SNP TSC0005661
agtttttatgtt

SEQ ID NO: 278130 - DNA, 12 bp, Artificial Sequence
  Oligonucleotide primer for the detection of SNP TSC0005661
aattctcatact

SEQ ID NO: 278131 - DNA, 12 bp, Artificial Sequence
  Oligonucleotide primer for the detection of SNP TSC0005661
tggagttgaaaa

SEQ ID NO: 278132 - DNA, 12 bp, Artificial Sequence
  Oligonucleotide primer for the detection of SNP TSC0005672
tattactactat

SEQ ID NO: 278133 - DNA, 12 bp, Artificial Sequence
  Oligonucleotide primer for the detection of SNP TSC0005672
agaatttagaaa

SEQ ID NO: 278134 - DNA, 12 bp, Artificial Sequence
  Oligonucleotide primer for the detection of SNP TSC0005673
atatttctttat

SEQ ID NO: 278135 - DNA, 12 bp, Artificial Sequence
  Oligonucleotide primer for the detection of SNP TSC0005673
attctaccctaa

SEQ ID NO: 278136 - DNA, 12 bp, Artificial Sequence
  Oligonucleotide primer for the detection of SNP TSC0005673
atgtttttttat

SEQ ID NO: 278137 - DNA, 12 bp, Artificial Sequence
  Oligonucleotide primer for the detection of SNP TSC0005674
aatcataaaacc

SEQ ID NO: 278138 - DNA, 12 bp, Artificial Sequence
  Oligonucleotide primer for the detection of SNP TSC0005674
tgttgtaataaa

SEQ ID NO: 278139 - DNA, 12 bp, Artificial Sequence
  Oligonucleotide primer for the detection of SNP TSC0005696
atccaaatcaaa

SEQ ID NO: 278140 - DNA, 12 bp, Artificial Sequence
  Oligonucleotide primer for the detection of SNP TSC0005696
taggggtttttt

SEQ ID NO: 278141 - DNA, 12 bp, Artificial Sequence
  Oligonucleotide primer for the detection of SNP TSC0005696
aaaaacccttta

SEQ ID NO: 278142 - DNA, 12 bp, Artificial Sequence
  Oligonucleotide primer for the detection of SNP TSC0005696
gtttaggttaga

SEQ ID NO: 278143 - DNA, 12 bp, Artificial Sequence
  Oligonucleotide primer for the detection of SNP TSC0005697
ttctacctccca

SEQ ID NO: 278144 - DNA, 12 bp, Artificial Sequence
  Oligonucleotide primer for the detection of SNP TSC0005697
aattgtttgaat

SEQ ID NO: 278145 - DNA, 12 bp, Artificial Sequence
  Oligonucleotide primer for the detection of SNP TSC0005697
caattacttaaa

SEQ ID NO: 278146 - DNA, 12 bp, Artificial Sequence
  Oligonucleotide primer for the detection of SNP TSC0005698
taaacttctaac

SEQ ID NO: 278147 - DNA, 12 bp, Artificial Sequence
  Oligonucleotide primer for the detection of SNP TSC0005698
gtggattatttg

SEQ ID NO: 278148 - DNA, 12 bp, Artificial Sequence
  Oligonucleotide primer for the detection of SNP TSC0005698
ataaatcaccta

SEQ ID NO: 278149 - DNA, 12 bp, Artificial Sequence
  Oligonucleotide primer for the detection of SNP TSC0005698
tgaatttttgat

SEQ ID NO: 278150 - DNA, 12 bp, Artificial Sequence
  Oligonucleotide primer for the detection of SNP TSC0005715
caataacaacaa

SEQ ID NO: 278151 - DNA, 12 bp, Artificial Sequence
  Oligonucleotide primer for the detection of SNP TSC0005715
taagggaggggt

SEQ ID NO: 278152 - DNA, 12 bp, Artificial Sequence
  Oligonucleotide primer for the detection of SNP TSC0005715
taagggaggggc

SEQ ID NO: 278153 - DNA, 12 bp, Artificial Sequence
  Oligonucleotide primer for the detection of SNP TSC0005715
agtaatagtagt

SEQ ID NO: 278154 - DNA, 12 bp, Artificial Sequence
  Oligonucleotide primer for the detection of SNP TSC0005716
actactacccaa

SEQ ID NO: 278155 - DNA, 12 bp, Artificial Sequence
  Oligonucleotide primer for the detection of SNP TSC0005716
ggttgggtagat

SEQ ID NO: 278156 - DNA, 12 bp, Artificial Sequence
  Oligonucleotide primer for the detection of SNP TSC0005716
aactaaacaaat

SEQ ID NO: 278157 - DNA, 12 bp, Artificial Sequence
  Oligonucleotide primer for the detection of SNP TSC0005716
attgttgtttag

SEQ ID NO: 278158 - DNA, 12 bp, Artificial Sequence
  Oligonucleotide primer for the detection of SNP TSC0005731
ataattatctaa

SEQ ID NO: 278159 - DNA, 12 bp, Artificial Sequence
  Oligonucleotide primer for the detection of SNP TSC0005731
gatttagagttt

SEQ ID NO: 278160 - DNA, 12 bp, Artificial Sequence
  Oligonucleotide primer for the detection of SNP TSC0005731
aatccaaaatct

SEQ ID NO: 278161 - DNA, 12 bp, Artificial Sequence
  Oligonucleotide primer for the detection of SNP TSC0005731
gtggttatttaa

SEQ ID NO: 278162 - DNA, 12 bp, Artificial Sequence
  Oligonucleotide primer for the detection of SNP TSC0005732
ccatattctaac

SEQ ID NO: 278163 - DNA, 12 bp, Artificial Sequence
  Oligonucleotide primer for the detection of SNP TSC0005732
ttttaggggtta

SEQ ID NO: 278164 - DNA, 12 bp, Artificial Sequence
  Oligonucleotide primer for the detection of SNP TSC0005733
cattaaataacc

SEQ ID NO: 278165 - DNA, 12 bp, Artificial Sequence
  Oligonucleotide primer for the detection of SNP TSC0005733
cgttaaataacc

SEQ ID NO: 278166 - DNA, 12 bp, Artificial Sequence
  Oligonucleotide primer for the detection of SNP TSC0005733
ggaaagtttatg

SEQ ID NO: 278167 - DNA, 12 bp, Artificial Sequence
  Oligonucleotide primer for the detection of SNP TSC0005733
ggaaagtttacg

SEQ ID NO: 278168 - DNA, 12 bp, Artificial Sequence
  Oligonucleotide primer for the detection of SNP TSC0005734
caacaaataaat

SEQ ID NO: 278169 - DNA, 12 bp, Artificial Sequence
  Oligonucleotide primer for the detection of SNP TSC0005739
actacaataaaa

SEQ ID NO: 278170 - DNA, 12 bp, Artificial Sequence
  Oligonucleotide primer for the detection of SNP TSC0005739
ggagtgaggtgt

SEQ ID NO: 278171 - DNA, 12 bp, Artificial Sequence
  Oligonucleotide primer for the detection of SNP TSC0005739
gttgtagtgaga

SEQ ID NO: 278172 - DNA, 12 bp, Artificial Sequence
  Oligonucleotide primer for the detection of SNP TSC0005744
catatatatatt

SEQ ID NO: 278173 - DNA, 12 bp, Artificial Sequence
  Oligonucleotide primer for the detection of SNP TSC0005744
cgtatatatatt

SEQ ID NO: 278174 - DNA, 12 bp, Artificial Sequence
  Oligonucleotide primer for the detection of SNP TSC0005744
agtttaaagtgg

SEQ ID NO: 278175 - DNA, 12 bp, Artificial Sequence
  Oligonucleotide primer for the detection of SNP TSC0005765
aaaaaaacacga

SEQ ID NO: 278176 - DNA, 12 bp, Artificial Sequence
  Oligonucleotide primer for the detection of SNP TSC0005765
tgataaaaattt

SEQ ID NO: 278177 - DNA, 12 bp, Artificial Sequence
  Oligonucleotide primer for the detection of SNP TSC0005765
taataaaaatct

SEQ ID NO: 278178 - DNA, 12 bp, Artificial Sequence
  Oligonucleotide primer for the detection of SNP TSC0005765
aagaaagtatga

SEQ ID NO: 278179 - DNA, 12 bp, Artificial Sequence
  Oligonucleotide primer for the detection of SNP TSC0005765
aagaaagtacga

SEQ ID NO: 278180 - DNA, 12 bp, Artificial Sequence
  Oligonucleotide primer for the detection of SNP TSC0005767
ctacaaacccca

SEQ ID NO: 278181 - DNA, 12 bp, Artificial Sequence
  Oligonucleotide primer for the detection of SNP TSC0005767
aggataggttta

SEQ ID NO: 278182 - DNA, 12 bp, Artificial Sequence
  Oligonucleotide primer for the detection of SNP TSC0005767
aacaaacccaaa

SEQ ID NO: 278183 - DNA, 12 bp, Artificial Sequence
  Oligonucleotide primer for the detection of SNP TSC0005767
ttgtaagtttta

SEQ ID NO: 278184 - DNA, 12 bp, Artificial Sequence
  Oligonucleotide primer for the detection of SNP TSC0005772
acttcaaataac

SEQ ID NO: 278185 - DNA, 12 bp, Artificial Sequence
  Oligonucleotide primer for the detection of SNP TSC0005772
acttcgaataac

SEQ ID NO: 278186 - DNA, 12 bp, Artificial Sequence
  Oligonucleotide primer for the detection of SNP TSC0005772
ttttattgtgag

SEQ ID NO: 278187 - DNA, 12 bp, Artificial Sequence
  Oligonucleotide primer for the detection of SNP TSC0005777
aataatatcatt

SEQ ID NO: 278188 - DNA, 12 bp, Artificial Sequence
  Oligonucleotide primer for the detection of SNP TSC0005777
gagaatttaata

SEQ ID NO: 278189 - DNA, 12 bp, Artificial Sequence
  Oligonucleotide primer for the detection of SNP TSC0005778
tctaccctcact

SEQ ID NO: 278190 - DNA, 12 bp, Artificial Sequence
  Oligonucleotide primer for the detection of SNP TSC0005778
ataaatggttta

SEQ ID NO: 278191 - DNA, 12 bp, Artificial Sequence
  Oligonucleotide primer for the detection of SNP TSC0005779
acttataaacca

SEQ ID NO: 278192 - DNA, 12 bp, Artificial Sequence
  Oligonucleotide primer for the detection of SNP TSC0005779
atgggttaataa

SEQ ID NO: 278193 - DNA, 12 bp, Artificial Sequence
  Oligonucleotide primer for the detection of SNP TSC0005779
ataaaccaataa

SEQ ID NO: 278194 - DNA, 12 bp, Artificial Sequence
  Oligonucleotide primer for the detection of SNP TSC0005779
atttgtaggtta

SEQ ID NO: 278195 - DNA, 12 bp, Artificial Sequence
  Oligonucleotide primer for the detection of SNP TSC0005780
ttaaaaaataaa

SEQ ID NO: 278196 - DNA, 12 bp, Artificial Sequence
  Oligonucleotide primer for the detection of SNP TSC0005780
ttgatatgaatg

SEQ ID NO: 278197 - DNA, 12 bp, Artificial Sequence
  Oligonucleotide primer for the detection of SNP TSC0005780
tgaaaaataagt

SEQ ID NO: 278198 - DNA, 12 bp, Artificial Sequence
  Oligonucleotide primer for the detection of SNP TSC0005790
ttaacttttctt

SEQ ID NO: 278199 - DNA, 12 bp, Artificial Sequence
  Oligonucleotide primer for the detection of SNP TSC0005790
tatattttattt

SEQ ID NO: 278200 - DNA, 12 bp, Artificial Sequence
  Oligonucleotide primer for the detection of SNP TSC0005790
tcacatcttact

SEQ ID NO: 278201 - DNA, 12 bp, Artificial Sequence
  Oligonucleotide primer for the detection of SNP TSC0005790
tggttttttttt

SEQ ID NO: 278202 - DNA, 12 bp, Artificial Sequence
  Oligonucleotide primer for the detection of SNP TSC0005791
ccaaaaatcaac

SEQ ID NO: 278203 - DNA, 12 bp, Artificial Sequence
  Oligonucleotide primer for the detection of SNP TSC0005791
cctaccctacca

SEQ ID NO: 278204 - DNA, 12 bp, Artificial Sequence
  Oligonucleotide primer for the detection of SNP TSC0005791
ttagaagttagt

SEQ ID NO: 278205 - DNA, 12 bp, Artificial Sequence
  Oligonucleotide primer for the detection of SNP TSC0005791
ttagaagttagc

SEQ ID NO: 278206 - DNA, 12 bp, Artificial Sequence
  Oligonucleotide primer for the detection of SNP TSC0005792
aaataatataat

SEQ ID NO: 278207 - DNA, 12 bp, Artificial Sequence
  Oligonucleotide primer for the detection of SNP TSC0005792
gagaggaatagg

SEQ ID NO: 278208 - DNA, 12 bp, Artificial Sequence
  Oligonucleotide primer for the detection of SNP TSC0005797
ataaatcaatac

SEQ ID NO: 278209 - DNA, 12 bp, Artificial Sequence
  Oligonucleotide primer for the detection of SNP TSC0005797
ataaatcgatac

SEQ ID NO: 278210 - DNA, 12 bp, Artificial Sequence
  Oligonucleotide primer for the detection of SNP TSC0005797
gaattaatgtaa

SEQ ID NO: 278211 - DNA, 12 bp, Artificial Sequence
  Oligonukleotid-Primer
gaattaacgtaa

SEQ ID NO: 278212 - DNA, 12 bp, Artificial Sequence
  Oligonucleotide primer for the detection of SNP TSC0005798
acaccaaaaata

SEQ ID NO: 278213 - DNA, 12 bp, Artificial Sequence
  Oligonucleotide primer for the detection of SNP TSC0005798
gtttttagagta

SEQ ID NO: 278214 - DNA, 12 bp, Artificial Sequence
  Oligonucleotide primer for the detection of SNP TSC0005798
acttttaaaaca

SEQ ID NO: 278215 - DNA, 12 bp, Artificial Sequence
  Oligonucleotide primer for the detection of SNP TSC0005798
gtattagaaatg

SEQ ID NO: 278216 - DNA, 12 bp, Artificial Sequence
  Oligonucleotide primer for the detection of SNP TSC0005799
tcctaccaacct

SEQ ID NO: 278217 - DNA, 12 bp, Artificial Sequence
  Oligonucleotide primer for the detection of SNP TSC0005799
tgttgaatagag

SEQ ID NO: 278218 - DNA, 12 bp, Artificial Sequence
  Oligonucleotide primer for the detection of SNP TSC0005800
cttaaaaacaaa

SEQ ID NO: 278219 - DNA, 12 bp, Artificial Sequence
  Oligonucleotide primer for the detection of SNP TSC0005800
atggttgttatt

SEQ ID NO: 278220 - DNA, 12 bp, Artificial Sequence
  Oligonucleotide primer for the detection of SNP TSC0005800
cataactactac

SEQ ID NO: 278221 - DNA, 12 bp, Artificial Sequence
  Oligonucleotide primer for the detection of SNP TSC0005800
ttttggaggtag

SEQ ID NO: 278222 - DNA, 12 bp, Artificial Sequence
  Oligonucleotide primer for the detection of SNP TSC0005817
catcccaacccc

SEQ ID NO: 278223 - DNA, 12 bp, Artificial Sequence
  Oligonucleotide primer for the detection of SNP TSC0005817
atgaggggtata

SEQ ID NO: 278224 - DNA, 12 bp, Artificial Sequence
  Oligonucleotide primer for the detection of SNP TSC0005817
acgaggggtata

SEQ ID NO: 278225 - DNA, 12 bp, Artificial Sequence
  Oligonucleotide primer for the detection of SNP TSC0005817
acaaaaaacaca

SEQ ID NO: 278226 - DNA, 12 bp, Artificial Sequence
  Oligonucleotide primer for the detection of SNP TSC0005817
acgaaaaacaca

SEQ ID NO: 278227 - DNA, 12 bp, Artificial Sequence
  Oligonucleotide primer for the detection of SNP TSC0005818
actctaccctca

SEQ ID NO: 278228 - DNA, 12 bp, Artificial Sequence
  Oligonucleotide primer for the detection of SNP TSC0005818
ttatttttgggt

SEQ ID NO: 278229 - DNA, 12 bp, Artificial Sequence
  Oligonucleotide primer for the detection of SNP TSC0005818
ccacccctaaat

SEQ ID NO: 278230 - DNA, 12 bp, Artificial Sequence
  Oligonucleotide primer for the detection of SNP TSC0005819
cctactatatct

SEQ ID NO: 278231 - DNA, 12 bp, Artificial Sequence
  Oligonucleotide primer for the detection of SNP TSC0005819
ggggtagttggg

SEQ ID NO: 278232 - DNA, 12 bp, Artificial Sequence
  Oligonucleotide primer for the detection of SNP TSC0005820
ccacaattaaac

SEQ ID NO: 278233 - DNA, 12 bp, Artificial Sequence
  Oligonucleotide primer for the detection of SNP TSC0005820
taggggtggttg

SEQ ID NO: 278234 - DNA, 12 bp, Artificial Sequence
  Oligonucleotide primer for the detection of SNP TSC0005821
aaaaatcctaac

SEQ ID NO: 278235 - DNA, 12 bp, Artificial Sequence
  Oligonucleotide primer for the detection of SNP TSC0005821
tagtagggagtg

SEQ ID NO: 278236 - DNA, 12 bp, Artificial Sequence
  Oligonucleotide primer for the detection of SNP TSC0005824
ttttaaatcctt

SEQ ID NO: 278237 - DNA, 12 bp, Artificial Sequence
  Oligonucleotide primer for the detection of SNP TSC0005824
agtaatttttga

SEQ ID NO: 278238 - DNA, 12 bp, Artificial Sequence
  Oligonucleotide primer for the detection of SNP TSC0005826
ataacaaactta

SEQ ID NO: 278239 - DNA, 12 bp, Artificial Sequence
  Oligonucleotide primer for the detection of SNP TSC0005826
ggttgttttttt

SEQ ID NO: 278240 - DNA, 12 bp, Artificial Sequence
  Oligonucleotide primer for the detection of SNP TSC0005826
ctactcttctaa

SEQ ID NO: 278241 - DNA, 12 bp, Artificial Sequence
  Oligonucleotide primer for the detection of SNP TSC0005826
gtagatttgttt

SEQ ID NO: 278242 - DNA, 12 bp, Artificial Sequence
  Oligonucleotide primer for the detection of SNP TSC0005827
aactcccaacaa

SEQ ID NO: 278243 - DNA, 12 bp, Artificial Sequence
  Oligonucleotide primer for the detection of SNP TSC0005827
aactcccaacga

SEQ ID NO: 278244 - DNA, 12 bp, Artificial Sequence
  Oligonucleotide primer for the detection of SNP TSC0005827
tatttgtaagag

SEQ ID NO: 278245 - DNA, 12 bp, Artificial Sequence
  Oligonucleotide primer for the detection of SNP TSC0005827
tacctataaaaa

SEQ ID NO: 278246 - DNA, 12 bp, Artificial Sequence
  Oligonucleotide primer for the detection of SNP TSC0005827
tttttagtggtt

SEQ ID NO: 278247 - DNA, 12 bp, Artificial Sequence
  Oligonucleotide primer for the detection of SNP TSC0005827
tttttagcggtt

SEQ ID NO: 278248 - DNA, 12 bp, Artificial Sequence
  Oligonucleotide primer for the detection of SNP TSC0005837
aaacaactactt

SEQ ID NO: 278249 - DNA, 12 bp, Artificial Sequence
  Oligonucleotide primer for the detection of SNP TSC0005837
gatattgggtga

SEQ ID NO: 278250 - DNA, 12 bp, Artificial Sequence
  Oligonucleotide primer for the detection of SNP TSC0005838
actcaattctta

SEQ ID NO: 278251 - DNA, 12 bp, Artificial Sequence
  Oligonucleotide primer for the detection of SNP TSC0005838
taagttttaaat

SEQ ID NO: 278252 - DNA, 12 bp, Artificial Sequence
  Oligonucleotide primer for the detection of SNP TSC0005838
taaattttaaat

SEQ ID NO: 278253 - DNA, 12 bp, Artificial Sequence
  Oligonucleotide primer for the detection of SNP TSC0005839
ataactattcaa

SEQ ID NO: 278254 - DNA, 12 bp, Artificial Sequence
  Oligonucleotide primer for the detection of SNP TSC0005839
ataactattcga

SEQ ID NO: 278255 - DNA, 12 bp, Artificial Sequence
  Oligonucleotide primer for the detection of SNP TSC0005839
tttaaggtgttg

SEQ ID NO: 278256 - DNA, 12 bp, Artificial Sequence
  Oligonucleotide primer for the detection of SNP TSC0005839
tttaaggcgttg

SEQ ID NO: 278257 - DNA, 12 bp, Artificial Sequence
  Oligonucleotide primer for the detection of SNP TSC0005839
ctcaaaacacta

SEQ ID NO: 278258 - DNA, 12 bp, Artificial Sequence
  Oligonucleotide primer for the detection of SNP TSC0005839
ctcaaaacgcta

SEQ ID NO: 278259 - DNA, 12 bp, Artificial Sequence
  Oligonucleotide primer for the detection of SNP TSC0005839
ggtgattgtttg

SEQ ID NO: 278260 - DNA, 12 bp, Artificial Sequence
  Oligonucleotide primer for the detection of SNP TSC0005839
ggtgattgttcg

SEQ ID NO: 278261 - DNA, 12 bp, Artificial Sequence
  Oligonucleotide primer for the detection of SNP TSC0005840
caaaatatattc

SEQ ID NO: 278262 - DNA, 12 bp, Artificial Sequence
  Oligonucleotide primer for the detection of SNP TSC0005840
cgaaatatattc

SEQ ID NO: 278263 - DNA, 12 bp, Artificial Sequence
  Oligonucleotide primer for the detection of SNP TSC0005840
aggtttggtagt

SEQ ID NO: 278264 - DNA, 12 bp, Artificial Sequence
  Oligonucleotide primer for the detection of SNP TSC0005841
caaacaatcacc

SEQ ID NO: 278265 - DNA, 12 bp, Artificial Sequence
  Oligonucleotide primer for the detection of SNP TSC0005841
cgaacaatcacc

SEQ ID NO: 278266 - DNA, 12 bp, Artificial Sequence
  Oligonucleotide primer for the detection of SNP TSC0005841
ggtgagaagtag

SEQ ID NO: 278267 - DNA, 12 bp, Artificial Sequence
  Oligonucleotide primer for the detection of SNP TSC0005842
aaataaaattta

SEQ ID NO: 278268 - DNA, 12 bp, Artificial Sequence
  Oligonucleotide primer for the detection of SNP TSC0005842
attgttaagttt

SEQ ID NO: 278269 - DNA, 12 bp, Artificial Sequence
  Oligonucleotide primer for the detection of SNP TSC0005842
aactaccaaacc

SEQ ID NO: 278270 - DNA, 12 bp, Artificial Sequence
  Oligonucleotide primer for the detection of SNP TSC0005842
aaagtgggattt

SEQ ID NO: 278271 - DNA, 12 bp, Artificial Sequence
  Oligonucleotide primer for the detection of SNP TSC0005849
ctaatctaaacc

SEQ ID NO: 278272 - DNA, 12 bp, Artificial Sequence
  Oligonucleotide primer for the detection of SNP TSC0005849
ccattactatca

SEQ ID NO: 278273 - DNA, 12 bp, Artificial Sequence
  Oligonucleotide primer for the detection of SNP TSC0005849
ttgatttgaatt

SEQ ID NO: 278274 - DNA, 12 bp, Artificial Sequence
  Oligonucleotide primer for the detection of SNP TSC0005851
accctacaaact

SEQ ID NO: 278275 - DNA, 12 bp, Artificial Sequence
  Oligonucleotide primer for the detection of SNP TSC0005851
tagaggttggaa

SEQ ID NO: 278276 - DNA, 12 bp, Artificial Sequence
  Oligonucleotide primer for the detection of SNP TSC0005852
aaatctctaaaa

SEQ ID NO: 278277 - DNA, 12 bp, Artificial Sequence
  Oligonucleotide primer for the detection of SNP TSC0005852
agtgtgtgttgg

SEQ ID NO: 278278 - DNA, 12 bp, Artificial Sequence
  Oligonucleotide primer for the detection of SNP TSC0005852
agtgtgcgttgg

SEQ ID NO: 278279 - DNA, 12 bp, Artificial Sequence
  Oligonucleotide primer for the detection of SNP TSC0005852
aatatacattaa

SEQ ID NO: 278280 - DNA, 12 bp, Artificial Sequence
  Oligonucleotide primer for the detection of SNP TSC0005852
aatatacgttaa

SEQ ID NO: 278281 - DNA, 12 bp, Artificial Sequence
  Oligonucleotide primer for the detection of SNP TSC0005852
aaggtttttgga

SEQ ID NO: 278282 - DNA, 12 bp, Artificial Sequence
  Oligonucleotide primer for the detection of SNP TSC0005853
ataaaaaacaaa

SEQ ID NO: 278283 - DNA, 12 bp, Artificial Sequence
  Oligonucleotide primer for the detection of SNP TSC0005853
gtaaaaaacaaa

SEQ ID NO: 278284 - DNA, 12 bp, Artificial Sequence
  Oligonucleotide primer for the detection of SNP TSC0005853
aatatagtttag

SEQ ID NO: 278285 - DNA, 12 bp, Artificial Sequence
  Oligonucleotide primer for the detection of SNP TSC0005853
acacaacccaaa

SEQ ID NO: 278286 - DNA, 12 bp, Artificial Sequence
  Oligonucleotide primer for the detection of SNP TSC0005853
gtggaaggtagg

SEQ ID NO: 278287 - DNA, 12 bp, Artificial Sequence
  Oligonucleotide primer for the detection of SNP TSC0005854
cacaaaatatca

SEQ ID NO: 278288 - DNA, 12 bp, Artificial Sequence
  Oligonukleotid-Primer
gaagattttttg

SEQ ID NO: 278289 - DNA, 12 bp, Artificial Sequence
  Oligonucleotide primer for the detection of SNP TSC0005854
gaagatttttcg

SEQ ID NO: 278290 - DNA, 12 bp, Artificial Sequence
  Oligonucleotide primer for the detection of SNP TSC0005854
aaaaactcttca

SEQ ID NO: 278291 - DNA, 12 bp, Artificial Sequence
  Oligonucleotide primer for the detection of SNP TSC0005854
aaaaactcttcg

SEQ ID NO: 278292 - DNA, 12 bp, Artificial Sequence
  Oligonucleotide primer for the detection of SNP TSC0005854
tataaaatatta

SEQ ID NO: 278293 - DNA, 12 bp, Artificial Sequence
  Oligonucleotide primer for the detection of SNP TSC0005855
ggtgatagatag

SEQ ID NO: 278294 - DNA, 12 bp, Artificial Sequence
  Oligonucleotide primer for the detection of SNP TSC0005855
ataacaaacaaa

SEQ ID NO: 278295 - DNA, 12 bp, Artificial Sequence
  Oligonucleotide primer for the detection of SNP TSC0005855
aaatggaagtag

SEQ ID NO: 278296 - DNA, 12 bp, Artificial Sequence
  Oligonucleotide primer for the detection of SNP TSC0005856
acaataacaaat

SEQ ID NO: 278297 - DNA, 12 bp, Artificial Sequence
  Oligonucleotide primer for the detection of SNP TSC0005856
acaataacgaat

SEQ ID NO: 278298 - DNA, 12 bp, Artificial Sequence
  Oligonucleotide primer for the detection of SNP TSC0005856
tagtttattttt

SEQ ID NO: 278299 - DNA, 12 bp, Artificial Sequence
  Oligonucleotide primer for the detection of SNP TSC0005856
caatctattctc

SEQ ID NO: 278300 - DNA, 12 bp, Artificial Sequence
  Oligonucleotide primer for the detection of SNP TSC0005856
gtagtggtgagt

SEQ ID NO: 278301 - DNA, 12 bp, Artificial Sequence
  Oligonucleotide primer for the detection of SNP TSC0005856
gtagtggcgagt

SEQ ID NO: 278302 - DNA, 12 bp, Artificial Sequence
  Oligonucleotide primer for the detection of SNP TSC0005857
ctaaaacttccc

SEQ ID NO: 278303 - DNA, 12 bp, Artificial Sequence
  Oligonucleotide primer for the detection of SNP TSC0005857
taggagttttat

SEQ ID NO: 278304 - DNA, 12 bp, Artificial Sequence
  Oligonucleotide primer for the detection of SNP TSC0005858
tattcacaccat

SEQ ID NO: 278305 - DNA, 12 bp, Artificial Sequence
  Oligonucleotide primer for the detection of SNP TSC0005858
tttgtgagtgta

SEQ ID NO: 278306 - DNA, 12 bp, Artificial Sequence
  Oligonucleotide primer for the detection of SNP TSC0005859
tctaaaaaacca

SEQ ID NO: 278307 - DNA, 12 bp, Artificial Sequence
  Oligonucleotide primer for the detection of SNP TSC0005859
agaggaaagttt

SEQ ID NO: 278308 - DNA, 12 bp, Artificial Sequence
  Oligonucleotide primer for the detection of SNP TSC0005859
aaaaaaaaactc

SEQ ID NO: 278309 - DNA, 12 bp, Artificial Sequence
  Oligonucleotide primer for the detection of SNP TSC0005859
ttttaagggatt

SEQ ID NO: 278310 - DNA, 12 bp, Artificial Sequence
  Oligonucleotide primer for the detection of SNP TSC0005860
tctaaactatat

SEQ ID NO: 278311 - DNA, 12 bp, Artificial Sequence
  Oligonucleotide primer for the detection of SNP TSC0005860
gtgttagtttag

SEQ ID NO: 278312 - DNA, 12 bp, Artificial Sequence
  Oligonucleotide primer for the detection of SNP TSC0005861
aaaaaacaatta

SEQ ID NO: 278313 - DNA, 12 bp, Artificial Sequence
  Oligonucleotide primer for the detection of SNP TSC0005861
ggtttgatagga

SEQ ID NO: 278314 - DNA, 12 bp, Artificial Sequence
  Oligonucleotide primer for the detection of SNP TSC0005870
taaaaataattt

SEQ ID NO: 278315 - DNA, 12 bp, Artificial Sequence
  Oligonucleotide primer for the detection of SNP TSC0005870
tataatgataaa

SEQ ID NO: 278316 - DNA, 12 bp, Artificial Sequence
  Oligonucleotide primer for the detection of SNP TSC0005880
aagagagtttag

SEQ ID NO: 278317 - DNA, 12 bp, Artificial Sequence
  Oligonucleotide primer for the detection of SNP TSC0005880
aaaaaaattcaa

SEQ ID NO: 278318 - DNA, 12 bp, Artificial Sequence
  Oligonucleotide primer for the detection of SNP TSC0005880
agggtaagaggg

SEQ ID NO: 278319 - DNA, 12 bp, Artificial Sequence
  Oligonucleotide primer for the detection of SNP TSC0005881
ttcctccctcca

SEQ ID NO: 278320 - DNA, 12 bp, Artificial Sequence
  Oligonucleotide primer for the detection of SNP TSC0005881
gtgaaggaagtg

SEQ ID NO: 278321 - DNA, 12 bp, Artificial Sequence
  Oligonucleotide primer for the detection of SNP TSC0005886
ctaaaactaata

SEQ ID NO: 278322 - DNA, 12 bp, Artificial Sequence
  Oligonucleotide primer for the detection of SNP TSC0005886
tgttgtgattat

SEQ ID NO: 278323 - DNA, 12 bp, Artificial Sequence
  Oligonucleotide primer for the detection of SNP TSC0005886
tgttgtgattac

SEQ ID NO: 278324 - DNA, 12 bp, Artificial Sequence
  Oligonucleotide primer for the detection of SNP TSC0005886
ttactataatca

SEQ ID NO: 278325 - DNA, 12 bp, Artificial Sequence
  Oligonucleotide primer for the detection of SNP TSC0005886
ttggaattaata

SEQ ID NO: 278326 - DNA, 12 bp, Artificial Sequence
  Oligonucleotide primer for the detection of SNP TSC0005889
ttattaaaactt

SEQ ID NO: 278327 - DNA, 12 bp, Artificial Sequence
  Oligonucleotide primer for the detection of SNP TSC0005889
taatttatgagg

SEQ ID NO: 278328 - DNA, 12 bp, Artificial Sequence
  Oligonucleotide primer for the detection of SNP TSC0005892
aattatcctcac

SEQ ID NO: 278329 - DNA, 12 bp, Artificial Sequence
  Oligonucleotide primer for the detection of SNP TSC0005892
ttgtttagttta

SEQ ID NO: 278330 - DNA, 12 bp, Artificial Sequence
  Oligonucleotide primer for the detection of SNP TSC0005892
ctattcaactta

SEQ ID NO: 278331 - DNA, 12 bp, Artificial Sequence
  Oligonucleotide primer for the detection of SNP TSC0005892
ggttatttttat

SEQ ID NO: 278332 - DNA, 12 bp, Artificial Sequence
  Oligonucleotide primer for the detection of SNP TSC0005896
atacaaaatttc

SEQ ID NO: 278333 - DNA, 12 bp, Artificial Sequence
  Oligonucleotide primer for the detection of SNP TSC0005896
tgaggagtatag

SEQ ID NO: 278334 - DNA, 12 bp, Artificial Sequence
  Oligonucleotide primer for the detection of SNP TSC0005896
taaaaaacacaa

SEQ ID NO: 278335 - DNA, 12 bp, Artificial Sequence
  Oligonucleotide primer for the detection of SNP TSC0005896
gtgtaagatttt

SEQ ID NO: 278336 - DNA, 12 bp, Artificial Sequence
  Oligonucleotide primer for the detection of SNP TSC0005911
ccattccctcaa

SEQ ID NO: 278337 - DNA, 12 bp, Artificial Sequence
  Oligonucleotide primer for the detection of SNP TSC0005911
aggagtgaggtt

SEQ ID NO: 278338 - DNA, 12 bp, Artificial Sequence
  Oligonucleotide primer for the detection of SNP TSC0005912
aataatacatac

SEQ ID NO: 278339 - DNA, 12 bp, Artificial Sequence
  Oligonucleotide primer for the detection of SNP TSC0005912
ttaagttttaaa

SEQ ID NO: 278340 - DNA, 12 bp, Artificial Sequence
  Oligonucleotide primer for the detection of SNP TSC0005912
ccaaattccaaa

SEQ ID NO: 278341 - DNA, 12 bp, Artificial Sequence
  Oligonucleotide primer for the detection of SNP TSC0005912
gatgatgtatgt

SEQ ID NO: 278342 - DNA, 12 bp, Artificial Sequence
  Oligonucleotide primer for the detection of SNP TSC0005913
aacaattttatt

SEQ ID NO: 278343 - DNA, 12 bp, Artificial Sequence
  Oligonucleotide primer for the detection of SNP TSC0005913
aacgattttatt

SEQ ID NO: 278344 - DNA, 12 bp, Artificial Sequence
  Oligonucleotide primer for the detection of SNP TSC0005913
ttagtatttgta

SEQ ID NO: 278345 - DNA, 12 bp, Artificial Sequence
  Oligonucleotide primer for the detection of SNP TSC0005914
taaatataaata

SEQ ID NO: 278346 - DNA, 12 bp, Artificial Sequence
  Oligonucleotide primer for the detection of SNP TSC0005914
attattaatatt

SEQ ID NO: 278347 - DNA, 12 bp, Artificial Sequence
  Oligonucleotide primer for the detection of SNP TSC0005914
attactaacatc

SEQ ID NO: 278348 - DNA, 12 bp, Artificial Sequence
  Oligonucleotide primer for the detection of SNP TSC0005914
tagatatggatg

SEQ ID NO: 278349 - DNA, 12 bp, Artificial Sequence
  Oligonucleotide primer for the detection of SNP TSC0005916
atttgtttatga

SEQ ID NO: 278350 - DNA, 12 bp, Artificial Sequence
  Oligonucleotide primer for the detection of SNP TSC0005916
attcgtttatga

SEQ ID NO: 278351 - DNA, 12 bp, Artificial Sequence
  Oligonucleotide primer for the detection of SNP TSC0005916
attcataaaaaa

SEQ ID NO: 278352 - DNA, 12 bp, Artificial Sequence
  Oligonucleotide primer for the detection of SNP TSC0005916
gttcataaaaaa

SEQ ID NO: 278353 - DNA, 12 bp, Artificial Sequence
  Oligonucleotide primer for the detection of SNP TSC0005916
aggtagggggga

SEQ ID NO: 278354 - DNA, 12 bp, Artificial Sequence
  Oligonucleotide primer for the detection of SNP TSC0005920
gttgttatgtta

SEQ ID NO: 278355 - DNA, 12 bp, Artificial Sequence
  Oligonucleotide primer for the detection of SNP TSC0005921
ccactctcattt

SEQ ID NO: 278356 - DNA, 12 bp, Artificial Sequence
  Oligonucleotide primer for the detection of SNP TSC0005921
aatttaaataaa

SEQ ID NO: 278357 - DNA, 12 bp, Artificial Sequence
  Oligonucleotide primer for the detection of SNP TSC0005922
tatttgaattat

SEQ ID NO: 278358 - DNA, 12 bp, Artificial Sequence
  Oligonucleotide primer for the detection of SNP TSC0005922
taaatcataaaa

SEQ ID NO: 278359 - DNA, 12 bp, Artificial Sequence
  Oligonucleotide primer for the detection of SNP TSC0005922
tgggaaagattt

SEQ ID NO: 278360 - DNA, 12 bp, Artificial Sequence
  Oligonucleotide primer for the detection of SNP TSC0005941
ttaattatttta

SEQ ID NO: 278361 - DNA, 12 bp, Artificial Sequence
  Oligonucleotide primer for the detection of SNP TSC0005941
ttaatcattcca

SEQ ID NO: 278362 - DNA, 12 bp, Artificial Sequence
  Oligonucleotide primer for the detection of SNP TSC0005941
atatatgtatat

SEQ ID NO: 278363 - DNA, 12 bp, Artificial Sequence
  Oligonucleotide primer for the detection of SNP TSC0005945
ccattatcaaat

SEQ ID NO: 278364 - DNA, 12 bp, Artificial Sequence
  Oligonucleotide primer for the detection of SNP TSC0005945
tgtattaaatta

SEQ ID NO: 278365 - DNA, 12 bp, Artificial Sequence
  Oligonucleotide primer for the detection of SNP TSC0005950
aaaaatcctacc

SEQ ID NO: 278366 - DNA, 12 bp, Artificial Sequence
  Oligonucleotide primer for the detection of SNP TSC0005950
tgatagaggttg

SEQ ID NO: 278367 - DNA, 12 bp, Artificial Sequence
  Oligonucleotide primer for the detection of SNP TSC0005963
caacacaactaa

SEQ ID NO: 278368 - DNA, 12 bp, Artificial Sequence
  Oligonucleotide primer for the detection of SNP TSC0005963
ggggttgtattt

SEQ ID NO: 278369 - DNA, 12 bp, Artificial Sequence
  Oligonucleotide primer for the detection of SNP TSC0005963
ggggtcgtattt

SEQ ID NO: 278370 - DNA, 12 bp, Artificial Sequence
  Oligonucleotide primer for the detection of SNP TSC0005963
tcaaaatcatac

SEQ ID NO: 278371 - DNA, 12 bp, Artificial Sequence
  Oligonucleotide primer for the detection of SNP TSC0005963
tcaaaatcgtac

SEQ ID NO: 278372 - DNA, 12 bp, Artificial Sequence
  Oligonucleotide primer for the detection of SNP TSC0005963
tcgaaatcatac

SEQ ID NO: 278373 - DNA, 12 bp, Artificial Sequence
  Oligonukleotid-Primer
tcgaaatcgtac

SEQ ID NO: 278374 - DNA, 12 bp, Artificial Sequence
  Oligonucleotide primer for the detection of SNP TSC0005963
tagtatagttag

SEQ ID NO: 278375 - DNA, 12 bp, Artificial Sequence
  Oligonucleotide primer for the detection of SNP TSC0005964
aaaaccataaac

SEQ ID NO: 278376 - DNA, 12 bp, Artificial Sequence
  Oligonucleotide primer for the detection of SNP TSC0005964
aaagatatttaa

SEQ ID NO: 278377 - DNA, 12 bp, Artificial Sequence
  Oligonukleotid-Primer
acaaacatctca

SEQ ID NO: 278378 - DNA, 12 bp, Artificial Sequence
  Oligonucleotide primer for the detection of SNP TSC0005965
ttgtttttggta

SEQ ID NO: 278379 - DNA, 12 bp, Artificial Sequence
  Oligonucleotide primer for the detection of SNP TSC0005965
ctactcctaaca

SEQ ID NO: 278380 - DNA, 12 bp, Artificial Sequence
  Oligonucleotide primer for the detection of SNP TSC0005966
aaaatacctacc

SEQ ID NO: 278381 - DNA, 12 bp, Artificial Sequence
  Oligonucleotide primer for the detection of SNP TSC0005966
aaggtaaagaga

SEQ ID NO: 278382 - DNA, 12 bp, Artificial Sequence
  Oligonucleotide primer for the detection of SNP TSC0005967
ataacatctact

SEQ ID NO: 278383 - DNA, 12 bp, Artificial Sequence
  Oligonucleotide primer for the detection of SNP TSC0005967
aggtttttttag

SEQ ID NO: 278384 - DNA, 12 bp, Artificial Sequence
  Oligonucleotide primer for the detection of SNP TSC0005970
catccacaaccc

SEQ ID NO: 278385 - DNA, 12 bp, Artificial Sequence
  Oligonucleotide primer for the detection of SNP TSC0005970
catccacgaccc

SEQ ID NO: 278386 - DNA, 12 bp, Artificial Sequence
  Oligonucleotide primer for the detection of SNP TSC0005970
gtagtagttatg

SEQ ID NO: 278387 - DNA, 12 bp, Artificial Sequence
  Oligonucleotide primer for the detection of SNP TSC0005971
cactcaatcaat

SEQ ID NO: 278388 - DNA, 12 bp, Artificial Sequence
  Oligonucleotide primer for the detection of SNP TSC0005971
ttgaaggtgtta

SEQ ID NO: 278389 - DNA, 12 bp, Artificial Sequence
  Oligonucleotide primer for the detection of SNP TSC0005972
aaaccctaataa

SEQ ID NO: 278390 - DNA, 12 bp, Artificial Sequence
  Oligonucleotide primer for the detection of SNP TSC0005972
tatttaaatagt

SEQ ID NO: 278391 - DNA, 12 bp, Artificial Sequence
  Oligonucleotide primer for the detection of SNP TSC0005972
tattcaaacaac

SEQ ID NO: 278392 - DNA, 12 bp, Artificial Sequence
  Oligonucleotide primer for the detection of SNP TSC0005972
taagattttgat

SEQ ID NO: 278393 - DNA, 12 bp, Artificial Sequence
  Oligonucleotide primer for the detection of SNP TSC0005979
ttaaaaatacat

SEQ ID NO: 278394 - DNA, 12 bp, Artificial Sequence
  Oligonucleotide primer for the detection of SNP TSC0005979
atatatataata

SEQ ID NO: 278395 - DNA, 12 bp, Artificial Sequence
  Oligonucleotide primer for the detection of SNP TSC0005979
acacatacaaca

SEQ ID NO: 278396 - DNA, 12 bp, Artificial Sequence
  Oligonucleotide primer for the detection of SNP TSC0005979
ttgaaaatatat

SEQ ID NO: 278397 - DNA, 12 bp, Artificial Sequence
  Oligonucleotide primer for the detection of SNP TSC0005984
acaataatctaa

SEQ ID NO: 278398 - DNA, 12 bp, Artificial Sequence
  Oligonucleotide primer for the detection of SNP TSC0005984
gatgagaagttt

SEQ ID NO: 278399 - DNA, 12 bp, Artificial Sequence
  Oligonucleotide primer for the detection of SNP TSC0005984
ataaaaaactca

SEQ ID NO: 278400 - DNA, 12 bp, Artificial Sequence
  Oligonucleotide primer for the detection of SNP TSC0005984
agtgatttaatt

SEQ ID NO: 278401 - DNA, 12 bp, Artificial Sequence
  Oligonucleotide primer for the detection of SNP TSC0005993
ttctaaatccta

SEQ ID NO: 278402 - DNA, 12 bp, Artificial Sequence
  Oligonucleotide primer for the detection of SNP TSC0005993
tttatgtttttt

SEQ ID NO: 278403 - DNA, 12 bp, Artificial Sequence
  Oligonucleotide primer for the detection of SNP TSC0005993
tctatattctct

SEQ ID NO: 278404 - DNA, 12 bp, Artificial Sequence
  Oligonucleotide primer for the detection of SNP TSC0005993
ttttggattttg

SEQ ID NO: 278405 - DNA, 12 bp, Artificial Sequence
  Oligonucleotide primer for the detection of SNP TSC0005994
aacaattacaat

SEQ ID NO: 278406 - DNA, 12 bp, Artificial Sequence
  Oligonucleotide primer for the detection of SNP TSC0005994
tattgtgtgtgg

SEQ ID NO: 278407 - DNA, 12 bp, Artificial Sequence
  Oligonucleotide primer for the detection of SNP TSC0005995
taacaaatcatc

SEQ ID NO: 278408 - DNA, 12 bp, Artificial Sequence
  Oligonucleotide primer for the detection of SNP TSC0005995
attttttaggtt

SEQ ID NO: 278409 - DNA, 12 bp, Artificial Sequence
  Oligonucleotide primer for the detection of SNP TSC0005995
aaatcctctaaa

SEQ ID NO: 278410 - DNA, 12 bp, Artificial Sequence
  Oligonucleotide primer for the detection of SNP TSC0005995
tgatagattatt

SEQ ID NO: 278411 - DNA, 12 bp, Artificial Sequence
  Oligonucleotide primer for the detection of SNP TSC0005995
tgatagattatc

SEQ ID NO: 278412 - DNA, 12 bp, Artificial Sequence
  Oligonucleotide primer for the detection of SNP TSC0005996
cctactatcatc

SEQ ID NO: 278413 - DNA, 12 bp, Artificial Sequence
  Oligonucleotide primer for the detection of SNP TSC0005996
tttttgtaagaa

SEQ ID NO: 278414 - DNA, 12 bp, Artificial Sequence
  Oligonucleotide primer for the detection of SNP TSC0005997
tccaaaattttc

SEQ ID NO: 278415 - DNA, 12 bp, Artificial Sequence
  Oligonucleotide primer for the detection of SNP TSC0005997
aagtaaagtgga

SEQ ID NO: 278416 - DNA, 12 bp, Artificial Sequence
  Oligonucleotide primer for the detection of SNP TSC0005997
aaacaaaataaa

SEQ ID NO: 278417 - DNA, 12 bp, Artificial Sequence
  Oligonucleotide primer for the detection of SNP TSC0005997
tttaagattttt

SEQ ID NO: 278418 - DNA, 12 bp, Artificial Sequence
  Oligonucleotide primer for the detection of SNP TSC0005998
cattttctactc

SEQ ID NO: 278419 - DNA, 12 bp, Artificial Sequence
  Oligonucleotide primer for the detection of SNP TSC0005998
ttatgttattat

SEQ ID NO: 278420 - DNA, 12 bp, Artificial Sequence
  Oligonucleotide primer for the detection of SNP TSC0005998
accataccacca

SEQ ID NO: 278421 - DNA, 12 bp, Artificial Sequence
  Oligonucleotide primer for the detection of SNP TSC0005999
tttctacttttt

SEQ ID NO: 278422 - DNA, 12 bp, Artificial Sequence
  Oligonucleotide primer for the detection of SNP TSC0005999
ttaatttattta

SEQ ID NO: 278423 - DNA, 12 bp, Artificial Sequence
  Oligonucleotide primer for the detection of SNP TSC0006000
aaaaaccccacc

SEQ ID NO: 278424 - DNA, 12 bp, Artificial Sequence
  Oligonucleotide primer for the detection of SNP TSC0006000
agtttgttgtag

SEQ ID NO: 278425 - DNA, 12 bp, Artificial Sequence
  Oligonucleotide primer for the detection of SNP TSC0006001
tttcattatttt

SEQ ID NO: 278426 - DNA, 12 bp, Artificial Sequence
  Oligonucleotide primer for the detection of SNP TSC0006001
tttataatatat

SEQ ID NO: 278427 - DNA, 12 bp, Artificial Sequence
  Oligonucleotide primer for the detection of SNP TSC0006001
ttcacaatatac

SEQ ID NO: 278428 - DNA, 12 bp, Artificial Sequence
  Oligonucleotide primer for the detection of SNP TSC0006002
caataaacacaa

SEQ ID NO: 278429 - DNA, 12 bp, Artificial Sequence
  Oligonucleotide primer for the detection of SNP TSC0006002
caataaacacga

SEQ ID NO: 278430 - DNA, 12 bp, Artificial Sequence
  Oligonucleotide primer for the detection of SNP TSC0006002
cgataaacacaa

SEQ ID NO: 278431 - DNA, 12 bp, Artificial Sequence
  Oligonucleotide primer for the detection of SNP TSC0006002
cgataaacacga

SEQ ID NO: 278432 - DNA, 12 bp, Artificial Sequence
  Oligonucleotide primer for the detection of SNP TSC0006002
tttttgttttgt

SEQ ID NO: 278433 - DNA, 12 bp, Artificial Sequence
  Oligonucleotide primer for the detection of SNP TSC0006002
ttttcgttttgt

SEQ ID NO: 278434 - DNA, 12 bp, Artificial Sequence
  Oligonucleotide primer for the detection of SNP TSC0006002
tttttgtttcgt

SEQ ID NO: 278435 - DNA, 12 bp, Artificial Sequence
  Oligonucleotide primer for the detection of SNP TSC0006002
ttttcgtttcgt

SEQ ID NO: 278436 - DNA, 12 bp, Artificial Sequence
  Oligonucleotide primer for the detection of SNP TSC0006002
ccctcaccccat

SEQ ID NO: 278437 - DNA, 12 bp, Artificial Sequence
  Oligonucleotide primer for the detection of SNP TSC0006002
ccctcaccccgt

SEQ ID NO: 278438 - DNA, 12 bp, Artificial Sequence
  Oligonucleotide primer for the detection of SNP TSC0006002
ccctcgccccat

SEQ ID NO: 278439 - DNA, 12 bp, Artificial Sequence
  Oligonucleotide primer for the detection of SNP TSC0006002
ccctcgccccgt

SEQ ID NO: 278440 - DNA, 12 bp, Artificial Sequence
  Oligonucleotide primer for the detection of SNP TSC0006002
tggtaagtatgg

SEQ ID NO: 278441 - DNA, 12 bp, Artificial Sequence
  Oligonucleotide primer for the detection of SNP TSC0006002
cggtaagtatgg

SEQ ID NO: 278442 - DNA, 12 bp, Artificial Sequence
  Oligonucleotide primer for the detection of SNP TSC0006002
tggtaagtacgg

SEQ ID NO: 278443 - DNA, 12 bp, Artificial Sequence
  Oligonucleotide primer for the detection of SNP TSC0006002
cggtaagtacgg

SEQ ID NO: 278444 - DNA, 12 bp, Artificial Sequence
  Oligonucleotide primer for the detection of SNP TSC0006005
aaaattacaatt

SEQ ID NO: 278445 - DNA, 12 bp, Artificial Sequence
  Oligonucleotide primer for the detection of SNP TSC0006005
ttaattatatgt

SEQ ID NO: 278446 - DNA, 12 bp, Artificial Sequence
  Oligonukleotid-Primer
ccaatcacatat

SEQ ID NO: 278447 - DNA, 12 bp, Artificial Sequence
  Oligonucleotide primer for the detection of SNP TSC0006005
agattataattt

SEQ ID NO: 278448 - DNA, 12 bp, Artificial Sequence
  Oligonucleotide primer for the detection of SNP TSC0006006
ctcaactataaa

SEQ ID NO: 278449 - DNA, 12 bp, Artificial Sequence
  Oligonucleotide primer for the detection of SNP TSC0006006
gggtgtaagatt

SEQ ID NO: 278450 - DNA, 12 bp, Artificial Sequence
  Oligonucleotide primer for the detection of SNP TSC0006006
gggtgtaagatc

SEQ ID NO: 278451 - DNA, 12 bp, Artificial Sequence
  Oligonucleotide primer for the detection of SNP TSC0006006
aaatacaaaacc

SEQ ID NO: 278452 - DNA, 12 bp, Artificial Sequence
  Oligonucleotide primer for the detection of SNP TSC0006006
tttagttgtggg

SEQ ID NO: 278453 - DNA, 12 bp, Artificial Sequence
  Oligonucleotide primer for the detection of SNP TSC0006007
tataattttgga

SEQ ID NO: 278454 - DNA, 12 bp, Artificial Sequence
  Oligonucleotide primer for the detection of SNP TSC0006008
attatcttaaaa

SEQ ID NO: 278455 - DNA, 12 bp, Artificial Sequence
  Oligonucleotide primer for the detection of SNP TSC0006008
gtattataaatt

SEQ ID NO: 278456 - DNA, 12 bp, Artificial Sequence
  Oligonucleotide primer for the detection of SNP TSC0006008
ataccacaaact

SEQ ID NO: 278457 - DNA, 12 bp, Artificial Sequence
  Oligonucleotide primer for the detection of SNP TSC0006008
attgttttaagg

SEQ ID NO: 278458 - DNA, 12 bp, Artificial Sequence
  Oligonucleotide primer for the detection of SNP TSC0006009
attagattggtt

SEQ ID NO: 278459 - DNA, 12 bp, Artificial Sequence
  Oligonucleotide primer for the detection of SNP TSC0006009
atcaaattaacc

SEQ ID NO: 278460 - DNA, 12 bp, Artificial Sequence
  Oligonucleotide primer for the detection of SNP TSC0006009
tatgagttatta

SEQ ID NO: 278461 - DNA, 12 bp, Artificial Sequence
  Oligonucleotide primer for the detection of SNP TSC0006012
gtggtttattga

SEQ ID NO: 278462 - DNA, 12 bp, Artificial Sequence
  Oligonucleotide primer for the detection of SNP TSC0006014
ttcttataaaat

SEQ ID NO: 278463 - DNA, 12 bp, Artificial Sequence
  Oligonucleotide primer for the detection of SNP TSC0006014
gaaatgtattga

SEQ ID NO: 278464 - DNA, 12 bp, Artificial Sequence
  Oligonucleotide primer for the detection of SNP TSC0006019
cttaaaataatc

SEQ ID NO: 278465 - DNA, 12 bp, Artificial Sequence
  Oligonucleotide primer for the detection of SNP TSC0006019
aagatatatatt

SEQ ID NO: 278466 - DNA, 12 bp, Artificial Sequence
  Oligonucleotide primer for the detection of SNP TSC0006020
caaactcaattc

SEQ ID NO: 278467 - DNA, 12 bp, Artificial Sequence
  Oligonucleotide primer for the detection of SNP TSC0006020
caaactcgattc

SEQ ID NO: 278468 - DNA, 12 bp, Artificial Sequence
  Oligonucleotide primer for the detection of SNP TSC0006020
taggagaatatg

SEQ ID NO: 278469 - DNA, 12 bp, Artificial Sequence
  Oligonucleotide primer for the detection of SNP TSC0006021
ctatttacaaac

SEQ ID NO: 278470 - DNA, 12 bp, Artificial Sequence
  Oligonucleotide primer for the detection of SNP TSC0006021
tttatgggatta

SEQ ID NO: 278471 - DNA, 12 bp, Artificial Sequence
  Oligonucleotide primer for the detection of SNP TSC0006022
aaaaatattact

SEQ ID NO: 278472 - DNA, 12 bp, Artificial Sequence
  Oligonucleotide primer for the detection of SNP TSC0006022
tatttagaaatg

SEQ ID NO: 278473 - DNA, 12 bp, Artificial Sequence
  Oligonucleotide primer for the detection of SNP TSC0006027
caataaccaaaa

SEQ ID NO: 278474 - DNA, 12 bp, Artificial Sequence
  Oligonucleotide primer for the detection of SNP TSC0006027
ttagataagagt

SEQ ID NO: 278475 - DNA, 12 bp, Artificial Sequence
  Oligonucleotide primer for the detection of SNP TSC0006027
ccaaataaaaat

SEQ ID NO: 278476 - DNA, 12 bp, Artificial Sequence
  Oligonucleotide primer for the detection of SNP TSC0006027
tagtggttagaa

SEQ ID NO: 278477 - DNA, 12 bp, Artificial Sequence
  Oligonucleotide primer for the detection of SNP TSC0006035
aaaccactcact

SEQ ID NO: 278478 - DNA, 12 bp, Artificial Sequence
  Oligonucleotide primer for the detection of SNP TSC0006035
aaaccactcgct

SEQ ID NO: 278479 - DNA, 12 bp, Artificial Sequence
  Oligonucleotide primer for the detection of SNP TSC0006035
tttatttatgta

SEQ ID NO: 278480 - DNA, 12 bp, Artificial Sequence
  Oligonucleotide primer for the detection of SNP TSC0006041
taaactctcctc

SEQ ID NO: 278481 - DNA, 12 bp, Artificial Sequence
  Oligonucleotide primer for the detection of SNP TSC0006041
ggtgggtaagtg

SEQ ID NO: 278482 - DNA, 12 bp, Artificial Sequence
  Oligonucleotide primer for the detection of SNP TSC0006041
ggtgggtaagcg

SEQ ID NO: 278483 - DNA, 12 bp, Artificial Sequence
  Oligonucleotide primer for the detection of SNP TSC0006050
tttccctttccc

SEQ ID NO: 278484 - DNA, 12 bp, Artificial Sequence
  Oligonucleotide primer for the detection of SNP TSC0006050
aattattagaag

SEQ ID NO: 278485 - DNA, 12 bp, Artificial Sequence
  Oligonucleotide primer for the detection of SNP TSC0006051
ttaattaaaaaa

SEQ ID NO: 278486 - DNA, 12 bp, Artificial Sequence
  Oligonucleotide primer for the detection of SNP TSC0006051
ttaggagtaata

SEQ ID NO: 278487 - DNA, 12 bp, Artificial Sequence
  Oligonucleotide primer for the detection of SNP TSC0006051
ccaaaaataata

SEQ ID NO: 278488 - DNA, 12 bp, Artificial Sequence
  Oligonucleotide primer for the detection of SNP TSC0006051
ttgattaaaaaa

SEQ ID NO: 278489 - DNA, 12 bp, Artificial Sequence
  Oligonucleotide primer for the detection of SNP TSC0006052
cattttcctttt

SEQ ID NO: 278490 - DNA, 12 bp, Artificial Sequence
  Oligonucleotide primer for the detection of SNP TSC0006052
tgtaaaaggaag

SEQ ID NO: 278491 - DNA, 12 bp, Artificial Sequence
  Oligonucleotide primer for the detection of SNP TSC0006055
aacgaaaaaaat

SEQ ID NO: 278492 - DNA, 12 bp, Artificial Sequence
  Oligonucleotide primer for the detection of SNP TSC0006055
aggatttatgta

SEQ ID NO: 278493 - DNA, 12 bp, Artificial Sequence
  Oligonucleotide primer for the detection of SNP TSC0006056
tattttaaacat

SEQ ID NO: 278494 - DNA, 12 bp, Artificial Sequence
  Oligonucleotide primer for the detection of SNP TSC0006056
taatattaaaga

SEQ ID NO: 278495 - DNA, 12 bp, Artificial Sequence
  Oligonucleotide primer for the detection of SNP TSC0006057
ttcatccaaaac

SEQ ID NO: 278496 - DNA, 12 bp, Artificial Sequence
  Oligonucleotide primer for the detection of SNP TSC0006057
tattaggattta

SEQ ID NO: 278497 - DNA, 12 bp, Artificial Sequence
  Oligonucleotide primer for the detection of SNP TSC0006057
catcaaaactta

SEQ ID NO: 278498 - DNA, 12 bp, Artificial Sequence
  Oligonucleotide primer for the detection of SNP TSC0006057
tttatttagggt

SEQ ID NO: 278499 - DNA, 12 bp, Artificial Sequence
  Oligonucleotide primer for the detection of SNP TSC0006066
cactactctctc

SEQ ID NO: 278500 - DNA, 12 bp, Artificial Sequence
  Oligonucleotide primer for the detection of SNP TSC0006066
gtattggtatgg

SEQ ID NO: 278501 - DNA, 12 bp, Artificial Sequence
  Oligonucleotide primer for the detection of SNP TSC0006066
gtatcggtatgg

SEQ ID NO: 278502 - DNA, 12 bp, Artificial Sequence
  Oligonucleotide primer for the detection of SNP TSC0006066
acatcaatataa

SEQ ID NO: 278503 - DNA, 12 bp, Artificial Sequence
  Oligonucleotide primer for the detection of SNP TSC0006066
acatcgatataa

SEQ ID NO: 278504 - DNA, 12 bp, Artificial Sequence
  Oligonucleotide primer for the detection of SNP TSC0006066
tattattttttt

SEQ ID NO: 278505 - DNA, 12 bp, Artificial Sequence
  Oligonucleotide primer for the detection of SNP TSC0006067
ataaataaaaat

SEQ ID NO: 278506 - DNA, 12 bp, Artificial Sequence
  Oligonucleotide primer for the detection of SNP TSC0006067
tattaatattta

SEQ ID NO: 278507 - DNA, 12 bp, Artificial Sequence
  Oligonucleotide primer for the detection of SNP TSC0006068
acatttattaaa

SEQ ID NO: 278508 - DNA, 12 bp, Artificial Sequence
  Oligonucleotide primer for the detection of SNP TSC0006068
acgtttattaaa

SEQ ID NO: 278509 - DNA, 12 bp, Artificial Sequence
  Oligonucleotide primer for the detection of SNP TSC0006068
atttgtatttat

SEQ ID NO: 278510 - DNA, 12 bp, Artificial Sequence
  Oligonucleotide primer for the detection of SNP TSC0006068
acctacatttat

SEQ ID NO: 278511 - DNA, 12 bp, Artificial Sequence
  Oligonucleotide primer for the detection of SNP TSC0006068
tgtttattaagt

SEQ ID NO: 278512 - DNA, 12 bp, Artificial Sequence
  Oligonucleotide primer for the detection of SNP TSC0006068
cgtttattaagt

SEQ ID NO: 278513 - DNA, 12 bp, Artificial Sequence
  Oligonucleotide primer for the detection of SNP TSC0006070
atacaccctaac

SEQ ID NO: 278514 - DNA, 12 bp, Artificial Sequence
  Oligonucleotide primer for the detection of SNP TSC0006071
cttcccaacaac

SEQ ID NO: 278515 - DNA, 12 bp, Artificial Sequence
  Oligonucleotide primer for the detection of SNP TSC0006071
cttcccaacgac

SEQ ID NO: 278516 - DNA, 12 bp, Artificial Sequence
  Oligonucleotide primer for the detection of SNP TSC0006071
cttcccgacaac

SEQ ID NO: 278517 - DNA, 12 bp, Artificial Sequence
  Oligonucleotide primer for the detection of SNP TSC0006071
cttcccgacgac

SEQ ID NO: 278518 - DNA, 12 bp, Artificial Sequence
  Oligonucleotide primer for the detection of SNP TSC0006071
gaatgttatgaa

SEQ ID NO: 278519 - DNA, 12 bp, Artificial Sequence
  Oligonucleotide primer for the detection of SNP TSC0006071
gaatgttacgaa

SEQ ID NO: 278520 - DNA, 12 bp, Artificial Sequence
  Oligonucleotide primer for the detection of SNP TSC0006089
aatttttgggtt

SEQ ID NO: 278521 - DNA, 12 bp, Artificial Sequence
  Oligonucleotide primer for the detection of SNP TSC0006089
aattttcgggtt

SEQ ID NO: 278522 - DNA, 12 bp, Artificial Sequence
  Oligonucleotide primer for the detection of SNP TSC0006089
aaactcccaaac

SEQ ID NO: 278523 - DNA, 12 bp, Artificial Sequence
  Oligonucleotide primer for the detection of SNP TSC0006089
aaactcccgaac

SEQ ID NO: 278524 - DNA, 12 bp, Artificial Sequence
  Oligonucleotide primer for the detection of SNP TSC0006089
ggaggattattt

SEQ ID NO: 278525 - DNA, 12 bp, Artificial Sequence
  Oligonucleotide primer for the detection of SNP TSC0006091
aaccacatccct

SEQ ID NO: 278526 - DNA, 12 bp, Artificial Sequence
  Oligonucleotide primer for the detection of SNP TSC0006091
gtttttgtaggg

SEQ ID NO: 278527 - DNA, 12 bp, Artificial Sequence
  Oligonucleotide primer for the detection of SNP TSC0006096
aaacccccaact

SEQ ID NO: 278528 - DNA, 12 bp, Artificial Sequence
  Oligonucleotide primer for the detection of SNP TSC0006096
agatggtttagt

SEQ ID NO: 278529 - DNA, 12 bp, Artificial Sequence
  Oligonucleotide primer for the detection of SNP TSC0006096
ataactcaataa

SEQ ID NO: 278530 - DNA, 12 bp, Artificial Sequence
  Oligonucleotide primer for the detection of SNP TSC0006096
gggtttttagtt

SEQ ID NO: 278531 - DNA, 12 bp, Artificial Sequence
  Oligonucleotide primer for the detection of SNP TSC0006097
ataatatctttc

SEQ ID NO: 278532 - DNA, 12 bp, Artificial Sequence
  Oligonucleotide primer for the detection of SNP TSC0006097
aataataataat

SEQ ID NO: 278533 - DNA, 12 bp, Artificial Sequence
  Oligonucleotide primer for the detection of SNP TSC0006100
atttcaaaactc

SEQ ID NO: 278534 - DNA, 12 bp, Artificial Sequence
  Oligonucleotide primer for the detection of SNP TSC0006100
aagagttattga

SEQ ID NO: 278535 - DNA, 12 bp, Artificial Sequence
  Oligonucleotide primer for the detection of SNP TSC0006101
tttatattctta

SEQ ID NO: 278536 - DNA, 12 bp, Artificial Sequence
  Oligonucleotide primer for the detection of SNP TSC0006101
ttagagtgtaat

SEQ ID NO: 278537 - DNA, 12 bp, Artificial Sequence
  Oligonucleotide primer for the detection of SNP TSC0006101
aaaatataataa

SEQ ID NO: 278538 - DNA, 12 bp, Artificial Sequence
  Oligonucleotide primer for the detection of SNP TSC0006101
tttgtgttttta

SEQ ID NO: 278539 - DNA, 12 bp, Artificial Sequence
  Oligonucleotide primer for the detection of SNP TSC0006102
caatacataatt

SEQ ID NO: 278540 - DNA, 12 bp, Artificial Sequence
  Oligonucleotide primer for the detection of SNP TSC0006102
attttatttaag

SEQ ID NO: 278541 - DNA, 12 bp, Artificial Sequence
  Oligonucleotide primer for the detection of SNP TSC0006110
tcacttttaaat

SEQ ID NO: 278542 - DNA, 12 bp, Artificial Sequence
  Oligonucleotide primer for the detection of SNP TSC0006110
ttttttatattt

SEQ ID NO: 278543 - DNA, 12 bp, Artificial Sequence
  Oligonukleotid-Primer
ttttttatactc

SEQ ID NO: 278544 - DNA, 12 bp, Artificial Sequence
  Oligonucleotide primer for the detection of SNP TSC0006110
ttatttttaagt

SEQ ID NO: 278545 - DNA, 12 bp, Artificial Sequence
  Oligonucleotide primer for the detection of SNP TSC0006115
taatcccttcat

SEQ ID NO: 278546 - DNA, 12 bp, Artificial Sequence
  Oligonucleotide primer for the detection of SNP TSC0006115
tgatttatgtaa

SEQ ID NO: 278547 - DNA, 12 bp, Artificial Sequence
  Oligonucleotide primer for the detection of SNP TSC0006115
tgatttacgtaa

SEQ ID NO: 278548 - DNA, 12 bp, Artificial Sequence
  Oligonucleotide primer for the detection of SNP TSC0006116
ataattaaattt

SEQ ID NO: 278549 - DNA, 12 bp, Artificial Sequence
  Oligonucleotide primer for the detection of SNP TSC0006116
ggatttataaat

SEQ ID NO: 278550 - DNA, 12 bp, Artificial Sequence
  Oligonucleotide primer for the detection of SNP TSC0006119
tatataatatac

SEQ ID NO: 278551 - DNA, 12 bp, Artificial Sequence
  Oligonucleotide primer for the detection of SNP TSC0006119
ttttggtttaag

SEQ ID NO: 278552 - DNA, 12 bp, Artificial Sequence
  Oligonucleotide primer for the detection of SNP TSC0006120
aacacacaaaca

SEQ ID NO: 278553 - DNA, 12 bp, Artificial Sequence
  Oligonucleotide primer for the detection of SNP TSC0006120
aacacgcaaaca

SEQ ID NO: 278554 - DNA, 12 bp, Artificial Sequence
  Oligonucleotide primer for the detection of SNP TSC0006120
aacgcacaaaca

SEQ ID NO: 278555 - DNA, 12 bp, Artificial Sequence
  Oligonucleotide primer for the detection of SNP TSC0006120
aacgcgcaaaca

SEQ ID NO: 278556 - DNA, 12 bp, Artificial Sequence
  Oligonucleotide primer for the detection of SNP TSC0006120
gatgggattata

SEQ ID NO: 278557 - DNA, 12 bp, Artificial Sequence
  Oligonucleotide primer for the detection of SNP TSC0006120
aataaaattaca

SEQ ID NO: 278558 - DNA, 12 bp, Artificial Sequence
  Oligonucleotide primer for the detection of SNP TSC0006120
gtgtgtaggtat

SEQ ID NO: 278559 - DNA, 12 bp, Artificial Sequence
  Oligonucleotide primer for the detection of SNP TSC0006120
gcgtgtaggtat

SEQ ID NO: 278560 - DNA, 12 bp, Artificial Sequence
  Oligonucleotide primer for the detection of SNP TSC0006120
gtgcgtaggtat

SEQ ID NO: 278561 - DNA, 12 bp, Artificial Sequence
  Oligonucleotide primer for the detection of SNP TSC0006120
gcgcgtaggtat

SEQ ID NO: 278562 - DNA, 12 bp, Artificial Sequence
  Oligonucleotide primer for the detection of SNP TSC0006121
taaatataataa

SEQ ID NO: 278563 - DNA, 12 bp, Artificial Sequence
  Oligonucleotide primer for the detection of SNP TSC0006121
atttatattatt

SEQ ID NO: 278564 - DNA, 12 bp, Artificial Sequence
  Oligonucleotide primer for the detection of SNP TSC0006121
attcacaccatt

SEQ ID NO: 278565 - DNA, 12 bp, Artificial Sequence
  Oligonucleotide primer for the detection of SNP TSC0006121
tgaatgtagtaa

SEQ ID NO: 278566 - DNA, 12 bp, Artificial Sequence
  Oligonucleotide primer for the detection of SNP TSC0006122
acaaataacaat

SEQ ID NO: 278567 - DNA, 12 bp, Artificial Sequence
  Oligonucleotide primer for the detection of SNP TSC0006122
tttatttagtag

SEQ ID NO: 278568 - DNA, 12 bp, Artificial Sequence
  Oligonucleotide primer for the detection of SNP TSC0006122
tccatccaataa

SEQ ID NO: 278569 - DNA, 12 bp, Artificial Sequence
  Oligonucleotide primer for the detection of SNP TSC0006122
ataaatgatagt

SEQ ID NO: 278570 - DNA, 12 bp, Artificial Sequence
  Oligonucleotide primer for the detection of SNP TSC0006129
aaatacaataac

SEQ ID NO: 278571 - DNA, 12 bp, Artificial Sequence
  Oligonucleotide primer for the detection of SNP TSC0006129
agagagttttga

SEQ ID NO: 278572 - DNA, 12 bp, Artificial Sequence
  Oligonucleotide primer for the detection of SNP TSC0006129
aaaaaaccttaa

SEQ ID NO: 278573 - DNA, 12 bp, Artificial Sequence
  Oligonucleotide primer for the detection of SNP TSC0006129
gagtgtagtggt

SEQ ID NO: 278574 - DNA, 12 bp, Artificial Sequence
  Oligonucleotide primer for the detection of SNP TSC0006132
aaaatttttaaa

SEQ ID NO: 278575 - DNA, 12 bp, Artificial Sequence
  Oligonucleotide primer for the detection of SNP TSC0006132
ttttctctacta

SEQ ID NO: 278576 - DNA, 12 bp, Artificial Sequence
  Oligonucleotide primer for the detection of SNP TSC0006145
tccccttttcaa

SEQ ID NO: 278577 - DNA, 12 bp, Artificial Sequence
  Oligonucleotide primer for the detection of SNP TSC0006145
attgtttgtaat

SEQ ID NO: 278578 - DNA, 12 bp, Artificial Sequence
  Oligonucleotide primer for the detection of SNP TSC0006145
ttatttataata

SEQ ID NO: 278579 - DNA, 12 bp, Artificial Sequence
  Oligonucleotide primer for the detection of SNP TSC0006149
actaacaataaa

SEQ ID NO: 278580 - DNA, 12 bp, Artificial Sequence
  Oligonucleotide primer for the detection of SNP TSC0006149
ctcaccctcact

SEQ ID NO: 278581 - DNA, 12 bp, Artificial Sequence
  Oligonucleotide primer for the detection of SNP TSC0006149
tttattggtaat

SEQ ID NO: 278582 - DNA, 12 bp, Artificial Sequence
  Oligonucleotide primer for the detection of SNP TSC0006154
ataatatatagg

SEQ ID NO: 278583 - DNA, 12 bp, Artificial Sequence
  Oligonucleotide primer for the detection of SNP TSC0006154
acaacacacaaa

SEQ ID NO: 278584 - DNA, 12 bp, Artificial Sequence
  Oligonucleotide primer for the detection of SNP TSC0006154
gtatgtgtgtgt

SEQ ID NO: 278585 - DNA, 12 bp, Artificial Sequence
  Oligonucleotide primer for the detection of SNP TSC0006159
ttttataagaaa

SEQ ID NO: 278586 - DNA, 12 bp, Artificial Sequence
  Oligonucleotide primer for the detection of SNP TSC0006163
ccttttatctaa

SEQ ID NO: 278587 - DNA, 12 bp, Artificial Sequence
  Oligonucleotide primer for the detection of SNP TSC0006163
tagtttggaaag

SEQ ID NO: 278588 - DNA, 12 bp, Artificial Sequence
  Oligonucleotide primer for the detection of SNP TSC0006163
caatctaaaaaa

SEQ ID NO: 278589 - DNA, 12 bp, Artificial Sequence
  Oligonucleotide primer for the detection of SNP TSC0006163
ttttttatttaa

SEQ ID NO: 278590 - DNA, 12 bp, Artificial Sequence
  Oligonucleotide primer for the detection of SNP TSC0006165
ttatcaaataac

SEQ ID NO: 278591 - DNA, 12 bp, Artificial Sequence
  Oligonucleotide primer for the detection of SNP TSC0006165
attgaagagttg

SEQ ID NO: 278592 - DNA, 12 bp, Artificial Sequence
  Oligonucleotide primer for the detection of SNP TSC0006166
gatagaatttat

SEQ ID NO: 278593 - DNA, 12 bp, Artificial Sequence
  Oligonucleotide primer for the detection of SNP TSC0006166
gatagaatttac

SEQ ID NO: 278594 - DNA, 12 bp, Artificial Sequence
  Oligonucleotide primer for the detection of SNP TSC0006166
aacaaaattcac

SEQ ID NO: 278595 - DNA, 12 bp, Artificial Sequence
  Oligonucleotide primer for the detection of SNP TSC0006166
gttattatgggg

SEQ ID NO: 278596 - DNA, 12 bp, Artificial Sequence
  Oligonucleotide primer for the detection of SNP TSC0006167
attacttatctc

SEQ ID NO: 278597 - DNA, 12 bp, Artificial Sequence
  Oligonucleotide primer for the detection of SNP TSC0006167
tagttatttgat

SEQ ID NO: 278598 - DNA, 12 bp, Artificial Sequence
  Oligonucleotide primer for the detection of SNP TSC0006167
taatcacttaat

SEQ ID NO: 278599 - DNA, 12 bp, Artificial Sequence
  Oligonucleotide primer for the detection of SNP TSC0006167
gttgtttatttt

SEQ ID NO: 278600 - DNA, 12 bp, Artificial Sequence
  Oligonucleotide primer for the detection of SNP TSC0006168
taccttaaaaaa

SEQ ID NO: 278601 - DNA, 12 bp, Artificial Sequence
  Oligonucleotide primer for the detection of SNP TSC0006168
tttatggtaatt

SEQ ID NO: 278602 - DNA, 12 bp, Artificial Sequence
  Oligonucleotide primer for the detection of SNP TSC0006168
attctataacaa

SEQ ID NO: 278603 - DNA, 12 bp, Artificial Sequence
  Oligonucleotide primer for the detection of SNP TSC0006168
gtgttttgggag

SEQ ID NO: 278604 - DNA, 12 bp, Artificial Sequence
  Oligonucleotide primer for the detection of SNP TSC0006170
aacataataact

SEQ ID NO: 278605 - DNA, 12 bp, Artificial Sequence
  Oligonucleotide primer for the detection of SNP TSC0006170
agattataggta

SEQ ID NO: 278606 - DNA, 12 bp, Artificial Sequence
  Oligonucleotide primer for the detection of SNP TSC0006170
aaactacaaaca

SEQ ID NO: 278607 - DNA, 12 bp, Artificial Sequence
  Oligonucleotide primer for the detection of SNP TSC0006170
ggtatggtgatt

SEQ ID NO: 278608 - DNA, 12 bp, Artificial Sequence
  Oligonucleotide primer for the detection of SNP TSC0006172
atactaccacac

SEQ ID NO: 278609 - DNA, 12 bp, Artificial Sequence
  Oligonucleotide primer for the detection of SNP TSC0006172
aaaaattagttg

SEQ ID NO: 278610 - DNA, 12 bp, Artificial Sequence
  Oligonucleotide primer for the detection of SNP TSC0006172
aaaaattaacta

SEQ ID NO: 278611 - DNA, 12 bp, Artificial Sequence
  Oligonucleotide primer for the detection of SNP TSC0006172
atgttgttatat

SEQ ID NO: 278612 - DNA, 12 bp, Artificial Sequence
  Oligonucleotide primer for the detection of SNP TSC0006177
taacatcctcac

SEQ ID NO: 278613 - DNA, 12 bp, Artificial Sequence
  Oligonucleotide primer for the detection of SNP TSC0006177
aagtaaaatgtg

SEQ ID NO: 278614 - DNA, 12 bp, Artificial Sequence
  Oligonucleotide primer for the detection of SNP TSC0006177
aagtaaaacgtg

SEQ ID NO: 278615 - DNA, 12 bp, Artificial Sequence
  Oligonucleotide primer for the detection of SNP TSC0006185
ttaaaattaaaa

SEQ ID NO: 278616 - DNA, 12 bp, Artificial Sequence
  Oligonucleotide primer for the detection of SNP TSC0006185
taattttagtat

SEQ ID NO: 278617 - DNA, 12 bp, Artificial Sequence
  Oligonucleotide primer for the detection of SNP TSC0006185
taattttagtac

SEQ ID NO: 278618 - DNA, 12 bp, Artificial Sequence
  Oligonucleotide primer for the detection of SNP TSC0006185
ctaattttaata

SEQ ID NO: 278619 - DNA, 12 bp, Artificial Sequence
  Oligonucleotide primer for the detection of SNP TSC0006185
ttggggttaaaa

SEQ ID NO: 278620 - DNA, 12 bp, Artificial Sequence
  Oligonukleotid-Primer
ttaataaaacaa

SEQ ID NO: 278621 - DNA, 12 bp, Artificial Sequence
  Oligonucleotide primer for the detection of SNP TSC0006186
ttaataaaacga

SEQ ID NO: 278622 - DNA, 12 bp, Artificial Sequence
  Oligonucleotide primer for the detection of SNP TSC0006186
ttgagaagggta

SEQ ID NO: 278623 - DNA, 12 bp, Artificial Sequence
  Oligonucleotide primer for the detection of SNP TSC0006186
ttaaaaaaaaca

SEQ ID NO: 278624 - DNA, 12 bp, Artificial Sequence
  Oligonucleotide primer for the detection of SNP TSC0006186
atttagtgaagt

SEQ ID NO: 278625 - DNA, 12 bp, Artificial Sequence
  Oligonucleotide primer for the detection of SNP TSC0006186
atttagtgaagc

SEQ ID NO: 278626 - DNA, 12 bp, Artificial Sequence
  Oligonucleotide primer for the detection of SNP TSC0006187
aaaaaaactttc

SEQ ID NO: 278627 - DNA, 12 bp, Artificial Sequence
  Oligonucleotide primer for the detection of SNP TSC0006187
gttattatatgg

SEQ ID NO: 278628 - DNA, 12 bp, Artificial Sequence
  Oligonucleotide primer for the detection of SNP TSC0006188
atttactctctt

SEQ ID NO: 278629 - DNA, 12 bp, Artificial Sequence
  Oligonucleotide primer for the detection of SNP TSC0006188
gaggaaaggggg

SEQ ID NO: 278630 - DNA, 12 bp, Artificial Sequence
  Oligonucleotide primer for the detection of SNP TSC0006195
aaaaaataaact

SEQ ID NO: 278631 - DNA, 12 bp, Artificial Sequence
  Oligonucleotide primer for the detection of SNP TSC0006195
tgtttgttattg

SEQ ID NO: 278632 - DNA, 12 bp, Artificial Sequence
  Oligonucleotide primer for the detection of SNP TSC0006195
cgtttgttattg

SEQ ID NO: 278633 - DNA, 12 bp, Artificial Sequence
  Oligonucleotide primer for the detection of SNP TSC0006195
tgtttgttatcg

SEQ ID NO: 278634 - DNA, 12 bp, Artificial Sequence
  Oligonucleotide primer for the detection of SNP TSC0006195
cgtttgttatcg

SEQ ID NO: 278635 - DNA, 12 bp, Artificial Sequence
  Oligonucleotide primer for the detection of SNP TSC0006196
ttaacctaaact

SEQ ID NO: 278636 - DNA, 12 bp, Artificial Sequence
  Oligonucleotide primer for the detection of SNP TSC0006196
tgtgagttatta

SEQ ID NO: 278637 - DNA, 12 bp, Artificial Sequence
  Oligonucleotide primer for the detection of SNP TSC0006196
cgtgagttatta

SEQ ID NO: 278638 - DNA, 12 bp, Artificial Sequence
  Oligonucleotide primer for the detection of SNP TSC0006196
cataaaccacca

SEQ ID NO: 278639 - DNA, 12 bp, Artificial Sequence
  Oligonucleotide primer for the detection of SNP TSC0006196
cgtaaaccacca

SEQ ID NO: 278640 - DNA, 12 bp, Artificial Sequence
  Oligonucleotide primer for the detection of SNP TSC0006196
ttagtttaggtt

SEQ ID NO: 278641 - DNA, 12 bp, Artificial Sequence
  Oligonucleotide primer for the detection of SNP TSC0006203
atttagtttgga

SEQ ID NO: 278642 - DNA, 12 bp, Artificial Sequence
  Oligonucleotide primer for the detection of SNP TSC0006212
tttaaataaatt

SEQ ID NO: 278643 - DNA, 12 bp, Artificial Sequence
  Oligonucleotide primer for the detection of SNP TSC0006212
gttatttttttg

SEQ ID NO: 278644 - DNA, 12 bp, Artificial Sequence
  Oligonucleotide primer for the detection of SNP TSC0006212
atcactcttcta

SEQ ID NO: 278645 - DNA, 12 bp, Artificial Sequence
  Oligonucleotide primer for the detection of SNP TSC0006212
tttggatggatt

SEQ ID NO: 278646 - DNA, 12 bp, Artificial Sequence
  Oligonucleotide primer for the detection of SNP TSC0006220
taatcattaaaa

SEQ ID NO: 278647 - DNA, 12 bp, Artificial Sequence
  Oligonucleotide primer for the detection of SNP TSC0006220
ttgatttgtatt

SEQ ID NO: 278648 - DNA, 12 bp, Artificial Sequence
  Oligonucleotide primer for the detection of SNP TSC0006220
ttaatttacatt

SEQ ID NO: 278649 - DNA, 12 bp, Artificial Sequence
  Oligonucleotide primer for the detection of SNP TSC0006220
ttgattattaga

SEQ ID NO: 278650 - DNA, 12 bp, Artificial Sequence
  Oligonucleotide primer for the detection of SNP TSC0006222
tatccaaattta

SEQ ID NO: 278651 - DNA, 12 bp, Artificial Sequence
  Oligonucleotide primer for the detection of SNP TSC0006222
taaagttatttg

SEQ ID NO: 278652 - DNA, 12 bp, Artificial Sequence
  Oligonucleotide primer for the detection of SNP TSC0006222
caaaattattta

SEQ ID NO: 278653 - DNA, 12 bp, Artificial Sequence
  Oligonucleotide primer for the detection of SNP TSC0006222
ttatttagattt

SEQ ID NO: 278654 - DNA, 12 bp, Artificial Sequence
  Oligonucleotide primer for the detection of SNP TSC0006236
attcttccttcc

SEQ ID NO: 278655 - DNA, 12 bp, Artificial Sequence
  Oligonucleotide primer for the detection of SNP TSC0006236
aattttagaata

SEQ ID NO: 278656 - DNA, 12 bp, Artificial Sequence
  Oligonucleotide primer for the detection of SNP TSC0006236
aaccttaaaaca

SEQ ID NO: 278657 - DNA, 12 bp, Artificial Sequence
  Oligonucleotide primer for the detection of SNP TSC0006252
atcttaacacat

SEQ ID NO: 278658 - DNA, 12 bp, Artificial Sequence
  Oligonucleotide primer for the detection of SNP TSC0006252
ttattagagata

SEQ ID NO: 278659 - DNA, 12 bp, Artificial Sequence
  Oligonucleotide primer for the detection of SNP TSC0006253
acaatactaaca

SEQ ID NO: 278660 - DNA, 12 bp, Artificial Sequence
  Oligonucleotide primer for the detection of SNP TSC0006253
acgatactaaca

SEQ ID NO: 278661 - DNA, 12 bp, Artificial Sequence
  Oligonucleotide primer for the detection of SNP TSC0006253
atatttttgtgt

SEQ ID NO: 278662 - DNA, 12 bp, Artificial Sequence
  Oligonucleotide primer for the detection of SNP TSC0006253
atatccttatac

SEQ ID NO: 278663 - DNA, 12 bp, Artificial Sequence
  Oligonucleotide primer for the detection of SNP TSC0006253
atggtgttgata

SEQ ID NO: 278664 - DNA, 12 bp, Artificial Sequence
  Oligonucleotide primer for the detection of SNP TSC0006253
acggtgttgata

SEQ ID NO: 278665 - DNA, 12 bp, Artificial Sequence
  Oligonucleotide primer for the detection of SNP TSC0006256
ttcttaatatat

SEQ ID NO: 278666 - DNA, 12 bp, Artificial Sequence
  Oligonucleotide primer for the detection of SNP TSC0006256
gaataatatttg

SEQ ID NO: 278667 - DNA, 12 bp, Artificial Sequence
  Oligonucleotide primer for the detection of SNP TSC0006259
cctaacaattac

SEQ ID NO: 278668 - DNA, 12 bp, Artificial Sequence
  Oligonucleotide primer for the detection of SNP TSC0006259
cctaacgattac

SEQ ID NO: 278669 - DNA, 12 bp, Artificial Sequence
  Oligonucleotide primer for the detection of SNP TSC0006259
attaggaatttt

SEQ ID NO: 278670 - DNA, 12 bp, Artificial Sequence
  Oligonucleotide primer for the detection of SNP TSC0006259
tcaaaaatctca

SEQ ID NO: 278671 - DNA, 12 bp, Artificial Sequence
  Oligonucleotide primer for the detection of SNP TSC0006259
tttgatggttgt

SEQ ID NO: 278672 - DNA, 12 bp, Artificial Sequence
  Oligonucleotide primer for the detection of SNP TSC0006259
tttgacggttgt

SEQ ID NO: 278673 - DNA, 12 bp, Artificial Sequence
  Oligonucleotide primer for the detection of SNP TSC0006263
tacccttttaaa

SEQ ID NO: 278674 - DNA, 12 bp, Artificial Sequence
  Oligonucleotide primer for the detection of SNP TSC0006263
agtttatgtatg

SEQ ID NO: 278675 - DNA, 12 bp, Artificial Sequence
  Oligonucleotide primer for the detection of SNP TSC0006263
agtttacgtatg

SEQ ID NO: 278676 - DNA, 12 bp, Artificial Sequence
  Oligonucleotide primer for the detection of SNP TSC0006263
aattcacatata

SEQ ID NO: 278677 - DNA, 12 bp, Artificial Sequence
  Oligonucleotide primer for the detection of SNP TSC0006263
aattcacgtata

SEQ ID NO: 278678 - DNA, 12 bp, Artificial Sequence
  Oligonucleotide primer for the detection of SNP TSC0006264
atatactatacc

SEQ ID NO: 278679 - DNA, 12 bp, Artificial Sequence
  Oligonucleotide primer for the detection of SNP TSC0006264
ctctttcattta

SEQ ID NO: 278680 - DNA, 12 bp, Artificial Sequence
  Oligonucleotide primer for the detection of SNP TSC0006264
gtgttatatttt

SEQ ID NO: 278681 - DNA, 12 bp, Artificial Sequence
  Oligonucleotide primer for the detection of SNP TSC0006267
atcacacataaa

SEQ ID NO: 278682 - DNA, 12 bp, Artificial Sequence
  Oligonucleotide primer for the detection of SNP TSC0006267
tagatgtgattt

SEQ ID NO: 278683 - DNA, 12 bp, Artificial Sequence
  Oligonucleotide primer for the detection of SNP TSC0006267
caaatataactc

SEQ ID NO: 278684 - DNA, 12 bp, Artificial Sequence
  Oligonucleotide primer for the detection of SNP TSC0006267
gttatatatagg

SEQ ID NO: 278685 - DNA, 12 bp, Artificial Sequence
  Oligonucleotide primer for the detection of SNP TSC0006275
cataaaaaaaac

SEQ ID NO: 278686 - DNA, 12 bp, Artificial Sequence
  Oligonucleotide primer for the detection of SNP TSC0006275
gaattgtggggg

SEQ ID NO: 278687 - DNA, 12 bp, Artificial Sequence
  Oligonucleotide primer for the detection of SNP TSC0006275
gaatcgtggggg

SEQ ID NO: 278688 - DNA, 12 bp, Artificial Sequence
  Oligonucleotide primer for the detection of SNP TSC0006275
aaatcataaaaa

SEQ ID NO: 278689 - DNA, 12 bp, Artificial Sequence
  Oligonucleotide primer for the detection of SNP TSC0006275
aaatcgtaaaaa

SEQ ID NO: 278690 - DNA, 12 bp, Artificial Sequence
  Oligonucleotide primer for the detection of SNP TSC0006275
gaatcataaaaa

SEQ ID NO: 278691 - DNA, 12 bp, Artificial Sequence
  Oligonucleotide primer for the detection of SNP TSC0006275
gaatcgtaaaaa

SEQ ID NO: 278692 - DNA, 12 bp, Artificial Sequence
  Oligonucleotide primer for the detection of SNP TSC0006275
tatgggggaaat

SEQ ID NO: 278693 - DNA, 12 bp, Artificial Sequence
  Oligonucleotide primer for the detection of SNP TSC0006276
atccaaactaat

SEQ ID NO: 278694 - DNA, 12 bp, Artificial Sequence
  Oligonucleotide primer for the detection of SNP TSC0006276
atttggaaggaa

SEQ ID NO: 278695 - DNA, 12 bp, Artificial Sequence
  Oligonucleotide primer for the detection of SNP TSC0006276
atctaaaaaaaa

SEQ ID NO: 278696 - DNA, 12 bp, Artificial Sequence
  Oligonucleotide primer for the detection of SNP TSC0006276
gtttaaattagt

SEQ ID NO: 278697 - DNA, 12 bp, Artificial Sequence
  Oligonucleotide primer for the detection of SNP TSC0006281
tcccttttaatc

SEQ ID NO: 278698 - DNA, 12 bp, Artificial Sequence
  Oligonucleotide primer for the detection of SNP TSC0006281
gttattggtgta

SEQ ID NO: 278699 - DNA, 12 bp, Artificial Sequence
  Oligonucleotide primer for the detection of SNP TSC0006281
gttatcggtgta

SEQ ID NO: 278700 - DNA, 12 bp, Artificial Sequence
  Oligonucleotide primer for the detection of SNP TSC0006281
attatcaataca

SEQ ID NO: 278701 - DNA, 12 bp, Artificial Sequence
  Oligonucleotide primer for the detection of SNP TSC0006281
attatcgataca

SEQ ID NO: 278702 - DNA, 12 bp, Artificial Sequence
  Oligonucleotide primer for the detection of SNP TSC0006282
tccctaaacaac

SEQ ID NO: 278703 - DNA, 12 bp, Artificial Sequence
  Oligonucleotide primer for the detection of SNP TSC0006282
aagtaagtttag

SEQ ID NO: 278704 - DNA, 12 bp, Artificial Sequence
  Oligonucleotide primer for the detection of SNP TSC0006283
cctcaaataccc

SEQ ID NO: 278705 - DNA, 12 bp, Artificial Sequence
  Oligonucleotide primer for the detection of SNP TSC0006283
aggaaatgtatg

SEQ ID NO: 278706 - DNA, 12 bp, Artificial Sequence
  Oligonucleotide primer for the detection of SNP TSC0006283
aggaaatgtacg

SEQ ID NO: 278707 - DNA, 12 bp, Artificial Sequence
  Oligonucleotide primer for the detection of SNP TSC0006283
aaaaaatacaca

SEQ ID NO: 278708 - DNA, 12 bp, Artificial Sequence
  Oligonucleotide primer for the detection of SNP TSC0006283
aaaaaatacacg

SEQ ID NO: 278709 - DNA, 12 bp, Artificial Sequence
  Oligonucleotide primer for the detection of SNP TSC0006283
ttttagatgttt

SEQ ID NO: 278710 - DNA, 12 bp, Artificial Sequence
  Oligonucleotide primer for the detection of SNP TSC0006284
aaaccataaact

SEQ ID NO: 278711 - DNA, 12 bp, Artificial Sequence
  Oligonucleotide primer for the detection of SNP TSC0006284
tgagttttagaa

SEQ ID NO: 278712 - DNA, 12 bp, Artificial Sequence
  Oligonucleotide primer for the detection of SNP TSC0006303
atttgttgtgtg

SEQ ID NO: 278713 - DNA, 12 bp, Artificial Sequence
  Oligonucleotide primer for the detection of SNP TSC0006305
tatttagttttt

SEQ ID NO: 278714 - DNA, 12 bp, Artificial Sequence
  Oligonucleotide primer for the detection of SNP TSC0006305
cacccaattctt

SEQ ID NO: 278715 - DNA, 12 bp, Artificial Sequence
  Oligonucleotide primer for the detection of SNP TSC0006305
gtgttatgaatg

SEQ ID NO: 278716 - DNA, 12 bp, Artificial Sequence
  Oligonucleotide primer for the detection of SNP TSC0006306
aaaatcacattt

SEQ ID NO: 278717 - DNA, 12 bp, Artificial Sequence
  Oligonucleotide primer for the detection of SNP TSC0006306
atagaaaggtat

SEQ ID NO: 278718 - DNA, 12 bp, Artificial Sequence
  Oligonucleotide primer for the detection of SNP TSC0006308
ataataattact

SEQ ID NO: 278719 - DNA, 12 bp, Artificial Sequence
  Oligonucleotide primer for the detection of SNP TSC0006308
tgtttaatttta

SEQ ID NO: 278720 - DNA, 12 bp, Artificial Sequence
  Oligonucleotide primer for the detection of SNP TSC0006309
tcttcttaaaac

SEQ ID NO: 278721 - DNA, 12 bp, Artificial Sequence
  Oligonucleotide primer for the detection of SNP TSC0006309
attaaaagggta

SEQ ID NO: 278722 - DNA, 12 bp, Artificial Sequence
  Oligonucleotide primer for the detection of SNP TSC0006332
cttctttccata

SEQ ID NO: 278723 - DNA, 12 bp, Artificial Sequence
  Oligonucleotide primer for the detection of SNP TSC0006332
aaggtgataaat

SEQ ID NO: 278724 - DNA, 12 bp, Artificial Sequence
  Oligonucleotide primer for the detection of SNP TSC0006332
aaataataaata

SEQ ID NO: 278725 - DNA, 12 bp, Artificial Sequence
  Oligonucleotide primer for the detection of SNP TSC0006336
atataatacttc

SEQ ID NO: 278726 - DNA, 12 bp, Artificial Sequence
  Oligonucleotide primer for the detection of SNP TSC0006336
aaaagatgttgt

SEQ ID NO: 278727 - DNA, 12 bp, Artificial Sequence
  Oligonucleotide primer for the detection of SNP TSC0006342
aaatttaaaaca

SEQ ID NO: 278728 - DNA, 12 bp, Artificial Sequence
  Oligonucleotide primer for the detection of SNP TSC0006342
tttggatttttt

SEQ ID NO: 278729 - DNA, 12 bp, Artificial Sequence
  Oligonucleotide primer for the detection of SNP TSC0006342
tctaaatttttt

SEQ ID NO: 278730 - DNA, 12 bp, Artificial Sequence
  Oligonucleotide primer for the detection of SNP TSC0006342
aaatttgggata

SEQ ID NO: 278731 - DNA, 12 bp, Artificial Sequence
  Oligonucleotide primer for the detection of SNP TSC0006343
caccaccctacc

SEQ ID NO: 278732 - DNA, 12 bp, Artificial Sequence
  Oligonucleotide primer for the detection of SNP TSC0006343
atggaaagttag

SEQ ID NO: 278733 - DNA, 12 bp, Artificial Sequence
  Oligonucleotide primer for the detection of SNP TSC0006344
cttccgaactaa

SEQ ID NO: 278734 - DNA, 12 bp, Artificial Sequence
  Oligonucleotide primer for the detection of SNP TSC0006344
gagaagttgtat

SEQ ID NO: 278735 - DNA, 12 bp, Artificial Sequence
  Oligonucleotide primer for the detection of SNP TSC0006344
gagaagtcgtat

SEQ ID NO: 278736 - DNA, 12 bp, Artificial Sequence
  Oligonucleotide primer for the detection of SNP TSC0006344
aaaaaaccatac

SEQ ID NO: 278737 - DNA, 12 bp, Artificial Sequence
  Oligonucleotide primer for the detection of SNP TSC0006344
aaaaaaccgtac

SEQ ID NO: 278738 - DNA, 12 bp, Artificial Sequence
  Oligonucleotide primer for the detection of SNP TSC0006344
gaaaaaccatac

SEQ ID NO: 278739 - DNA, 12 bp, Artificial Sequence
  Oligonucleotide primer for the detection of SNP TSC0006344
gaaaaaccgtac

SEQ ID NO: 278740 - DNA, 12 bp, Artificial Sequence
  Oligonucleotide primer for the detection of SNP TSC0006344
tttttgagttgg

SEQ ID NO: 278741 - DNA, 12 bp, Artificial Sequence
  Oligonucleotide primer for the detection of SNP TSC0006344
ttttcgagttgg

SEQ ID NO: 278742 - DNA, 12 bp, Artificial Sequence
  Oligonucleotide primer for the detection of SNP TSC0006357
tttaaccctttc

SEQ ID NO: 278743 - DNA, 12 bp, Artificial Sequence
  Oligonucleotide primer for the detection of SNP TSC0006357
ttaatgtagaga

SEQ ID NO: 278744 - DNA, 12 bp, Artificial Sequence
  Oligonucleotide primer for the detection of SNP TSC0006359
ctctaaatatta

SEQ ID NO: 278745 - DNA, 12 bp, Artificial Sequence
  Oligonucleotide primer for the detection of SNP TSC0006359
tatctatttttc

SEQ ID NO: 278746 - DNA, 12 bp, Artificial Sequence
  Oligonucleotide primer for the detection of SNP TSC0006359
ttttaagtgttg

SEQ ID NO: 278747 - DNA, 12 bp, Artificial Sequence
  Oligonucleotide primer for the detection of SNP TSC0006360
aaattctaaatc

SEQ ID NO: 278748 - DNA, 12 bp, Artificial Sequence
  Oligonucleotide primer for the detection of SNP TSC0006360
ttttagatatag

SEQ ID NO: 278749 - DNA, 12 bp, Artificial Sequence
  Oligonucleotide primer for the detection of SNP TSC0006361
tcatcctcctct

SEQ ID NO: 278750 - DNA, 12 bp, Artificial Sequence
  Oligonucleotide primer for the detection of SNP TSC0006361
tggttggaaata

SEQ ID NO: 278751 - DNA, 12 bp, Artificial Sequence
  Oligonucleotide primer for the detection of SNP TSC0006361
cggttggaaata

SEQ ID NO: 278752 - DNA, 12 bp, Artificial Sequence
  Oligonucleotide primer for the detection of SNP TSC0006361
caactaaaaaca

SEQ ID NO: 278753 - DNA, 12 bp, Artificial Sequence
  Oligonucleotide primer for the detection of SNP TSC0006361
cgactaaaaaca

SEQ ID NO: 278754 - DNA, 12 bp, Artificial Sequence
  Oligonucleotide primer for the detection of SNP TSC0006362
tataactatccc

SEQ ID NO: 278755 - DNA, 12 bp, Artificial Sequence
  Oligonucleotide primer for the detection of SNP TSC0006362
tatttgttattt

SEQ ID NO: 278756 - DNA, 12 bp, Artificial Sequence
  Oligonucleotide primer for the detection of SNP TSC0006363
tattttcttcat

SEQ ID NO: 278757 - DNA, 12 bp, Artificial Sequence
  Oligonucleotide primer for the detection of SNP TSC0006363
gattaaaatata

SEQ ID NO: 278758 - DNA, 12 bp, Artificial Sequence
  Oligonucleotide primer for the detection of SNP TSC0006364
ctaaaacaccac

SEQ ID NO: 278759 - DNA, 12 bp, Artificial Sequence
  Oligonucleotide primer for the detection of SNP TSC0006364
atggatttttta

SEQ ID NO: 278760 - DNA, 12 bp, Artificial Sequence
  Oligonucleotide primer for the detection of SNP TSC0006364
acggatttttta

SEQ ID NO: 278761 - DNA, 12 bp, Artificial Sequence
  Oligonucleotide primer for the detection of SNP TSC0006364
acaaatttttca

SEQ ID NO: 278762 - DNA, 12 bp, Artificial Sequence
  Oligonucleotide primer for the detection of SNP TSC0006364
acgaatttttca

SEQ ID NO: 278763 - DNA, 12 bp, Artificial Sequence
  Oligonucleotide primer for the detection of SNP TSC0006364
ttaaaatattat

SEQ ID NO: 278764 - DNA, 12 bp, Artificial Sequence
  Oligonucleotide primer for the detection of SNP TSC0006365
aaaatatttaat

SEQ ID NO: 278765 - DNA, 12 bp, Artificial Sequence
  Oligonucleotide primer for the detection of SNP TSC0006365
ggaatgttatag

SEQ ID NO: 278766 - DNA, 12 bp, Artificial Sequence
  Oligonucleotide primer for the detection of SNP TSC0006366
aaaaaaatatat

SEQ ID NO: 278767 - DNA, 12 bp, Artificial Sequence
  Oligonucleotide primer for the detection of SNP TSC0006366
gagaaaaatgta

SEQ ID NO: 278768 - DNA, 12 bp, Artificial Sequence
  Oligonucleotide primer for the detection of SNP TSC0006367
atatctaacttt

SEQ ID NO: 278769 - DNA, 12 bp, Artificial Sequence
  Oligonucleotide primer for the detection of SNP TSC0006367
aattattgatga

SEQ ID NO: 278770 - DNA, 12 bp, Artificial Sequence
  Oligonucleotide primer for the detection of SNP TSC0006369
tacccctaaaac

SEQ ID NO: 278771 - DNA, 12 bp, Artificial Sequence
  Oligonucleotide primer for the detection of SNP TSC0006369
gggaaggggttg

SEQ ID NO: 278772 - DNA, 12 bp, Artificial Sequence
  Oligonucleotide primer for the detection of SNP TSC0006369
tatttttgagat

SEQ ID NO: 278773 - DNA, 12 bp, Artificial Sequence
  Oligonucleotide primer for the detection of SNP TSC0006370
ttcttcacaaat

SEQ ID NO: 278774 - DNA, 12 bp, Artificial Sequence
  Oligonukleotid-Primer
agattttttaga

SEQ ID NO: 278775 - DNA, 12 bp, Artificial Sequence
  Oligonucleotide primer for the detection of SNP TSC0006370
ttttttataaat

SEQ ID NO: 278776 - DNA, 12 bp, Artificial Sequence
  Oligonucleotide primer for the detection of SNP TSC0006373
tcaacaaatata

SEQ ID NO: 278777 - DNA, 12 bp, Artificial Sequence
  Oligonucleotide primer for the detection of SNP TSC0006373
tggtaagtatat

SEQ ID NO: 278778 - DNA, 12 bp, Artificial Sequence
  Oligonucleotide primer for the detection of SNP TSC0006373
aacaaacacaca

SEQ ID NO: 278779 - DNA, 12 bp, Artificial Sequence
  Oligonucleotide primer for the detection of SNP TSC0006373
aataaatatatt

SEQ ID NO: 278780 - DNA, 12 bp, Artificial Sequence
  Oligonucleotide primer for the detection of SNP TSC0006377
ttcaaatctcat

SEQ ID NO: 278781 - DNA, 12 bp, Artificial Sequence
  Oligonucleotide primer for the detection of SNP TSC0006377
ggttatatttta

SEQ ID NO: 278782 - DNA, 12 bp, Artificial Sequence
  Oligonucleotide primer for the detection of SNP TSC0006380
cctaaaattaaa

SEQ ID NO: 278783 - DNA, 12 bp, Artificial Sequence
  Oligonucleotide primer for the detection of SNP TSC0006380
attatttaattt

SEQ ID NO: 278784 - DNA, 12 bp, Artificial Sequence
  Oligonucleotide primer for the detection of SNP TSC0006380
accattcaaccc

SEQ ID NO: 278785 - DNA, 12 bp, Artificial Sequence
  Oligonucleotide primer for the detection of SNP TSC0006380
tttaggattggg

SEQ ID NO: 278786 - DNA, 12 bp, Artificial Sequence
  Oligonucleotide primer for the detection of SNP TSC0006387
aacctataaaaa

SEQ ID NO: 278787 - DNA, 12 bp, Artificial Sequence
  Oligonucleotide primer for the detection of SNP TSC0006387
agtttttatttc

SEQ ID NO: 278788 - DNA, 12 bp, Artificial Sequence
  Oligonucleotide primer for the detection of SNP TSC0006387
caacttttattt

SEQ ID NO: 278789 - DNA, 12 bp, Artificial Sequence
  Oligonucleotide primer for the detection of SNP TSC0006387
agtttgtagaga

SEQ ID NO: 278790 - DNA, 12 bp, Artificial Sequence
  Oligonucleotide primer for the detection of SNP TSC0006388
acaataatacta

SEQ ID NO: 278791 - DNA, 12 bp, Artificial Sequence
  Oligonucleotide primer for the detection of SNP TSC0006388
attaatagaata

SEQ ID NO: 278792 - DNA, 12 bp, Artificial Sequence
  Oligonucleotide primer for the detection of SNP TSC0006388
attaacaaaata

SEQ ID NO: 278793 - DNA, 12 bp, Artificial Sequence
  Oligonucleotide primer for the detection of SNP TSC0006388
tgtaatgatgtt

SEQ ID NO: 278794 - DNA, 12 bp, Artificial Sequence
  Oligonucleotide primer for the detection of SNP TSC0006401
acaaccataacc

SEQ ID NO: 278795 - DNA, 12 bp, Artificial Sequence
  Oligonucleotide primer for the detection of SNP TSC0006401
acaaccgtaacc

SEQ ID NO: 278796 - DNA, 12 bp, Artificial Sequence
  Oligonucleotide primer for the detection of SNP TSC0006401
agatgtttaaag

SEQ ID NO: 278797 - DNA, 12 bp, Artificial Sequence
  Oligonucleotide primer for the detection of SNP TSC0006404
aactacctacct

SEQ ID NO: 278798 - DNA, 12 bp, Artificial Sequence
  Oligonucleotide primer for the detection of SNP TSC0006404
tttagaagttta

SEQ ID NO: 278799 - DNA, 12 bp, Artificial Sequence
  Oligonucleotide primer for the detection of SNP TSC0006414
tcaatatatcat

SEQ ID NO: 278800 - DNA, 12 bp, Artificial Sequence
  Oligonucleotide primer for the detection of SNP TSC0006414
tttatttttgag

SEQ ID NO: 278801 - DNA, 12 bp, Artificial Sequence
  Oligonucleotide primer for the detection of SNP TSC0006418
taacctcataat

SEQ ID NO: 278802 - DNA, 12 bp, Artificial Sequence
  Oligonucleotide primer for the detection of SNP TSC0006418
ggaggataagta

SEQ ID NO: 278803 - DNA, 12 bp, Artificial Sequence
  Oligonucleotide primer for the detection of SNP TSC0006419
acaaaatataaa

SEQ ID NO: 278804 - DNA, 12 bp, Artificial Sequence
  Oligonucleotide primer for the detection of SNP TSC0006419
acgaaatataaa

SEQ ID NO: 278805 - DNA, 12 bp, Artificial Sequence
  Oligonucleotide primer for the detection of SNP TSC0006419
gcaaaatataaa

SEQ ID NO: 278806 - DNA, 12 bp, Artificial Sequence
  Oligonucleotide primer for the detection of SNP TSC0006419
gcgaaatataaa

SEQ ID NO: 278807 - DNA, 12 bp, Artificial Sequence
  Oligonucleotide primer for the detection of SNP TSC0006419
tgttattgtggt

SEQ ID NO: 278808 - DNA, 12 bp, Artificial Sequence
  Oligonucleotide primer for the detection of SNP TSC0006419
tatcattataac

SEQ ID NO: 278809 - DNA, 12 bp, Artificial Sequence
  Oligonucleotide primer for the detection of SNP TSC0006419
gtgaaatatgaa

SEQ ID NO: 278810 - DNA, 12 bp, Artificial Sequence
  Oligonucleotide primer for the detection of SNP TSC0006419
gcgaaatatgaa

SEQ ID NO: 278811 - DNA, 12 bp, Artificial Sequence
  Oligonucleotide primer for the detection of SNP TSC0006424
attactcatttt

SEQ ID NO: 278812 - DNA, 12 bp, Artificial Sequence
  Oligonucleotide primer for the detection of SNP TSC0006424
tgaataaaaaag

SEQ ID NO: 278813 - DNA, 12 bp, Artificial Sequence
  Oligonucleotide primer for the detection of SNP TSC0006425
catccactctat

SEQ ID NO: 278814 - DNA, 12 bp, Artificial Sequence
  Oligonucleotide primer for the detection of SNP TSC0006425
cgtccactctat

SEQ ID NO: 278815 - DNA, 12 bp, Artificial Sequence
  Oligonucleotide primer for the detection of SNP TSC0006425
tatagagttggg

SEQ ID NO: 278816 - DNA, 12 bp, Artificial Sequence
  Oligonucleotide primer for the detection of SNP TSC0006425
tatagagtcggg

SEQ ID NO: 278817 - DNA, 12 bp, Artificial Sequence
  Oligonucleotide primer for the detection of SNP TSC0006426
tacatccaactc

SEQ ID NO: 278818 - DNA, 12 bp, Artificial Sequence
  Oligonucleotide primer for the detection of SNP TSC0006426
taattagagttg

SEQ ID NO: 278819 - DNA, 12 bp, Artificial Sequence
  Oligonucleotide primer for the detection of SNP TSC0006426
caaccaaaatta

SEQ ID NO: 278820 - DNA, 12 bp, Artificial Sequence
  Oligonucleotide primer for the detection of SNP TSC0006438
aaacaccaatta

SEQ ID NO: 278821 - DNA, 12 bp, Artificial Sequence
  Oligonucleotide primer for the detection of SNP TSC0006438
atgtttaaattt

SEQ ID NO: 278822 - DNA, 12 bp, Artificial Sequence
  Oligonucleotide primer for the detection of SNP TSC0006438
atccaaacctaa

SEQ ID NO: 278823 - DNA, 12 bp, Artificial Sequence
  Oligonucleotide primer for the detection of SNP TSC0006438
atattaattatt

SEQ ID NO: 278824 - DNA, 12 bp, Artificial Sequence
  Oligonucleotide primer for the detection of SNP TSC0006441
atataatatatt

SEQ ID NO: 278825 - DNA, 12 bp, Artificial Sequence
  Oligonucleotide primer for the detection of SNP TSC0006441
tgattattaatg

SEQ ID NO: 278826 - DNA, 12 bp, Artificial Sequence
  Oligonucleotide primer for the detection of SNP TSC0006441
tgattattaacg

SEQ ID NO: 278827 - DNA, 12 bp, Artificial Sequence
  Oligonucleotide primer for the detection of SNP TSC0006455
aaaaattacaat

SEQ ID NO: 278828 - DNA, 12 bp, Artificial Sequence
  Oligonucleotide primer for the detection of SNP TSC0006455
taattttttata

SEQ ID NO: 278829 - DNA, 12 bp, Artificial Sequence
  Oligonucleotide primer for the detection of SNP TSC0006460
tgttttggtaaa

SEQ ID NO: 278830 - DNA, 12 bp, Artificial Sequence
  Oligonucleotide primer for the detection of SNP TSC0006474
ctttttatttcc

SEQ ID NO: 278831 - DNA, 12 bp, Artificial Sequence
  Oligonucleotide primer for the detection of SNP TSC0006474
tgtagattgtaa

SEQ ID NO: 278832 - DNA, 12 bp, Artificial Sequence
  Oligonucleotide primer for the detection of SNP TSC0006474
cgtagattgtaa

SEQ ID NO: 278833 - DNA, 12 bp, Artificial Sequence
  Oligonucleotide primer for the detection of SNP TSC0006475
tatttttaaccc

SEQ ID NO: 278834 - DNA, 12 bp, Artificial Sequence
  Oligonucleotide primer for the detection of SNP TSC0006475
ttttgtaaagta

SEQ ID NO: 278835 - DNA, 12 bp, Artificial Sequence
  Oligonucleotide primer for the detection of SNP TSC0006484
taaaaactctat

SEQ ID NO: 278836 - DNA, 12 bp, Artificial Sequence
  Oligonucleotide primer for the detection of SNP TSC0006484
taatagagtgaa

SEQ ID NO: 278837 - DNA, 12 bp, Artificial Sequence
  Oligonucleotide primer for the detection of SNP TSC0006485
taataggtgatt

SEQ ID NO: 278838 - DNA, 12 bp, Artificial Sequence
  Oligonucleotide primer for the detection of SNP TSC0006485
acaaataattaa

SEQ ID NO: 278839 - DNA, 12 bp, Artificial Sequence
  Oligonucleotide primer for the detection of SNP TSC0006485
aggtaaaggaat

SEQ ID NO: 278840 - DNA, 12 bp, Artificial Sequence
  Oligonucleotide primer for the detection of SNP TSC0006486
accattataaac

SEQ ID NO: 278841 - DNA, 12 bp, Artificial Sequence
  Oligonucleotide primer for the detection of SNP TSC0006486
accgttataaac

SEQ ID NO: 278842 - DNA, 12 bp, Artificial Sequence
  Oligonucleotide primer for the detection of SNP TSC0006486
gattaagttgta

SEQ ID NO: 278843 - DNA, 12 bp, Artificial Sequence
  Oligonucleotide primer for the detection of SNP TSC0006501
gattgtgtagta

SEQ ID NO: 278844 - DNA, 12 bp, Artificial Sequence
  Oligonucleotide primer for the detection of SNP TSC0006502
aaccacaaacac

SEQ ID NO: 278845 - DNA, 12 bp, Artificial Sequence
  Oligonucleotide primer for the detection of SNP TSC0006502
ttagttttattt

SEQ ID NO: 278846 - DNA, 12 bp, Artificial Sequence
  Oligonucleotide primer for the detection of SNP TSC0006506
cattactaccac

SEQ ID NO: 278847 - DNA, 12 bp, Artificial Sequence
  Oligonucleotide primer for the detection of SNP TSC0006506
cgttactaccac

SEQ ID NO: 278848 - DNA, 12 bp, Artificial Sequence
  Oligonucleotide primer for the detection of SNP TSC0006506
ttttatagggtt

SEQ ID NO: 278849 - DNA, 12 bp, Artificial Sequence
  Oligonucleotide primer for the detection of SNP TSC0006506
ttccacaaaact

SEQ ID NO: 278850 - DNA, 12 bp, Artificial Sequence
  Oligonucleotide primer for the detection of SNP TSC0006506
tgttgttgttat

SEQ ID NO: 278851 - DNA, 12 bp, Artificial Sequence
  Oligonucleotide primer for the detection of SNP TSC0006506
cgttgttgttat

SEQ ID NO: 278852 - DNA, 12 bp, Artificial Sequence
  Oligonucleotide primer for the detection of SNP TSC0006507
ttaaatcaataa

SEQ ID NO: 278853 - DNA, 12 bp, Artificial Sequence
  Oligonucleotide primer for the detection of SNP TSC0006507
tataggattttt

SEQ ID NO: 278854 - DNA, 12 bp, Artificial Sequence
  Oligonucleotide primer for the detection of SNP TSC0006507
acaaaaccttta

SEQ ID NO: 278855 - DNA, 12 bp, Artificial Sequence
  Oligonucleotide primer for the detection of SNP TSC0006507
ttaaattaataa

SEQ ID NO: 278856 - DNA, 12 bp, Artificial Sequence
  Oligonucleotide primer for the detection of SNP TSC0006511
ttagagatgagg

SEQ ID NO: 278857 - DNA, 12 bp, Artificial Sequence
  Oligonucleotide primer for the detection of SNP TSC0006511
ttagagacgagg

SEQ ID NO: 278858 - DNA, 12 bp, Artificial Sequence
  Oligonucleotide primer for the detection of SNP TSC0006511
taaaatggtaaa

SEQ ID NO: 278859 - DNA, 12 bp, Artificial Sequence
  Oligonucleotide primer for the detection of SNP TSC0006512
aaccttttaaat

SEQ ID NO: 278860 - DNA, 12 bp, Artificial Sequence
  Oligonucleotide primer for the detection of SNP TSC0006512
ttaaatttttta

SEQ ID NO: 278861 - DNA, 12 bp, Artificial Sequence
  Oligonucleotide primer for the detection of SNP TSC0006513
atattcaaaaaa

SEQ ID NO: 278862 - DNA, 12 bp, Artificial Sequence
  Oligonucleotide primer for the detection of SNP TSC0006513
agttttttttgt

SEQ ID NO: 278863 - DNA, 12 bp, Artificial Sequence
  Oligonucleotide primer for the detection of SNP TSC0006513
aaccttctttac

SEQ ID NO: 278864 - DNA, 12 bp, Artificial Sequence
  Oligonucleotide primer for the detection of SNP TSC0006513
gtgtttaaggga

SEQ ID NO: 278865 - DNA, 12 bp, Artificial Sequence
  Oligonucleotide primer for the detection of SNP TSC0006516
aataaaaaatta

SEQ ID NO: 278866 - DNA, 12 bp, Artificial Sequence
  Oligonucleotide primer for the detection of SNP TSC0006516
gttttttgttag

SEQ ID NO: 278867 - DNA, 12 bp, Artificial Sequence
  Oligonukleotid-Primer
atctcctatcaa

SEQ ID NO: 278868 - DNA, 12 bp, Artificial Sequence
  Oligonucleotide primer for the detection of SNP TSC0006516
tggtaaggaatt

SEQ ID NO: 278869 - DNA, 12 bp, Artificial Sequence
  Oligonucleotide primer for the detection of SNP TSC0006528
ctttaaaaaact

SEQ ID NO: 278870 - DNA, 12 bp, Artificial Sequence
  Oligonucleotide primer for the detection of SNP TSC0006528
tgatgattatga

SEQ ID NO: 278871 - DNA, 12 bp, Artificial Sequence
  Oligonukleotid-Primer
tcaatcataacc

SEQ ID NO: 278872 - DNA, 12 bp, Artificial Sequence
  Oligonucleotide primer for the detection of SNP TSC0006530
atagaggtttga

SEQ ID NO: 278873 - DNA, 12 bp, Artificial Sequence
  Oligonucleotide primer for the detection of SNP TSC0006530
atagaggttcga

SEQ ID NO: 278874 - DNA, 12 bp, Artificial Sequence
  Oligonucleotide primer for the detection of SNP TSC0006535
tttaaaaaattc

SEQ ID NO: 278875 - DNA, 12 bp, Artificial Sequence
  Oligonucleotide primer for the detection of SNP TSC0006535
gtggtaaatttt

SEQ ID NO: 278876 - DNA, 12 bp, Artificial Sequence
  Oligonucleotide primer for the detection of SNP TSC0006535
atcaataataaa

SEQ ID NO: 278877 - DNA, 12 bp, Artificial Sequence
  Oligonucleotide primer for the detection of SNP TSC0006535
tttgaggaattt

SEQ ID NO: 278878 - DNA, 12 bp, Artificial Sequence
  Oligonucleotide primer for the detection of SNP TSC0006535
tttgaggaattc

SEQ ID NO: 278879 - DNA, 12 bp, Artificial Sequence
  Oligonucleotide primer for the detection of SNP TSC0006540
ctcaatttttct

SEQ ID NO: 278880 - DNA, 12 bp, Artificial Sequence
  Oligonucleotide primer for the detection of SNP TSC0006540
atatatttattt

SEQ ID NO: 278881 - DNA, 12 bp, Artificial Sequence
  Oligonucleotide primer for the detection of SNP TSC0006540
tatacacatcca

SEQ ID NO: 278882 - DNA, 12 bp, Artificial Sequence
  Oligonucleotide primer for the detection of SNP TSC0006540
tttaattttttt

SEQ ID NO: 278883 - DNA, 12 bp, Artificial Sequence
  Oligonucleotide primer for the detection of SNP TSC0006542
acttctaacact

SEQ ID NO: 278884 - DNA, 12 bp, Artificial Sequence
  Oligonucleotide primer for the detection of SNP TSC0006542
ttgagataatgg

SEQ ID NO: 278885 - DNA, 12 bp, Artificial Sequence
  Oligonucleotide primer for the detection of SNP TSC0006545
aatcacaattta

SEQ ID NO: 278886 - DNA, 12 bp, Artificial Sequence
  Oligonucleotide primer for the detection of SNP TSC0006545
atagtattttat

SEQ ID NO: 278887 - DNA, 12 bp, Artificial Sequence
  Oligonucleotide primer for the detection of SNP TSC0006545
acaatattttat

SEQ ID NO: 278888 - DNA, 12 bp, Artificial Sequence
  Oligonucleotide primer for the detection of SNP TSC0006545
aattataattta

SEQ ID NO: 278889 - DNA, 12 bp, Artificial Sequence
  Oligonucleotide primer for the detection of SNP TSC0006546
ctaattttatac

SEQ ID NO: 278890 - DNA, 12 bp, Artificial Sequence
  Oligonucleotide primer for the detection of SNP TSC0006546
ggtaggggtatg

SEQ ID NO: 278891 - DNA, 12 bp, Artificial Sequence
  Oligonucleotide primer for the detection of SNP TSC0006557
atatctaaacac

SEQ ID NO: 278892 - DNA, 12 bp, Artificial Sequence
  Oligonucleotide primer for the detection of SNP TSC0006557
ttttaaatgttg

SEQ ID NO: 278893 - DNA, 12 bp, Artificial Sequence
  Oligonucleotide primer for the detection of SNP TSC0006578
accactaaaaac

SEQ ID NO: 278894 - DNA, 12 bp, Artificial Sequence
  Oligonucleotide primer for the detection of SNP TSC0006578
tttttttggtta

SEQ ID NO: 278895 - DNA, 12 bp, Artificial Sequence
  Oligonucleotide primer for the detection of SNP TSC0006585
tcccttaacata

SEQ ID NO: 278896 - DNA, 12 bp, Artificial Sequence
  Oligonucleotide primer for the detection of SNP TSC0006585
tagagttagatg

SEQ ID NO: 278897 - DNA, 12 bp, Artificial Sequence
  Oligonucleotide primer for the detection of SNP TSC0006585
caaaaccaaata

SEQ ID NO: 278898 - DNA, 12 bp, Artificial Sequence
  Oligonucleotide primer for the detection of SNP TSC0006592
aaaaaaaactca

SEQ ID NO: 278899 - DNA, 12 bp, Artificial Sequence
  Oligonucleotide primer for the detection of SNP TSC0006592
ggtaattgtatt

SEQ ID NO: 278900 - DNA, 12 bp, Artificial Sequence
  Oligonucleotide primer for the detection of SNP TSC0006592
aataattacatc

SEQ ID NO: 278901 - DNA, 12 bp, Artificial Sequence
  Oligonucleotide primer for the detection of SNP TSC0006592
aggaaaaattta

SEQ ID NO: 278902 - DNA, 12 bp, Artificial Sequence
  Oligonucleotide primer for the detection of SNP TSC0006595
aatattttaaac

SEQ ID NO: 278903 - DNA, 12 bp, Artificial Sequence
  Oligonucleotide primer for the detection of SNP TSC0006595
gataggttttta

SEQ ID NO: 278904 - DNA, 12 bp, Artificial Sequence
  Oligonucleotide primer for the detection of SNP TSC0006597
ctccactctaat

SEQ ID NO: 278905 - DNA, 12 bp, Artificial Sequence
  Oligonucleotide primer for the detection of SNP TSC0006597
gtatggagttta

SEQ ID NO: 278906 - DNA, 12 bp, Artificial Sequence
  Oligonucleotide primer for the detection of SNP TSC0006597
atataaaatcca

SEQ ID NO: 278907 - DNA, 12 bp, Artificial Sequence
  Oligonucleotide primer for the detection of SNP TSC0006598
ccctcccctccc

SEQ ID NO: 278908 - DNA, 12 bp, Artificial Sequence
  Oligonucleotide primer for the detection of SNP TSC0006598
atattttttagg

SEQ ID NO: 278909 - DNA, 12 bp, Artificial Sequence
  Oligonucleotide primer for the detection of SNP TSC0006604
atttacaatcct

SEQ ID NO: 278910 - DNA, 12 bp, Artificial Sequence
  Oligonucleotide primer for the detection of SNP TSC0006604
tatagaatgata

SEQ ID NO: 278911 - DNA, 12 bp, Artificial Sequence
  Oligonucleotide primer for the detection of SNP TSC0006606
ctatcaaaaact

SEQ ID NO: 278912 - DNA, 12 bp, Artificial Sequence
  Oligonucleotide primer for the detection of SNP TSC0006606
ttgtatatatga

SEQ ID NO: 278913 - DNA, 12 bp, Artificial Sequence
  Oligonucleotide primer for the detection of SNP TSC0006607
caacaaaatcat

SEQ ID NO: 278914 - DNA, 12 bp, Artificial Sequence
  Oligonucleotide primer for the detection of SNP TSC0006607
tatagagaggtg

SEQ ID NO: 278915 - DNA, 12 bp, Artificial Sequence
  Oligonucleotide primer for the detection of SNP TSC0006607
cacaaaaaaata

SEQ ID NO: 278916 - DNA, 12 bp, Artificial Sequence
  Oligonucleotide primer for the detection of SNP TSC0006607
taataagattat

SEQ ID NO: 278917 - DNA, 12 bp, Artificial Sequence
  Oligonucleotide primer for the detection of SNP TSC0006627
attaaaaaaaat

SEQ ID NO: 278918 - DNA, 12 bp, Artificial Sequence
  Oligonucleotide primer for the detection of SNP TSC0006627
ttcgttgtttag

SEQ ID NO: 278919 - DNA, 12 bp, Artificial Sequence
  Oligonucleotide primer for the detection of SNP TSC0006637
taaattttagat

SEQ ID NO: 278920 - DNA, 12 bp, Artificial Sequence
  Oligonucleotide primer for the detection of SNP TSC0006637
taaatctcaaat

SEQ ID NO: 278921 - DNA, 12 bp, Artificial Sequence
  Oligonucleotide primer for the detection of SNP TSC0006637
tttggagatgaa

SEQ ID NO: 278922 - DNA, 12 bp, Artificial Sequence
  Oligonucleotide primer for the detection of SNP TSC0006638
cacacaataaac

SEQ ID NO: 278923 - DNA, 12 bp, Artificial Sequence
  Oligonucleotide primer for the detection of SNP TSC0006638
cacacgataaac

SEQ ID NO: 278924 - DNA, 12 bp, Artificial Sequence
  Oligonucleotide primer for the detection of SNP TSC0006638
ggttttatgggg

SEQ ID NO: 278925 - DNA, 12 bp, Artificial Sequence
  Oligonucleotide primer for the detection of SNP TSC0006638
ggttttacgggg

SEQ ID NO: 278926 - DNA, 12 bp, Artificial Sequence
  Oligonucleotide primer for the detection of SNP TSC0006639
actcctttactt

SEQ ID NO: 278927 - DNA, 12 bp, Artificial Sequence
  Oligonucleotide primer for the detection of SNP TSC0006639
tggtttttgttt

SEQ ID NO: 278928 - DNA, 12 bp, Artificial Sequence
  Oligonucleotide primer for the detection of SNP TSC0006639
taatctttaccc

SEQ ID NO: 278929 - DNA, 12 bp, Artificial Sequence
  Oligonucleotide primer for the detection of SNP TSC0006639
gtttttttgttt

SEQ ID NO: 278930 - DNA, 12 bp, Artificial Sequence
  Oligonucleotide primer for the detection of SNP TSC0006640
aaaaatttctac

SEQ ID NO: 278931 - DNA, 12 bp, Artificial Sequence
  Oligonucleotide primer for the detection of SNP TSC0006640
tggtttaaatta

SEQ ID NO: 278932 - DNA, 12 bp, Artificial Sequence
  Oligonucleotide primer for the detection of SNP TSC0006640
taactcaaatca

SEQ ID NO: 278933 - DNA, 12 bp, Artificial Sequence
  Oligonucleotide primer for the detection of SNP TSC0006640
gaagatttttgt

SEQ ID NO: 278934 - DNA, 12 bp, Artificial Sequence
  Oligonucleotide primer for the detection of SNP TSC0006640
gaagatttttgc

SEQ ID NO: 278935 - DNA, 12 bp, Artificial Sequence
  Oligonucleotide primer for the detection of SNP TSC0006641
catctattaata

SEQ ID NO: 278936 - DNA, 12 bp, Artificial Sequence
  Oligonucleotide primer for the detection of SNP TSC0006641
tttaaatttagg

SEQ ID NO: 278937 - DNA, 12 bp, Artificial Sequence
  Oligonucleotide primer for the detection of SNP TSC0006641
tccaaacccaaa

SEQ ID NO: 278938 - DNA, 12 bp, Artificial Sequence
  Oligonucleotide primer for the detection of SNP TSC0006641
atatttgttagt

SEQ ID NO: 278939 - DNA, 12 bp, Artificial Sequence
  Oligonucleotide primer for the detection of SNP TSC0006650
taaaccaatata

SEQ ID NO: 278940 - DNA, 12 bp, Artificial Sequence
  Oligonucleotide primer for the detection of SNP TSC0006650
attgtaagatat

SEQ ID NO: 278941 - DNA, 12 bp, Artificial Sequence
  Oligonucleotide primer for the detection of SNP TSC0006650
actacaaaatac

SEQ ID NO: 278942 - DNA, 12 bp, Artificial Sequence
  Oligonucleotide primer for the detection of SNP TSC0006650
tgagttagtgtg

SEQ ID NO: 278943 - DNA, 12 bp, Artificial Sequence
  Oligonucleotide primer for the detection of SNP TSC0006651
attgtttttaag

SEQ ID NO: 278944 - DNA, 12 bp, Artificial Sequence
  Oligonucleotide primer for the detection of SNP TSC0006663
aataacaacccc

SEQ ID NO: 278945 - DNA, 12 bp, Artificial Sequence
  Oligonucleotide primer for the detection of SNP TSC0006663
aataacgacccc

SEQ ID NO: 278946 - DNA, 12 bp, Artificial Sequence
  Oligonucleotide primer for the detection of SNP TSC0006663
atttgtagtttg

SEQ ID NO: 278947 - DNA, 12 bp, Artificial Sequence
  Oligonucleotide primer for the detection of SNP TSC0006663
acctacaaccta

SEQ ID NO: 278948 - DNA, 12 bp, Artificial Sequence
  Oligonucleotide primer for the detection of SNP TSC0006663
agtggtggtttt

SEQ ID NO: 278949 - DNA, 12 bp, Artificial Sequence
  Oligonucleotide primer for the detection of SNP TSC0006663
agtggcggtttt

SEQ ID NO: 278950 - DNA, 12 bp, Artificial Sequence
  Oligonucleotide primer for the detection of SNP TSC0006669
tacttttactac

SEQ ID NO: 278951 - DNA, 12 bp, Artificial Sequence
  Oligonucleotide primer for the detection of SNP TSC0006669
attaagggttag

SEQ ID NO: 278952 - DNA, 12 bp, Artificial Sequence
  Oligonucleotide primer for the detection of SNP TSC0006669
atcaaaaaccaa

SEQ ID NO: 278953 - DNA, 12 bp, Artificial Sequence
  Oligonucleotide primer for the detection of SNP TSC0006669
tgtttttattgt

SEQ ID NO: 278954 - DNA, 12 bp, Artificial Sequence
  Oligonucleotide primer for the detection of SNP TSC0006676
aaaatactattt

SEQ ID NO: 278955 - DNA, 12 bp, Artificial Sequence
  Oligonucleotide primer for the detection of SNP TSC0006676
tgttaagtgtta

SEQ ID NO: 278956 - DNA, 12 bp, Artificial Sequence
  Oligonucleotide primer for the detection of SNP TSC0006676
tgttaagcgtta

SEQ ID NO: 278957 - DNA, 12 bp, Artificial Sequence
  Oligonucleotide primer for the detection of SNP TSC0006701
aaaaactttcat

SEQ ID NO: 278958 - DNA, 12 bp, Artificial Sequence
  Oligonucleotide primer for the detection of SNP TSC0006701
ttagttgggaag

SEQ ID NO: 278959 - DNA, 12 bp, Artificial Sequence
  Oligonucleotide primer for the detection of SNP TSC0006705
ttacttataaca

SEQ ID NO: 278960 - DNA, 12 bp, Artificial Sequence
  Oligonucleotide primer for the detection of SNP TSC0006705
ttttctacttcc

SEQ ID NO: 278961 - DNA, 12 bp, Artificial Sequence
  Oligonucleotide primer for the detection of SNP TSC0006705
ttatttgtagta

SEQ ID NO: 278962 - DNA, 12 bp, Artificial Sequence
  Oligonucleotide primer for the detection of SNP TSC0006706
caaaaataaacc

SEQ ID NO: 278963 - DNA, 12 bp, Artificial Sequence
  Oligonucleotide primer for the detection of SNP TSC0006706
taaattattttt

SEQ ID NO: 278964 - DNA, 12 bp, Artificial Sequence
  Oligonucleotide primer for the detection of SNP TSC0006706
taaattattttc

SEQ ID NO: 278965 - DNA, 12 bp, Artificial Sequence
  Oligonucleotide primer for the detection of SNP TSC0006706
tcaaattatcct

SEQ ID NO: 278966 - DNA, 12 bp, Artificial Sequence
  Oligonucleotide primer for the detection of SNP TSC0006706
tagaaataagtt

SEQ ID NO: 278967 - DNA, 12 bp, Artificial Sequence
  Oligonucleotide primer for the detection of SNP TSC0006717
aaactcaaaaaa

SEQ ID NO: 278968 - DNA, 12 bp, Artificial Sequence
  Oligonukleotid-Primer
tattatattaat

SEQ ID NO: 278969 - DNA, 12 bp, Artificial Sequence
  Oligonucleotide primer for the detection of SNP TSC0006717
taccatactaac

SEQ ID NO: 278970 - DNA, 12 bp, Artificial Sequence
  Oligonucleotide primer for the detection of SNP TSC0006717
agatttagaggg

SEQ ID NO: 278971 - DNA, 12 bp, Artificial Sequence
  Oligonucleotide primer for the detection of SNP TSC0006723
aataacaaaact

SEQ ID NO: 278972 - DNA, 12 bp, Artificial Sequence
  Oligonucleotide primer for the detection of SNP TSC0006723
ggataagtaatt

SEQ ID NO: 278973 - DNA, 12 bp, Artificial Sequence
  Oligonucleotide primer for the detection of SNP TSC0006723
aacaaataatta

SEQ ID NO: 278974 - DNA, 12 bp, Artificial Sequence
  Oligonucleotide primer for the detection of SNP TSC0006723
aatggtaaagtt

SEQ ID NO: 278975 - DNA, 12 bp, Artificial Sequence
  Oligonucleotide primer for the detection of SNP TSC0006724
aaaaatttccat

SEQ ID NO: 278976 - DNA, 12 bp, Artificial Sequence
  Oligonucleotide primer for the detection of SNP TSC0006724
tgtaatttggag

SEQ ID NO: 278977 - DNA, 12 bp, Artificial Sequence
  Oligonucleotide primer for the detection of SNP TSC0006725
ttccattttaat

SEQ ID NO: 278978 - DNA, 12 bp, Artificial Sequence
  Oligonucleotide primer for the detection of SNP TSC0006725
atatggtagtta

SEQ ID NO: 278979 - DNA, 12 bp, Artificial Sequence
  Oligonucleotide primer for the detection of SNP TSC0006725
atataataacca

SEQ ID NO: 278980 - DNA, 12 bp, Artificial Sequence
  Oligonucleotide primer for the detection of SNP TSC0006729
agaataattata

SEQ ID NO: 278981 - DNA, 12 bp, Artificial Sequence
  Oligonucleotide primer for the detection of SNP TSC0006729
aaaacaatcata

SEQ ID NO: 278982 - DNA, 12 bp, Artificial Sequence
  Oligonucleotide primer for the detection of SNP TSC0006730
accaaatattca

SEQ ID NO: 278983 - DNA, 12 bp, Artificial Sequence
  Oligonucleotide primer for the detection of SNP TSC0006730
tggtggttattt

SEQ ID NO: 278984 - DNA, 12 bp, Artificial Sequence
  Oligonucleotide primer for the detection of SNP TSC0006730
taaccatctaaa

SEQ ID NO: 278985 - DNA, 12 bp, Artificial Sequence
  Oligonucleotide primer for the detection of SNP TSC0006730
gttaagtattta

SEQ ID NO: 278986 - DNA, 12 bp, Artificial Sequence
  Oligonucleotide primer for the detection of SNP TSC0006742
aactaaccccaa

SEQ ID NO: 278987 - DNA, 12 bp, Artificial Sequence
  Oligonucleotide primer for the detection of SNP TSC0006742
atttttgttatt

SEQ ID NO: 278988 - DNA, 12 bp, Artificial Sequence
  Oligonucleotide primer for the detection of SNP TSC0006742
acctctatcatt

SEQ ID NO: 278989 - DNA, 12 bp, Artificial Sequence
  Oligonucleotide primer for the detection of SNP TSC0006742
agttggttttaa

SEQ ID NO: 278990 - DNA, 12 bp, Artificial Sequence
  Oligonucleotide primer for the detection of SNP TSC0006745
attaactataac

SEQ ID NO: 278991 - DNA, 12 bp, Artificial Sequence
  Oligonucleotide primer for the detection of SNP TSC0006745
taggtttaaata

SEQ ID NO: 278992 - DNA, 12 bp, Artificial Sequence
  Oligonucleotide primer for the detection of SNP TSC0006747
atcctcaccatt

SEQ ID NO: 278993 - DNA, 12 bp, Artificial Sequence
  Oligonucleotide primer for the detection of SNP TSC0006747
tatgtaaaaaga

SEQ ID NO: 278994 - DNA, 12 bp, Artificial Sequence
  Oligonucleotide primer for the detection of SNP TSC0006749
ctacttaaatac

SEQ ID NO: 278995 - DNA, 12 bp, Artificial Sequence
  Oligonucleotide primer for the detection of SNP TSC0006749
gttttgtggtag

SEQ ID NO: 278996 - DNA, 12 bp, Artificial Sequence
  Oligonucleotide primer for the detection of SNP TSC0006749
ctctataataaa

SEQ ID NO: 278997 - DNA, 12 bp, Artificial Sequence
  Oligonucleotide primer for the detection of SNP TSC0006749
tttggatatttt

SEQ ID NO: 278998 - DNA, 12 bp, Artificial Sequence
  Oligonucleotide primer for the detection of SNP TSC0006760
taccctacaaat

SEQ ID NO: 278999 - DNA, 12 bp, Artificial Sequence
  Oligonucleotide primer for the detection of SNP TSC0006760
tatttggtagaa

SEQ ID NO: 279000 - DNA, 12 bp, Artificial Sequence
  Oligonucleotide primer for the detection of SNP TSC0006770
aaaacaaaaact

SEQ ID NO: 279001 - DNA, 12 bp, Artificial Sequence
  Oligonucleotide primer for the detection of SNP TSC0006770
gattttagttta

SEQ ID NO: 279002 - DNA, 12 bp, Artificial Sequence
  Oligonucleotide primer for the detection of SNP TSC0006772
ctacttttaaaa

SEQ ID NO: 279003 - DNA, 12 bp, Artificial Sequence
  Oligonucleotide primer for the detection of SNP TSC0006772
ggattattgttg

SEQ ID NO: 279004 - DNA, 12 bp, Artificial Sequence
  Oligonucleotide primer for the detection of SNP TSC0006772
aaattactatta

SEQ ID NO: 279005 - DNA, 12 bp, Artificial Sequence
  Oligonucleotide primer for the detection of SNP TSC0006772
tatttttgaaat

SEQ ID NO: 279006 - DNA, 12 bp, Artificial Sequence
  Oligonucleotide primer for the detection of SNP TSC0006776
attaatttggta

SEQ ID NO: 279007 - DNA, 12 bp, Artificial Sequence
  Oligonucleotide primer for the detection of SNP TSC0006777
aattcaattacc

SEQ ID NO: 279008 - DNA, 12 bp, Artificial Sequence
  Oligonucleotide primer for the detection of SNP TSC0006777
aggatttggtag

SEQ ID NO: 279009 - DNA, 12 bp, Artificial Sequence
  Oligonucleotide primer for the detection of SNP TSC0006777
aaaacctaataa

SEQ ID NO: 279010 - DNA, 12 bp, Artificial Sequence
  Oligonucleotide primer for the detection of SNP TSC0006777
gtttaattattt

SEQ ID NO: 279011 - DNA, 12 bp, Artificial Sequence
  Oligonucleotide primer for the detection of SNP TSC0006782
atttattacttc

SEQ ID NO: 279012 - DNA, 12 bp, Artificial Sequence
  Oligonucleotide primer for the detection of SNP TSC0006782
atattttgggag

SEQ ID NO: 279013 - DNA, 12 bp, Artificial Sequence
  Oligonucleotide primer for the detection of SNP TSC0006788
aaatattattac

SEQ ID NO: 279014 - DNA, 12 bp, Artificial Sequence
  Oligonucleotide primer for the detection of SNP TSC0006788
ttaataataaag

SEQ ID NO: 279015 - DNA, 12 bp, Artificial Sequence
  Oligonucleotide primer for the detection of SNP TSC0006788
ttaacaacaaaa

SEQ ID NO: 279016 - DNA, 12 bp, Artificial Sequence
  Oligonucleotide primer for the detection of SNP TSC0006788
aaatattattat

SEQ ID NO: 279017 - DNA, 12 bp, Artificial Sequence
  Oligonucleotide primer for the detection of SNP TSC0006789
aaatttaatttc

SEQ ID NO: 279018 - DNA, 12 bp, Artificial Sequence
  Oligonucleotide primer for the detection of SNP TSC0006789
gttgagaaagag

SEQ ID NO: 279019 - DNA, 12 bp, Artificial Sequence
  Oligonucleotide primer for the detection of SNP TSC0006789
ttaaaaaaaaaa

SEQ ID NO: 279020 - DNA, 12 bp, Artificial Sequence
  Oligonucleotide primer for the detection of SNP TSC0006789
agtttgattttt

SEQ ID NO: 279021 - DNA, 12 bp, Artificial Sequence
  Oligonucleotide primer for the detection of SNP TSC0006792
aataaaaaacat

SEQ ID NO: 279022 - DNA, 12 bp, Artificial Sequence
  Oligonucleotide primer for the detection of SNP TSC0006792
gatagagttgta

SEQ ID NO: 279023 - DNA, 12 bp, Artificial Sequence
  Oligonucleotide primer for the detection of SNP TSC0006792
gatagagtcgta

SEQ ID NO: 279024 - DNA, 12 bp, Artificial Sequence
  Oligonucleotide primer for the detection of SNP TSC0006799
atttttaaaaac

SEQ ID NO: 279025 - DNA, 12 bp, Artificial Sequence
  Oligonucleotide primer for the detection of SNP TSC0006799
agtatttttttg

SEQ ID NO: 279026 - DNA, 12 bp, Artificial Sequence
  Oligonucleotide primer for the detection of SNP TSC0006799
aacatcctccta

SEQ ID NO: 279027 - DNA, 12 bp, Artificial Sequence
  Oligonucleotide primer for the detection of SNP TSC0006799
atttttggaagt

SEQ ID NO: 279028 - DNA, 12 bp, Artificial Sequence
  Oligonucleotide primer for the detection of SNP TSC0006803
aaacttcattcc

SEQ ID NO: 279029 - DNA, 12 bp, Artificial Sequence
  Oligonucleotide primer for the detection of SNP TSC0006803
ggtttagaagtg

SEQ ID NO: 279030 - DNA, 12 bp, Artificial Sequence
  Oligonucleotide primer for the detection of SNP TSC0006804
aattatatttat

SEQ ID NO: 279031 - DNA, 12 bp, Artificial Sequence
  Oligonucleotide primer for the detection of SNP TSC0006804
atttttttgtaa

SEQ ID NO: 279032 - DNA, 12 bp, Artificial Sequence
  Oligonucleotide primer for the detection of SNP TSC0006811
cataataaaaac

SEQ ID NO: 279033 - DNA, 12 bp, Artificial Sequence
  Oligonucleotide primer for the detection of SNP TSC0006811
aatattttatgt

SEQ ID NO: 279034 - DNA, 12 bp, Artificial Sequence
  Oligonucleotide primer for the detection of SNP TSC0006811
aatattttatgc

SEQ ID NO: 279035 - DNA, 12 bp, Artificial Sequence
  Oligonucleotide primer for the detection of SNP TSC0006811
aaatattttata

SEQ ID NO: 279036 - DNA, 12 bp, Artificial Sequence
  Oligonucleotide primer for the detection of SNP TSC0006811
tataatgaaagt

SEQ ID NO: 279037 - DNA, 12 bp, Artificial Sequence
  Oligonucleotide primer for the detection of SNP TSC0006812
aactatataact

SEQ ID NO: 279038 - DNA, 12 bp, Artificial Sequence
  Oligonucleotide primer for the detection of SNP TSC0006812
tagtttttttta

SEQ ID NO: 279039 - DNA, 12 bp, Artificial Sequence
  Oligonucleotide primer for the detection of SNP TSC0006812
aattatataatt

SEQ ID NO: 279040 - DNA, 12 bp, Artificial Sequence
  Oligonucleotide primer for the detection of SNP TSC0006813
tattaattcaac

SEQ ID NO: 279041 - DNA, 12 bp, Artificial Sequence
  Oligonucleotide primer for the detection of SNP TSC0006813
gaattttttttc

SEQ ID NO: 279042 - DNA, 12 bp, Artificial Sequence
  Oligonucleotide primer for the detection of SNP TSC0006813
aaaacctctctt

SEQ ID NO: 279043 - DNA, 12 bp, Artificial Sequence
  Oligonucleotide primer for the detection of SNP TSC0006813
tgttgatttagt

SEQ ID NO: 279044 - DNA, 12 bp, Artificial Sequence
  Oligonucleotide primer for the detection of SNP TSC0006821
tcctcctatact

SEQ ID NO: 279045 - DNA, 12 bp, Artificial Sequence
  Oligonucleotide primer for the detection of SNP TSC0006821
atagttttgtta

SEQ ID NO: 279046 - DNA, 12 bp, Artificial Sequence
  Oligonucleotide primer for the detection of SNP TSC0006828
ttctataatacc

SEQ ID NO: 279047 - DNA, 12 bp, Artificial Sequence
  Oligonucleotide primer for the detection of SNP TSC0006828
atatttaagttt

SEQ ID NO: 279048 - DNA, 12 bp, Artificial Sequence
  Oligonucleotide primer for the detection of SNP TSC0006830
acaattctacta

SEQ ID NO: 279049 - DNA, 12 bp, Artificial Sequence
  Oligonucleotide primer for the detection of SNP TSC0006830
tgggtggatttt

SEQ ID NO: 279050 - DNA, 12 bp, Artificial Sequence
  Oligonucleotide primer for the detection of SNP TSC0006830
cgggtggatttt

SEQ ID NO: 279051 - DNA, 12 bp, Artificial Sequence
  Oligonucleotide primer for the detection of SNP TSC0006830
caaataaacttc

SEQ ID NO: 279052 - DNA, 12 bp, Artificial Sequence
  Oligonucleotide primer for the detection of SNP TSC0006830
cgaataaacttc

SEQ ID NO: 279053 - DNA, 12 bp, Artificial Sequence
  Oligonucleotide primer for the detection of SNP TSC0006830
gtaattttgttg

SEQ ID NO: 279054 - DNA, 12 bp, Artificial Sequence
  Oligonucleotide primer for the detection of SNP TSC0006832
tccattaatcta

SEQ ID NO: 279055 - DNA, 12 bp, Artificial Sequence
  Oligonucleotide primer for the detection of SNP TSC0006832
tccgttaatcta

SEQ ID NO: 279056 - DNA, 12 bp, Artificial Sequence
  Oligonucleotide primer for the detection of SNP TSC0006832
agaattattggg

SEQ ID NO: 279057 - DNA, 12 bp, Artificial Sequence
  Oligonukleotid-Primer
aaaatcactaaa

SEQ ID NO: 279058 - DNA, 12 bp, Artificial Sequence
  Oligonucleotide primer for the detection of SNP TSC0006832
ttgttaatttgt

SEQ ID NO: 279059 - DNA, 12 bp, Artificial Sequence
  Oligonucleotide primer for the detection of SNP TSC0006832
tcgttaatttgt

SEQ ID NO: 279060 - DNA, 12 bp, Artificial Sequence
  Oligonucleotide primer for the detection of SNP TSC0006838
aaaaacatttcc

SEQ ID NO: 279061 - DNA, 12 bp, Artificial Sequence
  Oligonukleotid-Primer
ttatagtggtag

SEQ ID NO: 279062 - DNA, 12 bp, Artificial Sequence
  Oligonucleotide primer for the detection of SNP TSC0006839
aacttattaaaa

SEQ ID NO: 279063 - DNA, 12 bp, Artificial Sequence
  Oligonucleotide primer for the detection of SNP TSC0006839
ttgttttatttt

SEQ ID NO: 279064 - DNA, 12 bp, Artificial Sequence
  Oligonucleotide primer for the detection of SNP TSC0006839
cactctatctca

SEQ ID NO: 279065 - DNA, 12 bp, Artificial Sequence
  Oligonucleotide primer for the detection of SNP TSC0006839
agatttgttgag

SEQ ID NO: 279066 - DNA, 12 bp, Artificial Sequence
  Oligonucleotide primer for the detection of SNP TSC0006840
caaaaatttaac

SEQ ID NO: 279067 - DNA, 12 bp, Artificial Sequence
  Oligonucleotide primer for the detection of SNP TSC0006840
tgtgagagttgg

SEQ ID NO: 279068 - DNA, 12 bp, Artificial Sequence
  Oligonucleotide primer for the detection of SNP TSC0006841
ttaaactaaaac

SEQ ID NO: 279069 - DNA, 12 bp, Artificial Sequence
  Oligonucleotide primer for the detection of SNP TSC0006841
ttttttttaata

SEQ ID NO: 279070 - DNA, 12 bp, Artificial Sequence
  Oligonucleotide primer for the detection of SNP TSC0006848
aatccactcata

SEQ ID NO: 279071 - DNA, 12 bp, Artificial Sequence
  Oligonucleotide primer for the detection of SNP TSC0006848
ttatgatagtta

SEQ ID NO: 279072 - DNA, 12 bp, Artificial Sequence
  Oligonucleotide primer for the detection of SNP TSC0006848
ctataataatca

SEQ ID NO: 279073 - DNA, 12 bp, Artificial Sequence
  Oligonucleotide primer for the detection of SNP TSC0006852
tatcactacaaa

SEQ ID NO: 279074 - DNA, 12 bp, Artificial Sequence
  Oligonucleotide primer for the detection of SNP TSC0006852
tgtgaatttgta

SEQ ID NO: 279075 - DNA, 12 bp, Artificial Sequence
  Oligonucleotide primer for the detection of SNP TSC0006852
cgtgaatttgta

SEQ ID NO: 279076 - DNA, 12 bp, Artificial Sequence
  Oligonucleotide primer for the detection of SNP TSC0006853
aaatccaaaaaa

SEQ ID NO: 279077 - DNA, 12 bp, Artificial Sequence
  Oligonucleotide primer for the detection of SNP TSC0006865
tacattcaatca

SEQ ID NO: 279078 - DNA, 12 bp, Artificial Sequence
  Oligonucleotide primer for the detection of SNP TSC0006865
taataaaaagat

SEQ ID NO: 279079 - DNA, 12 bp, Artificial Sequence
  Oligonucleotide primer for the detection of SNP TSC0006865
caataaaaaaat

SEQ ID NO: 279080 - DNA, 12 bp, Artificial Sequence
  Oligonucleotide primer for the detection of SNP TSC0006865
tgtatttagtta

SEQ ID NO: 279081 - DNA, 12 bp, Artificial Sequence
  Oligonucleotide primer for the detection of SNP TSC0006872
tactttttattt

SEQ ID NO: 279082 - DNA, 12 bp, Artificial Sequence
  Oligonucleotide primer for the detection of SNP TSC0006872
aaagaattatga

SEQ ID NO: 279083 - DNA, 12 bp, Artificial Sequence
  Oligonucleotide primer for the detection of SNP TSC0006873
attttaactaac

SEQ ID NO: 279084 - DNA, 12 bp, Artificial Sequence
  Oligonucleotide primer for the detection of SNP TSC0006873
tttaaaataata

SEQ ID NO: 279085 - DNA, 12 bp, Artificial Sequence
  Oligonucleotide primer for the detection of SNP TSC0006879
atcttccccatt

SEQ ID NO: 279086 - DNA, 12 bp, Artificial Sequence
  Oligonucleotide primer for the detection of SNP TSC0006879
agagttagtgga

SEQ ID NO: 279087 - DNA, 12 bp, Artificial Sequence
  Oligonucleotide primer for the detection of SNP TSC0006886
aattaccaaaaa

SEQ ID NO: 279088 - DNA, 12 bp, Artificial Sequence
  Oligonucleotide primer for the detection of SNP TSC0006886
gatttttttttt

SEQ ID NO: 279089 - DNA, 12 bp, Artificial Sequence
  Oligonucleotide primer for the detection of SNP TSC0006886
aactttttttcc

SEQ ID NO: 279090 - DNA, 12 bp, Artificial Sequence
  Oligonucleotide primer for the detection of SNP TSC0006886
gattgttaaaag

SEQ ID NO: 279091 - DNA, 12 bp, Artificial Sequence
  Oligonucleotide primer for the detection of SNP TSC0006893
aaaaaaacttac

SEQ ID NO: 279092 - DNA, 12 bp, Artificial Sequence
  Oligonucleotide primer for the detection of SNP TSC0006895
acaaattctctt

SEQ ID NO: 279093 - DNA, 12 bp, Artificial Sequence
  Oligonucleotide primer for the detection of SNP TSC0006895
aattaaagagaa

SEQ ID NO: 279094 - DNA, 12 bp, Artificial Sequence
  Oligonucleotide primer for the detection of SNP TSC0006895
ataggttttttt

SEQ ID NO: 279095 - DNA, 12 bp, Artificial Sequence
  Oligonucleotide primer for the detection of SNP TSC0006896
caacccactaca

SEQ ID NO: 279096 - DNA, 12 bp, Artificial Sequence
  Oligonucleotide primer for the detection of SNP TSC0006896
cgacccactaca

SEQ ID NO: 279097 - DNA, 12 bp, Artificial Sequence
  Oligonucleotide primer for the detection of SNP TSC0006896
ttgggaggtaga

SEQ ID NO: 279098 - DNA, 12 bp, Artificial Sequence
  Oligonucleotide primer for the detection of SNP TSC0006896
tcgggaggtaga

SEQ ID NO: 279099 - DNA, 12 bp, Artificial Sequence
  Oligonucleotide primer for the detection of SNP TSC0006896
gaaaaacaaaaa

SEQ ID NO: 279100 - DNA, 12 bp, Artificial Sequence
  Oligonucleotide primer for the detection of SNP TSC0006896
tggtttattgta

SEQ ID NO: 279101 - DNA, 12 bp, Artificial Sequence
  Oligonucleotide primer for the detection of SNP TSC0006896
cggtttattgta

SEQ ID NO: 279102 - DNA, 12 bp, Artificial Sequence
  Oligonucleotide primer for the detection of SNP TSC0006897
tacatcctctac

SEQ ID NO: 279103 - DNA, 12 bp, Artificial Sequence
  Oligonucleotide primer for the detection of SNP TSC0006897
gattgtattatt

SEQ ID NO: 279104 - DNA, 12 bp, Artificial Sequence
  Oligonucleotide primer for the detection of SNP TSC0006897
gatcgtattatt

SEQ ID NO: 279105 - DNA, 12 bp, Artificial Sequence
  Oligonucleotide primer for the detection of SNP TSC0006897
aatcacaccact

SEQ ID NO: 279106 - DNA, 12 bp, Artificial Sequence
  Oligonucleotide primer for the detection of SNP TSC0006897
aatcgcaccact

SEQ ID NO: 279107 - DNA, 12 bp, Artificial Sequence
  Oligonucleotide primer for the detection of SNP TSC0006901
aaaaataaaaat

SEQ ID NO: 279108 - DNA, 12 bp, Artificial Sequence
  Oligonucleotide primer for the detection of SNP TSC0006901
tgttttaaaaag

SEQ ID NO: 279109 - DNA, 12 bp, Artificial Sequence
  Oligonucleotide primer for the detection of SNP TSC0006912
aacaaatactcc

SEQ ID NO: 279110 - DNA, 12 bp, Artificial Sequence
  Oligonucleotide primer for the detection of SNP TSC0006912
ttatttgtgagt

SEQ ID NO: 279111 - DNA, 12 bp, Artificial Sequence
  Oligonucleotide primer for the detection of SNP TSC0006912
tctatctataaa

SEQ ID NO: 279112 - DNA, 12 bp, Artificial Sequence
  Oligonucleotide primer for the detection of SNP TSC0006912
ggtaggtgtttt

SEQ ID NO: 279113 - DNA, 12 bp, Artificial Sequence
  Oligonucleotide primer for the detection of SNP TSC0006912
ggtaggtgtttc

SEQ ID NO: 279114 - DNA, 12 bp, Artificial Sequence
  Oligonucleotide primer for the detection of SNP TSC0006913
atcaccctctta

SEQ ID NO: 279115 - DNA, 12 bp, Artificial Sequence
  Oligonucleotide primer for the detection of SNP TSC0006913
aaagatagttta

SEQ ID NO: 279116 - DNA, 12 bp, Artificial Sequence
  Oligonucleotide primer for the detection of SNP TSC0006914
tttcctcattat

SEQ ID NO: 279117 - DNA, 12 bp, Artificial Sequence
  Oligonucleotide primer for the detection of SNP TSC0006914
tttattgggtgg

SEQ ID NO: 279118 - DNA, 12 bp, Artificial Sequence
  Oligonucleotide primer for the detection of SNP TSC0006914
cccattaaataa

SEQ ID NO: 279119 - DNA, 12 bp, Artificial Sequence
  Oligonucleotide primer for the detection of SNP TSC0006914
tttttttattgt

SEQ ID NO: 279120 - DNA, 12 bp, Artificial Sequence
  Oligonucleotide primer for the detection of SNP TSC0006919
ttccccatcctc

SEQ ID NO: 279121 - DNA, 12 bp, Artificial Sequence
  Oligonucleotide primer for the detection of SNP TSC0006919
aattttttattg

SEQ ID NO: 279122 - DNA, 12 bp, Artificial Sequence
  Oligonucleotide primer for the detection of SNP TSC0006928
caccaactccct

SEQ ID NO: 279123 - DNA, 12 bp, Artificial Sequence
  Oligonucleotide primer for the detection of SNP TSC0006928
ttaatgttgggg

SEQ ID NO: 279124 - DNA, 12 bp, Artificial Sequence
  Oligonucleotide primer for the detection of SNP TSC0006929
aaaaaaatccca

SEQ ID NO: 279125 - DNA, 12 bp, Artificial Sequence
  Oligonucleotide primer for the detection of SNP TSC0006929
aaaaaaatcccg

SEQ ID NO: 279126 - DNA, 12 bp, Artificial Sequence
  Oligonucleotide primer for the detection of SNP TSC0006929
caaacttatcca

SEQ ID NO: 279127 - DNA, 12 bp, Artificial Sequence
  Oligonucleotide primer for the detection of SNP TSC0006929
aggagagatttt

SEQ ID NO: 279128 - DNA, 12 bp, Artificial Sequence
  Oligonucleotide primer for the detection of SNP TSC0006929
aggagagatttc

SEQ ID NO: 279129 - DNA, 12 bp, Artificial Sequence
  Oligonucleotide primer for the detection of SNP TSC0006931
attaaccatctt

SEQ ID NO: 279130 - DNA, 12 bp, Artificial Sequence
  Oligonucleotide primer for the detection of SNP TSC0006931
tttgtttgttta

SEQ ID NO: 279131 - DNA, 12 bp, Artificial Sequence
  Oligonucleotide primer for the detection of SNP TSC0006933
caaaataatcat

SEQ ID NO: 279132 - DNA, 12 bp, Artificial Sequence
  Oligonucleotide primer for the detection of SNP TSC0006933
gtttggggtttg

SEQ ID NO: 279133 - DNA, 12 bp, Artificial Sequence
  Oligonucleotide primer for the detection of SNP TSC0006934
aaaataacaaaa

SEQ ID NO: 279134 - DNA, 12 bp, Artificial Sequence
  Oligonucleotide primer for the detection of SNP TSC0006934
atggtaatgttt

SEQ ID NO: 279135 - DNA, 12 bp, Artificial Sequence
  Oligonucleotide primer for the detection of SNP TSC0006934
gaaatgataaag

SEQ ID NO: 279136 - DNA, 12 bp, Artificial Sequence
  Oligonucleotide primer for the detection of SNP TSC0006943
gattgtatttat

SEQ ID NO: 279137 - DNA, 12 bp, Artificial Sequence
  Oligonucleotide primer for the detection of SNP TSC0006943
aattatattcat

SEQ ID NO: 279138 - DNA, 12 bp, Artificial Sequence
  Oligonucleotide primer for the detection of SNP TSC0006943
tttgaatttttg

SEQ ID NO: 279139 - DNA, 12 bp, Artificial Sequence
  Oligonucleotide primer for the detection of SNP TSC0006951
tatataatattc

SEQ ID NO: 279140 - DNA, 12 bp, Artificial Sequence
  Oligonucleotide primer for the detection of SNP TSC0006951
attatattttta

SEQ ID NO: 279141 - DNA, 12 bp, Artificial Sequence
  Oligonucleotide primer for the detection of SNP TSC0006952
ttctcctacctc

SEQ ID NO: 279142 - DNA, 12 bp, Artificial Sequence
  Oligonucleotide primer for the detection of SNP TSC0006952
atagtataggag

SEQ ID NO: 279143 - DNA, 12 bp, Artificial Sequence
  Oligonucleotide primer for the detection of SNP TSC0006953
aatatcatatat

SEQ ID NO: 279144 - DNA, 12 bp, Artificial Sequence
  Oligonucleotide primer for the detection of SNP TSC0006953
tttgttgtagaa

SEQ ID NO: 279145 - DNA, 12 bp, Artificial Sequence
  Oligonucleotide primer for the detection of SNP TSC0006954
tctaaaatcctc

SEQ ID NO: 279146 - DNA, 12 bp, Artificial Sequence
  Oligonucleotide primer for the detection of SNP TSC0006954
gattgggagaaa

SEQ ID NO: 279147 - DNA, 12 bp, Artificial Sequence
  Oligonucleotide primer for the detection of SNP TSC0006955
ataacatacata

SEQ ID NO: 279148 - DNA, 12 bp, Artificial Sequence
  Oligonucleotide primer for the detection of SNP TSC0006955
tttaaaattctc

SEQ ID NO: 279149 - DNA, 12 bp, Artificial Sequence
  Oligonucleotide primer for the detection of SNP TSC0006955
gatgatatatat

SEQ ID NO: 279150 - DNA, 12 bp, Artificial Sequence
  Oligonucleotide primer for the detection of SNP TSC0006956
tattacaaaaat

SEQ ID NO: 279151 - DNA, 12 bp, Artificial Sequence
  Oligonucleotide primer for the detection of SNP TSC0006956
taatttgaaaaa

SEQ ID NO: 279152 - DNA, 12 bp, Artificial Sequence
  Oligonucleotide primer for the detection of SNP TSC0006956
tgttgtaggagt

SEQ ID NO: 279153 - DNA, 12 bp, Artificial Sequence
  Oligonucleotide primer for the detection of SNP TSC0006957
aaatataaatat

SEQ ID NO: 279154 - DNA, 12 bp, Artificial Sequence
  Oligonucleotide primer for the detection of SNP TSC0006957
atattttgggga

SEQ ID NO: 279155 - DNA, 12 bp, Artificial Sequence
  Oligonucleotide primer for the detection of SNP TSC0006957
cattttaaaaaa

SEQ ID NO: 279156 - DNA, 12 bp, Artificial Sequence
  Oligonucleotide primer for the detection of SNP TSC0006957
aaatgtgaatat

SEQ ID NO: 279157 - DNA, 12 bp, Artificial Sequence
  Oligonucleotide primer for the detection of SNP TSC0006958
attaccaaacat

SEQ ID NO: 279158 - DNA, 12 bp, Artificial Sequence
  Oligonucleotide primer for the detection of SNP TSC0006958
agaatttttgta

SEQ ID NO: 279159 - DNA, 12 bp, Artificial Sequence
  Oligonucleotide primer for the detection of SNP TSC0006964
aaaataccctac

SEQ ID NO: 279160 - DNA, 12 bp, Artificial Sequence
  Oligonucleotide primer for the detection of SNP TSC0006965
tatataatttat

SEQ ID NO: 279161 - DNA, 12 bp, Artificial Sequence
  Oligonucleotide primer for the detection of SNP TSC0006965
aatggtttagag

SEQ ID NO: 279162 - DNA, 12 bp, Artificial Sequence
  Oligonucleotide primer for the detection of SNP TSC0006966
taatttttctcc

SEQ ID NO: 279163 - DNA, 12 bp, Artificial Sequence
  Oligonucleotide primer for the detection of SNP TSC0006966
atagagagatgg

SEQ ID NO: 279164 - DNA, 12 bp, Artificial Sequence
  Oligonucleotide primer for the detection of SNP TSC0006974
aactcataaaac

SEQ ID NO: 279165 - DNA, 12 bp, Artificial Sequence
  Oligonucleotide primer for the detection of SNP TSC0006974
agtatgagagag

SEQ ID NO: 279166 - DNA, 12 bp, Artificial Sequence
  Oligonucleotide primer for the detection of SNP TSC0006982
gaaagtttttta

SEQ ID NO: 279167 - DNA, 12 bp, Artificial Sequence
  Oligonucleotide primer for the detection of SNP TSC0006983
attctttctcca

SEQ ID NO: 279168 - DNA, 12 bp, Artificial Sequence
  Oligonucleotide primer for the detection of SNP TSC0006983
tttagtagattt

SEQ ID NO: 279169 - DNA, 12 bp, Artificial Sequence
  Oligonucleotide primer for the detection of SNP TSC0006983
cttaacaaatcc

SEQ ID NO: 279170 - DNA, 12 bp, Artificial Sequence
  Oligonucleotide primer for the detection of SNP TSC0007002
ttaaataataac

SEQ ID NO: 279171 - DNA, 12 bp, Artificial Sequence
  Oligonucleotide primer for the detection of SNP TSC0007002
tatttgttttta

SEQ ID NO: 279172 - DNA, 12 bp, Artificial Sequence
  Oligonucleotide primer for the detection of SNP TSC0007003
cttccctataca

SEQ ID NO: 279173 - DNA, 12 bp, Artificial Sequence
  Oligonucleotide primer for the detection of SNP TSC0007003
atatatttgtag

SEQ ID NO: 279174 - DNA, 12 bp, Artificial Sequence
  Oligonucleotide primer for the detection of SNP TSC0007003
acatacttataa

SEQ ID NO: 279175 - DNA, 12 bp, Artificial Sequence
  Oligonucleotide primer for the detection of SNP TSC0007009
tacacatacaca

SEQ ID NO: 279176 - DNA, 12 bp, Artificial Sequence
  Oligonucleotide primer for the detection of SNP TSC0007009
ttgttatagggt

SEQ ID NO: 279177 - DNA, 12 bp, Artificial Sequence
  Oligonucleotide primer for the detection of SNP TSC0007009
ctaccacaaaat

SEQ ID NO: 279178 - DNA, 12 bp, Artificial Sequence
  Oligonucleotide primer for the detection of SNP TSC0007010
cacatacatata

SEQ ID NO: 279179 - DNA, 12 bp, Artificial Sequence
  Oligonucleotide primer for the detection of SNP TSC0007010
tatatgtatatg

SEQ ID NO: 279180 - DNA, 12 bp, Artificial Sequence
  Oligonucleotide primer for the detection of SNP TSC0007011
tttataaaaaac

SEQ ID NO: 279181 - DNA, 12 bp, Artificial Sequence
  Oligonucleotide primer for the detection of SNP TSC0007011
gagtgagaatga

SEQ ID NO: 279182 - DNA, 12 bp, Artificial Sequence
  Oligonucleotide primer for the detection of SNP TSC0007020
tttgcgtttgaa

SEQ ID NO: 279183 - DNA, 12 bp, Artificial Sequence
  Oligonucleotide primer for the detection of SNP TSC0007020
cctacatttaaa

SEQ ID NO: 279184 - DNA, 12 bp, Artificial Sequence
  Oligonucleotide primer for the detection of SNP TSC0007020
cctacgtttaaa

SEQ ID NO: 279185 - DNA, 12 bp, Artificial Sequence
  Oligonucleotide primer for the detection of SNP TSC0007020
aagttaaatggt

SEQ ID NO: 279186 - DNA, 12 bp, Artificial Sequence
  Oligonucleotide primer for the detection of SNP TSC0007021
gatgaagaggat

SEQ ID NO: 279187 - DNA, 12 bp, Artificial Sequence
  Oligonucleotide primer for the detection of SNP TSC0007021
ggagggagatag

SEQ ID NO: 279188 - DNA, 12 bp, Artificial Sequence
  Oligonucleotide primer for the detection of SNP TSC0007041
tttaatccttcc

SEQ ID NO: 279189 - DNA, 12 bp, Artificial Sequence
  Oligonucleotide primer for the detection of SNP TSC0007041
tgtatgttttta

SEQ ID NO: 279190 - DNA, 12 bp, Artificial Sequence
  Oligonucleotide primer for the detection of SNP TSC0007042
taaaccaaaata

SEQ ID NO: 279191 - DNA, 12 bp, Artificial Sequence
  Oligonucleotide primer for the detection of SNP TSC0007042
ataggaggtttt

SEQ ID NO: 279192 - DNA, 12 bp, Artificial Sequence
  Oligonucleotide primer for the detection of SNP TSC0007042
acaaaaaactcc

SEQ ID NO: 279193 - DNA, 12 bp, Artificial Sequence
  Oligonucleotide primer for the detection of SNP TSC0007042
taggttagaata

SEQ ID NO: 279194 - DNA, 12 bp, Artificial Sequence
  Oligonukleotid-Primer
ttctaaaaatta

SEQ ID NO: 279195 - DNA, 12 bp, Artificial Sequence
  Oligonucleotide primer for the detection of SNP TSC0007048
attgtagatatt

SEQ ID NO: 279196 - DNA, 12 bp, Artificial Sequence
  Oligonucleotide primer for the detection of SNP TSC0007048
actacaaatatt

SEQ ID NO: 279197 - DNA, 12 bp, Artificial Sequence
  Oligonucleotide primer for the detection of SNP TSC0007048
attttaagaatt

SEQ ID NO: 279198 - DNA, 12 bp, Artificial Sequence
  Oligonucleotide primer for the detection of SNP TSC0007049
ctttattcccaa

SEQ ID NO: 279199 - DNA, 12 bp, Artificial Sequence
  Oligonucleotide primer for the detection of SNP TSC0007049
ttgattgggaat

SEQ ID NO: 279200 - DNA, 12 bp, Artificial Sequence
  Oligonucleotide primer for the detection of SNP TSC0007049
ttaactaaaaat

SEQ ID NO: 279201 - DNA, 12 bp, Artificial Sequence
  Oligonucleotide primer for the detection of SNP TSC0007049
ttttatttttag

SEQ ID NO: 279202 - DNA, 12 bp, Artificial Sequence
  Oligonucleotide primer for the detection of SNP TSC0007050
attatgttttta

SEQ ID NO: 279203 - DNA, 12 bp, Artificial Sequence
  Oligonucleotide primer for the detection of SNP TSC0007050
atcatatctcta

SEQ ID NO: 279204 - DNA, 12 bp, Artificial Sequence
  Oligonucleotide primer for the detection of SNP TSC0007051
cctcctaaataa

SEQ ID NO: 279205 - DNA, 12 bp, Artificial Sequence
  Oligonucleotide primer for the detection of SNP TSC0007051
tatttgggagtt

SEQ ID NO: 279206 - DNA, 12 bp, Artificial Sequence
  Oligonucleotide primer for the detection of SNP TSC0007051
tacttaaaaatt

SEQ ID NO: 279207 - DNA, 12 bp, Artificial Sequence
  Oligonucleotide primer for the detection of SNP TSC0007051
ttttttgagtag

SEQ ID NO: 279208 - DNA, 12 bp, Artificial Sequence
  Oligonucleotide primer for the detection of SNP TSC0007060
ccaaaaaccaaa

SEQ ID NO: 279209 - DNA, 12 bp, Artificial Sequence
  Oligonucleotide primer for the detection of SNP TSC0007060
gtaattatgttt

SEQ ID NO: 279210 - DNA, 12 bp, Artificial Sequence
  Oligonucleotide primer for the detection of SNP TSC0007060
taataaccatac

SEQ ID NO: 279211 - DNA, 12 bp, Artificial Sequence
  Oligonucleotide primer for the detection of SNP TSC0007063
gtagtttatatt

SEQ ID NO: 279212 - DNA, 12 bp, Artificial Sequence
  Oligonucleotide primer for the detection of SNP TSC0007063
aacaacccacac

SEQ ID NO: 279213 - DNA, 12 bp, Artificial Sequence
  Oligonucleotide primer for the detection of SNP TSC0007063
aattgagaagag

SEQ ID NO: 279214 - DNA, 12 bp, Artificial Sequence
  Oligonucleotide primer for the detection of SNP TSC0007068
attcaaaaaaat

SEQ ID NO: 279215 - DNA, 12 bp, Artificial Sequence
  Oligonucleotide primer for the detection of SNP TSC0007068
ttttttaatatg

SEQ ID NO: 279216 - DNA, 12 bp, Artificial Sequence
  Oligonucleotide primer for the detection of SNP TSC0007068
ctttctaacata

SEQ ID NO: 279217 - DNA, 12 bp, Artificial Sequence
  Oligonucleotide primer for the detection of SNP TSC0007068
atttaagagaat

SEQ ID NO: 279218 - DNA, 12 bp, Artificial Sequence
  Oligonucleotide primer for the detection of SNP TSC0007069
aaaactacaaca

SEQ ID NO: 279219 - DNA, 12 bp, Artificial Sequence
  Oligonucleotide primer for the detection of SNP TSC0007069
gaaactacaaca

SEQ ID NO: 279220 - DNA, 12 bp, Artificial Sequence
  Oligonucleotide primer for the detection of SNP TSC0007069
tatattgagaat

SEQ ID NO: 279221 - DNA, 12 bp, Artificial Sequence
  Oligonucleotide primer for the detection of SNP TSC0007069
tatattaaaaat

SEQ ID NO: 279222 - DNA, 12 bp, Artificial Sequence
  Oligonucleotide primer for the detection of SNP TSC0007069
gaggttatagta

SEQ ID NO: 279223 - DNA, 12 bp, Artificial Sequence
  Oligonucleotide primer for the detection of SNP TSC0007076
ccttccacacaa

SEQ ID NO: 279224 - DNA, 12 bp, Artificial Sequence
  Oligonucleotide primer for the detection of SNP TSC0007076
gattttttatta

SEQ ID NO: 279225 - DNA, 12 bp, Artificial Sequence
  Oligonucleotide primer for the detection of SNP TSC0007076
attttttatata

SEQ ID NO: 279226 - DNA, 12 bp, Artificial Sequence
  Oligonucleotide primer for the detection of SNP TSC0007082
tttttggttttt

SEQ ID NO: 279227 - DNA, 12 bp, Artificial Sequence
  Oligonucleotide primer for the detection of SNP TSC0007082
tctctaaccctc

SEQ ID NO: 279228 - DNA, 12 bp, Artificial Sequence
  Oligonucleotide primer for the detection of SNP TSC0007082
agtgaaggaaat

SEQ ID NO: 279229 - DNA, 12 bp, Artificial Sequence
  Oligonucleotide primer for the detection of SNP TSC0007082
agtgaaggaaac

SEQ ID NO: 279230 - DNA, 12 bp, Artificial Sequence
  Oligonucleotide primer for the detection of SNP TSC0007084
tcctcacccaaa

SEQ ID NO: 279231 - DNA, 12 bp, Artificial Sequence
  Oligonucleotide primer for the detection of SNP TSC0007084
tagttataattt

SEQ ID NO: 279232 - DNA, 12 bp, Artificial Sequence
  Oligonucleotide primer for the detection of SNP TSC0007084
caattacaattc

SEQ ID NO: 279233 - DNA, 12 bp, Artificial Sequence
  Oligonucleotide primer for the detection of SNP TSC0007089
ccacttacctct

SEQ ID NO: 279234 - DNA, 12 bp, Artificial Sequence
  Oligonucleotide primer for the detection of SNP TSC0007089
ttaagttagaaa

SEQ ID NO: 279235 - DNA, 12 bp, Artificial Sequence
  Oligonucleotide primer for the detection of SNP TSC0007093
caaaaatacaat

SEQ ID NO: 279236 - DNA, 12 bp, Artificial Sequence
  Oligonucleotide primer for the detection of SNP TSC0007093
ttttttttatta

SEQ ID NO: 279237 - DNA, 12 bp, Artificial Sequence
  Oligonucleotide primer for the detection of SNP TSC0007093
ttttttctacca

SEQ ID NO: 279238 - DNA, 12 bp, Artificial Sequence
  Oligonucleotide primer for the detection of SNP TSC0007093
taagaatataat

SEQ ID NO: 279239 - DNA, 12 bp, Artificial Sequence
  Oligonucleotide primer for the detection of SNP TSC0007096
aataaaaactaa

SEQ ID NO: 279240 - DNA, 12 bp, Artificial Sequence
  Oligonucleotide primer for the detection of SNP TSC0007096
gaattagttttt

SEQ ID NO: 279241 - DNA, 12 bp, Artificial Sequence
  Oligonucleotide primer for the detection of SNP TSC0007096
aaatcaatcctc

SEQ ID NO: 279242 - DNA, 12 bp, Artificial Sequence
  Oligonucleotide primer for the detection of SNP TSC0007096
aataaggattgg

SEQ ID NO: 279243 - DNA, 12 bp, Artificial Sequence
  Oligonucleotide primer for the detection of SNP TSC0007097
taatacaattaa

SEQ ID NO: 279244 - DNA, 12 bp, Artificial Sequence
  Oligonucleotide primer for the detection of SNP TSC0007097
ttttaggatatt

SEQ ID NO: 279245 - DNA, 12 bp, Artificial Sequence
  Oligonucleotide primer for the detection of SNP TSC0007097
ttttaggatatc

SEQ ID NO: 279246 - DNA, 12 bp, Artificial Sequence
  Oligonucleotide primer for the detection of SNP TSC0007097
attctaaaacat

SEQ ID NO: 279247 - DNA, 12 bp, Artificial Sequence
  Oligonucleotide primer for the detection of SNP TSC0007097
tggtgtagttaa

SEQ ID NO: 279248 - DNA, 12 bp, Artificial Sequence
  Oligonucleotide primer for the detection of SNP TSC0007098
taaactaataca

SEQ ID NO: 279249 - DNA, 12 bp, Artificial Sequence
  Oligonucleotide primer for the detection of SNP TSC0007098
tagtatgattga

SEQ ID NO: 279250 - DNA, 12 bp, Artificial Sequence
  Oligonucleotide primer for the detection of SNP TSC0007098
taacataattaa

SEQ ID NO: 279251 - DNA, 12 bp, Artificial Sequence
  Oligonucleotide primer for the detection of SNP TSC0007098
ataggttaatat

SEQ ID NO: 279252 - DNA, 12 bp, Artificial Sequence
  Oligonucleotide primer for the detection of SNP TSC0007099
aactaacataaa

SEQ ID NO: 279253 - DNA, 12 bp, Artificial Sequence
  Oligonucleotide primer for the detection of SNP TSC0007099
agttttaagtgt

SEQ ID NO: 279254 - DNA, 12 bp, Artificial Sequence
  Oligonucleotide primer for the detection of SNP TSC0007099
aacctcaaatac

SEQ ID NO: 279255 - DNA, 12 bp, Artificial Sequence
  Oligonucleotide primer for the detection of SNP TSC0007099
aattgatatgga

SEQ ID NO: 279256 - DNA, 12 bp, Artificial Sequence
  Oligonucleotide primer for the detection of SNP TSC0007114
aaaaataaactc

SEQ ID NO: 279257 - DNA, 12 bp, Artificial Sequence
  Oligonucleotide primer for the detection of SNP TSC0007114
tattaggttgta

SEQ ID NO: 279258 - DNA, 12 bp, Artificial Sequence
  Oligonucleotide primer for the detection of SNP TSC0007120
cttcttaatttc

SEQ ID NO: 279259 - DNA, 12 bp, Artificial Sequence
  Oligonucleotide primer for the detection of SNP TSC0007120
gtagagttagag

SEQ ID NO: 279260 - DNA, 12 bp, Artificial Sequence
  Oligonucleotide primer for the detection of SNP TSC0007123
ttttcttttctc

SEQ ID NO: 279261 - DNA, 12 bp, Artificial Sequence
  Oligonucleotide primer for the detection of SNP TSC0007123
gtttagtagtgg

SEQ ID NO: 279262 - DNA, 12 bp, Artificial Sequence
  Oligonucleotide primer for the detection of SNP TSC0007131
aaaaaacctcca

SEQ ID NO: 279263 - DNA, 12 bp, Artificial Sequence
  Oligonucleotide primer for the detection of SNP TSC0007131
tgtgaggtgttg

SEQ ID NO: 279264 - DNA, 12 bp, Artificial Sequence
  Oligonucleotide primer for the detection of SNP TSC0007131
agggaggttttt

SEQ ID NO: 279265 - DNA, 12 bp, Artificial Sequence
  Oligonucleotide primer for the detection of SNP TSC0007134
aaatttccaaaa

SEQ ID NO: 279266 - DNA, 12 bp, Artificial Sequence
  Oligonucleotide primer for the detection of SNP TSC0007134
ggaaatattaat

SEQ ID NO: 279267 - DNA, 12 bp, Artificial Sequence
  Oligonucleotide primer for the detection of SNP TSC0007134
aaaaatatcaac

SEQ ID NO: 279268 - DNA, 12 bp, Artificial Sequence
  Oligonucleotide primer for the detection of SNP TSC0007134
aggtttttaaaa

SEQ ID NO: 279269 - DNA, 12 bp, Artificial Sequence
  Oligonucleotide primer for the detection of SNP TSC0007135
aaatttattaat

SEQ ID NO: 279270 - DNA, 12 bp, Artificial Sequence
  Oligonucleotide primer for the detection of SNP TSC0007135
tatgttataaaa

SEQ ID NO: 279271 - DNA, 12 bp, Artificial Sequence
  Oligonucleotide primer for the detection of SNP TSC0007136
agatagttttaa

SEQ ID NO: 279272 - DNA, 12 bp, Artificial Sequence
  Oligonucleotide primer for the detection of SNP TSC0007136
aaacaatctcaa

SEQ ID NO: 279273 - DNA, 12 bp, Artificial Sequence
  Oligonucleotide primer for the detection of SNP TSC0007136
aataagaaaata

SEQ ID NO: 279274 - DNA, 12 bp, Artificial Sequence
  Oligonucleotide primer for the detection of SNP TSC0007138
ctaaaaacattt

SEQ ID NO: 279275 - DNA, 12 bp, Artificial Sequence
  Oligonukleotid-Primer
ttggtttttagt

SEQ ID NO: 279276 - DNA, 12 bp, Artificial Sequence
  Oligonucleotide primer for the detection of SNP TSC0007138
ttggtttttagc

SEQ ID NO: 279277 - DNA, 12 bp, Artificial Sequence
  Oligonucleotide primer for the detection of SNP TSC0007138
taactctcaaca

SEQ ID NO: 279278 - DNA, 12 bp, Artificial Sequence
  Oligonucleotide primer for the detection of SNP TSC0007138
taactctcaacg

SEQ ID NO: 279279 - DNA, 12 bp, Artificial Sequence
  Oligonucleotide primer for the detection of SNP TSC0007138
ttaaaaatattt

SEQ ID NO: 279280 - DNA, 12 bp, Artificial Sequence
  Oligonucleotide primer for the detection of SNP TSC0007139
aataaccacaca

SEQ ID NO: 279281 - DNA, 12 bp, Artificial Sequence
  Oligonucleotide primer for the detection of SNP TSC0007139
atagttatatat

SEQ ID NO: 279282 - DNA, 12 bp, Artificial Sequence
  Oligonucleotide primer for the detection of SNP TSC0007147
attaccctaaat

SEQ ID NO: 279283 - DNA, 12 bp, Artificial Sequence
  Oligonucleotide primer for the detection of SNP TSC0007147
attgtttaattg

SEQ ID NO: 279284 - DNA, 12 bp, Artificial Sequence
  Oligonucleotide primer for the detection of SNP TSC0007147
atcgtttaattg

SEQ ID NO: 279285 - DNA, 12 bp, Artificial Sequence
  Oligonucleotide primer for the detection of SNP TSC0007147
atcatctaatta

SEQ ID NO: 279286 - DNA, 12 bp, Artificial Sequence
  Oligonucleotide primer for the detection of SNP TSC0007147
atcgtctaatta

SEQ ID NO: 279287 - DNA, 12 bp, Artificial Sequence
  Oligonucleotide primer for the detection of SNP TSC0007147
attgttttagat

SEQ ID NO: 279288 - DNA, 12 bp, Artificial Sequence
  Oligonucleotide primer for the detection of SNP TSC0007149
aaaactatatta

SEQ ID NO: 279289 - DNA, 12 bp, Artificial Sequence
  Oligonucleotide primer for the detection of SNP TSC0007149
agtagtgtagat

SEQ ID NO: 279290 - DNA, 12 bp, Artificial Sequence
  Oligonucleotide primer for the detection of SNP TSC0007149
aacaatacaaac

SEQ ID NO: 279291 - DNA, 12 bp, Artificial Sequence
  Oligonucleotide primer for the detection of SNP TSC0007149
agggttgtatta

SEQ ID NO: 279292 - DNA, 12 bp, Artificial Sequence
  Oligonucleotide primer for the detection of SNP TSC0007150
aacaacccattt

SEQ ID NO: 279293 - DNA, 12 bp, Artificial Sequence
  Oligonucleotide primer for the detection of SNP TSC0007150
tttggatgggta

SEQ ID NO: 279294 - DNA, 12 bp, Artificial Sequence
  Oligonucleotide primer for the detection of SNP TSC0007152
atcattaatatc

SEQ ID NO: 279295 - DNA, 12 bp, Artificial Sequence
  Oligonucleotide primer for the detection of SNP TSC0007152
aaattgaaatta

SEQ ID NO: 279296 - DNA, 12 bp, Artificial Sequence
  Oligonucleotide primer for the detection of SNP TSC0007153
ttaaatctaaaa

SEQ ID NO: 279297 - DNA, 12 bp, Artificial Sequence
  Oligonucleotide primer for the detection of SNP TSC0007153
ataattaagtat

SEQ ID NO: 279298 - DNA, 12 bp, Artificial Sequence
  Oligonucleotide primer for the detection of SNP TSC0007153
ataattaagtac

SEQ ID NO: 279299 - DNA, 12 bp, Artificial Sequence
  Oligonucleotide primer for the detection of SNP TSC0007153
aataaccaaata

SEQ ID NO: 279300 - DNA, 12 bp, Artificial Sequence
  Oligonucleotide primer for the detection of SNP TSC0007153
ttggatttgaga

SEQ ID NO: 279301 - DNA, 12 bp, Artificial Sequence
  Oligonucleotide primer for the detection of SNP TSC0007155
ataaaactaaaa

SEQ ID NO: 279302 - DNA, 12 bp, Artificial Sequence
  Oligonucleotide primer for the detection of SNP TSC0007155
tagtaaagtatt

SEQ ID NO: 279303 - DNA, 12 bp, Artificial Sequence
  Oligonucleotide primer for the detection of SNP TSC0007155
ctaacaaaacac

SEQ ID NO: 279304 - DNA, 12 bp, Artificial Sequence
  Oligonucleotide primer for the detection of SNP TSC0007155
ggtgtggagttg

SEQ ID NO: 279305 - DNA, 12 bp, Artificial Sequence
  Oligonucleotide primer for the detection of SNP TSC0007162
atcaaattaata

SEQ ID NO: 279306 - DNA, 12 bp, Artificial Sequence
  Oligonucleotide primer for the detection of SNP TSC0007162
agagtagaattg

SEQ ID NO: 279307 - DNA, 12 bp, Artificial Sequence
  Oligonucleotide primer for the detection of SNP TSC0007162
aaacaaaattaa

SEQ ID NO: 279308 - DNA, 12 bp, Artificial Sequence
  Oligonucleotide primer for the detection of SNP TSC0007162
gttaaattaata

SEQ ID NO: 279309 - DNA, 12 bp, Artificial Sequence
  Oligonucleotide primer for the detection of SNP TSC0007168
aaattttttaaa

SEQ ID NO: 279310 - DNA, 12 bp, Artificial Sequence
  Oligonucleotide primer for the detection of SNP TSC0007168
ttttaaaaaaaa

SEQ ID NO: 279311 - DNA, 12 bp, Artificial Sequence
  Oligonucleotide primer for the detection of SNP TSC0007168
tctcaaaaaaaa

SEQ ID NO: 279312 - DNA, 12 bp, Artificial Sequence
  Oligonucleotide primer for the detection of SNP TSC0007168
aggttttttggg

SEQ ID NO: 279313 - DNA, 12 bp, Artificial Sequence
  Oligonucleotide primer for the detection of SNP TSC0007169
gatagagcgaga

SEQ ID NO: 279314 - DNA, 12 bp, Artificial Sequence
  Oligonucleotide primer for the detection of SNP TSC0007169
aacaaaacgaaa

SEQ ID NO: 279315 - DNA, 12 bp, Artificial Sequence
  Oligonucleotide primer for the detection of SNP TSC0007169
gggttttttttt

SEQ ID NO: 279316 - DNA, 12 bp, Artificial Sequence
  Oligonucleotide primer for the detection of SNP TSC0007170
cccaaaaacaaa

SEQ ID NO: 279317 - DNA, 12 bp, Artificial Sequence
  Oligonucleotide primer for the detection of SNP TSC0007170
ttttgttttgtc

SEQ ID NO: 279318 - DNA, 12 bp, Artificial Sequence
  Oligonucleotide primer for the detection of SNP TSC0007170
cttctaccttat

SEQ ID NO: 279319 - DNA, 12 bp, Artificial Sequence
  Oligonucleotide primer for the detection of SNP TSC0007170
tttagggataga

SEQ ID NO: 279320 - DNA, 12 bp, Artificial Sequence
  Oligonucleotide primer for the detection of SNP TSC0007171
ttataaaataac

SEQ ID NO: 279321 - DNA, 12 bp, Artificial Sequence
  Oligonucleotide primer for the detection of SNP TSC0007173
ttctcttatatc

SEQ ID NO: 279322 - DNA, 12 bp, Artificial Sequence
  Oligonucleotide primer for the detection of SNP TSC0007173
tgaagagaaata

SEQ ID NO: 279323 - DNA, 12 bp, Artificial Sequence
  Oligonucleotide primer for the detection of SNP TSC0007174
tagttattatat

SEQ ID NO: 279324 - DNA, 12 bp, Artificial Sequence
  Oligonucleotide primer for the detection of SNP TSC0007174
actaccatataa

SEQ ID NO: 279325 - DNA, 12 bp, Artificial Sequence
  Oligonucleotide primer for the detection of SNP TSC0007174
gtagtatgattt

SEQ ID NO: 279326 - DNA, 12 bp, Artificial Sequence
  Oligonucleotide primer for the detection of SNP TSC0007175
actattctcaat

SEQ ID NO: 279327 - DNA, 12 bp, Artificial Sequence
  Oligonucleotide primer for the detection of SNP TSC0007175
tttgttttttga

SEQ ID NO: 279328 - DNA, 12 bp, Artificial Sequence
  Oligonucleotide primer for the detection of SNP TSC0007175
cctaccttctaa

SEQ ID NO: 279329 - DNA, 12 bp, Artificial Sequence
  Oligonucleotide primer for the detection of SNP TSC0007182
aaacaaaaaata

SEQ ID NO: 279330 - DNA, 12 bp, Artificial Sequence
  Oligonucleotide primer for the detection of SNP TSC0007182
atcttcctacac

SEQ ID NO: 279331 - DNA, 12 bp, Artificial Sequence
  Oligonucleotide primer for the detection of SNP TSC0007182
gaggtagggagt

SEQ ID NO: 279332 - DNA, 12 bp, Artificial Sequence
  Oligonucleotide primer for the detection of SNP TSC0007185
aacattacaaaa

SEQ ID NO: 279333 - DNA, 12 bp, Artificial Sequence
  Oligonucleotide primer for the detection of SNP TSC0007185
tgaagaaaattt

SEQ ID NO: 279334 - DNA, 12 bp, Artificial Sequence
  Oligonucleotide primer for the detection of SNP TSC0007185
taaaaaaaactc

SEQ ID NO: 279335 - DNA, 12 bp, Artificial Sequence
  Oligonucleotide primer for the detection of SNP TSC0007185
gtaatattatag

SEQ ID NO: 279336 - DNA, 12 bp, Artificial Sequence
  Oligonucleotide primer for the detection of SNP TSC0007187
ttactaacttaa

SEQ ID NO: 279337 - DNA, 12 bp, Artificial Sequence
  Oligonucleotide primer for the detection of SNP TSC0007187
atgatatagtag

SEQ ID NO: 279338 - DNA, 12 bp, Artificial Sequence
  Oligonucleotide primer for the detection of SNP TSC0007188
ataaaacaaact

SEQ ID NO: 279339 - DNA, 12 bp, Artificial Sequence
  Oligonucleotide primer for the detection of SNP TSC0007188
attttgtgtttt

SEQ ID NO: 279340 - DNA, 12 bp, Artificial Sequence
  Oligonucleotide primer for the detection of SNP TSC0007188
atcctatacttc

SEQ ID NO: 279341 - DNA, 12 bp, Artificial Sequence
  Oligonucleotide primer for the detection of SNP TSC0007188
atgagataggtt

SEQ ID NO: 279342 - DNA, 12 bp, Artificial Sequence
  Oligonucleotide primer for the detection of SNP TSC0007191
aaccaattaaat

SEQ ID NO: 279343 - DNA, 12 bp, Artificial Sequence
  Oligonucleotide primer for the detection of SNP TSC0007191
ataaagaaagga

SEQ ID NO: 279344 - DNA, 12 bp, Artificial Sequence
  Oligonucleotide primer for the detection of SNP TSC0007205
ataacccaaccc

SEQ ID NO: 279345 - DNA, 12 bp, Artificial Sequence
  Oligonucleotide primer for the detection of SNP TSC0007205
tattttaaaaaa

SEQ ID NO: 279346 - DNA, 12 bp, Artificial Sequence
  Oligonucleotide primer for the detection of SNP TSC0007214
tatatataaact

SEQ ID NO: 279347 - DNA, 12 bp, Artificial Sequence
  Oligonucleotide primer for the detection of SNP TSC0007214
taggtatggagg

SEQ ID NO: 279348 - DNA, 12 bp, Artificial Sequence
  Oligonucleotide primer for the detection of SNP TSC0007227
aaacccccatct

SEQ ID NO: 279349 - DNA, 12 bp, Artificial Sequence
  Oligonucleotide primer for the detection of SNP TSC0007227
tttttgagggag

SEQ ID NO: 279350 - DNA, 12 bp, Artificial Sequence
  Oligonucleotide primer for the detection of SNP TSC0007227
ttttcgagggag

SEQ ID NO: 279351 - DNA, 12 bp, Artificial Sequence
  Oligonucleotide primer for the detection of SNP TSC0007239
ttaaaaaatatc

SEQ ID NO: 279352 - DNA, 12 bp, Artificial Sequence
  Oligonucleotide primer for the detection of SNP TSC0007240
taatcaaactaa

SEQ ID NO: 279353 - DNA, 12 bp, Artificial Sequence
  Oligonucleotide primer for the detection of SNP TSC0007240
attagtaatttt

SEQ ID NO: 279354 - DNA, 12 bp, Artificial Sequence
  Oligonucleotide primer for the detection of SNP TSC0007240
tattaacaatct

SEQ ID NO: 279355 - DNA, 12 bp, Artificial Sequence
  Oligonucleotide primer for the detection of SNP TSC0007240
tagttaaattaa

SEQ ID NO: 279356 - DNA, 12 bp, Artificial Sequence
  Oligonucleotide primer for the detection of SNP TSC0007246
cccaataattat

SEQ ID NO: 279357 - DNA, 12 bp, Artificial Sequence
  Oligonucleotide primer for the detection of SNP TSC0007246
ttagtttattaa

SEQ ID NO: 279358 - DNA, 12 bp, Artificial Sequence
  Oligonucleotide primer for the detection of SNP TSC0007251
aaaattttaaat

SEQ ID NO: 279359 - DNA, 12 bp, Artificial Sequence
  Oligonucleotide primer for the detection of SNP TSC0007256
tttacaaactca

SEQ ID NO: 279360 - DNA, 12 bp, Artificial Sequence
  Oligonucleotide primer for the detection of SNP TSC0007256
tcccttccatct

SEQ ID NO: 279361 - DNA, 12 bp, Artificial Sequence
  Oligonucleotide primer for the detection of SNP TSC0007256
tttataggttta

SEQ ID NO: 279362 - DNA, 12 bp, Artificial Sequence
  Oligonucleotide primer for the detection of SNP TSC0007257
aaaaaccaaaaa

SEQ ID NO: 279363 - DNA, 12 bp, Artificial Sequence
  Oligonucleotide primer for the detection of SNP TSC0007257
aaaaaccgaaaa

SEQ ID NO: 279364 - DNA, 12 bp, Artificial Sequence
  Oligonucleotide primer for the detection of SNP TSC0007257
ttatattatttt

SEQ ID NO: 279365 - DNA, 12 bp, Artificial Sequence
  Oligonucleotide primer for the detection of SNP TSC0007257
aaccatatcatt

SEQ ID NO: 279366 - DNA, 12 bp, Artificial Sequence
  Oligonucleotide primer for the detection of SNP TSC0007257
ttgggaggggtt

SEQ ID NO: 279367 - DNA, 12 bp, Artificial Sequence
  Oligonucleotide primer for the detection of SNP TSC0007257
ttgggaggggtc

SEQ ID NO: 279368 - DNA, 12 bp, Artificial Sequence
  Oligonukleotid-Primer
cataaaaataac

SEQ ID NO: 279369 - DNA, 12 bp, Artificial Sequence
  Oligonucleotide primer for the detection of SNP TSC0007258
gaattatggagg

SEQ ID NO: 279370 - DNA, 12 bp, Artificial Sequence
  Oligonucleotide primer for the detection of SNP TSC0007266
ctattcatttct

SEQ ID NO: 279371 - DNA, 12 bp, Artificial Sequence
  Oligonucleotide primer for the detection of SNP TSC0007266
gaagataagaaa

SEQ ID NO: 279372 - DNA, 12 bp, Artificial Sequence
  Oligonukleotid-Primer
tttataaaccta

SEQ ID NO: 279373 - DNA, 12 bp, Artificial Sequence
  Oligonucleotide primer for the detection of SNP TSC0007280
tagaaaaatatt

SEQ ID NO: 279374 - DNA, 12 bp, Artificial Sequence
  Oligonucleotide primer for the detection of SNP TSC0007280
caaaaaaacatt

SEQ ID NO: 279375 - DNA, 12 bp, Artificial Sequence
  Oligonucleotide primer for the detection of SNP TSC0007280
tgtaagtttatt

SEQ ID NO: 279376 - DNA, 12 bp, Artificial Sequence
  Oligonucleotide primer for the detection of SNP TSC0007283
tttttataataa

SEQ ID NO: 279377 - DNA, 12 bp, Artificial Sequence
  Oligonucleotide primer for the detection of SNP TSC0007283
aagtaagtaatt

SEQ ID NO: 279378 - DNA, 12 bp, Artificial Sequence
  Oligonucleotide primer for the detection of SNP TSC0007283
aagtaagtaatc

SEQ ID NO: 279379 - DNA, 12 bp, Artificial Sequence
  Oligonucleotide primer for the detection of SNP TSC0007283
aaacaaacaatc

SEQ ID NO: 279380 - DNA, 12 bp, Artificial Sequence
  Oligonucleotide primer for the detection of SNP TSC0007283
ttttgtgatgat

SEQ ID NO: 279381 - DNA, 12 bp, Artificial Sequence
  Oligonucleotide primer for the detection of SNP TSC0007292
taaatataatac

SEQ ID NO: 279382 - DNA, 12 bp, Artificial Sequence
  Oligonucleotide primer for the detection of SNP TSC0007292
aataaaattatg

SEQ ID NO: 279383 - DNA, 12 bp, Artificial Sequence
  Oligonucleotide primer for the detection of SNP TSC0007310
ctacttcctacc

SEQ ID NO: 279384 - DNA, 12 bp, Artificial Sequence
  Oligonucleotide primer for the detection of SNP TSC0007310
gggagtagaggt

SEQ ID NO: 279385 - DNA, 12 bp, Artificial Sequence
  Oligonucleotide primer for the detection of SNP TSC0007310
ttgttttttatc

SEQ ID NO: 279386 - DNA, 12 bp, Artificial Sequence
  Oligonucleotide primer for the detection of SNP TSC0007311
tcaccaaataaa

SEQ ID NO: 279387 - DNA, 12 bp, Artificial Sequence
  Oligonucleotide primer for the detection of SNP TSC0007311
ttaagattgggt

SEQ ID NO: 279388 - DNA, 12 bp, Artificial Sequence
  Oligonucleotide primer for the detection of SNP TSC0007311
caaaattaaata

SEQ ID NO: 279389 - DNA, 12 bp, Artificial Sequence
  Oligonucleotide primer for the detection of SNP TSC0007311
ttttattagata

SEQ ID NO: 279390 - DNA, 12 bp, Artificial Sequence
  Oligonucleotide primer for the detection of SNP TSC0007327
aaacctctcctt

SEQ ID NO: 279391 - DNA, 12 bp, Artificial Sequence
  Oligonucleotide primer for the detection of SNP TSC0007327
ttgatgagagga

SEQ ID NO: 279392 - DNA, 12 bp, Artificial Sequence
  Oligonucleotide primer for the detection of SNP TSC0007327
ttgacgagagga

SEQ ID NO: 279393 - DNA, 12 bp, Artificial Sequence
  Oligonucleotide primer for the detection of SNP TSC0007329
ttactttttcaa

SEQ ID NO: 279394 - DNA, 12 bp, Artificial Sequence
  Oligonucleotide primer for the detection of SNP TSC0007329
taaaattgagtt

SEQ ID NO: 279395 - DNA, 12 bp, Artificial Sequence
  Oligonucleotide primer for the detection of SNP TSC0007329
aaaactaaatca

SEQ ID NO: 279396 - DNA, 12 bp, Artificial Sequence
  Oligonucleotide primer for the detection of SNP TSC0007329
tgtttttttagt

SEQ ID NO: 279397 - DNA, 12 bp, Artificial Sequence
  Oligonucleotide primer for the detection of SNP TSC0007330
aacttaaaacaa

SEQ ID NO: 279398 - DNA, 12 bp, Artificial Sequence
  Oligonucleotide primer for the detection of SNP TSC0007330
aactttcttccc

SEQ ID NO: 279399 - DNA, 12 bp, Artificial Sequence
  Oligonucleotide primer for the detection of SNP TSC0007330
gatttgggatag

SEQ ID NO: 279400 - DNA, 12 bp, Artificial Sequence
  Oligonucleotide primer for the detection of SNP TSC0007333
tattaataatat

SEQ ID NO: 279401 - DNA, 12 bp, Artificial Sequence
  Oligonucleotide primer for the detection of SNP TSC0007333
gatttgaggaga

SEQ ID NO: 279402 - DNA, 12 bp, Artificial Sequence
  Oligonucleotide primer for the detection of SNP TSC0007333
aacctaaaaaaa

SEQ ID NO: 279403 - DNA, 12 bp, Artificial Sequence
  Oligonucleotide primer for the detection of SNP TSC0007333
tgttggtaatgt

SEQ ID NO: 279404 - DNA, 12 bp, Artificial Sequence
  Oligonucleotide primer for the detection of SNP TSC0007334
ccctccacactc

SEQ ID NO: 279405 - DNA, 12 bp, Artificial Sequence
  Oligonucleotide primer for the detection of SNP TSC0007334
gtatttgtttag

SEQ ID NO: 279406 - DNA, 12 bp, Artificial Sequence
  Oligonucleotide primer for the detection of SNP TSC0007338
cctaattcacac

SEQ ID NO: 279407 - DNA, 12 bp, Artificial Sequence
  Oligonucleotide primer for the detection of SNP TSC0007338
gggaaggaatag

SEQ ID NO: 279408 - DNA, 12 bp, Artificial Sequence
  Oligonucleotide primer for the detection of SNP TSC0007339
caatttcaattt

SEQ ID NO: 279409 - DNA, 12 bp, Artificial Sequence
  Oligonucleotide primer for the detection of SNP TSC0007339
agttgtgtggta

SEQ ID NO: 279410 - DNA, 12 bp, Artificial Sequence
  Oligonucleotide primer for the detection of SNP TSC0007340
tatttcattaca

SEQ ID NO: 279411 - DNA, 12 bp, Artificial Sequence
  Oligonucleotide primer for the detection of SNP TSC0007340
aaattgattttt

SEQ ID NO: 279412 - DNA, 12 bp, Artificial Sequence
  Oligonucleotide primer for the detection of SNP TSC0007340
aaaattaatttc

SEQ ID NO: 279413 - DNA, 12 bp, Artificial Sequence
  Oligonucleotide primer for the detection of SNP TSC0007340
ttgttttattgt

SEQ ID NO: 279414 - DNA, 12 bp, Artificial Sequence
  Oligonucleotide primer for the detection of SNP TSC0007341
atctcaaacttc

SEQ ID NO: 279415 - DNA, 12 bp, Artificial Sequence
  Oligonucleotide primer for the detection of SNP TSC0007341
ggatagtttgag

SEQ ID NO: 279416 - DNA, 12 bp, Artificial Sequence
  Oligonucleotide primer for the detection of SNP TSC0007341
aaataacttaaa

SEQ ID NO: 279417 - DNA, 12 bp, Artificial Sequence
  Oligonucleotide primer for the detection of SNP TSC0007341
gttttaaatttt

SEQ ID NO: 279418 - DNA, 12 bp, Artificial Sequence
  Oligonucleotide primer for the detection of SNP TSC0007346
caattttaccct

SEQ ID NO: 279419 - DNA, 12 bp, Artificial Sequence
  Oligonucleotide primer for the detection of SNP TSC0007346
ttgtttatattg

SEQ ID NO: 279420 - DNA, 12 bp, Artificial Sequence
  Oligonucleotide primer for the detection of SNP TSC0007347
tactaacaacaa

SEQ ID NO: 279421 - DNA, 12 bp, Artificial Sequence
  Oligonucleotide primer for the detection of SNP TSC0007347
tactaacaacga

SEQ ID NO: 279422 - DNA, 12 bp, Artificial Sequence
  Oligonucleotide primer for the detection of SNP TSC0007347
tggtttgaaatt

SEQ ID NO: 279423 - DNA, 12 bp, Artificial Sequence
  Oligonucleotide primer for the detection of SNP TSC0007347
aataacttaaaa

SEQ ID NO: 279424 - DNA, 12 bp, Artificial Sequence
  Oligonucleotide primer for the detection of SNP TSC0007347
gtgttggtagtg

SEQ ID NO: 279425 - DNA, 12 bp, Artificial Sequence
  Oligonucleotide primer for the detection of SNP TSC0007347
gtgttggtagcg

SEQ ID NO: 279426 - DNA, 12 bp, Artificial Sequence
  Oligonucleotide primer for the detection of SNP TSC0007352
aataaaacacaa

SEQ ID NO: 279427 - DNA, 12 bp, Artificial Sequence
  Oligonucleotide primer for the detection of SNP TSC0007352
gaaaaatatggt

SEQ ID NO: 279428 - DNA, 12 bp, Artificial Sequence
  Oligonucleotide primer for the detection of SNP TSC0007352
agtgagatatag

SEQ ID NO: 279429 - DNA, 12 bp, Artificial Sequence
  Oligonucleotide primer for the detection of SNP TSC0007367
taattataacat

SEQ ID NO: 279430 - DNA, 12 bp, Artificial Sequence
  Oligonucleotide primer for the detection of SNP TSC0007367
tttgagattaga

SEQ ID NO: 279431 - DNA, 12 bp, Artificial Sequence
  Oligonucleotide primer for the detection of SNP TSC0007367
ttcgagattaga

SEQ ID NO: 279432 - DNA, 12 bp, Artificial Sequence
  Oligonucleotide primer for the detection of SNP TSC0007368
ctatataataac

SEQ ID NO: 279433 - DNA, 12 bp, Artificial Sequence
  Oligonucleotide primer for the detection of SNP TSC0007368
atatttagatga

SEQ ID NO: 279434 - DNA, 12 bp, Artificial Sequence
  Oligonucleotide primer for the detection of SNP TSC0007373
cttccatattac

SEQ ID NO: 279435 - DNA, 12 bp, Artificial Sequence
  Oligonucleotide primer for the detection of SNP TSC0007373
cttccgtattac

SEQ ID NO: 279436 - DNA, 12 bp, Artificial Sequence
  Oligonucleotide primer for the detection of SNP TSC0007373
ttgtgttgttta

SEQ ID NO: 279437 - DNA, 12 bp, Artificial Sequence
  Oligonucleotide primer for the detection of SNP TSC0007376
ataaaaatcaat

SEQ ID NO: 279438 - DNA, 12 bp, Artificial Sequence
  Oligonucleotide primer for the detection of SNP TSC0007376
gtttttaatata

SEQ ID NO: 279439 - DNA, 12 bp, Artificial Sequence
  Oligonucleotide primer for the detection of SNP TSC0007377
ataaacttcttt

SEQ ID NO: 279440 - DNA, 12 bp, Artificial Sequence
  Oligonucleotide primer for the detection of SNP TSC0007377
aataatggttaa

SEQ ID NO: 279441 - DNA, 12 bp, Artificial Sequence
  Oligonucleotide primer for the detection of SNP TSC0007377
aacaataaccaa

SEQ ID NO: 279442 - DNA, 12 bp, Artificial Sequence
  Oligonucleotide primer for the detection of SNP TSC0007377
gtaggttttttt

SEQ ID NO: 279443 - DNA, 12 bp, Artificial Sequence
  Oligonucleotide primer for the detection of SNP TSC0007378
caaaaccaccca

SEQ ID NO: 279444 - DNA, 12 bp, Artificial Sequence
  Oligonucleotide primer for the detection of SNP TSC0007378
caaaaccacccg

SEQ ID NO: 279445 - DNA, 12 bp, Artificial Sequence
  Oligonucleotide primer for the detection of SNP TSC0007378
gattatgagtta

SEQ ID NO: 279446 - DNA, 12 bp, Artificial Sequence
  Oligonucleotide primer for the detection of SNP TSC0007378
aaccataaacca

SEQ ID NO: 279447 - DNA, 12 bp, Artificial Sequence
  Oligonucleotide primer for the detection of SNP TSC0007378
taaggttatttg

SEQ ID NO: 279448 - DNA, 12 bp, Artificial Sequence
  Oligonucleotide primer for the detection of SNP TSC0007378
taaggttattcg

SEQ ID NO: 279449 - DNA, 12 bp, Artificial Sequence
  Oligonucleotide primer for the detection of SNP TSC0007379
tactaaaaatta

SEQ ID NO: 279450 - DNA, 12 bp, Artificial Sequence
  Oligonucleotide primer for the detection of SNP TSC0007379
gaagtttatatt

SEQ ID NO: 279451 - DNA, 12 bp, Artificial Sequence
  Oligonucleotide primer for the detection of SNP TSC0007379
gaagtttatatc

SEQ ID NO: 279452 - DNA, 12 bp, Artificial Sequence
  Oligonucleotide primer for the detection of SNP TSC0007379
aaaacctacacc

SEQ ID NO: 279453 - DNA, 12 bp, Artificial Sequence
  Oligonucleotide primer for the detection of SNP TSC0007379
gtattggggatt

SEQ ID NO: 279454 - DNA, 12 bp, Artificial Sequence
  Oligonucleotide primer for the detection of SNP TSC0007380
aacaccaaataa

SEQ ID NO: 279455 - DNA, 12 bp, Artificial Sequence
  Oligonucleotide primer for the detection of SNP TSC0007380
tatactcctttt

SEQ ID NO: 279456 - DNA, 12 bp, Artificial Sequence
  Oligonucleotide primer for the detection of SNP TSC0007380
ggtattaggtaa

SEQ ID NO: 279457 - DNA, 12 bp, Artificial Sequence
  Oligonucleotide primer for the detection of SNP TSC0007381
atttaaatttca

SEQ ID NO: 279458 - DNA, 12 bp, Artificial Sequence
  Oligonucleotide primer for the detection of SNP TSC0007381
ttttattatagt

SEQ ID NO: 279459 - DNA, 12 bp, Artificial Sequence
  Oligonucleotide primer for the detection of SNP TSC0007381
cctcatcacaat

SEQ ID NO: 279460 - DNA, 12 bp, Artificial Sequence
  Oligonucleotide primer for the detection of SNP TSC0007381
gtttgaatttta

SEQ ID NO: 279461 - DNA, 12 bp, Artificial Sequence
  Oligonucleotide primer for the detection of SNP TSC0007383
aaaataataacc

SEQ ID NO: 279462 - DNA, 12 bp, Artificial Sequence
  Oligonucleotide primer for the detection of SNP TSC0007383
ttagttgatttt

SEQ ID NO: 279463 - DNA, 12 bp, Artificial Sequence
  Oligonucleotide primer for the detection of SNP TSC0007383
ctaattaatttt

SEQ ID NO: 279464 - DNA, 12 bp, Artificial Sequence
  Oligonucleotide primer for the detection of SNP TSC0007383
gaggtaataatt

SEQ ID NO: 279465 - DNA, 12 bp, Artificial Sequence
  Oligonucleotide primer for the detection of SNP TSC0007384
aaaaataacatt

SEQ ID NO: 279466 - DNA, 12 bp, Artificial Sequence
  Oligonucleotide primer for the detection of SNP TSC0007384
aagatttgattt

SEQ ID NO: 279467 - DNA, 12 bp, Artificial Sequence
  Oligonucleotide primer for the detection of SNP TSC0007384
aaaacttaactt

SEQ ID NO: 279468 - DNA, 12 bp, Artificial Sequence
  Oligonucleotide primer for the detection of SNP TSC0007384
gaagatgatatt

SEQ ID NO: 279469 - DNA, 12 bp, Artificial Sequence
  Oligonucleotide primer for the detection of SNP TSC0007385
cattttctatcc

SEQ ID NO: 279470 - DNA, 12 bp, Artificial Sequence
  Oligonucleotide primer for the detection of SNP TSC0007385
ttataggaagag

SEQ ID NO: 279471 - DNA, 12 bp, Artificial Sequence
  Oligonucleotide primer for the detection of SNP TSC0007386
ttttatctttaa

SEQ ID NO: 279472 - DNA, 12 bp, Artificial Sequence
  Oligonucleotide primer for the detection of SNP TSC0007386
gataaaattata

SEQ ID NO: 279473 - DNA, 12 bp, Artificial Sequence
  Oligonucleotide primer for the detection of SNP TSC0007386
aacaaaatcaca

SEQ ID NO: 279474 - DNA, 12 bp, Artificial Sequence
  Oligonucleotide primer for the detection of SNP TSC0007386
ttttgtttttga

SEQ ID NO: 279475 - DNA, 12 bp, Artificial Sequence
  Oligonucleotide primer for the detection of SNP TSC0007387
aaatactaaaaa

SEQ ID NO: 279476 - DNA, 12 bp, Artificial Sequence
  Oligonucleotide primer for the detection of SNP TSC0007387
tttgtggttaga

SEQ ID NO: 279477 - DNA, 12 bp, Artificial Sequence
  Oligonucleotide primer for the detection of SNP TSC0007388
atcacaaaataa

SEQ ID NO: 279478 - DNA, 12 bp, Artificial Sequence
  Oligonucleotide primer for the detection of SNP TSC0007388
ggattgttgtat

SEQ ID NO: 279479 - DNA, 12 bp, Artificial Sequence
  Oligonucleotide primer for the detection of SNP TSC0007388
actactacataa

SEQ ID NO: 279480 - DNA, 12 bp, Artificial Sequence
  Oligonucleotide primer for the detection of SNP TSC0007388
gttatagagtaa

SEQ ID NO: 279481 - DNA, 12 bp, Artificial Sequence
  Oligonucleotide primer for the detection of SNP TSC0007389
tatttttccctt

SEQ ID NO: 279482 - DNA, 12 bp, Artificial Sequence
  Oligonucleotide primer for the detection of SNP TSC0007389
taatattttatg

SEQ ID NO: 279483 - DNA, 12 bp, Artificial Sequence
  Oligonucleotide primer for the detection of SNP TSC0007392
ctttaacataat

SEQ ID NO: 279484 - DNA, 12 bp, Artificial Sequence
  Oligonucleotide primer for the detection of SNP TSC0007393
ccaaattttctt

SEQ ID NO: 279485 - DNA, 12 bp, Artificial Sequence
  Oligonucleotide primer for the detection of SNP TSC0007393
taaaattagtaa

SEQ ID NO: 279486 - DNA, 12 bp, Artificial Sequence
  Oligonucleotide primer for the detection of SNP TSC0007399
tacacaacaccc

SEQ ID NO: 279487 - DNA, 12 bp, Artificial Sequence
  Oligonucleotide primer for the detection of SNP TSC0007399
tacgcaacaccc

SEQ ID NO: 279488 - DNA, 12 bp, Artificial Sequence
  Oligonucleotide primer for the detection of SNP TSC0007399
attaggttttag

SEQ ID NO: 279489 - DNA, 12 bp, Artificial Sequence
  Oligonucleotide primer for the detection of SNP TSC0007403
aaacaataaaat

SEQ ID NO: 279490 - DNA, 12 bp, Artificial Sequence
  Oligonucleotide primer for the detection of SNP TSC0007403
tttttttatgta

SEQ ID NO: 279491 - DNA, 12 bp, Artificial Sequence
  Oligonucleotide primer for the detection of SNP TSC0007404
tggggtgtgtta

SEQ ID NO: 279492 - DNA, 12 bp, Artificial Sequence
  Oligonucleotide primer for the detection of SNP TSC0007404
aaaatataccaa

SEQ ID NO: 279493 - DNA, 12 bp, Artificial Sequence
  Oligonucleotide primer for the detection of SNP TSC0007404
tgtagggaaggg

SEQ ID NO: 279494 - DNA, 12 bp, Artificial Sequence
  Oligonucleotide primer for the detection of SNP TSC0007405
taaaaacaatac

SEQ ID NO: 279495 - DNA, 12 bp, Artificial Sequence
  Oligonucleotide primer for the detection of SNP TSC0007405
atatagttagga

SEQ ID NO: 279496 - DNA, 12 bp, Artificial Sequence
  Oligonucleotide primer for the detection of SNP TSC0007411
cccccataactt

SEQ ID NO: 279497 - DNA, 12 bp, Artificial Sequence
  Oligonucleotide primer for the detection of SNP TSC0007411
tgttttgaagaa

SEQ ID NO: 279498 - DNA, 12 bp, Artificial Sequence
  Oligonucleotide primer for the detection of SNP TSC0007412
caaacaaatcac

SEQ ID NO: 279499 - DNA, 12 bp, Artificial Sequence
  Oligonucleotide primer for the detection of SNP TSC0007412
caaacgaatcac

SEQ ID NO: 279500 - DNA, 12 bp, Artificial Sequence
  Oligonucleotide primer for the detection of SNP TSC0007412
cgaacaaatcac

SEQ ID NO: 279501 - DNA, 12 bp, Artificial Sequence
  Oligonucleotide primer for the detection of SNP TSC0007412
cgaacgaatcac

SEQ ID NO: 279502 - DNA, 12 bp, Artificial Sequence
  Oligonucleotide primer for the detection of SNP TSC0007412
aaggtgggttgt

SEQ ID NO: 279503 - DNA, 12 bp, Artificial Sequence
  Oligonucleotide primer for the detection of SNP TSC0007412
aaggcgggttgt

SEQ ID NO: 279504 - DNA, 12 bp, Artificial Sequence
  Oligonucleotide primer for the detection of SNP TSC0007412
aaggtgggttgc

SEQ ID NO: 279505 - DNA, 12 bp, Artificial Sequence
  Oligonucleotide primer for the detection of SNP TSC0007412
aaggcgggttgc

SEQ ID NO: 279506 - DNA, 12 bp, Artificial Sequence
  Oligonucleotide primer for the detection of SNP TSC0007412
aaaacaaattac

SEQ ID NO: 279507 - DNA, 12 bp, Artificial Sequence
  Oligonucleotide primer for the detection of SNP TSC0007412
aaaacgaattac

SEQ ID NO: 279508 - DNA, 12 bp, Artificial Sequence
  Oligonucleotide primer for the detection of SNP TSC0007412
tgggtggattat

SEQ ID NO: 279509 - DNA, 12 bp, Artificial Sequence
  Oligonucleotide primer for the detection of SNP TSC0007412
cgggtggattat

SEQ ID NO: 279510 - DNA, 12 bp, Artificial Sequence
  Oligonucleotide primer for the detection of SNP TSC0007412
tgggcggattat

SEQ ID NO: 279511 - DNA, 12 bp, Artificial Sequence
  Oligonucleotide primer for the detection of SNP TSC0007412
tgggtggattac

SEQ ID NO: 279512 - DNA, 12 bp, Artificial Sequence
  Oligonucleotide primer for the detection of SNP TSC0007412
cgggcggattat

SEQ ID NO: 279513 - DNA, 12 bp, Artificial Sequence
  Oligonucleotide primer for the detection of SNP TSC0007412
cgggtggattac

SEQ ID NO: 279514 - DNA, 12 bp, Artificial Sequence
  Oligonucleotide primer for the detection of SNP TSC0007412
tgggcggattac

SEQ ID NO: 279515 - DNA, 12 bp, Artificial Sequence
  Oligonucleotide primer for the detection of SNP TSC0007412
cgggcggattac

SEQ ID NO: 279516 - DNA, 12 bp, Artificial Sequence
  Oligonucleotide primer for the detection of SNP TSC0007413
aatataattctc

SEQ ID NO: 279517 - DNA, 12 bp, Artificial Sequence
  Oligonucleotide primer for the detection of SNP TSC0007413
ggggttgttttt

SEQ ID NO: 279518 - DNA, 12 bp, Artificial Sequence
  Oligonucleotide primer for the detection of SNP TSC0007413
ggggttgttttc

SEQ ID NO: 279519 - DNA, 12 bp, Artificial Sequence
  Oligonucleotide primer for the detection of SNP TSC0007413
aaaaaaactact

SEQ ID NO: 279520 - DNA, 12 bp, Artificial Sequence
  Oligonucleotide primer for the detection of SNP TSC0007414
aaaaaaacaacc

SEQ ID NO: 279521 - DNA, 12 bp, Artificial Sequence
  Oligonucleotide primer for the detection of SNP TSC0007414
gaagttatgggg

SEQ ID NO: 279522 - DNA, 12 bp, Artificial Sequence
  Oligonukleotid-Primer
aaaaccataaaa

SEQ ID NO: 279523 - DNA, 12 bp, Artificial Sequence
  Oligonucleotide primer for the detection of SNP TSC0007414
aagggagtagtt

SEQ ID NO: 279524 - DNA, 12 bp, Artificial Sequence
  Oligonucleotide primer for the detection of SNP TSC0007425
taaacataatca

SEQ ID NO: 279525 - DNA, 12 bp, Artificial Sequence
  Oligonucleotide primer for the detection of SNP TSC0007425
atcattttaaat

SEQ ID NO: 279526 - DNA, 12 bp, Artificial Sequence
  Oligonucleotide primer for the detection of SNP TSC0007425
tggatataatta

SEQ ID NO: 279527 - DNA, 12 bp, Artificial Sequence
  Oligonucleotide primer for the detection of SNP TSC0007450
tataaataaaac

SEQ ID NO: 279528 - DNA, 12 bp, Artificial Sequence
  Oligonucleotide primer for the detection of SNP TSC0007450
gaatatgtatag

SEQ ID NO: 279529 - DNA, 12 bp, Artificial Sequence
  Oligonucleotide primer for the detection of SNP TSC0007450
aaatatatacaa

SEQ ID NO: 279530 - DNA, 12 bp, Artificial Sequence
  Oligonucleotide primer for the detection of SNP TSC0007450
tgtgggtggggt

SEQ ID NO: 279531 - DNA, 12 bp, Artificial Sequence
  Oligonucleotide primer for the detection of SNP TSC0007454
aataatttaaaa

SEQ ID NO: 279532 - DNA, 12 bp, Artificial Sequence
  Oligonucleotide primer for the detection of SNP TSC0007454
aataacctaaaa

SEQ ID NO: 279533 - DNA, 12 bp, Artificial Sequence
  Oligonucleotide primer for the detection of SNP TSC0007454
gaaaggggatag

SEQ ID NO: 279534 - DNA, 12 bp, Artificial Sequence
  Oligonucleotide primer for the detection of SNP TSC0007456
tatttatcttca

SEQ ID NO: 279535 - DNA, 12 bp, Artificial Sequence
  Oligonucleotide primer for the detection of SNP TSC0007456
ttcctctcctaa

SEQ ID NO: 279536 - DNA, 12 bp, Artificial Sequence
  Oligonucleotide primer for the detection of SNP TSC0007464
aaaaccaaacct

SEQ ID NO: 279537 - DNA, 12 bp, Artificial Sequence
  Oligonucleotide primer for the detection of SNP TSC0007464
taatagaagtaa

SEQ ID NO: 279538 - DNA, 12 bp, Artificial Sequence
  Oligonucleotide primer for the detection of SNP TSC0007466
acatacccctta

SEQ ID NO: 279539 - DNA, 12 bp, Artificial Sequence
  Oligonucleotide primer for the detection of SNP TSC0007466
tatgagaatatt

SEQ ID NO: 279540 - DNA, 12 bp, Artificial Sequence
  Oligonucleotide primer for the detection of SNP TSC0007466
aacataaaaaca

SEQ ID NO: 279541 - DNA, 12 bp, Artificial Sequence
  Oligonucleotide primer for the detection of SNP TSC0007466
gttttttgtttt

SEQ ID NO: 279542 - DNA, 12 bp, Artificial Sequence
  Oligonucleotide primer for the detection of SNP TSC0007468
aaaaacaacacc

SEQ ID NO: 279543 - DNA, 12 bp, Artificial Sequence
  Oligonucleotide primer for the detection of SNP TSC0007468
tgtttttgttta

SEQ ID NO: 279544 - DNA, 12 bp, Artificial Sequence
  Oligonucleotide primer for the detection of SNP TSC0007476
accaaataacca

SEQ ID NO: 279545 - DNA, 12 bp, Artificial Sequence
  Oligonucleotide primer for the detection of SNP TSC0007476
agttgtatttag

SEQ ID NO: 279546 - DNA, 12 bp, Artificial Sequence
  Oligonucleotide primer for the detection of SNP TSC0007476
aactacatctaa

SEQ ID NO: 279547 - DNA, 12 bp, Artificial Sequence
  Oligonucleotide primer for the detection of SNP TSC0007476
attagatggtta

SEQ ID NO: 279548 - DNA, 12 bp, Artificial Sequence
  Oligonucleotide primer for the detection of SNP TSC0007479
tcttataataat

SEQ ID NO: 279549 - DNA, 12 bp, Artificial Sequence
  Oligonucleotide primer for the detection of SNP TSC0007479
ggggtatttata

SEQ ID NO: 279550 - DNA, 12 bp, Artificial Sequence
  Oligonucleotide primer for the detection of SNP TSC0007486
ttaataaacaat

SEQ ID NO: 279551 - DNA, 12 bp, Artificial Sequence
  Oligonucleotide primer for the detection of SNP TSC0007486
ttttaattaaat

SEQ ID NO: 279552 - DNA, 12 bp, Artificial Sequence
  Oligonucleotide primer for the detection of SNP TSC0007486
accccaattaaa

SEQ ID NO: 279553 - DNA, 12 bp, Artificial Sequence
  Oligonucleotide primer for the detection of SNP TSC0007486
ttaatgggtagt

SEQ ID NO: 279554 - DNA, 12 bp, Artificial Sequence
  Oligonucleotide primer for the detection of SNP TSC0007487
ccctttaaaaat

SEQ ID NO: 279555 - DNA, 12 bp, Artificial Sequence
  Oligonucleotide primer for the detection of SNP TSC0007487
tttattttattg

SEQ ID NO: 279556 - DNA, 12 bp, Artificial Sequence
  Oligonucleotide primer for the detection of SNP TSC0007488
ttattcacaacc

SEQ ID NO: 279557 - DNA, 12 bp, Artificial Sequence
  Oligonucleotide primer for the detection of SNP TSC0007488
gtatttttaaag

SEQ ID NO: 279558 - DNA, 12 bp, Artificial Sequence
  Oligonucleotide primer for the detection of SNP TSC0007489
cctacaaacaac

SEQ ID NO: 279559 - DNA, 12 bp, Artificial Sequence
  Oligonucleotide primer for the detection of SNP TSC0007501
gtaaagagtttt

SEQ ID NO: 279560 - DNA, 12 bp, Artificial Sequence
  Oligonucleotide primer for the detection of SNP TSC0007502
aaatatttacac

SEQ ID NO: 279561 - DNA, 12 bp, Artificial Sequence
  Oligonucleotide primer for the detection of SNP TSC0007502
aattattgttag

SEQ ID NO: 279562 - DNA, 12 bp, Artificial Sequence
  Oligonucleotide primer for the detection of SNP TSC0007511
aacaaacattat

SEQ ID NO: 279563 - DNA, 12 bp, Artificial Sequence
  Oligonucleotide primer for the detection of SNP TSC0007511
aacaaacgttat

SEQ ID NO: 279564 - DNA, 12 bp, Artificial Sequence
  Oligonucleotide primer for the detection of SNP TSC0007511
ttaattgatgtg

SEQ ID NO: 279565 - DNA, 12 bp, Artificial Sequence
  Oligonucleotide primer for the detection of SNP TSC0007512
cataaaccacat

SEQ ID NO: 279566 - DNA, 12 bp, Artificial Sequence
  Oligonucleotide primer for the detection of SNP TSC0007512
ttaagtatgtga

SEQ ID NO: 279567 - DNA, 12 bp, Artificial Sequence
  Oligonucleotide primer for the detection of SNP TSC0007512
ttaaacatataa

SEQ ID NO: 279568 - DNA, 12 bp, Artificial Sequence
  Oligonucleotide primer for the detection of SNP TSC0007512
tatgagttatat

SEQ ID NO: 279569 - DNA, 12 bp, Artificial Sequence
  Oligonucleotide primer for the detection of SNP TSC0007513
tacctaaactca

SEQ ID NO: 279570 - DNA, 12 bp, Artificial Sequence
  Oligonucleotide primer for the detection of SNP TSC0007513
agattaaggttt

SEQ ID NO: 279571 - DNA, 12 bp, Artificial Sequence
  Oligonucleotide primer for the detection of SNP TSC0007513
tatttaggttta

SEQ ID NO: 279572 - DNA, 12 bp, Artificial Sequence
  Oligonucleotide primer for the detection of SNP TSC0007519
taccttcaattt

SEQ ID NO: 279573 - DNA, 12 bp, Artificial Sequence
  Oligonucleotide primer for the detection of SNP TSC0007519
gggtattaggtg

SEQ ID NO: 279574 - DNA, 12 bp, Artificial Sequence
  Oligonucleotide primer for the detection of SNP TSC0007521
tatatcaaaaca

SEQ ID NO: 279575 - DNA, 12 bp, Artificial Sequence
  Oligonucleotide primer for the detection of SNP TSC0007521
tgttaggttaat

SEQ ID NO: 279576 - DNA, 12 bp, Artificial Sequence
  Oligonucleotide primer for the detection of SNP TSC0007521
cgttaggttaat

SEQ ID NO: 279577 - DNA, 12 bp, Artificial Sequence
  Oligonucleotide primer for the detection of SNP TSC0007521
caccaaatcaac

SEQ ID NO: 279578 - DNA, 12 bp, Artificial Sequence
  Oligonucleotide primer for the detection of SNP TSC0007521
cgccaaatcaac

SEQ ID NO: 279579 - DNA, 12 bp, Artificial Sequence
  Oligonucleotide primer for the detection of SNP TSC0007521
tgtgttagaata

SEQ ID NO: 279580 - DNA, 12 bp, Artificial Sequence
  Oligonucleotide primer for the detection of SNP TSC0007522
taaaatacattc

SEQ ID NO: 279581 - DNA, 12 bp, Artificial Sequence
  Oligonucleotide primer for the detection of SNP TSC0007522
tttaattttgaa

SEQ ID NO: 279582 - DNA, 12 bp, Artificial Sequence
  Oligonucleotide primer for the detection of SNP TSC0007523
ccattcataaaa

SEQ ID NO: 279583 - DNA, 12 bp, Artificial Sequence
  Oligonucleotide primer for the detection of SNP TSC0007523
ccgttcataaaa

SEQ ID NO: 279584 - DNA, 12 bp, Artificial Sequence
  Oligonucleotide primer for the detection of SNP TSC0007523
tatgagtatgga

SEQ ID NO: 279585 - DNA, 12 bp, Artificial Sequence
  Oligonucleotide primer for the detection of SNP TSC0007523
ataaacataaaa

SEQ ID NO: 279586 - DNA, 12 bp, Artificial Sequence
  Oligonucleotide primer for the detection of SNP TSC0007523
ttgtttatgaag

SEQ ID NO: 279587 - DNA, 12 bp, Artificial Sequence
  Oligonucleotide primer for the detection of SNP TSC0007523
tcgtttatgaag

SEQ ID NO: 279588 - DNA, 12 bp, Artificial Sequence
  Oligonucleotide primer for the detection of SNP TSC0007524
aagagatgtaag

SEQ ID NO: 279589 - DNA, 12 bp, Artificial Sequence
  Oligonucleotide primer for the detection of SNP TSC0007524
gtaagattaaat

SEQ ID NO: 279590 - DNA, 12 bp, Artificial Sequence
  Oligonucleotide primer for the detection of SNP TSC0007524
gtaagattaaac

SEQ ID NO: 279591 - DNA, 12 bp, Artificial Sequence
  Oligonucleotide primer for the detection of SNP TSC0007558
tatcaaacacta

SEQ ID NO: 279592 - DNA, 12 bp, Artificial Sequence
  Oligonucleotide primer for the detection of SNP TSC0007558
ctacctctctta

SEQ ID NO: 279593 - DNA, 12 bp, Artificial Sequence
  Oligonucleotide primer for the detection of SNP TSC0007558
ttgttagatatt

SEQ ID NO: 279594 - DNA, 12 bp, Artificial Sequence
  Oligonucleotide primer for the detection of SNP TSC0007559
tcctactataac

SEQ ID NO: 279595 - DNA, 12 bp, Artificial Sequence
  Oligonucleotide primer for the detection of SNP TSC0007559
ttaagagaggta

SEQ ID NO: 279596 - DNA, 12 bp, Artificial Sequence
  Oligonucleotide primer for the detection of SNP TSC0007579
tcataaaaaact

SEQ ID NO: 279597 - DNA, 12 bp, Artificial Sequence
  Oligonucleotide primer for the detection of SNP TSC0007579
aagatgaggttg

SEQ ID NO: 279598 - DNA, 12 bp, Artificial Sequence
  Oligonucleotide primer for the detection of SNP TSC0007579
ttatggaaagtt

SEQ ID NO: 279599 - DNA, 12 bp, Artificial Sequence
  Oligonucleotide primer for the detection of SNP TSC0007594
ctcaaaccccac

SEQ ID NO: 279600 - DNA, 12 bp, Artificial Sequence
  Oligonucleotide primer for the detection of SNP TSC0007594
cctttaaactca

SEQ ID NO: 279601 - DNA, 12 bp, Artificial Sequence
  Oligonucleotide primer for the detection of SNP TSC0007594
tttaagttttat

SEQ ID NO: 279602 - DNA, 12 bp, Artificial Sequence
  Oligonucleotide primer for the detection of SNP TSC0007594
tttaagttttac

SEQ ID NO: 279603 - DNA, 12 bp, Artificial Sequence
  Oligonucleotide primer for the detection of SNP TSC0007602
aaaattctatct

SEQ ID NO: 279604 - DNA, 12 bp, Artificial Sequence
  Oligonucleotide primer for the detection of SNP TSC0007602
gggggaatagtg

SEQ ID NO: 279605 - DNA, 12 bp, Artificial Sequence
  Oligonucleotide primer for the detection of SNP TSC0007602
gggggaatagcg

SEQ ID NO: 279606 - DNA, 12 bp, Artificial Sequence
  Oligonucleotide primer for the detection of SNP TSC0007602
aaaaaaacaaca

SEQ ID NO: 279607 - DNA, 12 bp, Artificial Sequence
  Oligonucleotide primer for the detection of SNP TSC0007602
aaaaaaacaacg

SEQ ID NO: 279608 - DNA, 12 bp, Artificial Sequence
  Oligonucleotide primer for the detection of SNP TSC0007602
gagattttgttt

SEQ ID NO: 279609 - DNA, 12 bp, Artificial Sequence
  Oligonucleotide primer for the detection of SNP TSC0007609
caatcataaatc

SEQ ID NO: 279610 - DNA, 12 bp, Artificial Sequence
  Oligonucleotide primer for the detection of SNP TSC0007609
attgttaaatgg

SEQ ID NO: 279611 - DNA, 12 bp, Artificial Sequence
  Oligonucleotide primer for the detection of SNP TSC0007610
ttctctaaaaca

SEQ ID NO: 279612 - DNA, 12 bp, Artificial Sequence
  Oligonucleotide primer for the detection of SNP TSC0007610
attaaattttgt

SEQ ID NO: 279613 - DNA, 12 bp, Artificial Sequence
  Oligonucleotide primer for the detection of SNP TSC0007610
attaaatcctat

SEQ ID NO: 279614 - DNA, 12 bp, Artificial Sequence
  Oligonucleotide primer for the detection of SNP TSC0007610
ttttttggaata

SEQ ID NO: 279615 - DNA, 12 bp, Artificial Sequence
  Oligonucleotide primer for the detection of SNP TSC0007612
aaataacaaata

SEQ ID NO: 279616 - DNA, 12 bp, Artificial Sequence
  Oligonucleotide primer for the detection of SNP TSC0007612
aaataacgaata

SEQ ID NO: 279617 - DNA, 12 bp, Artificial Sequence
  Oligonucleotide primer for the detection of SNP TSC0007612
tgttttttgtaa

SEQ ID NO: 279618 - DNA, 12 bp, Artificial Sequence
  Oligonucleotide primer for the detection of SNP TSC0007612
tatcttctacaa

SEQ ID NO: 279619 - DNA, 12 bp, Artificial Sequence
  Oligonucleotide primer for the detection of SNP TSC0007612
agatggtgaatg

SEQ ID NO: 279620 - DNA, 12 bp, Artificial Sequence
  Oligonucleotide primer for the detection of SNP TSC0007612
agatggcgaatg

SEQ ID NO: 279621 - DNA, 12 bp, Artificial Sequence
  Oligonucleotide primer for the detection of SNP TSC0007613
ttataattaacc

SEQ ID NO: 279622 - DNA, 12 bp, Artificial Sequence
  Oligonucleotide primer for the detection of SNP TSC0007613
tagtatgattgg

SEQ ID NO: 279623 - DNA, 12 bp, Artificial Sequence
  Oligonucleotide primer for the detection of SNP TSC0007628
ttaacctctaat

SEQ ID NO: 279624 - DNA, 12 bp, Artificial Sequence
  Oligonucleotide primer for the detection of SNP TSC0007628
ttataattttag

SEQ ID NO: 279625 - DNA, 12 bp, Artificial Sequence
  Oligonucleotide primer for the detection of SNP TSC0007628
ccacaatcccaa

SEQ ID NO: 279626 - DNA, 12 bp, Artificial Sequence
  Oligonucleotide primer for the detection of SNP TSC0007628
ttggtttttgat

SEQ ID NO: 279627 - DNA, 12 bp, Artificial Sequence
  Oligonukleotid-Primer
attttccacctt

SEQ ID NO: 279628 - DNA, 12 bp, Artificial Sequence
  Oligonucleotide primer for the detection of SNP TSC0007640
gattttagaata

SEQ ID NO: 279629 - DNA, 12 bp, Artificial Sequence
  Oligonucleotide primer for the detection of SNP TSC0007640
aacctcaaaata

SEQ ID NO: 279630 - DNA, 12 bp, Artificial Sequence
  Oligonucleotide primer for the detection of SNP TSC0007640
attttttatttt

SEQ ID NO: 279631 - DNA, 12 bp, Artificial Sequence
  Oligonucleotide primer for the detection of SNP TSC0007641
tcaaatctcttc

SEQ ID NO: 279632 - DNA, 12 bp, Artificial Sequence
  Oligonucleotide primer for the detection of SNP TSC0007641
aagtaattaaat

SEQ ID NO: 279633 - DNA, 12 bp, Artificial Sequence
  Oligonucleotide primer for the detection of SNP TSC0007641
aataattaaaca

SEQ ID NO: 279634 - DNA, 12 bp, Artificial Sequence
  Oligonucleotide primer for the detection of SNP TSC0007642
caccttttctac

SEQ ID NO: 279635 - DNA, 12 bp, Artificial Sequence
  Oligonucleotide primer for the detection of SNP TSC0007642
agaatgaggttt

SEQ ID NO: 279636 - DNA, 12 bp, Artificial Sequence
  Oligonucleotide primer for the detection of SNP TSC0007642
aaaataaaactt

SEQ ID NO: 279637 - DNA, 12 bp, Artificial Sequence
  Oligonucleotide primer for the detection of SNP TSC0007642
ttttttttgttt

SEQ ID NO: 279638 - DNA, 12 bp, Artificial Sequence
  Oligonucleotide primer for the detection of SNP TSC0007650
cattaccattta

SEQ ID NO: 279639 - DNA, 12 bp, Artificial Sequence
  Oligonucleotide primer for the detection of SNP TSC0007650
agttttagttat

SEQ ID NO: 279640 - DNA, 12 bp, Artificial Sequence
  Oligonucleotide primer for the detection of SNP TSC0007650
aaccttaactat

SEQ ID NO: 279641 - DNA, 12 bp, Artificial Sequence
  Oligonucleotide primer for the detection of SNP TSC0007650
tattgttatttg

SEQ ID NO: 279642 - DNA, 12 bp, Artificial Sequence
  Oligonucleotide primer for the detection of SNP TSC0007654
aacttaattttt

SEQ ID NO: 279643 - DNA, 12 bp, Artificial Sequence
  Oligonucleotide primer for the detection of SNP TSC0007654
tatttagatgta

SEQ ID NO: 279644 - DNA, 12 bp, Artificial Sequence
  Oligonucleotide primer for the detection of SNP TSC0007654
cacctaaatata

SEQ ID NO: 279645 - DNA, 12 bp, Artificial Sequence
  Oligonucleotide primer for the detection of SNP TSC0007654
agtttaattttt

SEQ ID NO: 279646 - DNA, 12 bp, Artificial Sequence
  Oligonucleotide primer for the detection of SNP TSC0007655
acacaactaact

SEQ ID NO: 279647 - DNA, 12 bp, Artificial Sequence
  Oligonucleotide primer for the detection of SNP TSC0007655
aggtaggaatga

SEQ ID NO: 279648 - DNA, 12 bp, Artificial Sequence
  Oligonucleotide primer for the detection of SNP TSC0007662
atatatatatca

SEQ ID NO: 279649 - DNA, 12 bp, Artificial Sequence
  Oligonucleotide primer for the detection of SNP TSC0007662
aaaatgttaggt

SEQ ID NO: 279650 - DNA, 12 bp, Artificial Sequence
  Oligonucleotide primer for the detection of SNP TSC0007662
atatatgtgtta

SEQ ID NO: 279651 - DNA, 12 bp, Artificial Sequence
  Oligonucleotide primer for the detection of SNP TSC0007666
tttatctaaaaa

SEQ ID NO: 279652 - DNA, 12 bp, Artificial Sequence
  Oligonucleotide primer for the detection of SNP TSC0007666
tgaagaagaaat

SEQ ID NO: 279653 - DNA, 12 bp, Artificial Sequence
  Oligonucleotide primer for the detection of SNP TSC0007666
tttgtttgggaa

SEQ ID NO: 279654 - DNA, 12 bp, Artificial Sequence
  Oligonucleotide primer for the detection of SNP TSC0007667
aaaatccttctt

SEQ ID NO: 279655 - DNA, 12 bp, Artificial Sequence
  Oligonucleotide primer for the detection of SNP TSC0007667
tatgataagtaa

SEQ ID NO: 279656 - DNA, 12 bp, Artificial Sequence
  Oligonucleotide primer for the detection of SNP TSC0007667
gaggtttttttt

SEQ ID NO: 279657 - DNA, 12 bp, Artificial Sequence
  Oligonucleotide primer for the detection of SNP TSC0007668
aattacacaaac

SEQ ID NO: 279658 - DNA, 12 bp, Artificial Sequence
  Oligonucleotide primer for the detection of SNP TSC0007668
tttgatttttag

SEQ ID NO: 279659 - DNA, 12 bp, Artificial Sequence
  Oligonucleotide primer for the detection of SNP TSC0007669
aattaaactttt

SEQ ID NO: 279660 - DNA, 12 bp, Artificial Sequence
  Oligonucleotide primer for the detection of SNP TSC0007669
tttagatttata

SEQ ID NO: 279661 - DNA, 12 bp, Artificial Sequence
  Oligonucleotide primer for the detection of SNP TSC0007676
aaatacattaaa

SEQ ID NO: 279662 - DNA, 12 bp, Artificial Sequence
  Oligonucleotide primer for the detection of SNP TSC0007676
ttaatattaggt

SEQ ID NO: 279663 - DNA, 12 bp, Artificial Sequence
  Oligonucleotide primer for the detection of SNP TSC0007676
ttcaataccaaa

SEQ ID NO: 279664 - DNA, 12 bp, Artificial Sequence
  Oligonucleotide primer for the detection of SNP TSC0007676
gagtatattaag

SEQ ID NO: 279665 - DNA, 12 bp, Artificial Sequence
  Oligonucleotide primer for the detection of SNP TSC0007678
attctataaaca

SEQ ID NO: 279666 - DNA, 12 bp, Artificial Sequence
  Oligonucleotide primer for the detection of SNP TSC0007678
ttttgatgatgt

SEQ ID NO: 279667 - DNA, 12 bp, Artificial Sequence
  Oligonucleotide primer for the detection of SNP TSC0007678
tttaataatata

SEQ ID NO: 279668 - DNA, 12 bp, Artificial Sequence
  Oligonucleotide primer for the detection of SNP TSC0007678
ttttgtaggtat

SEQ ID NO: 279669 - DNA, 12 bp, Artificial Sequence
  Oligonucleotide primer for the detection of SNP TSC0007680
cttaatttatct

SEQ ID NO: 279670 - DNA, 12 bp, Artificial Sequence
  Oligonucleotide primer for the detection of SNP TSC0007680
tgataaatattg

SEQ ID NO: 279671 - DNA, 12 bp, Artificial Sequence
  Oligonucleotide primer for the detection of SNP TSC0007684
tttttcttttac

SEQ ID NO: 279672 - DNA, 12 bp, Artificial Sequence
  Oligonucleotide primer for the detection of SNP TSC0007684
aggttgttaaaa

SEQ ID NO: 279673 - DNA, 12 bp, Artificial Sequence
  Oligonucleotide primer for the detection of SNP TSC0007685
ccctttttactc

SEQ ID NO: 279674 - DNA, 12 bp, Artificial Sequence
  Oligonucleotide primer for the detection of SNP TSC0007685
gtttgaattata

SEQ ID NO: 279675 - DNA, 12 bp, Artificial Sequence
  Oligonucleotide primer for the detection of SNP TSC0007687
taaaaactatac

SEQ ID NO: 279676 - DNA, 12 bp, Artificial Sequence
  Oligonucleotide primer for the detection of SNP TSC0007687
gttggtgtggag

SEQ ID NO: 279677 - DNA, 12 bp, Artificial Sequence
  Oligonucleotide primer for the detection of SNP TSC0007687
gttggcgtggag

SEQ ID NO: 279678 - DNA, 12 bp, Artificial Sequence
  Oligonucleotide primer for the detection of SNP TSC0007689
aacaaataaatc

SEQ ID NO: 279679 - DNA, 12 bp, Artificial Sequence
  Oligonucleotide primer for the detection of SNP TSC0007689
aacgaataaatc

SEQ ID NO: 279680 - DNA, 12 bp, Artificial Sequence
  Oligonucleotide primer for the detection of SNP TSC0007689
ttaaatttttat

SEQ ID NO: 279681 - DNA, 12 bp, Artificial Sequence
  Oligonucleotide primer for the detection of SNP TSC0007689
aaactttcataa

SEQ ID NO: 279682 - DNA, 12 bp, Artificial Sequence
  Oligonucleotide primer for the detection of SNP TSC0007689
ataaattttttt

SEQ ID NO: 279683 - DNA, 12 bp, Artificial Sequence
  Oligonucleotide primer for the detection of SNP TSC0007691
tgtgtattatta

SEQ ID NO: 279684 - DNA, 12 bp, Artificial Sequence
  Oligonucleotide primer for the detection of SNP TSC0007691
tatacaccacca

SEQ ID NO: 279685 - DNA, 12 bp, Artificial Sequence
  Oligonucleotide primer for the detection of SNP TSC0007691
aaaaaaattgtt

SEQ ID NO: 279686 - DNA, 12 bp, Artificial Sequence
  Oligonucleotide primer for the detection of SNP TSC0007695
ctaccacataac

SEQ ID NO: 279687 - DNA, 12 bp, Artificial Sequence
  Oligonucleotide primer for the detection of SNP TSC0007695
gaaggattgtgg

SEQ ID NO: 279688 - DNA, 12 bp, Artificial Sequence
  Oligonucleotide primer for the detection of SNP TSC0007699
atctcttttcat

SEQ ID NO: 279689 - DNA, 12 bp, Artificial Sequence
  Oligonucleotide primer for the detection of SNP TSC0007699
ttttttttagta

SEQ ID NO: 279690 - DNA, 12 bp, Artificial Sequence
  Oligonucleotide primer for the detection of SNP TSC0007708
caaaaaaaatac

SEQ ID NO: 279691 - DNA, 12 bp, Artificial Sequence
  Oligonucleotide primer for the detection of SNP TSC0007708
tttatgtgttag

SEQ ID NO: 279692 - DNA, 12 bp, Artificial Sequence
  Oligonucleotide primer for the detection of SNP TSC0007711
acattattttat

SEQ ID NO: 279693 - DNA, 12 bp, Artificial Sequence
  Oligonucleotide primer for the detection of SNP TSC0007711
acgttattttat

SEQ ID NO: 279694 - DNA, 12 bp, Artificial Sequence
  Oligonucleotide primer for the detection of SNP TSC0007711
aagtataaatga

SEQ ID NO: 279695 - DNA, 12 bp, Artificial Sequence
  Oligonucleotide primer for the detection of SNP TSC0007711
aaacacaaataa

SEQ ID NO: 279696 - DNA, 12 bp, Artificial Sequence
  Oligonucleotide primer for the detection of SNP TSC0007711
atgttgttttgt

SEQ ID NO: 279697 - DNA, 12 bp, Artificial Sequence
  Oligonucleotide primer for the detection of SNP TSC0007711
acgttgttttgt

SEQ ID NO: 279698 - DNA, 12 bp, Artificial Sequence
  Oligonucleotide primer for the detection of SNP TSC0007718
acatcctactat

SEQ ID NO: 279699 - DNA, 12 bp, Artificial Sequence
  Oligonucleotide primer for the detection of SNP TSC0007718
acgtcctactat

SEQ ID NO: 279700 - DNA, 12 bp, Artificial Sequence
  Oligonucleotide primer for the detection of SNP TSC0007718
ttaggaattggg

SEQ ID NO: 279701 - DNA, 12 bp, Artificial Sequence
  Oligonucleotide primer for the detection of SNP TSC0007718
ttaaaaactaaa

SEQ ID NO: 279702 - DNA, 12 bp, Artificial Sequence
  Oligonucleotide primer for the detection of SNP TSC0007718
atgttttgttat

SEQ ID NO: 279703 - DNA, 12 bp, Artificial Sequence
  Oligonucleotide primer for the detection of SNP TSC0007718
acgttttgttat

SEQ ID NO: 279704 - DNA, 12 bp, Artificial Sequence
  Oligonucleotide primer for the detection of SNP TSC0007720
acccctcatatt

SEQ ID NO: 279705 - DNA, 12 bp, Artificial Sequence
  Oligonucleotide primer for the detection of SNP TSC0007720
agaggtttttaa

SEQ ID NO: 279706 - DNA, 12 bp, Artificial Sequence
  Oligonucleotide primer for the detection of SNP TSC0007722
actcaaaaatcc

SEQ ID NO: 279707 - DNA, 12 bp, Artificial Sequence
  Oligonucleotide primer for the detection of SNP TSC0007722
ggagattttgga

SEQ ID NO: 279708 - DNA, 12 bp, Artificial Sequence
  Oligonucleotide primer for the detection of SNP TSC0007726
tataataaatta

SEQ ID NO: 279709 - DNA, 12 bp, Artificial Sequence
  Oligonucleotide primer for the detection of SNP TSC0007726
tctttctttact

SEQ ID NO: 279710 - DNA, 12 bp, Artificial Sequence
  Oligonucleotide primer for the detection of SNP TSC0007726
tgtaataaattg

SEQ ID NO: 279711 - DNA, 12 bp, Artificial Sequence
  Oligonucleotide primer for the detection of SNP TSC0007742
aaaaatatcatt

SEQ ID NO: 279712 - DNA, 12 bp, Artificial Sequence
  Oligonucleotide primer for the detection of SNP TSC0007742
agtaaaaataaa

SEQ ID NO: 279713 - DNA, 12 bp, Artificial Sequence
  Oligonucleotide primer for the detection of SNP TSC0007742
gaaaatattatt

SEQ ID NO: 279714 - DNA, 12 bp, Artificial Sequence
  Oligonucleotide primer for the detection of SNP TSC0007744
caacaattatct

SEQ ID NO: 279715 - DNA, 12 bp, Artificial Sequence
  Oligonucleotide primer for the detection of SNP TSC0007749
ttctattataat

SEQ ID NO: 279716 - DNA, 12 bp, Artificial Sequence
  Oligonucleotide primer for the detection of SNP TSC0007749
tgtttggtttta

SEQ ID NO: 279717 - DNA, 12 bp, Artificial Sequence
  Oligonucleotide primer for the detection of SNP TSC0007751
ttcatattatac

SEQ ID NO: 279718 - DNA, 12 bp, Artificial Sequence
  Oligonucleotide primer for the detection of SNP TSC0007752
ggttttttagta

SEQ ID NO: 279719 - DNA, 12 bp, Artificial Sequence
  Oligonucleotide primer for the detection of SNP TSC0007752
aactctctaaca

SEQ ID NO: 279720 - DNA, 12 bp, Artificial Sequence
  Oligonucleotide primer for the detection of SNP TSC0007752
tttttaagagat

SEQ ID NO: 279721 - DNA, 12 bp, Artificial Sequence
  Oligonucleotide primer for the detection of SNP TSC0007753
aaatccaaacca

SEQ ID NO: 279722 - DNA, 12 bp, Artificial Sequence
  Oligonucleotide primer for the detection of SNP TSC0007753
taagttattttt

SEQ ID NO: 279723 - DNA, 12 bp, Artificial Sequence
  Oligonucleotide primer for the detection of SNP TSC0007753
aaattacttcca

SEQ ID NO: 279724 - DNA, 12 bp, Artificial Sequence
  Oligonucleotide primer for the detection of SNP TSC0007753
aagtttaaatta

SEQ ID NO: 279725 - DNA, 12 bp, Artificial Sequence
  Oligonucleotide primer for the detection of SNP TSC0007758
atatataatata

SEQ ID NO: 279726 - DNA, 12 bp, Artificial Sequence
  Oligonucleotide primer for the detection of SNP TSC0007758
aagtaaataatg

SEQ ID NO: 279727 - DNA, 12 bp, Artificial Sequence
  Oligonucleotide primer for the detection of SNP TSC0007758
aaacaaataata

SEQ ID NO: 279728 - DNA, 12 bp, Artificial Sequence
  Oligonukleotid-Primer
agtatatagtgt

SEQ ID NO: 279729 - DNA, 12 bp, Artificial Sequence
  Oligonucleotide primer for the detection of SNP TSC0007765
atataaaatctt

SEQ ID NO: 279730 - DNA, 12 bp, Artificial Sequence
  Oligonucleotide primer for the detection of SNP TSC0007765
aaattttgtgta

SEQ ID NO: 279731 - DNA, 12 bp, Artificial Sequence
  Oligonucleotide primer for the detection of SNP TSC0007767
aaactataactt

SEQ ID NO: 279732 - DNA, 12 bp, Artificial Sequence
  Oligonukleotid-Primer
gtttaattggta

SEQ ID NO: 279733 - DNA, 12 bp, Artificial Sequence
  Oligonucleotide primer for the detection of SNP TSC0007768
atcttttaattc

SEQ ID NO: 279734 - DNA, 12 bp, Artificial Sequence
  Oligonucleotide primer for the detection of SNP TSC0007768
tggtgtttgata

SEQ ID NO: 279735 - DNA, 12 bp, Artificial Sequence
  Oligonucleotide primer for the detection of SNP TSC0007772
cttattcctcac

SEQ ID NO: 279736 - DNA, 12 bp, Artificial Sequence
  Oligonukleotid-Primer
ttgtatttggtt

SEQ ID NO: 279737 - DNA, 12 bp, Artificial Sequence
  Oligonucleotide primer for the detection of SNP TSC0007772
tcgtatttggtt

SEQ ID NO: 279738 - DNA, 12 bp, Artificial Sequence
  Oligonucleotide primer for the detection of SNP TSC0007772
tatttaattaaa

SEQ ID NO: 279739 - DNA, 12 bp, Artificial Sequence
  Oligonucleotide primer for the detection of SNP TSC0007772
tttgttttttat

SEQ ID NO: 279740 - DNA, 12 bp, Artificial Sequence
  Oligonucleotide primer for the detection of SNP TSC0007773
tacaattatatt

SEQ ID NO: 279741 - DNA, 12 bp, Artificial Sequence
  Oligonucleotide primer for the detection of SNP TSC0007773
gtaatgtgaatg

SEQ ID NO: 279742 - DNA, 12 bp, Artificial Sequence
  Oligonucleotide primer for the detection of SNP TSC0007779
ctatcataatac

SEQ ID NO: 279743 - DNA, 12 bp, Artificial Sequence
  Oligonucleotide primer for the detection of SNP TSC0007779
ttttttagggta

SEQ ID NO: 279744 - DNA, 12 bp, Artificial Sequence
  Oligonucleotide primer for the detection of SNP TSC0007781
aataaattcact

SEQ ID NO: 279745 - DNA, 12 bp, Artificial Sequence
  Oligonucleotide primer for the detection of SNP TSC0007781
aaaatttaaatg

SEQ ID NO: 279746 - DNA, 12 bp, Artificial Sequence
  Oligonucleotide primer for the detection of SNP TSC0007782
tactccaaatca

SEQ ID NO: 279747 - DNA, 12 bp, Artificial Sequence
  Oligonucleotide primer for the detection of SNP TSC0007782
ttttttattggt

SEQ ID NO: 279748 - DNA, 12 bp, Artificial Sequence
  Oligonucleotide primer for the detection of SNP TSC0007782
cttcttactaac

SEQ ID NO: 279749 - DNA, 12 bp, Artificial Sequence
  Oligonucleotide primer for the detection of SNP TSC0007782
tgttttaagtta

SEQ ID NO: 279750 - DNA, 12 bp, Artificial Sequence
  Oligonucleotide primer for the detection of SNP TSC0007783
ataataatatat

SEQ ID NO: 279751 - DNA, 12 bp, Artificial Sequence
  Oligonucleotide primer for the detection of SNP TSC0007783
tatggattatga

SEQ ID NO: 279752 - DNA, 12 bp, Artificial Sequence
  Oligonucleotide primer for the detection of SNP TSC0007783
tacggattatga

SEQ ID NO: 279753 - DNA, 12 bp, Artificial Sequence
  Oligonucleotide primer for the detection of SNP TSC0007784
aaacttaatatt

SEQ ID NO: 279754 - DNA, 12 bp, Artificial Sequence
  Oligonucleotide primer for the detection of SNP TSC0007784
tgtatattttta

SEQ ID NO: 279755 - DNA, 12 bp, Artificial Sequence
  Oligonucleotide primer for the detection of SNP TSC0007786
tattctatctat

SEQ ID NO: 279756 - DNA, 12 bp, Artificial Sequence
  Oligonucleotide primer for the detection of SNP TSC0007786
gataaggatttg

SEQ ID NO: 279757 - DNA, 12 bp, Artificial Sequence
  Oligonucleotide primer for the detection of SNP TSC0007787
cttcaatatatc

SEQ ID NO: 279758 - DNA, 12 bp, Artificial Sequence
  Oligonucleotide primer for the detection of SNP TSC0007787
ttaatttaaatg

SEQ ID NO: 279759 - DNA, 12 bp, Artificial Sequence
  Oligonucleotide primer for the detection of SNP TSC0007787
tcaatttaaata

SEQ ID NO: 279760 - DNA, 12 bp, Artificial Sequence
  Oligonucleotide primer for the detection of SNP TSC0007787
ttttagtgtatt

SEQ ID NO: 279761 - DNA, 12 bp, Artificial Sequence
  Oligonucleotide primer for the detection of SNP TSC0007787
ttttagtgtatc

SEQ ID NO: 279762 - DNA, 12 bp, Artificial Sequence
  Oligonucleotide primer for the detection of SNP TSC0007788
aaaaacacctct

SEQ ID NO: 279763 - DNA, 12 bp, Artificial Sequence
  Oligonucleotide primer for the detection of SNP TSC0007788
ttttgttatatg

SEQ ID NO: 279764 - DNA, 12 bp, Artificial Sequence
  Oligonucleotide primer for the detection of SNP TSC0007789
ataaacaatcaa

SEQ ID NO: 279765 - DNA, 12 bp, Artificial Sequence
  Oligonucleotide primer for the detection of SNP TSC0007789
ttttgttagttg

SEQ ID NO: 279766 - DNA, 12 bp, Artificial Sequence
  Oligonucleotide primer for the detection of SNP TSC0007790
atatcctaaaac

SEQ ID NO: 279767 - DNA, 12 bp, Artificial Sequence
  Oligonucleotide primer for the detection of SNP TSC0007790
attgtgaattag

SEQ ID NO: 279768 - DNA, 12 bp, Artificial Sequence
  Oligonucleotide primer for the detection of SNP TSC0007790
attataaattaa

SEQ ID NO: 279769 - DNA, 12 bp, Artificial Sequence
  Oligonucleotide primer for the detection of SNP TSC0007790
atattttgaaat

SEQ ID NO: 279770 - DNA, 12 bp, Artificial Sequence
  Oligonucleotide primer for the detection of SNP TSC0007810
tttctctcatac

SEQ ID NO: 279771 - DNA, 12 bp, Artificial Sequence
  Oligonucleotide primer for the detection of SNP TSC0007810
taatatatatgg

SEQ ID NO: 279772 - DNA, 12 bp, Artificial Sequence
  Oligonucleotide primer for the detection of SNP TSC0007810
atatacataaaa

SEQ ID NO: 279773 - DNA, 12 bp, Artificial Sequence
  Oligonucleotide primer for the detection of SNP TSC0007815
aaaatcattttc

SEQ ID NO: 279774 - DNA, 12 bp, Artificial Sequence
  Oligonucleotide primer for the detection of SNP TSC0007815
ttttgatgaaaa

SEQ ID NO: 279775 - DNA, 12 bp, Artificial Sequence
  Oligonucleotide primer for the detection of SNP TSC0007815
ctttaataaaaa

SEQ ID NO: 279776 - DNA, 12 bp, Artificial Sequence
  Oligonucleotide primer for the detection of SNP TSC0007815
gaaattattttt

SEQ ID NO: 279777 - DNA, 12 bp, Artificial Sequence
  Oligonucleotide primer for the detection of SNP TSC0007819
tttacttatatt

SEQ ID NO: 279778 - DNA, 12 bp, Artificial Sequence
  Oligonucleotide primer for the detection of SNP TSC0007819
ttaaggtattta

SEQ ID NO: 279779 - DNA, 12 bp, Artificial Sequence
  Oligonucleotide primer for the detection of SNP TSC0007821
aaaaaaaacata

SEQ ID NO: 279780 - DNA, 12 bp, Artificial Sequence
  Oligonucleotide primer for the detection of SNP TSC0007821
aaaaaaaacgta

SEQ ID NO: 279781 - DNA, 12 bp, Artificial Sequence
  Oligonucleotide primer for the detection of SNP TSC0007821
tcccatctctaa

SEQ ID NO: 279782 - DNA, 12 bp, Artificial Sequence
  Oligonucleotide primer for the detection of SNP TSC0007821
taaagagaatgt

SEQ ID NO: 279783 - DNA, 12 bp, Artificial Sequence
  Oligonucleotide primer for the detection of SNP TSC0007821
taaagagaacgt

SEQ ID NO: 279784 - DNA, 12 bp, Artificial Sequence
  Oligonucleotide primer for the detection of SNP TSC0007827
ttaccctacttc

SEQ ID NO: 279785 - DNA, 12 bp, Artificial Sequence
  Oligonucleotide primer for the detection of SNP TSC0007827
taattggtaagg

SEQ ID NO: 279786 - DNA, 12 bp, Artificial Sequence
  Oligonucleotide primer for the detection of SNP TSC0007827
taactaacaaaa

SEQ ID NO: 279787 - DNA, 12 bp, Artificial Sequence
  Oligonucleotide primer for the detection of SNP TSC0007835
taaataacaaat

SEQ ID NO: 279788 - DNA, 12 bp, Artificial Sequence
  Oligonucleotide primer for the detection of SNP TSC0007835
taaattatttta

SEQ ID NO: 279789 - DNA, 12 bp, Artificial Sequence
  Oligonucleotide primer for the detection of SNP TSC0007836
ccattattaaca

SEQ ID NO: 279790 - DNA, 12 bp, Artificial Sequence
  Oligonucleotide primer for the detection of SNP TSC0007836
atggaagtaaat

SEQ ID NO: 279791 - DNA, 12 bp, Artificial Sequence
  Oligonucleotide primer for the detection of SNP TSC0007836
ataaaaataaat

SEQ ID NO: 279792 - DNA, 12 bp, Artificial Sequence
  Oligonucleotide primer for the detection of SNP TSC0007836
ttattgttaata

SEQ ID NO: 279793 - DNA, 12 bp, Artificial Sequence
  Oligonucleotide primer for the detection of SNP TSC0007837
tatattataaca

SEQ ID NO: 279794 - DNA, 12 bp, Artificial Sequence
  Oligonucleotide primer for the detection of SNP TSC0007837
aggtgtgtaaat

SEQ ID NO: 279795 - DNA, 12 bp, Artificial Sequence
  Oligonucleotide primer for the detection of SNP TSC0007837
aaatatataaat

SEQ ID NO: 279796 - DNA, 12 bp, Artificial Sequence
  Oligonucleotide primer for the detection of SNP TSC0007837
tgtgttgtgata

SEQ ID NO: 279797 - DNA, 12 bp, Artificial Sequence
  Oligonucleotide primer for the detection of SNP TSC0007838
tcaataaaataa

SEQ ID NO: 279798 - DNA, 12 bp, Artificial Sequence
  Oligonucleotide primer for the detection of SNP TSC0007838
tgaataaagtat

SEQ ID NO: 279799 - DNA, 12 bp, Artificial Sequence
  Oligonucleotide primer for the detection of SNP TSC0007838
taaataaaacac

SEQ ID NO: 279800 - DNA, 12 bp, Artificial Sequence
  Oligonucleotide primer for the detection of SNP TSC0007838
gtttagtaaagt

SEQ ID NO: 279801 - DNA, 12 bp, Artificial Sequence
  Oligonucleotide primer for the detection of SNP TSC0007839
ttcaaaaaactc

SEQ ID NO: 279802 - DNA, 12 bp, Artificial Sequence
  Oligonucleotide primer for the detection of SNP TSC0007839
aaatgggagatt

SEQ ID NO: 279803 - DNA, 12 bp, Artificial Sequence
  Oligonucleotide primer for the detection of SNP TSC0007839
aaacgggagatt

SEQ ID NO: 279804 - DNA, 12 bp, Artificial Sequence
  Oligonucleotide primer for the detection of SNP TSC0007839
aacaaaaaatta

SEQ ID NO: 279805 - DNA, 12 bp, Artificial Sequence
  Oligonucleotide primer for the detection of SNP TSC0007839
aacgaaaaatta

SEQ ID NO: 279806 - DNA, 12 bp, Artificial Sequence
  Oligonucleotide primer for the detection of SNP TSC0007839
tttagaaagttt

SEQ ID NO: 279807 - DNA, 12 bp, Artificial Sequence
  Oligonucleotide primer for the detection of SNP TSC0007846
accaatataact

SEQ ID NO: 279808 - DNA, 12 bp, Artificial Sequence
  Oligonucleotide primer for the detection of SNP TSC0007846
gttttttaaaaa

SEQ ID NO: 279809 - DNA, 12 bp, Artificial Sequence
  Oligonucleotide primer for the detection of SNP TSC0007854
tttaggtttaag

SEQ ID NO: 279810 - DNA, 12 bp, Artificial Sequence
  Oligonucleotide primer for the detection of SNP TSC0007854
cccaaattcaaa

SEQ ID NO: 279811 - DNA, 12 bp, Artificial Sequence
  Oligonucleotide primer for the detection of SNP TSC0007854
aggtaggagaat

SEQ ID NO: 279812 - DNA, 12 bp, Artificial Sequence
  Oligonucleotide primer for the detection of SNP TSC0007855
atctaaataaca

SEQ ID NO: 279813 - DNA, 12 bp, Artificial Sequence
  Oligonucleotide primer for the detection of SNP TSC0007855
ttttattttgtc

SEQ ID NO: 279814 - DNA, 12 bp, Artificial Sequence
  Oligonucleotide primer for the detection of SNP TSC0007855
tctcactctatc

SEQ ID NO: 279815 - DNA, 12 bp, Artificial Sequence
  Oligonucleotide primer for the detection of SNP TSC0007855
agtttgggtgat

SEQ ID NO: 279816 - DNA, 12 bp, Artificial Sequence
  Oligonucleotide primer for the detection of SNP TSC0007856
ttacaaatttct

SEQ ID NO: 279817 - DNA, 12 bp, Artificial Sequence
  Oligonucleotide primer for the detection of SNP TSC0007856
ggtatttggtag

SEQ ID NO: 279818 - DNA, 12 bp, Artificial Sequence
  Oligonucleotide primer for the detection of SNP TSC0007857
cctcataaaact

SEQ ID NO: 279819 - DNA, 12 bp, Artificial Sequence
  Oligonucleotide primer for the detection of SNP TSC0007857
tttaaagagtta

SEQ ID NO: 279820 - DNA, 12 bp, Artificial Sequence
  Oligonucleotide primer for the detection of SNP TSC0007857
cttaaaaaacca

SEQ ID NO: 279821 - DNA, 12 bp, Artificial Sequence
  Oligonukleotid-Primer
ttttatgaagtt

SEQ ID NO: 279822 - DNA, 12 bp, Artificial Sequence
  Oligonucleotide primer for the detection of SNP TSC0007859
aacaatttaatc

SEQ ID NO: 279823 - DNA, 12 bp, Artificial Sequence
  Oligonucleotide primer for the detection of SNP TSC0007859
aacgatttaatc

SEQ ID NO: 279824 - DNA, 12 bp, Artificial Sequence
  Oligonucleotide primer for the detection of SNP TSC0007859
tagttaaggaga

SEQ ID NO: 279825 - DNA, 12 bp, Artificial Sequence
  Oligonukleotid-Primer
ataaaaaaaata

SEQ ID NO: 279826 - DNA, 12 bp, Artificial Sequence
  Oligonucleotide primer for the detection of SNP TSC0007861
agttattaaaat

SEQ ID NO: 279827 - DNA, 12 bp, Artificial Sequence
  Oligonucleotide primer for the detection of SNP TSC0007861
agttattaaaac

SEQ ID NO: 279828 - DNA, 12 bp, Artificial Sequence
  Oligonucleotide primer for the detection of SNP TSC0007861
aaactatcaaaa

SEQ ID NO: 279829 - DNA, 12 bp, Artificial Sequence
  Oligonucleotide primer for the detection of SNP TSC0007861
ggtgagaaagat

SEQ ID NO: 279830 - DNA, 12 bp, Artificial Sequence
  Oligonucleotide primer for the detection of SNP TSC0007862
aaaactcacttc

SEQ ID NO: 279831 - DNA, 12 bp, Artificial Sequence
  Oligonucleotide primer for the detection of SNP TSC0007862
tagagtaagaag

SEQ ID NO: 279832 - DNA, 12 bp, Artificial Sequence
  Oligonucleotide primer for the detection of SNP TSC0007865
ttcaaacaattc

SEQ ID NO: 279833 - DNA, 12 bp, Artificial Sequence
  Oligonucleotide primer for the detection of SNP TSC0007865
ggttgaggtagg

SEQ ID NO: 279834 - DNA, 12 bp, Artificial Sequence
  Oligonucleotide primer for the detection of SNP TSC0007868
tttccttaattt

SEQ ID NO: 279835 - DNA, 12 bp, Artificial Sequence
  Oligonucleotide primer for the detection of SNP TSC0007868
aaattaggtttt

SEQ ID NO: 279836 - DNA, 12 bp, Artificial Sequence
  Oligonucleotide primer for the detection of SNP TSC0007868
aaattaaactcc

SEQ ID NO: 279837 - DNA, 12 bp, Artificial Sequence
  Oligonucleotide primer for the detection of SNP TSC0007868
tttttttgattt

SEQ ID NO: 279838 - DNA, 12 bp, Artificial Sequence
  Oligonucleotide primer for the detection of SNP TSC0007869
atccactataac

SEQ ID NO: 279839 - DNA, 12 bp, Artificial Sequence
  Oligonucleotide primer for the detection of SNP TSC0007869
attgaggattag

SEQ ID NO: 279840 - DNA, 12 bp, Artificial Sequence
  Oligonucleotide primer for the detection of SNP TSC0007872
ctttaataaccc

SEQ ID NO: 279841 - DNA, 12 bp, Artificial Sequence
  Oligonucleotide primer for the detection of SNP TSC0007872
tgatggatttaa

SEQ ID NO: 279842 - DNA, 12 bp, Artificial Sequence
  Oligonucleotide primer for the detection of SNP TSC0007873
attaacaactac

SEQ ID NO: 279843 - DNA, 12 bp, Artificial Sequence
  Oligonucleotide primer for the detection of SNP TSC0007873
tatatttgagta

SEQ ID NO: 279844 - DNA, 12 bp, Artificial Sequence
  Oligonucleotide primer for the detection of SNP TSC0007874
atactttaaaaa

SEQ ID NO: 279845 - DNA, 12 bp, Artificial Sequence
  Oligonucleotide primer for the detection of SNP TSC0007874
atttaaaaatag

SEQ ID NO: 279846 - DNA, 12 bp, Artificial Sequence
  Oligonucleotide primer for the detection of SNP TSC0007875
ttcattaaaaaa

SEQ ID NO: 279847 - DNA, 12 bp, Artificial Sequence
  Oligonucleotide primer for the detection of SNP TSC0007875
tattttatatga

SEQ ID NO: 279848 - DNA, 12 bp, Artificial Sequence
  Oligonucleotide primer for the detection of SNP TSC0007875
tattctacataa

SEQ ID NO: 279849 - DNA, 12 bp, Artificial Sequence
  Oligonucleotide primer for the detection of SNP TSC0007875
gtttattgaaaa

SEQ ID NO: 279850 - DNA, 12 bp, Artificial Sequence
  Oligonucleotide primer for the detection of SNP TSC0007876
ttttaaaatcac

SEQ ID NO: 279851 - DNA, 12 bp, Artificial Sequence
  Oligonucleotide primer for the detection of SNP TSC0007876
tttttaaaagtt

SEQ ID NO: 279852 - DNA, 12 bp, Artificial Sequence
  Oligonucleotide primer for the detection of SNP TSC0007876
tctcaaaaacca

SEQ ID NO: 279853 - DNA, 12 bp, Artificial Sequence
  Oligonucleotide primer for the detection of SNP TSC0007876
ttttagaattat

SEQ ID NO: 279854 - DNA, 12 bp, Artificial Sequence
  Oligonucleotide primer for the detection of SNP TSC0007877
ataattaaaatc

SEQ ID NO: 279855 - DNA, 12 bp, Artificial Sequence
  Oligonucleotide primer for the detection of SNP TSC0007877
tagaaaagttta

SEQ ID NO: 279856 - DNA, 12 bp, Artificial Sequence
  Oligonucleotide primer for the detection of SNP TSC0007878
attcaaataatt

SEQ ID NO: 279857 - DNA, 12 bp, Artificial Sequence
  Oligonucleotide primer for the detection of SNP TSC0007879
caataacacaat

SEQ ID NO: 279858 - DNA, 12 bp, Artificial Sequence
  Oligonucleotide primer for the detection of SNP TSC0007879
caataacacgat

SEQ ID NO: 279859 - DNA, 12 bp, Artificial Sequence
  Oligonucleotide primer for the detection of SNP TSC0007879
gtagtgagttga

SEQ ID NO: 279860 - DNA, 12 bp, Artificial Sequence
  Oligonucleotide primer for the detection of SNP TSC0007882
aatttaatataa

SEQ ID NO: 279861 - DNA, 12 bp, Artificial Sequence
  Oligonucleotide primer for the detection of SNP TSC0007882
ttatttattagt

SEQ ID NO: 279862 - DNA, 12 bp, Artificial Sequence
  Oligonucleotide primer for the detection of SNP TSC0007882
ttatttattaac

SEQ ID NO: 279863 - DNA, 12 bp, Artificial Sequence
  Oligonucleotide primer for the detection of SNP TSC0007882
gtttaatgtggt

SEQ ID NO: 279864 - DNA, 12 bp, Artificial Sequence
  Oligonucleotide primer for the detection of SNP TSC0007882
gtttaatgtggc

SEQ ID NO: 279865 - DNA, 12 bp, Artificial Sequence
  Oligonucleotide primer for the detection of SNP TSC0007888
ctccaacattct

SEQ ID NO: 279866 - DNA, 12 bp, Artificial Sequence
  Oligonucleotide primer for the detection of SNP TSC0007888
tttgtaggtata

SEQ ID NO: 279867 - DNA, 12 bp, Artificial Sequence
  Oligonucleotide primer for the detection of SNP TSC0007888
ttcgtaggtata

SEQ ID NO: 279868 - DNA, 12 bp, Artificial Sequence
  Oligonucleotide primer for the detection of SNP TSC0007891
ttcatccaatat

SEQ ID NO: 279869 - DNA, 12 bp, Artificial Sequence
  Oligonucleotide primer for the detection of SNP TSC0007891
ggtgatggaaag

SEQ ID NO: 279870 - DNA, 12 bp, Artificial Sequence
  Oligonucleotide primer for the detection of SNP TSC0007897
aacctacaccaa

SEQ ID NO: 279871 - DNA, 12 bp, Artificial Sequence
  Oligonucleotide primer for the detection of SNP TSC0007897
aacctacgccaa

SEQ ID NO: 279872 - DNA, 12 bp, Artificial Sequence
  Oligonucleotide primer for the detection of SNP TSC0007897
agagatttgttt

SEQ ID NO: 279873 - DNA, 12 bp, Artificial Sequence
  Oligonucleotide primer for the detection of SNP TSC0007897
aaaaaatttacc

SEQ ID NO: 279874 - DNA, 12 bp, Artificial Sequence
  Oligonucleotide primer for the detection of SNP TSC0007897
tttgtgttagtt

SEQ ID NO: 279875 - DNA, 12 bp, Artificial Sequence
  Oligonucleotide primer for the detection of SNP TSC0007897
tttgcgttagtt

SEQ ID NO: 279876 - DNA, 12 bp, Artificial Sequence
  Oligonucleotide primer for the detection of SNP TSC0007897
tttgtgttagtc

SEQ ID NO: 279877 - DNA, 12 bp, Artificial Sequence
  Oligonucleotide primer for the detection of SNP TSC0007897
tttgcgttagtc

SEQ ID NO: 279878 - DNA, 12 bp, Artificial Sequence
  Oligonucleotide primer for the detection of SNP TSC0007902
ataaaaaataat

SEQ ID NO: 279879 - DNA, 12 bp, Artificial Sequence
  Oligonucleotide primer for the detection of SNP TSC0007902
gatttttatgag

SEQ ID NO: 279880 - DNA, 12 bp, Artificial Sequence
  Oligonucleotide primer for the detection of SNP TSC0007907
aaaactccccac

SEQ ID NO: 279881 - DNA, 12 bp, Artificial Sequence
  Oligonucleotide primer for the detection of SNP TSC0007907
tatatttattag

SEQ ID NO: 279882 - DNA, 12 bp, Artificial Sequence
  Oligonucleotide primer for the detection of SNP TSC0007908
ataatcttcaaa

SEQ ID NO: 279883 - DNA, 12 bp, Artificial Sequence
  Oligonucleotide primer for the detection of SNP TSC0007908
atatttttagat

SEQ ID NO: 279884 - DNA, 12 bp, Artificial Sequence
  Oligonucleotide primer for the detection of SNP TSC0007908
aacatttttaaa

SEQ ID NO: 279885 - DNA, 12 bp, Artificial Sequence
  Oligonucleotide primer for the detection of SNP TSC0007908
taatttttaaat

SEQ ID NO: 279886 - DNA, 12 bp, Artificial Sequence
  Oligonucleotide primer for the detection of SNP TSC0007910
aatataccaaat

SEQ ID NO: 279887 - DNA, 12 bp, Artificial Sequence
  Oligonucleotide primer for the detection of SNP TSC0007910
agttgtattatt

SEQ ID NO: 279888 - DNA, 12 bp, Artificial Sequence
  Oligonucleotide primer for the detection of SNP TSC0007910
aactatactact

SEQ ID NO: 279889 - DNA, 12 bp, Artificial Sequence
  Oligonucleotide primer for the detection of SNP TSC0007910
aatgtgttaagt

SEQ ID NO: 279890 - DNA, 12 bp, Artificial Sequence
  Oligonucleotide primer for the detection of SNP TSC0007912
aaatcaaaaatt

SEQ ID NO: 279891 - DNA, 12 bp, Artificial Sequence
  Oligonucleotide primer for the detection of SNP TSC0007912
tggttaggttgg

SEQ ID NO: 279892 - DNA, 12 bp, Artificial Sequence
  Oligonucleotide primer for the detection of SNP TSC0007915
ctactaataatt

SEQ ID NO: 279893 - DNA, 12 bp, Artificial Sequence
  Oligonucleotide primer for the detection of SNP TSC0007915
aggaaggtaagg

SEQ ID NO: 279894 - DNA, 12 bp, Artificial Sequence
  Oligonucleotide primer for the detection of SNP TSC0007915
ttattgatgatt

SEQ ID NO: 279895 - DNA, 12 bp, Artificial Sequence
  Oligonucleotide primer for the detection of SNP TSC0007916
attattcatccc

SEQ ID NO: 279896 - DNA, 12 bp, Artificial Sequence
  Oligonucleotide primer for the detection of SNP TSC0007916
tttgtaggttta

SEQ ID NO: 279897 - DNA, 12 bp, Artificial Sequence
  Oligonucleotide primer for the detection of SNP TSC0007919
taacatatactc

SEQ ID NO: 279898 - DNA, 12 bp, Artificial Sequence
  Oligonucleotide primer for the detection of SNP TSC0007919
tttattagaagt

SEQ ID NO: 279899 - DNA, 12 bp, Artificial Sequence
  Oligonucleotide primer for the detection of SNP TSC0007919
tttattagaagc

SEQ ID NO: 279900 - DNA, 12 bp, Artificial Sequence
  Oligonucleotide primer for the detection of SNP TSC0007919
cctcaccaaaaa

SEQ ID NO: 279901 - DNA, 12 bp, Artificial Sequence
  Oligonucleotide primer for the detection of SNP TSC0007919
tggtatgtgttt

SEQ ID NO: 279902 - DNA, 12 bp, Artificial Sequence
  Oligonucleotide primer for the detection of SNP TSC0007923
atcctaccttcc

SEQ ID NO: 279903 - DNA, 12 bp, Artificial Sequence
  Oligonucleotide primer for the detection of SNP TSC0007926
atttataacttc

SEQ ID NO: 279904 - DNA, 12 bp, Artificial Sequence
  Oligonucleotide primer for the detection of SNP TSC0007926
gtttgtatagta

SEQ ID NO: 279905 - DNA, 12 bp, Artificial Sequence
  Oligonucleotide primer for the detection of SNP TSC0007927
taaaatattata

SEQ ID NO: 279906 - DNA, 12 bp, Artificial Sequence
  Oligonucleotide primer for the detection of SNP TSC0007927
aagtagatattg

SEQ ID NO: 279907 - DNA, 12 bp, Artificial Sequence
  Oligonucleotide primer for the detection of SNP TSC0007927
tgaaatgttatg

SEQ ID NO: 279908 - DNA, 12 bp, Artificial Sequence
  Oligonucleotide primer for the detection of SNP TSC0007937
taatttactctt

SEQ ID NO: 279909 - DNA, 12 bp, Artificial Sequence
  Oligonucleotide primer for the detection of SNP TSC0007937
tatagtttaatg

SEQ ID NO: 279910 - DNA, 12 bp, Artificial Sequence
  Oligonucleotide primer for the detection of SNP TSC0007941
ctcctaactttt

SEQ ID NO: 279911 - DNA, 12 bp, Artificial Sequence
  Oligonucleotide primer for the detection of SNP TSC0007941
tgttttttttaa

SEQ ID NO: 279912 - DNA, 12 bp, Artificial Sequence
  Oligonucleotide primer for the detection of SNP TSC0007945
tctaaatctata

SEQ ID NO: 279913 - DNA, 12 bp, Artificial Sequence
  Oligonucleotide primer for the detection of SNP TSC0007945
actccaacttaa

SEQ ID NO: 279914 - DNA, 12 bp, Artificial Sequence
  Oligonucleotide primer for the detection of SNP TSC0007945
ttaagtttgtat

SEQ ID NO: 279915 - DNA, 12 bp, Artificial Sequence
  Oligonucleotide primer for the detection of SNP TSC0007949
aaaatactcatt

SEQ ID NO: 279916 - DNA, 12 bp, Artificial Sequence
  Oligonucleotide primer for the detection of SNP TSC0007949
ggaaatgtttaa

SEQ ID NO: 279917 - DNA, 12 bp, Artificial Sequence
  Oligonucleotide primer for the detection of SNP TSC0007949
aaaaatacctaa

SEQ ID NO: 279918 - DNA, 12 bp, Artificial Sequence
  Oligonucleotide primer for the detection of SNP TSC0007949
aggatgtttatt

SEQ ID NO: 279919 - DNA, 12 bp, Artificial Sequence
  Oligonucleotide primer for the detection of SNP TSC0007950
cacaaatccccc

SEQ ID NO: 279920 - DNA, 12 bp, Artificial Sequence
  Oligonucleotide primer for the detection of SNP TSC0007950
tatattttgttt

SEQ ID NO: 279921 - DNA, 12 bp, Artificial Sequence
  Oligonucleotide primer for the detection of SNP TSC0007950
atactctaccta

SEQ ID NO: 279922 - DNA, 12 bp, Artificial Sequence
  Oligonucleotide primer for the detection of SNP TSC0007951
ctaatctacact

SEQ ID NO: 279923 - DNA, 12 bp, Artificial Sequence
  Oligonucleotide primer for the detection of SNP TSC0007951
ctaatctacgct

SEQ ID NO: 279924 - DNA, 12 bp, Artificial Sequence
  Oligonucleotide primer for the detection of SNP TSC0007951
tttttgtaggta

SEQ ID NO: 279925 - DNA, 12 bp, Artificial Sequence
  Oligonucleotide primer for the detection of SNP TSC0007954
aacaacctacaa

SEQ ID NO: 279926 - DNA, 12 bp, Artificial Sequence
  Oligonukleotid-Primer
tggtggttgttt

SEQ ID NO: 279927 - DNA, 12 bp, Artificial Sequence
  Oligonucleotide primer for the detection of SNP TSC0007954
taataattattc

SEQ ID NO: 279928 - DNA, 12 bp, Artificial Sequence
  Oligonucleotide primer for the detection of SNP TSC0007954
agaatagtttat

SEQ ID NO: 279929 - DNA, 12 bp, Artificial Sequence
  Oligonucleotide primer for the detection of SNP TSC0007955
ctataaatccct

SEQ ID NO: 279930 - DNA, 12 bp, Artificial Sequence
  Oligonucleotide primer for the detection of SNP TSC0007955
aattttgtttta

SEQ ID NO: 279931 - DNA, 12 bp, Artificial Sequence
  Oligonucleotide primer for the detection of SNP TSC0007956
ataatgtttagt

SEQ ID NO: 279932 - DNA, 12 bp, Artificial Sequence
  Oligonucleotide primer for the detection of SNP TSC0007956
ataatacttaac

SEQ ID NO: 279933 - DNA, 12 bp, Artificial Sequence
  Oligonucleotide primer for the detection of SNP TSC0007956
aaaagaaattag

SEQ ID NO: 279934 - DNA, 12 bp, Artificial Sequence
  Oligonucleotide primer for the detection of SNP TSC0007957
ctacctaaaaat

SEQ ID NO: 279935 - DNA, 12 bp, Artificial Sequence
  Oligonucleotide primer for the detection of SNP TSC0007958
tatatcattttt

SEQ ID NO: 279936 - DNA, 12 bp, Artificial Sequence
  Oligonucleotide primer for the detection of SNP TSC0007958
ttaaggttttta

SEQ ID NO: 279937 - DNA, 12 bp, Artificial Sequence
  Oligonucleotide primer for the detection of SNP TSC0007959
taatccccaaat

SEQ ID NO: 279938 - DNA, 12 bp, Artificial Sequence
  Oligonucleotide primer for the detection of SNP TSC0007959
gttggagatata

SEQ ID NO: 279939 - DNA, 12 bp, Artificial Sequence
  Oligonucleotide primer for the detection of SNP TSC0007963
accatcacaact

SEQ ID NO: 279940 - DNA, 12 bp, Artificial Sequence
  Oligonucleotide primer for the detection of SNP TSC0007963
accatcacgact

SEQ ID NO: 279941 - DNA, 12 bp, Artificial Sequence
  Oligonucleotide primer for the detection of SNP TSC0007963
ttgaggttgtag

SEQ ID NO: 279942 - DNA, 12 bp, Artificial Sequence
  Oligonucleotide primer for the detection of SNP TSC0007964
tctcaattcaaa

SEQ ID NO: 279943 - DNA, 12 bp, Artificial Sequence
  Oligonucleotide primer for the detection of SNP TSC0007964
gattatatagtt

SEQ ID NO: 279944 - DNA, 12 bp, Artificial Sequence
  Oligonucleotide primer for the detection of SNP TSC0007964
ataattacacaa

SEQ ID NO: 279945 - DNA, 12 bp, Artificial Sequence
  Oligonucleotide primer for the detection of SNP TSC0007964
ttttttagttta

SEQ ID NO: 279946 - DNA, 12 bp, Artificial Sequence
  Oligonucleotide primer for the detection of SNP TSC0007969
cctaacctataa

SEQ ID NO: 279947 - DNA, 12 bp, Artificial Sequence
  Oligonucleotide primer for the detection of SNP TSC0007969
gtaattttaaaa

SEQ ID NO: 279948 - DNA, 12 bp, Artificial Sequence
  Oligonucleotide primer for the detection of SNP TSC0007969
ataattccaaaa

SEQ ID NO: 279949 - DNA, 12 bp, Artificial Sequence
  Oligonucleotide primer for the detection of SNP TSC0007969
ggtttggtttgt

SEQ ID NO: 279950 - DNA, 12 bp, Artificial Sequence
  Oligonucleotide primer for the detection of SNP TSC0007970
atacttttaaaa

SEQ ID NO: 279951 - DNA, 12 bp, Artificial Sequence
  Oligonucleotide primer for the detection of SNP TSC0007970
gtgttatttgtt

SEQ ID NO: 279952 - DNA, 12 bp, Artificial Sequence
  Oligonucleotide primer for the detection of SNP TSC0007970
atattacttact

SEQ ID NO: 279953 - DNA, 12 bp, Artificial Sequence
  Oligonucleotide primer for the detection of SNP TSC0007970
gtatttttgaga

SEQ ID NO: 279954 - DNA, 12 bp, Artificial Sequence
  Oligonucleotide primer for the detection of SNP TSC0007973
aatattaacttc

SEQ ID NO: 279955 - DNA, 12 bp, Artificial Sequence
  Oligonucleotide primer for the detection of SNP TSC0007973
attaagagatag

SEQ ID NO: 279956 - DNA, 12 bp, Artificial Sequence
  Oligonucleotide primer for the detection of SNP TSC0007974
ccaaactaatat

SEQ ID NO: 279957 - DNA, 12 bp, Artificial Sequence
  Oligonucleotide primer for the detection of SNP TSC0007974
atgattgtatta

SEQ ID NO: 279958 - DNA, 12 bp, Artificial Sequence
  Oligonucleotide primer for the detection of SNP TSC0007974
atgatcgtatta

SEQ ID NO: 279959 - DNA, 12 bp, Artificial Sequence
  Oligonucleotide primer for the detection of SNP TSC0007975
acaatacaaacc

SEQ ID NO: 279960 - DNA, 12 bp, Artificial Sequence
  Oligonucleotide primer for the detection of SNP TSC0007975
atttatattttg

SEQ ID NO: 279961 - DNA, 12 bp, Artificial Sequence
  Oligonucleotide primer for the detection of SNP TSC0007976
attttctacatt

SEQ ID NO: 279962 - DNA, 12 bp, Artificial Sequence
  Oligonucleotide primer for the detection of SNP TSC0007976
atattattttag

SEQ ID NO: 279963 - DNA, 12 bp, Artificial Sequence
  Oligonucleotide primer for the detection of SNP TSC0007980
tctctatttccc

SEQ ID NO: 279964 - DNA, 12 bp, Artificial Sequence
  Oligonucleotide primer for the detection of SNP TSC0007980
gatttgtggaag

SEQ ID NO: 279965 - DNA, 12 bp, Artificial Sequence
  Oligonucleotide primer for the detection of SNP TSC0007980
gatttgcggaag

SEQ ID NO: 279966 - DNA, 12 bp, Artificial Sequence
  Oligonucleotide primer for the detection of SNP TSC0007984
tcaccacactat

SEQ ID NO: 279967 - DNA, 12 bp, Artificial Sequence
  Oligonucleotide primer for the detection of SNP TSC0007984
tcgccacactat

SEQ ID NO: 279968 - DNA, 12 bp, Artificial Sequence
  Oligonucleotide primer for the detection of SNP TSC0007984
ttatttgtgtaa

SEQ ID NO: 279969 - DNA, 12 bp, Artificial Sequence
  Oligonucleotide primer for the detection of SNP TSC0007985
aacaaatttcac

SEQ ID NO: 279970 - DNA, 12 bp, Artificial Sequence
  Oligonucleotide primer for the detection of SNP TSC0007985
gtttggttaata

SEQ ID NO: 279971 - DNA, 12 bp, Artificial Sequence
  Oligonucleotide primer for the detection of SNP TSC0007986
tttttaactata

SEQ ID NO: 279972 - DNA, 12 bp, Artificial Sequence
  Oligonucleotide primer for the detection of SNP TSC0007986
atgagttattat

SEQ ID NO: 279973 - DNA, 12 bp, Artificial Sequence
  Oligonucleotide primer for the detection of SNP TSC0007986
atgagttattac

SEQ ID NO: 279974 - DNA, 12 bp, Artificial Sequence
  Oligonucleotide primer for the detection of SNP TSC0007986
cataaactacca

SEQ ID NO: 279975 - DNA, 12 bp, Artificial Sequence
  Oligonucleotide primer for the detection of SNP TSC0007987
tactaaaattac

SEQ ID NO: 279976 - DNA, 12 bp, Artificial Sequence
  Oligonucleotide primer for the detection of SNP TSC0007987
tggtagtttatg

SEQ ID NO: 279977 - DNA, 12 bp, Artificial Sequence
  Oligonucleotide primer for the detection of SNP TSC0007993
atactctccaaa

SEQ ID NO: 279978 - DNA, 12 bp, Artificial Sequence
  Oligonucleotide primer for the detection of SNP TSC0007993
ttaaattttaag

SEQ ID NO: 279979 - DNA, 12 bp, Artificial Sequence
  Oligonucleotide primer for the detection of SNP TSC0007993
ccaaactccaaa

SEQ ID NO: 279980 - DNA, 12 bp, Artificial Sequence
  Oligonucleotide primer for the detection of SNP TSC0007994
taaatctaaatc

SEQ ID NO: 279981 - DNA, 12 bp, Artificial Sequence
  Oligonucleotide primer for the detection of SNP TSC0007994
ttttttgtagaa

SEQ ID NO: 279982 - DNA, 12 bp, Artificial Sequence
  Oligonucleotide primer for the detection of SNP TSC0007999
aataatttaatc

SEQ ID NO: 279983 - DNA, 12 bp, Artificial Sequence
  Oligonucleotide primer for the detection of SNP TSC0007999
tattataaatta

SEQ ID NO: 279984 - DNA, 12 bp, Artificial Sequence
  Oligonucleotide primer for the detection of SNP TSC0007999
cattacaaacca

SEQ ID NO: 279985 - DNA, 12 bp, Artificial Sequence
  Oligonucleotide primer for the detection of SNP TSC0007999
ggtgatttgatt

SEQ ID NO: 279986 - DNA, 12 bp, Artificial Sequence
  Oligonucleotide primer for the detection of SNP TSC0008002
ttttaaaaccca

SEQ ID NO: 279987 - DNA, 12 bp, Artificial Sequence
  Oligonucleotide primer for the detection of SNP TSC0008002
agtatgttgagt

SEQ ID NO: 279988 - DNA, 12 bp, Artificial Sequence
  Oligonucleotide primer for the detection of SNP TSC0008002
aacatattaaat

SEQ ID NO: 279989 - DNA, 12 bp, Artificial Sequence
  Oligonucleotide primer for the detection of SNP TSC0008002
ttttgaggttta

SEQ ID NO: 279990 - DNA, 12 bp, Artificial Sequence
  Oligonucleotide primer for the detection of SNP TSC0008005
aaatttaaaatt

SEQ ID NO: 279991 - DNA, 12 bp, Artificial Sequence
  Oligonucleotide primer for the detection of SNP TSC0008005
tgttttaagaag

SEQ ID NO: 279992 - DNA, 12 bp, Artificial Sequence
  Oligonucleotide primer for the detection of SNP TSC0008017
tttcaaattcat

SEQ ID NO: 279993 - DNA, 12 bp, Artificial Sequence
  Oligonucleotide primer for the detection of SNP TSC0008017
aataataatgtt

SEQ ID NO: 279994 - DNA, 12 bp, Artificial Sequence
  Oligonucleotide primer for the detection of SNP TSC0008020
ataaattcttaa

SEQ ID NO: 279995 - DNA, 12 bp, Artificial Sequence
  Oligonucleotide primer for the detection of SNP TSC0008020
gttttttatttt

SEQ ID NO: 279996 - DNA, 12 bp, Artificial Sequence
  Oligonucleotide primer for the detection of SNP TSC0008020
attcctcattcc

SEQ ID NO: 279997 - DNA, 12 bp, Artificial Sequence
  Oligonucleotide primer for the detection of SNP TSC0008020
ataaatttttgg

SEQ ID NO: 279998 - DNA, 12 bp, Artificial Sequence
  Oligonucleotide primer for the detection of SNP TSC0008021
ttcccaattatt

SEQ ID NO: 279999 - DNA, 12 bp, Artificial Sequence
  Oligonucleotide primer for the detection of SNP TSC0008027
acccaaaaccca

SEQ ID NO: 280000 - DNA, 12 bp, Artificial Sequence
  Oligonucleotide primer for the detection of SNP TSC0008027
tccccaaaacca

SEQ ID NO: 280001 - DNA, 12 bp, Artificial Sequence
  Oligonucleotide primer for the detection of SNP TSC0008027
agtttaaggttt

SEQ ID NO: 280002 - DNA, 12 bp, Artificial Sequence
  Oligonucleotide primer for the detection of SNP TSC0008028
ataaaatatatc

SEQ ID NO: 280003 - DNA, 12 bp, Artificial Sequence
  Oligonucleotide primer for the detection of SNP TSC0008028
tttttatgttta

SEQ ID NO: 280004 - DNA, 12 bp, Artificial Sequence
  Oligonucleotide primer for the detection of SNP TSC0008029
cataaaactact

SEQ ID NO: 280005 - DNA, 12 bp, Artificial Sequence
  Oligonucleotide primer for the detection of SNP TSC0008029
taagttttgatg

SEQ ID NO: 280006 - DNA, 12 bp, Artificial Sequence
  Oligonucleotide primer for the detection of SNP TSC0008029
caaatcctaata

SEQ ID NO: 280007 - DNA, 12 bp, Artificial Sequence
  Oligonucleotide primer for the detection of SNP TSC0008029
tataggattgtt

SEQ ID NO: 280008 - DNA, 12 bp, Artificial Sequence
  Oligonucleotide primer for the detection of SNP TSC0008030
aactcacccctt

SEQ ID NO: 280009 - DNA, 12 bp, Artificial Sequence
  Oligonucleotide primer for the detection of SNP TSC0008030
gtggttttaggg

SEQ ID NO: 280010 - DNA, 12 bp, Artificial Sequence
  Oligonucleotide primer for the detection of SNP TSC0008030
gcggttttaggg

SEQ ID NO: 280011 - DNA, 12 bp, Artificial Sequence
  Oligonucleotide primer for the detection of SNP TSC0008031
ataataatctat

SEQ ID NO: 280012 - DNA, 12 bp, Artificial Sequence
  Oligonucleotide primer for the detection of SNP TSC0008031
agaagtggttta

SEQ ID NO: 280013 - DNA, 12 bp, Artificial Sequence
  Oligonucleotide primer for the detection of SNP TSC0008036
aacctccccaac

SEQ ID NO: 280014 - DNA, 12 bp, Artificial Sequence
  Oligonucleotide primer for the detection of SNP TSC0008036
aatagttttata

SEQ ID NO: 280015 - DNA, 12 bp, Artificial Sequence
  Oligonucleotide primer for the detection of SNP TSC0008045
aaccctctacta

SEQ ID NO: 280016 - DNA, 12 bp, Artificial Sequence
  Oligonucleotide primer for the detection of SNP TSC0008045
tatttttagtac

SEQ ID NO: 280017 - DNA, 12 bp, Artificial Sequence
  Oligonucleotide primer for the detection of SNP TSC0008045
cattctcaatac

SEQ ID NO: 280018 - DNA, 12 bp, Artificial Sequence
  Oligonucleotide primer for the detection of SNP TSC0008045
agttttttgttg

SEQ ID NO: 280019 - DNA, 12 bp, Artificial Sequence
  Oligonucleotide primer for the detection of SNP TSC0008047
acctatttcttt

SEQ ID NO: 280020 - DNA, 12 bp, Artificial Sequence
  Oligonucleotide primer for the detection of SNP TSC0008049
aacacaacccaa

SEQ ID NO: 280021 - DNA, 12 bp, Artificial Sequence
  Oligonucleotide primer for the detection of SNP TSC0008049
tatttgattgat

SEQ ID NO: 280022 - DNA, 12 bp, Artificial Sequence
  Oligonucleotide primer for the detection of SNP TSC0008049
tacctaactaat

SEQ ID NO: 280023 - DNA, 12 bp, Artificial Sequence
  Oligonucleotide primer for the detection of SNP TSC0008049
gatatagtttaa

SEQ ID NO: 280024 - DNA, 12 bp, Artificial Sequence
  Oligonucleotide primer for the detection of SNP TSC0008053
ctactttaataa

SEQ ID NO: 280025 - DNA, 12 bp, Artificial Sequence
  Oligonucleotide primer for the detection of SNP TSC0008053
aattttaatttc

SEQ ID NO: 280026 - DNA, 12 bp, Artificial Sequence
  Oligonucleotide primer for the detection of SNP TSC0008053
ttattttagtag

SEQ ID NO: 280027 - DNA, 12 bp, Artificial Sequence
  Oligonucleotide primer for the detection of SNP TSC0008055
tcccttaaattc

SEQ ID NO: 280028 - DNA, 12 bp, Artificial Sequence
  Oligonucleotide primer for the detection of SNP TSC0008055
aggtttattgta

SEQ ID NO: 280029 - DNA, 12 bp, Artificial Sequence
  Oligonucleotide primer for the detection of SNP TSC0008082
ttataacactaa

SEQ ID NO: 280030 - DNA, 12 bp, Artificial Sequence
  Oligonucleotide primer for the detection of SNP TSC0008082
ggtgttagtaga

SEQ ID NO: 280031 - DNA, 12 bp, Artificial Sequence
  Oligonucleotide primer for the detection of SNP TSC0008082
atactaacaaaa

SEQ ID NO: 280032 - DNA, 12 bp, Artificial Sequence
  Oligonucleotide primer for the detection of SNP TSC0008082
ttatagtattga

SEQ ID NO: 280033 - DNA, 12 bp, Artificial Sequence
  Oligonucleotide primer for the detection of SNP TSC0008083
atactttctcca

SEQ ID NO: 280034 - DNA, 12 bp, Artificial Sequence
  Oligonucleotide primer for the detection of SNP TSC0008083
agatatttttat

SEQ ID NO: 280035 - DNA, 12 bp, Artificial Sequence
  Oligonucleotide primer for the detection of SNP TSC0008083
aaaacattccca

SEQ ID NO: 280036 - DNA, 12 bp, Artificial Sequence
  Oligonucleotide primer for the detection of SNP TSC0008084
attggaagagag

SEQ ID NO: 280037 - DNA, 12 bp, Artificial Sequence
  Oligonucleotide primer for the detection of SNP TSC0008085
taatctctacta

SEQ ID NO: 280038 - DNA, 12 bp, Artificial Sequence
  Oligonucleotide primer for the detection of SNP TSC0008085
ttataattttta

SEQ ID NO: 280039 - DNA, 12 bp, Artificial Sequence
  Oligonucleotide primer for the detection of SNP TSC0008085
cataatttttaa

SEQ ID NO: 280040 - DNA, 12 bp, Artificial Sequence
  Oligonucleotide primer for the detection of SNP TSC0008085
gtttttgttatt

SEQ ID NO: 280041 - DNA, 12 bp, Artificial Sequence
  Oligonucleotide primer for the detection of SNP TSC0008088
aatttcaacttt

SEQ ID NO: 280042 - DNA, 12 bp, Artificial Sequence
  Oligonucleotide primer for the detection of SNP TSC0008088
gtgtaaatttgg

SEQ ID NO: 280043 - DNA, 12 bp, Artificial Sequence
  Oligonucleotide primer for the detection of SNP TSC0008089
taaactcctaaa

SEQ ID NO: 280044 - DNA, 12 bp, Artificial Sequence
  Oligonucleotide primer for the detection of SNP TSC0008089
gggaggattgtt

SEQ ID NO: 280045 - DNA, 12 bp, Artificial Sequence
  Oligonucleotide primer for the detection of SNP TSC0008089
aaaaaaattact

SEQ ID NO: 280046 - DNA, 12 bp, Artificial Sequence
  Oligonucleotide primer for the detection of SNP TSC0008089
tgaatttttggg

SEQ ID NO: 280047 - DNA, 12 bp, Artificial Sequence
  Oligonucleotide primer for the detection of SNP TSC0008097
ttctcaccatat

SEQ ID NO: 280048 - DNA, 12 bp, Artificial Sequence
  Oligonucleotide primer for the detection of SNP TSC0008097
ttctcgccatat

SEQ ID NO: 280049 - DNA, 12 bp, Artificial Sequence
  Oligonucleotide primer for the detection of SNP TSC0008097
gaagagtgagta

SEQ ID NO: 280050 - DNA, 12 bp, Artificial Sequence
  Oligonucleotide primer for the detection of SNP TSC0008097
gaagagcgagta

SEQ ID NO: 280051 - DNA, 12 bp, Artificial Sequence
  Oligonucleotide primer for the detection of SNP TSC0008098
aatccattttca

SEQ ID NO: 280052 - DNA, 12 bp, Artificial Sequence
  Oligonucleotide primer for the detection of SNP TSC0008098
gtttttattagt

SEQ ID NO: 280053 - DNA, 12 bp, Artificial Sequence
  Oligonucleotide primer for the detection of SNP TSC0008098
atctttatcaac

SEQ ID NO: 280054 - DNA, 12 bp, Artificial Sequence
  Oligonucleotide primer for the detection of SNP TSC0008098
agtttattttta

SEQ ID NO: 280055 - DNA, 12 bp, Artificial Sequence
  Oligonucleotide primer for the detection of SNP TSC0008109
tacccaataaaa

SEQ ID NO: 280056 - DNA, 12 bp, Artificial Sequence
  Oligonucleotide primer for the detection of SNP TSC0008109
gtgagttgatat

SEQ ID NO: 280057 - DNA, 12 bp, Artificial Sequence
  Oligonucleotide primer for the detection of SNP TSC0008109
tataaattaaca

SEQ ID NO: 280058 - DNA, 12 bp, Artificial Sequence
  Oligonucleotide primer for the detection of SNP TSC0008109
tatttaataggg

SEQ ID NO: 280059 - DNA, 12 bp, Artificial Sequence
  Oligonucleotide primer for the detection of SNP TSC0008110
ataactaataca

SEQ ID NO: 280060 - DNA, 12 bp, Artificial Sequence
  Oligonucleotide primer for the detection of SNP TSC0008110
ggagaagaatat

SEQ ID NO: 280061 - DNA, 12 bp, Artificial Sequence
  Oligonucleotide primer for the detection of SNP TSC0008110
aaaaaaaaacac

SEQ ID NO: 280062 - DNA, 12 bp, Artificial Sequence
  Oligonucleotide primer for the detection of SNP TSC0008110
ataattggtgta

SEQ ID NO: 280063 - DNA, 12 bp, Artificial Sequence
  Oligonucleotide primer for the detection of SNP TSC0008121
cctcatatacat

SEQ ID NO: 280064 - DNA, 12 bp, Artificial Sequence
  Oligonucleotide primer for the detection of SNP TSC0008121
aaattgtttttg

SEQ ID NO: 280065 - DNA, 12 bp, Artificial Sequence
  Oligonucleotide primer for the detection of SNP TSC0008128
aaaacaaccaac

SEQ ID NO: 280066 - DNA, 12 bp, Artificial Sequence
  Oligonucleotide primer for the detection of SNP TSC0008128
tttttaatattg

SEQ ID NO: 280067 - DNA, 12 bp, Artificial Sequence
  Oligonucleotide primer for the detection of SNP TSC0008128
cttttaatacta

SEQ ID NO: 280068 - DNA, 12 bp, Artificial Sequence
  Oligonucleotide primer for the detection of SNP TSC0008128
agaatagttaat

SEQ ID NO: 280069 - DNA, 12 bp, Artificial Sequence
  Oligonucleotide primer for the detection of SNP TSC0008137
attcttcaaaaa

SEQ ID NO: 280070 - DNA, 12 bp, Artificial Sequence
  Oligonucleotide primer for the detection of SNP TSC0008137
tattgaatttaa

SEQ ID NO: 280071 - DNA, 12 bp, Artificial Sequence
  Oligonucleotide primer for the detection of SNP TSC0008137
attaaatccaaa

SEQ ID NO: 280072 - DNA, 12 bp, Artificial Sequence
  Oligonucleotide primer for the detection of SNP TSC0008137
gttttttaagag

SEQ ID NO: 280073 - DNA, 12 bp, Artificial Sequence
  Oligonucleotide primer for the detection of SNP TSC0008156
tactttcaatct

SEQ ID NO: 280074 - DNA, 12 bp, Artificial Sequence
  Oligonucleotide primer for the detection of SNP TSC0008156
ggttaatagtta

SEQ ID NO: 280075 - DNA, 12 bp, Artificial Sequence
  Oligonucleotide primer for the detection of SNP TSC0008166
caacactacaaa

SEQ ID NO: 280076 - DNA, 12 bp, Artificial Sequence
  Oligonucleotide primer for the detection of SNP TSC0008166
attaaattattt

SEQ ID NO: 280077 - DNA, 12 bp, Artificial Sequence
  Oligonucleotide primer for the detection of SNP TSC0008166
atcaaactatct

SEQ ID NO: 280078 - DNA, 12 bp, Artificial Sequence
  Oligonucleotide primer for the detection of SNP TSC0008166
taatattataga

SEQ ID NO: 280079 - DNA, 12 bp, Artificial Sequence
  Oligonucleotide primer for the detection of SNP TSC0008171
ctttaacctact

SEQ ID NO: 280080 - DNA, 12 bp, Artificial Sequence
  Oligonucleotide primer for the detection of SNP TSC0008171
ttttagggatta

SEQ ID NO: 280081 - DNA, 12 bp, Artificial Sequence
  Oligonucleotide primer for the detection of SNP TSC0008172
ttacacacacct

SEQ ID NO: 280082 - DNA, 12 bp, Artificial Sequence
  Oligonucleotide primer for the detection of SNP TSC0008172
tgttgtggtaaa

SEQ ID NO: 280083 - DNA, 12 bp, Artificial Sequence
  Oligonucleotide primer for the detection of SNP TSC0008178
aactcctaacct

SEQ ID NO: 280084 - DNA, 12 bp, Artificial Sequence
  Oligonucleotide primer for the detection of SNP TSC0008178
gtgggtggattg

SEQ ID NO: 280085 - DNA, 12 bp, Artificial Sequence
  Oligonucleotide primer for the detection of SNP TSC0008178
gcgggtggattg

SEQ ID NO: 280086 - DNA, 12 bp, Artificial Sequence
  Oligonucleotide primer for the detection of SNP TSC0008190
tatttaatttac

SEQ ID NO: 280087 - DNA, 12 bp, Artificial Sequence
  Oligonukleotid-Primer
tagatgaaaatt

SEQ ID NO: 280088 - DNA, 12 bp, Artificial Sequence
  Oligonucleotide primer for the detection of SNP TSC0008190
aataaataaaaa

SEQ ID NO: 280089 - DNA, 12 bp, Artificial Sequence
  Oligonucleotide primer for the detection of SNP TSC0008191
ttcaaacatcaa

SEQ ID NO: 280090 - DNA, 12 bp, Artificial Sequence
  Oligonucleotide primer for the detection of SNP TSC0008191
ttttttattgat

SEQ ID NO: 280091 - DNA, 12 bp, Artificial Sequence
  Oligonucleotide primer for the detection of SNP TSC0008191
ttctttattaac

SEQ ID NO: 280092 - DNA, 12 bp, Artificial Sequence
  Oligonucleotide primer for the detection of SNP TSC0008191
tttaggtattag

SEQ ID NO: 280093 - DNA, 12 bp, Artificial Sequence
  Oligonucleotide primer for the detection of SNP TSC0008193
cattttatactt

SEQ ID NO: 280094 - DNA, 12 bp, Artificial Sequence
  Oligonucleotide primer for the detection of SNP TSC0008193
aattttataggg

SEQ ID NO: 280095 - DNA, 12 bp, Artificial Sequence
  Oligonucleotide primer for the detection of SNP TSC0008194
tttttagggtta

SEQ ID NO: 280096 - DNA, 12 bp, Artificial Sequence
  Oligonucleotide primer for the detection of SNP TSC0008201
actatcccttca

SEQ ID NO: 280097 - DNA, 12 bp, Artificial Sequence
  Oligonucleotide primer for the detection of SNP TSC0008201
agattatttttt

SEQ ID NO: 280098 - DNA, 12 bp, Artificial Sequence
  Oligonucleotide primer for the detection of SNP TSC0008202
taaaacaaataa

SEQ ID NO: 280099 - DNA, 12 bp, Artificial Sequence
  Oligonucleotide primer for the detection of SNP TSC0008202
atgttatttaat

SEQ ID NO: 280100 - DNA, 12 bp, Artificial Sequence
  Oligonucleotide primer for the detection of SNP TSC0008202
atcatttaataa

SEQ ID NO: 280101 - DNA, 12 bp, Artificial Sequence
  Oligonucleotide primer for the detection of SNP TSC0008202
tgagatagatga

SEQ ID NO: 280102 - DNA, 12 bp, Artificial Sequence
  Oligonucleotide primer for the detection of SNP TSC0008204
tccaaaaccaca

SEQ ID NO: 280103 - DNA, 12 bp, Artificial Sequence
  Oligonucleotide primer for the detection of SNP TSC0008204
gattttgggatt

SEQ ID NO: 280104 - DNA, 12 bp, Artificial Sequence
  Oligonucleotide primer for the detection of SNP TSC0008204
aattttaaaatt

SEQ ID NO: 280105 - DNA, 12 bp, Artificial Sequence
  Oligonucleotide primer for the detection of SNP TSC0008204
tttaaggttata

SEQ ID NO: 280106 - DNA, 12 bp, Artificial Sequence
  Oligonucleotide primer for the detection of SNP TSC0008205
aaaaaataaata

SEQ ID NO: 280107 - DNA, 12 bp, Artificial Sequence
  Oligonucleotide primer for the detection of SNP TSC0008205
atgtgtaaaaat

SEQ ID NO: 280108 - DNA, 12 bp, Artificial Sequence
  Oligonucleotide primer for the detection of SNP TSC0008205
catatataaaaa

SEQ ID NO: 280109 - DNA, 12 bp, Artificial Sequence
  Oligonucleotide primer for the detection of SNP TSC0008205
ggaggatagatg

SEQ ID NO: 280110 - DNA, 12 bp, Artificial Sequence
  Oligonucleotide primer for the detection of SNP TSC0008207
taaataaaatac

SEQ ID NO: 280111 - DNA, 12 bp, Artificial Sequence
  Oligonucleotide primer for the detection of SNP TSC0008207
aatattttttat

SEQ ID NO: 280112 - DNA, 12 bp, Artificial Sequence
  Oligonucleotide primer for the detection of SNP TSC0008213
actcttcaaaaa

SEQ ID NO: 280113 - DNA, 12 bp, Artificial Sequence
  Oligonucleotide primer for the detection of SNP TSC0008213
attttagttttt

SEQ ID NO: 280114 - DNA, 12 bp, Artificial Sequence
  Oligonucleotide primer for the detection of SNP TSC0008213
attttagttttc

SEQ ID NO: 280115 - DNA, 12 bp, Artificial Sequence
  Oligonucleotide primer for the detection of SNP TSC0008213
aaattctaattt

SEQ ID NO: 280116 - DNA, 12 bp, Artificial Sequence
  Oligonucleotide primer for the detection of SNP TSC0008213
tattttttagaa

SEQ ID NO: 280117 - DNA, 12 bp, Artificial Sequence
  Oligonucleotide primer for the detection of SNP TSC0008214
ttaatatacatt

SEQ ID NO: 280118 - DNA, 12 bp, Artificial Sequence
  Oligonucleotide primer for the detection of SNP TSC0008214
tagaatttagaa

SEQ ID NO: 280119 - DNA, 12 bp, Artificial Sequence
  Oligonucleotide primer for the detection of SNP TSC0008229
attcaataacat

SEQ ID NO: 280120 - DNA, 12 bp, Artificial Sequence
  Oligonucleotide primer for the detection of SNP TSC0008229
tgttttgattaa

SEQ ID NO: 280121 - DNA, 12 bp, Artificial Sequence
  Oligonucleotide primer for the detection of SNP TSC0008232
aaatattttacc

SEQ ID NO: 280122 - DNA, 12 bp, Artificial Sequence
  Oligonucleotide primer for the detection of SNP TSC0008232
tagtgaggatta

SEQ ID NO: 280123 - DNA, 12 bp, Artificial Sequence
  Oligonucleotide primer for the detection of SNP TSC0008235
aaaacctaaaca

SEQ ID NO: 280124 - DNA, 12 bp, Artificial Sequence
  Oligonucleotide primer for the detection of SNP TSC0008235
ttatgattttag

SEQ ID NO: 280125 - DNA, 12 bp, Artificial Sequence
  Oligonucleotide primer for the detection of SNP TSC0008235
tcataaccccaa

SEQ ID NO: 280126 - DNA, 12 bp, Artificial Sequence
  Oligonucleotide primer for the detection of SNP TSC0008235
agggtttgggta

SEQ ID NO: 280127 - DNA, 12 bp, Artificial Sequence
  Oligonucleotide primer for the detection of SNP TSC0008237
atatctaatata

SEQ ID NO: 280128 - DNA, 12 bp, Artificial Sequence
  Oligonucleotide primer for the detection of SNP TSC0008237
atgtagtgtttg

SEQ ID NO: 280129 - DNA, 12 bp, Artificial Sequence
  Oligonucleotide primer for the detection of SNP TSC0008237
atacaatattta

SEQ ID NO: 280130 - DNA, 12 bp, Artificial Sequence
  Oligonucleotide primer for the detection of SNP TSC0008237
atatttagtgtg

SEQ ID NO: 280131 - DNA, 12 bp, Artificial Sequence
  Oligonucleotide primer for the detection of SNP TSC0008238
aatataacctaa

SEQ ID NO: 280132 - DNA, 12 bp, Artificial Sequence
  Oligonucleotide primer for the detection of SNP TSC0008238
tgttttgatatg

SEQ ID NO: 280133 - DNA, 12 bp, Artificial Sequence
  Oligonucleotide primer for the detection of SNP TSC0008238
tactctaacata

SEQ ID NO: 280134 - DNA, 12 bp, Artificial Sequence
  Oligonucleotide primer for the detection of SNP TSC0008238
gatatgatttaa

SEQ ID NO: 280135 - DNA, 12 bp, Artificial Sequence
  Oligonucleotide primer for the detection of SNP TSC0008242
aaaacatttttt

SEQ ID NO: 280136 - DNA, 12 bp, Artificial Sequence
  Oligonucleotide primer for the detection of SNP TSC0008242
ttgagagttgat

SEQ ID NO: 280137 - DNA, 12 bp, Artificial Sequence
  Oligonucleotide primer for the detection of SNP TSC0008242
tcgagagttgat

SEQ ID NO: 280138 - DNA, 12 bp, Artificial Sequence
  Oligonucleotide primer for the detection of SNP TSC0008242
ttgagagtcgat

SEQ ID NO: 280139 - DNA, 12 bp, Artificial Sequence
  Oligonucleotide primer for the detection of SNP TSC0008242
tcgagagtcgat

SEQ ID NO: 280140 - DNA, 12 bp, Artificial Sequence
  Oligonucleotide primer for the detection of SNP TSC0008242
ctcaaaaatcaa

SEQ ID NO: 280141 - DNA, 12 bp, Artificial Sequence
  Oligonucleotide primer for the detection of SNP TSC0008242
ctcaaaaatcga

SEQ ID NO: 280142 - DNA, 12 bp, Artificial Sequence
  Oligonucleotide primer for the detection of SNP TSC0008242
ctcgaaaatcaa

SEQ ID NO: 280143 - DNA, 12 bp, Artificial Sequence
  Oligonucleotide primer for the detection of SNP TSC0008242
ctcgaaaatcga

SEQ ID NO: 280144 - DNA, 12 bp, Artificial Sequence
  Oligonucleotide primer for the detection of SNP TSC0008242
aaaatatttttt

SEQ ID NO: 280145 - DNA, 12 bp, Artificial Sequence
  Oligonucleotide primer for the detection of SNP TSC0008244
tacttaaaatac

SEQ ID NO: 280146 - DNA, 12 bp, Artificial Sequence
  Oligonucleotide primer for the detection of SNP TSC0008244
ttttatttatag

SEQ ID NO: 280147 - DNA, 12 bp, Artificial Sequence
  Oligonucleotide primer for the detection of SNP TSC0008244
tctcactcacaa

SEQ ID NO: 280148 - DNA, 12 bp, Artificial Sequence
  Oligonucleotide primer for the detection of SNP TSC0008244
tatttgggatat

SEQ ID NO: 280149 - DNA, 12 bp, Artificial Sequence
  Oligonucleotide primer for the detection of SNP TSC0008245
aatttaatacat

SEQ ID NO: 280150 - DNA, 12 bp, Artificial Sequence
  Oligonucleotide primer for the detection of SNP TSC0008245
aataaattatat

SEQ ID NO: 280151 - DNA, 12 bp, Artificial Sequence
  Oligonucleotide primer for the detection of SNP TSC0008245
acaaattacata

SEQ ID NO: 280152 - DNA, 12 bp, Artificial Sequence
  Oligonucleotide primer for the detection of SNP TSC0008245
aatttaatatat

SEQ ID NO: 280153 - DNA, 12 bp, Artificial Sequence
  Oligonucleotide primer for the detection of SNP TSC0008247
aaatcaaataac

SEQ ID NO: 280154 - DNA, 12 bp, Artificial Sequence
  Oligonucleotide primer for the detection of SNP TSC0008247
gtaagtttaata

SEQ ID NO: 280155 - DNA, 12 bp, Artificial Sequence
  Oligonucleotide primer for the detection of SNP TSC0008248
aaaaactaatta

SEQ ID NO: 280156 - DNA, 12 bp, Artificial Sequence
  Oligonucleotide primer for the detection of SNP TSC0008248
tttttggaggtt

SEQ ID NO: 280157 - DNA, 12 bp, Artificial Sequence
  Oligonucleotide primer for the detection of SNP TSC0008248
tgaagattgatt

SEQ ID NO: 280158 - DNA, 12 bp, Artificial Sequence
  Oligonucleotide primer for the detection of SNP TSC0008249
aaaaataataaa

SEQ ID NO: 280159 - DNA, 12 bp, Artificial Sequence
  Oligonucleotide primer for the detection of SNP TSC0008249
accctctcctcc

SEQ ID NO: 280160 - DNA, 12 bp, Artificial Sequence
  Oligonucleotide primer for the detection of SNP TSC0008249
ggaggtggtggg

SEQ ID NO: 280161 - DNA, 12 bp, Artificial Sequence
  Oligonucleotide primer for the detection of SNP TSC0008250
tatacaaatatt

SEQ ID NO: 280162 - DNA, 12 bp, Artificial Sequence
  Oligonucleotide primer for the detection of SNP TSC0008250
aaccttccccca

SEQ ID NO: 280163 - DNA, 12 bp, Artificial Sequence
  Oligonucleotide primer for the detection of SNP TSC0008250
tgtgtaagtgtt

SEQ ID NO: 280164 - DNA, 12 bp, Artificial Sequence
  Oligonucleotide primer for the detection of SNP TSC0008251
tctctctctctc

SEQ ID NO: 280165 - DNA, 12 bp, Artificial Sequence
  Oligonucleotide primer for the detection of SNP TSC0008251
agagagagggag

SEQ ID NO: 280166 - DNA, 12 bp, Artificial Sequence
  Oligonucleotide primer for the detection of SNP TSC0008256
cacaactaacta

SEQ ID NO: 280167 - DNA, 12 bp, Artificial Sequence
  Oligonucleotide primer for the detection of SNP TSC0008256
gtgtggttttat

SEQ ID NO: 280168 - DNA, 12 bp, Artificial Sequence
  Oligonukleotid-Primer
gcgtggttttat

SEQ ID NO: 280169 - DNA, 12 bp, Artificial Sequence
  Oligonucleotide primer for the detection of SNP TSC0008256
acataatcccat

SEQ ID NO: 280170 - DNA, 12 bp, Artificial Sequence
  Oligonucleotide primer for the detection of SNP TSC0008256
acgtaatcccat

SEQ ID NO: 280171 - DNA, 12 bp, Artificial Sequence
  Oligonucleotide primer for the detection of SNP TSC0008256
gcataatcccat

SEQ ID NO: 280172 - DNA, 12 bp, Artificial Sequence
  Oligonucleotide primer for the detection of SNP TSC0008256
gcgtaatcccat

SEQ ID NO: 280173 - DNA, 12 bp, Artificial Sequence
  Oligonucleotide primer for the detection of SNP TSC0008256
ttataattggtt

SEQ ID NO: 280174 - DNA, 12 bp, Artificial Sequence
  Oligonucleotide primer for the detection of SNP TSC0008281
aaaccttctaca

SEQ ID NO: 280175 - DNA, 12 bp, Artificial Sequence
  Oligonucleotide primer for the detection of SNP TSC0008281
ttggatggttgt

SEQ ID NO: 280176 - DNA, 12 bp, Artificial Sequence
  Oligonucleotide primer for the detection of SNP TSC0008281
tctaaataacta

SEQ ID NO: 280177 - DNA, 12 bp, Artificial Sequence
  Oligonucleotide primer for the detection of SNP TSC0008281
aggttttttata

SEQ ID NO: 280178 - DNA, 12 bp, Artificial Sequence
  Oligonucleotide primer for the detection of SNP TSC0008296
ttaaatcaaatt

SEQ ID NO: 280179 - DNA, 12 bp, Artificial Sequence
  Oligonucleotide primer for the detection of SNP TSC0008296
ttaattaggaaa

SEQ ID NO: 280180 - DNA, 12 bp, Artificial Sequence
  Oligonucleotide primer for the detection of SNP TSC0008303
acttaaatttta

SEQ ID NO: 280181 - DNA, 12 bp, Artificial Sequence
  Oligonucleotide primer for the detection of SNP TSC0008303
gaggttggtatt

SEQ ID NO: 280182 - DNA, 12 bp, Artificial Sequence
  Oligonucleotide primer for the detection of SNP TSC0008303
aaaaattaatac

SEQ ID NO: 280183 - DNA, 12 bp, Artificial Sequence
  Oligonucleotide primer for the detection of SNP TSC0008303
ttaggttttatt

SEQ ID NO: 280184 - DNA, 12 bp, Artificial Sequence
  Oligonucleotide primer for the detection of SNP TSC0008304
attactaaaaat

SEQ ID NO: 280185 - DNA, 12 bp, Artificial Sequence
  Oligonucleotide primer for the detection of SNP TSC0008304
atttagagaata

SEQ ID NO: 280186 - DNA, 12 bp, Artificial Sequence
  Oligonucleotide primer for the detection of SNP TSC0008311
aattcacaaccc

SEQ ID NO: 280187 - DNA, 12 bp, Artificial Sequence
  Oligonucleotide primer for the detection of SNP TSC0008311
tttgataaagtg

SEQ ID NO: 280188 - DNA, 12 bp, Artificial Sequence
  Oligonucleotide primer for the detection of SNP TSC0008313
taatatagttat

SEQ ID NO: 280189 - DNA, 12 bp, Artificial Sequence
  Oligonucleotide primer for the detection of SNP TSC0008313
caacataaccat

SEQ ID NO: 280190 - DNA, 12 bp, Artificial Sequence
  Oligonucleotide primer for the detection of SNP TSC0008313
ttggtgggttag

SEQ ID NO: 280191 - DNA, 12 bp, Artificial Sequence
  Oligonucleotide primer for the detection of SNP TSC0008314
ggggaaaaatta

SEQ ID NO: 280192 - DNA, 12 bp, Artificial Sequence
  Oligonucleotide primer for the detection of SNP TSC0008314
aaaaaaaaatca

SEQ ID NO: 280193 - DNA, 12 bp, Artificial Sequence
  Oligonucleotide primer for the detection of SNP TSC0008314
tatttagggtgt

SEQ ID NO: 280194 - DNA, 12 bp, Artificial Sequence
  Oligonucleotide primer for the detection of SNP TSC0008314
tatttagggtgc

SEQ ID NO: 280195 - DNA, 12 bp, Artificial Sequence
  Oligonucleotide primer for the detection of SNP TSC0008315
taaatgggtaaa

SEQ ID NO: 280196 - DNA, 12 bp, Artificial Sequence
  Oligonucleotide primer for the detection of SNP TSC0008335
atatattattta

SEQ ID NO: 280197 - DNA, 12 bp, Artificial Sequence
  Oligonucleotide primer for the detection of SNP TSC0008335
agagaaaaatat

SEQ ID NO: 280198 - DNA, 12 bp, Artificial Sequence
  Oligonucleotide primer for the detection of SNP TSC0008335
atgtattatttg

SEQ ID NO: 280199 - DNA, 12 bp, Artificial Sequence
  Oligonucleotide primer for the detection of SNP TSC0008336
ttcaaatcattt

SEQ ID NO: 280200 - DNA, 12 bp, Artificial Sequence
  Oligonucleotide primer for the detection of SNP TSC0008336
atattaaaaata

SEQ ID NO: 280201 - DNA, 12 bp, Artificial Sequence
  Oligonucleotide primer for the detection of SNP TSC0008342
accaaaacatat

SEQ ID NO: 280202 - DNA, 12 bp, Artificial Sequence
  Oligonucleotide primer for the detection of SNP TSC0008342
gttgtttaattt

SEQ ID NO: 280203 - DNA, 12 bp, Artificial Sequence
  Oligonucleotide primer for the detection of SNP TSC0008342
actatttaactc

SEQ ID NO: 280204 - DNA, 12 bp, Artificial Sequence
  Oligonucleotide primer for the detection of SNP TSC0008342
ttaagatatatt

SEQ ID NO: 280205 - DNA, 12 bp, Artificial Sequence
  Oligonucleotide primer for the detection of SNP TSC0008342
ttaagatatatc

SEQ ID NO: 280206 - DNA, 12 bp, Artificial Sequence
  Oligonucleotide primer for the detection of SNP TSC0008350
tatatattaaat

SEQ ID NO: 280207 - DNA, 12 bp, Artificial Sequence
  Oligonucleotide primer for the detection of SNP TSC0008350
aatattgttgta

SEQ ID NO: 280208 - DNA, 12 bp, Artificial Sequence
  Oligonucleotide primer for the detection of SNP TSC0008350
aatattgtcgta

SEQ ID NO: 280209 - DNA, 12 bp, Artificial Sequence
  Oligonucleotide primer for the detection of SNP TSC0008353
caatacaacaat

SEQ ID NO: 280210 - DNA, 12 bp, Artificial Sequence
  Oligonucleotide primer for the detection of SNP TSC0008353
attttttataaa

SEQ ID NO: 280211 - DNA, 12 bp, Artificial Sequence
  Oligonucleotide primer for the detection of SNP TSC0008353
atctcttacaaa

SEQ ID NO: 280212 - DNA, 12 bp, Artificial Sequence
  Oligonucleotide primer for the detection of SNP TSC0008353
taatgtagtaat

SEQ ID NO: 280213 - DNA, 12 bp, Artificial Sequence
  Oligonucleotide primer for the detection of SNP TSC0008356
atacccttaaac

SEQ ID NO: 280214 - DNA, 12 bp, Artificial Sequence
  Oligonucleotide primer for the detection of SNP TSC0008356
taagtgagttga

SEQ ID NO: 280215 - DNA, 12 bp, Artificial Sequence
  Oligonucleotide primer for the detection of SNP TSC0008356
taagtgagtcga

SEQ ID NO: 280216 - DNA, 12 bp, Artificial Sequence
  Oligonucleotide primer for the detection of SNP TSC0008359
caaaactaacac

SEQ ID NO: 280217 - DNA, 12 bp, Artificial Sequence
  Oligonucleotide primer for the detection of SNP TSC0008359
tatgtttttgtt

SEQ ID NO: 280218 - DNA, 12 bp, Artificial Sequence
  Oligonucleotide primer for the detection of SNP TSC0008359
acatatctttac

SEQ ID NO: 280219 - DNA, 12 bp, Artificial Sequence
  Oligonucleotide primer for the detection of SNP TSC0008359
agagttagtatt

SEQ ID NO: 280220 - DNA, 12 bp, Artificial Sequence
  Oligonucleotide primer for the detection of SNP TSC0008360
taaaaaactact

SEQ ID NO: 280221 - DNA, 12 bp, Artificial Sequence
  Oligonucleotide primer for the detection of SNP TSC0008360
gaaattggtaat

SEQ ID NO: 280222 - DNA, 12 bp, Artificial Sequence
  Oligonucleotide primer for the detection of SNP TSC0008360
aaaactaacaac

SEQ ID NO: 280223 - DNA, 12 bp, Artificial Sequence
  Oligonucleotide primer for the detection of SNP TSC0008361
aatattcctaat

SEQ ID NO: 280224 - DNA, 12 bp, Artificial Sequence
  Oligonucleotide primer for the detection of SNP TSC0008361
cccaccaccaca

SEQ ID NO: 280225 - DNA, 12 bp, Artificial Sequence
  Oligonucleotide primer for the detection of SNP TSC0008361
gatatttttggt

SEQ ID NO: 280226 - DNA, 12 bp, Artificial Sequence
  Oligonucleotide primer for the detection of SNP TSC0008367
aatcctttttaa

SEQ ID NO: 280227 - DNA, 12 bp, Artificial Sequence
  Oligonucleotide primer for the detection of SNP TSC0008367
atatatagtaga

SEQ ID NO: 280228 - DNA, 12 bp, Artificial Sequence
  Oligonucleotide primer for the detection of SNP TSC0008367
tacataataaaa

SEQ ID NO: 280229 - DNA, 12 bp, Artificial Sequence
  Oligonucleotide primer for the detection of SNP TSC0008368
attcatatcctc

SEQ ID NO: 280230 - DNA, 12 bp, Artificial Sequence
  Oligonucleotide primer for the detection of SNP TSC0008368
ttgttttagaga

SEQ ID NO: 280231 - DNA, 12 bp, Artificial Sequence
  Oligonucleotide primer for the detection of SNP TSC0008369
tcttaaaaaaaa

SEQ ID NO: 280232 - DNA, 12 bp, Artificial Sequence
  Oligonucleotide primer for the detection of SNP TSC0008369
aatgagattaat

SEQ ID NO: 280233 - DNA, 12 bp, Artificial Sequence
  Oligonucleotide primer for the detection of SNP TSC0008369
aataaaatcaat

SEQ ID NO: 280234 - DNA, 12 bp, Artificial Sequence
  Oligonucleotide primer for the detection of SNP TSC0008369
ttttggaaaaga

SEQ ID NO: 280235 - DNA, 12 bp, Artificial Sequence
  Oligonucleotide primer for the detection of SNP TSC0008380
caatttcatttt

SEQ ID NO: 280236 - DNA, 12 bp, Artificial Sequence
  Oligonucleotide primer for the detection of SNP TSC0008380
taagattatata

SEQ ID NO: 280237 - DNA, 12 bp, Artificial Sequence
  Oligonucleotide primer for the detection of SNP TSC0008383
aatacaaccaat

SEQ ID NO: 280238 - DNA, 12 bp, Artificial Sequence
  Oligonucleotide primer for the detection of SNP TSC0008383
atgttaaattaa

SEQ ID NO: 280239 - DNA, 12 bp, Artificial Sequence
  Oligonucleotide primer for the detection of SNP TSC0008389
tatataaatttt

SEQ ID NO: 280240 - DNA, 12 bp, Artificial Sequence
  Oligonucleotide primer for the detection of SNP TSC0008389
aatgtaaaaaaa

SEQ ID NO: 280241 - DNA, 12 bp, Artificial Sequence
  Oligonucleotide primer for the detection of SNP TSC0008395
taacccataaat

SEQ ID NO: 280242 - DNA, 12 bp, Artificial Sequence
  Oligonucleotide primer for the detection of SNP TSC0008395
atgtttattgaa

SEQ ID NO: 280243 - DNA, 12 bp, Artificial Sequence
  Oligonucleotide primer for the detection of SNP TSC0008396
tcccaaaatcct

SEQ ID NO: 280244 - DNA, 12 bp, Artificial Sequence
  Oligonucleotide primer for the detection of SNP TSC0008396
tcccgaaatcct

SEQ ID NO: 280245 - DNA, 12 bp, Artificial Sequence
  Oligonucleotide primer for the detection of SNP TSC0008396
gaaggtgttaga

SEQ ID NO: 280246 - DNA, 12 bp, Artificial Sequence
  Oligonucleotide primer for the detection of SNP TSC0008396
aaaatatcaaaa

SEQ ID NO: 280247 - DNA, 12 bp, Artificial Sequence
  Oligonucleotide primer for the detection of SNP TSC0008396
ttttggaatttt

SEQ ID NO: 280248 - DNA, 12 bp, Artificial Sequence
  Oligonucleotide primer for the detection of SNP TSC0008396
tttcggaatttt

SEQ ID NO: 280249 - DNA, 12 bp, Artificial Sequence
  Oligonucleotide primer for the detection of SNP TSC0008397
ttatacaaaaat

SEQ ID NO: 280250 - DNA, 12 bp, Artificial Sequence
  Oligonucleotide primer for the detection of SNP TSC0008397
attaaggaaagg

SEQ ID NO: 280251 - DNA, 12 bp, Artificial Sequence
  Oligonucleotide primer for the detection of SNP TSC0008399
actactacatct

SEQ ID NO: 280252 - DNA, 12 bp, Artificial Sequence
  Oligonucleotide primer for the detection of SNP TSC0008399
tttttggttttg

SEQ ID NO: 280253 - DNA, 12 bp, Artificial Sequence
  Oligonucleotide primer for the detection of SNP TSC0008406
tctatccatcca

SEQ ID NO: 280254 - DNA, 12 bp, Artificial Sequence
  Oligonucleotide primer for the detection of SNP TSC0008406
ggatgagtggat

SEQ ID NO: 280255 - DNA, 12 bp, Artificial Sequence
  Oligonucleotide primer for the detection of SNP TSC0008406
tttgtttattta

SEQ ID NO: 280256 - DNA, 12 bp, Artificial Sequence
  Oligonucleotide primer for the detection of SNP TSC0008408
tgatgttaggaa

SEQ ID NO: 280257 - DNA, 12 bp, Artificial Sequence
  Oligonucleotide primer for the detection of SNP TSC0008408
aatatcaaaaaa

SEQ ID NO: 280258 - DNA, 12 bp, Artificial Sequence
  Oligonucleotide primer for the detection of SNP TSC0008408
agaaagttgaag

SEQ ID NO: 280259 - DNA, 12 bp, Artificial Sequence
  Oligonucleotide primer for the detection of SNP TSC0008408
agaaagtcgaag

SEQ ID NO: 280260 - DNA, 12 bp, Artificial Sequence
  Oligonucleotide primer for the detection of SNP TSC0008409
ctcctaaattca

SEQ ID NO: 280261 - DNA, 12 bp, Artificial Sequence
  Oligonucleotide primer for the detection of SNP TSC0008409
agttgaaggtgg

SEQ ID NO: 280262 - DNA, 12 bp, Artificial Sequence
  Oligonucleotide primer for the detection of SNP TSC0008409
agtcgaaggtgg

SEQ ID NO: 280263 - DNA, 12 bp, Artificial Sequence
  Oligonucleotide primer for the detection of SNP TSC0008417
aactcaaaataa

SEQ ID NO: 280264 - DNA, 12 bp, Artificial Sequence
  Oligonucleotide primer for the detection of SNP TSC0008417
tgggtagatttt

SEQ ID NO: 280265 - DNA, 12 bp, Artificial Sequence
  Oligonukleotid-Primer
taaataaatttt

SEQ ID NO: 280266 - DNA, 12 bp, Artificial Sequence
  Oligonucleotide primer for the detection of SNP TSC0008417
ggtttaaaataa

SEQ ID NO: 280267 - DNA, 12 bp, Artificial Sequence
  Oligonucleotide primer for the detection of SNP TSC0008419
aaaaacgaaaca

SEQ ID NO: 280268 - DNA, 12 bp, Artificial Sequence
  Oligonucleotide primer for the detection of SNP TSC0008419
aatgttttgttt

SEQ ID NO: 280269 - DNA, 12 bp, Artificial Sequence
  Oligonucleotide primer for the detection of SNP TSC0008419
aatattctattc

SEQ ID NO: 280270 - DNA, 12 bp, Artificial Sequence
  Oligonucleotide primer for the detection of SNP TSC0008419
aaaagtgaagta

SEQ ID NO: 280271 - DNA, 12 bp, Artificial Sequence
  Oligonucleotide primer for the detection of SNP TSC0008419
aaaagcgaagta

SEQ ID NO: 280272 - DNA, 12 bp, Artificial Sequence
  Oligonucleotide primer for the detection of SNP TSC0008420
tcaccataaaac

SEQ ID NO: 280273 - DNA, 12 bp, Artificial Sequence
  Oligonucleotide primer for the detection of SNP TSC0008420
tcttttaatata

SEQ ID NO: 280274 - DNA, 12 bp, Artificial Sequence
  Oligonucleotide primer for the detection of SNP TSC0008420
ttattatgagat

SEQ ID NO: 280275 - DNA, 12 bp, Artificial Sequence
  Oligonucleotide primer for the detection of SNP TSC0008433
taactacaataa

SEQ ID NO: 280276 - DNA, 12 bp, Artificial Sequence
  Oligonucleotide primer for the detection of SNP TSC0008433
ataaggtagaaa

SEQ ID NO: 280277 - DNA, 12 bp, Artificial Sequence
  Oligonucleotide primer for the detection of SNP TSC0008433
ataaaataaaaa

SEQ ID NO: 280278 - DNA, 12 bp, Artificial Sequence
  Oligonucleotide primer for the detection of SNP TSC0008433
tttgattataat

SEQ ID NO: 280279 - DNA, 12 bp, Artificial Sequence
  Oligonucleotide primer for the detection of SNP TSC0008439
tcttaatataat

SEQ ID NO: 280280 - DNA, 12 bp, Artificial Sequence
  Oligonucleotide primer for the detection of SNP TSC0008439
aaaaaaaatagg

SEQ ID NO: 280281 - DNA, 12 bp, Artificial Sequence
  Oligonucleotide primer for the detection of SNP TSC0008440
atcactaatcct

SEQ ID NO: 280282 - DNA, 12 bp, Artificial Sequence
  Oligonucleotide primer for the detection of SNP TSC0008440
aagtaaataata

SEQ ID NO: 280283 - DNA, 12 bp, Artificial Sequence
  Oligonucleotide primer for the detection of SNP TSC0008441
tcatttctcttt

SEQ ID NO: 280284 - DNA, 12 bp, Artificial Sequence
  Oligonucleotide primer for the detection of SNP TSC0008441
aaatatttttta

SEQ ID NO: 280285 - DNA, 12 bp, Artificial Sequence
  Oligonucleotide primer for the detection of SNP TSC0008447
ataatcttacct

SEQ ID NO: 280286 - DNA, 12 bp, Artificial Sequence
  Oligonucleotide primer for the detection of SNP TSC0008447
gaggtgttatag

SEQ ID NO: 280287 - DNA, 12 bp, Artificial Sequence
  Oligonucleotide primer for the detection of SNP TSC0008456
aacatacataat

SEQ ID NO: 280288 - DNA, 12 bp, Artificial Sequence
  Oligonucleotide primer for the detection of SNP TSC0008456
tttaatttattg

SEQ ID NO: 280289 - DNA, 12 bp, Artificial Sequence
  Oligonucleotide primer for the detection of SNP TSC0008457
ttaaatacaaca

SEQ ID NO: 280290 - DNA, 12 bp, Artificial Sequence
  Oligonucleotide primer for the detection of SNP TSC0008457
ttcatacattta

SEQ ID NO: 280291 - DNA, 12 bp, Artificial Sequence
  Oligonucleotide primer for the detection of SNP TSC0008457
tttggatataat

SEQ ID NO: 280292 - DNA, 12 bp, Artificial Sequence
  Oligonucleotide primer for the detection of SNP TSC0008458
tcacctaaattt

SEQ ID NO: 280293 - DNA, 12 bp, Artificial Sequence
  Oligonucleotide primer for the detection of SNP TSC0008458
gttgataatgag

SEQ ID NO: 280294 - DNA, 12 bp, Artificial Sequence
  Oligonucleotide primer for the detection of SNP TSC0008459
cacctttcacaa

SEQ ID NO: 280295 - DNA, 12 bp, Artificial Sequence
  Oligonucleotide primer for the detection of SNP TSC0008459
attttgagttga

SEQ ID NO: 280296 - DNA, 12 bp, Artificial Sequence
  Oligonucleotide primer for the detection of SNP TSC0008459
attttaaattaa

SEQ ID NO: 280297 - DNA, 12 bp, Artificial Sequence
  Oligonucleotide primer for the detection of SNP TSC0008465
ttattaatatct

SEQ ID NO: 280298 - DNA, 12 bp, Artificial Sequence
  Oligonucleotide primer for the detection of SNP TSC0008465
gaagataataaa

SEQ ID NO: 280299 - DNA, 12 bp, Artificial Sequence
  Oligonucleotide primer for the detection of SNP TSC0008473
caattacttctc

SEQ ID NO: 280300 - DNA, 12 bp, Artificial Sequence
  Oligonucleotide primer for the detection of SNP TSC0008473
aatgaattaggg

SEQ ID NO: 280301 - DNA, 12 bp, Artificial Sequence
  Oligonucleotide primer for the detection of SNP TSC0008473
aataaactaaaa

SEQ ID NO: 280302 - DNA, 12 bp, Artificial Sequence
  Oligonucleotide primer for the detection of SNP TSC0008473
agttgttttttt

SEQ ID NO: 280303 - DNA, 12 bp, Artificial Sequence
  Oligonucleotide primer for the detection of SNP TSC0008474
cctctacaaatc

SEQ ID NO: 280304 - DNA, 12 bp, Artificial Sequence
  Oligonucleotide primer for the detection of SNP TSC0008474
gttttagtagag

SEQ ID NO: 280305 - DNA, 12 bp, Artificial Sequence
  Oligonucleotide primer for the detection of SNP TSC0008477
aaatcttatttt

SEQ ID NO: 280306 - DNA, 12 bp, Artificial Sequence
  Oligonucleotide primer for the detection of SNP TSC0008479
aaaaatatccaa

SEQ ID NO: 280307 - DNA, 12 bp, Artificial Sequence
  Oligonucleotide primer for the detection of SNP TSC0008479
aaaaatatccga

SEQ ID NO: 280308 - DNA, 12 bp, Artificial Sequence
  Oligonucleotide primer for the detection of SNP TSC0008479
agttattgtgtt

SEQ ID NO: 280309 - DNA, 12 bp, Artificial Sequence
  Oligonucleotide primer for the detection of SNP TSC0008479
agttatcgtgtt

SEQ ID NO: 280310 - DNA, 12 bp, Artificial Sequence
  Oligonucleotide primer for the detection of SNP TSC0008479
agttattgcgtt

SEQ ID NO: 280311 - DNA, 12 bp, Artificial Sequence
  Oligonucleotide primer for the detection of SNP TSC0008479
agttatcgcgtt

SEQ ID NO: 280312 - DNA, 12 bp, Artificial Sequence
  Oligonucleotide primer for the detection of SNP TSC0008479
aaccaccacacc

SEQ ID NO: 280313 - DNA, 12 bp, Artificial Sequence
  Oligonucleotide primer for the detection of SNP TSC0008479
aaccaccacgcc

SEQ ID NO: 280314 - DNA, 12 bp, Artificial Sequence
  Oligonucleotide primer for the detection of SNP TSC0008479
aaccaccgcacc

SEQ ID NO: 280315 - DNA, 12 bp, Artificial Sequence
  Oligonucleotide primer for the detection of SNP TSC0008479
aaccaccgcgcc

SEQ ID NO: 280316 - DNA, 12 bp, Artificial Sequence
  Oligonucleotide primer for the detection of SNP TSC0008479
aagagtgtttgg

SEQ ID NO: 280317 - DNA, 12 bp, Artificial Sequence
  Oligonucleotide primer for the detection of SNP TSC0008479
aagagtgttcgg

SEQ ID NO: 280318 - DNA, 12 bp, Artificial Sequence
  Oligonucleotide primer for the detection of SNP TSC0008480
tcataaaatcaa

SEQ ID NO: 280319 - DNA, 12 bp, Artificial Sequence
  Oligonucleotide primer for the detection of SNP TSC0008480
tggtttttattt

SEQ ID NO: 280320 - DNA, 12 bp, Artificial Sequence
  Oligonucleotide primer for the detection of SNP TSC0008480
ataatctccatc

SEQ ID NO: 280321 - DNA, 12 bp, Artificial Sequence
  Oligonucleotide primer for the detection of SNP TSC0008480
ttatgaggttag

SEQ ID NO: 280322 - DNA, 12 bp, Artificial Sequence
  Oligonucleotide primer for the detection of SNP TSC0008481
attttattttta

SEQ ID NO: 280323 - DNA, 12 bp, Artificial Sequence
  Oligonucleotide primer for the detection of SNP TSC0008490
ccaataaacttc

SEQ ID NO: 280324 - DNA, 12 bp, Artificial Sequence
  Oligonucleotide primer for the detection of SNP TSC0008490
tgtattgttgtg

SEQ ID NO: 280325 - DNA, 12 bp, Artificial Sequence
  Oligonucleotide primer for the detection of SNP TSC0008490
tacattactata

SEQ ID NO: 280326 - DNA, 12 bp, Artificial Sequence
  Oligonucleotide primer for the detection of SNP TSC0008490
ttaatgaatttt

SEQ ID NO: 280327 - DNA, 12 bp, Artificial Sequence
  Oligonucleotide primer for the detection of SNP TSC0008491
cccccctaccta

SEQ ID NO: 280328 - DNA, 12 bp, Artificial Sequence
  Oligonucleotide primer for the detection of SNP TSC0008491
gtgttatggttt

SEQ ID NO: 280329 - DNA, 12 bp, Artificial Sequence
  Oligonucleotide primer for the detection of SNP TSC0008491
atatcataattt

SEQ ID NO: 280330 - DNA, 12 bp, Artificial Sequence
  Oligonucleotide primer for the detection of SNP TSC0008493
tctaaatattta

SEQ ID NO: 280331 - DNA, 12 bp, Artificial Sequence
  Oligonucleotide primer for the detection of SNP TSC0008493
tttaaattttca

SEQ ID NO: 280332 - DNA, 12 bp, Artificial Sequence
  Oligonucleotide primer for the detection of SNP TSC0008493
tttgaatgtttg

SEQ ID NO: 280333 - DNA, 12 bp, Artificial Sequence
  Oligonucleotide primer for the detection of SNP TSC0008500
ttacaaacaaaa

SEQ ID NO: 280334 - DNA, 12 bp, Artificial Sequence
  Oligonucleotide primer for the detection of SNP TSC0008500
attttagaattt

SEQ ID NO: 280335 - DNA, 12 bp, Artificial Sequence
  Oligonucleotide primer for the detection of SNP TSC0008500
aatcccaaaatc

SEQ ID NO: 280336 - DNA, 12 bp, Artificial Sequence
  Oligonucleotide primer for the detection of SNP TSC0008500
attgtaggtaag

SEQ ID NO: 280337 - DNA, 12 bp, Artificial Sequence
  Oligonucleotide primer for the detection of SNP TSC0008502
aaaaaaaattct

SEQ ID NO: 280338 - DNA, 12 bp, Artificial Sequence
  Oligonucleotide primer for the detection of SNP TSC0008502
tttaaattttaa

SEQ ID NO: 280339 - DNA, 12 bp, Artificial Sequence
  Oligonucleotide primer for the detection of SNP TSC0008503
agtttattgtaa

SEQ ID NO: 280340 - DNA, 12 bp, Artificial Sequence
  Oligonucleotide primer for the detection of SNP TSC0008504
aatccacccacc

SEQ ID NO: 280341 - DNA, 12 bp, Artificial Sequence
  Oligonucleotide primer for the detection of SNP TSC0008504
gatttatttatt

SEQ ID NO: 280342 - DNA, 12 bp, Artificial Sequence
  Oligonucleotide primer for the detection of SNP TSC0008507
aactcaaataat

SEQ ID NO: 280343 - DNA, 12 bp, Artificial Sequence
  Oligonucleotide primer for the detection of SNP TSC0008507
attgttataaag

SEQ ID NO: 280344 - DNA, 12 bp, Artificial Sequence
  Oligonucleotide primer for the detection of SNP TSC0008508
caaaaaacaaac

SEQ ID NO: 280345 - DNA, 12 bp, Artificial Sequence
  Oligonucleotide primer for the detection of SNP TSC0008508
tgttagtatttg

SEQ ID NO: 280346 - DNA, 12 bp, Artificial Sequence
  Oligonucleotide primer for the detection of SNP TSC0008509
ctcgaaataaat

SEQ ID NO: 280347 - DNA, 12 bp, Artificial Sequence
  Oligonucleotide primer for the detection of SNP TSC0008509
ttatttttttag

SEQ ID NO: 280348 - DNA, 12 bp, Artificial Sequence
  Oligonucleotide primer for the detection of SNP TSC0008510
tatatatacaat

SEQ ID NO: 280349 - DNA, 12 bp, Artificial Sequence
  Oligonucleotide primer for the detection of SNP TSC0008510
tatatatacgat

SEQ ID NO: 280350 - DNA, 12 bp, Artificial Sequence
  Oligonucleotide primer for the detection of SNP TSC0008510
ttttagatttta

SEQ ID NO: 280351 - DNA, 12 bp, Artificial Sequence
  Oligonucleotide primer for the detection of SNP TSC0008511
taatttttcttt

SEQ ID NO: 280352 - DNA, 12 bp, Artificial Sequence
  Oligonucleotide primer for the detection of SNP TSC0008511
aaaataaaaaag

SEQ ID NO: 280353 - DNA, 12 bp, Artificial Sequence
  Oligonucleotide primer for the detection of SNP TSC0008512
aaacaacctacc

SEQ ID NO: 280354 - DNA, 12 bp, Artificial Sequence
  Oligonucleotide primer for the detection of SNP TSC0008512
atatttttaggg

SEQ ID NO: 280355 - DNA, 12 bp, Artificial Sequence
  Oligonucleotide primer for the detection of SNP TSC0008515
ttttcaaaaacc

SEQ ID NO: 280356 - DNA, 12 bp, Artificial Sequence
  Oligonucleotide primer for the detection of SNP TSC0008515
cttcctactcta

SEQ ID NO: 280357 - DNA, 12 bp, Artificial Sequence
  Oligonucleotide primer for the detection of SNP TSC0008515
tttttaggggtt

SEQ ID NO: 280358 - DNA, 12 bp, Artificial Sequence
  Oligonucleotide primer for the detection of SNP TSC0008516
tctaaacaaaaa

SEQ ID NO: 280359 - DNA, 12 bp, Artificial Sequence
  Oligonucleotide primer for the detection of SNP TSC0008516
catttctcctac

SEQ ID NO: 280360 - DNA, 12 bp, Artificial Sequence
  Oligonucleotide primer for the detection of SNP TSC0008516
tttgagtagaga

SEQ ID NO: 280361 - DNA, 12 bp, Artificial Sequence
  Oligonucleotide primer for the detection of SNP TSC0008518
atgttttttaga

SEQ ID NO: 280362 - DNA, 12 bp, Artificial Sequence
  Oligonucleotide primer for the detection of SNP TSC0008518
atatctttcaaa

SEQ ID NO: 280363 - DNA, 12 bp, Artificial Sequence
  Oligonucleotide primer for the detection of SNP TSC0008518
tttagaggagtg

SEQ ID NO: 280364 - DNA, 12 bp, Artificial Sequence
  Oligonucleotide primer for the detection of SNP TSC0008528
actataaatatt

SEQ ID NO: 280365 - DNA, 12 bp, Artificial Sequence
  Oligonucleotide primer for the detection of SNP TSC0008528
aaaattgggtgg

SEQ ID NO: 280366 - DNA, 12 bp, Artificial Sequence
  Oligonucleotide primer for the detection of SNP TSC0008528
aaaatcgggtgg

SEQ ID NO: 280367 - DNA, 12 bp, Artificial Sequence
  Oligonucleotide primer for the detection of SNP TSC0008535
tcttaataaaac

SEQ ID NO: 280368 - DNA, 12 bp, Artificial Sequence
  Oligonucleotide primer for the detection of SNP TSC0008535
taaaattatgag

SEQ ID NO: 280369 - DNA, 12 bp, Artificial Sequence
  Oligonucleotide primer for the detection of SNP TSC0008535
taaaaccataaa

SEQ ID NO: 280370 - DNA, 12 bp, Artificial Sequence
  Oligonukleotid-Primer
ttttggtggggt

SEQ ID NO: 280371 - DNA, 12 bp, Artificial Sequence
  Oligonucleotide primer for the detection of SNP TSC0008535
ttttggtggggc

SEQ ID NO: 280372 - DNA, 12 bp, Artificial Sequence
  Oligonucleotide primer for the detection of SNP TSC0008536
aatatattttat

SEQ ID NO: 280373 - DNA, 12 bp, Artificial Sequence
  Oligonucleotide primer for the detection of SNP TSC0008536
tgaggtagaaaa

SEQ ID NO: 280374 - DNA, 12 bp, Artificial Sequence
  Oligonucleotide primer for the detection of SNP TSC0008536
cgaggtagaaaa

SEQ ID NO: 280375 - DNA, 12 bp, Artificial Sequence
  Oligonucleotide primer for the detection of SNP TSC0008537
acataaaaccaa

SEQ ID NO: 280376 - DNA, 12 bp, Artificial Sequence
  Oligonucleotide primer for the detection of SNP TSC0008537
attttttattag

SEQ ID NO: 280377 - DNA, 12 bp, Artificial Sequence
  Oligonucleotide primer for the detection of SNP TSC0008537
agtatgaaatta

SEQ ID NO: 280378 - DNA, 12 bp, Artificial Sequence
  Oligonucleotide primer for the detection of SNP TSC0008538
aaatacttctat

SEQ ID NO: 280379 - DNA, 12 bp, Artificial Sequence
  Oligonucleotide primer for the detection of SNP TSC0008538
tatatgtattta

SEQ ID NO: 280380 - DNA, 12 bp, Artificial Sequence
  Oligonucleotide primer for the detection of SNP TSC0008539
tcacccttaaaa

SEQ ID NO: 280381 - DNA, 12 bp, Artificial Sequence
  Oligonucleotide primer for the detection of SNP TSC0008539
gttattgggttt

SEQ ID NO: 280382 - DNA, 12 bp, Artificial Sequence
  Oligonucleotide primer for the detection of SNP TSC0008539
gttattgggttc

SEQ ID NO: 280383 - DNA, 12 bp, Artificial Sequence
  Oligonucleotide primer for the detection of SNP TSC0008539
atcactaaactc

SEQ ID NO: 280384 - DNA, 12 bp, Artificial Sequence
  Oligonucleotide primer for the detection of SNP TSC0008539
tatttttgaggt

SEQ ID NO: 280385 - DNA, 12 bp, Artificial Sequence
  Oligonucleotide primer for the detection of SNP TSC0008541
ttaatttcctat

SEQ ID NO: 280386 - DNA, 12 bp, Artificial Sequence
  Oligonucleotide primer for the detection of SNP TSC0008541
atttattattta

SEQ ID NO: 280387 - DNA, 12 bp, Artificial Sequence
  Oligonucleotide primer for the detection of SNP TSC0008542
cctccccttcca

SEQ ID NO: 280388 - DNA, 12 bp, Artificial Sequence
  Oligonucleotide primer for the detection of SNP TSC0008542
tttataattatg

SEQ ID NO: 280389 - DNA, 12 bp, Artificial Sequence
  Oligonucleotide primer for the detection of SNP TSC0008542
cttacaatcata

SEQ ID NO: 280390 - DNA, 12 bp, Artificial Sequence
  Oligonucleotide primer for the detection of SNP TSC0008543
ttctactacaac

SEQ ID NO: 280391 - DNA, 12 bp, Artificial Sequence
  Oligonucleotide primer for the detection of SNP TSC0008543
atattatgtgga

SEQ ID NO: 280392 - DNA, 12 bp, Artificial Sequence
  Oligonucleotide primer for the detection of SNP TSC0008544
cacaattctaac

SEQ ID NO: 280393 - DNA, 12 bp, Artificial Sequence
  Oligonucleotide primer for the detection of SNP TSC0008544
aaagatgtttga

SEQ ID NO: 280394 - DNA, 12 bp, Artificial Sequence
  Oligonucleotide primer for the detection of SNP TSC0008545
caatacaaaacc

SEQ ID NO: 280395 - DNA, 12 bp, Artificial Sequence
  Oligonucleotide primer for the detection of SNP TSC0008545
tagagaattaag

SEQ ID NO: 280396 - DNA, 12 bp, Artificial Sequence
  Oligonucleotide primer for the detection of SNP TSC0008546
aacatcaacaca

SEQ ID NO: 280397 - DNA, 12 bp, Artificial Sequence
  Oligonucleotide primer for the detection of SNP TSC0008546
ttaattatggga

SEQ ID NO: 280398 - DNA, 12 bp, Artificial Sequence
  Oligonucleotide primer for the detection of SNP TSC0008546
ttaattacggga

SEQ ID NO: 280399 - DNA, 12 bp, Artificial Sequence
  Oligonucleotide primer for the detection of SNP TSC0008546
ttaatcacaaaa

SEQ ID NO: 280400 - DNA, 12 bp, Artificial Sequence
  Oligonucleotide primer for the detection of SNP TSC0008546
ttaatcacgaaa

SEQ ID NO: 280401 - DNA, 12 bp, Artificial Sequence
  Oligonucleotide primer for the detection of SNP TSC0008546
aatattagtata

SEQ ID NO: 280402 - DNA, 12 bp, Artificial Sequence
  Oligonucleotide primer for the detection of SNP TSC0008557
tgtggtataatt

SEQ ID NO: 280403 - DNA, 12 bp, Artificial Sequence
  Oligonucleotide primer for the detection of SNP TSC0008557
tataacataatc

SEQ ID NO: 280404 - DNA, 12 bp, Artificial Sequence
  Oligonucleotide primer for the detection of SNP TSC0008557
ggttgtagtgaa

SEQ ID NO: 280405 - DNA, 12 bp, Artificial Sequence
  Oligonucleotide primer for the detection of SNP TSC0008575
ccccaacccccc

SEQ ID NO: 280406 - DNA, 12 bp, Artificial Sequence
  Oligonucleotide primer for the detection of SNP TSC0008575
ccccgacccccc

SEQ ID NO: 280407 - DNA, 12 bp, Artificial Sequence
  Oligonucleotide primer for the detection of SNP TSC0008575
agttatgttaag

SEQ ID NO: 280408 - DNA, 12 bp, Artificial Sequence
  Oligonucleotide primer for the detection of SNP TSC0008576
acaacactcctc

SEQ ID NO: 280409 - DNA, 12 bp, Artificial Sequence
  unsure (5): Oligonucleotide primer for the detection of SNP TSC0008576
tttangtaaggg

SEQ ID NO: 280410 - DNA, 12 bp, Artificial Sequence
  Oligonucleotide primer for the detection of SNP TSC0008577
tattattatatt

SEQ ID NO: 280411 - DNA, 12 bp, Artificial Sequence
  Oligonucleotide primer for the detection of SNP TSC0008577
caccaccatacc

SEQ ID NO: 280412 - DNA, 12 bp, Artificial Sequence
  Oligonucleotide primer for the detection of SNP TSC0008578
ataaaaataacc

SEQ ID NO: 280413 - DNA, 12 bp, Artificial Sequence
  Oligonucleotide primer for the detection of SNP TSC0008578
tttagggatttt

SEQ ID NO: 280414 - DNA, 12 bp, Artificial Sequence
  Oligonucleotide primer for the detection of SNP TSC0008578
tttagggatttc

SEQ ID NO: 280415 - DNA, 12 bp, Artificial Sequence
  Oligonucleotide primer for the detection of SNP TSC0008578
cccaaaaacttc

SEQ ID NO: 280416 - DNA, 12 bp, Artificial Sequence
  Oligonucleotide primer for the detection of SNP TSC0008578
atgaggatgatt

SEQ ID NO: 280417 - DNA, 12 bp, Artificial Sequence
  Oligonucleotide primer for the detection of SNP TSC0008578
atgaggatgatc

SEQ ID NO: 280418 - DNA, 12 bp, Artificial Sequence
  Oligonucleotide primer for the detection of SNP TSC0008579
taataatacata

SEQ ID NO: 280419 - DNA, 12 bp, Artificial Sequence
  Oligonucleotide primer for the detection of SNP TSC0008579
atggtggtgtat

SEQ ID NO: 280420 - DNA, 12 bp, Artificial Sequence
  Oligonucleotide primer for the detection of SNP TSC0008582
ctacaaccctac

SEQ ID NO: 280421 - DNA, 12 bp, Artificial Sequence
  Oligonucleotide primer for the detection of SNP TSC0008582
agttgggtgaat

SEQ ID NO: 280422 - DNA, 12 bp, Artificial Sequence
  Oligonucleotide primer for the detection of SNP TSC0008582
ctaaataaataa

SEQ ID NO: 280423 - DNA, 12 bp, Artificial Sequence
  Oligonucleotide primer for the detection of SNP TSC0008582
ttataattttgt

SEQ ID NO: 280424 - DNA, 12 bp, Artificial Sequence
  Oligonucleotide primer for the detection of SNP TSC0008606
aaacaacatcat

SEQ ID NO: 280425 - DNA, 12 bp, Artificial Sequence
  Oligonucleotide primer for the detection of SNP TSC0008606
tttttagatgtg

SEQ ID NO: 280426 - DNA, 12 bp, Artificial Sequence
  Oligonucleotide primer for the detection of SNP TSC0008612
tattcacatcct

SEQ ID NO: 280427 - DNA, 12 bp, Artificial Sequence
  Oligonucleotide primer for the detection of SNP TSC0008612
aataaatgttgg

SEQ ID NO: 280428 - DNA, 12 bp, Artificial Sequence
  Oligonucleotide primer for the detection of SNP TSC0008612
aataaatactaa

SEQ ID NO: 280429 - DNA, 12 bp, Artificial Sequence
  Oligonucleotide primer for the detection of SNP TSC0008612
tatttatatttt

SEQ ID NO: 280430 - DNA, 12 bp, Artificial Sequence
  Oligonucleotide primer for the detection of SNP TSC0008617
tttaacaaacat

SEQ ID NO: 280431 - DNA, 12 bp, Artificial Sequence
  Oligonucleotide primer for the detection of SNP TSC0008617
tttaacaaacgt

SEQ ID NO: 280432 - DNA, 12 bp, Artificial Sequence
  Oligonucleotide primer for the detection of SNP TSC0008617
gaataaaagaaa

SEQ ID NO: 280433 - DNA, 12 bp, Artificial Sequence
  Oligonucleotide primer for the detection of SNP TSC0008618
atacttaataac

SEQ ID NO: 280434 - DNA, 12 bp, Artificial Sequence
  Oligonucleotide primer for the detection of SNP TSC0008618
atattgaaatta

SEQ ID NO: 280435 - DNA, 12 bp, Artificial Sequence
  Oligonucleotide primer for the detection of SNP TSC0008619
ttattcctacta

SEQ ID NO: 280436 - DNA, 12 bp, Artificial Sequence
  Oligonucleotide primer for the detection of SNP TSC0008619
aaggttaaatat

SEQ ID NO: 280437 - DNA, 12 bp, Artificial Sequence
  Oligonucleotide primer for the detection of SNP TSC0008619
tttatttttgtt

SEQ ID NO: 280438 - DNA, 12 bp, Artificial Sequence
  Oligonucleotide primer for the detection of SNP TSC0008637
accaatcacact

SEQ ID NO: 280439 - DNA, 12 bp, Artificial Sequence
  Oligonucleotide primer for the detection of SNP TSC0008637
accaatcgcact

SEQ ID NO: 280440 - DNA, 12 bp, Artificial Sequence
  Oligonucleotide primer for the detection of SNP TSC0008637
ttattttgatta

SEQ ID NO: 280441 - DNA, 12 bp, Artificial Sequence
  Oligonucleotide primer for the detection of SNP TSC0008638
aaaaaaacccac

SEQ ID NO: 280442 - DNA, 12 bp, Artificial Sequence
  Oligonucleotide primer for the detection of SNP TSC0008638
aagaaatgagtg

SEQ ID NO: 280443 - DNA, 12 bp, Artificial Sequence
  Oligonucleotide primer for the detection of SNP TSC0008638
ggagaggtttat

SEQ ID NO: 280444 - DNA, 12 bp, Artificial Sequence
  Oligonucleotide primer for the detection of SNP TSC0008642
ataacataaacc

SEQ ID NO: 280445 - DNA, 12 bp, Artificial Sequence
  Oligonucleotide primer for the detection of SNP TSC0008642
aagttgggttag

SEQ ID NO: 280446 - DNA, 12 bp, Artificial Sequence
  Oligonucleotide primer for the detection of SNP TSC0008650
tctaaaaaacct

SEQ ID NO: 280447 - DNA, 12 bp, Artificial Sequence
  Oligonucleotide primer for the detection of SNP TSC0008650
aaatttatagtg

SEQ ID NO: 280448 - DNA, 12 bp, Artificial Sequence
  Oligonucleotide primer for the detection of SNP TSC0008651
aataaccttttc

SEQ ID NO: 280449 - DNA, 12 bp, Artificial Sequence
  Oligonucleotide primer for the detection of SNP TSC0008651
gagttataaggg

SEQ ID NO: 280450 - DNA, 12 bp, Artificial Sequence
  Oligonucleotide primer for the detection of SNP TSC0008653
actattcaaaat

SEQ ID NO: 280451 - DNA, 12 bp, Artificial Sequence
  Oligonucleotide primer for the detection of SNP TSC0008653
aattattgtgta

SEQ ID NO: 280452 - DNA, 12 bp, Artificial Sequence
  Oligonucleotide primer for the detection of SNP TSC0008654
aacgtaataact

SEQ ID NO: 280453 - DNA, 12 bp, Artificial Sequence
  Oligonucleotide primer for the detection of SNP TSC0008654
aaattataggtg

SEQ ID NO: 280454 - DNA, 12 bp, Artificial Sequence
  Oligonucleotide primer for the detection of SNP TSC0008654
aaattataggcg

SEQ ID NO: 280455 - DNA, 12 bp, Artificial Sequence
  Oligonucleotide primer for the detection of SNP TSC0008655
cttctcttactc

SEQ ID NO: 280456 - DNA, 12 bp, Artificial Sequence
  Oligonucleotide primer for the detection of SNP TSC0008655
gaaggaagagga

SEQ ID NO: 280457 - DNA, 12 bp, Artificial Sequence
  Oligonucleotide primer for the detection of SNP TSC0008656
ctctaaactaaa

SEQ ID NO: 280458 - DNA, 12 bp, Artificial Sequence
  Oligonucleotide primer for the detection of SNP TSC0008656
ggataaagaagt

SEQ ID NO: 280459 - DNA, 12 bp, Artificial Sequence
  Oligonucleotide primer for the detection of SNP TSC0008656
aaataaaaaaat

SEQ ID NO: 280460 - DNA, 12 bp, Artificial Sequence
  Oligonucleotide primer for the detection of SNP TSC0008656
ttttaggttgaa

SEQ ID NO: 280461 - DNA, 12 bp, Artificial Sequence
  Oligonucleotide primer for the detection of SNP TSC0008664
actaaaaacact

SEQ ID NO: 280462 - DNA, 12 bp, Artificial Sequence
  Oligonucleotide primer for the detection of SNP TSC0008664
ttgtgttttttg

SEQ ID NO: 280463 - DNA, 12 bp, Artificial Sequence
  Oligonucleotide primer for the detection of SNP TSC0008670
aaaaataatctc

SEQ ID NO: 280464 - DNA, 12 bp, Artificial Sequence
  Oligonucleotide primer for the detection of SNP TSC0008670
tattttgttttt

SEQ ID NO: 280465 - DNA, 12 bp, Artificial Sequence
  Oligonucleotide primer for the detection of SNP TSC0008671
acaactcactac

SEQ ID NO: 280466 - DNA, 12 bp, Artificial Sequence
  Oligonucleotide primer for the detection of SNP TSC0008671
gcaactcactac

SEQ ID NO: 280467 - DNA, 12 bp, Artificial Sequence
  Oligonucleotide primer for the detection of SNP TSC0008671
tggaaggtggag

SEQ ID NO: 280468 - DNA, 12 bp, Artificial Sequence
  Oligonucleotide primer for the detection of SNP TSC0008671
tggaaggcggag

SEQ ID NO: 280469 - DNA, 12 bp, Artificial Sequence
  Oligonucleotide primer for the detection of SNP TSC0008679
accccaaaaaat

SEQ ID NO: 280470 - DNA, 12 bp, Artificial Sequence
  Oligonucleotide primer for the detection of SNP TSC0008679
attttgggttag

SEQ ID NO: 280471 - DNA, 12 bp, Artificial Sequence
  Oligonucleotide primer for the detection of SNP TSC0008680
taaataccccta

SEQ ID NO: 280472 - DNA, 12 bp, Artificial Sequence
  Oligonucleotide primer for the detection of SNP TSC0008680
gaagtatttatt

SEQ ID NO: 280473 - DNA, 12 bp, Artificial Sequence
  Oligonucleotide primer for the detection of SNP TSC0008680
aaaatattcatc

SEQ ID NO: 280474 - DNA, 12 bp, Artificial Sequence
  Oligonucleotide primer for the detection of SNP TSC0008680
tgaatgtttttg

SEQ ID NO: 280475 - DNA, 12 bp, Artificial Sequence
  Oligonucleotide primer for the detection of SNP TSC0008681
tgggggtggagg

SEQ ID NO: 280476 - DNA, 12 bp, Artificial Sequence
  Oligonucleotide primer for the detection of SNP TSC0008681
taaaaataaaaa

SEQ ID NO: 280477 - DNA, 12 bp, Artificial Sequence
  Oligonucleotide primer for the detection of SNP TSC0008681
gaggagtggatg

SEQ ID NO: 280478 - DNA, 12 bp, Artificial Sequence
  Oligonucleotide primer for the detection of SNP TSC0008687
aaactattttat

SEQ ID NO: 280479 - DNA, 12 bp, Artificial Sequence
  Oligonucleotide primer for the detection of SNP TSC0008687
ggttattggtta

SEQ ID NO: 280480 - DNA, 12 bp, Artificial Sequence
  Oligonucleotide primer for the detection of SNP TSC0008692
tacactaacatc

SEQ ID NO: 280481 - DNA, 12 bp, Artificial Sequence
  Oligonucleotide primer for the detection of SNP TSC0008692
tacgctaacatc

SEQ ID NO: 280482 - DNA, 12 bp, Artificial Sequence
  Oligonucleotide primer for the detection of SNP TSC0008692
tttgatttgggg

SEQ ID NO: 280483 - DNA, 12 bp, Artificial Sequence
  Oligonucleotide primer for the detection of SNP TSC0008693
taactcactaat

SEQ ID NO: 280484 - DNA, 12 bp, Artificial Sequence
  Oligonucleotide primer for the detection of SNP TSC0008693
tgagatttagaa

SEQ ID NO: 280485 - DNA, 12 bp, Artificial Sequence
  Oligonucleotide primer for the detection of SNP TSC0008694
ctaaatctcatt

SEQ ID NO: 280486 - DNA, 12 bp, Artificial Sequence
  Oligonucleotide primer for the detection of SNP TSC0008694
aggtttattttg

SEQ ID NO: 280487 - DNA, 12 bp, Artificial Sequence
  Oligonucleotide primer for the detection of SNP TSC0008695
taaaatacaaat

SEQ ID NO: 280488 - DNA, 12 bp, Artificial Sequence
  Oligonucleotide primer for the detection of SNP TSC0008695
tattaaatgtgg

SEQ ID NO: 280489 - DNA, 12 bp, Artificial Sequence
  Oligonucleotide primer for the detection of SNP TSC0008695
tattaaatgcgg

SEQ ID NO: 280490 - DNA, 12 bp, Artificial Sequence
  Oligonucleotide primer for the detection of SNP TSC0008696
taatttactaaa

SEQ ID NO: 280491 - DNA, 12 bp, Artificial Sequence
  Oligonucleotide primer for the detection of SNP TSC0008696
tgaagagtatgt

SEQ ID NO: 280492 - DNA, 12 bp, Artificial Sequence
  Oligonucleotide primer for the detection of SNP TSC0008696
tgaagagtacgt

SEQ ID NO: 280493 - DNA, 12 bp, Artificial Sequence
  Oligonucleotide primer for the detection of SNP TSC0008696
tgaagagtatgc

SEQ ID NO: 280494 - DNA, 12 bp, Artificial Sequence
  Oligonucleotide primer for the detection of SNP TSC0008696
tgaagagtacgc

SEQ ID NO: 280495 - DNA, 12 bp, Artificial Sequence
  Oligonucleotide primer for the detection of SNP TSC0008696
taaaaaacacac

SEQ ID NO: 280496 - DNA, 12 bp, Artificial Sequence
  Oligonucleotide primer for the detection of SNP TSC0008696
taaaaaacacgc

SEQ ID NO: 280497 - DNA, 12 bp, Artificial Sequence
  Oligonucleotide primer for the detection of SNP TSC0008696
tgatttattgag

SEQ ID NO: 280498 - DNA, 12 bp, Artificial Sequence
  Oligonucleotide primer for the detection of SNP TSC0008699
ttcctctttcct

SEQ ID NO: 280499 - DNA, 12 bp, Artificial Sequence
  Oligonucleotide primer for the detection of SNP TSC0008699
ggaattgtttta

SEQ ID NO: 280500 - DNA, 12 bp, Artificial Sequence
  Oligonucleotide primer for the detection of SNP TSC0008700
acatataaaaat

SEQ ID NO: 280501 - DNA, 12 bp, Artificial Sequence
  Oligonucleotide primer for the detection of SNP TSC0008700
ttatagaatata

SEQ ID NO: 280502 - DNA, 12 bp, Artificial Sequence
  Oligonucleotide primer for the detection of SNP TSC0008701
tattctataatt

SEQ ID NO: 280503 - DNA, 12 bp, Artificial Sequence
  Oligonucleotide primer for the detection of SNP TSC0008701
ttttattaatta

SEQ ID NO: 280504 - DNA, 12 bp, Artificial Sequence
  Oligonucleotide primer for the detection of SNP TSC0008702
aatataattatt

SEQ ID NO: 280505 - DNA, 12 bp, Artificial Sequence
  Oligonucleotide primer for the detection of SNP TSC0008702
gaatttattggg

SEQ ID NO: 280506 - DNA, 12 bp, Artificial Sequence
  Oligonucleotide primer for the detection of SNP TSC0008708
acacaaaaattt

SEQ ID NO: 280507 - DNA, 12 bp, Artificial Sequence
  Oligonucleotide primer for the detection of SNP TSC0008708
tttggttttata

SEQ ID NO: 280508 - DNA, 12 bp, Artificial Sequence
  Oligonucleotide primer for the detection of SNP TSC0008709
atccaaatcacc

SEQ ID NO: 280509 - DNA, 12 bp, Artificial Sequence
  Oligonucleotide primer for the detection of SNP TSC0008709
gaggggtttggt

SEQ ID NO: 280510 - DNA, 12 bp, Artificial Sequence
  Oligonucleotide primer for the detection of SNP TSC0008709
aaaaacctaata

SEQ ID NO: 280511 - DNA, 12 bp, Artificial Sequence
  Oligonucleotide primer for the detection of SNP TSC0008709
ttaagttatttt

SEQ ID NO: 280512 - DNA, 12 bp, Artificial Sequence
  Oligonucleotide primer for the detection of SNP TSC0008712
ctacccttactt

SEQ ID NO: 280513 - DNA, 12 bp, Artificial Sequence
  Oligonucleotide primer for the detection of SNP TSC0008712
gtttatggagga

SEQ ID NO: 280514 - DNA, 12 bp, Artificial Sequence
  Oligonucleotide primer for the detection of SNP TSC0008720
ctttaaaaatta

SEQ ID NO: 280515 - DNA, 12 bp, Artificial Sequence
  Oligonucleotide primer for the detection of SNP TSC0008720
ataagtgttagt

SEQ ID NO: 280516 - DNA, 12 bp, Artificial Sequence
  Oligonucleotide primer for the detection of SNP TSC0008720
ataaatattaat

SEQ ID NO: 280517 - DNA, 12 bp, Artificial Sequence
  Oligonucleotide primer for the detection of SNP TSC0008721
aaacaattatac

SEQ ID NO: 280518 - DNA, 12 bp, Artificial Sequence
  Oligonucleotide primer for the detection of SNP TSC0008721
atgtaatagtat

SEQ ID NO: 280519 - DNA, 12 bp, Artificial Sequence
  Oligonucleotide primer for the detection of SNP TSC0008721
caacaacacaaa

SEQ ID NO: 280520 - DNA, 12 bp, Artificial Sequence
  Oligonucleotide primer for the detection of SNP TSC0008721
gggtagttgtgt

SEQ ID NO: 280521 - DNA, 12 bp, Artificial Sequence
  Oligonucleotide primer for the detection of SNP TSC0008722
aaaactatataa

SEQ ID NO: 280522 - DNA, 12 bp, Artificial Sequence
  Oligonucleotide primer for the detection of SNP TSC0008722
gtatagttagtt

SEQ ID NO: 280523 - DNA, 12 bp, Artificial Sequence
  Oligonucleotide primer for the detection of SNP TSC0008722
atacataaccaa

SEQ ID NO: 280524 - DNA, 12 bp, Artificial Sequence
  Oligonucleotide primer for the detection of SNP TSC0008722
aaattgtgtgat

SEQ ID NO: 280525 - DNA, 12 bp, Artificial Sequence
  Oligonucleotide primer for the detection of SNP TSC0008724
tcatatctaata

SEQ ID NO: 280526 - DNA, 12 bp, Artificial Sequence
  Oligonucleotide primer for the detection of SNP TSC0008724
attaagatagtt

SEQ ID NO: 280527 - DNA, 12 bp, Artificial Sequence
  Oligonucleotide primer for the detection of SNP TSC0008724
accaaaataact

SEQ ID NO: 280528 - DNA, 12 bp, Artificial Sequence
  Oligonucleotide primer for the detection of SNP TSC0008724
ttatgtttggta

SEQ ID NO: 280529 - DNA, 12 bp, Artificial Sequence
  Oligonucleotide primer for the detection of SNP TSC0008729
aaaactacccaa

SEQ ID NO: 280530 - DNA, 12 bp, Artificial Sequence
  Oligonucleotide primer for the detection of SNP TSC0008729
tttaaattatat

SEQ ID NO: 280531 - DNA, 12 bp, Artificial Sequence
  Oligonucleotide primer for the detection of SNP TSC0008729
atccaaaccata

SEQ ID NO: 280532 - DNA, 12 bp, Artificial Sequence
  Oligonucleotide primer for the detection of SNP TSC0008729
aattgtttagtt

SEQ ID NO: 280533 - DNA, 12 bp, Artificial Sequence
  Oligonucleotide primer for the detection of SNP TSC0008746
aaaatacactta

SEQ ID NO: 280534 - DNA, 12 bp, Artificial Sequence
  Oligonucleotide primer for the detection of SNP TSC0008746
tggattgtgtat

SEQ ID NO: 280535 - DNA, 12 bp, Artificial Sequence
  Oligonucleotide primer for the detection of SNP TSC0008746
ctaaactatata

SEQ ID NO: 280536 - DNA, 12 bp, Artificial Sequence
  Oligonucleotide primer for the detection of SNP TSC0008746
aaaatatattta

SEQ ID NO: 280537 - DNA, 12 bp, Artificial Sequence
  Oligonucleotide primer for the detection of SNP TSC0008747
ataacatccata

SEQ ID NO: 280538 - DNA, 12 bp, Artificial Sequence
  Oligonucleotide primer for the detection of SNP TSC0008747
tttattttgagg

SEQ ID NO: 280539 - DNA, 12 bp, Artificial Sequence
  Oligonucleotide primer for the detection of SNP TSC0008747
tttattttaaaa

SEQ ID NO: 280540 - DNA, 12 bp, Artificial Sequence
  Oligonucleotide primer for the detection of SNP TSC0008747
aatgatatttat

SEQ ID NO: 280541 - DNA, 12 bp, Artificial Sequence
  Oligonucleotide primer for the detection of SNP TSC0008748
tatatactatct

SEQ ID NO: 280542 - DNA, 12 bp, Artificial Sequence
  Oligonucleotide primer for the detection of SNP TSC0008748
atgggttttttg

SEQ ID NO: 280543 - DNA, 12 bp, Artificial Sequence
  Oligonucleotide primer for the detection of SNP TSC0008749
tctctctcctac

SEQ ID NO: 280544 - DNA, 12 bp, Artificial Sequence
  Oligonucleotide primer for the detection of SNP TSC0008749
ttaaattattag

SEQ ID NO: 280545 - DNA, 12 bp, Artificial Sequence
  Oligonucleotide primer for the detection of SNP TSC0008750
cccaatctcaaa

SEQ ID NO: 280546 - DNA, 12 bp, Artificial Sequence
  Oligonucleotide primer for the detection of SNP TSC0008750
tatattgttata

SEQ ID NO: 280547 - DNA, 12 bp, Artificial Sequence
  Oligonucleotide primer for the detection of SNP TSC0008750
cacactattata

SEQ ID NO: 280548 - DNA, 12 bp, Artificial Sequence
  Oligonucleotide primer for the detection of SNP TSC0008750
tttagttttaga

SEQ ID NO: 280549 - DNA, 12 bp, Artificial Sequence
  Oligonucleotide primer for the detection of SNP TSC0008751
taacacttcccc

SEQ ID NO: 280550 - DNA, 12 bp, Artificial Sequence
  Oligonucleotide primer for the detection of SNP TSC0008751
agagagagagta

SEQ ID NO: 280551 - DNA, 12 bp, Artificial Sequence
  Oligonucleotide primer for the detection of SNP TSC0008753
atatccaaaatt

SEQ ID NO: 280552 - DNA, 12 bp, Artificial Sequence
  Oligonucleotide primer for the detection of SNP TSC0008753
agtttgtaagtg

SEQ ID NO: 280553 - DNA, 12 bp, Artificial Sequence
  Oligonucleotide primer for the detection of SNP TSC0008774
atccaattcaac

SEQ ID NO: 280554 - DNA, 12 bp, Artificial Sequence
  Oligonucleotide primer for the detection of SNP TSC0008774
tatgtgttatga

SEQ ID NO: 280555 - DNA, 12 bp, Artificial Sequence
  Oligonucleotide primer for the detection of SNP TSC0008774
tacgtgttatga

SEQ ID NO: 280556 - DNA, 12 bp, Artificial Sequence
  Oligonucleotide primer for the detection of SNP TSC0008774
tatgcgttatga

SEQ ID NO: 280557 - DNA, 12 bp, Artificial Sequence
  Oligonucleotide primer for the detection of SNP TSC0008774
tacgcgttatga

SEQ ID NO: 280558 - DNA, 12 bp, Artificial Sequence
  Oligonucleotide primer for the detection of SNP TSC0008776
agtgagttaaga

SEQ ID NO: 280559 - DNA, 12 bp, Artificial Sequence
  Oligonucleotide primer for the detection of SNP TSC0008776
aataaaccaaaa

SEQ ID NO: 280560 - DNA, 12 bp, Artificial Sequence
  Oligonucleotide primer for the detection of SNP TSC0008776
gagtgtagtggc

SEQ ID NO: 280561 - DNA, 12 bp, Artificial Sequence
  Oligonucleotide primer for the detection of SNP TSC0008777
caacaattattt

SEQ ID NO: 280562 - DNA, 12 bp, Artificial Sequence
  Oligonucleotide primer for the detection of SNP TSC0008777
gatttgggggta

SEQ ID NO: 280563 - DNA, 12 bp, Artificial Sequence
  Oligonucleotide primer for the detection of SNP TSC0008778
cccaaactaaaa

SEQ ID NO: 280564 - DNA, 12 bp, Artificial Sequence
  Oligonucleotide primer for the detection of SNP TSC0008778
ttatgttattgt

SEQ ID NO: 280565 - DNA, 12 bp, Artificial Sequence
  Oligonucleotide primer for the detection of SNP TSC0008778
ttacgttattgt

SEQ ID NO: 280566 - DNA, 12 bp, Artificial Sequence
  Oligonucleotide primer for the detection of SNP TSC0008778
atcacaccacta

SEQ ID NO: 280567 - DNA, 12 bp, Artificial Sequence
  Oligonucleotide primer for the detection of SNP TSC0008778
atcacgccacta

SEQ ID NO: 280568 - DNA, 12 bp, Artificial Sequence
  Oligonucleotide primer for the detection of SNP TSC0008779
ccacacccaact

SEQ ID NO: 280569 - DNA, 12 bp, Artificial Sequence
  Oligonucleotide primer for the detection of SNP TSC0008779
aaaaatataaaa

SEQ ID NO: 280570 - DNA, 12 bp, Artificial Sequence
  Oligonucleotide primer for the detection of SNP TSC0008779
aaaaatacaaaa

SEQ ID NO: 280571 - DNA, 12 bp, Artificial Sequence
  Oligonucleotide primer for the detection of SNP TSC0008779
ttatatttagtt

SEQ ID NO: 280572 - DNA, 12 bp, Artificial Sequence
  Oligonucleotide primer for the detection of SNP TSC0008780
aaaactcttaac

SEQ ID NO: 280573 - DNA, 12 bp, Artificial Sequence
  Oligonucleotide primer for the detection of SNP TSC0008780
atgaggatgttg

SEQ ID NO: 280574 - DNA, 12 bp, Artificial Sequence
  Oligonucleotide primer for the detection of SNP TSC0008780
atgaggatgtcg

SEQ ID NO: 280575 - DNA, 12 bp, Artificial Sequence
  Oligonucleotide primer for the detection of SNP TSC0008781
cctcctcaccaa

SEQ ID NO: 280576 - DNA, 12 bp, Artificial Sequence
  Oligonucleotide primer for the detection of SNP TSC0008781
attattgttatt

SEQ ID NO: 280577 - DNA, 12 bp, Artificial Sequence
  Oligonucleotide primer for the detection of SNP TSC0008781
atcattattacc

SEQ ID NO: 280578 - DNA, 12 bp, Artificial Sequence
  Oligonucleotide primer for the detection of SNP TSC0008781
tttttttattag

SEQ ID NO: 280579 - DNA, 12 bp, Artificial Sequence
  Oligonucleotide primer for the detection of SNP TSC0008782
acatctaaaaat

SEQ ID NO: 280580 - DNA, 12 bp, Artificial Sequence
  Oligonucleotide primer for the detection of SNP TSC0008782
gttgttagtgaa

SEQ ID NO: 280581 - DNA, 12 bp, Artificial Sequence
  Oligonucleotide primer for the detection of SNP TSC0008783
tcaattccataa

SEQ ID NO: 280582 - DNA, 12 bp, Artificial Sequence
  Oligonucleotide primer for the detection of SNP TSC0008783
attattatattt

SEQ ID NO: 280583 - DNA, 12 bp, Artificial Sequence
  Oligonucleotide primer for the detection of SNP TSC0008783
actattatattc

SEQ ID NO: 280584 - DNA, 12 bp, Artificial Sequence
  Oligonukleotid-Primer
ttaattttatgg

SEQ ID NO: 280585 - DNA, 12 bp, Artificial Sequence
  Oligonucleotide primer for the detection of SNP TSC0008784
aataaaacacat

SEQ ID NO: 280586 - DNA, 12 bp, Artificial Sequence
  Oligonucleotide primer for the detection of SNP TSC0008784
tttttaatttaa

SEQ ID NO: 280587 - DNA, 12 bp, Artificial Sequence
  Oligonucleotide primer for the detection of SNP TSC0008792
aaactaaaaaac

SEQ ID NO: 280588 - DNA, 12 bp, Artificial Sequence
  Oligonukleotid-Primer
tattttgtagaa

SEQ ID NO: 280589 - DNA, 12 bp, Artificial Sequence
  Oligonucleotide primer for the detection of SNP TSC0008793
aaaaaaaaaatt

SEQ ID NO: 280590 - DNA, 12 bp, Artificial Sequence
  Oligonucleotide primer for the detection of SNP TSC0008793
aattgtgagtta

SEQ ID NO: 280591 - DNA, 12 bp, Artificial Sequence
  Oligonucleotide primer for the detection of SNP TSC0008794
atataacaatct

SEQ ID NO: 280592 - DNA, 12 bp, Artificial Sequence
  Oligonukleotid-Primer
agtagtgtgaaa

SEQ ID NO: 280593 - DNA, 12 bp, Artificial Sequence
  Oligonucleotide primer for the detection of SNP TSC0008801
accccaaaattt

SEQ ID NO: 280594 - DNA, 12 bp, Artificial Sequence
  Oligonucleotide primer for the detection of SNP TSC0008801
gaagggtgttag

SEQ ID NO: 280595 - DNA, 12 bp, Artificial Sequence
  Oligonucleotide primer for the detection of SNP TSC0008810
ctaacttttttt

SEQ ID NO: 280596 - DNA, 12 bp, Artificial Sequence
  Oligonukleotid-Primer
atagtgtaaaga

SEQ ID NO: 280597 - DNA, 12 bp, Artificial Sequence
  Oligonucleotide primer for the detection of SNP TSC0008817
acccatttcctc

SEQ ID NO: 280598 - DNA, 12 bp, Artificial Sequence
  Oligonucleotide primer for the detection of SNP TSC0008817
tttttttttgtg

SEQ ID NO: 280599 - DNA, 12 bp, Artificial Sequence
  Oligonucleotide primer for the detection of SNP TSC0008817
ttctttttataa

SEQ ID NO: 280600 - DNA, 12 bp, Artificial Sequence
  Oligonucleotide primer for the detection of SNP TSC0008817
atttattttttc

SEQ ID NO: 280601 - DNA, 12 bp, Artificial Sequence
  Oligonucleotide primer for the detection of SNP TSC0008828
tcatacttttct

SEQ ID NO: 280602 - DNA, 12 bp, Artificial Sequence
  Oligonucleotide primer for the detection of SNP TSC0008828
atgtataaaaaa

SEQ ID NO: 280603 - DNA, 12 bp, Artificial Sequence
  Oligonucleotide primer for the detection of SNP TSC0008833
tttaaaaccaat

SEQ ID NO: 280604 - DNA, 12 bp, Artificial Sequence
  Oligonucleotide primer for the detection of SNP TSC0008833
tttttgtttata

SEQ ID NO: 280605 - DNA, 12 bp, Artificial Sequence
  Oligonucleotide primer for the detection of SNP TSC0008839
ctaaactacaat

SEQ ID NO: 280606 - DNA, 12 bp, Artificial Sequence
  Oligonucleotide primer for the detection of SNP TSC0008839
aagtagaattaa

SEQ ID NO: 280607 - DNA, 12 bp, Artificial Sequence
  Oligonucleotide primer for the detection of SNP TSC0008840
ttttaggttttt

SEQ ID NO: 280608 - DNA, 12 bp, Artificial Sequence
  Oligonucleotide primer for the detection of SNP TSC0008840
ccccaaaccctc

SEQ ID NO: 280609 - DNA, 12 bp, Artificial Sequence
  Oligonucleotide primer for the detection of SNP TSC0008840
agggaataaaag

SEQ ID NO: 280610 - DNA, 12 bp, Artificial Sequence
  Oligonucleotide primer for the detection of SNP TSC0008842
aattttacactt

SEQ ID NO: 280611 - DNA, 12 bp, Artificial Sequence
  Oligonucleotide primer for the detection of SNP TSC0008842
atttaaaatgaa

SEQ ID NO: 280612 - DNA, 12 bp, Artificial Sequence
  Oligonucleotide primer for the detection of SNP TSC0008848
caaccaaatcct

SEQ ID NO: 280613 - DNA, 12 bp, Artificial Sequence
  Oligonucleotide primer for the detection of SNP TSC0008848
gttgtttttggg

SEQ ID NO: 280614 - DNA, 12 bp, Artificial Sequence
  Oligonucleotide primer for the detection of SNP TSC0008849
taccttctaaaa

SEQ ID NO: 280615 - DNA, 12 bp, Artificial Sequence
  Oligonucleotide primer for the detection of SNP TSC0008849
ttgatgttattt

SEQ ID NO: 280616 - DNA, 12 bp, Artificial Sequence
  Oligonucleotide primer for the detection of SNP TSC0008849
ttgatgttattc

SEQ ID NO: 280617 - DNA, 12 bp, Artificial Sequence
  Oligonucleotide primer for the detection of SNP TSC0008849
ctaatatcatcc

SEQ ID NO: 280618 - DNA, 12 bp, Artificial Sequence
  Oligonucleotide primer for the detection of SNP TSC0008849
aatgttttttgg

SEQ ID NO: 280619 - DNA, 12 bp, Artificial Sequence
  Oligonucleotide primer for the detection of SNP TSC0008853
actaaatattct

SEQ ID NO: 280620 - DNA, 12 bp, Artificial Sequence
  Oligonucleotide primer for the detection of SNP TSC0008853
aaggagggttta

SEQ ID NO: 280621 - DNA, 12 bp, Artificial Sequence
  Oligonucleotide primer for the detection of SNP TSC0008857
ccactctccaac

SEQ ID NO: 280622 - DNA, 12 bp, Artificial Sequence
  Oligonucleotide primer for the detection of SNP TSC0008857
atagatggataa

SEQ ID NO: 280623 - DNA, 12 bp, Artificial Sequence
  Oligonucleotide primer for the detection of SNP TSC0008857
ataaataaataa

SEQ ID NO: 280624 - DNA, 12 bp, Artificial Sequence
  Oligonucleotide primer for the detection of SNP TSC0008857
ttattttttaat

SEQ ID NO: 280625 - DNA, 12 bp, Artificial Sequence
  Oligonucleotide primer for the detection of SNP TSC0008862
ataaaaataaca

SEQ ID NO: 280626 - DNA, 12 bp, Artificial Sequence
  Oligonucleotide primer for the detection of SNP TSC0008862
cttccatttccc

SEQ ID NO: 280627 - DNA, 12 bp, Artificial Sequence
  Oligonucleotide primer for the detection of SNP TSC0008862
atgagggtgata

SEQ ID NO: 280628 - DNA, 12 bp, Artificial Sequence
  Oligonucleotide primer for the detection of SNP TSC0008871
aaaaatattatt

SEQ ID NO: 280629 - DNA, 12 bp, Artificial Sequence
  Oligonucleotide primer for the detection of SNP TSC0008871
agttttaaaata

SEQ ID NO: 280630 - DNA, 12 bp, Artificial Sequence
  Oligonucleotide primer for the detection of SNP TSC0008878
aatatctaacta

SEQ ID NO: 280631 - DNA, 12 bp, Artificial Sequence
  Oligonucleotide primer for the detection of SNP TSC0008878
gtaaatatagtt

SEQ ID NO: 280632 - DNA, 12 bp, Artificial Sequence
  Oligonucleotide primer for the detection of SNP TSC0008878
caacaaacacaa

SEQ ID NO: 280633 - DNA, 12 bp, Artificial Sequence
  Oligonucleotide primer for the detection of SNP TSC0008878
ggtatttggtta

SEQ ID NO: 280634 - DNA, 12 bp, Artificial Sequence
  Oligonucleotide primer for the detection of SNP TSC0008886
ataaaccaatta

SEQ ID NO: 280635 - DNA, 12 bp, Artificial Sequence
  Oligonucleotide primer for the detection of SNP TSC0008886
taaaggaaagag

SEQ ID NO: 280636 - DNA, 12 bp, Artificial Sequence
  Oligonucleotide primer for the detection of SNP TSC0008886
tgagttaattat

SEQ ID NO: 280637 - DNA, 12 bp, Artificial Sequence
  Oligonucleotide primer for the detection of SNP TSC0008887
ctcataaaactt

SEQ ID NO: 280638 - DNA, 12 bp, Artificial Sequence
  Oligonucleotide primer for the detection of SNP TSC0008887
ttatgatagtga

SEQ ID NO: 280639 - DNA, 12 bp, Artificial Sequence
  Oligonucleotide primer for the detection of SNP TSC0008889
cataaaaatata

SEQ ID NO: 280640 - DNA, 12 bp, Artificial Sequence
  Oligonucleotide primer for the detection of SNP TSC0008889
atgtatgtatat

SEQ ID NO: 280641 - DNA, 12 bp, Artificial Sequence
  Oligonucleotide primer for the detection of SNP TSC0008889
tataggggtgtg

SEQ ID NO: 280642 - DNA, 12 bp, Artificial Sequence
  Oligonucleotide primer for the detection of SNP TSC0008890
tatttacccatt

SEQ ID NO: 280643 - DNA, 12 bp, Artificial Sequence
  Oligonucleotide primer for the detection of SNP TSC0008890
gtttattatgga

SEQ ID NO: 280644 - DNA, 12 bp, Artificial Sequence
  Oligonucleotide primer for the detection of SNP TSC0008890
atctactataaa

SEQ ID NO: 280645 - DNA, 12 bp, Artificial Sequence
  Oligonucleotide primer for the detection of SNP TSC0008890
atttatttattt

SEQ ID NO: 280646 - DNA, 12 bp, Artificial Sequence
  Oligonucleotide primer for the detection of SNP TSC0008892
ctaatataattt

SEQ ID NO: 280647 - DNA, 12 bp, Artificial Sequence
  Oligonucleotide primer for the detection of SNP TSC0008892
ggtggggatata

SEQ ID NO: 280648 - DNA, 12 bp, Artificial Sequence
  Oligonucleotide primer for the detection of SNP TSC0008896
ttaaaaccaaaa

SEQ ID NO: 280649 - DNA, 12 bp, Artificial Sequence
  Oligonucleotide primer for the detection of SNP TSC0008896
gttggttttgaa

SEQ ID NO: 280650 - DNA, 12 bp, Artificial Sequence
  Oligonucleotide primer for the detection of SNP TSC0008896
attaaccctaaa

SEQ ID NO: 280651 - DNA, 12 bp, Artificial Sequence
  Oligonucleotide primer for the detection of SNP TSC0008896
ttgagattagaa

SEQ ID NO: 280652 - DNA, 12 bp, Artificial Sequence
  Oligonucleotide primer for the detection of SNP TSC0008900
ccttctaaaaat

SEQ ID NO: 280653 - DNA, 12 bp, Artificial Sequence
  Oligonucleotide primer for the detection of SNP TSC0008900
taaaagtttgga

SEQ ID NO: 280654 - DNA, 12 bp, Artificial Sequence
  Oligonucleotide primer for the detection of SNP TSC0008904
attcattcatct

SEQ ID NO: 280655 - DNA, 12 bp, Artificial Sequence
  Oligonucleotide primer for the detection of SNP TSC0008904
taaggattagta

SEQ ID NO: 280656 - DNA, 12 bp, Artificial Sequence
  Oligonucleotide primer for the detection of SNP TSC0008908
ataaaacacata

SEQ ID NO: 280657 - DNA, 12 bp, Artificial Sequence
  Oligonucleotide primer for the detection of SNP TSC0008908
ttcctctttacc

SEQ ID NO: 280658 - DNA, 12 bp, Artificial Sequence
  Oligonucleotide primer for the detection of SNP TSC0008908
ggtagaatatat

SEQ ID NO: 280659 - DNA, 12 bp, Artificial Sequence
  Oligonucleotide primer for the detection of SNP TSC0008919
caaaaaaaactt

SEQ ID NO: 280660 - DNA, 12 bp, Artificial Sequence
  Oligonucleotide primer for the detection of SNP TSC0008919
tggttagttgta

SEQ ID NO: 280661 - DNA, 12 bp, Artificial Sequence
  Oligonucleotide primer for the detection of SNP TSC0008919
taattaactaca

SEQ ID NO: 280662 - DNA, 12 bp, Artificial Sequence
  Oligonucleotide primer for the detection of SNP TSC0008919
tagaaagggttt

SEQ ID NO: 280663 - DNA, 12 bp, Artificial Sequence
  Oligonucleotide primer for the detection of SNP TSC0008921
atacttcatata

SEQ ID NO: 280664 - DNA, 12 bp, Artificial Sequence
  Oligonucleotide primer for the detection of SNP TSC0008921
atacttcgtata

SEQ ID NO: 280665 - DNA, 12 bp, Artificial Sequence
  Oligonucleotide primer for the detection of SNP TSC0008921
agttttgtaggt

SEQ ID NO: 280666 - DNA, 12 bp, Artificial Sequence
  Oligonucleotide primer for the detection of SNP TSC0008921
aattctacaaac

SEQ ID NO: 280667 - DNA, 12 bp, Artificial Sequence
  Oligonucleotide primer for the detection of SNP TSC0008921
atgttttgtgta

SEQ ID NO: 280668 - DNA, 12 bp, Artificial Sequence
  Oligonucleotide primer for the detection of SNP TSC0008921
atgtttcgtgta

SEQ ID NO: 280669 - DNA, 12 bp, Artificial Sequence
  Oligonucleotide primer for the detection of SNP TSC0008922
cctacaaaacta

SEQ ID NO: 280670 - DNA, 12 bp, Artificial Sequence
  Oligonucleotide primer for the detection of SNP TSC0008922
tttaattggttt

SEQ ID NO: 280671 - DNA, 12 bp, Artificial Sequence
  Oligonucleotide primer for the detection of SNP TSC0008922
atttaattaact

SEQ ID NO: 280672 - DNA, 12 bp, Artificial Sequence
  Oligonucleotide primer for the detection of SNP TSC0008922
gtttgtagaatt

SEQ ID NO: 280673 - DNA, 12 bp, Artificial Sequence
  Oligonucleotide primer for the detection of SNP TSC0008923
aaattctttata

SEQ ID NO: 280674 - DNA, 12 bp, Artificial Sequence
  Oligonucleotide primer for the detection of SNP TSC0008923
agattagtattt

SEQ ID NO: 280675 - DNA, 12 bp, Artificial Sequence
  Oligonucleotide primer for the detection of SNP TSC0008923
aaactaatatct

SEQ ID NO: 280676 - DNA, 12 bp, Artificial Sequence
  Oligonucleotide primer for the detection of SNP TSC0008923
ggattttttata

SEQ ID NO: 280677 - DNA, 12 bp, Artificial Sequence
  Oligonucleotide primer for the detection of SNP TSC0008943
ttaaacaaacaa

SEQ ID NO: 280678 - DNA, 12 bp, Artificial Sequence
  Oligonucleotide primer for the detection of SNP TSC0008943
ttaaacgaacaa

SEQ ID NO: 280679 - DNA, 12 bp, Artificial Sequence
  Oligonucleotide primer for the detection of SNP TSC0008943
cttctcactccc

SEQ ID NO: 280680 - DNA, 12 bp, Artificial Sequence
  Oligonucleotide primer for the detection of SNP TSC0008943
ttgggtgggtag

SEQ ID NO: 280681 - DNA, 12 bp, Artificial Sequence
  Oligonucleotide primer for the detection of SNP TSC0008943
ttgggcgggtag

SEQ ID NO: 280682 - DNA, 12 bp, Artificial Sequence
  Oligonucleotide primer for the detection of SNP TSC0008944
aaatcacaataa

SEQ ID NO: 280683 - DNA, 12 bp, Artificial Sequence
  Oligonucleotide primer for the detection of SNP TSC0008944
aggtgattattt

SEQ ID NO: 280684 - DNA, 12 bp, Artificial Sequence
  Oligonucleotide primer for the detection of SNP TSC0008944
aggtgattattc

SEQ ID NO: 280685 - DNA, 12 bp, Artificial Sequence
  Oligonucleotide primer for the detection of SNP TSC0008944
aaataatcaccc

SEQ ID NO: 280686 - DNA, 12 bp, Artificial Sequence
  Oligonucleotide primer for the detection of SNP TSC0008944
gaaattataatg

SEQ ID NO: 280687 - DNA, 12 bp, Artificial Sequence
  Oligonucleotide primer for the detection of SNP TSC0008945
acacctcccaat

SEQ ID NO: 280688 - DNA, 12 bp, Artificial Sequence
  Oligonucleotide primer for the detection of SNP TSC0008945
ttggagtgggtg

SEQ ID NO: 280689 - DNA, 12 bp, Artificial Sequence
  Oligonucleotide primer for the detection of SNP TSC0008955
aacaaccctaaa

SEQ ID NO: 280690 - DNA, 12 bp, Artificial Sequence
  Oligonucleotide primer for the detection of SNP TSC0008955
cttactaatttt

SEQ ID NO: 280691 - DNA, 12 bp, Artificial Sequence
  Oligonucleotide primer for the detection of SNP TSC0008955
ggtaattttgag

SEQ ID NO: 280692 - DNA, 12 bp, Artificial Sequence
  Oligonucleotide primer for the detection of SNP TSC0008956
attcttaactat

SEQ ID NO: 280693 - DNA, 12 bp, Artificial Sequence
  Oligonucleotide primer for the detection of SNP TSC0008956
atattgtgtgag

SEQ ID NO: 280694 - DNA, 12 bp, Artificial Sequence
  Oligonucleotide primer for the detection of SNP TSC0008960
aataaaaaaatt

SEQ ID NO: 280695 - DNA, 12 bp, Artificial Sequence
  Oligonucleotide primer for the detection of SNP TSC0008960
aaattaatttag

SEQ ID NO: 280696 - DNA, 12 bp, Artificial Sequence
  Oligonucleotide primer for the detection of SNP TSC0008968
tttagtttgtaa

SEQ ID NO: 280697 - DNA, 12 bp, Artificial Sequence
  Oligonucleotide primer for the detection of SNP TSC0008970
accccaatcaac

SEQ ID NO: 280698 - DNA, 12 bp, Artificial Sequence
  Oligonucleotide primer for the detection of SNP TSC0008970
aaaggagttata

SEQ ID NO: 280699 - DNA, 12 bp, Artificial Sequence
  Oligonucleotide primer for the detection of SNP TSC0008971
aaactaccatca

SEQ ID NO: 280700 - DNA, 12 bp, Artificial Sequence
  Oligonucleotide primer for the detection of SNP TSC0008971
aaactaccgtca

SEQ ID NO: 280701 - DNA, 12 bp, Artificial Sequence
  Oligonucleotide primer for the detection of SNP TSC0008971
gaattattgttg

SEQ ID NO: 280702 - DNA, 12 bp, Artificial Sequence
  Oligonucleotide primer for the detection of SNP TSC0008972
cccttaataatc

SEQ ID NO: 280703 - DNA, 12 bp, Artificial Sequence
  Oligonucleotide primer for the detection of SNP TSC0008972
aaattttgttag

SEQ ID NO: 280704 - DNA, 12 bp, Artificial Sequence
  Oligonucleotide primer for the detection of SNP TSC0008974
actacaaaaacc

SEQ ID NO: 280705 - DNA, 12 bp, Artificial Sequence
  Oligonucleotide primer for the detection of SNP TSC0008974
ggatagggatgg

SEQ ID NO: 280706 - DNA, 12 bp, Artificial Sequence
  Oligonucleotide primer for the detection of SNP TSC0008974
aaacaaaaataa

SEQ ID NO: 280707 - DNA, 12 bp, Artificial Sequence
  Oligonucleotide primer for the detection of SNP TSC0008974
gttataggagtt

SEQ ID NO: 280708 - DNA, 12 bp, Artificial Sequence
  Oligonucleotide primer for the detection of SNP TSC0008975
aatatataaaac

SEQ ID NO: 280709 - DNA, 12 bp, Artificial Sequence
  Oligonucleotide primer for the detection of SNP TSC0008975
atgtttggaaag

SEQ ID NO: 280710 - DNA, 12 bp, Artificial Sequence
  Oligonucleotide primer for the detection of SNP TSC0008981
ttcttaatctac

SEQ ID NO: 280711 - DNA, 12 bp, Artificial Sequence
  Oligonucleotide primer for the detection of SNP TSC0008981
tttttgtggtaa

SEQ ID NO: 280712 - DNA, 12 bp, Artificial Sequence
  Oligonucleotide primer for the detection of SNP TSC0008989
tttcaacttttt

SEQ ID NO: 280713 - DNA, 12 bp, Artificial Sequence
  Oligonucleotide primer for the detection of SNP TSC0008989
ttaagttaagta

SEQ ID NO: 280714 - DNA, 12 bp, Artificial Sequence
  Oligonucleotide primer for the detection of SNP TSC0008991
tttaaaaaaaac

SEQ ID NO: 280715 - DNA, 12 bp, Artificial Sequence
  Oligonucleotide primer for the detection of SNP TSC0008991
aggtttttcggg

SEQ ID NO: 280716 - DNA, 12 bp, Artificial Sequence
  Oligonucleotide primer for the detection of SNP TSC0009005
ttataaaactat

SEQ ID NO: 280717 - DNA, 12 bp, Artificial Sequence
  Oligonucleotide primer for the detection of SNP TSC0009005
aagtatttttta

SEQ ID NO: 280718 - DNA, 12 bp, Artificial Sequence
  Oligonucleotide primer for the detection of SNP TSC0009006
caaatatcccct

SEQ ID NO: 280719 - DNA, 12 bp, Artificial Sequence
  Oligonucleotide primer for the detection of SNP TSC0009006
ttagtataaata

SEQ ID NO: 280720 - DNA, 12 bp, Artificial Sequence
  Oligonucleotide primer for the detection of SNP TSC0009006
ccaatataaaca

SEQ ID NO: 280721 - DNA, 12 bp, Artificial Sequence
  Oligonucleotide primer for the detection of SNP TSC0009007
ataccacatttt

SEQ ID NO: 280722 - DNA, 12 bp, Artificial Sequence
  Oligonucleotide primer for the detection of SNP TSC0009007
atttattaaaat

SEQ ID NO: 280723 - DNA, 12 bp, Artificial Sequence
  Oligonucleotide primer for the detection of SNP TSC0009007
acttattaaaat

SEQ ID NO: 280724 - DNA, 12 bp, Artificial Sequence
  Oligonucleotide primer for the detection of SNP TSC0009007
atgttatatttt

SEQ ID NO: 280725 - DNA, 12 bp, Artificial Sequence
  Oligonucleotide primer for the detection of SNP TSC0009008
taacttccaata

SEQ ID NO: 280726 - DNA, 12 bp, Artificial Sequence
  Oligonucleotide primer for the detection of SNP TSC0009008
ttaatgttggtt

SEQ ID NO: 280727 - DNA, 12 bp, Artificial Sequence
  Oligonucleotide primer for the detection of SNP TSC0009008
ttaatgttggtc

SEQ ID NO: 280728 - DNA, 12 bp, Artificial Sequence
  Oligonucleotide primer for the detection of SNP TSC0009008
tattaatactaa

SEQ ID NO: 280729 - DNA, 12 bp, Artificial Sequence
  Oligonukleotid-Primer
tggtttttaata

SEQ ID NO: 280730 - DNA, 12 bp, Artificial Sequence
  Oligonucleotide primer for the detection of SNP TSC0009009
atatctactcac

SEQ ID NO: 280731 - DNA, 12 bp, Artificial Sequence
  Oligonucleotide primer for the detection of SNP TSC0009009
atggagatgata

SEQ ID NO: 280732 - DNA, 12 bp, Artificial Sequence
  Oligonucleotide primer for the detection of SNP TSC0009014
tagtaattttta

SEQ ID NO: 280733 - DNA, 12 bp, Artificial Sequence
  Oligonucleotide primer for the detection of SNP TSC0009018
ataaattatcta

SEQ ID NO: 280734 - DNA, 12 bp, Artificial Sequence
  Oligonucleotide primer for the detection of SNP TSC0009018
taaaatttttga

SEQ ID NO: 280735 - DNA, 12 bp, Artificial Sequence
  Oligonucleotide primer for the detection of SNP TSC0009018
caaaacccttaa

SEQ ID NO: 280736 - DNA, 12 bp, Artificial Sequence
  Oligonucleotide primer for the detection of SNP TSC0009018
ataaattatttg

SEQ ID NO: 280737 - DNA, 12 bp, Artificial Sequence
  Oligonukleotid-Primer
tctaatcaaaaa

SEQ ID NO: 280738 - DNA, 12 bp, Artificial Sequence
  Oligonucleotide primer for the detection of SNP TSC0009019
taaatagttaaa

SEQ ID NO: 280739 - DNA, 12 bp, Artificial Sequence
  Oligonucleotide primer for the detection of SNP TSC0009019
taaataaccaaa

SEQ ID NO: 280740 - DNA, 12 bp, Artificial Sequence
  Oligonucleotide primer for the detection of SNP TSC0009019
tttggttaaggg

SEQ ID NO: 280741 - DNA, 12 bp, Artificial Sequence
  Oligonucleotide primer for the detection of SNP TSC0009020
tcacttcaaaaa

SEQ ID NO: 280742 - DNA, 12 bp, Artificial Sequence
  Oligonucleotide primer for the detection of SNP TSC0009020
ggaattaaagat

SEQ ID NO: 280743 - DNA, 12 bp, Artificial Sequence
  Oligonucleotide primer for the detection of SNP TSC0009020
ttattttaaaga

SEQ ID NO: 280744 - DNA, 12 bp, Artificial Sequence
  Oligonucleotide primer for the detection of SNP TSC0009021
cccaaactattt

SEQ ID NO: 280745 - DNA, 12 bp, Artificial Sequence
  Oligonucleotide primer for the detection of SNP TSC0009021
ttgaatatttag

SEQ ID NO: 280746 - DNA, 12 bp, Artificial Sequence
  Oligonucleotide primer for the detection of SNP TSC0009021
ctaaacactcaa

SEQ ID NO: 280747 - DNA, 12 bp, Artificial Sequence
  Oligonucleotide primer for the detection of SNP TSC0009021
tttaagttgttt

SEQ ID NO: 280748 - DNA, 12 bp, Artificial Sequence
  Oligonucleotide primer for the detection of SNP TSC0009025
catttcacattt

SEQ ID NO: 280749 - DNA, 12 bp, Artificial Sequence
  Oligonucleotide primer for the detection of SNP TSC0009025
taagttatatta

SEQ ID NO: 280750 - DNA, 12 bp, Artificial Sequence
  Oligonucleotide primer for the detection of SNP TSC0009026
aatataaaattt

SEQ ID NO: 280751 - DNA, 12 bp, Artificial Sequence
  Oligonucleotide primer for the detection of SNP TSC0009026
tgtgtttttatt

SEQ ID NO: 280752 - DNA, 12 bp, Artificial Sequence
  Oligonucleotide primer for the detection of SNP TSC0009026
tatatccccacc

SEQ ID NO: 280753 - DNA, 12 bp, Artificial Sequence
  Oligonucleotide primer for the detection of SNP TSC0009026
gatgtgagattt

SEQ ID NO: 280754 - DNA, 12 bp, Artificial Sequence
  Oligonucleotide primer for the detection of SNP TSC0009027
caaatctattcc

SEQ ID NO: 280755 - DNA, 12 bp, Artificial Sequence
  Oligonucleotide primer for the detection of SNP TSC0009027
gtaattgaatta

SEQ ID NO: 280756 - DNA, 12 bp, Artificial Sequence
  Oligonucleotide primer for the detection of SNP TSC0009028
ataccattacac

SEQ ID NO: 280757 - DNA, 12 bp, Artificial Sequence
  Oligonucleotide primer for the detection of SNP TSC0009028
gtgtttattaag

SEQ ID NO: 280758 - DNA, 12 bp, Artificial Sequence
  Oligonucleotide primer for the detection of SNP TSC0009029
ccaaatatcact

SEQ ID NO: 280759 - DNA, 12 bp, Artificial Sequence
  Oligonucleotide primer for the detection of SNP TSC0009029
aaatattaagga

SEQ ID NO: 280760 - DNA, 12 bp, Artificial Sequence
  Oligonucleotide primer for the detection of SNP TSC0009029
aaataccaaaaa

SEQ ID NO: 280761 - DNA, 12 bp, Artificial Sequence
  Oligonucleotide primer for the detection of SNP TSC0009029
ttaaatattatt

SEQ ID NO: 280762 - DNA, 12 bp, Artificial Sequence
  Oligonucleotide primer for the detection of SNP TSC0009034
aaatcttccctt

SEQ ID NO: 280763 - DNA, 12 bp, Artificial Sequence
  Oligonucleotide primer for the detection of SNP TSC0009034
tgaatttgttta

SEQ ID NO: 280764 - DNA, 12 bp, Artificial Sequence
  Oligonucleotide primer for the detection of SNP TSC0009039
ttataaaataaa

SEQ ID NO: 280765 - DNA, 12 bp, Artificial Sequence
  Oligonucleotide primer for the detection of SNP TSC0009039
ttttttcctcat

SEQ ID NO: 280766 - DNA, 12 bp, Artificial Sequence
  Oligonucleotide primer for the detection of SNP TSC0009039
tttgtgggatga

SEQ ID NO: 280767 - DNA, 12 bp, Artificial Sequence
  Oligonucleotide primer for the detection of SNP TSC0009040
acaacaatacca

SEQ ID NO: 280768 - DNA, 12 bp, Artificial Sequence
  Oligonucleotide primer for the detection of SNP TSC0009040
tatattgtgtag

SEQ ID NO: 280769 - DNA, 12 bp, Artificial Sequence
  Oligonucleotide primer for the detection of SNP TSC0009040
cacattatacaa

SEQ ID NO: 280770 - DNA, 12 bp, Artificial Sequence
  Oligonucleotide primer for the detection of SNP TSC0009040
gataatagtgtt

SEQ ID NO: 280771 - DNA, 12 bp, Artificial Sequence
  Oligonucleotide primer for the detection of SNP TSC0009041
tcctttcatcac

SEQ ID NO: 280772 - DNA, 12 bp, Artificial Sequence
  Oligonucleotide primer for the detection of SNP TSC0009041
tcctttcatcgc

SEQ ID NO: 280773 - DNA, 12 bp, Artificial Sequence
  Oligonucleotide primer for the detection of SNP TSC0009041
tatgtggtgagg

SEQ ID NO: 280774 - DNA, 12 bp, Artificial Sequence
  Oligonucleotide primer for the detection of SNP TSC0009041
tatataataaaa

SEQ ID NO: 280775 - DNA, 12 bp, Artificial Sequence
  Oligonucleotide primer for the detection of SNP TSC0009041
tttttttatcgt

SEQ ID NO: 280776 - DNA, 12 bp, Artificial Sequence
  Oligonucleotide primer for the detection of SNP TSC0009041
tttttttattgc

SEQ ID NO: 280777 - DNA, 12 bp, Artificial Sequence
  Oligonucleotide primer for the detection of SNP TSC0009041
tttttttatcgc

SEQ ID NO: 280778 - DNA, 12 bp, Artificial Sequence
  Oligonucleotide primer for the detection of SNP TSC0009043
aggatagaatta

SEQ ID NO: 280779 - DNA, 12 bp, Artificial Sequence
  Oligonucleotide primer for the detection of SNP TSC0009043
aaaacaaaacca

SEQ ID NO: 280780 - DNA, 12 bp, Artificial Sequence
  Oligonucleotide primer for the detection of SNP TSC0009043
aaggggtatgat

SEQ ID NO: 280781 - DNA, 12 bp, Artificial Sequence
  Oligonucleotide primer for the detection of SNP TSC0009044
ctcaacctccca

SEQ ID NO: 280782 - DNA, 12 bp, Artificial Sequence
  Oligonucleotide primer for the detection of SNP TSC0009044
taatcccaacca

SEQ ID NO: 280783 - DNA, 12 bp, Artificial Sequence
  Oligonucleotide primer for the detection of SNP TSC0009055
tcatttattttc

SEQ ID NO: 280784 - DNA, 12 bp, Artificial Sequence
  Oligonucleotide primer for the detection of SNP TSC0009055
aaagtttaataa

SEQ ID NO: 280785 - DNA, 12 bp, Artificial Sequence
  Oligonucleotide primer for the detection of SNP TSC0009058
aatacataaact

SEQ ID NO: 280786 - DNA, 12 bp, Artificial Sequence
  Oligonucleotide primer for the detection of SNP TSC0009058
aatacgtaaact

SEQ ID NO: 280787 - DNA, 12 bp, Artificial Sequence
  Oligonucleotide primer for the detection of SNP TSC0009058
ttaatgagataa

SEQ ID NO: 280788 - DNA, 12 bp, Artificial Sequence
  Oligonucleotide primer for the detection of SNP TSC0009058
ccaataaaataa

SEQ ID NO: 280789 - DNA, 12 bp, Artificial Sequence
  Oligonucleotide primer for the detection of SNP TSC0009058
aatatgtgagtt

SEQ ID NO: 280790 - DNA, 12 bp, Artificial Sequence
  Oligonucleotide primer for the detection of SNP TSC0009058
aatacgtgagtt

SEQ ID NO: 280791 - DNA, 12 bp, Artificial Sequence
  Oligonucleotide primer for the detection of SNP TSC0009069
ttaacctactaa

SEQ ID NO: 280792 - DNA, 12 bp, Artificial Sequence
  Oligonucleotide primer for the detection of SNP TSC0009069
ataaaattttta

SEQ ID NO: 280793 - DNA, 12 bp, Artificial Sequence
  Oligonucleotide primer for the detection of SNP TSC0009077
tccaccttatcc

SEQ ID NO: 280794 - DNA, 12 bp, Artificial Sequence
  Oligonucleotide primer for the detection of SNP TSC0009077
agatgttaaggg

SEQ ID NO: 280795 - DNA, 12 bp, Artificial Sequence
  Oligonucleotide primer for the detection of SNP TSC0009081
accctctacttc

SEQ ID NO: 280796 - DNA, 12 bp, Artificial Sequence
  Oligonucleotide primer for the detection of SNP TSC0009081
tagttaaattta

SEQ ID NO: 280797 - DNA, 12 bp, Artificial Sequence
  Oligonucleotide primer for the detection of SNP TSC0009082
atttgttgaaga

SEQ ID NO: 280798 - DNA, 12 bp, Artificial Sequence
  Oligonucleotide primer for the detection of SNP TSC0009082
atctactaaaaa

SEQ ID NO: 280799 - DNA, 12 bp, Artificial Sequence
  Oligonucleotide primer for the detection of SNP TSC0009082
gaaataggaagt

SEQ ID NO: 280800 - DNA, 12 bp, Artificial Sequence
  Oligonucleotide primer for the detection of SNP TSC0009087
aaaaaccattaa

SEQ ID NO: 280801 - DNA, 12 bp, Artificial Sequence
  Oligonucleotide primer for the detection of SNP TSC0009087
ttttggttttgt

SEQ ID NO: 280802 - DNA, 12 bp, Artificial Sequence
  Oligonucleotide primer for the detection of SNP TSC0009087
tttaactttata

SEQ ID NO: 280803 - DNA, 12 bp, Artificial Sequence
  Oligonucleotide primer for the detection of SNP TSC0009087
gagattattggt

SEQ ID NO: 280804 - DNA, 12 bp, Artificial Sequence
  Oligonucleotide primer for the detection of SNP TSC0009088
acaaaaaccatt

SEQ ID NO: 280805 - DNA, 12 bp, Artificial Sequence
  Oligonucleotide primer for the detection of SNP TSC0009088
tttggttttgta

SEQ ID NO: 280806 - DNA, 12 bp, Artificial Sequence
  Oligonucleotide primer for the detection of SNP TSC0009088
atagagattatt

SEQ ID NO: 280807 - DNA, 12 bp, Artificial Sequence
  Oligonucleotide primer for the detection of SNP TSC0009092
tttattctaaac

SEQ ID NO: 280808 - DNA, 12 bp, Artificial Sequence
  Oligonucleotide primer for the detection of SNP TSC0009092
tagttatttata

SEQ ID NO: 280809 - DNA, 12 bp, Artificial Sequence
  Oligonucleotide primer for the detection of SNP TSC0009102
tttaaaacttcc

SEQ ID NO: 280810 - DNA, 12 bp, Artificial Sequence
  Oligonucleotide primer for the detection of SNP TSC0009102
attatttattaa

SEQ ID NO: 280811 - DNA, 12 bp, Artificial Sequence
  Oligonucleotide primer for the detection of SNP TSC0009103
acaaattccttc

SEQ ID NO: 280812 - DNA, 12 bp, Artificial Sequence
  Oligonucleotide primer for the detection of SNP TSC0009103
agaaggaatttg

SEQ ID NO: 280813 - DNA, 12 bp, Artificial Sequence
  Oligonucleotide primer for the detection of SNP TSC0009104
ccaatttctccc

SEQ ID NO: 280814 - DNA, 12 bp, Artificial Sequence
  Oligonucleotide primer for the detection of SNP TSC0009111
taaaaacaacat

SEQ ID NO: 280815 - DNA, 12 bp, Artificial Sequence
  Oligonucleotide primer for the detection of SNP TSC0009111
aaatagtgaaaa

SEQ ID NO: 280816 - DNA, 12 bp, Artificial Sequence
  Oligonucleotide primer for the detection of SNP TSC0009112
atttttatattt

SEQ ID NO: 280817 - DNA, 12 bp, Artificial Sequence
  Oligonucleotide primer for the detection of SNP TSC0009112
aaaattataaaa

SEQ ID NO: 280818 - DNA, 12 bp, Artificial Sequence
  Oligonucleotide primer for the detection of SNP TSC0009113
caatatcacaca

SEQ ID NO: 280819 - DNA, 12 bp, Artificial Sequence
  Oligonucleotide primer for the detection of SNP TSC0009113
tatatgggtata

SEQ ID NO: 280820 - DNA, 12 bp, Artificial Sequence
  Oligonucleotide primer for the detection of SNP TSC0009113
tacataaatata

SEQ ID NO: 280821 - DNA, 12 bp, Artificial Sequence
  Oligonucleotide primer for the detection of SNP TSC0009113
tagtattatata

SEQ ID NO: 280822 - DNA, 12 bp, Artificial Sequence
  Oligonucleotide primer for the detection of SNP TSC0009127
aaaacataataa

SEQ ID NO: 280823 - DNA, 12 bp, Artificial Sequence
  Oligonucleotide primer for the detection of SNP TSC0009127
gaaatttaaatt

SEQ ID NO: 280824 - DNA, 12 bp, Artificial Sequence
  Oligonucleotide primer for the detection of SNP TSC0009127
aaaattcaaacc

SEQ ID NO: 280825 - DNA, 12 bp, Artificial Sequence
  Oligonucleotide primer for the detection of SNP TSC0009127
ttaggatatagt

SEQ ID NO: 280826 - DNA, 12 bp, Artificial Sequence
  Oligonucleotide primer for the detection of SNP TSC0009133
cactaaaaattt

SEQ ID NO: 280827 - DNA, 12 bp, Artificial Sequence
  Oligonucleotide primer for the detection of SNP TSC0009133
aatttgtttaag

SEQ ID NO: 280828 - DNA, 12 bp, Artificial Sequence
  Oligonucleotide primer for the detection of SNP TSC0009139
ttttctccttcc

SEQ ID NO: 280829 - DNA, 12 bp, Artificial Sequence
  Oligonucleotide primer for the detection of SNP TSC0009139
tagagaaatatg

SEQ ID NO: 280830 - DNA, 12 bp, Artificial Sequence
  Oligonucleotide primer for the detection of SNP TSC0009141
cctctaaataat

SEQ ID NO: 280831 - DNA, 12 bp, Artificial Sequence
  Oligonucleotide primer for the detection of SNP TSC0009141
tgtttgtttgta

SEQ ID NO: 280832 - DNA, 12 bp, Artificial Sequence
  Oligonucleotide primer for the detection of SNP TSC0009142
ctccaactaccc

SEQ ID NO: 280833 - DNA, 12 bp, Artificial Sequence
  Oligonucleotide primer for the detection of SNP TSC0009142
ttgatgtaataa

SEQ ID NO: 280834 - DNA, 12 bp, Artificial Sequence
  Oligonucleotide primer for the detection of SNP TSC0009142
tcgatgtaataa

SEQ ID NO: 280835 - DNA, 12 bp, Artificial Sequence
  Oligonucleotide primer for the detection of SNP TSC0009142
ttgacgtaataa

SEQ ID NO: 280836 - DNA, 12 bp, Artificial Sequence
  Oligonucleotide primer for the detection of SNP TSC0009142
tcgacgtaataa

SEQ ID NO: 280837 - DNA, 12 bp, Artificial Sequence
  Oligonucleotide primer for the detection of SNP TSC0009146
aacaaaaaacac

SEQ ID NO: 280838 - DNA, 12 bp, Artificial Sequence
  Oligonukleotid-Primer
ttttttgtggta

SEQ ID NO: 280839 - DNA, 12 bp, Artificial Sequence
  Oligonucleotide primer for the detection of SNP TSC0009146
tttttcgtggta

SEQ ID NO: 280840 - DNA, 12 bp, Artificial Sequence
  Oligonucleotide primer for the detection of SNP TSC0009147
ttttatgattta

SEQ ID NO: 280841 - DNA, 12 bp, Artificial Sequence
  Oligonucleotide primer for the detection of SNP TSC0009148
tcacaatcataa

SEQ ID NO: 280842 - DNA, 12 bp, Artificial Sequence
  Oligonukleotid-Primer
ggtatttatttt

SEQ ID NO: 280843 - DNA, 12 bp, Artificial Sequence
  Oligonucleotide primer for the detection of SNP TSC0009148
ggtatttatttc

SEQ ID NO: 280844 - DNA, 12 bp, Artificial Sequence
  Oligonucleotide primer for the detection of SNP TSC0009148
acattcacccca

SEQ ID NO: 280845 - DNA, 12 bp, Artificial Sequence
  Oligonucleotide primer for the detection of SNP TSC0009148
acattcaccccg

SEQ ID NO: 280846 - DNA, 12 bp, Artificial Sequence
  Oligonucleotide primer for the detection of SNP TSC0009148
ttatagttatag

SEQ ID NO: 280847 - DNA, 12 bp, Artificial Sequence
  Oligonucleotide primer for the detection of SNP TSC0009149
ttacaatatccc

SEQ ID NO: 280848 - DNA, 12 bp, Artificial Sequence
  Oligonucleotide primer for the detection of SNP TSC0009149
atgattgtgagg

SEQ ID NO: 280849 - DNA, 12 bp, Artificial Sequence
  Oligonucleotide primer for the detection of SNP TSC0009150
aaattaaacatt

SEQ ID NO: 280850 - DNA, 12 bp, Artificial Sequence
  Oligonucleotide primer for the detection of SNP TSC0009150
ttatatgtgagg

SEQ ID NO: 280851 - DNA, 12 bp, Artificial Sequence
  Oligonucleotide primer for the detection of SNP TSC0009172
ccaaaaaactta

SEQ ID NO: 280852 - DNA, 12 bp, Artificial Sequence
  Oligonucleotide primer for the detection of SNP TSC0009172
tttgttataatt

SEQ ID NO: 280853 - DNA, 12 bp, Artificial Sequence
  Oligonucleotide primer for the detection of SNP TSC0009172
cttctaccataa

SEQ ID NO: 280854 - DNA, 12 bp, Artificial Sequence
  Oligonucleotide primer for the detection of SNP TSC0009172
tttaggaaattt

SEQ ID NO: 280855 - DNA, 12 bp, Artificial Sequence
  Oligonucleotide primer for the detection of SNP TSC0009173
aaaataaataat

SEQ ID NO: 280856 - DNA, 12 bp, Artificial Sequence
  Oligonucleotide primer for the detection of SNP TSC0009173
cttttctttata

SEQ ID NO: 280857 - DNA, 12 bp, Artificial Sequence
  Oligonucleotide primer for the detection of SNP TSC0009173
agaatgggtgat

SEQ ID NO: 280858 - DNA, 12 bp, Artificial Sequence
  Oligonucleotide primer for the detection of SNP TSC0009174
taaataacatta

SEQ ID NO: 280859 - DNA, 12 bp, Artificial Sequence
  Oligonucleotide primer for the detection of SNP TSC0009174
atttttttttag

SEQ ID NO: 280860 - DNA, 12 bp, Artificial Sequence
  Oligonucleotide primer for the detection of SNP TSC0009174
actctttcccaa

SEQ ID NO: 280861 - DNA, 12 bp, Artificial Sequence
  Oligonucleotide primer for the detection of SNP TSC0009174
gtaaatgatatt

SEQ ID NO: 280862 - DNA, 12 bp, Artificial Sequence
  Oligonucleotide primer for the detection of SNP TSC0009176
tataataaaaac

SEQ ID NO: 280863 - DNA, 12 bp, Artificial Sequence
  Oligonucleotide primer for the detection of SNP TSC0009176
tttattgtgttg

SEQ ID NO: 280864 - DNA, 12 bp, Artificial Sequence
  Oligonucleotide primer for the detection of SNP TSC0009177
tcaaaaccatac

SEQ ID NO: 280865 - DNA, 12 bp, Artificial Sequence
  Oligonucleotide primer for the detection of SNP TSC0009177
gattgttatgta

SEQ ID NO: 280866 - DNA, 12 bp, Artificial Sequence
  Oligonucleotide primer for the detection of SNP TSC0009181
tttattttaaat

SEQ ID NO: 280867 - DNA, 12 bp, Artificial Sequence
  Oligonucleotide primer for the detection of SNP TSC0009181
tatattttaatg

SEQ ID NO: 280868 - DNA, 12 bp, Artificial Sequence
  Oligonucleotide primer for the detection of SNP TSC0009183
aattttcttcaa

SEQ ID NO: 280869 - DNA, 12 bp, Artificial Sequence
  Oligonucleotide primer for the detection of SNP TSC0009183
aaaggaaaagtt

SEQ ID NO: 280870 - DNA, 12 bp, Artificial Sequence
  Oligonucleotide primer for the detection of SNP TSC0009184
aaaccaacaatc

SEQ ID NO: 280871 - DNA, 12 bp, Artificial Sequence
  Oligonucleotide primer for the detection of SNP TSC0009184
tttggtaataga

SEQ ID NO: 280872 - DNA, 12 bp, Artificial Sequence
  Oligonucleotide primer for the detection of SNP TSC0009185
ttcccttctacc

SEQ ID NO: 280873 - DNA, 12 bp, Artificial Sequence
  Oligonucleotide primer for the detection of SNP TSC0009185
ataaaattatta

SEQ ID NO: 280874 - DNA, 12 bp, Artificial Sequence
  Oligonucleotide primer for the detection of SNP TSC0009192
aaattcaaaaac

SEQ ID NO: 280875 - DNA, 12 bp, Artificial Sequence
  Oligonucleotide primer for the detection of SNP TSC0009192
aaattcgaaaac

SEQ ID NO: 280876 - DNA, 12 bp, Artificial Sequence
  Oligonucleotide primer for the detection of SNP TSC0009192
ggtttttaatta

SEQ ID NO: 280877 - DNA, 12 bp, Artificial Sequence
  Oligonucleotide primer for the detection of SNP TSC0009193
aaaccaaccttt

SEQ ID NO: 280878 - DNA, 12 bp, Artificial Sequence
  Oligonucleotide primer for the detection of SNP TSC0009193
tttgtaggagat

SEQ ID NO: 280879 - DNA, 12 bp, Artificial Sequence
  Oligonucleotide primer for the detection of SNP TSC0009193
cctacaaaaaac

SEQ ID NO: 280880 - DNA, 12 bp, Artificial Sequence
  Oligonucleotide primer for the detection of SNP TSC0009193
aagttagttttt

SEQ ID NO: 280881 - DNA, 12 bp, Artificial Sequence
  Oligonucleotide primer for the detection of SNP TSC0009195
tcttctctatat

SEQ ID NO: 280882 - DNA, 12 bp, Artificial Sequence
  Oligonucleotide primer for the detection of SNP TSC0009195
tgattatatata

SEQ ID NO: 280883 - DNA, 12 bp, Artificial Sequence
  Oligonucleotide primer for the detection of SNP TSC0009195
taatcatacata

SEQ ID NO: 280884 - DNA, 12 bp, Artificial Sequence
  Oligonucleotide primer for the detection of SNP TSC0009195
ttttttttgtgt

SEQ ID NO: 280885 - DNA, 12 bp, Artificial Sequence
  Oligonucleotide primer for the detection of SNP TSC0009196
aaaaaaattaca

SEQ ID NO: 280886 - DNA, 12 bp, Artificial Sequence
  Oligonucleotide primer for the detection of SNP TSC0009196
atttattttaaa

SEQ ID NO: 280887 - DNA, 12 bp, Artificial Sequence
  Oligonucleotide primer for the detection of SNP TSC0009220
ctacaaaaccac

SEQ ID NO: 280888 - DNA, 12 bp, Artificial Sequence
  Oligonucleotide primer for the detection of SNP TSC0009220
tgggtagttttg

SEQ ID NO: 280889 - DNA, 12 bp, Artificial Sequence
  Oligonucleotide primer for the detection of SNP TSC0009220
taaacaactcta

SEQ ID NO: 280890 - DNA, 12 bp, Artificial Sequence
  Oligonucleotide primer for the detection of SNP TSC0009220
ttgtagagttat

SEQ ID NO: 280891 - DNA, 12 bp, Artificial Sequence
  Oligonucleotide primer for the detection of SNP TSC0009221
aaactacccaaa

SEQ ID NO: 280892 - DNA, 12 bp, Artificial Sequence
  Oligonucleotide primer for the detection of SNP TSC0009221
tttgtagggtat

SEQ ID NO: 280893 - DNA, 12 bp, Artificial Sequence
  Oligonucleotide primer for the detection of SNP TSC0009221
tctacaaaatac

SEQ ID NO: 280894 - DNA, 12 bp, Artificial Sequence
  Oligonucleotide primer for the detection of SNP TSC0009221
gagttgtttaag

SEQ ID NO: 280895 - DNA, 12 bp, Artificial Sequence
  Oligonucleotide primer for the detection of SNP TSC0009222
ctcccctcaaaa

SEQ ID NO: 280896 - DNA, 12 bp, Artificial Sequence
  Oligonucleotide primer for the detection of SNP TSC0009222
atatatatgagt

SEQ ID NO: 280897 - DNA, 12 bp, Artificial Sequence
  Oligonucleotide primer for the detection of SNP TSC0009222
atatatacgagt

SEQ ID NO: 280898 - DNA, 12 bp, Artificial Sequence
  Oligonucleotide primer for the detection of SNP TSC0009222
acacatacaaac

SEQ ID NO: 280899 - DNA, 12 bp, Artificial Sequence
  Oligonucleotide primer for the detection of SNP TSC0009222
acacatacgaac

SEQ ID NO: 280900 - DNA, 12 bp, Artificial Sequence
  Oligonucleotide primer for the detection of SNP TSC0009222
attttttttagg

SEQ ID NO: 280901 - DNA, 12 bp, Artificial Sequence
  Oligonucleotide primer for the detection of SNP TSC0009223
tcaactattttt

SEQ ID NO: 280902 - DNA, 12 bp, Artificial Sequence
  Oligonucleotide primer for the detection of SNP TSC0009223
tgtgaggtttga

SEQ ID NO: 280903 - DNA, 12 bp, Artificial Sequence
  Oligonucleotide primer for the detection of SNP TSC0009223
ataaaacttaaa

SEQ ID NO: 280904 - DNA, 12 bp, Artificial Sequence
  Oligonucleotide primer for the detection of SNP TSC0009223
taattgtttttt

SEQ ID NO: 280905 - DNA, 12 bp, Artificial Sequence
  Oligonucleotide primer for the detection of SNP TSC0009223
taattgtttttc

SEQ ID NO: 280906 - DNA, 12 bp, Artificial Sequence
  Oligonucleotide primer for the detection of SNP TSC0009224
taaaacacaaac

SEQ ID NO: 280907 - DNA, 12 bp, Artificial Sequence
  Oligonucleotide primer for the detection of SNP TSC0009224
tttttattgatg

SEQ ID NO: 280908 - DNA, 12 bp, Artificial Sequence
  Oligonucleotide primer for the detection of SNP TSC0009224
ttattaataaaa

SEQ ID NO: 280909 - DNA, 12 bp, Artificial Sequence
  Oligonucleotide primer for the detection of SNP TSC0009224
tgagatataagt

SEQ ID NO: 280910 - DNA, 12 bp, Artificial Sequence
  Oligonucleotide primer for the detection of SNP TSC0009234
atctattttatt

SEQ ID NO: 280911 - DNA, 12 bp, Artificial Sequence
  Oligonucleotide primer for the detection of SNP TSC0009234
agtagtatggaa

SEQ ID NO: 280912 - DNA, 12 bp, Artificial Sequence
  Oligonucleotide primer for the detection of SNP TSC0009246
tttcatactact

SEQ ID NO: 280913 - DNA, 12 bp, Artificial Sequence
  Oligonucleotide primer for the detection of SNP TSC0009246
tttggggatgta

SEQ ID NO: 280914 - DNA, 12 bp, Artificial Sequence
  Oligonucleotide primer for the detection of SNP TSC0009247
actaaaatatac

SEQ ID NO: 280915 - DNA, 12 bp, Artificial Sequence
  Oligonucleotide primer for the detection of SNP TSC0009247
ttttttttaaag

SEQ ID NO: 280916 - DNA, 12 bp, Artificial Sequence
  Oligonucleotide primer for the detection of SNP TSC0009248
aatatataaaat

SEQ ID NO: 280917 - DNA, 12 bp, Artificial Sequence
  Oligonucleotide primer for the detection of SNP TSC0009248
gtatttttaaat

SEQ ID NO: 280918 - DNA, 12 bp, Artificial Sequence
  Oligonucleotide primer for the detection of SNP TSC0009248
aatattcttaaa

SEQ ID NO: 280919 - DNA, 12 bp, Artificial Sequence
  Oligonucleotide primer for the detection of SNP TSC0009248
aatgtgtgaaat

SEQ ID NO: 280920 - DNA, 12 bp, Artificial Sequence
  Oligonucleotide primer for the detection of SNP TSC0009254
cacccaaaatcc

SEQ ID NO: 280921 - DNA, 12 bp, Artificial Sequence
  Oligonucleotide primer for the detection of SNP TSC0009254
cacccgaaatcc

SEQ ID NO: 280922 - DNA, 12 bp, Artificial Sequence
  Oligonucleotide primer for the detection of SNP TSC0009254
ttttttgagtaa

SEQ ID NO: 280923 - DNA, 12 bp, Artificial Sequence
  Oligonucleotide primer for the detection of SNP TSC0009255
atctcacttata

SEQ ID NO: 280924 - DNA, 12 bp, Artificial Sequence
  Oligonucleotide primer for the detection of SNP TSC0009255
tttaaattccac

SEQ ID NO: 280925 - DNA, 12 bp, Artificial Sequence
  Oligonucleotide primer for the detection of SNP TSC0009255
attttatttatg

SEQ ID NO: 280926 - DNA, 12 bp, Artificial Sequence
  Oligonucleotide primer for the detection of SNP TSC0009256
taataatcattt

SEQ ID NO: 280927 - DNA, 12 bp, Artificial Sequence
  Oligonucleotide primer for the detection of SNP TSC0009256
tatgtatattta

SEQ ID NO: 280928 - DNA, 12 bp, Artificial Sequence
  Oligonucleotide primer for the detection of SNP TSC0009256
tatacatactta

SEQ ID NO: 280929 - DNA, 12 bp, Artificial Sequence
  Oligonucleotide primer for the detection of SNP TSC0009256
ggtaattatttt

SEQ ID NO: 280930 - DNA, 12 bp, Artificial Sequence
  Oligonucleotide primer for the detection of SNP TSC0009256
ggtaattatttc

SEQ ID NO: 280931 - DNA, 12 bp, Artificial Sequence
  Oligonucleotide primer for the detection of SNP TSC0009257
attaatttttta

SEQ ID NO: 280932 - DNA, 12 bp, Artificial Sequence
  Oligonucleotide primer for the detection of SNP TSC0009257
ttaactctccaa

SEQ ID NO: 280933 - DNA, 12 bp, Artificial Sequence
  Oligonucleotide primer for the detection of SNP TSC0009257
aaatgagtgagt

SEQ ID NO: 280934 - DNA, 12 bp, Artificial Sequence
  Oligonucleotide primer for the detection of SNP TSC0009259
aacatttataac

SEQ ID NO: 280935 - DNA, 12 bp, Artificial Sequence
  Oligonucleotide primer for the detection of SNP TSC0009259
tggagtttataa

SEQ ID NO: 280936 - DNA, 12 bp, Artificial Sequence
  Oligonucleotide primer for the detection of SNP TSC0009259
taaaattcataa

SEQ ID NO: 280937 - DNA, 12 bp, Artificial Sequence
  Oligonucleotide primer for the detection of SNP TSC0009259
ggtatttgtgat

SEQ ID NO: 280938 - DNA, 12 bp, Artificial Sequence
  Oligonucleotide primer for the detection of SNP TSC0009265
catttcacataa

SEQ ID NO: 280939 - DNA, 12 bp, Artificial Sequence
  Oligonukleotid-Primer
tctttttacccc

SEQ ID NO: 280940 - DNA, 12 bp, Artificial Sequence
  Oligonucleotide primer for the detection of SNP TSC0009265
atattttatatg

SEQ ID NO: 280941 - DNA, 12 bp, Artificial Sequence
  Oligonucleotide primer for the detection of SNP TSC0009266
atcaatccttct

SEQ ID NO: 280942 - DNA, 12 bp, Artificial Sequence
  Oligonucleotide primer for the detection of SNP TSC0009266
tattgtgttata

SEQ ID NO: 280943 - DNA, 12 bp, Artificial Sequence
  Oligonukleotid-Primer
tatctctaataa

SEQ ID NO: 280944 - DNA, 12 bp, Artificial Sequence
  Oligonucleotide primer for the detection of SNP TSC0009271
gaataatattag

SEQ ID NO: 280945 - DNA, 12 bp, Artificial Sequence
  Oligonucleotide primer for the detection of SNP TSC0009271
aacaacactaaa

SEQ ID NO: 280946 - DNA, 12 bp, Artificial Sequence
  Oligonucleotide primer for the detection of SNP TSC0009271
ttttaatagttt

SEQ ID NO: 280947 - DNA, 12 bp, Artificial Sequence
  Oligonucleotide primer for the detection of SNP TSC0009272
cccaaaatccat

SEQ ID NO: 280948 - DNA, 12 bp, Artificial Sequence
  Oligonucleotide primer for the detection of SNP TSC0009272
ttttattttata

SEQ ID NO: 280949 - DNA, 12 bp, Artificial Sequence
  Oligonucleotide primer for the detection of SNP TSC0009273
taatcattcatc

SEQ ID NO: 280950 - DNA, 12 bp, Artificial Sequence
  Oligonucleotide primer for the detection of SNP TSC0009274
cataaaacaacc

SEQ ID NO: 280951 - DNA, 12 bp, Artificial Sequence
  Oligonucleotide primer for the detection of SNP TSC0009274
ggtataatttaa

SEQ ID NO: 280952 - DNA, 12 bp, Artificial Sequence
  Oligonucleotide primer for the detection of SNP TSC0009274
aatacaattcaa

SEQ ID NO: 280953 - DNA, 12 bp, Artificial Sequence
  Oligonucleotide primer for the detection of SNP TSC0009274
tataggataatt

SEQ ID NO: 280954 - DNA, 12 bp, Artificial Sequence
  Oligonucleotide primer for the detection of SNP TSC0009278
atttaaaatagg

SEQ ID NO: 280955 - DNA, 12 bp, Artificial Sequence
  Oligonucleotide primer for the detection of SNP TSC0009278
atccaaaataaa

SEQ ID NO: 280956 - DNA, 12 bp, Artificial Sequence
  Oligonucleotide primer for the detection of SNP TSC0009278
gaaaggggaaag

SEQ ID NO: 280957 - DNA, 12 bp, Artificial Sequence
  Oligonucleotide primer for the detection of SNP TSC0009279
acacactaaaaa

SEQ ID NO: 280958 - DNA, 12 bp, Artificial Sequence
  Oligonucleotide primer for the detection of SNP TSC0009279
acacgctaaaaa

SEQ ID NO: 280959 - DNA, 12 bp, Artificial Sequence
  Oligonucleotide primer for the detection of SNP TSC0009279
ttttttatgtga

SEQ ID NO: 280960 - DNA, 12 bp, Artificial Sequence
  Oligonucleotide primer for the detection of SNP TSC0009279
tttctcatataa

SEQ ID NO: 280961 - DNA, 12 bp, Artificial Sequence
  Oligonucleotide primer for the detection of SNP TSC0009279
gtatgttggaag

SEQ ID NO: 280962 - DNA, 12 bp, Artificial Sequence
  Oligonucleotide primer for the detection of SNP TSC0009279
gtacgttggaag

SEQ ID NO: 280963 - DNA, 12 bp, Artificial Sequence
  Oligonucleotide primer for the detection of SNP TSC0009280
aaaaaaatcttc

SEQ ID NO: 280964 - DNA, 12 bp, Artificial Sequence
  Oligonucleotide primer for the detection of SNP TSC0009280
tttttttgaatt

SEQ ID NO: 280965 - DNA, 12 bp, Artificial Sequence
  Oligonucleotide primer for the detection of SNP TSC0009280
tttcttaaatta

SEQ ID NO: 280966 - DNA, 12 bp, Artificial Sequence
  Oligonucleotide primer for the detection of SNP TSC0009280
gggggttttttt

SEQ ID NO: 280967 - DNA, 12 bp, Artificial Sequence
  Oligonucleotide primer for the detection of SNP TSC0009283
atatcaaaaatt

SEQ ID NO: 280968 - DNA, 12 bp, Artificial Sequence
  Oligonucleotide primer for the detection of SNP TSC0009283
tgtttagggtga

SEQ ID NO: 280969 - DNA, 12 bp, Artificial Sequence
  Oligonucleotide primer for the detection of SNP TSC0009283
tacccaaaataa

SEQ ID NO: 280970 - DNA, 12 bp, Artificial Sequence
  Oligonucleotide primer for the detection of SNP TSC0009283
atgttaggagtt

SEQ ID NO: 280971 - DNA, 12 bp, Artificial Sequence
  Oligonucleotide primer for the detection of SNP TSC0009285
taatattaaatt

SEQ ID NO: 280972 - DNA, 12 bp, Artificial Sequence
  Oligonucleotide primer for the detection of SNP TSC0009285
agttattaaata

SEQ ID NO: 280973 - DNA, 12 bp, Artificial Sequence
  Oligonucleotide primer for the detection of SNP TSC0009286
catatctaaaaa

SEQ ID NO: 280974 - DNA, 12 bp, Artificial Sequence
  Oligonucleotide primer for the detection of SNP TSC0009286
taggatatagga

SEQ ID NO: 280975 - DNA, 12 bp, Artificial Sequence
  Oligonucleotide primer for the detection of SNP TSC0009286
caaaatacaaaa

SEQ ID NO: 280976 - DNA, 12 bp, Artificial Sequence
  Oligonucleotide primer for the detection of SNP TSC0009286
atatttaaaaat

SEQ ID NO: 280977 - DNA, 12 bp, Artificial Sequence
  Oligonucleotide primer for the detection of SNP TSC0009287
aaatctttaaaa

SEQ ID NO: 280978 - DNA, 12 bp, Artificial Sequence
  Oligonucleotide primer for the detection of SNP TSC0009287
tttttagttata

SEQ ID NO: 280979 - DNA, 12 bp, Artificial Sequence
  Oligonucleotide primer for the detection of SNP TSC0009287
ttttaaccacaa

SEQ ID NO: 280980 - DNA, 12 bp, Artificial Sequence
  Oligonucleotide primer for the detection of SNP TSC0009287
ggatttttaaaa

SEQ ID NO: 280981 - DNA, 12 bp, Artificial Sequence
  Oligonucleotide primer for the detection of SNP TSC0009288
accataaattta

SEQ ID NO: 280982 - DNA, 12 bp, Artificial Sequence
  Oligonucleotide primer for the detection of SNP TSC0009288
taaagtagtaat

SEQ ID NO: 280983 - DNA, 12 bp, Artificial Sequence
  Oligonucleotide primer for the detection of SNP TSC0009288
caaaataataat

SEQ ID NO: 280984 - DNA, 12 bp, Artificial Sequence
  Oligonucleotide primer for the detection of SNP TSC0009288
attatagattta

SEQ ID NO: 280985 - DNA, 12 bp, Artificial Sequence
  Oligonucleotide primer for the detection of SNP TSC0009296
aatatcaataat

SEQ ID NO: 280986 - DNA, 12 bp, Artificial Sequence
  Oligonucleotide primer for the detection of SNP TSC0009296
ttttatatatag

SEQ ID NO: 280987 - DNA, 12 bp, Artificial Sequence
  Oligonucleotide primer for the detection of SNP TSC0009297
acataccaccat

SEQ ID NO: 280988 - DNA, 12 bp, Artificial Sequence
  Oligonucleotide primer for the detection of SNP TSC0009297
acgtaccaccat

SEQ ID NO: 280989 - DNA, 12 bp, Artificial Sequence
  Oligonucleotide primer for the detection of SNP TSC0009297
aaaattagttag

SEQ ID NO: 280990 - DNA, 12 bp, Artificial Sequence
  Oligonucleotide primer for the detection of SNP TSC0009299
aaatcaaaacca

SEQ ID NO: 280991 - DNA, 12 bp, Artificial Sequence
  Oligonucleotide primer for the detection of SNP TSC0009299
tttttgtgtatt

SEQ ID NO: 280992 - DNA, 12 bp, Artificial Sequence
  Oligonucleotide primer for the detection of SNP TSC0009299
tttatataccaa

SEQ ID NO: 280993 - DNA, 12 bp, Artificial Sequence
  Oligonucleotide primer for the detection of SNP TSC0009299
taagttagagtt

SEQ ID NO: 280994 - DNA, 12 bp, Artificial Sequence
  Oligonucleotide primer for the detection of SNP TSC0009300
aaaatacacaat

SEQ ID NO: 280995 - DNA, 12 bp, Artificial Sequence
  Oligonucleotide primer for the detection of SNP TSC0009300
tggttttaatgg

SEQ ID NO: 280996 - DNA, 12 bp, Artificial Sequence
  Oligonucleotide primer for the detection of SNP TSC0009300
tggttttaacgg

SEQ ID NO: 280997 - DNA, 12 bp, Artificial Sequence
  Oligonucleotide primer for the detection of SNP TSC0009300
taaccccaacaa

SEQ ID NO: 280998 - DNA, 12 bp, Artificial Sequence
  Oligonucleotide primer for the detection of SNP TSC0009300
taaccccaacga

SEQ ID NO: 280999 - DNA, 12 bp, Artificial Sequence
  Oligonucleotide primer for the detection of SNP TSC0009300
aaaatatatagt

SEQ ID NO: 281000 - DNA, 12 bp, Artificial Sequence
  Oligonucleotide primer for the detection of SNP TSC0009302
ttataaatttta

SEQ ID NO: 281001 - DNA, 12 bp, Artificial Sequence
  Oligonucleotide primer for the detection of SNP TSC0009302
taaaagaaaaag

SEQ ID NO: 281002 - DNA, 12 bp, Artificial Sequence
  Oligonucleotide primer for the detection of SNP TSC0009302
ttgtgaatttta

SEQ ID NO: 281003 - DNA, 12 bp, Artificial Sequence
  Oligonucleotide primer for the detection of SNP TSC0009303
tatttaaaaata

SEQ ID NO: 281004 - DNA, 12 bp, Artificial Sequence
  Oligonucleotide primer for the detection of SNP TSC0009303
tagaaattgaat

SEQ ID NO: 281005 - DNA, 12 bp, Artificial Sequence
  Oligonucleotide primer for the detection of SNP TSC0009303
aaaattaaacaa

SEQ ID NO: 281006 - DNA, 12 bp, Artificial Sequence
  Oligonucleotide primer for the detection of SNP TSC0009303
gtttaagaatat

SEQ ID NO: 281007 - DNA, 12 bp, Artificial Sequence
  Oligonucleotide primer for the detection of SNP TSC0009306
ctctaataatta

SEQ ID NO: 281008 - DNA, 12 bp, Artificial Sequence
  Oligonucleotide primer for the detection of SNP TSC0009306
agaattttgttt

SEQ ID NO: 281009 - DNA, 12 bp, Artificial Sequence
  Oligonucleotide primer for the detection of SNP TSC0009306
aaaaaaatttta

SEQ ID NO: 281010 - DNA, 12 bp, Artificial Sequence
  Oligonucleotide primer for the detection of SNP TSC0009314
ttaacctactat

SEQ ID NO: 281011 - DNA, 12 bp, Artificial Sequence
  Oligonucleotide primer for the detection of SNP TSC0009314
aagttttttagg

SEQ ID NO: 281012 - DNA, 12 bp, Artificial Sequence
  Oligonucleotide primer for the detection of SNP TSC0009315
caaaatctatcc

SEQ ID NO: 281013 - DNA, 12 bp, Artificial Sequence
  Oligonucleotide primer for the detection of SNP TSC0009315
agatatttgtta

SEQ ID NO: 281014 - DNA, 12 bp, Artificial Sequence
  Oligonucleotide primer for the detection of SNP TSC0009316
tataccacaaaa

SEQ ID NO: 281015 - DNA, 12 bp, Artificial Sequence
  Oligonucleotide primer for the detection of SNP TSC0009316
tttaaaattgga

SEQ ID NO: 281016 - DNA, 12 bp, Artificial Sequence
  Oligonucleotide primer for the detection of SNP TSC0009316
tttaaaactaaa

SEQ ID NO: 281017 - DNA, 12 bp, Artificial Sequence
  Oligonucleotide primer for the detection of SNP TSC0009316
gtatgtattata

SEQ ID NO: 281018 - DNA, 12 bp, Artificial Sequence
  Oligonucleotide primer for the detection of SNP TSC0009317
acacttatattt

SEQ ID NO: 281019 - DNA, 12 bp, Artificial Sequence
  Oligonucleotide primer for the detection of SNP TSC0009317
gaggtaaagaaa

SEQ ID NO: 281020 - DNA, 12 bp, Artificial Sequence
  Oligonucleotide primer for the detection of SNP TSC0009326
aatcaattaaaa

SEQ ID NO: 281021 - DNA, 12 bp, Artificial Sequence
  Oligonucleotide primer for the detection of SNP TSC0009326
taatagtttttt

SEQ ID NO: 281022 - DNA, 12 bp, Artificial Sequence
  Oligonucleotide primer for the detection of SNP TSC0009326
caattccccaaa

SEQ ID NO: 281023 - DNA, 12 bp, Artificial Sequence
  Oligonucleotide primer for the detection of SNP TSC0009326
aattagttaaga

SEQ ID NO: 281024 - DNA, 12 bp, Artificial Sequence
  Oligonukleotid-Primer
cataactattca

SEQ ID NO: 281025 - DNA, 12 bp, Artificial Sequence
  Oligonucleotide primer for the detection of SNP TSC0009334
tgttgtttatgt

SEQ ID NO: 281026 - DNA, 12 bp, Artificial Sequence
  Oligonucleotide primer for the detection of SNP TSC0009334
cgttgtttatgt

SEQ ID NO: 281027 - DNA, 12 bp, Artificial Sequence
  Oligonucleotide primer for the detection of SNP TSC0009334
cattactcatat

SEQ ID NO: 281028 - DNA, 12 bp, Artificial Sequence
  Oligonucleotide primer for the detection of SNP TSC0009334
cgttactcatat

SEQ ID NO: 281029 - DNA, 12 bp, Artificial Sequence
  Oligonucleotide primer for the detection of SNP TSC0009334
tatggttgttta

SEQ ID NO: 281030 - DNA, 12 bp, Artificial Sequence
  Oligonucleotide primer for the detection of SNP TSC0009335
taaattacttac

SEQ ID NO: 281031 - DNA, 12 bp, Artificial Sequence
  Oligonucleotide primer for the detection of SNP TSC0009335
gggtggtgagtg

SEQ ID NO: 281032 - DNA, 12 bp, Artificial Sequence
  Oligonucleotide primer for the detection of SNP TSC0009368
actaataaaacc

SEQ ID NO: 281033 - DNA, 12 bp, Artificial Sequence
  Oligonucleotide primer for the detection of SNP TSC0009368
agtgttttgtaa

SEQ ID NO: 281034 - DNA, 12 bp, Artificial Sequence
  Oligonucleotide primer for the detection of SNP TSC0009368
aatattttacaa

SEQ ID NO: 281035 - DNA, 12 bp, Artificial Sequence
  Oligonucleotide primer for the detection of SNP TSC0009368
attaatggaatt

SEQ ID NO: 281036 - DNA, 12 bp, Artificial Sequence
  Oligonucleotide primer for the detection of SNP TSC0009375
tcctctcccaac

SEQ ID NO: 281037 - DNA, 12 bp, Artificial Sequence
  Oligonucleotide primer for the detection of SNP TSC0009375
gtgttattagga

SEQ ID NO: 281038 - DNA, 12 bp, Artificial Sequence
  Oligonucleotide primer for the detection of SNP TSC0009376
aaaaataatact

SEQ ID NO: 281039 - DNA, 12 bp, Artificial Sequence
  Oligonucleotide primer for the detection of SNP TSC0009376
tggttataaatt

SEQ ID NO: 281040 - DNA, 12 bp, Artificial Sequence
  Oligonucleotide primer for the detection of SNP TSC0009379
tctcctttaaaa

SEQ ID NO: 281041 - DNA, 12 bp, Artificial Sequence
  Oligonucleotide primer for the detection of SNP TSC0009379
ttgttataattt

SEQ ID NO: 281042 - DNA, 12 bp, Artificial Sequence
  Oligonucleotide primer for the detection of SNP TSC0009379
ttactacaattt

SEQ ID NO: 281043 - DNA, 12 bp, Artificial Sequence
  Oligonucleotide primer for the detection of SNP TSC0009379
ttttttttagga

SEQ ID NO: 281044 - DNA, 12 bp, Artificial Sequence
  Oligonucleotide primer for the detection of SNP TSC0009380
aacacttaaaca

SEQ ID NO: 281045 - DNA, 12 bp, Artificial Sequence
  Oligonucleotide primer for the detection of SNP TSC0009380
aacgcttaaaca

SEQ ID NO: 281046 - DNA, 12 bp, Artificial Sequence
  Oligonucleotide primer for the detection of SNP TSC0009380
ttaattaatttt

SEQ ID NO: 281047 - DNA, 12 bp, Artificial Sequence
  Oligonucleotide primer for the detection of SNP TSC0009380
ttaattaattcc

SEQ ID NO: 281048 - DNA, 12 bp, Artificial Sequence
  Oligonucleotide primer for the detection of SNP TSC0009380
gatgtttgaata

SEQ ID NO: 281049 - DNA, 12 bp, Artificial Sequence
  Oligonucleotide primer for the detection of SNP TSC0009380
gacgtttgaata

SEQ ID NO: 281050 - DNA, 12 bp, Artificial Sequence
  Oligonucleotide primer for the detection of SNP TSC0009381
aatctcaaacat

SEQ ID NO: 281051 - DNA, 12 bp, Artificial Sequence
  Oligonucleotide primer for the detection of SNP TSC0009381
agatttgtaaag

SEQ ID NO: 281052 - DNA, 12 bp, Artificial Sequence
  Oligonucleotide primer for the detection of SNP TSC0009381
aaatttacaaaa

SEQ ID NO: 281053 - DNA, 12 bp, Artificial Sequence
  Oligonucleotide primer for the detection of SNP TSC0009381
aattttaagtat

SEQ ID NO: 281054 - DNA, 12 bp, Artificial Sequence
  Oligonucleotide primer for the detection of SNP TSC0009388
taacataaaaaa

SEQ ID NO: 281055 - DNA, 12 bp, Artificial Sequence
  Oligonucleotide primer for the detection of SNP TSC0009388
atgttattatgg

SEQ ID NO: 281056 - DNA, 12 bp, Artificial Sequence
  Oligonucleotide primer for the detection of SNP TSC0009388
atatcatcataa

SEQ ID NO: 281057 - DNA, 12 bp, Artificial Sequence
  Oligonucleotide primer for the detection of SNP TSC0009388
tgatatggaaaa

SEQ ID NO: 281058 - DNA, 12 bp, Artificial Sequence
  Oligonucleotide primer for the detection of SNP TSC0009389
aacaaatttccc

SEQ ID NO: 281059 - DNA, 12 bp, Artificial Sequence
  Oligonucleotide primer for the detection of SNP TSC0009389
tagattaatata

SEQ ID NO: 281060 - DNA, 12 bp, Artificial Sequence
  Oligonucleotide primer for the detection of SNP TSC0009389
caaactaacaca

SEQ ID NO: 281061 - DNA, 12 bp, Artificial Sequence
  Oligonucleotide primer for the detection of SNP TSC0009389
agtaaatttttt

SEQ ID NO: 281062 - DNA, 12 bp, Artificial Sequence
  Oligonucleotide primer for the detection of SNP TSC0009391
ataaaaattaaa

SEQ ID NO: 281063 - DNA, 12 bp, Artificial Sequence
  Oligonucleotide primer for the detection of SNP TSC0009391
gattttgggata

SEQ ID NO: 281064 - DNA, 12 bp, Artificial Sequence
  Oligonucleotide primer for the detection of SNP TSC0009391
accctaaaataa

SEQ ID NO: 281065 - DNA, 12 bp, Artificial Sequence
  Oligonucleotide primer for the detection of SNP TSC0009391
tgtagaagttga

SEQ ID NO: 281066 - DNA, 12 bp, Artificial Sequence
  Oligonucleotide primer for the detection of SNP TSC0009395
ctataaaacttt

SEQ ID NO: 281067 - DNA, 12 bp, Artificial Sequence
  Oligonucleotide primer for the detection of SNP TSC0009395
gaggttttattg

SEQ ID NO: 281068 - DNA, 12 bp, Artificial Sequence
  Oligonucleotide primer for the detection of SNP TSC0009396
aaactaaataat

SEQ ID NO: 281069 - DNA, 12 bp, Artificial Sequence
  Oligonucleotide primer for the detection of SNP TSC0009397
aaatattacaca

SEQ ID NO: 281070 - DNA, 12 bp, Artificial Sequence
  Oligonucleotide primer for the detection of SNP TSC0009397
tggttgtttaaa

SEQ ID NO: 281071 - DNA, 12 bp, Artificial Sequence
  Oligonucleotide primer for the detection of SNP TSC0009397
taattatttaaa

SEQ ID NO: 281072 - DNA, 12 bp, Artificial Sequence
  Oligonucleotide primer for the detection of SNP TSC0009397
ggtgttatatat

SEQ ID NO: 281073 - DNA, 12 bp, Artificial Sequence
  Oligonucleotide primer for the detection of SNP TSC0009402
atacccaaacac

SEQ ID NO: 281074 - DNA, 12 bp, Artificial Sequence
  Oligonucleotide primer for the detection of SNP TSC0009402
gatatttgtaat

SEQ ID NO: 281075 - DNA, 12 bp, Artificial Sequence
  Oligonucleotide primer for the detection of SNP TSC0009417
acttacattaat

SEQ ID NO: 281076 - DNA, 12 bp, Artificial Sequence
  Oligonucleotide primer for the detection of SNP TSC0009417
ttagggtgtata

SEQ ID NO: 281077 - DNA, 12 bp, Artificial Sequence
  Oligonucleotide primer for the detection of SNP TSC0009418
atattatcaaaa

SEQ ID NO: 281078 - DNA, 12 bp, Artificial Sequence
  Oligonucleotide primer for the detection of SNP TSC0009418
aatatgttgttt

SEQ ID NO: 281079 - DNA, 12 bp, Artificial Sequence
  Oligonucleotide primer for the detection of SNP TSC0009418
aatatgtcgttt

SEQ ID NO: 281080 - DNA, 12 bp, Artificial Sequence
  Oligonucleotide primer for the detection of SNP TSC0009418
acatatcattta

SEQ ID NO: 281081 - DNA, 12 bp, Artificial Sequence
  Oligonucleotide primer for the detection of SNP TSC0009418
acatatcgttta

SEQ ID NO: 281082 - DNA, 12 bp, Artificial Sequence
  Oligonucleotide primer for the detection of SNP TSC0009418
agatattgttaa

SEQ ID NO: 281083 - DNA, 12 bp, Artificial Sequence
  Oligonucleotide primer for the detection of SNP TSC0009419
acctaaataata

SEQ ID NO: 281084 - DNA, 12 bp, Artificial Sequence
  Oligonucleotide primer for the detection of SNP TSC0009419
gagtttaattta

SEQ ID NO: 281085 - DNA, 12 bp, Artificial Sequence
  Oligonucleotide primer for the detection of SNP TSC0009419
aaacccaactca

SEQ ID NO: 281086 - DNA, 12 bp, Artificial Sequence
  Oligonucleotide primer for the detection of SNP TSC0009419
tgtttaagtaat

SEQ ID NO: 281087 - DNA, 12 bp, Artificial Sequence
  Oligonucleotide primer for the detection of SNP TSC0009420
tcacaaaattac

SEQ ID NO: 281088 - DNA, 12 bp, Artificial Sequence
  Oligonucleotide primer for the detection of SNP TSC0009420
gttggtttttag

SEQ ID NO: 281089 - DNA, 12 bp, Artificial Sequence
  Oligonucleotide primer for the detection of SNP TSC0009424
aacataattaat

SEQ ID NO: 281090 - DNA, 12 bp, Artificial Sequence
  Oligonucleotide primer for the detection of SNP TSC0009424
gtaagaattttg

SEQ ID NO: 281091 - DNA, 12 bp, Artificial Sequence
  Oligonucleotide primer for the detection of SNP TSC0009424
ataaaaattcta

SEQ ID NO: 281092 - DNA, 12 bp, Artificial Sequence
  Oligonucleotide primer for the detection of SNP TSC0009424
ggtatggttagt

SEQ ID NO: 281093 - DNA, 12 bp, Artificial Sequence
  Oligonucleotide primer for the detection of SNP TSC0009435
ttatcattaaat

SEQ ID NO: 281094 - DNA, 12 bp, Artificial Sequence
  Oligonucleotide primer for the detection of SNP TSC0009435
attttttatgag

SEQ ID NO: 281095 - DNA, 12 bp, Artificial Sequence
  Oligonucleotide primer for the detection of SNP TSC0009436
cctactataaac

SEQ ID NO: 281096 - DNA, 12 bp, Artificial Sequence
  Oligonucleotide primer for the detection of SNP TSC0009436
gttttatgtttg

SEQ ID NO: 281097 - DNA, 12 bp, Artificial Sequence
  Oligonucleotide primer for the detection of SNP TSC0009436
acctcatattta

SEQ ID NO: 281098 - DNA, 12 bp, Artificial Sequence
  Oligonucleotide primer for the detection of SNP TSC0009436
gcctcatattta

SEQ ID NO: 281099 - DNA, 12 bp, Artificial Sequence
  Oligonucleotide primer for the detection of SNP TSC0009436
ttattgtgaatt

SEQ ID NO: 281100 - DNA, 12 bp, Artificial Sequence
  Oligonucleotide primer for the detection of SNP TSC0009439
acccatacaatt

SEQ ID NO: 281101 - DNA, 12 bp, Artificial Sequence
  Oligonucleotide primer for the detection of SNP TSC0009439
aaataatatagg

SEQ ID NO: 281102 - DNA, 12 bp, Artificial Sequence
  Oligonucleotide primer for the detection of SNP TSC0009442
ttttaaacattt

SEQ ID NO: 281103 - DNA, 12 bp, Artificial Sequence
  Oligonucleotide primer for the detection of SNP TSC0009442
ttttataaattt

SEQ ID NO: 281104 - DNA, 12 bp, Artificial Sequence
  Oligonucleotide primer for the detection of SNP TSC0009442
atttcacaaacc

SEQ ID NO: 281105 - DNA, 12 bp, Artificial Sequence
  Oligonukleotid-Primer
ttttgagtattt

SEQ ID NO: 281106 - DNA, 12 bp, Artificial Sequence
  Oligonucleotide primer for the detection of SNP TSC0009445
acaaaatattat

SEQ ID NO: 281107 - DNA, 12 bp, Artificial Sequence
  Oligonucleotide primer for the detection of SNP TSC0009446
acaaacaaacaa

SEQ ID NO: 281108 - DNA, 12 bp, Artificial Sequence
  Oligonucleotide primer for the detection of SNP TSC0009446
ataaggagaaat

SEQ ID NO: 281109 - DNA, 12 bp, Artificial Sequence
  Oligonukleotid-Primer
acaaaaaaaaat

SEQ ID NO: 281110 - DNA, 12 bp, Artificial Sequence
  Oligonucleotide primer for the detection of SNP TSC0009446
gtaggtaggtaa

SEQ ID NO: 281111 - DNA, 12 bp, Artificial Sequence
  Oligonucleotide primer for the detection of SNP TSC0009450
cccttatattct

SEQ ID NO: 281112 - DNA, 12 bp, Artificial Sequence
  Oligonucleotide primer for the detection of SNP TSC0009450
ttagaaatgggt

SEQ ID NO: 281113 - DNA, 12 bp, Artificial Sequence
  Oligonucleotide primer for the detection of SNP TSC0009450
tttttgtgtttt

SEQ ID NO: 281114 - DNA, 12 bp, Artificial Sequence
  Oligonucleotide primer for the detection of SNP TSC0009453
tattcccaatat

SEQ ID NO: 281115 - DNA, 12 bp, Artificial Sequence
  Oligonucleotide primer for the detection of SNP TSC0009453
tttttatagttg

SEQ ID NO: 281116 - DNA, 12 bp, Artificial Sequence
  Oligonucleotide primer for the detection of SNP TSC0009454
gtggaaaatgga

SEQ ID NO: 281117 - DNA, 12 bp, Artificial Sequence
  Oligonukleotid-Primer
cacatttttaat

SEQ ID NO: 281118 - DNA, 12 bp, Artificial Sequence
  Oligonucleotide primer for the detection of SNP TSC0009455
tattgttataag

SEQ ID NO: 281119 - DNA, 12 bp, Artificial Sequence
  Oligonucleotide primer for the detection of SNP TSC0009457
tttcaccttcta

SEQ ID NO: 281120 - DNA, 12 bp, Artificial Sequence
  Oligonucleotide primer for the detection of SNP TSC0009457
gaagttatgatt

SEQ ID NO: 281121 - DNA, 12 bp, Artificial Sequence
  Oligonucleotide primer for the detection of SNP TSC0009457
gaagttacgatt

SEQ ID NO: 281122 - DNA, 12 bp, Artificial Sequence
  Oligonucleotide primer for the detection of SNP TSC0009457
gaagttatgatc

SEQ ID NO: 281123 - DNA, 12 bp, Artificial Sequence
  Oligonucleotide primer for the detection of SNP TSC0009457
gaagttacgatc

SEQ ID NO: 281124 - DNA, 12 bp, Artificial Sequence
  Oligonucleotide primer for the detection of SNP TSC0009457
aaaactacaatc

SEQ ID NO: 281125 - DNA, 12 bp, Artificial Sequence
  Oligonucleotide primer for the detection of SNP TSC0009457
aaaactacgatc

SEQ ID NO: 281126 - DNA, 12 bp, Artificial Sequence
  Oligonucleotide primer for the detection of SNP TSC0009458
tttacccatctc

SEQ ID NO: 281127 - DNA, 12 bp, Artificial Sequence
  Oligonucleotide primer for the detection of SNP TSC0009458
aaggttgagagg

SEQ ID NO: 281128 - DNA, 12 bp, Artificial Sequence
  Oligonucleotide primer for the detection of SNP TSC0009460
taaagataattt

SEQ ID NO: 281129 - DNA, 12 bp, Artificial Sequence
  Oligonucleotide primer for the detection of SNP TSC0009460
taaaaataacct

SEQ ID NO: 281130 - DNA, 12 bp, Artificial Sequence
  Oligonucleotide primer for the detection of SNP TSC0009460
aagttgttttta

SEQ ID NO: 281131 - DNA, 12 bp, Artificial Sequence
  Oligonucleotide primer for the detection of SNP TSC0009464
catctaacataa

SEQ ID NO: 281132 - DNA, 12 bp, Artificial Sequence
  Oligonucleotide primer for the detection of SNP TSC0009464
agttaatttttt

SEQ ID NO: 281133 - DNA, 12 bp, Artificial Sequence
  Oligonucleotide primer for the detection of SNP TSC0009464
acaacaactaac

SEQ ID NO: 281134 - DNA, 12 bp, Artificial Sequence
  Oligonucleotide primer for the detection of SNP TSC0009464
agtatttggtat

SEQ ID NO: 281135 - DNA, 12 bp, Artificial Sequence
  Oligonucleotide primer for the detection of SNP TSC0009476
tctaacatttcc

SEQ ID NO: 281136 - DNA, 12 bp, Artificial Sequence
  Oligonucleotide primer for the detection of SNP TSC0009476
gagtgtaagtag

SEQ ID NO: 281137 - DNA, 12 bp, Artificial Sequence
  Oligonucleotide primer for the detection of SNP TSC0009477
acctaatctaaa

SEQ ID NO: 281138 - DNA, 12 bp, Artificial Sequence
  Oligonucleotide primer for the detection of SNP TSC0009477
agtaaaatattt

SEQ ID NO: 281139 - DNA, 12 bp, Artificial Sequence
  Oligonucleotide primer for the detection of SNP TSC0009477
aacaaaatactt

SEQ ID NO: 281140 - DNA, 12 bp, Artificial Sequence
  Oligonucleotide primer for the detection of SNP TSC0009477
gtttaatttgaa

SEQ ID NO: 281141 - DNA, 12 bp, Artificial Sequence
  Oligonucleotide primer for the detection of SNP TSC0009488
ttgttgtattaa

SEQ ID NO: 281142 - DNA, 12 bp, Artificial Sequence
  Oligonucleotide primer for the detection of SNP TSC0009489
acccctctatct

SEQ ID NO: 281143 - DNA, 12 bp, Artificial Sequence
  Oligonucleotide primer for the detection of SNP TSC0009489
tgatataaagag

SEQ ID NO: 281144 - DNA, 12 bp, Artificial Sequence
  Oligonucleotide primer for the detection of SNP TSC0009490
aaataaccctca

SEQ ID NO: 281145 - DNA, 12 bp, Artificial Sequence
  Oligonucleotide primer for the detection of SNP TSC0009490
gttggggttagg

SEQ ID NO: 281146 - DNA, 12 bp, Artificial Sequence
  Oligonucleotide primer for the detection of SNP TSC0009490
attaaaatcaaa

SEQ ID NO: 281147 - DNA, 12 bp, Artificial Sequence
  Oligonucleotide primer for the detection of SNP TSC0009490
aagtaattttta

SEQ ID NO: 281148 - DNA, 12 bp, Artificial Sequence
  Oligonucleotide primer for the detection of SNP TSC0009493
ttgagtttttga

SEQ ID NO: 281149 - DNA, 12 bp, Artificial Sequence
  Oligonucleotide primer for the detection of SNP TSC0009493
ggattatttgag

SEQ ID NO: 281150 - DNA, 12 bp, Artificial Sequence
  Oligonucleotide primer for the detection of SNP TSC0009494
caaaaattaact

SEQ ID NO: 281151 - DNA, 12 bp, Artificial Sequence
  Oligonucleotide primer for the detection of SNP TSC0009498
aaaataactaaa

SEQ ID NO: 281152 - DNA, 12 bp, Artificial Sequence
  Oligonucleotide primer for the detection of SNP TSC0009498
tatagaaatgat

SEQ ID NO: 281153 - DNA, 12 bp, Artificial Sequence
  Oligonucleotide primer for the detection of SNP TSC0009498
gaaataattgga

SEQ ID NO: 281154 - DNA, 12 bp, Artificial Sequence
  Oligonucleotide primer for the detection of SNP TSC0009499
tttctaaatttc

SEQ ID NO: 281155 - DNA, 12 bp, Artificial Sequence
  Oligonucleotide primer for the detection of SNP TSC0009499
gaaggtagaggg

SEQ ID NO: 281156 - DNA, 12 bp, Artificial Sequence
  Oligonucleotide primer for the detection of SNP TSC0009500
ctcctaccccaa

SEQ ID NO: 281157 - DNA, 12 bp, Artificial Sequence
  Oligonucleotide primer for the detection of SNP TSC0009500
ttgatgttagtt

SEQ ID NO: 281158 - DNA, 12 bp, Artificial Sequence
  Oligonucleotide primer for the detection of SNP TSC0009500
ctaataccaact

SEQ ID NO: 281159 - DNA, 12 bp, Artificial Sequence
  Oligonucleotide primer for the detection of SNP TSC0009500
tttttgttttag

SEQ ID NO: 281160 - DNA, 12 bp, Artificial Sequence
  Oligonucleotide primer for the detection of SNP TSC0009503
aactcaatcaca

SEQ ID NO: 281161 - DNA, 12 bp, Artificial Sequence
  Oligonucleotide primer for the detection of SNP TSC0009503
tatgagagggat

SEQ ID NO: 281162 - DNA, 12 bp, Artificial Sequence
  Oligonucleotide primer for the detection of SNP TSC0009503
tacgagagggat

SEQ ID NO: 281163 - DNA, 12 bp, Artificial Sequence
  Oligonucleotide primer for the detection of SNP TSC0009503
gaaaaaaacaaa

SEQ ID NO: 281164 - DNA, 12 bp, Artificial Sequence
  Oligonucleotide primer for the detection of SNP TSC0009503
tggtttagttat

SEQ ID NO: 281165 - DNA, 12 bp, Artificial Sequence
  Oligonucleotide primer for the detection of SNP TSC0009504
ctatcacaaaaa

SEQ ID NO: 281166 - DNA, 12 bp, Artificial Sequence
  Oligonucleotide primer for the detection of SNP TSC0009504
ctatcacgaaaa

SEQ ID NO: 281167 - DNA, 12 bp, Artificial Sequence
  Oligonucleotide primer for the detection of SNP TSC0009504
tttgaaaaagta

SEQ ID NO: 281168 - DNA, 12 bp, Artificial Sequence
  Oligonucleotide primer for the detection of SNP TSC0009504
tctaaaaaaaca

SEQ ID NO: 281169 - DNA, 12 bp, Artificial Sequence
  Oligonucleotide primer for the detection of SNP TSC0009504
atttgttatgaa

SEQ ID NO: 281170 - DNA, 12 bp, Artificial Sequence
  Oligonucleotide primer for the detection of SNP TSC0009504
atttgttacgaa

SEQ ID NO: 281171 - DNA, 12 bp, Artificial Sequence
  Oligonucleotide primer for the detection of SNP TSC0009505
tttatccctctc

SEQ ID NO: 281172 - DNA, 12 bp, Artificial Sequence
  Oligonucleotide primer for the detection of SNP TSC0009505
aatgtatttatt

SEQ ID NO: 281173 - DNA, 12 bp, Artificial Sequence
  Oligonucleotide primer for the detection of SNP TSC0009505
atacacttatta

SEQ ID NO: 281174 - DNA, 12 bp, Artificial Sequence
  Oligonucleotide primer for the detection of SNP TSC0009505
tttgtttttttc

SEQ ID NO: 281175 - DNA, 12 bp, Artificial Sequence
  Oligonucleotide primer for the detection of SNP TSC0009512
actattcactat

SEQ ID NO: 281176 - DNA, 12 bp, Artificial Sequence
  Oligonucleotide primer for the detection of SNP TSC0009512
ttttgtatagag

SEQ ID NO: 281177 - DNA, 12 bp, Artificial Sequence
  Oligonucleotide primer for the detection of SNP TSC0009512
tcttacacaaaa

SEQ ID NO: 281178 - DNA, 12 bp, Artificial Sequence
  Oligonucleotide primer for the detection of SNP TSC0009512
attatttattat

SEQ ID NO: 281179 - DNA, 12 bp, Artificial Sequence
  Oligonucleotide primer for the detection of SNP TSC0009516
taccatattctc

SEQ ID NO: 281180 - DNA, 12 bp, Artificial Sequence
  Oligonucleotide primer for the detection of SNP TSC0009516
agttgtttattg

SEQ ID NO: 281181 - DNA, 12 bp, Artificial Sequence
  Oligonucleotide primer for the detection of SNP TSC0009516
aactacccatta

SEQ ID NO: 281182 - DNA, 12 bp, Artificial Sequence
  Oligonucleotide primer for the detection of SNP TSC0009516
tgttatgttttt

SEQ ID NO: 281183 - DNA, 12 bp, Artificial Sequence
  Oligonucleotide primer for the detection of SNP TSC0009517
actatatcacct

SEQ ID NO: 281184 - DNA, 12 bp, Artificial Sequence
  Oligonucleotide primer for the detection of SNP TSC0009517
tggaatgatttg

SEQ ID NO: 281185 - DNA, 12 bp, Artificial Sequence
  Oligonucleotide primer for the detection of SNP TSC0009519
tcttaaaattac

SEQ ID NO: 281186 - DNA, 12 bp, Artificial Sequence
  Oligonucleotide primer for the detection of SNP TSC0009519
ttttagttagaa

SEQ ID NO: 281187 - DNA, 12 bp, Artificial Sequence
  Oligonucleotide primer for the detection of SNP TSC0009522
ccccccttattt

SEQ ID NO: 281188 - DNA, 12 bp, Artificial Sequence
  Oligonucleotide primer for the detection of SNP TSC0009522
aagttgtgaaaa

SEQ ID NO: 281189 - DNA, 12 bp, Artificial Sequence
  Oligonucleotide primer for the detection of SNP TSC0009522
aactataaaaaa

SEQ ID NO: 281190 - DNA, 12 bp, Artificial Sequence
  Oligonucleotide primer for the detection of SNP TSC0009527
attttctcaaaa

SEQ ID NO: 281191 - DNA, 12 bp, Artificial Sequence
  Oligonucleotide primer for the detection of SNP TSC0009527
agtgtttttatt

SEQ ID NO: 281192 - DNA, 12 bp, Artificial Sequence
  Oligonucleotide primer for the detection of SNP TSC0009527
aatatccttatt

SEQ ID NO: 281193 - DNA, 12 bp, Artificial Sequence
  Oligonucleotide primer for the detection of SNP TSC0009527
atttttttaaaa

SEQ ID NO: 281194 - DNA, 12 bp, Artificial Sequence
  Oligonucleotide primer for the detection of SNP TSC0009529
atctttctaact

SEQ ID NO: 281195 - DNA, 12 bp, Artificial Sequence
  Oligonucleotide primer for the detection of SNP TSC0009529
gagatattttag

SEQ ID NO: 281196 - DNA, 12 bp, Artificial Sequence
  Oligonucleotide primer for the detection of SNP TSC0009531
caaataatttat

SEQ ID NO: 281197 - DNA, 12 bp, Artificial Sequence
  Oligonucleotide primer for the detection of SNP TSC0009531
atgatttatttt

SEQ ID NO: 281198 - DNA, 12 bp, Artificial Sequence
  Oligonucleotide primer for the detection of SNP TSC0009531
aataacccattc

SEQ ID NO: 281199 - DNA, 12 bp, Artificial Sequence
  Oligonucleotide primer for the detection of SNP TSC0009531
taggtagtttat

SEQ ID NO: 281200 - DNA, 12 bp, Artificial Sequence
  Oligonucleotide primer for the detection of SNP TSC0009532
aataaactacct

SEQ ID NO: 281201 - DNA, 12 bp, Artificial Sequence
  Oligonucleotide primer for the detection of SNP TSC0009532
gttgagaaattg

SEQ ID NO: 281202 - DNA, 12 bp, Artificial Sequence
  Oligonucleotide primer for the detection of SNP TSC0009535
tcaacaaatctc

SEQ ID NO: 281203 - DNA, 12 bp, Artificial Sequence
  Oligonucleotide primer for the detection of SNP TSC0009535
aaaatttggaat

SEQ ID NO: 281204 - DNA, 12 bp, Artificial Sequence
  Oligonucleotide primer for the detection of SNP TSC0009544
attagtaatagg

SEQ ID NO: 281205 - DNA, 12 bp, Artificial Sequence
  Oligonucleotide primer for the detection of SNP TSC0009544
tcaataacaaaa

SEQ ID NO: 281206 - DNA, 12 bp, Artificial Sequence
  Oligonucleotide primer for the detection of SNP TSC0009544
atagattagtgt

SEQ ID NO: 281207 - DNA, 12 bp, Artificial Sequence
  Oligonucleotide primer for the detection of SNP TSC0009549
taaacccacaaa

SEQ ID NO: 281208 - DNA, 12 bp, Artificial Sequence
  Oligonucleotide primer for the detection of SNP TSC0009549
taaacccacgaa

SEQ ID NO: 281209 - DNA, 12 bp, Artificial Sequence
  Oligonucleotide primer for the detection of SNP TSC0009549
tagtattttttt

SEQ ID NO: 281210 - DNA, 12 bp, Artificial Sequence
  Oligonukleotid-Primer
aacaatatcctt

SEQ ID NO: 281211 - DNA, 12 bp, Artificial Sequence
  Oligonucleotide primer for the detection of SNP TSC0009549
aaatttatggat

SEQ ID NO: 281212 - DNA, 12 bp, Artificial Sequence
  Oligonucleotide primer for the detection of SNP TSC0009549
aaatttacggat

SEQ ID NO: 281213 - DNA, 12 bp, Artificial Sequence
  Oligonucleotide primer for the detection of SNP TSC0009552
tttaactaaaat

SEQ ID NO: 281214 - DNA, 12 bp, Artificial Sequence
  Oligonukleotid-Primer
tactaaaaacct

SEQ ID NO: 281215 - DNA, 12 bp, Artificial Sequence
  Oligonucleotide primer for the detection of SNP TSC0009554
actctcatctcc

SEQ ID NO: 281216 - DNA, 12 bp, Artificial Sequence
  Oligonucleotide primer for the detection of SNP TSC0009554
tggagagggaga

SEQ ID NO: 281217 - DNA, 12 bp, Artificial Sequence
  Oligonucleotide primer for the detection of SNP TSC0009555
ctccccttaacc

SEQ ID NO: 281218 - DNA, 12 bp, Artificial Sequence
  Oligonukleotid-Primer
gagattgttata

SEQ ID NO: 281219 - DNA, 12 bp, Artificial Sequence
  Oligonucleotide primer for the detection of SNP TSC0009559
taacccactact

SEQ ID NO: 281220 - DNA, 12 bp, Artificial Sequence
  Oligonucleotide primer for the detection of SNP TSC0009559
gggtttttatta

SEQ ID NO: 281221 - DNA, 12 bp, Artificial Sequence
  Oligonucleotide primer for the detection of SNP TSC0009560
ataatttcttta

SEQ ID NO: 281222 - DNA, 12 bp, Artificial Sequence
  Oligonukleotid-Primer
attatttaggta

SEQ ID NO: 281223 - DNA, 12 bp, Artificial Sequence
  Oligonucleotide primer for the detection of SNP TSC0009560
atcatccaaaca

SEQ ID NO: 281224 - DNA, 12 bp, Artificial Sequence
  Oligonucleotide primer for the detection of SNP TSC0009570
tataaaattcct

SEQ ID NO: 281225 - DNA, 12 bp, Artificial Sequence
  Oligonucleotide primer for the detection of SNP TSC0009570
attgtttttggt

SEQ ID NO: 281226 - DNA, 12 bp, Artificial Sequence
  Oligonukleotid-Primer
aaatctaaactt

SEQ ID NO: 281227 - DNA, 12 bp, Artificial Sequence
  Oligonucleotide primer for the detection of SNP TSC0009571
tgtttttgtata

SEQ ID NO: 281228 - DNA, 12 bp, Artificial Sequence
  Oligonucleotide primer for the detection of SNP TSC0009571
cgtttttgtata

SEQ ID NO: 281229 - DNA, 12 bp, Artificial Sequence
  Oligonucleotide primer for the detection of SNP TSC0009576
tacactattatt

SEQ ID NO: 281230 - DNA, 12 bp, Artificial Sequence
  Oligonucleotide primer for the detection of SNP TSC0009576
taagattttagg

SEQ ID NO: 281231 - DNA, 12 bp, Artificial Sequence
  Oligonucleotide primer for the detection of SNP TSC0009577
atattataaaat

SEQ ID NO: 281232 - DNA, 12 bp, Artificial Sequence
  Oligonucleotide primer for the detection of SNP TSC0009577
tgtaggagttga

SEQ ID NO: 281233 - DNA, 12 bp, Artificial Sequence
  Oligonucleotide primer for the detection of SNP TSC0009579
tggaatttaaag

SEQ ID NO: 281234 - DNA, 12 bp, Artificial Sequence
  Oligonucleotide primer for the detection of SNP TSC0009579
taaaacttaaaa

SEQ ID NO: 281235 - DNA, 12 bp, Artificial Sequence
  Oligonucleotide primer for the detection of SNP TSC0009579
agaaagaagttt

SEQ ID NO: 281236 - DNA, 12 bp, Artificial Sequence
  Oligonucleotide primer for the detection of SNP TSC0009581
ctttcataacca

SEQ ID NO: 281237 - DNA, 12 bp, Artificial Sequence
  Oligonucleotide primer for the detection of SNP TSC0009581
ggtttttgtttt

SEQ ID NO: 281238 - DNA, 12 bp, Artificial Sequence
  Oligonucleotide primer for the detection of SNP TSC0009581
caaaattcttat

SEQ ID NO: 281239 - DNA, 12 bp, Artificial Sequence
  Oligonucleotide primer for the detection of SNP TSC0009581
cgaaattcttat

SEQ ID NO: 281240 - DNA, 12 bp, Artificial Sequence
  Oligonucleotide primer for the detection of SNP TSC0009581
tttttatggtta

SEQ ID NO: 281241 - DNA, 12 bp, Artificial Sequence
  Oligonucleotide primer for the detection of SNP TSC0009586
ataaccttttta

SEQ ID NO: 281242 - DNA, 12 bp, Artificial Sequence
  Oligonucleotide primer for the detection of SNP TSC0009586
ttgaattgtttt

SEQ ID NO: 281243 - DNA, 12 bp, Artificial Sequence
  Oligonucleotide primer for the detection of SNP TSC0009586
attaaattattc

SEQ ID NO: 281244 - DNA, 12 bp, Artificial Sequence
  Oligonucleotide primer for the detection of SNP TSC0009593
acttacatttta

SEQ ID NO: 281245 - DNA, 12 bp, Artificial Sequence
  Oligonucleotide primer for the detection of SNP TSC0009593
acttacgtttta

SEQ ID NO: 281246 - DNA, 12 bp, Artificial Sequence
  Oligonucleotide primer for the detection of SNP TSC0009593
tagttggaatga

SEQ ID NO: 281247 - DNA, 12 bp, Artificial Sequence
  Oligonucleotide primer for the detection of SNP TSC0009593
tagtcggaatga

SEQ ID NO: 281248 - DNA, 12 bp, Artificial Sequence
  Oligonucleotide primer for the detection of SNP TSC0009594
ctcaaaacaaac

SEQ ID NO: 281249 - DNA, 12 bp, Artificial Sequence
  Oligonucleotide primer for the detection of SNP TSC0009594
ctcaaaacgaac

SEQ ID NO: 281250 - DNA, 12 bp, Artificial Sequence
  Oligonucleotide primer for the detection of SNP TSC0009594
taaaagtaggaa

SEQ ID NO: 281251 - DNA, 12 bp, Artificial Sequence
  Oligonucleotide primer for the detection of SNP TSC0009594
tttagggtgagt

SEQ ID NO: 281252 - DNA, 12 bp, Artificial Sequence
  Oligonucleotide primer for the detection of SNP TSC0009594
tttagggcgagt

SEQ ID NO: 281253 - DNA, 12 bp, Artificial Sequence
  Oligonucleotide primer for the detection of SNP TSC0009596
ttaaaacccaaa

SEQ ID NO: 281254 - DNA, 12 bp, Artificial Sequence
  Oligonucleotide primer for the detection of SNP TSC0009596
gttttttgtgag

SEQ ID NO: 281255 - DNA, 12 bp, Artificial Sequence
  Oligonucleotide primer for the detection of SNP TSC0009596
accccctataaa

SEQ ID NO: 281256 - DNA, 12 bp, Artificial Sequence
  Oligonucleotide primer for the detection of SNP TSC0009596
ttggagtttagg

SEQ ID NO: 281257 - DNA, 12 bp, Artificial Sequence
  Oligonucleotide primer for the detection of SNP TSC0009597
aaaaaaattttt

SEQ ID NO: 281258 - DNA, 12 bp, Artificial Sequence
  Oligonucleotide primer for the detection of SNP TSC0009597
gtggaaaaatta

SEQ ID NO: 281259 - DNA, 12 bp, Artificial Sequence
  Oligonucleotide primer for the detection of SNP TSC0009598
ttatataatatt

SEQ ID NO: 281260 - DNA, 12 bp, Artificial Sequence
  Oligonucleotide primer for the detection of SNP TSC0009598
aaggataaaggg

SEQ ID NO: 281261 - DNA, 12 bp, Artificial Sequence
  Oligonucleotide primer for the detection of SNP TSC0009600
caacattaaatt

SEQ ID NO: 281262 - DNA, 12 bp, Artificial Sequence
  Oligonucleotide primer for the detection of SNP TSC0009600
tttgtagtattg

SEQ ID NO: 281263 - DNA, 12 bp, Artificial Sequence
  Oligonucleotide primer for the detection of SNP TSC0009602
ctcaacctaaat

SEQ ID NO: 281264 - DNA, 12 bp, Artificial Sequence
  Oligonucleotide primer for the detection of SNP TSC0009602
ggtagtatttta

SEQ ID NO: 281265 - DNA, 12 bp, Artificial Sequence
  Oligonucleotide primer for the detection of SNP TSC0009604
cacccctccctc

SEQ ID NO: 281266 - DNA, 12 bp, Artificial Sequence
  Oligonucleotide primer for the detection of SNP TSC0009604
agttatgtaagg

SEQ ID NO: 281267 - DNA, 12 bp, Artificial Sequence
  Oligonucleotide primer for the detection of SNP TSC0009605
aataaaaaaatc

SEQ ID NO: 281268 - DNA, 12 bp, Artificial Sequence
  Oligonucleotide primer for the detection of SNP TSC0009605
tttagggtttaa

SEQ ID NO: 281269 - DNA, 12 bp, Artificial Sequence
  Oligonucleotide primer for the detection of SNP TSC0009606
atataaacttca

SEQ ID NO: 281270 - DNA, 12 bp, Artificial Sequence
  Oligonucleotide primer for the detection of SNP TSC0009606
gaatattggagt

SEQ ID NO: 281271 - DNA, 12 bp, Artificial Sequence
  Oligonucleotide primer for the detection of SNP TSC0009606
aaacactaaaat

SEQ ID NO: 281272 - DNA, 12 bp, Artificial Sequence
  Oligonucleotide primer for the detection of SNP TSC0009606
atataaatttta

SEQ ID NO: 281273 - DNA, 12 bp, Artificial Sequence
  Oligonucleotide primer for the detection of SNP TSC0009612
ccaataaaaaaa

SEQ ID NO: 281274 - DNA, 12 bp, Artificial Sequence
  Oligonucleotide primer for the detection of SNP TSC0009612
ttaataagtttt

SEQ ID NO: 281275 - DNA, 12 bp, Artificial Sequence
  Oligonucleotide primer for the detection of SNP TSC0009612
aatcaataaact

SEQ ID NO: 281276 - DNA, 12 bp, Artificial Sequence
  Oligonucleotide primer for the detection of SNP TSC0009612
ttttaatggaaa

SEQ ID NO: 281277 - DNA, 12 bp, Artificial Sequence
  Oligonucleotide primer for the detection of SNP TSC0009619
tcacctcaaaaa

SEQ ID NO: 281278 - DNA, 12 bp, Artificial Sequence
  Oligonucleotide primer for the detection of SNP TSC0009619
tttttagagtgg

SEQ ID NO: 281279 - DNA, 12 bp, Artificial Sequence
  Oligonucleotide primer for the detection of SNP TSC0009619
tttttagagcgg

SEQ ID NO: 281280 - DNA, 12 bp, Artificial Sequence
  Oligonucleotide primer for the detection of SNP TSC0009619
tcttcaaaacaa

SEQ ID NO: 281281 - DNA, 12 bp, Artificial Sequence
  Oligonucleotide primer for the detection of SNP TSC0009619
tcttcaaaacga

SEQ ID NO: 281282 - DNA, 12 bp, Artificial Sequence
  Oligonucleotide primer for the detection of SNP TSC0009619
atttattttaga

SEQ ID NO: 281283 - DNA, 12 bp, Artificial Sequence
  Oligonucleotide primer for the detection of SNP TSC0009623
taaaacttctac

SEQ ID NO: 281284 - DNA, 12 bp, Artificial Sequence
  Oligonucleotide primer for the detection of SNP TSC0009623
tattgttattga

SEQ ID NO: 281285 - DNA, 12 bp, Artificial Sequence
  Oligonucleotide primer for the detection of SNP TSC0009624
ttttcttacaat

SEQ ID NO: 281286 - DNA, 12 bp, Artificial Sequence
  Oligonucleotide primer for the detection of SNP TSC0009624
ttgtaaagttga

SEQ ID NO: 281287 - DNA, 12 bp, Artificial Sequence
  Oligonucleotide primer for the detection of SNP TSC0009625
tcctctcctata

SEQ ID NO: 281288 - DNA, 12 bp, Artificial Sequence
  Oligonucleotide primer for the detection of SNP TSC0009625
ttatttagtttt

SEQ ID NO: 281289 - DNA, 12 bp, Artificial Sequence
  Oligonucleotide primer for the detection of SNP TSC0009625
tcattcaatttt

SEQ ID NO: 281290 - DNA, 12 bp, Artificial Sequence
  Oligonucleotide primer for the detection of SNP TSC0009631
gaaatttttata

SEQ ID NO: 281291 - DNA, 12 bp, Artificial Sequence
  Oligonucleotide primer for the detection of SNP TSC0009638
ctttaaacctta

SEQ ID NO: 281292 - DNA, 12 bp, Artificial Sequence
  Oligonucleotide primer for the detection of SNP TSC0009638
atggatatatta

SEQ ID NO: 281293 - DNA, 12 bp, Artificial Sequence
  Oligonucleotide primer for the detection of SNP TSC0009638
ataaacacacca

SEQ ID NO: 281294 - DNA, 12 bp, Artificial Sequence
  Oligonucleotide primer for the detection of SNP TSC0009638
ttttgaatttta

SEQ ID NO: 281295 - DNA, 12 bp, Artificial Sequence
  Oligonucleotide primer for the detection of SNP TSC0009639
acataaattata

SEQ ID NO: 281296 - DNA, 12 bp, Artificial Sequence
  Oligonucleotide primer for the detection of SNP TSC0009639
ttttttgttgta

SEQ ID NO: 281297 - DNA, 12 bp, Artificial Sequence
  Oligonucleotide primer for the detection of SNP TSC0009639
ttttttactaca

SEQ ID NO: 281298 - DNA, 12 bp, Artificial Sequence
  Oligonucleotide primer for the detection of SNP TSC0009639
atatagattata

SEQ ID NO: 281299 - DNA, 12 bp, Artificial Sequence
  Oligonucleotide primer for the detection of SNP TSC0009640
taataaaaaagt

SEQ ID NO: 281300 - DNA, 12 bp, Artificial Sequence
  Oligonucleotide primer for the detection of SNP TSC0009640
caacaaaaaaat

SEQ ID NO: 281301 - DNA, 12 bp, Artificial Sequence
  Oligonucleotide primer for the detection of SNP TSC0009640
tgaaaaaggatt

SEQ ID NO: 281302 - DNA, 12 bp, Artificial Sequence
  Oligonucleotide primer for the detection of SNP TSC0009643
taataccatata

SEQ ID NO: 281303 - DNA, 12 bp, Artificial Sequence
  Oligonucleotide primer for the detection of SNP TSC0009643
tagatgtttttt

SEQ ID NO: 281304 - DNA, 12 bp, Artificial Sequence
  Oligonucleotide primer for the detection of SNP TSC0009643
tagatgtttttc

SEQ ID NO: 281305 - DNA, 12 bp, Artificial Sequence
  Oligonucleotide primer for the detection of SNP TSC0009643
taaatattcttc

SEQ ID NO: 281306 - DNA, 12 bp, Artificial Sequence
  Oligonucleotide primer for the detection of SNP TSC0009643
gtggtgttatat

SEQ ID NO: 281307 - DNA, 12 bp, Artificial Sequence
  Oligonucleotide primer for the detection of SNP TSC0009647
aaataaaaaaga

SEQ ID NO: 281308 - DNA, 12 bp, Artificial Sequence
  Oligonucleotide primer for the detection of SNP TSC0009648
atcaattaaatc

SEQ ID NO: 281309 - DNA, 12 bp, Artificial Sequence
  Oligonucleotide primer for the detection of SNP TSC0009648
ttataaagaata

SEQ ID NO: 281310 - DNA, 12 bp, Artificial Sequence
  Oligonucleotide primer for the detection of SNP TSC0009648
ttataaaaaaca

SEQ ID NO: 281311 - DNA, 12 bp, Artificial Sequence
  Oligonucleotide primer for the detection of SNP TSC0009648
gttaattaaatt

SEQ ID NO: 281312 - DNA, 12 bp, Artificial Sequence
  Oligonucleotide primer for the detection of SNP TSC0009649
acttcatttata

SEQ ID NO: 281313 - DNA, 12 bp, Artificial Sequence
  Oligonucleotide primer for the detection of SNP TSC0009649
atgaataaaatt

SEQ ID NO: 281314 - DNA, 12 bp, Artificial Sequence
  Oligonucleotide primer for the detection of SNP TSC0009649
ataaacaaaact

SEQ ID NO: 281315 - DNA, 12 bp, Artificial Sequence
  Oligonukleotid-Primer
tgttttatttat

SEQ ID NO: 281316 - DNA, 12 bp, Artificial Sequence
  Oligonucleotide primer for the detection of SNP TSC0009650
taactttcccct

SEQ ID NO: 281317 - DNA, 12 bp, Artificial Sequence
  Oligonucleotide primer for the detection of SNP TSC0009650
tttaaaggtggg

SEQ ID NO: 281318 - DNA, 12 bp, Artificial Sequence
  Oligonucleotide primer for the detection of SNP TSC0009651
tatgttttaaaa

SEQ ID NO: 281319 - DNA, 12 bp, Artificial Sequence
  Oligonukleotid-Primer
tacgttttaaaa

SEQ ID NO: 281320 - DNA, 12 bp, Artificial Sequence
  Oligonucleotide primer for the detection of SNP TSC0009651
cacgtttcaaaa

SEQ ID NO: 281321 - DNA, 12 bp, Artificial Sequence
  Oligonucleotide primer for the detection of SNP TSC0009657
ctaaaaactttt

SEQ ID NO: 281322 - DNA, 12 bp, Artificial Sequence
  Oligonucleotide primer for the detection of SNP TSC0009657
tggttgaaatta

SEQ ID NO: 281323 - DNA, 12 bp, Artificial Sequence
  Oligonucleotide primer for the detection of SNP TSC0009657
taattaaaacca

SEQ ID NO: 281324 - DNA, 12 bp, Artificial Sequence
  Oligonucleotide primer for the detection of SNP TSC0009657
ttagagattttt

SEQ ID NO: 281325 - DNA, 12 bp, Artificial Sequence
  Oligonucleotide primer for the detection of SNP TSC0009658
ccctccctacaa

SEQ ID NO: 281326 - DNA, 12 bp, Artificial Sequence
  Oligonucleotide primer for the detection of SNP TSC0009658
attgaatttttt

SEQ ID NO: 281327 - DNA, 12 bp, Artificial Sequence
  Oligonucleotide primer for the detection of SNP TSC0009658
attaaattcccc

SEQ ID NO: 281328 - DNA, 12 bp, Artificial Sequence
  Oligonucleotide primer for the detection of SNP TSC0009658
ttttttttataa

SEQ ID NO: 281329 - DNA, 12 bp, Artificial Sequence
  Oligonucleotide primer for the detection of SNP TSC0009660
cctataattata

SEQ ID NO: 281330 - DNA, 12 bp, Artificial Sequence
  Oligonucleotide primer for the detection of SNP TSC0009660
gttatggtaaat

SEQ ID NO: 281331 - DNA, 12 bp, Artificial Sequence
  Oligonucleotide primer for the detection of SNP TSC0009660
attataacaaat

SEQ ID NO: 281332 - DNA, 12 bp, Artificial Sequence
  Oligonucleotide primer for the detection of SNP TSC0009660
tttataattgta

SEQ ID NO: 281333 - DNA, 12 bp, Artificial Sequence
  Oligonucleotide primer for the detection of SNP TSC0009662
tatacttaaact

SEQ ID NO: 281334 - DNA, 12 bp, Artificial Sequence
  Oligonucleotide primer for the detection of SNP TSC0009662
tttataggaaag

SEQ ID NO: 281335 - DNA, 12 bp, Artificial Sequence
  Oligonucleotide primer for the detection of SNP TSC0009665
aaaccatcttca

SEQ ID NO: 281336 - DNA, 12 bp, Artificial Sequence
  Oligonucleotide primer for the detection of SNP TSC0009665
ggttagtttttt

SEQ ID NO: 281337 - DNA, 12 bp, Artificial Sequence
  Oligonucleotide primer for the detection of SNP TSC0009665
ggttagtttttc

SEQ ID NO: 281338 - DNA, 12 bp, Artificial Sequence
  Oligonucleotide primer for the detection of SNP TSC0009665
aattaaccttcc

SEQ ID NO: 281339 - DNA, 12 bp, Artificial Sequence
  Oligonucleotide primer for the detection of SNP TSC0009665
aggttattttta

SEQ ID NO: 281340 - DNA, 12 bp, Artificial Sequence
  Oligonucleotide primer for the detection of SNP TSC0009666
aaattagtagat

SEQ ID NO: 281341 - DNA, 12 bp, Artificial Sequence
  Oligonucleotide primer for the detection of SNP TSC0009666
taaatcaacaaa

SEQ ID NO: 281342 - DNA, 12 bp, Artificial Sequence
  Oligonucleotide primer for the detection of SNP TSC0009666
ttgtttatgtta

SEQ ID NO: 281343 - DNA, 12 bp, Artificial Sequence
  Oligonucleotide primer for the detection of SNP TSC0009668
ttattctcaacc

SEQ ID NO: 281344 - DNA, 12 bp, Artificial Sequence
  Oligonucleotide primer for the detection of SNP TSC0009668
gaatagtttgga

SEQ ID NO: 281345 - DNA, 12 bp, Artificial Sequence
  Oligonucleotide primer for the detection of SNP TSC0009669
cccaatcccaaa

SEQ ID NO: 281346 - DNA, 12 bp, Artificial Sequence
  Oligonucleotide primer for the detection of SNP TSC0009669
gttataaagaat

SEQ ID NO: 281347 - DNA, 12 bp, Artificial Sequence
  Oligonucleotide primer for the detection of SNP TSC0009669
tttagttttagg

SEQ ID NO: 281348 - DNA, 12 bp, Artificial Sequence
  Oligonucleotide primer for the detection of SNP TSC0009673
acttcatttaac

SEQ ID NO: 281349 - DNA, 12 bp, Artificial Sequence
  Oligonucleotide primer for the detection of SNP TSC0009673
tttttaaagagg

SEQ ID NO: 281350 - DNA, 12 bp, Artificial Sequence
  Oligonucleotide primer for the detection of SNP TSC0009677
atataacctaac

SEQ ID NO: 281351 - DNA, 12 bp, Artificial Sequence
  Oligonucleotide primer for the detection of SNP TSC0009677
gagtttatattt

SEQ ID NO: 281352 - DNA, 12 bp, Artificial Sequence
  Oligonucleotide primer for the detection of SNP TSC0009677
atctatatttaa

SEQ ID NO: 281353 - DNA, 12 bp, Artificial Sequence
  Oligonucleotide primer for the detection of SNP TSC0009677
taatttaatttt

SEQ ID NO: 281354 - DNA, 12 bp, Artificial Sequence
  Oligonucleotide primer for the detection of SNP TSC0009679
taaaaaaaatca

SEQ ID NO: 281355 - DNA, 12 bp, Artificial Sequence
  Oligonucleotide primer for the detection of SNP TSC0009679
taaaaaaaatcg

SEQ ID NO: 281356 - DNA, 12 bp, Artificial Sequence
  Oligonucleotide primer for the detection of SNP TSC0009679
tctcttttctat

SEQ ID NO: 281357 - DNA, 12 bp, Artificial Sequence
  Oligonucleotide primer for the detection of SNP TSC0009679
ttagagggaatt

SEQ ID NO: 281358 - DNA, 12 bp, Artificial Sequence
  Oligonucleotide primer for the detection of SNP TSC0009679
ttagagggaatc

SEQ ID NO: 281359 - DNA, 12 bp, Artificial Sequence
  Oligonucleotide primer for the detection of SNP TSC0009680
atggagtaatga

SEQ ID NO: 281360 - DNA, 12 bp, Artificial Sequence
  Oligonucleotide primer for the detection of SNP TSC0009680
taaaacaataaa

SEQ ID NO: 281361 - DNA, 12 bp, Artificial Sequence
  Oligonucleotide primer for the detection of SNP TSC0009680
gagaaaatgatt

SEQ ID NO: 281362 - DNA, 12 bp, Artificial Sequence
  Oligonucleotide primer for the detection of SNP TSC0009680
gagaaaatgatc

SEQ ID NO: 281363 - DNA, 12 bp, Artificial Sequence
  Oligonucleotide primer for the detection of SNP TSC0009686
accaaaaaacta

SEQ ID NO: 281364 - DNA, 12 bp, Artificial Sequence
  Oligonucleotide primer for the detection of SNP TSC0009686
tttattaaattt

SEQ ID NO: 281365 - DNA, 12 bp, Artificial Sequence
  Oligonucleotide primer for the detection of SNP TSC0009686
ttaccaaatcta

SEQ ID NO: 281366 - DNA, 12 bp, Artificial Sequence
  Oligonucleotide primer for the detection of SNP TSC0009686
gttaaagggtta

SEQ ID NO: 281367 - DNA, 12 bp, Artificial Sequence
  Oligonucleotide primer for the detection of SNP TSC0009689
aaattctattct

SEQ ID NO: 281368 - DNA, 12 bp, Artificial Sequence
  Oligonucleotide primer for the detection of SNP TSC0009689
tgagttttttaa

SEQ ID NO: 281369 - DNA, 12 bp, Artificial Sequence
  Oligonucleotide primer for the detection of SNP TSC0009689
aaaccctccaaa

SEQ ID NO: 281370 - DNA, 12 bp, Artificial Sequence
  Oligonucleotide primer for the detection of SNP TSC0009690
aaaacttcaaca

SEQ ID NO: 281371 - DNA, 12 bp, Artificial Sequence
  Oligonucleotide primer for the detection of SNP TSC0009690
attattagtggg

SEQ ID NO: 281372 - DNA, 12 bp, Artificial Sequence
  Oligonucleotide primer for the detection of SNP TSC0009690
actatcaataaa

SEQ ID NO: 281373 - DNA, 12 bp, Artificial Sequence
  Oligonucleotide primer for the detection of SNP TSC0009690
gggattttagta

SEQ ID NO: 281374 - DNA, 12 bp, Artificial Sequence
  Oligonucleotide primer for the detection of SNP TSC0009691
caaattaacacc

SEQ ID NO: 281375 - DNA, 12 bp, Artificial Sequence
  Oligonucleotide primer for the detection of SNP TSC0009691
aataatagtaat

SEQ ID NO: 281376 - DNA, 12 bp, Artificial Sequence
  Oligonucleotide primer for the detection of SNP TSC0009691
aacaacaacaac

SEQ ID NO: 281377 - DNA, 12 bp, Artificial Sequence
  Oligonucleotide primer for the detection of SNP TSC0009691
taaattgatatt

SEQ ID NO: 281378 - DNA, 12 bp, Artificial Sequence
  Oligonucleotide primer for the detection of SNP TSC0009692
ttaaattaaaat

SEQ ID NO: 281379 - DNA, 12 bp, Artificial Sequence
  Oligonucleotide primer for the detection of SNP TSC0009692
tgtaaatattaa

SEQ ID NO: 281380 - DNA, 12 bp, Artificial Sequence
  Oligonucleotide primer for the detection of SNP TSC0009692
tataaatattaa

SEQ ID NO: 281381 - DNA, 12 bp, Artificial Sequence
  Oligonucleotide primer for the detection of SNP TSC0009692
ttaaattgaaat

SEQ ID NO: 281382 - DNA, 12 bp, Artificial Sequence
  Oligonucleotide primer for the detection of SNP TSC0009696
cccaactaatcc

SEQ ID NO: 281383 - DNA, 12 bp, Artificial Sequence
  Oligonucleotide primer for the detection of SNP TSC0009696
tagtttagtata

SEQ ID NO: 281384 - DNA, 12 bp, Artificial Sequence
  Oligonucleotide primer for the detection of SNP TSC0009697
cataccttctat

SEQ ID NO: 281385 - DNA, 12 bp, Artificial Sequence
  Oligonucleotide primer for the detection of SNP TSC0009697
tatatgttttta

SEQ ID NO: 281386 - DNA, 12 bp, Artificial Sequence
  Oligonucleotide primer for the detection of SNP TSC0009698
atatttaaaaga

SEQ ID NO: 281387 - DNA, 12 bp, Artificial Sequence
  Oligonucleotide primer for the detection of SNP TSC0009700
atcaattaaata

SEQ ID NO: 281388 - DNA, 12 bp, Artificial Sequence
  Oligonucleotide primer for the detection of SNP TSC0009700
gaaaaataattt

SEQ ID NO: 281389 - DNA, 12 bp, Artificial Sequence
  Oligonucleotide primer for the detection of SNP TSC0009700
aaaaacaattta

SEQ ID NO: 281390 - DNA, 12 bp, Artificial Sequence
  Oligonucleotide primer for the detection of SNP TSC0009700
attaattaaata

SEQ ID NO: 281391 - DNA, 12 bp, Artificial Sequence
  Oligonucleotide primer for the detection of SNP TSC0009701
ttatttaactca

SEQ ID NO: 281392 - DNA, 12 bp, Artificial Sequence
  Oligonucleotide primer for the detection of SNP TSC0009701
gatttgtagaat

SEQ ID NO: 281393 - DNA, 12 bp, Artificial Sequence
  Oligonucleotide primer for the detection of SNP TSC0009701
aacctacaaaat

SEQ ID NO: 281394 - DNA, 12 bp, Artificial Sequence
  Oligonucleotide primer for the detection of SNP TSC0009701
tatttggtttat

SEQ ID NO: 281395 - DNA, 12 bp, Artificial Sequence
  Oligonucleotide primer for the detection of SNP TSC0009706
aaaatattcttt

SEQ ID NO: 281396 - DNA, 12 bp, Artificial Sequence
  Oligonucleotide primer for the detection of SNP TSC0009706
tttgataaagta

SEQ ID NO: 281397 - DNA, 12 bp, Artificial Sequence
  Oligonucleotide primer for the detection of SNP TSC0009716
cattacaaaaat

SEQ ID NO: 281398 - DNA, 12 bp, Artificial Sequence
  Oligonucleotide primer for the detection of SNP TSC0009716
gaatgtttttta

SEQ ID NO: 281399 - DNA, 12 bp, Artificial Sequence
  Oligonucleotide primer for the detection of SNP TSC0009717
acatcacctctc

SEQ ID NO: 281400 - DNA, 12 bp, Artificial Sequence
  Oligonucleotide primer for the detection of SNP TSC0009717
tgttatgtggaa

SEQ ID NO: 281401 - DNA, 12 bp, Artificial Sequence
  Oligonucleotide primer for the detection of SNP TSC0009722
aaataaaacacc

SEQ ID NO: 281402 - DNA, 12 bp, Artificial Sequence
  Oligonucleotide primer for the detection of SNP TSC0009722
tttttaggattg

SEQ ID NO: 281403 - DNA, 12 bp, Artificial Sequence
  Oligonucleotide primer for the detection of SNP TSC0009724
catatttaccaa

SEQ ID NO: 281404 - DNA, 12 bp, Artificial Sequence
  Oligonucleotide primer for the detection of SNP TSC0009724
ttataatttttt

SEQ ID NO: 281405 - DNA, 12 bp, Artificial Sequence
  Oligonucleotide primer for the detection of SNP TSC0009724
acttacaatctc

SEQ ID NO: 281406 - DNA, 12 bp, Artificial Sequence
  Oligonucleotide primer for the detection of SNP TSC0009724
tttatatttatt

SEQ ID NO: 281407 - DNA, 12 bp, Artificial Sequence
  Oligonucleotide primer for the detection of SNP TSC0009729
aataattcctta

SEQ ID NO: 281408 - DNA, 12 bp, Artificial Sequence
  Oligonucleotide primer for the detection of SNP TSC0009729
ttgtgtataaat

SEQ ID NO: 281409 - DNA, 12 bp, Artificial Sequence
  Oligonucleotide primer for the detection of SNP TSC0009729
ttatatacaaat

SEQ ID NO: 281410 - DNA, 12 bp, Artificial Sequence
  Oligonucleotide primer for the detection of SNP TSC0009729
aggtaatttttt

SEQ ID NO: 281411 - DNA, 12 bp, Artificial Sequence
  Oligonucleotide primer for the detection of SNP TSC0009731
tttatatatata

SEQ ID NO: 281412 - DNA, 12 bp, Artificial Sequence
  Oligonukleotid-Primer
cttacacacaca

SEQ ID NO: 281413 - DNA, 12 bp, Artificial Sequence
  Oligonucleotide primer for the detection of SNP TSC0009731
aagggttttttt

SEQ ID NO: 281414 - DNA, 12 bp, Artificial Sequence
  Oligonucleotide primer for the detection of SNP TSC0009734
tcttaaatactc

SEQ ID NO: 281415 - DNA, 12 bp, Artificial Sequence
  Oligonucleotide primer for the detection of SNP TSC0009734
taataaatatat

SEQ ID NO: 281416 - DNA, 12 bp, Artificial Sequence
  Oligonucleotide primer for the detection of SNP TSC0009734
taataaatatac

SEQ ID NO: 281417 - DNA, 12 bp, Artificial Sequence
  Oligonucleotide primer for the detection of SNP TSC0009734
caacaaatatac

SEQ ID NO: 281418 - DNA, 12 bp, Artificial Sequence
  Oligonucleotide primer for the detection of SNP TSC0009734
taagtgtttttt

SEQ ID NO: 281419 - DNA, 12 bp, Artificial Sequence
  Oligonucleotide primer for the detection of SNP TSC0009735
ataattcaaaac

SEQ ID NO: 281420 - DNA, 12 bp, Artificial Sequence
  Oligonucleotide primer for the detection of SNP TSC0009735
gaagatttgtga

SEQ ID NO: 281421 - DNA, 12 bp, Artificial Sequence
  Oligonucleotide primer for the detection of SNP TSC0009736
taaaataactac

SEQ ID NO: 281422 - DNA, 12 bp, Artificial Sequence
  Oligonucleotide primer for the detection of SNP TSC0009736
atagagtgttag

SEQ ID NO: 281423 - DNA, 12 bp, Artificial Sequence
  Oligonucleotide primer for the detection of SNP TSC0009740
gtgttttgtatg

SEQ ID NO: 281424 - DNA, 12 bp, Artificial Sequence
  Oligonucleotide primer for the detection of SNP TSC0009744
aatcataaaatt

SEQ ID NO: 281425 - DNA, 12 bp, Artificial Sequence
  Oligonucleotide primer for the detection of SNP TSC0009744
cattttttacaa

SEQ ID NO: 281426 - DNA, 12 bp, Artificial Sequence
  Oligonucleotide primer for the detection of SNP TSC0009744
ggttatggaatt

SEQ ID NO: 281427 - DNA, 12 bp, Artificial Sequence
  Oligonucleotide primer for the detection of SNP TSC0009748
gtgatgtattta

SEQ ID NO: 281428 - DNA, 12 bp, Artificial Sequence
  Oligonukleotid-Primer
taaaattatttt

SEQ ID NO: 281429 - DNA, 12 bp, Artificial Sequence
  Oligonucleotide primer for the detection of SNP TSC0009749
tttatagtaatg

SEQ ID NO: 281430 - DNA, 12 bp, Artificial Sequence
  Oligonucleotide primer for the detection of SNP TSC0009754
tgttatgtagga

SEQ ID NO: 281431 - DNA, 12 bp, Artificial Sequence
  Oligonucleotide primer for the detection of SNP TSC0009757
tcaaacctaaac

SEQ ID NO: 281432 - DNA, 12 bp, Artificial Sequence
  Oligonucleotide primer for the detection of SNP TSC0009757
tgttgttgaata

SEQ ID NO: 281433 - DNA, 12 bp, Artificial Sequence
  Oligonucleotide primer for the detection of SNP TSC0009757
tgtcgttgaata

SEQ ID NO: 281434 - DNA, 12 bp, Artificial Sequence
  Oligonucleotide primer for the detection of SNP TSC0009761
tggaagattatg

SEQ ID NO: 281435 - DNA, 12 bp, Artificial Sequence
  Oligonucleotide primer for the detection of SNP TSC0009761
tggaagattacg

SEQ ID NO: 281436 - DNA, 12 bp, Artificial Sequence
  Oligonucleotide primer for the detection of SNP TSC0009770
taacaacatata

SEQ ID NO: 281437 - DNA, 12 bp, Artificial Sequence
  Oligonucleotide primer for the detection of SNP TSC0009770
aagtttatttat

SEQ ID NO: 281438 - DNA, 12 bp, Artificial Sequence
  Oligonucleotide primer for the detection of SNP TSC0009770
aaacttacttac

SEQ ID NO: 281439 - DNA, 12 bp, Artificial Sequence
  Oligonucleotide primer for the detection of SNP TSC0009770
ttaataatatgt

SEQ ID NO: 281440 - DNA, 12 bp, Artificial Sequence
  Oligonucleotide primer for the detection of SNP TSC0009776
atacatcaccat

SEQ ID NO: 281441 - DNA, 12 bp, Artificial Sequence
  Oligonucleotide primer for the detection of SNP TSC0009776
atacgtcaccat

SEQ ID NO: 281442 - DNA, 12 bp, Artificial Sequence
  Oligonucleotide primer for the detection of SNP TSC0009776
ttttttatttta

SEQ ID NO: 281443 - DNA, 12 bp, Artificial Sequence
  Oligonucleotide primer for the detection of SNP TSC0009790
aatccaacttca

SEQ ID NO: 281444 - DNA, 12 bp, Artificial Sequence
  Oligonucleotide primer for the detection of SNP TSC0009790
tgggagtgaaat

SEQ ID NO: 281445 - DNA, 12 bp, Artificial Sequence
  Oligonucleotide primer for the detection of SNP TSC0009790
taaaaataaaat

SEQ ID NO: 281446 - DNA, 12 bp, Artificial Sequence
  Oligonucleotide primer for the detection of SNP TSC0009790
atttaattttat

SEQ ID NO: 281447 - DNA, 12 bp, Artificial Sequence
  Oligonucleotide primer for the detection of SNP TSC0009796
atacataaaaat

SEQ ID NO: 281448 - DNA, 12 bp, Artificial Sequence
  Oligonucleotide primer for the detection of SNP TSC0009797
caaaattaatac

SEQ ID NO: 281449 - DNA, 12 bp, Artificial Sequence
  Oligonucleotide primer for the detection of SNP TSC0009797
cgaaattaatac

SEQ ID NO: 281450 - DNA, 12 bp, Artificial Sequence
  Oligonucleotide primer for the detection of SNP TSC0009797
gtattttttgtg

SEQ ID NO: 281451 - DNA, 12 bp, Artificial Sequence
  Oligonucleotide primer for the detection of SNP TSC0009797
gtatttttcgtg

SEQ ID NO: 281452 - DNA, 12 bp, Artificial Sequence
  Oligonucleotide primer for the detection of SNP TSC0009798
attatttttata

SEQ ID NO: 281453 - DNA, 12 bp, Artificial Sequence
  Oligonucleotide primer for the detection of SNP TSC0009799
aaaccaactcat

SEQ ID NO: 281454 - DNA, 12 bp, Artificial Sequence
  Oligonucleotide primer for the detection of SNP TSC0009799
gaaccaactcat

SEQ ID NO: 281455 - DNA, 12 bp, Artificial Sequence
  Oligonucleotide primer for the detection of SNP TSC0009799
ttattttgtgga

SEQ ID NO: 281456 - DNA, 12 bp, Artificial Sequence
  Oligonucleotide primer for the detection of SNP TSC0009799
ttattttgcgga

SEQ ID NO: 281457 - DNA, 12 bp, Artificial Sequence
  Oligonucleotide primer for the detection of SNP TSC0009799
ctaccttacaaa

SEQ ID NO: 281458 - DNA, 12 bp, Artificial Sequence
  Oligonucleotide primer for the detection of SNP TSC0009799
ctaccttacgaa

SEQ ID NO: 281459 - DNA, 12 bp, Artificial Sequence
  Oligonucleotide primer for the detection of SNP TSC0009799
gagttagtttat

SEQ ID NO: 281460 - DNA, 12 bp, Artificial Sequence
  Oligonukleotid-Primer
caatctaacccc

SEQ ID NO: 281461 - DNA, 12 bp, Artificial Sequence
  Oligonucleotide primer for the detection of SNP TSC0009800
tttgttttggag

SEQ ID NO: 281462 - DNA, 12 bp, Artificial Sequence
  Oligonucleotide primer for the detection of SNP TSC0009800
tctactttaaaa

SEQ ID NO: 281463 - DNA, 12 bp, Artificial Sequence
  Oligonucleotide primer for the detection of SNP TSC0009800
aatttggttttt

SEQ ID NO: 281464 - DNA, 12 bp, Artificial Sequence
  Oligonucleotide primer for the detection of SNP TSC0009801
ttcactacttac

SEQ ID NO: 281465 - DNA, 12 bp, Artificial Sequence
  Oligonucleotide primer for the detection of SNP TSC0009801
ttcgctacttac

SEQ ID NO: 281466 - DNA, 12 bp, Artificial Sequence
  Oligonucleotide primer for the detection of SNP TSC0009807
actaataatcac

SEQ ID NO: 281467 - DNA, 12 bp, Artificial Sequence
  Oligonucleotide primer for the detection of SNP TSC0009807
attttattgttt

SEQ ID NO: 281468 - DNA, 12 bp, Artificial Sequence
  Oligonucleotide primer for the detection of SNP TSC0009807
cttcattattca

SEQ ID NO: 281469 - DNA, 12 bp, Artificial Sequence
  Oligonucleotide primer for the detection of SNP TSC0009807
gttgatagttat

SEQ ID NO: 281470 - DNA, 12 bp, Artificial Sequence
  Oligonucleotide primer for the detection of SNP TSC0009810
taatccaacatc

SEQ ID NO: 281471 - DNA, 12 bp, Artificial Sequence
  Oligonucleotide primer for the detection of SNP TSC0009810
aggtagttggag

SEQ ID NO: 281472 - DNA, 12 bp, Artificial Sequence
  Oligonucleotide primer for the detection of SNP TSC0009813
ttctctcacaac

SEQ ID NO: 281473 - DNA, 12 bp, Artificial Sequence
  Oligonucleotide primer for the detection of SNP TSC0009813
ttctctcacgac

SEQ ID NO: 281474 - DNA, 12 bp, Artificial Sequence
  Oligonucleotide primer for the detection of SNP TSC0009813
ggaaagttaaga

SEQ ID NO: 281475 - DNA, 12 bp, Artificial Sequence
  Oligonucleotide primer for the detection of SNP TSC0009816
aatataattaac

SEQ ID NO: 281476 - DNA, 12 bp, Artificial Sequence
  Oligonucleotide primer for the detection of SNP TSC0009816
gattttatagtg

SEQ ID NO: 281477 - DNA, 12 bp, Artificial Sequence
  Oligonucleotide primer for the detection of SNP TSC0009818
accatttacata

SEQ ID NO: 281478 - DNA, 12 bp, Artificial Sequence
  Oligonucleotide primer for the detection of SNP TSC0009818
accgtttacata

SEQ ID NO: 281479 - DNA, 12 bp, Artificial Sequence
  Oligonucleotide primer for the detection of SNP TSC0009818
gtgaaatgtaag

SEQ ID NO: 281480 - DNA, 12 bp, Artificial Sequence
  Oligonucleotide primer for the detection of SNP TSC0009818
ataaaatataaa

SEQ ID NO: 281481 - DNA, 12 bp, Artificial Sequence
  Oligonucleotide primer for the detection of SNP TSC0009818
tattgtttgtat

SEQ ID NO: 281482 - DNA, 12 bp, Artificial Sequence
  Oligonucleotide primer for the detection of SNP TSC0009818
tatcgtttgtat

SEQ ID NO: 281483 - DNA, 12 bp, Artificial Sequence
  Oligonucleotide primer for the detection of SNP TSC0009820
attcaacttaaa

SEQ ID NO: 281484 - DNA, 12 bp, Artificial Sequence
  Oligonucleotide primer for the detection of SNP TSC0009820
tttttaaaaaat

SEQ ID NO: 281485 - DNA, 12 bp, Artificial Sequence
  Oligonucleotide primer for the detection of SNP TSC0009820
tttttaaaaaac

SEQ ID NO: 281486 - DNA, 12 bp, Artificial Sequence
  Oligonucleotide primer for the detection of SNP TSC0009820
ttttttaaaaaa

SEQ ID NO: 281487 - DNA, 12 bp, Artificial Sequence
  Oligonucleotide primer for the detection of SNP TSC0009820
atttagtttaga

SEQ ID NO: 281488 - DNA, 12 bp, Artificial Sequence
  Oligonucleotide primer for the detection of SNP TSC0009824
ttttcataactt

SEQ ID NO: 281489 - DNA, 12 bp, Artificial Sequence
  Oligonucleotide primer for the detection of SNP TSC0009824
ttgtagttaaag

SEQ ID NO: 281490 - DNA, 12 bp, Artificial Sequence
  Oligonucleotide primer for the detection of SNP TSC0009825
caataattattt

SEQ ID NO: 281491 - DNA, 12 bp, Artificial Sequence
  Oligonucleotide primer for the detection of SNP TSC0009825
ttaagttatgaa

SEQ ID NO: 281492 - DNA, 12 bp, Artificial Sequence
  Oligonucleotide primer for the detection of SNP TSC0009825
ccaaatcataaa

SEQ ID NO: 281493 - DNA, 12 bp, Artificial Sequence
  Oligonucleotide primer for the detection of SNP TSC0009825
tagtagttattt

SEQ ID NO: 281494 - DNA, 12 bp, Artificial Sequence
  Oligonucleotide primer for the detection of SNP TSC0009826
ctaccccaacat

SEQ ID NO: 281495 - DNA, 12 bp, Artificial Sequence
  Oligonucleotide primer for the detection of SNP TSC0009826
atgaatagtgaa

SEQ ID NO: 281496 - DNA, 12 bp, Artificial Sequence
  Oligonucleotide primer for the detection of SNP TSC0009839
tactttactatt

SEQ ID NO: 281497 - DNA, 12 bp, Artificial Sequence
  Oligonucleotide primer for the detection of SNP TSC0009839
tatgtaattata

SEQ ID NO: 281498 - DNA, 12 bp, Artificial Sequence
  Oligonucleotide primer for the detection of SNP TSC0009845
ccaatccaaata

SEQ ID NO: 281499 - DNA, 12 bp, Artificial Sequence
  Oligonucleotide primer for the detection of SNP TSC0009845
tttacttttcct

SEQ ID NO: 281500 - DNA, 12 bp, Artificial Sequence
  Oligonucleotide primer for the detection of SNP TSC0009845
ttaatttaaata

SEQ ID NO: 281501 - DNA, 12 bp, Artificial Sequence
  Oligonucleotide primer for the detection of SNP TSC0009848
aaaattaaaatt

SEQ ID NO: 281502 - DNA, 12 bp, Artificial Sequence
  Oligonucleotide primer for the detection of SNP TSC0009848
tttttttgtgta

SEQ ID NO: 281503 - DNA, 12 bp, Artificial Sequence
  Oligonucleotide primer for the detection of SNP TSC0009850
aaataaatctat

SEQ ID NO: 281504 - DNA, 12 bp, Artificial Sequence
  Oligonucleotide primer for the detection of SNP TSC0009850
tgttaaggtaga

SEQ ID NO: 281505 - DNA, 12 bp, Artificial Sequence
  Oligonucleotide primer for the detection of SNP TSC0009854
ataacctcataa

SEQ ID NO: 281506 - DNA, 12 bp, Artificial Sequence
  Oligonucleotide primer for the detection of SNP TSC0009854
ataacctcgtaa

SEQ ID NO: 281507 - DNA, 12 bp, Artificial Sequence
  Oligonucleotide primer for the detection of SNP TSC0009854
attgttagtgat

SEQ ID NO: 281508 - DNA, 12 bp, Artificial Sequence
  Oligonucleotide primer for the detection of SNP TSC0009854
actactaataac

SEQ ID NO: 281509 - DNA, 12 bp, Artificial Sequence
  Oligonucleotide primer for the detection of SNP TSC0009854
ataattttgtga

SEQ ID NO: 281510 - DNA, 12 bp, Artificial Sequence
  Oligonucleotide primer for the detection of SNP TSC0009854
ataatttcgtga

SEQ ID NO: 281511 - DNA, 12 bp, Artificial Sequence
  Oligonucleotide primer for the detection of SNP TSC0009862
tcttatcaatac

SEQ ID NO: 281512 - DNA, 12 bp, Artificial Sequence
  Oligonucleotide primer for the detection of SNP TSC0009862
aaatatgaatta

SEQ ID NO: 281513 - DNA, 12 bp, Artificial Sequence
  Oligonucleotide primer for the detection of SNP TSC0009864
ttcaacaaatat

SEQ ID NO: 281514 - DNA, 12 bp, Artificial Sequence
  Oligonucleotide primer for the detection of SNP TSC0009864
aaatagtttgaa

SEQ ID NO: 281515 - DNA, 12 bp, Artificial Sequence
  Oligonucleotide primer for the detection of SNP TSC0009866
cacaaaataaca

SEQ ID NO: 281516 - DNA, 12 bp, Artificial Sequence
  Oligonucleotide primer for the detection of SNP TSC0009866
tgtaagtgggtt

SEQ ID NO: 281517 - DNA, 12 bp, Artificial Sequence
  Oligonucleotide primer for the detection of SNP TSC0009866
tataaataaact

SEQ ID NO: 281518 - DNA, 12 bp, Artificial Sequence
  Oligonucleotide primer for the detection of SNP TSC0009866
tatagagtgata

SEQ ID NO: 281519 - DNA, 12 bp, Artificial Sequence
  Oligonucleotide primer for the detection of SNP TSC0009869
tcctcattttcc

SEQ ID NO: 281520 - DNA, 12 bp, Artificial Sequence
  Oligonucleotide primer for the detection of SNP TSC0009869
tgattttattat

SEQ ID NO: 281521 - DNA, 12 bp, Artificial Sequence
  Oligonucleotide primer for the detection of SNP TSC0009869
ataactttacca

SEQ ID NO: 281522 - DNA, 12 bp, Artificial Sequence
  Oligonucleotide primer for the detection of SNP TSC0009870
ccacctacctca

SEQ ID NO: 281523 - DNA, 12 bp, Artificial Sequence
  Oligonucleotide primer for the detection of SNP TSC0009870
ccgcctacctca

SEQ ID NO: 281524 - DNA, 12 bp, Artificial Sequence
  Oligonucleotide primer for the detection of SNP TSC0009870
gtgaggaggttt

SEQ ID NO: 281525 - DNA, 12 bp, Artificial Sequence
  Oligonucleotide primer for the detection of SNP TSC0009870
ataaaaaaacct

SEQ ID NO: 281526 - DNA, 12 bp, Artificial Sequence
  Oligonucleotide primer for the detection of SNP TSC0009870
tcgtttgtttta

SEQ ID NO: 281527 - DNA, 12 bp, Artificial Sequence
  Oligonucleotide primer for the detection of SNP TSC0009881
tatacacaatat

SEQ ID NO: 281528 - DNA, 12 bp, Artificial Sequence
  Oligonucleotide primer for the detection of SNP TSC0009881
atatattatttg

SEQ ID NO: 281529 - DNA, 12 bp, Artificial Sequence
  Oligonucleotide primer for the detection of SNP TSC0009882
ctataaaaaaat

SEQ ID NO: 281530 - DNA, 12 bp, Artificial Sequence
  Oligonucleotide primer for the detection of SNP TSC0009882
atttagttttag

SEQ ID NO: 281531 - DNA, 12 bp, Artificial Sequence
  Oligonucleotide primer for the detection of SNP TSC0009883
aaaacttaccat

SEQ ID NO: 281532 - DNA, 12 bp, Artificial Sequence
  Oligonucleotide primer for the detection of SNP TSC0009883
ttttttttgtta

SEQ ID NO: 281533 - DNA, 12 bp, Artificial Sequence
  Oligonucleotide primer for the detection of SNP TSC0009885
aactttttcctc

SEQ ID NO: 281534 - DNA, 12 bp, Artificial Sequence
  Oligonucleotide primer for the detection of SNP TSC0009885
atttttaagaaa

SEQ ID NO: 281535 - DNA, 12 bp, Artificial Sequence
  Oligonucleotide primer for the detection of SNP TSC0009886
taaaatacaata

SEQ ID NO: 281536 - DNA, 12 bp, Artificial Sequence
  Oligonucleotide primer for the detection of SNP TSC0009886
gttaaaattata

SEQ ID NO: 281537 - DNA, 12 bp, Artificial Sequence
  Oligonucleotide primer for the detection of SNP TSC0009886
accaaaatcaca

SEQ ID NO: 281538 - DNA, 12 bp, Artificial Sequence
  Oligonucleotide primer for the detection of SNP TSC0009886
tggagtgtagtg

SEQ ID NO: 281539 - DNA, 12 bp, Artificial Sequence
  Oligonucleotide primer for the detection of SNP TSC0009887
tacattcacaaa

SEQ ID NO: 281540 - DNA, 12 bp, Artificial Sequence
  Oligonucleotide primer for the detection of SNP TSC0009887
tgaatgtttttt

SEQ ID NO: 281541 - DNA, 12 bp, Artificial Sequence
  Oligonucleotide primer for the detection of SNP TSC0009887
tgaatgtttttc

SEQ ID NO: 281542 - DNA, 12 bp, Artificial Sequence
  Oligonucleotide primer for the detection of SNP TSC0009887
taaatacctttc

SEQ ID NO: 281543 - DNA, 12 bp, Artificial Sequence
  Oligonucleotide primer for the detection of SNP TSC0009887
atatgtatttat

SEQ ID NO: 281544 - DNA, 12 bp, Artificial Sequence
  Oligonucleotide primer for the detection of SNP TSC0009888
acttaaactacc

SEQ ID NO: 281545 - DNA, 12 bp, Artificial Sequence
  Oligonucleotide primer for the detection of SNP TSC0009888
tataggattttg

SEQ ID NO: 281546 - DNA, 12 bp, Artificial Sequence
  Oligonucleotide primer for the detection of SNP TSC0009889
aacactctatat

SEQ ID NO: 281547 - DNA, 12 bp, Artificial Sequence
  Oligonucleotide primer for the detection of SNP TSC0009889
aacgctctatat

SEQ ID NO: 281548 - DNA, 12 bp, Artificial Sequence
  Oligonucleotide primer for the detection of SNP TSC0009889
aaagttataaaa

SEQ ID NO: 281549 - DNA, 12 bp, Artificial Sequence
  Oligonucleotide primer for the detection of SNP TSC0009892
atataaacaaat

SEQ ID NO: 281550 - DNA, 12 bp, Artificial Sequence
  Oligonucleotide primer for the detection of SNP TSC0009892
tatttattttta

SEQ ID NO: 281551 - DNA, 12 bp, Artificial Sequence
  Oligonucleotide primer for the detection of SNP TSC0009892
attcatttccaa

SEQ ID NO: 281552 - DNA, 12 bp, Artificial Sequence
  Oligonucleotide primer for the detection of SNP TSC0009892
gtatgggtaagt

SEQ ID NO: 281553 - DNA, 12 bp, Artificial Sequence
  Oligonukleotid-Primer
tataacaacata

SEQ ID NO: 281554 - DNA, 12 bp, Artificial Sequence
  Oligonucleotide primer for the detection of SNP TSC0009894
attattttatat

SEQ ID NO: 281555 - DNA, 12 bp, Artificial Sequence
  Oligonucleotide primer for the detection of SNP TSC0009894
tattatttcata

SEQ ID NO: 281556 - DNA, 12 bp, Artificial Sequence
  Oligonucleotide primer for the detection of SNP TSC0009894
ttatagtagtat

SEQ ID NO: 281557 - DNA, 12 bp, Artificial Sequence
  Oligonucleotide primer for the detection of SNP TSC0009898
caactcctacta

SEQ ID NO: 281558 - DNA, 12 bp, Artificial Sequence
  Oligonucleotide primer for the detection of SNP TSC0009898
tggttggtggaa

SEQ ID NO: 281559 - DNA, 12 bp, Artificial Sequence
  Oligonucleotide primer for the detection of SNP TSC0009898
aattaataaaaa

SEQ ID NO: 281560 - DNA, 12 bp, Artificial Sequence
  Oligonucleotide primer for the detection of SNP TSC0009898
agtttttgttat

SEQ ID NO: 281561 - DNA, 12 bp, Artificial Sequence
  Oligonucleotide primer for the detection of SNP TSC0009898
agtttttgttac

SEQ ID NO: 281562 - DNA, 12 bp, Artificial Sequence
  Oligonucleotide primer for the detection of SNP TSC0009901
ataaaacactac

SEQ ID NO: 281563 - DNA, 12 bp, Artificial Sequence
  Oligonucleotide primer for the detection of SNP TSC0009901
ttaggtattttt

SEQ ID NO: 281564 - DNA, 12 bp, Artificial Sequence
  Oligonucleotide primer for the detection of SNP TSC0009901
caaatattttta

SEQ ID NO: 281565 - DNA, 12 bp, Artificial Sequence
  Oligonucleotide primer for the detection of SNP TSC0009901
tggggtattgtt

SEQ ID NO: 281566 - DNA, 12 bp, Artificial Sequence
  Oligonucleotide primer for the detection of SNP TSC0009906
cattccaaaact

SEQ ID NO: 281567 - DNA, 12 bp, Artificial Sequence
  Oligonucleotide primer for the detection of SNP TSC0009906
cattccgaaact

SEQ ID NO: 281568 - DNA, 12 bp, Artificial Sequence
  Oligonucleotide primer for the detection of SNP TSC0009906
atttaaatttta

SEQ ID NO: 281569 - DNA, 12 bp, Artificial Sequence
  Oligonucleotide primer for the detection of SNP TSC0009909
ttctaaaccaaa

SEQ ID NO: 281570 - DNA, 12 bp, Artificial Sequence
  Oligonucleotide primer for the detection of SNP TSC0009909
agagatatattg

SEQ ID NO: 281571 - DNA, 12 bp, Artificial Sequence
  Oligonucleotide primer for the detection of SNP TSC0009909
aaaaatacatta

SEQ ID NO: 281572 - DNA, 12 bp, Artificial Sequence
  Oligonucleotide primer for the detection of SNP TSC0009909
ttttggattaaa

SEQ ID NO: 281573 - DNA, 12 bp, Artificial Sequence
  Oligonucleotide primer for the detection of SNP TSC0009910
taaaaaatttct

SEQ ID NO: 281574 - DNA, 12 bp, Artificial Sequence
  Oligonucleotide primer for the detection of SNP TSC0009910
ttgatatttttg

SEQ ID NO: 281575 - DNA, 12 bp, Artificial Sequence
  Oligonucleotide primer for the detection of SNP TSC0009912
aacccatcaaaa

SEQ ID NO: 281576 - DNA, 12 bp, Artificial Sequence
  Oligonucleotide primer for the detection of SNP TSC0009912
ttaaagagataa

SEQ ID NO: 281577 - DNA, 12 bp, Artificial Sequence
  Oligonucleotide primer for the detection of SNP TSC0009912
ccaaaaaaataa

SEQ ID NO: 281578 - DNA, 12 bp, Artificial Sequence
  Oligonucleotide primer for the detection of SNP TSC0009912
gatttattagaa

SEQ ID NO: 281579 - DNA, 12 bp, Artificial Sequence
  Oligonucleotide primer for the detection of SNP TSC0009913
aaatcctccaaa

SEQ ID NO: 281580 - DNA, 12 bp, Artificial Sequence
  Oligonucleotide primer for the detection of SNP TSC0009913
aaatcctccgaa

SEQ ID NO: 281581 - DNA, 12 bp, Artificial Sequence
  Oligonucleotide primer for the detection of SNP TSC0009913
gagtggtgttgg

SEQ ID NO: 281582 - DNA, 12 bp, Artificial Sequence
  Oligonucleotide primer for the detection of SNP TSC0009913
gagcggtgttgg

SEQ ID NO: 281583 - DNA, 12 bp, Artificial Sequence
  Oligonucleotide primer for the detection of SNP TSC0009913
gagtggcgttgg

SEQ ID NO: 281584 - DNA, 12 bp, Artificial Sequence
  Oligonucleotide primer for the detection of SNP TSC0009913
gagtggtgtcgg

SEQ ID NO: 281585 - DNA, 12 bp, Artificial Sequence
  Oligonucleotide primer for the detection of SNP TSC0009913
gagcggcgttgg

SEQ ID NO: 281586 - DNA, 12 bp, Artificial Sequence
  Oligonucleotide primer for the detection of SNP TSC0009913
gagcggtgtcgg

SEQ ID NO: 281587 - DNA, 12 bp, Artificial Sequence
  Oligonucleotide primer for the detection of SNP TSC0009913
gagtggcgtcgg

SEQ ID NO: 281588 - DNA, 12 bp, Artificial Sequence
  Oligonucleotide primer for the detection of SNP TSC0009913
gagcggcgtcgg

SEQ ID NO: 281589 - DNA, 12 bp, Artificial Sequence
  Oligonucleotide primer for the detection of SNP TSC0009913
aaacaacaccaa

SEQ ID NO: 281590 - DNA, 12 bp, Artificial Sequence
  Oligonucleotide primer for the detection of SNP TSC0009913
aaacaacaccga

SEQ ID NO: 281591 - DNA, 12 bp, Artificial Sequence
  Oligonucleotide primer for the detection of SNP TSC0009913
aaacaacgccaa

SEQ ID NO: 281592 - DNA, 12 bp, Artificial Sequence
  Oligonucleotide primer for the detection of SNP TSC0009913
aaacgacaccaa

SEQ ID NO: 281593 - DNA, 12 bp, Artificial Sequence
  Oligonucleotide primer for the detection of SNP TSC0009913
aaacaacgccga

SEQ ID NO: 281594 - DNA, 12 bp, Artificial Sequence
  Oligonucleotide primer for the detection of SNP TSC0009913
aaacgacaccga

SEQ ID NO: 281595 - DNA, 12 bp, Artificial Sequence
  Oligonucleotide primer for the detection of SNP TSC0009913
aaacgacgccaa

SEQ ID NO: 281596 - DNA, 12 bp, Artificial Sequence
  Oligonucleotide primer for the detection of SNP TSC0009913
aaacgacgccga

SEQ ID NO: 281597 - DNA, 12 bp, Artificial Sequence
  Oligonucleotide primer for the detection of SNP TSC0009913
tttagatttttc

SEQ ID NO: 281598 - DNA, 12 bp, Artificial Sequence
  Oligonucleotide primer for the detection of SNP TSC0009922
ctattaaaaaac

SEQ ID NO: 281599 - DNA, 12 bp, Artificial Sequence
  Oligonucleotide primer for the detection of SNP TSC0009922
ttttatttttaa

SEQ ID NO: 281600 - DNA, 12 bp, Artificial Sequence
  Oligonucleotide primer for the detection of SNP TSC0009924
ggtatgggtgtg

SEQ ID NO: 281601 - DNA, 12 bp, Artificial Sequence
  Oligonucleotide primer for the detection of SNP TSC0009924
aatataaatata

SEQ ID NO: 281602 - DNA, 12 bp, Artificial Sequence
  Oligonucleotide primer for the detection of SNP TSC0009924
ggaaggaaaggt

SEQ ID NO: 281603 - DNA, 12 bp, Artificial Sequence
  Oligonucleotide primer for the detection of SNP TSC0009927
tatattacaaca

SEQ ID NO: 281604 - DNA, 12 bp, Artificial Sequence
  Oligonucleotide primer for the detection of SNP TSC0009927
tgttgatttatt

SEQ ID NO: 281605 - DNA, 12 bp, Artificial Sequence
  Oligonucleotide primer for the detection of SNP TSC0009927
tgtcgatttatt

SEQ ID NO: 281606 - DNA, 12 bp, Artificial Sequence
  Oligonukleotid-Primer
tatcaacttacc

SEQ ID NO: 281607 - DNA, 12 bp, Artificial Sequence
  Oligonucleotide primer for the detection of SNP TSC0009927
tatcgacttacc

SEQ ID NO: 281608 - DNA, 12 bp, Artificial Sequence
  Oligonucleotide primer for the detection of SNP TSC0009927
tgtgttgtaata

SEQ ID NO: 281609 - DNA, 12 bp, Artificial Sequence
  Oligonucleotide primer for the detection of SNP TSC0009930
attttctatatc

SEQ ID NO: 281610 - DNA, 12 bp, Artificial Sequence
  Oligonucleotide primer for the detection of SNP TSC0009930
tcttctactata

SEQ ID NO: 281611 - DNA, 12 bp, Artificial Sequence
  Oligonucleotide primer for the detection of SNP TSC0009930
gttttttgtgtt

SEQ ID NO: 281612 - DNA, 12 bp, Artificial Sequence
  Oligonucleotide primer for the detection of SNP TSC0009938
ttaaaccatatc

SEQ ID NO: 281613 - DNA, 12 bp, Artificial Sequence
  Oligonucleotide primer for the detection of SNP TSC0009938
aggaaataagag

SEQ ID NO: 281614 - DNA, 12 bp, Artificial Sequence
  Oligonucleotide primer for the detection of SNP TSC0009939
aaacacataact

SEQ ID NO: 281615 - DNA, 12 bp, Artificial Sequence
  Oligonucleotide primer for the detection of SNP TSC0009939
aaacacgtaact

SEQ ID NO: 281616 - DNA, 12 bp, Artificial Sequence
  Oligonucleotide primer for the detection of SNP TSC0009939
gttgaggttatt

SEQ ID NO: 281617 - DNA, 12 bp, Artificial Sequence
  Oligonucleotide primer for the detection of SNP TSC0009939
actaaaatcatt

SEQ ID NO: 281618 - DNA, 12 bp, Artificial Sequence
  Oligonucleotide primer for the detection of SNP TSC0009939
gggtatgtggtt

SEQ ID NO: 281619 - DNA, 12 bp, Artificial Sequence
  Oligonucleotide primer for the detection of SNP TSC0009939
gggtacgtggtt

SEQ ID NO: 281620 - DNA, 12 bp, Artificial Sequence
  Oligonucleotide primer for the detection of SNP TSC0009940
taacttcttata

SEQ ID NO: 281621 - DNA, 12 bp, Artificial Sequence
  Oligonucleotide primer for the detection of SNP TSC0009940
ttaaaggtggtt

SEQ ID NO: 281622 - DNA, 12 bp, Artificial Sequence
  Oligonucleotide primer for the detection of SNP TSC0009940
tttaaaaataac

SEQ ID NO: 281623 - DNA, 12 bp, Artificial Sequence
  Oligonucleotide primer for the detection of SNP TSC0009940
ttagttttttat

SEQ ID NO: 281624 - DNA, 12 bp, Artificial Sequence
  Oligonucleotide primer for the detection of SNP TSC0009943
ccctcaaacaaa

SEQ ID NO: 281625 - DNA, 12 bp, Artificial Sequence
  Oligonucleotide primer for the detection of SNP TSC0009943
aggaattgtgaa

SEQ ID NO: 281626 - DNA, 12 bp, Artificial Sequence
  Oligonucleotide primer for the detection of SNP TSC0009943
aggaatcgtgaa

SEQ ID NO: 281627 - DNA, 12 bp, Artificial Sequence
  Oligonucleotide primer for the detection of SNP TSC0009950
ccaacattattt

SEQ ID NO: 281628 - DNA, 12 bp, Artificial Sequence
  Oligonucleotide primer for the detection of SNP TSC0009950
ccaacgttattt

SEQ ID NO: 281629 - DNA, 12 bp, Artificial Sequence
  Oligonucleotide primer for the detection of SNP TSC0009950
ttaattttgtga

SEQ ID NO: 281630 - DNA, 12 bp, Artificial Sequence
  Oligonucleotide primer for the detection of SNP TSC0009951
gaaataatgttg

SEQ ID NO: 281631 - DNA, 12 bp, Artificial Sequence
  Oligonucleotide primer for the detection of SNP TSC0009951
gaaataacgttg

SEQ ID NO: 281632 - DNA, 12 bp, Artificial Sequence
  Oligonucleotide primer for the detection of SNP TSC0009952
accaaaaaaaat

SEQ ID NO: 281633 - DNA, 12 bp, Artificial Sequence
  Oligonucleotide primer for the detection of SNP TSC0009959
tactttataatt

SEQ ID NO: 281634 - DNA, 12 bp, Artificial Sequence
  Oligonucleotide primer for the detection of SNP TSC0009959
aaattgattata

SEQ ID NO: 281635 - DNA, 12 bp, Artificial Sequence
  Oligonucleotide primer for the detection of SNP TSC0009960
tcactacccaat

SEQ ID NO: 281636 - DNA, 12 bp, Artificial Sequence
  Oligonucleotide primer for the detection of SNP TSC0009960
tcactacccgat

SEQ ID NO: 281637 - DNA, 12 bp, Artificial Sequence
  Oligonucleotide primer for the detection of SNP TSC0009960
tatagtaaattg

SEQ ID NO: 281638 - DNA, 12 bp, Artificial Sequence
  Oligonucleotide primer for the detection of SNP TSC0009966
cctccccacaac

SEQ ID NO: 281639 - DNA, 12 bp, Artificial Sequence
  Oligonucleotide primer for the detection of SNP TSC0009966
tggtagggaaga

SEQ ID NO: 281640 - DNA, 12 bp, Artificial Sequence
  Oligonucleotide primer for the detection of SNP TSC0009966
tttttttatagt

SEQ ID NO: 281641 - DNA, 12 bp, Artificial Sequence
  Oligonucleotide primer for the detection of SNP TSC0009969
caccttatcttc

SEQ ID NO: 281642 - DNA, 12 bp, Artificial Sequence
  Oligonucleotide primer for the detection of SNP TSC0009969
tagagagtgtta

SEQ ID NO: 281643 - DNA, 12 bp, Artificial Sequence
  Oligonucleotide primer for the detection of SNP TSC0009975
attactttttat

SEQ ID NO: 281644 - DNA, 12 bp, Artificial Sequence
  Oligonucleotide primer for the detection of SNP TSC0009975
ttatttttgtaa

SEQ ID NO: 281645 - DNA, 12 bp, Artificial Sequence
  Oligonucleotide primer for the detection of SNP TSC0009975
attattttttat

SEQ ID NO: 281646 - DNA, 12 bp, Artificial Sequence
  Oligonucleotide primer for the detection of SNP TSC0009976
atttcaatattt

SEQ ID NO: 281647 - DNA, 12 bp, Artificial Sequence
  Oligonucleotide primer for the detection of SNP TSC0009976
ttgtaattaaaa

SEQ ID NO: 281648 - DNA, 12 bp, Artificial Sequence
  Oligonucleotide primer for the detection of SNP TSC0009977
tattacttactt

SEQ ID NO: 281649 - DNA, 12 bp, Artificial Sequence
  Oligonucleotide primer for the detection of SNP TSC0009977
attatgttatta

SEQ ID NO: 281650 - DNA, 12 bp, Artificial Sequence
  Oligonucleotide primer for the detection of SNP TSC0009978
aatcaacaaaat

SEQ ID NO: 281651 - DNA, 12 bp, Artificial Sequence
  Oligonucleotide primer for the detection of SNP TSC0009978
aatttgtattta

SEQ ID NO: 281652 - DNA, 12 bp, Artificial Sequence
  Oligonucleotide primer for the detection of SNP TSC0009978
aattcgtattta

SEQ ID NO: 281653 - DNA, 12 bp, Artificial Sequence
  Oligonucleotide primer for the detection of SNP TSC0009978
aactcatattta

SEQ ID NO: 281654 - DNA, 12 bp, Artificial Sequence
  Oligonucleotide primer for the detection of SNP TSC0009978
aactcgtattta

SEQ ID NO: 281655 - DNA, 12 bp, Artificial Sequence
  Oligonucleotide primer for the detection of SNP TSC0009978
aattagtaaagt

SEQ ID NO: 281656 - DNA, 12 bp, Artificial Sequence
  Oligonucleotide primer for the detection of SNP TSC0009979
caaaatataaat

SEQ ID NO: 281657 - DNA, 12 bp, Artificial Sequence
  Oligonucleotide primer for the detection of SNP TSC0009979
gttagtgggggg

SEQ ID NO: 281658 - DNA, 12 bp, Artificial Sequence
  Oligonucleotide primer for the detection of SNP TSC0009979
gttagcgggggg

SEQ ID NO: 281659 - DNA, 12 bp, Artificial Sequence
  Oligonucleotide primer for the detection of SNP TSC0009981
tataagatattt

SEQ ID NO: 281660 - DNA, 12 bp, Artificial Sequence
  Oligonucleotide primer for the detection of SNP TSC0009981
tataagatattc

SEQ ID NO: 281661 - DNA, 12 bp, Artificial Sequence
  Oligonucleotide primer for the detection of SNP TSC0009981
ttccacaaaaca

SEQ ID NO: 281662 - DNA, 12 bp, Artificial Sequence
  Oligonucleotide primer for the detection of SNP TSC0009984
aaaaaaaaacaa

SEQ ID NO: 281663 - DNA, 12 bp, Artificial Sequence
  Oligonucleotide primer for the detection of SNP TSC0009984
tgtgaagaaggt

SEQ ID NO: 281664 - DNA, 12 bp, Artificial Sequence
  Oligonucleotide primer for the detection of SNP TSC0009984
taaaggagaagt

SEQ ID NO: 281665 - DNA, 12 bp, Artificial Sequence
  Oligonucleotide primer for the detection of SNP TSC0009985
tctaccataatt

SEQ ID NO: 281666 - DNA, 12 bp, Artificial Sequence
  Oligonucleotide primer for the detection of SNP TSC0009985
ttagattggtaa

SEQ ID NO: 281667 - DNA, 12 bp, Artificial Sequence
  Oligonucleotide primer for the detection of SNP TSC0009985
ttagatcggtaa

SEQ ID NO: 281668 - DNA, 12 bp, Artificial Sequence
  Oligonucleotide primer for the detection of SNP TSC0009986
atcaacctcttt

SEQ ID NO: 281669 - DNA, 12 bp, Artificial Sequence
  Oligonucleotide primer for the detection of SNP TSC0009986
tatataaaagag

SEQ ID NO: 281670 - DNA, 12 bp, Artificial Sequence
  Oligonucleotide primer for the detection of SNP TSC0009987
ttatatatcttt

SEQ ID NO: 281671 - DNA, 12 bp, Artificial Sequence
  Oligonucleotide primer for the detection of SNP TSC0009987
agtggggtattg

SEQ ID NO: 281672 - DNA, 12 bp, Artificial Sequence
  Oligonucleotide primer for the detection of SNP TSC0009989
aaatctcatctt

SEQ ID NO: 281673 - DNA, 12 bp, Artificial Sequence
  Oligonucleotide primer for the detection of SNP TSC0009989
ttggggattata

SEQ ID NO: 281674 - DNA, 12 bp, Artificial Sequence
  Oligonucleotide primer for the detection of SNP TSC0009991
ccctactcataa

SEQ ID NO: 281675 - DNA, 12 bp, Artificial Sequence
  Oligonucleotide primer for the detection of SNP TSC0009991
ttttgtttatga

SEQ ID NO: 281676 - DNA, 12 bp, Artificial Sequence
  Oligonucleotide primer for the detection of SNP TSC0009993
aaaaaaacataa

SEQ ID NO: 281677 - DNA, 12 bp, Artificial Sequence
  Oligonucleotide primer for the detection of SNP TSC0009993
gttttagttttt

SEQ ID NO: 281678 - DNA, 12 bp, Artificial Sequence
  Oligonucleotide primer for the detection of SNP TSC0009993
tactttaatttc

SEQ ID NO: 281679 - DNA, 12 bp, Artificial Sequence
  Oligonucleotide primer for the detection of SNP TSC0009993
gaaggaatatgg

SEQ ID NO: 281680 - DNA, 12 bp, Artificial Sequence
  Oligonucleotide primer for the detection of SNP TSC0009994
ataaaacataat

SEQ ID NO: 281681 - DNA, 12 bp, Artificial Sequence
  Oligonucleotide primer for the detection of SNP TSC0009994
ataaaacgtaat

SEQ ID NO: 281682 - DNA, 12 bp, Artificial Sequence
  Oligonucleotide primer for the detection of SNP TSC0009995
ctacaaaataat

SEQ ID NO: 281683 - DNA, 12 bp, Artificial Sequence
  Oligonucleotide primer for the detection of SNP TSC0009995
aaatggggataa

SEQ ID NO: 281684 - DNA, 12 bp, Artificial Sequence
  Oligonucleotide primer for the detection of SNP TSC0009996
cttacacaactt

SEQ ID NO: 281685 - DNA, 12 bp, Artificial Sequence
  Oligonucleotide primer for the detection of SNP TSC0009996
tggttattagga

SEQ ID NO: 281686 - DNA, 12 bp, Artificial Sequence
  Oligonucleotide primer for the detection of SNP TSC0009997
tactccttaaaa

SEQ ID NO: 281687 - DNA, 12 bp, Artificial Sequence
  Oligonucleotide primer for the detection of SNP TSC0009997
gaaaaaatgatt

SEQ ID NO: 281688 - DNA, 12 bp, Artificial Sequence
  Oligonucleotide primer for the detection of SNP TSC0009997
aattgttttttg

SEQ ID NO: 281689 - DNA, 12 bp, Artificial Sequence
  Oligonucleotide primer for the detection of SNP TSC0009999
aactctcttaaa

SEQ ID NO: 281690 - DNA, 12 bp, Artificial Sequence
  Oligonucleotide primer for the detection of SNP TSC0009999
gttattggagtg

SEQ ID NO: 281691 - DNA, 12 bp, Artificial Sequence
  Oligonucleotide primer for the detection of SNP TSC0009999
ccactaaaataa

SEQ ID NO: 281692 - DNA, 12 bp, Artificial Sequence
  Oligonucleotide primer for the detection of SNP TSC0010000
atctaaaataca

SEQ ID NO: 281693 - DNA, 12 bp, Artificial Sequence
  Oligonucleotide primer for the detection of SNP TSC0010000
tgttaattattt

SEQ ID NO: 281694 - DNA, 12 bp, Artificial Sequence
  Oligonucleotide primer for the detection of SNP TSC0010000
tactaattattt

SEQ ID NO: 281695 - DNA, 12 bp, Artificial Sequence
  Oligonucleotide primer for the detection of SNP TSC0010000
atttaaaatata

SEQ ID NO: 281696 - DNA, 12 bp, Artificial Sequence
  Oligonucleotide primer for the detection of SNP TSC0010001
aactaaatcaac

SEQ ID NO: 281697 - DNA, 12 bp, Artificial Sequence
  Oligonucleotide primer for the detection of SNP TSC0010001
gatttatgtgta

SEQ ID NO: 281698 - DNA, 12 bp, Artificial Sequence
  Oligonucleotide primer for the detection of SNP TSC0010001
gatttacgtgta

SEQ ID NO: 281699 - DNA, 12 bp, Artificial Sequence
  Oligonucleotide primer for the detection of SNP TSC0010001
aatccacatata

SEQ ID NO: 281700 - DNA, 12 bp, Artificial Sequence
  Oligonucleotide primer for the detection of SNP TSC0010001
aatccacgtata

SEQ ID NO: 281701 - DNA, 12 bp, Artificial Sequence
  Oligonucleotide primer for the detection of SNP TSC0010001
gatccacatata

SEQ ID NO: 281702 - DNA, 12 bp, Artificial Sequence
  Oligonucleotide primer for the detection of SNP TSC0010001
gatccacgtata

SEQ ID NO: 281703 - DNA, 12 bp, Artificial Sequence
  Oligonucleotide primer for the detection of SNP TSC0010001
aattaggttaat

SEQ ID NO: 281704 - DNA, 12 bp, Artificial Sequence
  Oligonucleotide primer for the detection of SNP TSC0010002
ctaaaaactaac

SEQ ID NO: 281705 - DNA, 12 bp, Artificial Sequence
  Oligonucleotide primer for the detection of SNP TSC0010002
attttagattta

SEQ ID NO: 281706 - DNA, 12 bp, Artificial Sequence
  Oligonucleotide primer for the detection of SNP TSC0010005
aatatatcataa

SEQ ID NO: 281707 - DNA, 12 bp, Artificial Sequence
  Oligonucleotide primer for the detection of SNP TSC0010005
tttatctattat

SEQ ID NO: 281708 - DNA, 12 bp, Artificial Sequence
  Oligonucleotide primer for the detection of SNP TSC0010006
aaaaatcaaact

SEQ ID NO: 281709 - DNA, 12 bp, Artificial Sequence
  Oligonucleotide primer for the detection of SNP TSC0010006
aaaaatcgaact

SEQ ID NO: 281710 - DNA, 12 bp, Artificial Sequence
  Oligonucleotide primer for the detection of SNP TSC0010006
atgatatatttt

SEQ ID NO: 281711 - DNA, 12 bp, Artificial Sequence
  Oligonucleotide primer for the detection of SNP TSC0010006
tataatatatct

SEQ ID NO: 281712 - DNA, 12 bp, Artificial Sequence
  Oligonucleotide primer for the detection of SNP TSC0010006
aagagttgagtt

SEQ ID NO: 281713 - DNA, 12 bp, Artificial Sequence
  Oligonucleotide primer for the detection of SNP TSC0010006
aagagtcgagtt

SEQ ID NO: 281714 - DNA, 12 bp, Artificial Sequence
  Oligonucleotide primer for the detection of SNP TSC0010012
taaacacccatt

SEQ ID NO: 281715 - DNA, 12 bp, Artificial Sequence
  Oligonucleotide primer for the detection of SNP TSC0010012
taaacgcccatt

SEQ ID NO: 281716 - DNA, 12 bp, Artificial Sequence
  Oligonucleotide primer for the detection of SNP TSC0010012
attaatatttta

SEQ ID NO: 281717 - DNA, 12 bp, Artificial Sequence
  Oligonucleotide primer for the detection of SNP TSC0010014
accaccaaacca

SEQ ID NO: 281718 - DNA, 12 bp, Artificial Sequence
  Oligonucleotide primer for the detection of SNP TSC0010014
accgccaaacca

SEQ ID NO: 281719 - DNA, 12 bp, Artificial Sequence
  Oligonucleotide primer for the detection of SNP TSC0010014
ttggttgttgtt

SEQ ID NO: 281720 - DNA, 12 bp, Artificial Sequence
  Oligonucleotide primer for the detection of SNP TSC0010014
ctaattattact

SEQ ID NO: 281721 - DNA, 12 bp, Artificial Sequence
  Oligonucleotide primer for the detection of SNP TSC0010014
attgttaaatta

SEQ ID NO: 281722 - DNA, 12 bp, Artificial Sequence
  Oligonucleotide primer for the detection of SNP TSC0010014
atcgttaaatta

SEQ ID NO: 281723 - DNA, 12 bp, Artificial Sequence
  Oligonucleotide primer for the detection of SNP TSC0010015
aaaaaaaaaatc

SEQ ID NO: 281724 - DNA, 12 bp, Artificial Sequence
  Oligonucleotide primer for the detection of SNP TSC0010015
taaattagaata

SEQ ID NO: 281725 - DNA, 12 bp, Artificial Sequence
  Oligonucleotide primer for the detection of SNP TSC0010016
cccttaaactat

SEQ ID NO: 281726 - DNA, 12 bp, Artificial Sequence
  Oligonucleotide primer for the detection of SNP TSC0010016
agggaggagtaa

SEQ ID NO: 281727 - DNA, 12 bp, Artificial Sequence
  Oligonucleotide primer for the detection of SNP TSC0010018
tatatattttca

SEQ ID NO: 281728 - DNA, 12 bp, Artificial Sequence
  Oligonucleotide primer for the detection of SNP TSC0010018
aagatagttttt

SEQ ID NO: 281729 - DNA, 12 bp, Artificial Sequence
  Oligonucleotide primer for the detection of SNP TSC0010018
aaaacaatcttt

SEQ ID NO: 281730 - DNA, 12 bp, Artificial Sequence
  Oligonucleotide primer for the detection of SNP TSC0010022
ataatataactt

SEQ ID NO: 281731 - DNA, 12 bp, Artificial Sequence
  Oligonucleotide primer for the detection of SNP TSC0010022
ttttattgagta

SEQ ID NO: 281732 - DNA, 12 bp, Artificial Sequence
  Oligonucleotide primer for the detection of SNP TSC0010022
ctttattaaaca

SEQ ID NO: 281733 - DNA, 12 bp, Artificial Sequence
  Oligonucleotide primer for the detection of SNP TSC0010022
gtgatatgattt

SEQ ID NO: 281734 - DNA, 12 bp, Artificial Sequence
  Oligonucleotide primer for the detection of SNP TSC0010023
agaaggggaaag

SEQ ID NO: 281735 - DNA, 12 bp, Artificial Sequence
  Oligonucleotide primer for the detection of SNP TSC0010036
aaccccattata

SEQ ID NO: 281736 - DNA, 12 bp, Artificial Sequence
  Oligonucleotide primer for the detection of SNP TSC0010036
tttttatttaga

SEQ ID NO: 281737 - DNA, 12 bp, Artificial Sequence
  Oligonucleotide primer for the detection of SNP TSC0010036
tcccacttaaaa

SEQ ID NO: 281738 - DNA, 12 bp, Artificial Sequence
  Oligonucleotide primer for the detection of SNP TSC0010036
aagttttattat

SEQ ID NO: 281739 - DNA, 12 bp, Artificial Sequence
  Oligonucleotide primer for the detection of SNP TSC0010039
caatttatcctt

SEQ ID NO: 281740 - DNA, 12 bp, Artificial Sequence
  Oligonucleotide primer for the detection of SNP TSC0010039
cgatttatcctt

SEQ ID NO: 281741 - DNA, 12 bp, Artificial Sequence
  Oligonucleotide primer for the detection of SNP TSC0010041
aattaactaaaa

SEQ ID NO: 281742 - DNA, 12 bp, Artificial Sequence
  Oligonucleotide primer for the detection of SNP TSC0010041
tgtttaaataat

SEQ ID NO: 281743 - DNA, 12 bp, Artificial Sequence
  Oligonukleotid-Primer
tatccaaacaac

SEQ ID NO: 281744 - DNA, 12 bp, Artificial Sequence
  Oligonucleotide primer for the detection of SNP TSC0010041
gattggttgaaa

SEQ ID NO: 281745 - DNA, 12 bp, Artificial Sequence
  Oligonucleotide primer for the detection of SNP TSC0010042
tccatcttatct

SEQ ID NO: 281746 - DNA, 12 bp, Artificial Sequence
  Oligonucleotide primer for the detection of SNP TSC0010042
ttttttagattg

SEQ ID NO: 281747 - DNA, 12 bp, Artificial Sequence
  Oligonukleotid-Primer
caaactatcatt

SEQ ID NO: 281748 - DNA, 12 bp, Artificial Sequence
  Oligonucleotide primer for the detection of SNP TSC0010046
tttaataaattt

SEQ ID NO: 281749 - DNA, 12 bp, Artificial Sequence
  Oligonucleotide primer for the detection of SNP TSC0010046
tctaataaactc

SEQ ID NO: 281750 - DNA, 12 bp, Artificial Sequence
  Oligonucleotide primer for the detection of SNP TSC0010046
taaattgttatt

SEQ ID NO: 281751 - DNA, 12 bp, Artificial Sequence
  Oligonucleotide primer for the detection of SNP TSC0010047
attttcctctaa

SEQ ID NO: 281752 - DNA, 12 bp, Artificial Sequence
  Oligonucleotide primer for the detection of SNP TSC0010047
aggtttgtttgg

SEQ ID NO: 281753 - DNA, 12 bp, Artificial Sequence
  Oligonucleotide primer for the detection of SNP TSC0010049
tatcattcaact

SEQ ID NO: 281754 - DNA, 12 bp, Artificial Sequence
  Oligonucleotide primer for the detection of SNP TSC0010049
ttatttttttga

SEQ ID NO: 281755 - DNA, 12 bp, Artificial Sequence
  Oligonukleotid-Primer
cattaaaaccta

SEQ ID NO: 281756 - DNA, 12 bp, Artificial Sequence
  Oligonucleotide primer for the detection of SNP TSC0010051
tttttttggggg

SEQ ID NO: 281757 - DNA, 12 bp, Artificial Sequence
  Oligonucleotide primer for the detection of SNP TSC0010051
ttcttttaaaaa

SEQ ID NO: 281758 - DNA, 12 bp, Artificial Sequence
  Oligonucleotide primer for the detection of SNP TSC0010051
attggggtttgt

SEQ ID NO: 281759 - DNA, 12 bp, Artificial Sequence
  Oligonucleotide primer for the detection of SNP TSC0010052
ttttaaattaat

SEQ ID NO: 281760 - DNA, 12 bp, Artificial Sequence
  Oligonucleotide primer for the detection of SNP TSC0010052
atgttgatataa

SEQ ID NO: 281761 - DNA, 12 bp, Artificial Sequence
  Oligonucleotide primer for the detection of SNP TSC0010052
atattaatataa

SEQ ID NO: 281762 - DNA, 12 bp, Artificial Sequence
  Oligonucleotide primer for the detection of SNP TSC0010052
ttaaattgattt

SEQ ID NO: 281763 - DNA, 12 bp, Artificial Sequence
  Oligonucleotide primer for the detection of SNP TSC0010053
ataataattttt

SEQ ID NO: 281764 - DNA, 12 bp, Artificial Sequence
  Oligonucleotide primer for the detection of SNP TSC0010053
aaatatattttt

SEQ ID NO: 281765 - DNA, 12 bp, Artificial Sequence
  Oligonucleotide primer for the detection of SNP TSC0010054
atcaaaatttcc

SEQ ID NO: 281766 - DNA, 12 bp, Artificial Sequence
  Oligonucleotide primer for the detection of SNP TSC0010054
ttaagagtttta

SEQ ID NO: 281767 - DNA, 12 bp, Artificial Sequence
  Oligonucleotide primer for the detection of SNP TSC0010055
aaaaaactttaa

SEQ ID NO: 281768 - DNA, 12 bp, Artificial Sequence
  Oligonucleotide primer for the detection of SNP TSC0010055
tttggagttatt

SEQ ID NO: 281769 - DNA, 12 bp, Artificial Sequence
  Oligonucleotide primer for the detection of SNP TSC0010055
ggaaattttgat

SEQ ID NO: 281770 - DNA, 12 bp, Artificial Sequence
  Oligonucleotide primer for the detection of SNP TSC0010056
caataactttct

SEQ ID NO: 281771 - DNA, 12 bp, Artificial Sequence
  Oligonucleotide primer for the detection of SNP TSC0010056
aaattattatat

SEQ ID NO: 281772 - DNA, 12 bp, Artificial Sequence
  Oligonucleotide primer for the detection of SNP TSC0010056
aaatcactatac

SEQ ID NO: 281773 - DNA, 12 bp, Artificial Sequence
  Oligonucleotide primer for the detection of SNP TSC0010056
tagtgatttttt

SEQ ID NO: 281774 - DNA, 12 bp, Artificial Sequence
  Oligonucleotide primer for the detection of SNP TSC0010060
aataattttaaa

SEQ ID NO: 281775 - DNA, 12 bp, Artificial Sequence
  Oligonucleotide primer for the detection of SNP TSC0010060
ttttaatatttt

SEQ ID NO: 281776 - DNA, 12 bp, Artificial Sequence
  Oligonucleotide primer for the detection of SNP TSC0010060
tcactttcaaca

SEQ ID NO: 281777 - DNA, 12 bp, Artificial Sequence
  Oligonucleotide primer for the detection of SNP TSC0010060
gaatagttttgg

SEQ ID NO: 281778 - DNA, 12 bp, Artificial Sequence
  Oligonucleotide primer for the detection of SNP TSC0010061
aatttcactatt

SEQ ID NO: 281779 - DNA, 12 bp, Artificial Sequence
  Oligonucleotide primer for the detection of SNP TSC0010061
ttaaagtttgtg

SEQ ID NO: 281780 - DNA, 12 bp, Artificial Sequence
  Oligonucleotide primer for the detection of SNP TSC0010062
acaaaacaacaa

SEQ ID NO: 281781 - DNA, 12 bp, Artificial Sequence
  Oligonucleotide primer for the detection of SNP TSC0010062
acaaaacaacga

SEQ ID NO: 281782 - DNA, 12 bp, Artificial Sequence
  Oligonucleotide primer for the detection of SNP TSC0010062
agtagggtattt

SEQ ID NO: 281783 - DNA, 12 bp, Artificial Sequence
  Oligonucleotide primer for the detection of SNP TSC0010062
acaaaacatcca

SEQ ID NO: 281784 - DNA, 12 bp, Artificial Sequence
  Oligonucleotide primer for the detection of SNP TSC0010062
tataaagtagtg

SEQ ID NO: 281785 - DNA, 12 bp, Artificial Sequence
  Oligonucleotide primer for the detection of SNP TSC0010062
tataaagtagcg

SEQ ID NO: 281786 - DNA, 12 bp, Artificial Sequence
  Oligonucleotide primer for the detection of SNP TSC0010063
ctaccaataaac

SEQ ID NO: 281787 - DNA, 12 bp, Artificial Sequence
  Oligonucleotide primer for the detection of SNP TSC0010063
tggagtttggga

SEQ ID NO: 281788 - DNA, 12 bp, Artificial Sequence
  Oligonucleotide primer for the detection of SNP TSC0010063
tggagttcggga

SEQ ID NO: 281789 - DNA, 12 bp, Artificial Sequence
  Oligonucleotide primer for the detection of SNP TSC0010065
aaaacacacaaa

SEQ ID NO: 281790 - DNA, 12 bp, Artificial Sequence
  Oligonucleotide primer for the detection of SNP TSC0010065
taaaagttatat

SEQ ID NO: 281791 - DNA, 12 bp, Artificial Sequence
  Oligonucleotide primer for the detection of SNP TSC0010065
ccaaaaactata

SEQ ID NO: 281792 - DNA, 12 bp, Artificial Sequence
  Oligonucleotide primer for the detection of SNP TSC0010065
gagagtatatag

SEQ ID NO: 281793 - DNA, 12 bp, Artificial Sequence
  Oligonucleotide primer for the detection of SNP TSC0010075
ctattttccatt

SEQ ID NO: 281794 - DNA, 12 bp, Artificial Sequence
  Oligonucleotide primer for the detection of SNP TSC0010075
ttatagtataga

SEQ ID NO: 281795 - DNA, 12 bp, Artificial Sequence
  Oligonucleotide primer for the detection of SNP TSC0010075
tcataacacaaa

SEQ ID NO: 281796 - DNA, 12 bp, Artificial Sequence
  Oligonucleotide primer for the detection of SNP TSC0010076
tatttttaattt

SEQ ID NO: 281797 - DNA, 12 bp, Artificial Sequence
  Oligonucleotide primer for the detection of SNP TSC0010076
attaataaaatg

SEQ ID NO: 281798 - DNA, 12 bp, Artificial Sequence
  Oligonucleotide primer for the detection of SNP TSC0010077
ccaaaatcataa

SEQ ID NO: 281799 - DNA, 12 bp, Artificial Sequence
  Oligonucleotide primer for the detection of SNP TSC0010077
ggtttggatgtt

SEQ ID NO: 281800 - DNA, 12 bp, Artificial Sequence
  Oligonucleotide primer for the detection of SNP TSC0010077
ggttcggatgtt

SEQ ID NO: 281801 - DNA, 12 bp, Artificial Sequence
  Oligonucleotide primer for the detection of SNP TSC0010077
aacccaaatatc

SEQ ID NO: 281802 - DNA, 12 bp, Artificial Sequence
  Oligonucleotide primer for the detection of SNP TSC0010077
aacccgaatatc

SEQ ID NO: 281803 - DNA, 12 bp, Artificial Sequence
  Oligonucleotide primer for the detection of SNP TSC0010077
ttaagattatgg

SEQ ID NO: 281804 - DNA, 12 bp, Artificial Sequence
  Oligonucleotide primer for the detection of SNP TSC0010078
tataaaaaacga

SEQ ID NO: 281805 - DNA, 12 bp, Artificial Sequence
  Oligonucleotide primer for the detection of SNP TSC0010078
gagtttatggat

SEQ ID NO: 281806 - DNA, 12 bp, Artificial Sequence
  Oligonucleotide primer for the detection of SNP TSC0010078
aaacccataaat

SEQ ID NO: 281807 - DNA, 12 bp, Artificial Sequence
  Oligonucleotide primer for the detection of SNP TSC0010078
tgtggagagtga

SEQ ID NO: 281808 - DNA, 12 bp, Artificial Sequence
  Oligonucleotide primer for the detection of SNP TSC0010078
tgtggagagcga

SEQ ID NO: 281809 - DNA, 12 bp, Artificial Sequence
  Oligonucleotide primer for the detection of SNP TSC0010079
tcataattccac

SEQ ID NO: 281810 - DNA, 12 bp, Artificial Sequence
  Oligonucleotide primer for the detection of SNP TSC0010079
gtttttttagtt

SEQ ID NO: 281811 - DNA, 12 bp, Artificial Sequence
  Oligonucleotide primer for the detection of SNP TSC0010079
ccttcccaacca

SEQ ID NO: 281812 - DNA, 12 bp, Artificial Sequence
  Oligonucleotide primer for the detection of SNP TSC0010079
ttatagttttat

SEQ ID NO: 281813 - DNA, 12 bp, Artificial Sequence
  Oligonucleotide primer for the detection of SNP TSC0010080
atacatacaatt

SEQ ID NO: 281814 - DNA, 12 bp, Artificial Sequence
  Oligonucleotide primer for the detection of SNP TSC0010080
atgataggtaag

SEQ ID NO: 281815 - DNA, 12 bp, Artificial Sequence
  Oligonucleotide primer for the detection of SNP TSC0010083
taaaaaaataat

SEQ ID NO: 281816 - DNA, 12 bp, Artificial Sequence
  Oligonucleotide primer for the detection of SNP TSC0010083
tttattaattta

SEQ ID NO: 281817 - DNA, 12 bp, Artificial Sequence
  Oligonucleotide primer for the detection of SNP TSC0010083
tctatcaatcca

SEQ ID NO: 281818 - DNA, 12 bp, Artificial Sequence
  Oligonucleotide primer for the detection of SNP TSC0010083
tagaaggatgat

SEQ ID NO: 281819 - DNA, 12 bp, Artificial Sequence
  Oligonucleotide primer for the detection of SNP TSC0010087
ggtattttgttt

SEQ ID NO: 281820 - DNA, 12 bp, Artificial Sequence
  Oligonucleotide primer for the detection of SNP TSC0010087
aaaataccttac

SEQ ID NO: 281821 - DNA, 12 bp, Artificial Sequence
  Oligonucleotide primer for the detection of SNP TSC0010087
gaaggtgaaagg

SEQ ID NO: 281822 - DNA, 12 bp, Artificial Sequence
  Oligonucleotide primer for the detection of SNP TSC0010088
caaacattccca

SEQ ID NO: 281823 - DNA, 12 bp, Artificial Sequence
  Oligonucleotide primer for the detection of SNP TSC0010088
tagaagaagata

SEQ ID NO: 281824 - DNA, 12 bp, Artificial Sequence
  Oligonucleotide primer for the detection of SNP TSC0010089
aaccaatcaaat

SEQ ID NO: 281825 - DNA, 12 bp, Artificial Sequence
  Oligonucleotide primer for the detection of SNP TSC0010089
gattaattaaat

SEQ ID NO: 281826 - DNA, 12 bp, Artificial Sequence
  Oligonucleotide primer for the detection of SNP TSC0010093
aaatacttaacc

SEQ ID NO: 281827 - DNA, 12 bp, Artificial Sequence
  Oligonucleotide primer for the detection of SNP TSC0010093
atttgttaaatg

SEQ ID NO: 281828 - DNA, 12 bp, Artificial Sequence
  Oligonucleotide primer for the detection of SNP TSC0010097
aaattaccactt

SEQ ID NO: 281829 - DNA, 12 bp, Artificial Sequence
  Oligonucleotide primer for the detection of SNP TSC0010097
aattattttgaa

SEQ ID NO: 281830 - DNA, 12 bp, Artificial Sequence
  Oligonucleotide primer for the detection of SNP TSC0010097
aattaccttaaa

SEQ ID NO: 281831 - DNA, 12 bp, Artificial Sequence
  Oligonucleotide primer for the detection of SNP TSC0010097
aagttattattt

SEQ ID NO: 281832 - DNA, 12 bp, Artificial Sequence
  Oligonucleotide primer for the detection of SNP TSC0010099
tacctttttttt

SEQ ID NO: 281833 - DNA, 12 bp, Artificial Sequence
  Oligonucleotide primer for the detection of SNP TSC0010099
tttgtggggggg

SEQ ID NO: 281834 - DNA, 12 bp, Artificial Sequence
  Oligonucleotide primer for the detection of SNP TSC0010101
ataacttaactt

SEQ ID NO: 281835 - DNA, 12 bp, Artificial Sequence
  Oligonucleotide primer for the detection of SNP TSC0010101
tttttagtggaa

SEQ ID NO: 281836 - DNA, 12 bp, Artificial Sequence
  Oligonucleotide primer for the detection of SNP TSC0010102
aactcacaattc

SEQ ID NO: 281837 - DNA, 12 bp, Artificial Sequence
  Oligonucleotide primer for the detection of SNP TSC0010104
acatatataacc

SEQ ID NO: 281838 - DNA, 12 bp, Artificial Sequence
  Oligonucleotide primer for the detection of SNP TSC0010104
ggttgtgttttt

SEQ ID NO: 281839 - DNA, 12 bp, Artificial Sequence
  Oligonucleotide primer for the detection of SNP TSC0010104
ggtcgtgttttt

SEQ ID NO: 281840 - DNA, 12 bp, Artificial Sequence
  Oligonucleotide primer for the detection of SNP TSC0010104
aaccatattctt

SEQ ID NO: 281841 - DNA, 12 bp, Artificial Sequence
  Oligonucleotide primer for the detection of SNP TSC0010104
aaccgtattctt

SEQ ID NO: 281842 - DNA, 12 bp, Artificial Sequence
  Oligonucleotide primer for the detection of SNP TSC0010104
gtatatatggtt

SEQ ID NO: 281843 - DNA, 12 bp, Artificial Sequence
  Oligonucleotide primer for the detection of SNP TSC0010107
aaattctacctc

SEQ ID NO: 281844 - DNA, 12 bp, Artificial Sequence
  Oligonukleotid-Primer
attatatgtaga

SEQ ID NO: 281845 - DNA, 12 bp, Artificial Sequence
  Oligonucleotide primer for the detection of SNP TSC0010108
gtttgttttaag

SEQ ID NO: 281846 - DNA, 12 bp, Artificial Sequence
  Oligonucleotide primer for the detection of SNP TSC0010115
aactcaaaaacc

SEQ ID NO: 281847 - DNA, 12 bp, Artificial Sequence
  Oligonucleotide primer for the detection of SNP TSC0010115
gtagggtaagga

SEQ ID NO: 281848 - DNA, 12 bp, Artificial Sequence
  Oligonucleotide primer for the detection of SNP TSC0010116
tatacctcctta

SEQ ID NO: 281849 - DNA, 12 bp, Artificial Sequence
  Oligonucleotide primer for the detection of SNP TSC0010116
ttttaagatttt

SEQ ID NO: 281850 - DNA, 12 bp, Artificial Sequence
  Oligonucleotide primer for the detection of SNP TSC0010116
cttcaaaacctt

SEQ ID NO: 281851 - DNA, 12 bp, Artificial Sequence
  Oligonucleotide primer for the detection of SNP TSC0010116
tatgttttttta

SEQ ID NO: 281852 - DNA, 12 bp, Artificial Sequence
  Oligonukleotid-Primer
aaccccaaccat

SEQ ID NO: 281853 - DNA, 12 bp, Artificial Sequence
  Oligonucleotide primer for the detection of SNP TSC0010117
ttattttagggt

SEQ ID NO: 281854 - DNA, 12 bp, Artificial Sequence
  Oligonucleotide primer for the detection of SNP TSC0010117
tcatcccaaaac

SEQ ID NO: 281855 - DNA, 12 bp, Artificial Sequence
  Oligonucleotide primer for the detection of SNP TSC0010118
ccataaaaatca

SEQ ID NO: 281856 - DNA, 12 bp, Artificial Sequence
  Oligonucleotide primer for the detection of SNP TSC0010118
ccataaaaatcg

SEQ ID NO: 281857 - DNA, 12 bp, Artificial Sequence
  Oligonucleotide primer for the detection of SNP TSC0010118
tggagggtttag

SEQ ID NO: 281858 - DNA, 12 bp, Artificial Sequence
  Oligonucleotide primer for the detection of SNP TSC0010118
taaaaaactcaa

SEQ ID NO: 281859 - DNA, 12 bp, Artificial Sequence
  Oligonucleotide primer for the detection of SNP TSC0010118
ttatgagggttg

SEQ ID NO: 281860 - DNA, 12 bp, Artificial Sequence
  Oligonucleotide primer for the detection of SNP TSC0010118
ttatgagggtcg

SEQ ID NO: 281861 - DNA, 12 bp, Artificial Sequence
  Oligonucleotide primer for the detection of SNP TSC0010119
taaaataacccc

SEQ ID NO: 281862 - DNA, 12 bp, Artificial Sequence
  Oligonucleotide primer for the detection of SNP TSC0010119
tttttgtttaag

SEQ ID NO: 281863 - DNA, 12 bp, Artificial Sequence
  Oligonucleotide primer for the detection of SNP TSC0010121
gattattttgtt

SEQ ID NO: 281864 - DNA, 12 bp, Artificial Sequence
  Oligonucleotide primer for the detection of SNP TSC0010121
gattatttcgtt

SEQ ID NO: 281865 - DNA, 12 bp, Artificial Sequence
  Oligonucleotide primer for the detection of SNP TSC0010121
gattattttgtc

SEQ ID NO: 281866 - DNA, 12 bp, Artificial Sequence
  Oligonucleotide primer for the detection of SNP TSC0010121
gattatttcgtc

SEQ ID NO: 281867 - DNA, 12 bp, Artificial Sequence
  Oligonucleotide primer for the detection of SNP TSC0010121
aattaccccatc

SEQ ID NO: 281868 - DNA, 12 bp, Artificial Sequence
  Oligonucleotide primer for the detection of SNP TSC0010121
aattaccccgtc

SEQ ID NO: 281869 - DNA, 12 bp, Artificial Sequence
  Oligonucleotide primer for the detection of SNP TSC0010121
agtagaggggag

SEQ ID NO: 281870 - DNA, 12 bp, Artificial Sequence
  Oligonucleotide primer for the detection of SNP TSC0010124
cctaaccttttt

SEQ ID NO: 281871 - DNA, 12 bp, Artificial Sequence
  Oligonucleotide primer for the detection of SNP TSC0010125
aaattcaaaacc

SEQ ID NO: 281872 - DNA, 12 bp, Artificial Sequence
  Oligonucleotide primer for the detection of SNP TSC0010125
aaattcgaaacc

SEQ ID NO: 281873 - DNA, 12 bp, Artificial Sequence
  Oligonucleotide primer for the detection of SNP TSC0010127
aatcacaaaact

SEQ ID NO: 281874 - DNA, 12 bp, Artificial Sequence
  Oligonucleotide primer for the detection of SNP TSC0010127
tgtgtgtgtgag

SEQ ID NO: 281875 - DNA, 12 bp, Artificial Sequence
  Oligonucleotide primer for the detection of SNP TSC0010134
cattaaaactat

SEQ ID NO: 281876 - DNA, 12 bp, Artificial Sequence
  Oligonucleotide primer for the detection of SNP TSC0010134
ttgttagggtaa

SEQ ID NO: 281877 - DNA, 12 bp, Artificial Sequence
  Oligonucleotide primer for the detection of SNP TSC0010135
taaacaatatat

SEQ ID NO: 281878 - DNA, 12 bp, Artificial Sequence
  Oligonucleotide primer for the detection of SNP TSC0010135
tacccatcaata

SEQ ID NO: 281879 - DNA, 12 bp, Artificial Sequence
  Oligonucleotide primer for the detection of SNP TSC0010135
tagatagtgtgt

SEQ ID NO: 281880 - DNA, 12 bp, Artificial Sequence
  Oligonucleotide primer for the detection of SNP TSC0010136
tacatatataca

SEQ ID NO: 281881 - DNA, 12 bp, Artificial Sequence
  Oligonucleotide primer for the detection of SNP TSC0010136
tttagtgtaggt

SEQ ID NO: 281882 - DNA, 12 bp, Artificial Sequence
  Oligonucleotide primer for the detection of SNP TSC0010136
tcccaatacaaa

SEQ ID NO: 281883 - DNA, 12 bp, Artificial Sequence
  Oligonucleotide primer for the detection of SNP TSC0010136
tgtatgtgtgta

SEQ ID NO: 281884 - DNA, 12 bp, Artificial Sequence
  Oligonucleotide primer for the detection of SNP TSC0010137
cttttaaaaaat

SEQ ID NO: 281885 - DNA, 12 bp, Artificial Sequence
  Oligonucleotide primer for the detection of SNP TSC0010137
aattttttaaaa

SEQ ID NO: 281886 - DNA, 12 bp, Artificial Sequence
  Oligonucleotide primer for the detection of SNP TSC0010138
tattccccttaa

SEQ ID NO: 281887 - DNA, 12 bp, Artificial Sequence
  Oligonucleotide primer for the detection of SNP TSC0010138
ttgtgggaataa

SEQ ID NO: 281888 - DNA, 12 bp, Artificial Sequence
  Oligonucleotide primer for the detection of SNP TSC0010138
tgttttttttgg

SEQ ID NO: 281889 - DNA, 12 bp, Artificial Sequence
  Oligonucleotide primer for the detection of SNP TSC0010139
cacctccctatt

SEQ ID NO: 281890 - DNA, 12 bp, Artificial Sequence
  Oligonucleotide primer for the detection of SNP TSC0010140
aaaacaaaattt

SEQ ID NO: 281891 - DNA, 12 bp, Artificial Sequence
  Oligonucleotide primer for the detection of SNP TSC0010140
tattaaaatata

SEQ ID NO: 281892 - DNA, 12 bp, Artificial Sequence
  Oligonucleotide primer for the detection of SNP TSC0010143
attaaaatacct

SEQ ID NO: 281893 - DNA, 12 bp, Artificial Sequence
  Oligonucleotide primer for the detection of SNP TSC0010143
gttgtttttata

SEQ ID NO: 281894 - DNA, 12 bp, Artificial Sequence
  Oligonucleotide primer for the detection of SNP TSC0010144
caaaaacctaaa

SEQ ID NO: 281895 - DNA, 12 bp, Artificial Sequence
  Oligonucleotide primer for the detection of SNP TSC0010144
catattctccta

SEQ ID NO: 281896 - DNA, 12 bp, Artificial Sequence
  Oligonucleotide primer for the detection of SNP TSC0010144
tagaagtttagg

SEQ ID NO: 281897 - DNA, 12 bp, Artificial Sequence
  Oligonucleotide primer for the detection of SNP TSC0010145
aatcactataac

SEQ ID NO: 281898 - DNA, 12 bp, Artificial Sequence
  Oligonucleotide primer for the detection of SNP TSC0010145
tgaagtttattt

SEQ ID NO: 281899 - DNA, 12 bp, Artificial Sequence
  Oligonucleotide primer for the detection of SNP TSC0010145
aaaatccattca

SEQ ID NO: 281900 - DNA, 12 bp, Artificial Sequence
  Oligonucleotide primer for the detection of SNP TSC0010145
attattgtagtt

SEQ ID NO: 281901 - DNA, 12 bp, Artificial Sequence
  Oligonucleotide primer for the detection of SNP TSC0010146
aaataaattcct

SEQ ID NO: 281902 - DNA, 12 bp, Artificial Sequence
  Oligonucleotide primer for the detection of SNP TSC0010146
tgtgtgtttaga

SEQ ID NO: 281903 - DNA, 12 bp, Artificial Sequence
  Oligonucleotide primer for the detection of SNP TSC0010147
ctaaactaaaca

SEQ ID NO: 281904 - DNA, 12 bp, Artificial Sequence
  Oligonucleotide primer for the detection of SNP TSC0010147
tgttgttattat

SEQ ID NO: 281905 - DNA, 12 bp, Artificial Sequence
  Oligonucleotide primer for the detection of SNP TSC0010147
atactaccacta

SEQ ID NO: 281906 - DNA, 12 bp, Artificial Sequence
  Oligonucleotide primer for the detection of SNP TSC0010147
tttgggttaagt

SEQ ID NO: 281907 - DNA, 12 bp, Artificial Sequence
  Oligonucleotide primer for the detection of SNP TSC0010151
aaaaactaattc

SEQ ID NO: 281908 - DNA, 12 bp, Artificial Sequence
  Oligonucleotide primer for the detection of SNP TSC0010151
atgtaattatag

SEQ ID NO: 281909 - DNA, 12 bp, Artificial Sequence
  Oligonucleotide primer for the detection of SNP TSC0010151
acgtaattatag

SEQ ID NO: 281910 - DNA, 12 bp, Artificial Sequence
  Oligonucleotide primer for the detection of SNP TSC0010152
aacattcaaaat

SEQ ID NO: 281911 - DNA, 12 bp, Artificial Sequence
  Oligonucleotide primer for the detection of SNP TSC0010152
tatattttgaag

SEQ ID NO: 281912 - DNA, 12 bp, Artificial Sequence
  Oligonucleotide primer for the detection of SNP TSC0010155
ttgtggattagg

SEQ ID NO: 281913 - DNA, 12 bp, Artificial Sequence
  Oligonucleotide primer for the detection of SNP TSC0010156
ctccatcttcac

SEQ ID NO: 281914 - DNA, 12 bp, Artificial Sequence
  Oligonucleotide primer for the detection of SNP TSC0010156
attatttgaagg

SEQ ID NO: 281915 - DNA, 12 bp, Artificial Sequence
  Oligonucleotide primer for the detection of SNP TSC0010156
attattcgaagg

SEQ ID NO: 281916 - DNA, 12 bp, Artificial Sequence
  Oligonucleotide primer for the detection of SNP TSC0010157
tttaaaatactt

SEQ ID NO: 281917 - DNA, 12 bp, Artificial Sequence
  Oligonucleotide primer for the detection of SNP TSC0010157
gttttttgaaga

SEQ ID NO: 281918 - DNA, 12 bp, Artificial Sequence
  Oligonucleotide primer for the detection of SNP TSC0010157
atcttctaaaaa

SEQ ID NO: 281919 - DNA, 12 bp, Artificial Sequence
  Oligonucleotide primer for the detection of SNP TSC0010157
tttaaaatgttt

SEQ ID NO: 281920 - DNA, 12 bp, Artificial Sequence
  Oligonucleotide primer for the detection of SNP TSC0010158
ctaatataaata

SEQ ID NO: 281921 - DNA, 12 bp, Artificial Sequence
  Oligonucleotide primer for the detection of SNP TSC0010158
agtaggaaaaag

SEQ ID NO: 281922 - DNA, 12 bp, Artificial Sequence
  Oligonucleotide primer for the detection of SNP TSC0010158
tgatataaatgt

SEQ ID NO: 281923 - DNA, 12 bp, Artificial Sequence
  Oligonucleotide primer for the detection of SNP TSC0010160
aaatatatacat

SEQ ID NO: 281924 - DNA, 12 bp, Artificial Sequence
  Oligonucleotide primer for the detection of SNP TSC0010160
atgtttattaaa

SEQ ID NO: 281925 - DNA, 12 bp, Artificial Sequence
  Oligonucleotide primer for the detection of SNP TSC0010163
catctacctatt

SEQ ID NO: 281926 - DNA, 12 bp, Artificial Sequence
  Oligonucleotide primer for the detection of SNP TSC0010163
ttttagaattgg

SEQ ID NO: 281927 - DNA, 12 bp, Artificial Sequence
  Oligonucleotide primer for the detection of SNP TSC0010164
ttcactttccat

SEQ ID NO: 281928 - DNA, 12 bp, Artificial Sequence
  Oligonucleotide primer for the detection of SNP TSC0010164
ttcactttccgt

SEQ ID NO: 281929 - DNA, 12 bp, Artificial Sequence
  Oligonucleotide primer for the detection of SNP TSC0010164
gttatataatta

SEQ ID NO: 281930 - DNA, 12 bp, Artificial Sequence
  Oligonucleotide primer for the detection of SNP TSC0010165
tcaactacaacc

SEQ ID NO: 281931 - DNA, 12 bp, Artificial Sequence
  Oligonucleotide primer for the detection of SNP TSC0010165
tcaactacgacc

SEQ ID NO: 281932 - DNA, 12 bp, Artificial Sequence
  Oligonucleotide primer for the detection of SNP TSC0010165
ttgtttgtggga

SEQ ID NO: 281933 - DNA, 12 bp, Artificial Sequence
  Oligonucleotide primer for the detection of SNP TSC0010165
ttgttcgtggga

SEQ ID NO: 281934 - DNA, 12 bp, Artificial Sequence
  Oligonucleotide primer for the detection of SNP TSC0010172
taaaaacaatca

SEQ ID NO: 281935 - DNA, 12 bp, Artificial Sequence
  Oligonucleotide primer for the detection of SNP TSC0010172
ataaggtgtttt

SEQ ID NO: 281936 - DNA, 12 bp, Artificial Sequence
  Oligonucleotide primer for the detection of SNP TSC0010172
taaaatactcta

SEQ ID NO: 281937 - DNA, 12 bp, Artificial Sequence
  Oligonucleotide primer for the detection of SNP TSC0010172
taggagtaatta

SEQ ID NO: 281938 - DNA, 12 bp, Artificial Sequence
  Oligonucleotide primer for the detection of SNP TSC0010180
caatcctctatt

SEQ ID NO: 281939 - DNA, 12 bp, Artificial Sequence
  Oligonucleotide primer for the detection of SNP TSC0010182
aaaaaaactatt

SEQ ID NO: 281940 - DNA, 12 bp, Artificial Sequence
  Oligonucleotide primer for the detection of SNP TSC0010182
ggaaattgggaa

SEQ ID NO: 281941 - DNA, 12 bp, Artificial Sequence
  Oligonucleotide primer for the detection of SNP TSC0010182
aaaggaattatt

SEQ ID NO: 281942 - DNA, 12 bp, Artificial Sequence
  Oligonucleotide primer for the detection of SNP TSC0010183
tatttcccctat

SEQ ID NO: 281943 - DNA, 12 bp, Artificial Sequence
  Oligonucleotide primer for the detection of SNP TSC0010183
aggaagtgatgg

SEQ ID NO: 281944 - DNA, 12 bp, Artificial Sequence
  Oligonucleotide primer for the detection of SNP TSC0010184
atgtgaggtaat

SEQ ID NO: 281945 - DNA, 12 bp, Artificial Sequence
  Oligonucleotide primer for the detection of SNP TSC0010184
tataaaacaaca

SEQ ID NO: 281946 - DNA, 12 bp, Artificial Sequence
  Oligonucleotide primer for the detection of SNP TSC0010185
catccttaaacc

SEQ ID NO: 281947 - DNA, 12 bp, Artificial Sequence
  Oligonucleotide primer for the detection of SNP TSC0010185
ttggttttggtg

SEQ ID NO: 281948 - DNA, 12 bp, Artificial Sequence
  Oligonucleotide primer for the detection of SNP TSC0010185
ttggtttcggtg

SEQ ID NO: 281949 - DNA, 12 bp, Artificial Sequence
  Oligonucleotide primer for the detection of SNP TSC0010190
ccttaactccct

SEQ ID NO: 281950 - DNA, 12 bp, Artificial Sequence
  Oligonucleotide primer for the detection of SNP TSC0010190
ttttaaatatga

SEQ ID NO: 281951 - DNA, 12 bp, Artificial Sequence
  Oligonucleotide primer for the detection of SNP TSC0010196
ttctaatataaa

SEQ ID NO: 281952 - DNA, 12 bp, Artificial Sequence
  Oligonucleotide primer for the detection of SNP TSC0010196
ttgggttttaag

SEQ ID NO: 281953 - DNA, 12 bp, Artificial Sequence
  Oligonucleotide primer for the detection of SNP TSC0010196
taaatctcaaaa

SEQ ID NO: 281954 - DNA, 12 bp, Artificial Sequence
  Oligonucleotide primer for the detection of SNP TSC0010196
ttgatgtggatt

SEQ ID NO: 281955 - DNA, 12 bp, Artificial Sequence
  Oligonucleotide primer for the detection of SNP TSC0010197
aaatttaatttt

SEQ ID NO: 281956 - DNA, 12 bp, Artificial Sequence
  Oligonucleotide primer for the detection of SNP TSC0010197
aagtttggtttt

SEQ ID NO: 281957 - DNA, 12 bp, Artificial Sequence
  Oligonucleotide primer for the detection of SNP TSC0010202
caaataaaacaa

SEQ ID NO: 281958 - DNA, 12 bp, Artificial Sequence
  Oligonucleotide primer for the detection of SNP TSC0010202
tgtaaatttaat

SEQ ID NO: 281959 - DNA, 12 bp, Artificial Sequence
  Oligonucleotide primer for the detection of SNP TSC0010202
acaaacccaata

SEQ ID NO: 281960 - DNA, 12 bp, Artificial Sequence
  Oligonucleotide primer for the detection of SNP TSC0010202
aaataagataat

SEQ ID NO: 281961 - DNA, 12 bp, Artificial Sequence
  Oligonucleotide primer for the detection of SNP TSC0010202
aaataagataac

SEQ ID NO: 281962 - DNA, 12 bp, Artificial Sequence
  Oligonucleotide primer for the detection of SNP TSC0010203
ccccctaccttc

SEQ ID NO: 281963 - DNA, 12 bp, Artificial Sequence
  Oligonucleotide primer for the detection of SNP TSC0010203
ttttttgtttga

SEQ ID NO: 281964 - DNA, 12 bp, Artificial Sequence
  Oligonucleotide primer for the detection of SNP TSC0010203
ctccctacctaa

SEQ ID NO: 281965 - DNA, 12 bp, Artificial Sequence
  Oligonucleotide primer for the detection of SNP TSC0010205
gattattttttt

SEQ ID NO: 281966 - DNA, 12 bp, Artificial Sequence
  Oligonucleotide primer for the detection of SNP TSC0010205
tattccctcaaa

SEQ ID NO: 281967 - DNA, 12 bp, Artificial Sequence
  Oligonucleotide primer for the detection of SNP TSC0010205
tttggaaaaatt

SEQ ID NO: 281968 - DNA, 12 bp, Artificial Sequence
  Oligonucleotide primer for the detection of SNP TSC0010212
cctcctctctta

SEQ ID NO: 281969 - DNA, 12 bp, Artificial Sequence
  Oligonucleotide primer for the detection of SNP TSC0010212
gaggtgggtggg

SEQ ID NO: 281970 - DNA, 12 bp, Artificial Sequence
  Oligonucleotide primer for the detection of SNP TSC0010213
acaaaaaatccc

SEQ ID NO: 281971 - DNA, 12 bp, Artificial Sequence
  Oligonucleotide primer for the detection of SNP TSC0010213
gataaatggtag

SEQ ID NO: 281972 - DNA, 12 bp, Artificial Sequence
  Oligonucleotide primer for the detection of SNP TSC0010216
caactacaactt

SEQ ID NO: 281973 - DNA, 12 bp, Artificial Sequence
  Oligonucleotide primer for the detection of SNP TSC0010216
atattttttttt

SEQ ID NO: 281974 - DNA, 12 bp, Artificial Sequence
  Oligonucleotide primer for the detection of SNP TSC0010216
acattttttttt

SEQ ID NO: 281975 - DNA, 12 bp, Artificial Sequence
  Oligonucleotide primer for the detection of SNP TSC0010216
taattgtaattt

SEQ ID NO: 281976 - DNA, 12 bp, Artificial Sequence
  Oligonucleotide primer for the detection of SNP TSC0010222
aactcattccaa

SEQ ID NO: 281977 - DNA, 12 bp, Artificial Sequence
  Oligonucleotide primer for the detection of SNP TSC0010222
agtttttgagtt

SEQ ID NO: 281978 - DNA, 12 bp, Artificial Sequence
  Oligonucleotide primer for the detection of SNP TSC0010222
aacttttaaatt

SEQ ID NO: 281979 - DNA, 12 bp, Artificial Sequence
  Oligonucleotide primer for the detection of SNP TSC0010222
aatttattttag

SEQ ID NO: 281980 - DNA, 12 bp, Artificial Sequence
  Oligonucleotide primer for the detection of SNP TSC0010227
tactacctcccc

SEQ ID NO: 281981 - DNA, 12 bp, Artificial Sequence
  Oligonukleotid-Primer
aatgggggttag

SEQ ID NO: 281982 - DNA, 12 bp, Artificial Sequence
  Oligonucleotide primer for the detection of SNP TSC0010233
cctccatataca

SEQ ID NO: 281983 - DNA, 12 bp, Artificial Sequence
  Oligonucleotide primer for the detection of SNP TSC0010233
gtggtggtagat

SEQ ID NO: 281984 - DNA, 12 bp, Artificial Sequence
  Oligonucleotide primer for the detection of SNP TSC0010233
ataataacaaat

SEQ ID NO: 281985 - DNA, 12 bp, Artificial Sequence
  Oligonucleotide primer for the detection of SNP TSC0010233
gtaataacaaat

SEQ ID NO: 281986 - DNA, 12 bp, Artificial Sequence
  Oligonucleotide primer for the detection of SNP TSC0010233
tttttatgtgta

SEQ ID NO: 281987 - DNA, 12 bp, Artificial Sequence
  Oligonucleotide primer for the detection of SNP TSC0010235
attctcatactt

SEQ ID NO: 281988 - DNA, 12 bp, Artificial Sequence
  Oligonucleotide primer for the detection of SNP TSC0010235
atgtttttatta

SEQ ID NO: 281989 - DNA, 12 bp, Artificial Sequence
  Oligonucleotide primer for the detection of SNP TSC0010237
aatacccaatat

SEQ ID NO: 281990 - DNA, 12 bp, Artificial Sequence
  Oligonucleotide primer for the detection of SNP TSC0010237
tgtaatatttgg

SEQ ID NO: 281991 - DNA, 12 bp, Artificial Sequence
  Oligonucleotide primer for the detection of SNP TSC0010237
tataacatttaa

SEQ ID NO: 281992 - DNA, 12 bp, Artificial Sequence
  Oligonucleotide primer for the detection of SNP TSC0010237
agtgtttagtgt

SEQ ID NO: 281993 - DNA, 12 bp, Artificial Sequence
  Oligonucleotide primer for the detection of SNP TSC0010239
acccaatcaacc

SEQ ID NO: 281994 - DNA, 12 bp, Artificial Sequence
  Oligonucleotide primer for the detection of SNP TSC0010239
ggagttaggtag

SEQ ID NO: 281995 - DNA, 12 bp, Artificial Sequence
  Oligonucleotide primer for the detection of SNP TSC0010239
aaaaccaaacaa

SEQ ID NO: 281996 - DNA, 12 bp, Artificial Sequence
  Oligonucleotide primer for the detection of SNP TSC0010239
atttagttagtt

SEQ ID NO: 281997 - DNA, 12 bp, Artificial Sequence
  Oligonucleotide primer for the detection of SNP TSC0010243
aaaatactaaat

SEQ ID NO: 281998 - DNA, 12 bp, Artificial Sequence
  Oligonucleotide primer for the detection of SNP TSC0010243
gtttattttgtg

SEQ ID NO: 281999 - DNA, 12 bp, Artificial Sequence
  Oligonucleotide primer for the detection of SNP TSC0010243
gtttatttcgtg

SEQ ID NO: 282000 - DNA, 12 bp, Artificial Sequence
  Oligonucleotide primer for the detection of SNP TSC0010245
caaatctaaaaa

SEQ ID NO: 282001 - DNA, 12 bp, Artificial Sequence
  Oligonucleotide primer for the detection of SNP TSC0010245
ggtggggtttat

SEQ ID NO: 282002 - DNA, 12 bp, Artificial Sequence
  Oligonucleotide primer for the detection of SNP TSC0010245
aataaaattcac

SEQ ID NO: 282003 - DNA, 12 bp, Artificial Sequence
  Oligonucleotide primer for the detection of SNP TSC0010245
gataaaattcac

SEQ ID NO: 282004 - DNA, 12 bp, Artificial Sequence
  Oligonucleotide primer for the detection of SNP TSC0010245
taggtttggaag

SEQ ID NO: 282005 - DNA, 12 bp, Artificial Sequence
  Oligonucleotide primer for the detection of SNP TSC0010252
tccaaacccacc

SEQ ID NO: 282006 - DNA, 12 bp, Artificial Sequence
  Oligonucleotide primer for the detection of SNP TSC0010252
ttatatggaaag

SEQ ID NO: 282007 - DNA, 12 bp, Artificial Sequence
  Oligonucleotide primer for the detection of SNP TSC0010253
catccaaaaaac

SEQ ID NO: 282008 - DNA, 12 bp, Artificial Sequence
  Oligonucleotide primer for the detection of SNP TSC0010253
gaagatttttta

SEQ ID NO: 282009 - DNA, 12 bp, Artificial Sequence
  Oligonucleotide primer for the detection of SNP TSC0010272
tttttaaatacc

SEQ ID NO: 282010 - DNA, 12 bp, Artificial Sequence
  Oligonucleotide primer for the detection of SNP TSC0010272
ttagggaaagga

SEQ ID NO: 282011 - DNA, 12 bp, Artificial Sequence
  Oligonucleotide primer for the detection of SNP TSC0010275
atcccttttacc

SEQ ID NO: 282012 - DNA, 12 bp, Artificial Sequence
  Oligonucleotide primer for the detection of SNP TSC0010275
ttagttgatttg

SEQ ID NO: 282013 - DNA, 12 bp, Artificial Sequence
  Oligonucleotide primer for the detection of SNP TSC0010281
ataattcaaatt

SEQ ID NO: 282014 - DNA, 12 bp, Artificial Sequence
  Oligonucleotide primer for the detection of SNP TSC0010281
ttaatattgagg

SEQ ID NO: 282015 - DNA, 12 bp, Artificial Sequence
  Oligonucleotide primer for the detection of SNP TSC0010282
ctaaaaaatctc

SEQ ID NO: 282016 - DNA, 12 bp, Artificial Sequence
  Oligonucleotide primer for the detection of SNP TSC0010282
tgtttaattttg

SEQ ID NO: 282017 - DNA, 12 bp, Artificial Sequence
  Oligonucleotide primer for the detection of SNP TSC0010284
acttaaaaaact

SEQ ID NO: 282018 - DNA, 12 bp, Artificial Sequence
  Oligonucleotide primer for the detection of SNP TSC0010284
atttaagtgatt

SEQ ID NO: 282019 - DNA, 12 bp, Artificial Sequence
  Oligonucleotide primer for the detection of SNP TSC0010284
atttaagcgatt

SEQ ID NO: 282020 - DNA, 12 bp, Artificial Sequence
  Oligonucleotide primer for the detection of SNP TSC0010284
actcaaacaatc

SEQ ID NO: 282021 - DNA, 12 bp, Artificial Sequence
  Oligonucleotide primer for the detection of SNP TSC0010284
actcaaacgatc

SEQ ID NO: 282022 - DNA, 12 bp, Artificial Sequence
  Oligonucleotide primer for the detection of SNP TSC0010284
atttgggaggtt

SEQ ID NO: 282023 - DNA, 12 bp, Artificial Sequence
  Oligonucleotide primer for the detection of SNP TSC0010286
atccttattact

SEQ ID NO: 282024 - DNA, 12 bp, Artificial Sequence
  Oligonucleotide primer for the detection of SNP TSC0010286
ttattgaattaa

SEQ ID NO: 282025 - DNA, 12 bp, Artificial Sequence
  Oligonucleotide primer for the detection of SNP TSC0010296
ctccaatactaa

SEQ ID NO: 282026 - DNA, 12 bp, Artificial Sequence
  Oligonucleotide primer for the detection of SNP TSC0010296
ttaagtttttat

SEQ ID NO: 282027 - DNA, 12 bp, Artificial Sequence
  Oligonucleotide primer for the detection of SNP TSC0010296
ccaaacccccat

SEQ ID NO: 282028 - DNA, 12 bp, Artificial Sequence
  Oligonucleotide primer for the detection of SNP TSC0010296
ttttagtattga

SEQ ID NO: 282029 - DNA, 12 bp, Artificial Sequence
  Oligonucleotide primer for the detection of SNP TSC0010297
atccattaactt

SEQ ID NO: 282030 - DNA, 12 bp, Artificial Sequence
  Oligonucleotide primer for the detection of SNP TSC0010297
gatattttttta

SEQ ID NO: 282031 - DNA, 12 bp, Artificial Sequence
  Oligonucleotide primer for the detection of SNP TSC0010297
aatactcttcca

SEQ ID NO: 282032 - DNA, 12 bp, Artificial Sequence
  Oligonucleotide primer for the detection of SNP TSC0010297
atttattaattt

SEQ ID NO: 282033 - DNA, 12 bp, Artificial Sequence
  Oligonucleotide primer for the detection of SNP TSC0010303
aaataatacctc

SEQ ID NO: 282034 - DNA, 12 bp, Artificial Sequence
  Oligonucleotide primer for the detection of SNP TSC0010303
gttaaaaaagtg

SEQ ID NO: 282035 - DNA, 12 bp, Artificial Sequence
  Oligonucleotide primer for the detection of SNP TSC0010303
gttaaaaaagcg

SEQ ID NO: 282036 - DNA, 12 bp, Artificial Sequence
  Oligonucleotide primer for the detection of SNP TSC0010303
caaaaaaacaaa

SEQ ID NO: 282037 - DNA, 12 bp, Artificial Sequence
  Oligonucleotide primer for the detection of SNP TSC0010303
caaaaaaacgaa

SEQ ID NO: 282038 - DNA, 12 bp, Artificial Sequence
  Oligonucleotide primer for the detection of SNP TSC0010303
atggtgtttttt

SEQ ID NO: 282039 - DNA, 12 bp, Artificial Sequence
  Oligonucleotide primer for the detection of SNP TSC0010304
taataaataatc

SEQ ID NO: 282040 - DNA, 12 bp, Artificial Sequence
  Oligonucleotide primer for the detection of SNP TSC0010304
ttttttgtgatt

SEQ ID NO: 282041 - DNA, 12 bp, Artificial Sequence
  Oligonucleotide primer for the detection of SNP TSC0010304
tctccttataac

SEQ ID NO: 282042 - DNA, 12 bp, Artificial Sequence
  Oligonucleotide primer for the detection of SNP TSC0010304
agtaagtaattt

SEQ ID NO: 282043 - DNA, 12 bp, Artificial Sequence
  Oligonucleotide primer for the detection of SNP TSC0010305
taaatattaaat

SEQ ID NO: 282044 - DNA, 12 bp, Artificial Sequence
  Oligonucleotide primer for the detection of SNP TSC0010305
tagtaataataa

SEQ ID NO: 282045 - DNA, 12 bp, Artificial Sequence
  Oligonucleotide primer for the detection of SNP TSC0010305
caataacaataa

SEQ ID NO: 282046 - DNA, 12 bp, Artificial Sequence
  Oligonucleotide primer for the detection of SNP TSC0010305
taaatgttaggt

SEQ ID NO: 282047 - DNA, 12 bp, Artificial Sequence
  Oligonucleotide primer for the detection of SNP TSC0010306
aatatttaatat

SEQ ID NO: 282048 - DNA, 12 bp, Artificial Sequence
  Oligonucleotide primer for the detection of SNP TSC0010306
atataataggta

SEQ ID NO: 282049 - DNA, 12 bp, Artificial Sequence
  Oligonucleotide primer for the detection of SNP TSC0010306
atataacaaaca

SEQ ID NO: 282050 - DNA, 12 bp, Artificial Sequence
  Oligonucleotide primer for the detection of SNP TSC0010306
aatgtttaatat

SEQ ID NO: 282051 - DNA, 12 bp, Artificial Sequence
  Oligonucleotide primer for the detection of SNP TSC0010307
tactaatatctc

SEQ ID NO: 282052 - DNA, 12 bp, Artificial Sequence
  Oligonucleotide primer for the detection of SNP TSC0010307
gataggttagga

SEQ ID NO: 282053 - DNA, 12 bp, Artificial Sequence
  Oligonucleotide primer for the detection of SNP TSC0010311
ccccacccaaaa

SEQ ID NO: 282054 - DNA, 12 bp, Artificial Sequence
  Oligonucleotide primer for the detection of SNP TSC0010311
gaaagggttttt

SEQ ID NO: 282055 - DNA, 12 bp, Artificial Sequence
  Oligonucleotide primer for the detection of SNP TSC0010311
aaaaaaatcctc

SEQ ID NO: 282056 - DNA, 12 bp, Artificial Sequence
  Oligonucleotide primer for the detection of SNP TSC0010311
ttttatttaagg

SEQ ID NO: 282057 - DNA, 12 bp, Artificial Sequence
  Oligonucleotide primer for the detection of SNP TSC0010326
taacatctactc

SEQ ID NO: 282058 - DNA, 12 bp, Artificial Sequence
  Oligonucleotide primer for the detection of SNP TSC0010326
aatgattagaag

SEQ ID NO: 282059 - DNA, 12 bp, Artificial Sequence
  Oligonucleotide primer for the detection of SNP TSC0010328
aatcctaatatc

SEQ ID NO: 282060 - DNA, 12 bp, Artificial Sequence
  Oligonucleotide primer for the detection of SNP TSC0010328
agagtaagagag

SEQ ID NO: 282061 - DNA, 12 bp, Artificial Sequence
  Oligonucleotide primer for the detection of SNP TSC0010330
caacaaaatata

SEQ ID NO: 282062 - DNA, 12 bp, Artificial Sequence
  Oligonucleotide primer for the detection of SNP TSC0010330
cgacaaaatata

SEQ ID NO: 282063 - DNA, 12 bp, Artificial Sequence
  Oligonucleotide primer for the detection of SNP TSC0010330
tattaaaaggtt

SEQ ID NO: 282064 - DNA, 12 bp, Artificial Sequence
  Oligonucleotide primer for the detection of SNP TSC0010330
attaaaaaatca

SEQ ID NO: 282065 - DNA, 12 bp, Artificial Sequence
  Oligonucleotide primer for the detection of SNP TSC0010330
tgatagaatatg

SEQ ID NO: 282066 - DNA, 12 bp, Artificial Sequence
  Oligonukleotid-Primer
cgatagaatatg

SEQ ID NO: 282067 - DNA, 12 bp, Artificial Sequence
  Oligonucleotide primer for the detection of SNP TSC0010331
acttaacaaaat

SEQ ID NO: 282068 - DNA, 12 bp, Artificial Sequence
  Oligonucleotide primer for the detection of SNP TSC0010331
ttatttttagtg

SEQ ID NO: 282069 - DNA, 12 bp, Artificial Sequence
  Oligonucleotide primer for the detection of SNP TSC0010368
acacccaacctc

SEQ ID NO: 282070 - DNA, 12 bp, Artificial Sequence
  Oligonukleotid-Primer
atttttaaataa

SEQ ID NO: 282071 - DNA, 12 bp, Artificial Sequence
  Oligonucleotide primer for the detection of SNP TSC0010369
caacctcccaaa

SEQ ID NO: 282072 - DNA, 12 bp, Artificial Sequence
  Oligonucleotide primer for the detection of SNP TSC0010369
cgacctcccaaa

SEQ ID NO: 282073 - DNA, 12 bp, Artificial Sequence
  Oligonucleotide primer for the detection of SNP TSC0010369
gtaattttagta

SEQ ID NO: 282074 - DNA, 12 bp, Artificial Sequence
  Oligonucleotide primer for the detection of SNP TSC0010369
ataatcccaaca

SEQ ID NO: 282075 - DNA, 12 bp, Artificial Sequence
  Oligonucleotide primer for the detection of SNP TSC0010370
ataataaaatat

SEQ ID NO: 282076 - DNA, 12 bp, Artificial Sequence
  Oligonucleotide primer for the detection of SNP TSC0010370
tgatttaattga

SEQ ID NO: 282077 - DNA, 12 bp, Artificial Sequence
  Oligonucleotide primer for the detection of SNP TSC0010370
cgatttaattga

SEQ ID NO: 282078 - DNA, 12 bp, Artificial Sequence
  Oligonucleotide primer for the detection of SNP TSC0010374
atctcctaactc

SEQ ID NO: 282079 - DNA, 12 bp, Artificial Sequence
  Oligonucleotide primer for the detection of SNP TSC0010374
agaagttatttt

SEQ ID NO: 282080 - DNA, 12 bp, Artificial Sequence
  Oligonucleotide primer for the detection of SNP TSC0010374
aaaaatcatttt

SEQ ID NO: 282081 - DNA, 12 bp, Artificial Sequence
  Oligonucleotide primer for the detection of SNP TSC0010374
attttttaattt

SEQ ID NO: 282082 - DNA, 12 bp, Artificial Sequence
  Oligonucleotide primer for the detection of SNP TSC0010386
tatttaaatata

SEQ ID NO: 282083 - DNA, 12 bp, Artificial Sequence
  Oligonucleotide primer for the detection of SNP TSC0010386
ataagattggaa

SEQ ID NO: 282084 - DNA, 12 bp, Artificial Sequence
  Oligonucleotide primer for the detection of SNP TSC0010386
tatttaggtgta

SEQ ID NO: 282085 - DNA, 12 bp, Artificial Sequence
  Oligonucleotide primer for the detection of SNP TSC0010387
ctccacaaccat

SEQ ID NO: 282086 - DNA, 12 bp, Artificial Sequence
  Oligonucleotide primer for the detection of SNP TSC0010387
atgtataggaaa

SEQ ID NO: 282087 - DNA, 12 bp, Artificial Sequence
  Oligonucleotide primer for the detection of SNP TSC0010387
atatacaaaaaa

SEQ ID NO: 282088 - DNA, 12 bp, Artificial Sequence
  Oligonucleotide primer for the detection of SNP TSC0010387
ttttataattat

SEQ ID NO: 282089 - DNA, 12 bp, Artificial Sequence
  Oligonucleotide primer for the detection of SNP TSC0010388
tccaaaatctta

SEQ ID NO: 282090 - DNA, 12 bp, Artificial Sequence
  Oligonucleotide primer for the detection of SNP TSC0010388
tccgaaatctta

SEQ ID NO: 282091 - DNA, 12 bp, Artificial Sequence
  Oligonucleotide primer for the detection of SNP TSC0010388
agtttgagtaat

SEQ ID NO: 282092 - DNA, 12 bp, Artificial Sequence
  Oligonucleotide primer for the detection of SNP TSC0010388
aacctaaacaac

SEQ ID NO: 282093 - DNA, 12 bp, Artificial Sequence
  Oligonucleotide primer for the detection of SNP TSC0010388
tttggggttttg

SEQ ID NO: 282094 - DNA, 12 bp, Artificial Sequence
  Oligonucleotide primer for the detection of SNP TSC0010388
ttcggggttttg

SEQ ID NO: 282095 - DNA, 12 bp, Artificial Sequence
  Oligonucleotide primer for the detection of SNP TSC0010390
ttctcccccttc

SEQ ID NO: 282096 - DNA, 12 bp, Artificial Sequence
  Oligonucleotide primer for the detection of SNP TSC0010390
aaaggtaaagga

SEQ ID NO: 282097 - DNA, 12 bp, Artificial Sequence
  Oligonucleotide primer for the detection of SNP TSC0010394
aaaaaccatatt

SEQ ID NO: 282098 - DNA, 12 bp, Artificial Sequence
  Oligonucleotide primer for the detection of SNP TSC0010394
tgtaagaaggga

SEQ ID NO: 282099 - DNA, 12 bp, Artificial Sequence
  Oligonucleotide primer for the detection of SNP TSC0010404
ttttttaattta

SEQ ID NO: 282100 - DNA, 12 bp, Artificial Sequence
  Oligonucleotide primer for the detection of SNP TSC0010405
actaacattttt

SEQ ID NO: 282101 - DNA, 12 bp, Artificial Sequence
  Oligonucleotide primer for the detection of SNP TSC0010405
tatattagttgg

SEQ ID NO: 282102 - DNA, 12 bp, Artificial Sequence
  Oligonucleotide primer for the detection of SNP TSC0010410
aaaatacaaaac

SEQ ID NO: 282103 - DNA, 12 bp, Artificial Sequence
  Oligonucleotide primer for the detection of SNP TSC0010410
tttattagtttg

SEQ ID NO: 282104 - DNA, 12 bp, Artificial Sequence
  Oligonucleotide primer for the detection of SNP TSC0010414
atacaaaaacta

SEQ ID NO: 282105 - DNA, 12 bp, Artificial Sequence
  Oligonucleotide primer for the detection of SNP TSC0010414
tattaaattatt

SEQ ID NO: 282106 - DNA, 12 bp, Artificial Sequence
  Oligonucleotide primer for the detection of SNP TSC0010414
actaaaccacca

SEQ ID NO: 282107 - DNA, 12 bp, Artificial Sequence
  Oligonucleotide primer for the detection of SNP TSC0010414
aatgtagaaatt

SEQ ID NO: 282108 - DNA, 12 bp, Artificial Sequence
  Oligonucleotide primer for the detection of SNP TSC0010415
actcctactctt

SEQ ID NO: 282109 - DNA, 12 bp, Artificial Sequence
  Oligonucleotide primer for the detection of SNP TSC0010415
atttgtttttgg

SEQ ID NO: 282110 - DNA, 12 bp, Artificial Sequence
  Oligonucleotide primer for the detection of SNP TSC0010416
taattacataaa

SEQ ID NO: 282111 - DNA, 12 bp, Artificial Sequence
  Oligonucleotide primer for the detection of SNP TSC0010416
aggtttgatgtt

SEQ ID NO: 282112 - DNA, 12 bp, Artificial Sequence
  Oligonucleotide primer for the detection of SNP TSC0010416
aaatctaatact

SEQ ID NO: 282113 - DNA, 12 bp, Artificial Sequence
  Oligonucleotide primer for the detection of SNP TSC0010416
tggttatatgga

SEQ ID NO: 282114 - DNA, 12 bp, Artificial Sequence
  Oligonucleotide primer for the detection of SNP TSC0010417
ttttcttatcat

SEQ ID NO: 282115 - DNA, 12 bp, Artificial Sequence
  Oligonucleotide primer for the detection of SNP TSC0010417
aaatagttttag

SEQ ID NO: 282116 - DNA, 12 bp, Artificial Sequence
  Oligonucleotide primer for the detection of SNP TSC0010424
aacctaaaaaac

SEQ ID NO: 282117 - DNA, 12 bp, Artificial Sequence
  Oligonucleotide primer for the detection of SNP TSC0010460
tacaaatacatt

SEQ ID NO: 282118 - DNA, 12 bp, Artificial Sequence
  Oligonucleotide primer for the detection of SNP TSC0010460
tgttttattaga

SEQ ID NO: 282119 - DNA, 12 bp, Artificial Sequence
  Oligonucleotide primer for the detection of SNP TSC0010463
taaaaacaaata

SEQ ID NO: 282120 - DNA, 12 bp, Artificial Sequence
  Oligonucleotide primer for the detection of SNP TSC0010463
tttttattatgt

SEQ ID NO: 282121 - DNA, 12 bp, Artificial Sequence
  Oligonucleotide primer for the detection of SNP TSC0010463
ctctcaccatat

SEQ ID NO: 282122 - DNA, 12 bp, Artificial Sequence
  Oligonucleotide primer for the detection of SNP TSC0010463
tgggagtaggta

SEQ ID NO: 282123 - DNA, 12 bp, Artificial Sequence
  Oligonucleotide primer for the detection of SNP TSC0010464
attttttttaag

SEQ ID NO: 282124 - DNA, 12 bp, Artificial Sequence
  Oligonucleotide primer for the detection of SNP TSC0010465
aaaaaacaccat

SEQ ID NO: 282125 - DNA, 12 bp, Artificial Sequence
  Oligonucleotide primer for the detection of SNP TSC0010465
ttgtatagtgta

SEQ ID NO: 282126 - DNA, 12 bp, Artificial Sequence
  Oligonucleotide primer for the detection of SNP TSC0010465
ctatacaatata

SEQ ID NO: 282127 - DNA, 12 bp, Artificial Sequence
  Oligonucleotide primer for the detection of SNP TSC0010465
gagaaatattat

SEQ ID NO: 282128 - DNA, 12 bp, Artificial Sequence
  Oligonucleotide primer for the detection of SNP TSC0010466
ataaaattaccc

SEQ ID NO: 282129 - DNA, 12 bp, Artificial Sequence
  Oligonucleotide primer for the detection of SNP TSC0010466
tagggtaaaaat

SEQ ID NO: 282130 - DNA, 12 bp, Artificial Sequence
  Oligonucleotide primer for the detection of SNP TSC0010466
ttaaaacaaaaa

SEQ ID NO: 282131 - DNA, 12 bp, Artificial Sequence
  Oligonucleotide primer for the detection of SNP TSC0010466
gtaaaattgttt

SEQ ID NO: 282132 - DNA, 12 bp, Artificial Sequence
  Oligonucleotide primer for the detection of SNP TSC0010466
gtaaaattgttc

SEQ ID NO: 282133 - DNA, 12 bp, Artificial Sequence
  Oligonucleotide primer for the detection of SNP TSC0010467
aacaaaatttca

SEQ ID NO: 282134 - DNA, 12 bp, Artificial Sequence
  Oligonucleotide primer for the detection of SNP TSC0010467
agtttgattaat

SEQ ID NO: 282135 - DNA, 12 bp, Artificial Sequence
  Oligonucleotide primer for the detection of SNP TSC0010467
aatctaaccaat

SEQ ID NO: 282136 - DNA, 12 bp, Artificial Sequence
  Oligonucleotide primer for the detection of SNP TSC0010467
gatagggtttta

SEQ ID NO: 282137 - DNA, 12 bp, Artificial Sequence
  Oligonucleotide primer for the detection of SNP TSC0010468
aatctcaactac

SEQ ID NO: 282138 - DNA, 12 bp, Artificial Sequence
  Oligonucleotide primer for the detection of SNP TSC0010470
tccattttttct

SEQ ID NO: 282139 - DNA, 12 bp, Artificial Sequence
  Oligonucleotide primer for the detection of SNP TSC0010470
ttaattgaatta

SEQ ID NO: 282140 - DNA, 12 bp, Artificial Sequence
  Oligonucleotide primer for the detection of SNP TSC0010478
aatacaaaaatt

SEQ ID NO: 282141 - DNA, 12 bp, Artificial Sequence
  Oligonucleotide primer for the detection of SNP TSC0010478
ttattatgtttg

SEQ ID NO: 282142 - DNA, 12 bp, Artificial Sequence
  Oligonucleotide primer for the detection of SNP TSC0010481
ttatttggttta

SEQ ID NO: 282143 - DNA, 12 bp, Artificial Sequence
  Oligonucleotide primer for the detection of SNP TSC0010481
ttattcggttta

SEQ ID NO: 282144 - DNA, 12 bp, Artificial Sequence
  Oligonucleotide primer for the detection of SNP TSC0010482
tccaaacccata

SEQ ID NO: 282145 - DNA, 12 bp, Artificial Sequence
  Oligonucleotide primer for the detection of SNP TSC0010482
ggtttggagtgg

SEQ ID NO: 282146 - DNA, 12 bp, Artificial Sequence
  Oligonucleotide primer for the detection of SNP TSC0010482
acctaaaataaa

SEQ ID NO: 282147 - DNA, 12 bp, Artificial Sequence
  Oligonucleotide primer for the detection of SNP TSC0010482
ttagatttatat

SEQ ID NO: 282148 - DNA, 12 bp, Artificial Sequence
  Oligonucleotide primer for the detection of SNP TSC0010487
acccaccacctc

SEQ ID NO: 282149 - DNA, 12 bp, Artificial Sequence
  Oligonucleotide primer for the detection of SNP TSC0010487
acccgccacctc

SEQ ID NO: 282150 - DNA, 12 bp, Artificial Sequence
  Oligonucleotide primer for the detection of SNP TSC0010487
tgagaattgagg

SEQ ID NO: 282151 - DNA, 12 bp, Artificial Sequence
  Oligonucleotide primer for the detection of SNP TSC0010488
gattttttaaag

SEQ ID NO: 282152 - DNA, 12 bp, Artificial Sequence
  Oligonucleotide primer for the detection of SNP TSC0010488
atttttgtaatt

SEQ ID NO: 282153 - DNA, 12 bp, Artificial Sequence
  Oligonucleotide primer for the detection of SNP TSC0010496
attccactactt

SEQ ID NO: 282154 - DNA, 12 bp, Artificial Sequence
  Oligonucleotide primer for the detection of SNP TSC0010496
attttttgaaag

SEQ ID NO: 282155 - DNA, 12 bp, Artificial Sequence
  Oligonucleotide primer for the detection of SNP TSC0010496
atttttcgaaag

SEQ ID NO: 282156 - DNA, 12 bp, Artificial Sequence
  Oligonucleotide primer for the detection of SNP TSC0010502
taataaaaacct

SEQ ID NO: 282157 - DNA, 12 bp, Artificial Sequence
  Oligonucleotide primer for the detection of SNP TSC0010502
atgtatttttta

SEQ ID NO: 282158 - DNA, 12 bp, Artificial Sequence
  Oligonucleotide primer for the detection of SNP TSC0010503
acatatctctat

SEQ ID NO: 282159 - DNA, 12 bp, Artificial Sequence
  Oligonucleotide primer for the detection of SNP TSC0010503
taatattggaaa

SEQ ID NO: 282160 - DNA, 12 bp, Artificial Sequence
  Oligonucleotide primer for the detection of SNP TSC0010503
caatattaaaaa

SEQ ID NO: 282161 - DNA, 12 bp, Artificial Sequence
  Oligonucleotide primer for the detection of SNP TSC0010503
atatatttttat

SEQ ID NO: 282162 - DNA, 12 bp, Artificial Sequence
  Oligonucleotide primer for the detection of SNP TSC0010513
taaaacaccaaa

SEQ ID NO: 282163 - DNA, 12 bp, Artificial Sequence
  Oligonucleotide primer for the detection of SNP TSC0010513
tgattatttagg

SEQ ID NO: 282164 - DNA, 12 bp, Artificial Sequence
  Oligonucleotide primer for the detection of SNP TSC0010514
atactatttaaa

SEQ ID NO: 282165 - DNA, 12 bp, Artificial Sequence
  Oligonucleotide primer for the detection of SNP TSC0010514
ataaagttatat

SEQ ID NO: 282166 - DNA, 12 bp, Artificial Sequence
  Oligonucleotide primer for the detection of SNP TSC0010514
acaaaactatat

SEQ ID NO: 282167 - DNA, 12 bp, Artificial Sequence
  Oligonucleotide primer for the detection of SNP TSC0010514
gttgtttaaatt

SEQ ID NO: 282168 - DNA, 12 bp, Artificial Sequence
  Oligonucleotide primer for the detection of SNP TSC0010515
tctatttttaca

SEQ ID NO: 282169 - DNA, 12 bp, Artificial Sequence
  Oligonucleotide primer for the detection of SNP TSC0010515
tagtatagtatt

SEQ ID NO: 282170 - DNA, 12 bp, Artificial Sequence
  Oligonucleotide primer for the detection of SNP TSC0010515
caacataatact

SEQ ID NO: 282171 - DNA, 12 bp, Artificial Sequence
  Oligonucleotide primer for the detection of SNP TSC0010515
tttgtttttata

SEQ ID NO: 282172 - DNA, 12 bp, Artificial Sequence
  Oligonucleotide primer for the detection of SNP TSC0010519
ccataaaacaaa

SEQ ID NO: 282173 - DNA, 12 bp, Artificial Sequence
  Oligonucleotide primer for the detection of SNP TSC0010519
aaatgtgttgat

SEQ ID NO: 282174 - DNA, 12 bp, Artificial Sequence
  Oligonucleotide primer for the detection of SNP TSC0010519
aaatatattaat

SEQ ID NO: 282175 - DNA, 12 bp, Artificial Sequence
  Oligonukleotid-Primer
gttatgaagtaa

SEQ ID NO: 282176 - DNA, 12 bp, Artificial Sequence
  Oligonucleotide primer for the detection of SNP TSC0010520
aactacaaccct

SEQ ID NO: 282177 - DNA, 12 bp, Artificial Sequence
  Oligonucleotide primer for the detection of SNP TSC0010520
gtagatttttag

SEQ ID NO: 282178 - DNA, 12 bp, Artificial Sequence
  Oligonucleotide primer for the detection of SNP TSC0010560
ttataacccaaa

SEQ ID NO: 282179 - DNA, 12 bp, Artificial Sequence
  Oligonucleotide primer for the detection of SNP TSC0010561
tttctacttatt

SEQ ID NO: 282180 - DNA, 12 bp, Artificial Sequence
  Oligonucleotide primer for the detection of SNP TSC0010561
tagtaatagaaa

SEQ ID NO: 282181 - DNA, 12 bp, Artificial Sequence
  Oligonucleotide primer for the detection of SNP TSC0010562
actaccaaaaaa

SEQ ID NO: 282182 - DNA, 12 bp, Artificial Sequence
  Oligonucleotide primer for the detection of SNP TSC0010562
ttaatataattc

SEQ ID NO: 282183 - DNA, 12 bp, Artificial Sequence
  Oligonucleotide primer for the detection of SNP TSC0010562
ttaacataatcc

SEQ ID NO: 282184 - DNA, 12 bp, Artificial Sequence
  Oligonucleotide primer for the detection of SNP TSC0010562
gttaagaagttt

SEQ ID NO: 282185 - DNA, 12 bp, Artificial Sequence
  Oligonucleotide primer for the detection of SNP TSC0010563
taatacaaaaac

SEQ ID NO: 282186 - DNA, 12 bp, Artificial Sequence
  Oligonucleotide primer for the detection of SNP TSC0010563
atgtgaagataa

SEQ ID NO: 282187 - DNA, 12 bp, Artificial Sequence
  Oligonucleotide primer for the detection of SNP TSC0010569
aacacatatctc

SEQ ID NO: 282188 - DNA, 12 bp, Artificial Sequence
  Oligonucleotide primer for the detection of SNP TSC0010569
attttagagaga

SEQ ID NO: 282189 - DNA, 12 bp, Artificial Sequence
  Oligonucleotide primer for the detection of SNP TSC0010570
ccaaaaactaac

SEQ ID NO: 282190 - DNA, 12 bp, Artificial Sequence
  Oligonucleotide primer for the detection of SNP TSC0010570
ttttttgtagtg

SEQ ID NO: 282191 - DNA, 12 bp, Artificial Sequence
  Oligonucleotide primer for the detection of SNP TSC0010571
ctatctaaacaa

SEQ ID NO: 282192 - DNA, 12 bp, Artificial Sequence
  Oligonucleotide primer for the detection of SNP TSC0010571
gtttattttgtt

SEQ ID NO: 282193 - DNA, 12 bp, Artificial Sequence
  Oligonucleotide primer for the detection of SNP TSC0010571
gtttattttgtc

SEQ ID NO: 282194 - DNA, 12 bp, Artificial Sequence
  Oligonucleotide primer for the detection of SNP TSC0010571
attcaccttacc

SEQ ID NO: 282195 - DNA, 12 bp, Artificial Sequence
  Oligonucleotide primer for the detection of SNP TSC0010571
tgtttagatagt

SEQ ID NO: 282196 - DNA, 12 bp, Artificial Sequence
  Oligonucleotide primer for the detection of SNP TSC0010574
aaacataaccta

SEQ ID NO: 282197 - DNA, 12 bp, Artificial Sequence
  Oligonucleotide primer for the detection of SNP TSC0010574
ggtgtaaattgt

SEQ ID NO: 282198 - DNA, 12 bp, Artificial Sequence
  Oligonucleotide primer for the detection of SNP TSC0010574
aatataaattat

SEQ ID NO: 282199 - DNA, 12 bp, Artificial Sequence
  Oligonucleotide primer for the detection of SNP TSC0010574
aaatatggttta

SEQ ID NO: 282200 - DNA, 12 bp, Artificial Sequence
  Oligonucleotide primer for the detection of SNP TSC0010577
aacaaaactata

SEQ ID NO: 282201 - DNA, 12 bp, Artificial Sequence
  Oligonucleotide primer for the detection of SNP TSC0010577
ttgttaagattt

SEQ ID NO: 282202 - DNA, 12 bp, Artificial Sequence
  Oligonucleotide primer for the detection of SNP TSC0010577
ctaccaaaactt

SEQ ID NO: 282203 - DNA, 12 bp, Artificial Sequence
  Oligonucleotide primer for the detection of SNP TSC0010577
gatagagttatg

SEQ ID NO: 282204 - DNA, 12 bp, Artificial Sequence
  Oligonucleotide primer for the detection of SNP TSC0010578
tcttaaaaaaat

SEQ ID NO: 282205 - DNA, 12 bp, Artificial Sequence
  Oligonucleotide primer for the detection of SNP TSC0010578
ttaatagtagta

SEQ ID NO: 282206 - DNA, 12 bp, Artificial Sequence
  Oligonucleotide primer for the detection of SNP TSC0010580
aaattaaaatca

SEQ ID NO: 282207 - DNA, 12 bp, Artificial Sequence
  Oligonucleotide primer for the detection of SNP TSC0010580
gggggttgtata

SEQ ID NO: 282208 - DNA, 12 bp, Artificial Sequence
  Oligonucleotide primer for the detection of SNP TSC0010580
aaaaattacaca

SEQ ID NO: 282209 - DNA, 12 bp, Artificial Sequence
  Oligonucleotide primer for the detection of SNP TSC0010580
aattaaagttat

SEQ ID NO: 282210 - DNA, 12 bp, Artificial Sequence
  Oligonucleotide primer for the detection of SNP TSC0010580
aattaaagttac

SEQ ID NO: 282211 - DNA, 12 bp, Artificial Sequence
  Oligonucleotide primer for the detection of SNP TSC0010581
ttctcctaaatt

SEQ ID NO: 282212 - DNA, 12 bp, Artificial Sequence
  Oligonucleotide primer for the detection of SNP TSC0010581
tatttcgggagg

SEQ ID NO: 282213 - DNA, 12 bp, Artificial Sequence
  Oligonucleotide primer for the detection of SNP TSC0010585
aaatagatagta

SEQ ID NO: 282214 - DNA, 12 bp, Artificial Sequence
  Oligonucleotide primer for the detection of SNP TSC0010588
atcctcataaca

SEQ ID NO: 282215 - DNA, 12 bp, Artificial Sequence
  Oligonucleotide primer for the detection of SNP TSC0010588
atcctcgtaaca

SEQ ID NO: 282216 - DNA, 12 bp, Artificial Sequence
  Oligonucleotide primer for the detection of SNP TSC0010588
gaggatgaaggt

SEQ ID NO: 282217 - DNA, 12 bp, Artificial Sequence
  Oligonucleotide primer for the detection of SNP TSC0010588
gtttttgtgata

SEQ ID NO: 282218 - DNA, 12 bp, Artificial Sequence
  Oligonucleotide primer for the detection of SNP TSC0010588
gttttcgtgata

SEQ ID NO: 282219 - DNA, 12 bp, Artificial Sequence
  Oligonucleotide primer for the detection of SNP TSC0010589
aatttcaaattt

SEQ ID NO: 282220 - DNA, 12 bp, Artificial Sequence
  Oligonucleotide primer for the detection of SNP TSC0010589
agttattatttg

SEQ ID NO: 282221 - DNA, 12 bp, Artificial Sequence
  Oligonucleotide primer for the detection of SNP TSC0010589
aattatcattta

SEQ ID NO: 282222 - DNA, 12 bp, Artificial Sequence
  Oligonucleotide primer for the detection of SNP TSC0010589
gattttaagttt

SEQ ID NO: 282223 - DNA, 12 bp, Artificial Sequence
  Oligonucleotide primer for the detection of SNP TSC0010591
atattatttaac

SEQ ID NO: 282224 - DNA, 12 bp, Artificial Sequence
  Oligonucleotide primer for the detection of SNP TSC0010591
atattatttggt

SEQ ID NO: 282225 - DNA, 12 bp, Artificial Sequence
  Oligonucleotide primer for the detection of SNP TSC0010599
aaactaaacaaa

SEQ ID NO: 282226 - DNA, 12 bp, Artificial Sequence
  Oligonucleotide primer for the detection of SNP TSC0010599
ttttttgggtat

SEQ ID NO: 282227 - DNA, 12 bp, Artificial Sequence
  Oligonucleotide primer for the detection of SNP TSC0010599
ctccctaaacac

SEQ ID NO: 282228 - DNA, 12 bp, Artificial Sequence
  Oligonucleotide primer for the detection of SNP TSC0010599
aggttggataag

SEQ ID NO: 282229 - DNA, 12 bp, Artificial Sequence
  Oligonucleotide primer for the detection of SNP TSC0010600
ataaaaaataaa

SEQ ID NO: 282230 - DNA, 12 bp, Artificial Sequence
  Oligonucleotide primer for the detection of SNP TSC0010600
ggagtaaaaagt

SEQ ID NO: 282231 - DNA, 12 bp, Artificial Sequence
  Oligonucleotide primer for the detection of SNP TSC0010601
aaaaaaaataca

SEQ ID NO: 282232 - DNA, 12 bp, Artificial Sequence
  Oligonucleotide primer for the detection of SNP TSC0010601
tttttaaagagt

SEQ ID NO: 282233 - DNA, 12 bp, Artificial Sequence
  Oligonucleotide primer for the detection of SNP TSC0010601
gaaagagtatat

SEQ ID NO: 282234 - DNA, 12 bp, Artificial Sequence
  Oligonucleotide primer for the detection of SNP TSC0010601
gaaagagtatac

SEQ ID NO: 282235 - DNA, 12 bp, Artificial Sequence
  Oligonucleotide primer for the detection of SNP TSC0010602
ttaacccaatcc

SEQ ID NO: 282236 - DNA, 12 bp, Artificial Sequence
  Oligonucleotide primer for the detection of SNP TSC0010603
aaatatattttc

SEQ ID NO: 282237 - DNA, 12 bp, Artificial Sequence
  Oligonucleotide primer for the detection of SNP TSC0010603
agtataatagtg

SEQ ID NO: 282238 - DNA, 12 bp, Artificial Sequence
  Oligonucleotide primer for the detection of SNP TSC0010604
tcttcctttaaa

SEQ ID NO: 282239 - DNA, 12 bp, Artificial Sequence
  Oligonucleotide primer for the detection of SNP TSC0010604
gtttttttgatt

SEQ ID NO: 282240 - DNA, 12 bp, Artificial Sequence
  Oligonucleotide primer for the detection of SNP TSC0010604
tacttccctaac

SEQ ID NO: 282241 - DNA, 12 bp, Artificial Sequence
  Oligonucleotide primer for the detection of SNP TSC0010604
ttttttttgggt

SEQ ID NO: 282242 - DNA, 12 bp, Artificial Sequence
  Oligonucleotide primer for the detection of SNP TSC0010605
taactccccacc

SEQ ID NO: 282243 - DNA, 12 bp, Artificial Sequence
  Oligonucleotide primer for the detection of SNP TSC0010605
tggtagttttgg

SEQ ID NO: 282244 - DNA, 12 bp, Artificial Sequence
  Oligonucleotide primer for the detection of SNP TSC0010605
cggtagttttgg

SEQ ID NO: 282245 - DNA, 12 bp, Artificial Sequence
  Oligonucleotide primer for the detection of SNP TSC0010606
ctattctcacaa

SEQ ID NO: 282246 - DNA, 12 bp, Artificial Sequence
  Oligonucleotide primer for the detection of SNP TSC0010606
gtgagaatagat

SEQ ID NO: 282247 - DNA, 12 bp, Artificial Sequence
  Oligonucleotide primer for the detection of SNP TSC0010606
gtgagaatagac

SEQ ID NO: 282248 - DNA, 12 bp, Artificial Sequence
  Oligonucleotide primer for the detection of SNP TSC0010606
ataaaaataaac

SEQ ID NO: 282249 - DNA, 12 bp, Artificial Sequence
  Oligonucleotide primer for the detection of SNP TSC0010607
aattaaataacc

SEQ ID NO: 282250 - DNA, 12 bp, Artificial Sequence
  Oligonucleotide primer for the detection of SNP TSC0010607
taatagtttgta

SEQ ID NO: 282251 - DNA, 12 bp, Artificial Sequence
  Oligonucleotide primer for the detection of SNP TSC0010608
ttaaacccctcc

SEQ ID NO: 282252 - DNA, 12 bp, Artificial Sequence
  Oligonucleotide primer for the detection of SNP TSC0010608
tatgtagagggg

SEQ ID NO: 282253 - DNA, 12 bp, Artificial Sequence
  Oligonucleotide primer for the detection of SNP TSC0010609
tttacctctact

SEQ ID NO: 282254 - DNA, 12 bp, Artificial Sequence
  Oligonucleotide primer for the detection of SNP TSC0010609
tagttgtaatga

SEQ ID NO: 282255 - DNA, 12 bp, Artificial Sequence
  Oligonucleotide primer for the detection of SNP TSC0010609
caattataataa

SEQ ID NO: 282256 - DNA, 12 bp, Artificial Sequence
  Oligonucleotide primer for the detection of SNP TSC0010610
catacatatacc

SEQ ID NO: 282257 - DNA, 12 bp, Artificial Sequence
  Oligonucleotide primer for the detection of SNP TSC0010610
atagtttatgta

SEQ ID NO: 282258 - DNA, 12 bp, Artificial Sequence
  Oligonucleotide primer for the detection of SNP TSC0010611
aataactaatct

SEQ ID NO: 282259 - DNA, 12 bp, Artificial Sequence
  Oligonucleotide primer for the detection of SNP TSC0010611
gtttaagatttt

SEQ ID NO: 282260 - DNA, 12 bp, Artificial Sequence
  Oligonucleotide primer for the detection of SNP TSC0010611
acccaaaactcc

SEQ ID NO: 282261 - DNA, 12 bp, Artificial Sequence
  Oligonucleotide primer for the detection of SNP TSC0010611
ggtagttgattt

SEQ ID NO: 282262 - DNA, 12 bp, Artificial Sequence
  Oligonucleotide primer for the detection of SNP TSC0010612
acttttaaacct

SEQ ID NO: 282263 - DNA, 12 bp, Artificial Sequence
  Oligonucleotide primer for the detection of SNP TSC0010612
tagtgtttgaag

SEQ ID NO: 282264 - DNA, 12 bp, Artificial Sequence
  Oligonucleotide primer for the detection of SNP TSC0010613
actatctcatta

SEQ ID NO: 282265 - DNA, 12 bp, Artificial Sequence
  Oligonucleotide primer for the detection of SNP TSC0010613
gttttggagtag

SEQ ID NO: 282266 - DNA, 12 bp, Artificial Sequence
  Oligonucleotide primer for the detection of SNP TSC0010613
accctaaaacaa

SEQ ID NO: 282267 - DNA, 12 bp, Artificial Sequence
  Oligonucleotide primer for the detection of SNP TSC0010613
ggttgttttatt

SEQ ID NO: 282268 - DNA, 12 bp, Artificial Sequence
  Oligonucleotide primer for the detection of SNP TSC0010614
ataaaatcctct

SEQ ID NO: 282269 - DNA, 12 bp, Artificial Sequence
  Oligonucleotide primer for the detection of SNP TSC0010614
gagatttattta

SEQ ID NO: 282270 - DNA, 12 bp, Artificial Sequence
  Oligonucleotide primer for the detection of SNP TSC0010615
aaataacatact

SEQ ID NO: 282271 - DNA, 12 bp, Artificial Sequence
  Oligonucleotide primer for the detection of SNP TSC0010615
aaataacgtact

SEQ ID NO: 282272 - DNA, 12 bp, Artificial Sequence
  Oligonucleotide primer for the detection of SNP TSC0010615
ttattttgggga

SEQ ID NO: 282273 - DNA, 12 bp, Artificial Sequence
  Oligonucleotide primer for the detection of SNP TSC0010615
ttatttcgggga

SEQ ID NO: 282274 - DNA, 12 bp, Artificial Sequence
  Oligonucleotide primer for the detection of SNP TSC0010615
cctcaaaaaaaa

SEQ ID NO: 282275 - DNA, 12 bp, Artificial Sequence
  Oligonucleotide primer for the detection of SNP TSC0010615
cctcgaaaaaaa

SEQ ID NO: 282276 - DNA, 12 bp, Artificial Sequence
  Oligonucleotide primer for the detection of SNP TSC0010615
gaatggtgtgtt

SEQ ID NO: 282277 - DNA, 12 bp, Artificial Sequence
  Oligonucleotide primer for the detection of SNP TSC0010615
gaatggcgtgtt

SEQ ID NO: 282278 - DNA, 12 bp, Artificial Sequence
  Oligonucleotide primer for the detection of SNP TSC0010616
ataaaatatcct

SEQ ID NO: 282279 - DNA, 12 bp, Artificial Sequence
  Oligonucleotide primer for the detection of SNP TSC0010616
tgtgttgtgggg

SEQ ID NO: 282280 - DNA, 12 bp, Artificial Sequence
  Oligonucleotide primer for the detection of SNP TSC0010616
tgtgtcgtgggg

SEQ ID NO: 282281 - DNA, 12 bp, Artificial Sequence
  Oligonucleotide primer for the detection of SNP TSC0010617
ttctccaaattc

SEQ ID NO: 282282 - DNA, 12 bp, Artificial Sequence
  Oligonucleotide primer for the detection of SNP TSC0010617
aaaagataagtt

SEQ ID NO: 282283 - DNA, 12 bp, Artificial Sequence
  Oligonucleotide primer for the detection of SNP TSC0010617
aaaaacaaacca

SEQ ID NO: 282284 - DNA, 12 bp, Artificial Sequence
  Oligonucleotide primer for the detection of SNP TSC0010617
ttttttaagttt

SEQ ID NO: 282285 - DNA, 12 bp, Artificial Sequence
  Oligonucleotide primer for the detection of SNP TSC0010617
ttttttaagttc

SEQ ID NO: 282286 - DNA, 12 bp, Artificial Sequence
  Oligonucleotide primer for the detection of SNP TSC0010618
ccaaattatttt

SEQ ID NO: 282287 - DNA, 12 bp, Artificial Sequence
  Oligonucleotide primer for the detection of SNP TSC0010618
agatgtttggtg

SEQ ID NO: 282288 - DNA, 12 bp, Artificial Sequence
  Oligonucleotide primer for the detection of SNP TSC0010619
tccaaaattcat

SEQ ID NO: 282289 - DNA, 12 bp, Artificial Sequence
  Oligonucleotide primer for the detection of SNP TSC0010619
tccgaaattcat

SEQ ID NO: 282290 - DNA, 12 bp, Artificial Sequence
  Oligonucleotide primer for the detection of SNP TSC0010619
taaggtattagg

SEQ ID NO: 282291 - DNA, 12 bp, Artificial Sequence
  Oligonucleotide primer for the detection of SNP TSC0010620
acttataacaat

SEQ ID NO: 282292 - DNA, 12 bp, Artificial Sequence
  Oligonukleotid-Primer
attattaagata

SEQ ID NO: 282293 - DNA, 12 bp, Artificial Sequence
  Oligonucleotide primer for the detection of SNP TSC0010622
tttaacccccat

SEQ ID NO: 282294 - DNA, 12 bp, Artificial Sequence
  Oligonucleotide primer for the detection of SNP TSC0010622
tttatgagagta

SEQ ID NO: 282295 - DNA, 12 bp, Artificial Sequence
  Oligonucleotide primer for the detection of SNP TSC0010623
acaaactactcc

SEQ ID NO: 282296 - DNA, 12 bp, Artificial Sequence
  Oligonukleotid-Primer
gggagtagtttg

SEQ ID NO: 282297 - DNA, 12 bp, Artificial Sequence
  Oligonucleotide primer for the detection of SNP TSC0010624
cactaccctaat

SEQ ID NO: 282298 - DNA, 12 bp, Artificial Sequence
  Oligonucleotide primer for the detection of SNP TSC0010624
tatagaggtaga

SEQ ID NO: 282299 - DNA, 12 bp, Artificial Sequence
  Oligonucleotide primer for the detection of SNP TSC0010625
atactaaaaata

SEQ ID NO: 282300 - DNA, 12 bp, Artificial Sequence
  Oligonukleotid-Primer
ccctcaatataa

SEQ ID NO: 282301 - DNA, 12 bp, Artificial Sequence
  Oligonucleotide primer for the detection of SNP TSC0010625
atattgagggtg

SEQ ID NO: 282302 - DNA, 12 bp, Artificial Sequence
  Oligonucleotide primer for the detection of SNP TSC0010626
atattaataaat

SEQ ID NO: 282303 - DNA, 12 bp, Artificial Sequence
  Oligonucleotide primer for the detection of SNP TSC0010626
attggtgaagga

SEQ ID NO: 282304 - DNA, 12 bp, Artificial Sequence
  Oligonucleotide primer for the detection of SNP TSC0010626
gtgttggtgggt

SEQ ID NO: 282305 - DNA, 12 bp, Artificial Sequence
  Oligonucleotide primer for the detection of SNP TSC0010629
tatttatttaat

SEQ ID NO: 282306 - DNA, 12 bp, Artificial Sequence
  Oligonucleotide primer for the detection of SNP TSC0010629
tgtaatagtaaa

SEQ ID NO: 282307 - DNA, 12 bp, Artificial Sequence
  Oligonucleotide primer for the detection of SNP TSC0010629
tgtttgtttaat

SEQ ID NO: 282308 - DNA, 12 bp, Artificial Sequence
  Oligonucleotide primer for the detection of SNP TSC0010630
tttaaagaaatt

SEQ ID NO: 282309 - DNA, 12 bp, Artificial Sequence
  Oligonucleotide primer for the detection of SNP TSC0010630
cttaaaaaaatt

SEQ ID NO: 282310 - DNA, 12 bp, Artificial Sequence
  Oligonucleotide primer for the detection of SNP TSC0010636
ctaataccaatc

SEQ ID NO: 282311 - DNA, 12 bp, Artificial Sequence
  Oligonucleotide primer for the detection of SNP TSC0010636
gttaaagaggta

SEQ ID NO: 282312 - DNA, 12 bp, Artificial Sequence
  Oligonucleotide primer for the detection of SNP TSC0010637
aatctcttcact

SEQ ID NO: 282313 - DNA, 12 bp, Artificial Sequence
  Oligonucleotide primer for the detection of SNP TSC0010637
tggagataaagg

SEQ ID NO: 282314 - DNA, 12 bp, Artificial Sequence
  Oligonucleotide primer for the detection of SNP TSC0010637
cggagataaagg

SEQ ID NO: 282315 - DNA, 12 bp, Artificial Sequence
  Oligonucleotide primer for the detection of SNP TSC0010638
cattaaaaaaaa

SEQ ID NO: 282316 - DNA, 12 bp, Artificial Sequence
  Oligonucleotide primer for the detection of SNP TSC0010638
cgttaaaaaaaa

SEQ ID NO: 282317 - DNA, 12 bp, Artificial Sequence
  Oligonucleotide primer for the detection of SNP TSC0010638
taattaggagaa

SEQ ID NO: 282318 - DNA, 12 bp, Artificial Sequence
  Oligonucleotide primer for the detection of SNP TSC0010638
caaccaaaaaaa

SEQ ID NO: 282319 - DNA, 12 bp, Artificial Sequence
  Oligonucleotide primer for the detection of SNP TSC0010638
gtttttgttgag

SEQ ID NO: 282320 - DNA, 12 bp, Artificial Sequence
  Oligonucleotide primer for the detection of SNP TSC0010638
gttttcgttgag

SEQ ID NO: 282321 - DNA, 12 bp, Artificial Sequence
  Oligonucleotide primer for the detection of SNP TSC0010642
cccaaacaaaca

SEQ ID NO: 282322 - DNA, 12 bp, Artificial Sequence
  Oligonucleotide primer for the detection of SNP TSC0010642
aaatttggagag

SEQ ID NO: 282323 - DNA, 12 bp, Artificial Sequence
  Oligonucleotide primer for the detection of SNP TSC0010642
aaatttaaaaaa

SEQ ID NO: 282324 - DNA, 12 bp, Artificial Sequence
  Oligonucleotide primer for the detection of SNP TSC0010642
ttaggtaggtat

SEQ ID NO: 282325 - DNA, 12 bp, Artificial Sequence
  Oligonucleotide primer for the detection of SNP TSC0010643
atcaaaaccaac

SEQ ID NO: 282326 - DNA, 12 bp, Artificial Sequence
  Oligonucleotide primer for the detection of SNP TSC0010643
agtagttttttg

SEQ ID NO: 282327 - DNA, 12 bp, Artificial Sequence
  Oligonucleotide primer for the detection of SNP TSC0010644
ataccctaaact

SEQ ID NO: 282328 - DNA, 12 bp, Artificial Sequence
  Oligonucleotide primer for the detection of SNP TSC0010645
aaataccaaccc

SEQ ID NO: 282329 - DNA, 12 bp, Artificial Sequence
  Oligonucleotide primer for the detection of SNP TSC0010645
tatggaagatta

SEQ ID NO: 282330 - DNA, 12 bp, Artificial Sequence
  Oligonucleotide primer for the detection of SNP TSC0010646
taatatatatta

SEQ ID NO: 282331 - DNA, 12 bp, Artificial Sequence
  Oligonucleotide primer for the detection of SNP TSC0010646
aggtggggtaat

SEQ ID NO: 282332 - DNA, 12 bp, Artificial Sequence
  Oligonucleotide primer for the detection of SNP TSC0010646
aataaaacaata

SEQ ID NO: 282333 - DNA, 12 bp, Artificial Sequence
  Oligonucleotide primer for the detection of SNP TSC0010646
tggtgtgtattg

SEQ ID NO: 282334 - DNA, 12 bp, Artificial Sequence
  Oligonucleotide primer for the detection of SNP TSC0010647
attacctcatta

SEQ ID NO: 282335 - DNA, 12 bp, Artificial Sequence
  Oligonucleotide primer for the detection of SNP TSC0010647
attacctcgtta

SEQ ID NO: 282336 - DNA, 12 bp, Artificial Sequence
  Oligonucleotide primer for the detection of SNP TSC0010647
ggaatttgatgt

SEQ ID NO: 282337 - DNA, 12 bp, Artificial Sequence
  Oligonucleotide primer for the detection of SNP TSC0010647
aaaaacttaata

SEQ ID NO: 282338 - DNA, 12 bp, Artificial Sequence
  Oligonucleotide primer for the detection of SNP TSC0010647
tgttattttgtt

SEQ ID NO: 282339 - DNA, 12 bp, Artificial Sequence
  Oligonucleotide primer for the detection of SNP TSC0010647
tgttatttcgtt

SEQ ID NO: 282340 - DNA, 12 bp, Artificial Sequence
  Oligonucleotide primer for the detection of SNP TSC0010664
taattaactcaa

SEQ ID NO: 282341 - DNA, 12 bp, Artificial Sequence
  Oligonucleotide primer for the detection of SNP TSC0010664
atagtttgtgta

SEQ ID NO: 282342 - DNA, 12 bp, Artificial Sequence
  Oligonucleotide primer for the detection of SNP TSC0010664
caacttatacaa

SEQ ID NO: 282343 - DNA, 12 bp, Artificial Sequence
  Oligonucleotide primer for the detection of SNP TSC0010664
tgattggtttag

SEQ ID NO: 282344 - DNA, 12 bp, Artificial Sequence
  Oligonucleotide primer for the detection of SNP TSC0010665
acaaaattaact

SEQ ID NO: 282345 - DNA, 12 bp, Artificial Sequence
  Oligonucleotide primer for the detection of SNP TSC0010665
tgtatattatta

SEQ ID NO: 282346 - DNA, 12 bp, Artificial Sequence
  Oligonucleotide primer for the detection of SNP TSC0010665
tacataccacca

SEQ ID NO: 282347 - DNA, 12 bp, Artificial Sequence
  Oligonucleotide primer for the detection of SNP TSC0010665
ataaaattagtt

SEQ ID NO: 282348 - DNA, 12 bp, Artificial Sequence
  Oligonucleotide primer for the detection of SNP TSC0010673
taaacttcataa

SEQ ID NO: 282349 - DNA, 12 bp, Artificial Sequence
  Oligonucleotide primer for the detection of SNP TSC0010673
gttggagagttt

SEQ ID NO: 282350 - DNA, 12 bp, Artificial Sequence
  Oligonucleotide primer for the detection of SNP TSC0010673
actaaaaaatct

SEQ ID NO: 282351 - DNA, 12 bp, Artificial Sequence
  Oligonucleotide primer for the detection of SNP TSC0010673
tggattttatga

SEQ ID NO: 282352 - DNA, 12 bp, Artificial Sequence
  Oligonucleotide primer for the detection of SNP TSC0010674
aaacaaaatccc

SEQ ID NO: 282353 - DNA, 12 bp, Artificial Sequence
  Oligonucleotide primer for the detection of SNP TSC0010674
ttttgtatgtag

SEQ ID NO: 282354 - DNA, 12 bp, Artificial Sequence
  Oligonucleotide primer for the detection of SNP TSC0010676
tataaacccacc

SEQ ID NO: 282355 - DNA, 12 bp, Artificial Sequence
  Oligonucleotide primer for the detection of SNP TSC0010676
tagttttttaag

SEQ ID NO: 282356 - DNA, 12 bp, Artificial Sequence
  Oligonucleotide primer for the detection of SNP TSC0010689
actaacaaaact

SEQ ID NO: 282357 - DNA, 12 bp, Artificial Sequence
  Oligonucleotide primer for the detection of SNP TSC0010689
ttttagtttgtg

SEQ ID NO: 282358 - DNA, 12 bp, Artificial Sequence
  Oligonucleotide primer for the detection of SNP TSC0010700
caaactatcaat

SEQ ID NO: 282359 - DNA, 12 bp, Artificial Sequence
  Oligonucleotide primer for the detection of SNP TSC0010700
ataaaaatgtaa

SEQ ID NO: 282360 - DNA, 12 bp, Artificial Sequence
  Oligonucleotide primer for the detection of SNP TSC0010700
ataaaaatacaa

SEQ ID NO: 282361 - DNA, 12 bp, Artificial Sequence
  Oligonucleotide primer for the detection of SNP TSC0010700
tagattattagt

SEQ ID NO: 282362 - DNA, 12 bp, Artificial Sequence
  Oligonucleotide primer for the detection of SNP TSC0010701
ctcattactctc

SEQ ID NO: 282363 - DNA, 12 bp, Artificial Sequence
  Oligonucleotide primer for the detection of SNP TSC0010701
aaattagaagtt

SEQ ID NO: 282364 - DNA, 12 bp, Artificial Sequence
  Oligonucleotide primer for the detection of SNP TSC0010701
aaaatcaaaaac

SEQ ID NO: 282365 - DNA, 12 bp, Artificial Sequence
  Oligonucleotide primer for the detection of SNP TSC0010702
acttttaaaaat

SEQ ID NO: 282366 - DNA, 12 bp, Artificial Sequence
  Oligonucleotide primer for the detection of SNP TSC0010702
aatatttgtagg

SEQ ID NO: 282367 - DNA, 12 bp, Artificial Sequence
  Oligonucleotide primer for the detection of SNP TSC0010705
atataatttcac

SEQ ID NO: 282368 - DNA, 12 bp, Artificial Sequence
  Oligonucleotide primer for the detection of SNP TSC0010705
agagttttgtaa

SEQ ID NO: 282369 - DNA, 12 bp, Artificial Sequence
  Oligonucleotide primer for the detection of SNP TSC0010705
aaaactttacaa

SEQ ID NO: 282370 - DNA, 12 bp, Artificial Sequence
  Oligonucleotide primer for the detection of SNP TSC0010705
gtatagttttat

SEQ ID NO: 282371 - DNA, 12 bp, Artificial Sequence
  Oligonucleotide primer for the detection of SNP TSC0010707
ccaaaaattttc

SEQ ID NO: 282372 - DNA, 12 bp, Artificial Sequence
  Oligonucleotide primer for the detection of SNP TSC0010707
tggagattttta

SEQ ID NO: 282373 - DNA, 12 bp, Artificial Sequence
  Oligonucleotide primer for the detection of SNP TSC0010707
taaaaatttcca

SEQ ID NO: 282374 - DNA, 12 bp, Artificial Sequence
  Oligonucleotide primer for the detection of SNP TSC0010708
tattttataatt

SEQ ID NO: 282375 - DNA, 12 bp, Artificial Sequence
  Oligonucleotide primer for the detection of SNP TSC0010708
atgttgagagag

SEQ ID NO: 282376 - DNA, 12 bp, Artificial Sequence
  Oligonucleotide primer for the detection of SNP TSC0010709
ttcttatattta

SEQ ID NO: 282377 - DNA, 12 bp, Artificial Sequence
  Oligonucleotide primer for the detection of SNP TSC0010709
aagaattttatt

SEQ ID NO: 282378 - DNA, 12 bp, Artificial Sequence
  Oligonucleotide primer for the detection of SNP TSC0010709
aaaaaatcttac

SEQ ID NO: 282379 - DNA, 12 bp, Artificial Sequence
  Oligonucleotide primer for the detection of SNP TSC0010710
cataccataaac

SEQ ID NO: 282380 - DNA, 12 bp, Artificial Sequence
  Oligonucleotide primer for the detection of SNP TSC0010710
cataccgtaaac

SEQ ID NO: 282381 - DNA, 12 bp, Artificial Sequence
  Oligonucleotide primer for the detection of SNP TSC0010710
ggttagttgttg

SEQ ID NO: 282382 - DNA, 12 bp, Artificial Sequence
  Oligonucleotide primer for the detection of SNP TSC0010710
aaccaactacta

SEQ ID NO: 282383 - DNA, 12 bp, Artificial Sequence
  Oligonucleotide primer for the detection of SNP TSC0010710
tatattgtgggt

SEQ ID NO: 282384 - DNA, 12 bp, Artificial Sequence
  Oligonucleotide primer for the detection of SNP TSC0010710
tatatcgtgggt

SEQ ID NO: 282385 - DNA, 12 bp, Artificial Sequence
  Oligonucleotide primer for the detection of SNP TSC0010711
ccacaattccat

SEQ ID NO: 282386 - DNA, 12 bp, Artificial Sequence
  Oligonucleotide primer for the detection of SNP TSC0010711
aaggtagtggga

SEQ ID NO: 282387 - DNA, 12 bp, Artificial Sequence
  Oligonucleotide primer for the detection of SNP TSC0010712
ttaacattaaat

SEQ ID NO: 282388 - DNA, 12 bp, Artificial Sequence
  Oligonucleotide primer for the detection of SNP TSC0010712
taataatgtaga

SEQ ID NO: 282389 - DNA, 12 bp, Artificial Sequence
  Oligonucleotide primer for the detection of SNP TSC0010712
caacaatacaaa

SEQ ID NO: 282390 - DNA, 12 bp, Artificial Sequence
  Oligonucleotide primer for the detection of SNP TSC0010712
ttgatattgagt

SEQ ID NO: 282391 - DNA, 12 bp, Artificial Sequence
  Oligonucleotide primer for the detection of SNP TSC0010713
atcatcattaac

SEQ ID NO: 282392 - DNA, 12 bp, Artificial Sequence
  Oligonucleotide primer for the detection of SNP TSC0010713
gtgtaatatttg

SEQ ID NO: 282393 - DNA, 12 bp, Artificial Sequence
  Oligonukleotid-Primer
atataacattta

SEQ ID NO: 282394 - DNA, 12 bp, Artificial Sequence
  Oligonucleotide primer for the detection of SNP TSC0010713
gttattattagt

SEQ ID NO: 282395 - DNA, 12 bp, Artificial Sequence
  Oligonucleotide primer for the detection of SNP TSC0010714
aaaaaaattcat

SEQ ID NO: 282396 - DNA, 12 bp, Artificial Sequence
  Oligonucleotide primer for the detection of SNP TSC0010714
aagaagtagagg

SEQ ID NO: 282397 - DNA, 12 bp, Artificial Sequence
  Oligonucleotide primer for the detection of SNP TSC0010714
agggaagtttat

SEQ ID NO: 282398 - DNA, 12 bp, Artificial Sequence
  Oligonucleotide primer for the detection of SNP TSC0010715
ctccaattctaa

SEQ ID NO: 282399 - DNA, 12 bp, Artificial Sequence
  Oligonucleotide primer for the detection of SNP TSC0010715
tgatagaaagag

SEQ ID NO: 282400 - DNA, 12 bp, Artificial Sequence
  Oligonucleotide primer for the detection of SNP TSC0010716
caacaaatcatt

SEQ ID NO: 282401 - DNA, 12 bp, Artificial Sequence
  Oligonucleotide primer for the detection of SNP TSC0010716
caacaaatcgtt

SEQ ID NO: 282402 - DNA, 12 bp, Artificial Sequence
  Oligonucleotide primer for the detection of SNP TSC0010716
aaaaaagtaaaa

SEQ ID NO: 282403 - DNA, 12 bp, Artificial Sequence
  Oligonucleotide primer for the detection of SNP TSC0010718
tacatcacctaa

SEQ ID NO: 282404 - DNA, 12 bp, Artificial Sequence
  Oligonucleotide primer for the detection of SNP TSC0010718
tttgtaatgatt

SEQ ID NO: 282405 - DNA, 12 bp, Artificial Sequence
  Oligonucleotide primer for the detection of SNP TSC0010718
ctacaataatca

SEQ ID NO: 282406 - DNA, 12 bp, Artificial Sequence
  Oligonucleotide primer for the detection of SNP TSC0010718
tatattatttgg

SEQ ID NO: 282407 - DNA, 12 bp, Artificial Sequence
  Oligonucleotide primer for the detection of SNP TSC0010719
acaaaacctaaa

SEQ ID NO: 282408 - DNA, 12 bp, Artificial Sequence
  Oligonucleotide primer for the detection of SNP TSC0010719
gatgtaattatt

SEQ ID NO: 282409 - DNA, 12 bp, Artificial Sequence
  Oligonucleotide primer for the detection of SNP TSC0010719
aatataactatt

SEQ ID NO: 282410 - DNA, 12 bp, Artificial Sequence
  Oligonucleotide primer for the detection of SNP TSC0010719
gtaaagtttaga

SEQ ID NO: 282411 - DNA, 12 bp, Artificial Sequence
  Oligonucleotide primer for the detection of SNP TSC0010720
tatttaggtgat

SEQ ID NO: 282412 - DNA, 12 bp, Artificial Sequence
  Oligonucleotide primer for the detection of SNP TSC0010720
cacccaaataat

SEQ ID NO: 282413 - DNA, 12 bp, Artificial Sequence
  Oligonucleotide primer for the detection of SNP TSC0010720
agaaaagagtta

SEQ ID NO: 282414 - DNA, 12 bp, Artificial Sequence
  Oligonucleotide primer for the detection of SNP TSC0010721
tataaacactac

SEQ ID NO: 282415 - DNA, 12 bp, Artificial Sequence
  Oligonucleotide primer for the detection of SNP TSC0010721
aaattttttgta

SEQ ID NO: 282416 - DNA, 12 bp, Artificial Sequence
  Oligonucleotide primer for the detection of SNP TSC0010728
acttccttacat

SEQ ID NO: 282417 - DNA, 12 bp, Artificial Sequence
  Oligonucleotide primer for the detection of SNP TSC0010728
tgagtaggaata

SEQ ID NO: 282418 - DNA, 12 bp, Artificial Sequence
  Oligonucleotide primer for the detection of SNP TSC0010729
tcttcccctctc

SEQ ID NO: 282419 - DNA, 12 bp, Artificial Sequence
  Oligonucleotide primer for the detection of SNP TSC0010729
gtttatttatag

SEQ ID NO: 282420 - DNA, 12 bp, Artificial Sequence
  Oligonucleotide primer for the detection of SNP TSC0010730
ttggaagttgtg

SEQ ID NO: 282421 - DNA, 12 bp, Artificial Sequence
  Oligonucleotide primer for the detection of SNP TSC0010731
tacaaaactaat

SEQ ID NO: 282422 - DNA, 12 bp, Artificial Sequence
  Oligonucleotide primer for the detection of SNP TSC0010731
gggattataatg

SEQ ID NO: 282423 - DNA, 12 bp, Artificial Sequence
  Oligonucleotide primer for the detection of SNP TSC0010734
aaaacaacaaca

SEQ ID NO: 282424 - DNA, 12 bp, Artificial Sequence
  Oligonucleotide primer for the detection of SNP TSC0010734
aattagtttttt

SEQ ID NO: 282425 - DNA, 12 bp, Artificial Sequence
  Oligonucleotide primer for the detection of SNP TSC0010734
aaccaaccttcc

SEQ ID NO: 282426 - DNA, 12 bp, Artificial Sequence
  Oligonucleotide primer for the detection of SNP TSC0010734
gaaataataata

SEQ ID NO: 282427 - DNA, 12 bp, Artificial Sequence
  Oligonucleotide primer for the detection of SNP TSC0010736
attatttaaaaa

SEQ ID NO: 282428 - DNA, 12 bp, Artificial Sequence
  Oligonucleotide primer for the detection of SNP TSC0010736
taaattttatgt

SEQ ID NO: 282429 - DNA, 12 bp, Artificial Sequence
  Oligonucleotide primer for the detection of SNP TSC0010736
taaacttcatac

SEQ ID NO: 282430 - DNA, 12 bp, Artificial Sequence
  Oligonucleotide primer for the detection of SNP TSC0010736
attatttggaag

SEQ ID NO: 282431 - DNA, 12 bp, Artificial Sequence
  Oligonucleotide primer for the detection of SNP TSC0010738
acccatatttta

SEQ ID NO: 282432 - DNA, 12 bp, Artificial Sequence
  Oligonucleotide primer for the detection of SNP TSC0010738
aatgattatttt

SEQ ID NO: 282433 - DNA, 12 bp, Artificial Sequence
  Oligonucleotide primer for the detection of SNP TSC0010738
atacaataatta

SEQ ID NO: 282434 - DNA, 12 bp, Artificial Sequence
  Oligonucleotide primer for the detection of SNP TSC0010738
tgtttatatttt

SEQ ID NO: 282435 - DNA, 12 bp, Artificial Sequence
  Oligonucleotide primer for the detection of SNP TSC0010739
aataaccatcta

SEQ ID NO: 282436 - DNA, 12 bp, Artificial Sequence
  Oligonucleotide primer for the detection of SNP TSC0010739
ttttttttagtt

SEQ ID NO: 282437 - DNA, 12 bp, Artificial Sequence
  Oligonucleotide primer for the detection of SNP TSC0010739
tctcttctaact

SEQ ID NO: 282438 - DNA, 12 bp, Artificial Sequence
  Oligonucleotide primer for the detection of SNP TSC0010739
ggtggttattta

SEQ ID NO: 282439 - DNA, 12 bp, Artificial Sequence
  Oligonucleotide primer for the detection of SNP TSC0010740
tcaaaaaccttt

SEQ ID NO: 282440 - DNA, 12 bp, Artificial Sequence
  Oligonucleotide primer for the detection of SNP TSC0010750
actacatatttc

SEQ ID NO: 282441 - DNA, 12 bp, Artificial Sequence
  Oligonucleotide primer for the detection of SNP TSC0010750
ttttttagaaat

SEQ ID NO: 282442 - DNA, 12 bp, Artificial Sequence
  Oligonucleotide primer for the detection of SNP TSC0010750
cttttctaaaaa

SEQ ID NO: 282443 - DNA, 12 bp, Artificial Sequence
  Oligonucleotide primer for the detection of SNP TSC0010750
attgtatgtttt

SEQ ID NO: 282444 - DNA, 12 bp, Artificial Sequence
  Oligonucleotide primer for the detection of SNP TSC0010750
attgtatgtttc

SEQ ID NO: 282445 - DNA, 12 bp, Artificial Sequence
  Oligonucleotide primer for the detection of SNP TSC0010751
attctctaaaca

SEQ ID NO: 282446 - DNA, 12 bp, Artificial Sequence
  Oligonucleotide primer for the detection of SNP TSC0010751
aatgttgatttt

SEQ ID NO: 282447 - DNA, 12 bp, Artificial Sequence
  Oligonucleotide primer for the detection of SNP TSC0010751
aatattaacctc

SEQ ID NO: 282448 - DNA, 12 bp, Artificial Sequence
  Oligonucleotide primer for the detection of SNP TSC0010751
gttttttaaata

SEQ ID NO: 282449 - DNA, 12 bp, Artificial Sequence
  Oligonucleotide primer for the detection of SNP TSC0010764
tccatattcaaa

SEQ ID NO: 282450 - DNA, 12 bp, Artificial Sequence
  Oligonucleotide primer for the detection of SNP TSC0010764
ttttgaataatt

SEQ ID NO: 282451 - DNA, 12 bp, Artificial Sequence
  Oligonucleotide primer for the detection of SNP TSC0010764
ttttaaacaatt

SEQ ID NO: 282452 - DNA, 12 bp, Artificial Sequence
  Oligonucleotide primer for the detection of SNP TSC0010764
tttatgtttaaa

SEQ ID NO: 282453 - DNA, 12 bp, Artificial Sequence
  Oligonucleotide primer for the detection of SNP TSC0010786
aatctctcaaat

SEQ ID NO: 282454 - DNA, 12 bp, Artificial Sequence
  Oligonucleotide primer for the detection of SNP TSC0010786
gaaagttagata

SEQ ID NO: 282455 - DNA, 12 bp, Artificial Sequence
  Oligonucleotide primer for the detection of SNP TSC0010794
tcacaataaaaa

SEQ ID NO: 282456 - DNA, 12 bp, Artificial Sequence
  Oligonucleotide primer for the detection of SNP TSC0010794
tcacgataaaaa

SEQ ID NO: 282457 - DNA, 12 bp, Artificial Sequence
  Oligonucleotide primer for the detection of SNP TSC0010794
aaaaggtaggtt

SEQ ID NO: 282458 - DNA, 12 bp, Artificial Sequence
  Oligonucleotide primer for the detection of SNP TSC0010794
aaaaacaaatca

SEQ ID NO: 282459 - DNA, 12 bp, Artificial Sequence
  Oligonucleotide primer for the detection of SNP TSC0010794
attatggtggag

SEQ ID NO: 282460 - DNA, 12 bp, Artificial Sequence
  Oligonucleotide primer for the detection of SNP TSC0010794
attacggtggag

SEQ ID NO: 282461 - DNA, 12 bp, Artificial Sequence
  Oligonucleotide primer for the detection of SNP TSC0010795
ttataaatacat

SEQ ID NO: 282462 - DNA, 12 bp, Artificial Sequence
  Oligonucleotide primer for the detection of SNP TSC0010795
gataaagttaag

SEQ ID NO: 282463 - DNA, 12 bp, Artificial Sequence
  Oligonucleotide primer for the detection of SNP TSC0010797
aacttattttta

SEQ ID NO: 282464 - DNA, 12 bp, Artificial Sequence
  Oligonucleotide primer for the detection of SNP TSC0010797
agtttttttaag

SEQ ID NO: 282465 - DNA, 12 bp, Artificial Sequence
  Oligonucleotide primer for the detection of SNP TSC0010797
aaccttctcaaa

SEQ ID NO: 282466 - DNA, 12 bp, Artificial Sequence
  Oligonucleotide primer for the detection of SNP TSC0010797
aatttattttta

SEQ ID NO: 282467 - DNA, 12 bp, Artificial Sequence
  Oligonucleotide primer for the detection of SNP TSC0010798
aattcaaactat

SEQ ID NO: 282468 - DNA, 12 bp, Artificial Sequence
  Oligonucleotide primer for the detection of SNP TSC0010798
gtatttatttta

SEQ ID NO: 282469 - DNA, 12 bp, Artificial Sequence
  Oligonucleotide primer for the detection of SNP TSC0010799
ataataaccata

SEQ ID NO: 282470 - DNA, 12 bp, Artificial Sequence
  Oligonucleotide primer for the detection of SNP TSC0010799
taaaagttggta

SEQ ID NO: 282471 - DNA, 12 bp, Artificial Sequence
  Oligonucleotide primer for the detection of SNP TSC0010806
tattactatcta

SEQ ID NO: 282472 - DNA, 12 bp, Artificial Sequence
  Oligonucleotide primer for the detection of SNP TSC0010806
tgatgtgttggt

SEQ ID NO: 282473 - DNA, 12 bp, Artificial Sequence
  Oligonucleotide primer for the detection of SNP TSC0010806
taatatactaat

SEQ ID NO: 282474 - DNA, 12 bp, Artificial Sequence
  Oligonucleotide primer for the detection of SNP TSC0010806
tgttattgtttg

SEQ ID NO: 282475 - DNA, 12 bp, Artificial Sequence
  Oligonucleotide primer for the detection of SNP TSC0010809
taaaactcataa

SEQ ID NO: 282476 - DNA, 12 bp, Artificial Sequence
  Oligonucleotide primer for the detection of SNP TSC0010809
aacccctcactt

SEQ ID NO: 282477 - DNA, 12 bp, Artificial Sequence
  Oligonucleotide primer for the detection of SNP TSC0010809
taaaatttataa

SEQ ID NO: 282478 - DNA, 12 bp, Artificial Sequence
  Oligonucleotide primer for the detection of SNP TSC0010814
ttacttacaaac

SEQ ID NO: 282479 - DNA, 12 bp, Artificial Sequence
  Oligonucleotide primer for the detection of SNP TSC0010814
ataaagttattt

SEQ ID NO: 282480 - DNA, 12 bp, Artificial Sequence
  Oligonucleotide primer for the detection of SNP TSC0010814
taaaactactca

SEQ ID NO: 282481 - DNA, 12 bp, Artificial Sequence
  Oligonucleotide primer for the detection of SNP TSC0010814
tatttataaatt

SEQ ID NO: 282482 - DNA, 12 bp, Artificial Sequence
  Oligonucleotide primer for the detection of SNP TSC0010820
atcatccaatca

SEQ ID NO: 282483 - DNA, 12 bp, Artificial Sequence
  Oligonucleotide primer for the detection of SNP TSC0010820
tgtaatgtgtgt

SEQ ID NO: 282484 - DNA, 12 bp, Artificial Sequence
  Oligonucleotide primer for the detection of SNP TSC0010820
tacaatatatat

SEQ ID NO: 282485 - DNA, 12 bp, Artificial Sequence
  Oligonucleotide primer for the detection of SNP TSC0010820
attatttaatta

SEQ ID NO: 282486 - DNA, 12 bp, Artificial Sequence
  Oligonucleotide primer for the detection of SNP TSC0010821
attctaaaaatc

SEQ ID NO: 282487 - DNA, 12 bp, Artificial Sequence
  Oligonucleotide primer for the detection of SNP TSC0010821
attaataagttg

SEQ ID NO: 282488 - DNA, 12 bp, Artificial Sequence
  Oligonucleotide primer for the detection of SNP TSC0010832
acaatataaaaa

SEQ ID NO: 282489 - DNA, 12 bp, Artificial Sequence
  Oligonucleotide primer for the detection of SNP TSC0010832
tttgtattagtt

SEQ ID NO: 282490 - DNA, 12 bp, Artificial Sequence
  Oligonukleotid-Primer
cctatattaatc

SEQ ID NO: 282491 - DNA, 12 bp, Artificial Sequence
  Oligonucleotide primer for the detection of SNP TSC0010832
gtagtgtgaaaa

SEQ ID NO: 282492 - DNA, 12 bp, Artificial Sequence
  Oligonucleotide primer for the detection of SNP TSC0010834
aaaataatactt

SEQ ID NO: 282493 - DNA, 12 bp, Artificial Sequence
  Oligonucleotide primer for the detection of SNP TSC0010834
gtttttatttgg

SEQ ID NO: 282494 - DNA, 12 bp, Artificial Sequence
  Oligonucleotide primer for the detection of SNP TSC0010836
aaattccaattt

SEQ ID NO: 282495 - DNA, 12 bp, Artificial Sequence
  Oligonucleotide primer for the detection of SNP TSC0010836
tagtagtttgag

SEQ ID NO: 282496 - DNA, 12 bp, Artificial Sequence
  Oligonucleotide primer for the detection of SNP TSC0010837
tttaaaaactaa

SEQ ID NO: 282497 - DNA, 12 bp, Artificial Sequence
  Oligonucleotide primer for the detection of SNP TSC0010837
tggtattttatt

SEQ ID NO: 282498 - DNA, 12 bp, Artificial Sequence
  Oligonukleotid-Primer
taacacctcacc

SEQ ID NO: 282499 - DNA, 12 bp, Artificial Sequence
  Oligonucleotide primer for the detection of SNP TSC0010837
ttgaagattgat

SEQ ID NO: 282500 - DNA, 12 bp, Artificial Sequence
  Oligonucleotide primer for the detection of SNP TSC0010837
ttgaagattgac

SEQ ID NO: 282501 - DNA, 12 bp, Artificial Sequence
  Oligonucleotide primer for the detection of SNP TSC0010838
cacaattccaca

SEQ ID NO: 282502 - DNA, 12 bp, Artificial Sequence
  Oligonucleotide primer for the detection of SNP TSC0010838
cacaattccacg

SEQ ID NO: 282503 - DNA, 12 bp, Artificial Sequence
  Oligonucleotide primer for the detection of SNP TSC0010838
ggtttttattat

SEQ ID NO: 282504 - DNA, 12 bp, Artificial Sequence
  Oligonucleotide primer for the detection of SNP TSC0010838
taatttccacca

SEQ ID NO: 282505 - DNA, 12 bp, Artificial Sequence
  Oligonucleotide primer for the detection of SNP TSC0010838
atagttttacgt

SEQ ID NO: 282506 - DNA, 12 bp, Artificial Sequence
  Oligonucleotide primer for the detection of SNP TSC0010839
tactctatcttc

SEQ ID NO: 282507 - DNA, 12 bp, Artificial Sequence
  Oligonucleotide primer for the detection of SNP TSC0010839
agaaagaggtaa

SEQ ID NO: 282508 - DNA, 12 bp, Artificial Sequence
  Oligonucleotide primer for the detection of SNP TSC0010843
acattcaactac

SEQ ID NO: 282509 - DNA, 12 bp, Artificial Sequence
  Oligonucleotide primer for the detection of SNP TSC0010843
acattcgactac

SEQ ID NO: 282510 - DNA, 12 bp, Artificial Sequence
  Oligonucleotide primer for the detection of SNP TSC0010843
tgataggttaga

SEQ ID NO: 282511 - DNA, 12 bp, Artificial Sequence
  Oligonucleotide primer for the detection of SNP TSC0010847
aattattcatta

SEQ ID NO: 282512 - DNA, 12 bp, Artificial Sequence
  Oligonucleotide primer for the detection of SNP TSC0010847
gatgttgtattt

SEQ ID NO: 282513 - DNA, 12 bp, Artificial Sequence
  Oligonucleotide primer for the detection of SNP TSC0010847
aatattacatct

SEQ ID NO: 282514 - DNA, 12 bp, Artificial Sequence
  Oligonucleotide primer for the detection of SNP TSC0010850
aataatcaacca

SEQ ID NO: 282515 - DNA, 12 bp, Artificial Sequence
  Oligonucleotide primer for the detection of SNP TSC0010850
aataatcaaccg

SEQ ID NO: 282516 - DNA, 12 bp, Artificial Sequence
  Oligonucleotide primer for the detection of SNP TSC0010850
aataatcgacca

SEQ ID NO: 282517 - DNA, 12 bp, Artificial Sequence
  Oligonucleotide primer for the detection of SNP TSC0010850
aataatcgaccg

SEQ ID NO: 282518 - DNA, 12 bp, Artificial Sequence
  Oligonucleotide primer for the detection of SNP TSC0010850
cactatcacttc

SEQ ID NO: 282519 - DNA, 12 bp, Artificial Sequence
  Oligonucleotide primer for the detection of SNP TSC0010850
ggtagttgattg

SEQ ID NO: 282520 - DNA, 12 bp, Artificial Sequence
  Oligonucleotide primer for the detection of SNP TSC0010850
ggtagtcgattg

SEQ ID NO: 282521 - DNA, 12 bp, Artificial Sequence
  Oligonucleotide primer for the detection of SNP TSC0010850
ggtagttgatcg

SEQ ID NO: 282522 - DNA, 12 bp, Artificial Sequence
  Oligonucleotide primer for the detection of SNP TSC0010850
ggtagtcgatcg

SEQ ID NO: 282523 - DNA, 12 bp, Artificial Sequence
  Oligonucleotide primer for the detection of SNP TSC0010851
aaaaaattcttt

SEQ ID NO: 282524 - DNA, 12 bp, Artificial Sequence
  Oligonucleotide primer for the detection of SNP TSC0010851
ttttaagttata

SEQ ID NO: 282525 - DNA, 12 bp, Artificial Sequence
  Oligonucleotide primer for the detection of SNP TSC0010852
taactattccat

SEQ ID NO: 282526 - DNA, 12 bp, Artificial Sequence
  Oligonucleotide primer for the detection of SNP TSC0010852
atatatagaaaa

SEQ ID NO: 282527 - DNA, 12 bp, Artificial Sequence
  Oligonucleotide primer for the detection of SNP TSC0010853
gtgtattaggta

SEQ ID NO: 282528 - DNA, 12 bp, Artificial Sequence
  Oligonucleotide primer for the detection of SNP TSC0010853
atataccaaaca

SEQ ID NO: 282529 - DNA, 12 bp, Artificial Sequence
  Oligonucleotide primer for the detection of SNP TSC0010853
atgggtggaggt

SEQ ID NO: 282530 - DNA, 12 bp, Artificial Sequence
  Oligonucleotide primer for the detection of SNP TSC0010854
tcataaaatctt

SEQ ID NO: 282531 - DNA, 12 bp, Artificial Sequence
  Oligonucleotide primer for the detection of SNP TSC0010854
tgatgttagaaa

SEQ ID NO: 282532 - DNA, 12 bp, Artificial Sequence
  Oligonucleotide primer for the detection of SNP TSC0010854
cgatgttagaaa

SEQ ID NO: 282533 - DNA, 12 bp, Artificial Sequence
  Oligonucleotide primer for the detection of SNP TSC0010854
tgacgttagaaa

SEQ ID NO: 282534 - DNA, 12 bp, Artificial Sequence
  Oligonucleotide primer for the detection of SNP TSC0010854
cgacgttagaaa

SEQ ID NO: 282535 - DNA, 12 bp, Artificial Sequence
  Oligonucleotide primer for the detection of SNP TSC0010854
caacaccaaaaa

SEQ ID NO: 282536 - DNA, 12 bp, Artificial Sequence
  Oligonucleotide primer for the detection of SNP TSC0010854
caacgccaaaaa

SEQ ID NO: 282537 - DNA, 12 bp, Artificial Sequence
  Oligonucleotide primer for the detection of SNP TSC0010854
cgacaccaaaaa

SEQ ID NO: 282538 - DNA, 12 bp, Artificial Sequence
  Oligonucleotide primer for the detection of SNP TSC0010854
cgacgccaaaaa

SEQ ID NO: 282539 - DNA, 12 bp, Artificial Sequence
  Oligonucleotide primer for the detection of SNP TSC0010855
acaaaaacaatt

SEQ ID NO: 282540 - DNA, 12 bp, Artificial Sequence
  Oligonucleotide primer for the detection of SNP TSC0010855
acaaaaacgatt

SEQ ID NO: 282541 - DNA, 12 bp, Artificial Sequence
  Oligonucleotide primer for the detection of SNP TSC0010855
gtgagttattta

SEQ ID NO: 282542 - DNA, 12 bp, Artificial Sequence
  Oligonucleotide primer for the detection of SNP TSC0010856
actaaaccacac

SEQ ID NO: 282543 - DNA, 12 bp, Artificial Sequence
  Oligonucleotide primer for the detection of SNP TSC0010856
tttttttatata

SEQ ID NO: 282544 - DNA, 12 bp, Artificial Sequence
  Oligonucleotide primer for the detection of SNP TSC0010857
aaattattcaat

SEQ ID NO: 282545 - DNA, 12 bp, Artificial Sequence
  Oligonucleotide primer for the detection of SNP TSC0010857
atatagaaatga

SEQ ID NO: 282546 - DNA, 12 bp, Artificial Sequence
  Oligonucleotide primer for the detection of SNP TSC0010857
atatagaaacga

SEQ ID NO: 282547 - DNA, 12 bp, Artificial Sequence
  Oligonucleotide primer for the detection of SNP TSC0010858
aaactccttatt

SEQ ID NO: 282548 - DNA, 12 bp, Artificial Sequence
  Oligonucleotide primer for the detection of SNP TSC0010858
tttttagttagg

SEQ ID NO: 282549 - DNA, 12 bp, Artificial Sequence
  Oligonucleotide primer for the detection of SNP TSC0010860
acaataaaaaat

SEQ ID NO: 282550 - DNA, 12 bp, Artificial Sequence
  Oligonucleotide primer for the detection of SNP TSC0010860
aggatggtgtta

SEQ ID NO: 282551 - DNA, 12 bp, Artificial Sequence
  Oligonucleotide primer for the detection of SNP TSC0010860
aaaataatacta

SEQ ID NO: 282552 - DNA, 12 bp, Artificial Sequence
  Oligonucleotide primer for the detection of SNP TSC0010860
ataatagggggt

SEQ ID NO: 282553 - DNA, 12 bp, Artificial Sequence
  Oligonucleotide primer for the detection of SNP TSC0010864
acaattaaaaac

SEQ ID NO: 282554 - DNA, 12 bp, Artificial Sequence
  Oligonucleotide primer for the detection of SNP TSC0010864
acgattaaaaac

SEQ ID NO: 282555 - DNA, 12 bp, Artificial Sequence
  Oligonucleotide primer for the detection of SNP TSC0010864
gaggttttggaa

SEQ ID NO: 282556 - DNA, 12 bp, Artificial Sequence
  Oligonucleotide primer for the detection of SNP TSC0010865
acctcctttacc

SEQ ID NO: 282557 - DNA, 12 bp, Artificial Sequence
  Oligonucleotide primer for the detection of SNP TSC0010865
gtttttattgag

SEQ ID NO: 282558 - DNA, 12 bp, Artificial Sequence
  Oligonucleotide primer for the detection of SNP TSC0010865
attttcattaaa

SEQ ID NO: 282559 - DNA, 12 bp, Artificial Sequence
  Oligonucleotide primer for the detection of SNP TSC0010866
caaatttcttaa

SEQ ID NO: 282560 - DNA, 12 bp, Artificial Sequence
  Oligonucleotide primer for the detection of SNP TSC0010866
gaatagaggatt

SEQ ID NO: 282561 - DNA, 12 bp, Artificial Sequence
  Oligonucleotide primer for the detection of SNP TSC0010866
aaataaaaaatt

SEQ ID NO: 282562 - DNA, 12 bp, Artificial Sequence
  Oligonucleotide primer for the detection of SNP TSC0010866
taggttttttga

SEQ ID NO: 282563 - DNA, 12 bp, Artificial Sequence
  Oligonucleotide primer for the detection of SNP TSC0010869
tatttcattcaa

SEQ ID NO: 282564 - DNA, 12 bp, Artificial Sequence
  Oligonucleotide primer for the detection of SNP TSC0010869
atgtaattattt

SEQ ID NO: 282565 - DNA, 12 bp, Artificial Sequence
  Oligonucleotide primer for the detection of SNP TSC0010869
atacaatcactc

SEQ ID NO: 282566 - DNA, 12 bp, Artificial Sequence
  Oligonucleotide primer for the detection of SNP TSC0010869
tattttatttaa

SEQ ID NO: 282567 - DNA, 12 bp, Artificial Sequence
  Oligonucleotide primer for the detection of SNP TSC0010870
actataaataac

SEQ ID NO: 282568 - DNA, 12 bp, Artificial Sequence
  Oligonucleotide primer for the detection of SNP TSC0010870
gtaattataatt

SEQ ID NO: 282569 - DNA, 12 bp, Artificial Sequence
  Oligonucleotide primer for the detection of SNP TSC0010870
acaactacaact

SEQ ID NO: 282570 - DNA, 12 bp, Artificial Sequence
  Oligonucleotide primer for the detection of SNP TSC0010870
gttgtaagtgat

SEQ ID NO: 282571 - DNA, 12 bp, Artificial Sequence
  Oligonukleotid-Primer
tttatttttttg

SEQ ID NO: 282572 - DNA, 12 bp, Artificial Sequence
  Oligonucleotide primer for the detection of SNP TSC0010871
ttactttcctaa

SEQ ID NO: 282573 - DNA, 12 bp, Artificial Sequence
  Oligonucleotide primer for the detection of SNP TSC0010871
tggaagagaaat

SEQ ID NO: 282574 - DNA, 12 bp, Artificial Sequence
  Oligonucleotide primer for the detection of SNP TSC0010876
ctcaattttaaa

SEQ ID NO: 282575 - DNA, 12 bp, Artificial Sequence
  Oligonucleotide primer for the detection of SNP TSC0010876
ttttttgaagta

SEQ ID NO: 282576 - DNA, 12 bp, Artificial Sequence
  Oligonucleotide primer for the detection of SNP TSC0010876
ttagttttggat

SEQ ID NO: 282577 - DNA, 12 bp, Artificial Sequence
  Oligonucleotide primer for the detection of SNP TSC0010877
aaacaaaattat

SEQ ID NO: 282578 - DNA, 12 bp, Artificial Sequence
  Oligonucleotide primer for the detection of SNP TSC0010877
ttttataaatta

SEQ ID NO: 282579 - DNA, 12 bp, Artificial Sequence
  Oligonucleotide primer for the detection of SNP TSC0010887
aaatggtggtaa

SEQ ID NO: 282580 - DNA, 12 bp, Artificial Sequence
  Oligonucleotide primer for the detection of SNP TSC0010892
aacaaaatccta

SEQ ID NO: 282581 - DNA, 12 bp, Artificial Sequence
  Oligonucleotide primer for the detection of SNP TSC0010892
taatgaaataat

SEQ ID NO: 282582 - DNA, 12 bp, Artificial Sequence
  Oligonucleotide primer for the detection of SNP TSC0010892
aaatagaatttt

SEQ ID NO: 282583 - DNA, 12 bp, Artificial Sequence
  Oligonucleotide primer for the detection of SNP TSC0010893
tagagagaagta

SEQ ID NO: 282584 - DNA, 12 bp, Artificial Sequence
  Oligonucleotide primer for the detection of SNP TSC0010893
tgagttttaaat

SEQ ID NO: 282585 - DNA, 12 bp, Artificial Sequence
  Oligonucleotide primer for the detection of SNP TSC0010894
atattaacttac

SEQ ID NO: 282586 - DNA, 12 bp, Artificial Sequence
  Oligonucleotide primer for the detection of SNP TSC0010894
gggattttgtga

SEQ ID NO: 282587 - DNA, 12 bp, Artificial Sequence
  Oligonucleotide primer for the detection of SNP TSC0010894
aaaaccttataa

SEQ ID NO: 282588 - DNA, 12 bp, Artificial Sequence
  Oligonucleotide primer for the detection of SNP TSC0010894
gtattaatttat

SEQ ID NO: 282589 - DNA, 12 bp, Artificial Sequence
  Oligonucleotide primer for the detection of SNP TSC0010898
caatacaataac

SEQ ID NO: 282590 - DNA, 12 bp, Artificial Sequence
  Oligonucleotide primer for the detection of SNP TSC0010898
caatacgataac

SEQ ID NO: 282591 - DNA, 12 bp, Artificial Sequence
  Oligonucleotide primer for the detection of SNP TSC0010898
cgatacaataac

SEQ ID NO: 282592 - DNA, 12 bp, Artificial Sequence
  Oligonucleotide primer for the detection of SNP TSC0010898
cgatacgataac

SEQ ID NO: 282593 - DNA, 12 bp, Artificial Sequence
  Oligonucleotide primer for the detection of SNP TSC0010898
attataggtgtg

SEQ ID NO: 282594 - DNA, 12 bp, Artificial Sequence
  Oligonucleotide primer for the detection of SNP TSC0010899
ctacatactctt

SEQ ID NO: 282595 - DNA, 12 bp, Artificial Sequence
  Oligonucleotide primer for the detection of SNP TSC0010899
ggtttagattag

SEQ ID NO: 282596 - DNA, 12 bp, Artificial Sequence
  Oligonucleotide primer for the detection of SNP TSC0010900
attcatactcac

SEQ ID NO: 282597 - DNA, 12 bp, Artificial Sequence
  Oligonucleotide primer for the detection of SNP TSC0010900
gtttatatttat

SEQ ID NO: 282598 - DNA, 12 bp, Artificial Sequence
  Oligonucleotide primer for the detection of SNP TSC0010902
tcacctttaata

SEQ ID NO: 282599 - DNA, 12 bp, Artificial Sequence
  Oligonucleotide primer for the detection of SNP TSC0010902
attaaatttaat

SEQ ID NO: 282600 - DNA, 12 bp, Artificial Sequence
  Oligonucleotide primer for the detection of SNP TSC0010902
attaaatctaat

SEQ ID NO: 282601 - DNA, 12 bp, Artificial Sequence
  Oligonucleotide primer for the detection of SNP TSC0010902
ttatttttaatg

SEQ ID NO: 282602 - DNA, 12 bp, Artificial Sequence
  Oligonucleotide primer for the detection of SNP TSC0010903
ataatctaactt

SEQ ID NO: 282603 - DNA, 12 bp, Artificial Sequence
  Oligonucleotide primer for the detection of SNP TSC0010903
taaataataata

SEQ ID NO: 282604 - DNA, 12 bp, Artificial Sequence
  Oligonucleotide primer for the detection of SNP TSC0010904
aaccttataaaa

SEQ ID NO: 282605 - DNA, 12 bp, Artificial Sequence
  Oligonucleotide primer for the detection of SNP TSC0010904
tgatttaattat

SEQ ID NO: 282606 - DNA, 12 bp, Artificial Sequence
  Oligonucleotide primer for the detection of SNP TSC0010904
tgatttaattac

SEQ ID NO: 282607 - DNA, 12 bp, Artificial Sequence
  Oligonucleotide primer for the detection of SNP TSC0010904
taattcaatcac

SEQ ID NO: 282608 - DNA, 12 bp, Artificial Sequence
  Oligonucleotide primer for the detection of SNP TSC0010904
gggttttgtggg

SEQ ID NO: 282609 - DNA, 12 bp, Artificial Sequence
  Oligonucleotide primer for the detection of SNP TSC0010905
aaaccaattatc

SEQ ID NO: 282610 - DNA, 12 bp, Artificial Sequence
  Oligonucleotide primer for the detection of SNP TSC0010905
agaaagttgaga

SEQ ID NO: 282611 - DNA, 12 bp, Artificial Sequence
  Oligonucleotide primer for the detection of SNP TSC0010906
aataactaactc

SEQ ID NO: 282612 - DNA, 12 bp, Artificial Sequence
  Oligonucleotide primer for the detection of SNP TSC0010906
aactttatttaa

SEQ ID NO: 282613 - DNA, 12 bp, Artificial Sequence
  Oligonucleotide primer for the detection of SNP TSC0010906
gataattggttt

SEQ ID NO: 282614 - DNA, 12 bp, Artificial Sequence
  Oligonucleotide primer for the detection of SNP TSC0010909
ccatcacctctt

SEQ ID NO: 282615 - DNA, 12 bp, Artificial Sequence
  Oligonucleotide primer for the detection of SNP TSC0010909
tatttaaaatga

SEQ ID NO: 282616 - DNA, 12 bp, Artificial Sequence
  Oligonucleotide primer for the detection of SNP TSC0010912
actcaatctcca

SEQ ID NO: 282617 - DNA, 12 bp, Artificial Sequence
  Oligonucleotide primer for the detection of SNP TSC0010912
atgggaggaggg

SEQ ID NO: 282618 - DNA, 12 bp, Artificial Sequence
  Oligonucleotide primer for the detection of SNP TSC0010912
aatttagttttt

SEQ ID NO: 282619 - DNA, 12 bp, Artificial Sequence
  Oligonucleotide primer for the detection of SNP TSC0010913
ccaactctctaa

SEQ ID NO: 282620 - DNA, 12 bp, Artificial Sequence
  Oligonucleotide primer for the detection of SNP TSC0010913
attagaaagatt

SEQ ID NO: 282621 - DNA, 12 bp, Artificial Sequence
  Oligonucleotide primer for the detection of SNP TSC0010913
accaaaaaaacc

SEQ ID NO: 282622 - DNA, 12 bp, Artificial Sequence
  Oligonucleotide primer for the detection of SNP TSC0010914
aaactaaaaaaa

SEQ ID NO: 282623 - DNA, 12 bp, Artificial Sequence
  Oligonucleotide primer for the detection of SNP TSC0010914
tgattaaagggg

SEQ ID NO: 282624 - DNA, 12 bp, Artificial Sequence
  Oligonucleotide primer for the detection of SNP TSC0010915
aaactaaaaaat

SEQ ID NO: 282625 - DNA, 12 bp, Artificial Sequence
  Oligonucleotide primer for the detection of SNP TSC0010915
tgtatgttaatt

SEQ ID NO: 282626 - DNA, 12 bp, Artificial Sequence
  Oligonucleotide primer for the detection of SNP TSC0010915
atataccaatta

SEQ ID NO: 282627 - DNA, 12 bp, Artificial Sequence
  Oligonucleotide primer for the detection of SNP TSC0010915
gagttaaaaaat

SEQ ID NO: 282628 - DNA, 12 bp, Artificial Sequence
  Oligonucleotide primer for the detection of SNP TSC0010916
tataaattcctt

SEQ ID NO: 282629 - DNA, 12 bp, Artificial Sequence
  Oligonucleotide primer for the detection of SNP TSC0010916
agataatagaga

SEQ ID NO: 282630 - DNA, 12 bp, Artificial Sequence
  Oligonucleotide primer for the detection of SNP TSC0010917
caaaaattaaaa

SEQ ID NO: 282631 - DNA, 12 bp, Artificial Sequence
  Oligonucleotide primer for the detection of SNP TSC0010917
attttttaaaat

SEQ ID NO: 282632 - DNA, 12 bp, Artificial Sequence
  Oligonucleotide primer for the detection of SNP TSC0010918
attccctcaatt

SEQ ID NO: 282633 - DNA, 12 bp, Artificial Sequence
  Oligonucleotide primer for the detection of SNP TSC0010918
attccctcgatt

SEQ ID NO: 282634 - DNA, 12 bp, Artificial Sequence
  Oligonucleotide primer for the detection of SNP TSC0010918
agtgtttgtttg

SEQ ID NO: 282635 - DNA, 12 bp, Artificial Sequence
  Oligonucleotide primer for the detection of SNP TSC0010921
aaaacaaatacc

SEQ ID NO: 282636 - DNA, 12 bp, Artificial Sequence
  Oligonucleotide primer for the detection of SNP TSC0010921
ataggaattatg

SEQ ID NO: 282637 - DNA, 12 bp, Artificial Sequence
  Oligonucleotide primer for the detection of SNP TSC0010922
gagaggaaggga

SEQ ID NO: 282638 - DNA, 12 bp, Artificial Sequence
  Oligonucleotide primer for the detection of SNP TSC0010923
ataaaacaacca

SEQ ID NO: 282639 - DNA, 12 bp, Artificial Sequence
  Oligonucleotide primer for the detection of SNP TSC0010923
aatatttttaat

SEQ ID NO: 282640 - DNA, 12 bp, Artificial Sequence
  Oligonucleotide primer for the detection of SNP TSC0010923
tatctctaacaa

SEQ ID NO: 282641 - DNA, 12 bp, Artificial Sequence
  Oligonucleotide primer for the detection of SNP TSC0010923
tgtggagtaatt

SEQ ID NO: 282642 - DNA, 12 bp, Artificial Sequence
  Oligonucleotide primer for the detection of SNP TSC0010928
aaggtgaatagt

SEQ ID NO: 282643 - DNA, 12 bp, Artificial Sequence
  Oligonucleotide primer for the detection of SNP TSC0010928
ataaataacaaa

SEQ ID NO: 282644 - DNA, 12 bp, Artificial Sequence
  Oligonucleotide primer for the detection of SNP TSC0010928
taataaaaatgg

SEQ ID NO: 282645 - DNA, 12 bp, Artificial Sequence
  Oligonucleotide primer for the detection of SNP TSC0010929
caatatatactc

SEQ ID NO: 282646 - DNA, 12 bp, Artificial Sequence
  Oligonucleotide primer for the detection of SNP TSC0010929
aagttaaagagg

SEQ ID NO: 282647 - DNA, 12 bp, Artificial Sequence
  Oligonucleotide primer for the detection of SNP TSC0010930
tatttttctctt

SEQ ID NO: 282648 - DNA, 12 bp, Artificial Sequence
  Oligonucleotide primer for the detection of SNP TSC0010930
tttttgaagaaa

SEQ ID NO: 282649 - DNA, 12 bp, Artificial Sequence
  Oligonucleotide primer for the detection of SNP TSC0010932
caaaacatctac

SEQ ID NO: 282650 - DNA, 12 bp, Artificial Sequence
  Oligonucleotide primer for the detection of SNP TSC0010932
atttgggagtag

SEQ ID NO: 282651 - DNA, 12 bp, Artificial Sequence
  Oligonucleotide primer for the detection of SNP TSC0010932
atctaaaaacaa

SEQ ID NO: 282652 - DNA, 12 bp, Artificial Sequence
  Oligonucleotide primer for the detection of SNP TSC0010932
tagggtatttgt

SEQ ID NO: 282653 - DNA, 12 bp, Artificial Sequence
  Oligonucleotide primer for the detection of SNP TSC0010934
ctacaaatacaa

SEQ ID NO: 282654 - DNA, 12 bp, Artificial Sequence
  Oligonucleotide primer for the detection of SNP TSC0010934
atttggttaatt

SEQ ID NO: 282655 - DNA, 12 bp, Artificial Sequence
  Oligonucleotide primer for the detection of SNP TSC0010934
acttaactaatt

SEQ ID NO: 282656 - DNA, 12 bp, Artificial Sequence
  Oligonucleotide primer for the detection of SNP TSC0010934
ttgtaaatataa

SEQ ID NO: 282657 - DNA, 12 bp, Artificial Sequence
  Oligonucleotide primer for the detection of SNP TSC0010935
ataaacaaatca

SEQ ID NO: 282658 - DNA, 12 bp, Artificial Sequence
  Oligonucleotide primer for the detection of SNP TSC0010935
atttttgatttt

SEQ ID NO: 282659 - DNA, 12 bp, Artificial Sequence
  Oligonucleotide primer for the detection of SNP TSC0010935
tcctaacctcaa

SEQ ID NO: 282660 - DNA, 12 bp, Artificial Sequence
  Oligonucleotide primer for the detection of SNP TSC0010935
gtgggtagatta

SEQ ID NO: 282661 - DNA, 12 bp, Artificial Sequence
  Oligonucleotide primer for the detection of SNP TSC0010937
taaacataatac

SEQ ID NO: 282662 - DNA, 12 bp, Artificial Sequence
  Oligonucleotide primer for the detection of SNP TSC0010937
tagggaattata

SEQ ID NO: 282663 - DNA, 12 bp, Artificial Sequence
  Oligonucleotide primer for the detection of SNP TSC0010938
aatacattataa

SEQ ID NO: 282664 - DNA, 12 bp, Artificial Sequence
  Oligonucleotide primer for the detection of SNP TSC0010938
ttgttttaggga

SEQ ID NO: 282665 - DNA, 12 bp, Artificial Sequence
  Oligonucleotide primer for the detection of SNP TSC0010938
ctacctcaaaaa

SEQ ID NO: 282666 - DNA, 12 bp, Artificial Sequence
  Oligonucleotide primer for the detection of SNP TSC0010938
agtatattgtag

SEQ ID NO: 282667 - DNA, 12 bp, Artificial Sequence
  Oligonucleotide primer for the detection of SNP TSC0010939
cctctcaaaaaa

SEQ ID NO: 282668 - DNA, 12 bp, Artificial Sequence
  Oligonucleotide primer for the detection of SNP TSC0010939
atagtttgttag

SEQ ID NO: 282669 - DNA, 12 bp, Artificial Sequence
  Oligonucleotide primer for the detection of SNP TSC0010939
ataacctatcaa

SEQ ID NO: 282670 - DNA, 12 bp, Artificial Sequence
  Oligonucleotide primer for the detection of SNP TSC0010939
ttttttagggga

SEQ ID NO: 282671 - DNA, 12 bp, Artificial Sequence
  Oligonucleotide primer for the detection of SNP TSC0010940
aacctactaatt

SEQ ID NO: 282672 - DNA, 12 bp, Artificial Sequence
  Oligonucleotide primer for the detection of SNP TSC0010940
ataggggggtaa

SEQ ID NO: 282673 - DNA, 12 bp, Artificial Sequence
  Oligonucleotide primer for the detection of SNP TSC0010940
agtttgttggtt

SEQ ID NO: 282674 - DNA, 12 bp, Artificial Sequence
  Oligonucleotide primer for the detection of SNP TSC0010941
gtttaattatgt

SEQ ID NO: 282675 - DNA, 12 bp, Artificial Sequence
  Oligonucleotide primer for the detection of SNP TSC0010941
gtttaattacgt

SEQ ID NO: 282676 - DNA, 12 bp, Artificial Sequence
  Oligonucleotide primer for the detection of SNP TSC0010941
gtttaattatgc

SEQ ID NO: 282677 - DNA, 12 bp, Artificial Sequence
  Oligonucleotide primer for the detection of SNP TSC0010941
gtttaattacgc

SEQ ID NO: 282678 - DNA, 12 bp, Artificial Sequence
  Oligonucleotide primer for the detection of SNP TSC0010941
catctaaccaca

SEQ ID NO: 282679 - DNA, 12 bp, Artificial Sequence
  Oligonucleotide primer for the detection of SNP TSC0010941
catctaaccacg

SEQ ID NO: 282680 - DNA, 12 bp, Artificial Sequence
  Oligonucleotide primer for the detection of SNP TSC0010941
cgtctaaccaca

SEQ ID NO: 282681 - DNA, 12 bp, Artificial Sequence
  Oligonucleotide primer for the detection of SNP TSC0010941
cgtctaaccacg

SEQ ID NO: 282682 - DNA, 12 bp, Artificial Sequence
  Oligonucleotide primer for the detection of SNP TSC0010941
tgagagtgaagt

SEQ ID NO: 282683 - DNA, 12 bp, Artificial Sequence
  Oligonucleotide primer for the detection of SNP TSC0010942
cattttaaatct

SEQ ID NO: 282684 - DNA, 12 bp, Artificial Sequence
  Oligonucleotide primer for the detection of SNP TSC0010942
tattgattaaaa

SEQ ID NO: 282685 - DNA, 12 bp, Artificial Sequence
  Oligonucleotide primer for the detection of SNP TSC0010944
aaactacaataa

SEQ ID NO: 282686 - DNA, 12 bp, Artificial Sequence
  Oligonucleotide primer for the detection of SNP TSC0010944
tatgttattttg

SEQ ID NO: 282687 - DNA, 12 bp, Artificial Sequence
  Oligonucleotide primer for the detection of SNP TSC0010944
cataccatttta

SEQ ID NO: 282688 - DNA, 12 bp, Artificial Sequence
  Oligonucleotide primer for the detection of SNP TSC0010944
aggttatagtaa

SEQ ID NO: 282689 - DNA, 12 bp, Artificial Sequence
  Oligonucleotide primer for the detection of SNP TSC0010945
catacaaaaatc

SEQ ID NO: 282690 - DNA, 12 bp, Artificial Sequence
  Oligonucleotide primer for the detection of SNP TSC0010945
atggaaatggta

SEQ ID NO: 282691 - DNA, 12 bp, Artificial Sequence
  Oligonucleotide primer for the detection of SNP TSC0010947
actaaaaaaaat

SEQ ID NO: 282692 - DNA, 12 bp, Artificial Sequence
  Oligonucleotide primer for the detection of SNP TSC0010947
gttattatattt

SEQ ID NO: 282693 - DNA, 12 bp, Artificial Sequence
  Oligonucleotide primer for the detection of SNP TSC0010947
taaccatcatac

SEQ ID NO: 282694 - DNA, 12 bp, Artificial Sequence
  Oligonucleotide primer for the detection of SNP TSC0010947
gttaaaagaagt

SEQ ID NO: 282695 - DNA, 12 bp, Artificial Sequence
  Oligonucleotide primer for the detection of SNP TSC0010948
taataccatcca

SEQ ID NO: 282696 - DNA, 12 bp, Artificial Sequence
  Oligonucleotide primer for the detection of SNP TSC0010948
attggttagaag

SEQ ID NO: 282697 - DNA, 12 bp, Artificial Sequence
  Oligonucleotide primer for the detection of SNP TSC0010948
attaaccaaaaa

SEQ ID NO: 282698 - DNA, 12 bp, Artificial Sequence
  Oligonucleotide primer for the detection of SNP TSC0010948
gatattatttat

SEQ ID NO: 282699 - DNA, 12 bp, Artificial Sequence
  Oligonucleotide primer for the detection of SNP TSC0010949
ctaccttcttac

SEQ ID NO: 282700 - DNA, 12 bp, Artificial Sequence
  Oligonucleotide primer for the detection of SNP TSC0010949
ggatttttggtg

SEQ ID NO: 282701 - DNA, 12 bp, Artificial Sequence
  Oligonucleotide primer for the detection of SNP TSC0010949
aaacttctaata

SEQ ID NO: 282702 - DNA, 12 bp, Artificial Sequence
  Oligonucleotide primer for the detection of SNP TSC0010949
ttgtttttttgt

SEQ ID NO: 282703 - DNA, 12 bp, Artificial Sequence
  Oligonucleotide primer for the detection of SNP TSC0010949
ttgtttttttgc

SEQ ID NO: 282704 - DNA, 12 bp, Artificial Sequence
  Oligonucleotide primer for the detection of SNP TSC0010950
aacataaactca

SEQ ID NO: 282705 - DNA, 12 bp, Artificial Sequence
  Oligonucleotide primer for the detection of SNP TSC0010950
ggagattttttt

SEQ ID NO: 282706 - DNA, 12 bp, Artificial Sequence
  Oligonucleotide primer for the detection of SNP TSC0010950
ggagattttttc

SEQ ID NO: 282707 - DNA, 12 bp, Artificial Sequence
  Oligonucleotide primer for the detection of SNP TSC0010950
aaaaatcccctc

SEQ ID NO: 282708 - DNA, 12 bp, Artificial Sequence
  Oligonucleotide primer for the detection of SNP TSC0010950
tggtatgggttt

SEQ ID NO: 282709 - DNA, 12 bp, Artificial Sequence
  Oligonucleotide primer for the detection of SNP TSC0010951
tcccatacatct

SEQ ID NO: 282710 - DNA, 12 bp, Artificial Sequence
  Oligonucleotide primer for the detection of SNP TSC0010951
taatgagttgta

SEQ ID NO: 282711 - DNA, 12 bp, Artificial Sequence
  Oligonucleotide primer for the detection of SNP TSC0010951
taacgagttgta

SEQ ID NO: 282712 - DNA, 12 bp, Artificial Sequence
  Oligonucleotide primer for the detection of SNP TSC0010953
tgttttaagttt

SEQ ID NO: 282713 - DNA, 12 bp, Artificial Sequence
  Oligonucleotide primer for the detection of SNP TSC0010953
atcccaaaccta

SEQ ID NO: 282714 - DNA, 12 bp, Artificial Sequence
  Oligonucleotide primer for the detection of SNP TSC0010953
gggataggagag

SEQ ID NO: 282715 - DNA, 12 bp, Artificial Sequence
  Oligonucleotide primer for the detection of SNP TSC0010958
taataactccac

SEQ ID NO: 282716 - DNA, 12 bp, Artificial Sequence
  Oligonucleotide primer for the detection of SNP TSC0010958
ggagaggttaaa

SEQ ID NO: 282717 - DNA, 12 bp, Artificial Sequence
  Oligonucleotide primer for the detection of SNP TSC0010963
tatcaaaaattc

SEQ ID NO: 282718 - DNA, 12 bp, Artificial Sequence
  Oligonucleotide primer for the detection of SNP TSC0010965
aaataccccacc

SEQ ID NO: 282719 - DNA, 12 bp, Artificial Sequence
  Oligonucleotide primer for the detection of SNP TSC0010965
agggtgagaaga

SEQ ID NO: 282720 - DNA, 12 bp, Artificial Sequence
  Oligonucleotide primer for the detection of SNP TSC0010966
ataaaaaaaatc

SEQ ID NO: 282721 - DNA, 12 bp, Artificial Sequence
  Oligonucleotide primer for the detection of SNP TSC0010966
gtaatagaattg

SEQ ID NO: 282722 - DNA, 12 bp, Artificial Sequence
  Oligonucleotide primer for the detection of SNP TSC0010967
tctatatcctcc

SEQ ID NO: 282723 - DNA, 12 bp, Artificial Sequence
  Oligonucleotide primer for the detection of SNP TSC0010967
gaggttattagg

SEQ ID NO: 282724 - DNA, 12 bp, Artificial Sequence
  Oligonucleotide primer for the detection of SNP TSC0010968
ttctaaaacctc

SEQ ID NO: 282725 - DNA, 12 bp, Artificial Sequence
  Oligonucleotide primer for the detection of SNP TSC0010968
cccacccaccca

SEQ ID NO: 282726 - DNA, 12 bp, Artificial Sequence
  Oligonucleotide primer for the detection of SNP TSC0010968
ttttgggatttt

SEQ ID NO: 282727 - DNA, 12 bp, Artificial Sequence
  Oligonucleotide primer for the detection of SNP TSC0010969
ctatcaactaca

SEQ ID NO: 282728 - DNA, 12 bp, Artificial Sequence
  Oligonucleotide primer for the detection of SNP TSC0010969
aatatctccttt

SEQ ID NO: 282729 - DNA, 12 bp, Artificial Sequence
  Oligonucleotide primer for the detection of SNP TSC0010970
ttaaaataattt

SEQ ID NO: 282730 - DNA, 12 bp, Artificial Sequence
  Oligonucleotide primer for the detection of SNP TSC0010970
ttttatttattt

SEQ ID NO: 282731 - DNA, 12 bp, Artificial Sequence
  Oligonucleotide primer for the detection of SNP TSC0010971
acccataacaat

SEQ ID NO: 282732 - DNA, 12 bp, Artificial Sequence
  Oligonucleotide primer for the detection of SNP TSC0010971
atatgtgtgttg

SEQ ID NO: 282733 - DNA, 12 bp, Artificial Sequence
  Oligonucleotide primer for the detection of SNP TSC0010972
aatttaattaaa

SEQ ID NO: 282734 - DNA, 12 bp, Artificial Sequence
  Oligonucleotide primer for the detection of SNP TSC0010972
ttggtttttttt

SEQ ID NO: 282735 - DNA, 12 bp, Artificial Sequence
  Oligonucleotide primer for the detection of SNP TSC0010972
ttaatcttcttt

SEQ ID NO: 282736 - DNA, 12 bp, Artificial Sequence
  Oligonucleotide primer for the detection of SNP TSC0010972
agtttaattaaa

SEQ ID NO: 282737 - DNA, 12 bp, Artificial Sequence
  Oligonucleotide primer for the detection of SNP TSC0010974
ttctacaatttt

SEQ ID NO: 282738 - DNA, 12 bp, Artificial Sequence
  Oligonucleotide primer for the detection of SNP TSC0010974
tattattgagga

SEQ ID NO: 282739 - DNA, 12 bp, Artificial Sequence
  Oligonucleotide primer for the detection of SNP TSC0010975
tacactattctt

SEQ ID NO: 282740 - DNA, 12 bp, Artificial Sequence
  Oligonucleotide primer for the detection of SNP TSC0010975
gattttataggt

SEQ ID NO: 282741 - DNA, 12 bp, Artificial Sequence
  Oligonucleotide primer for the detection of SNP TSC0010975
aattccataaac

SEQ ID NO: 282742 - DNA, 12 bp, Artificial Sequence
  Oligonucleotide primer for the detection of SNP TSC0010975
tgtattattttt

SEQ ID NO: 282743 - DNA, 12 bp, Artificial Sequence
  Oligonucleotide primer for the detection of SNP TSC0010976
attacaatactt

SEQ ID NO: 282744 - DNA, 12 bp, Artificial Sequence
  Oligonucleotide primer for the detection of SNP TSC0010976
tattatttatgg

SEQ ID NO: 282745 - DNA, 12 bp, Artificial Sequence
  Oligonucleotide primer for the detection of SNP TSC0010977
aacaaactctat

SEQ ID NO: 282746 - DNA, 12 bp, Artificial Sequence
  Oligonucleotide primer for the detection of SNP TSC0010977
tgttttgagata

SEQ ID NO: 282747 - DNA, 12 bp, Artificial Sequence
  Oligonucleotide primer for the detection of SNP TSC0010978
tttattactaat

SEQ ID NO: 282748 - DNA, 12 bp, Artificial Sequence
  Oligonucleotide primer for the detection of SNP TSC0010978
tagtaataaaaa

SEQ ID NO: 282749 - DNA, 12 bp, Artificial Sequence
  Oligonucleotide primer for the detection of SNP TSC0010979
aactcaataccc

SEQ ID NO: 282750 - DNA, 12 bp, Artificial Sequence
  Oligonucleotide primer for the detection of SNP TSC0010979
ggttaggggatg

SEQ ID NO: 282751 - DNA, 12 bp, Artificial Sequence
  Oligonucleotide primer for the detection of SNP TSC0010980
tattactaataa

SEQ ID NO: 282752 - DNA, 12 bp, Artificial Sequence
  Oligonucleotide primer for the detection of SNP TSC0010980
ttattttgtttg

SEQ ID NO: 282753 - DNA, 12 bp, Artificial Sequence
  Oligonucleotide primer for the detection of SNP TSC0010980
ccaccctaccta

SEQ ID NO: 282754 - DNA, 12 bp, Artificial Sequence
  Oligonucleotide primer for the detection of SNP TSC0010980
attattaataat

SEQ ID NO: 282755 - DNA, 12 bp, Artificial Sequence
  Oligonucleotide primer for the detection of SNP TSC0010981
aaaaaattcatc

SEQ ID NO: 282756 - DNA, 12 bp, Artificial Sequence
  Oligonucleotide primer for the detection of SNP TSC0010981
tttttattttta

SEQ ID NO: 282757 - DNA, 12 bp, Artificial Sequence
  Oligonucleotide primer for the detection of SNP TSC0010982
aaaataaaattt

SEQ ID NO: 282758 - DNA, 12 bp, Artificial Sequence
  Oligonucleotide primer for the detection of SNP TSC0010982
tgagtatttaga

SEQ ID NO: 282759 - DNA, 12 bp, Artificial Sequence
  Oligonucleotide primer for the detection of SNP TSC0010983
atacaacataat

SEQ ID NO: 282760 - DNA, 12 bp, Artificial Sequence
  Oligonucleotide primer for the detection of SNP TSC0010983
gtacaacataat

SEQ ID NO: 282761 - DNA, 12 bp, Artificial Sequence
  Oligonucleotide primer for the detection of SNP TSC0010983
ttattttgtggg

SEQ ID NO: 282762 - DNA, 12 bp, Artificial Sequence
  Oligonucleotide primer for the detection of SNP TSC0010984
aaaaaattccca

SEQ ID NO: 282763 - DNA, 12 bp, Artificial Sequence
  Oligonucleotide primer for the detection of SNP TSC0010984
ttttttagatga

SEQ ID NO: 282764 - DNA, 12 bp, Artificial Sequence
  Oligonucleotide primer for the detection of SNP TSC0010984
ctccaaataaaa

SEQ ID NO: 282765 - DNA, 12 bp, Artificial Sequence
  Oligonucleotide primer for the detection of SNP TSC0010984
aggaaaattttt

SEQ ID NO: 282766 - DNA, 12 bp, Artificial Sequence
  Oligonucleotide primer for the detection of SNP TSC0010985
ataaaaccttca

SEQ ID NO: 282767 - DNA, 12 bp, Artificial Sequence
  Oligonucleotide primer for the detection of SNP TSC0010985
gttaaaatagtt

SEQ ID NO: 282768 - DNA, 12 bp, Artificial Sequence
  Oligonucleotide primer for the detection of SNP TSC0010985
actaaaataatc

SEQ ID NO: 282769 - DNA, 12 bp, Artificial Sequence
  Oligonucleotide primer for the detection of SNP TSC0010985
tgtaaagttttt

SEQ ID NO: 282770 - DNA, 12 bp, Artificial Sequence
  Oligonucleotide primer for the detection of SNP TSC0010986
aatactcttaaa

SEQ ID NO: 282771 - DNA, 12 bp, Artificial Sequence
  Oligonucleotide primer for the detection of SNP TSC0010986
tcttcattctaa

SEQ ID NO: 282772 - DNA, 12 bp, Artificial Sequence
  Oligonucleotide primer for the detection of SNP TSC0010986
gaatgtttttag

SEQ ID NO: 282773 - DNA, 12 bp, Artificial Sequence
  Oligonucleotide primer for the detection of SNP TSC0010987
acaactaataat

SEQ ID NO: 282774 - DNA, 12 bp, Artificial Sequence
  Oligonucleotide primer for the detection of SNP TSC0010987
acgactaataat

SEQ ID NO: 282775 - DNA, 12 bp, Artificial Sequence
  Oligonucleotide primer for the detection of SNP TSC0010987
tattaggtatag

SEQ ID NO: 282776 - DNA, 12 bp, Artificial Sequence
  Oligonucleotide primer for the detection of SNP TSC0010988
taaaattattaa

SEQ ID NO: 282777 - DNA, 12 bp, Artificial Sequence
  Oligonucleotide primer for the detection of SNP TSC0010988
aaggtagatatt

SEQ ID NO: 282778 - DNA, 12 bp, Artificial Sequence
  Oligonucleotide primer for the detection of SNP TSC0010988
aaaacaaacatc

SEQ ID NO: 282779 - DNA, 12 bp, Artificial Sequence
  Oligonucleotide primer for the detection of SNP TSC0010988
taggattattag

SEQ ID NO: 282780 - DNA, 12 bp, Artificial Sequence
  Oligonucleotide primer for the detection of SNP TSC0010989
taatcccaacta

SEQ ID NO: 282781 - DNA, 12 bp, Artificial Sequence
  Oligonukleotid-Primer
attatagttttt

SEQ ID NO: 282782 - DNA, 12 bp, Artificial Sequence
  Oligonucleotide primer for the detection of SNP TSC0010989
accacaacctcc

SEQ ID NO: 282783 - DNA, 12 bp, Artificial Sequence
  Oligonucleotide primer for the detection of SNP TSC0010990
tacttccacctc

SEQ ID NO: 282784 - DNA, 12 bp, Artificial Sequence
  Oligonucleotide primer for the detection of SNP TSC0010990
tatttataatag

SEQ ID NO: 282785 - DNA, 12 bp, Artificial Sequence
  Oligonukleotid-Primer
tttttattcttt

SEQ ID NO: 282786 - DNA, 12 bp, Artificial Sequence
  Oligonucleotide primer for the detection of SNP TSC0010991
aaaaagaaaaga

SEQ ID NO: 282787 - DNA, 12 bp, Artificial Sequence
  Oligonucleotide primer for the detection of SNP TSC0010992
cgtatttagtta

SEQ ID NO: 282788 - DNA, 12 bp, Artificial Sequence
  Oligonucleotide primer for the detection of SNP TSC0010992
cacacccaacca

SEQ ID NO: 282789 - DNA, 12 bp, Artificial Sequence
  Oligonucleotide primer for the detection of SNP TSC0010992
cgcacccaacca

SEQ ID NO: 282790 - DNA, 12 bp, Artificial Sequence
  Oligonucleotide primer for the detection of SNP TSC0010992
aagaaaatgtgt

SEQ ID NO: 282791 - DNA, 12 bp, Artificial Sequence
  Oligonucleotide primer for the detection of SNP TSC0010993
tcttttcttttt

SEQ ID NO: 282792 - DNA, 12 bp, Artificial Sequence
  Oligonucleotide primer for the detection of SNP TSC0010993
ttttgttttaga

SEQ ID NO: 282793 - DNA, 12 bp, Artificial Sequence
  Oligonucleotide primer for the detection of SNP TSC0011000
actcctaaaaat

SEQ ID NO: 282794 - DNA, 12 bp, Artificial Sequence
  Oligonucleotide primer for the detection of SNP TSC0011000
tatgtagtttaa

SEQ ID NO: 282795 - DNA, 12 bp, Artificial Sequence
  Oligonucleotide primer for the detection of SNP TSC0011001
tgtgtttggttt

SEQ ID NO: 282796 - DNA, 12 bp, Artificial Sequence
  Oligonucleotide primer for the detection of SNP TSC0011001
tatacctaacct

SEQ ID NO: 282797 - DNA, 12 bp, Artificial Sequence
  Oligonucleotide primer for the detection of SNP TSC0011001
agttaattagat

SEQ ID NO: 282798 - DNA, 12 bp, Artificial Sequence
  Oligonucleotide primer for the detection of SNP TSC0011002
ttctaattcctt

SEQ ID NO: 282799 - DNA, 12 bp, Artificial Sequence
  Oligonucleotide primer for the detection of SNP TSC0011003
acaaccaaaaaa

SEQ ID NO: 282800 - DNA, 12 bp, Artificial Sequence
  Oligonucleotide primer for the detection of SNP TSC0011003
gaatgaggggtt

SEQ ID NO: 282801 - DNA, 12 bp, Artificial Sequence
  Oligonucleotide primer for the detection of SNP TSC0011003
atagttaagaag

SEQ ID NO: 282802 - DNA, 12 bp, Artificial Sequence
  Oligonucleotide primer for the detection of SNP TSC0011004
aacaacctcaaa

SEQ ID NO: 282803 - DNA, 12 bp, Artificial Sequence
  Oligonucleotide primer for the detection of SNP TSC0011004
atgtgggaggat

SEQ ID NO: 282804 - DNA, 12 bp, Artificial Sequence
  Oligonucleotide primer for the detection of SNP TSC0011004
acgtgggaggat

SEQ ID NO: 282805 - DNA, 12 bp, Artificial Sequence
  Oligonucleotide primer for the detection of SNP TSC0011004
aacataaaaaaa

SEQ ID NO: 282806 - DNA, 12 bp, Artificial Sequence
  Oligonucleotide primer for the detection of SNP TSC0011004
aacgtaaaaaaa

SEQ ID NO: 282807 - DNA, 12 bp, Artificial Sequence
  Oligonucleotide primer for the detection of SNP TSC0011004
atagttttaagt

SEQ ID NO: 282808 - DNA, 12 bp, Artificial Sequence
  Oligonucleotide primer for the detection of SNP TSC0011004
atagttttaagc

SEQ ID NO: 282809 - DNA, 12 bp, Artificial Sequence
  Oligonucleotide primer for the detection of SNP TSC0011006
aaccaaaactaa

SEQ ID NO: 282810 - DNA, 12 bp, Artificial Sequence
  Oligonucleotide primer for the detection of SNP TSC0011006
aaaaagtatttt

SEQ ID NO: 282811 - DNA, 12 bp, Artificial Sequence
  Oligonucleotide primer for the detection of SNP TSC0011006
aaaaaatacttt

SEQ ID NO: 282812 - DNA, 12 bp, Artificial Sequence
  Oligonucleotide primer for the detection of SNP TSC0011006
ggttagggttga

SEQ ID NO: 282813 - DNA, 12 bp, Artificial Sequence
  Oligonucleotide primer for the detection of SNP TSC0011007
tccttaaatttt

SEQ ID NO: 282814 - DNA, 12 bp, Artificial Sequence
  Oligonucleotide primer for the detection of SNP TSC0011007
tctaactctaaa

SEQ ID NO: 282815 - DNA, 12 bp, Artificial Sequence
  Oligonucleotide primer for the detection of SNP TSC0011008
ttttgtttttaa

SEQ ID NO: 282816 - DNA, 12 bp, Artificial Sequence
  Oligonucleotide primer for the detection of SNP TSC0011008
ttttatcttcaa

SEQ ID NO: 282817 - DNA, 12 bp, Artificial Sequence
  Oligonucleotide primer for the detection of SNP TSC0011008
aatgatgatttt

SEQ ID NO: 282818 - DNA, 12 bp, Artificial Sequence
  Oligonucleotide primer for the detection of SNP TSC0011009
tacacatacaat

SEQ ID NO: 282819 - DNA, 12 bp, Artificial Sequence
  Oligonucleotide primer for the detection of SNP TSC0011009
gaagtaaatgta

SEQ ID NO: 282820 - DNA, 12 bp, Artificial Sequence
  Oligonucleotide primer for the detection of SNP TSC0011010
cttacataaaac

SEQ ID NO: 282821 - DNA, 12 bp, Artificial Sequence
  Oligonucleotide primer for the detection of SNP TSC0011010
agatagttttag

SEQ ID NO: 282822 - DNA, 12 bp, Artificial Sequence
  Oligonucleotide primer for the detection of SNP TSC0011012
attacaacaaat

SEQ ID NO: 282823 - DNA, 12 bp, Artificial Sequence
  Oligonucleotide primer for the detection of SNP TSC0011012
aaataatttttg

SEQ ID NO: 282824 - DNA, 12 bp, Artificial Sequence
  Oligonucleotide primer for the detection of SNP TSC0011012
attataataagt

SEQ ID NO: 282825 - DNA, 12 bp, Artificial Sequence
  Oligonucleotide primer for the detection of SNP TSC0011015
tttttaataaaa

SEQ ID NO: 282826 - DNA, 12 bp, Artificial Sequence
  Oligonucleotide primer for the detection of SNP TSC0011015
tggtgaaatttt

SEQ ID NO: 282827 - DNA, 12 bp, Artificial Sequence
  Oligonucleotide primer for the detection of SNP TSC0011015
tggtgaaatttc

SEQ ID NO: 282828 - DNA, 12 bp, Artificial Sequence
  Oligonucleotide primer for the detection of SNP TSC0011015
aataaaacccca

SEQ ID NO: 282829 - DNA, 12 bp, Artificial Sequence
  Oligonucleotide primer for the detection of SNP TSC0011015
aataaaaccccg

SEQ ID NO: 282830 - DNA, 12 bp, Artificial Sequence
  Oligonucleotide primer for the detection of SNP TSC0011015
tttttagtagaa

SEQ ID NO: 282831 - DNA, 12 bp, Artificial Sequence
  Oligonucleotide primer for the detection of SNP TSC0011017
taaactctaaaa

SEQ ID NO: 282832 - DNA, 12 bp, Artificial Sequence
  Oligonucleotide primer for the detection of SNP TSC0011017
tttaatagtttg

SEQ ID NO: 282833 - DNA, 12 bp, Artificial Sequence
  Oligonucleotide primer for the detection of SNP TSC0011017
cccaacaaccta

SEQ ID NO: 282834 - DNA, 12 bp, Artificial Sequence
  Oligonucleotide primer for the detection of SNP TSC0011017
atgagttttaga

SEQ ID NO: 282835 - DNA, 12 bp, Artificial Sequence
  Oligonucleotide primer for the detection of SNP TSC0011018
tataaacacaat

SEQ ID NO: 282836 - DNA, 12 bp, Artificial Sequence
  Oligonucleotide primer for the detection of SNP TSC0011018
gtagagatgtaa

SEQ ID NO: 282837 - DNA, 12 bp, Artificial Sequence
  Oligonucleotide primer for the detection of SNP TSC0011019
tcaaaacaacac

SEQ ID NO: 282838 - DNA, 12 bp, Artificial Sequence
  Oligonucleotide primer for the detection of SNP TSC0011019
tttttagttggg

SEQ ID NO: 282839 - DNA, 12 bp, Artificial Sequence
  Oligonucleotide primer for the detection of SNP TSC0011019
tttttaactaaa

SEQ ID NO: 282840 - DNA, 12 bp, Artificial Sequence
  Oligonucleotide primer for the detection of SNP TSC0011019
ttaggataatat

SEQ ID NO: 282841 - DNA, 12 bp, Artificial Sequence
  Oligonucleotide primer for the detection of SNP TSC0011022
aattctaatacc

SEQ ID NO: 282842 - DNA, 12 bp, Artificial Sequence
  Oligonucleotide primer for the detection of SNP TSC0011022
ttattagggagg

SEQ ID NO: 282843 - DNA, 12 bp, Artificial Sequence
  Oligonucleotide primer for the detection of SNP TSC0011023
tctaacctcttt

SEQ ID NO: 282844 - DNA, 12 bp, Artificial Sequence
  Oligonucleotide primer for the detection of SNP TSC0011023
ttttaaaaatgg

SEQ ID NO: 282845 - DNA, 12 bp, Artificial Sequence
  Oligonucleotide primer for the detection of SNP TSC0011027
aaatttataaac

SEQ ID NO: 282846 - DNA, 12 bp, Artificial Sequence
  Oligonucleotide primer for the detection of SNP TSC0011027
agattgggaaaa

SEQ ID NO: 282847 - DNA, 12 bp, Artificial Sequence
  Oligonucleotide primer for the detection of SNP TSC0011028
aaaaatacttcc

SEQ ID NO: 282848 - DNA, 12 bp, Artificial Sequence
  Oligonucleotide primer for the detection of SNP TSC0011028
gtgaatgggaaa

SEQ ID NO: 282849 - DNA, 12 bp, Artificial Sequence
  Oligonucleotide primer for the detection of SNP TSC0011029
tcaaaacccttc

SEQ ID NO: 282850 - DNA, 12 bp, Artificial Sequence
  Oligonucleotide primer for the detection of SNP TSC0011029
ggtataagtata

SEQ ID NO: 282851 - DNA, 12 bp, Artificial Sequence
  Oligonucleotide primer for the detection of SNP TSC0011029
aatacaaataca

SEQ ID NO: 282852 - DNA, 12 bp, Artificial Sequence
  Oligonucleotide primer for the detection of SNP TSC0011029
ttagggtttttt

SEQ ID NO: 282853 - DNA, 12 bp, Artificial Sequence
  Oligonucleotide primer for the detection of SNP TSC0011030
aaaaactcctat

SEQ ID NO: 282854 - DNA, 12 bp, Artificial Sequence
  Oligonucleotide primer for the detection of SNP TSC0011030
ggttagtggatg

SEQ ID NO: 282855 - DNA, 12 bp, Artificial Sequence
  Oligonucleotide primer for the detection of SNP TSC0011031
ccttcttctcat

SEQ ID NO: 282856 - DNA, 12 bp, Artificial Sequence
  Oligonucleotide primer for the detection of SNP TSC0011031
gatatttaagtt

SEQ ID NO: 282857 - DNA, 12 bp, Artificial Sequence
  Oligonucleotide primer for the detection of SNP TSC0011031
aacatttaaact

SEQ ID NO: 282858 - DNA, 12 bp, Artificial Sequence
  Oligonucleotide primer for the detection of SNP TSC0011032
aataatattgaa

SEQ ID NO: 282859 - DNA, 12 bp, Artificial Sequence
  Oligonucleotide primer for the detection of SNP TSC0011033
ctatttttttaa

SEQ ID NO: 282860 - DNA, 12 bp, Artificial Sequence
  Oligonucleotide primer for the detection of SNP TSC0011033
ggttttaaaagt

SEQ ID NO: 282861 - DNA, 12 bp, Artificial Sequence
  Oligonucleotide primer for the detection of SNP TSC0011033
ggttttaaaagc

SEQ ID NO: 282862 - DNA, 12 bp, Artificial Sequence
  Oligonucleotide primer for the detection of SNP TSC0011033
aattttaaaaac

SEQ ID NO: 282863 - DNA, 12 bp, Artificial Sequence
  Oligonucleotide primer for the detection of SNP TSC0011034
catacttcataa

SEQ ID NO: 282864 - DNA, 12 bp, Artificial Sequence
  Oligonucleotide primer for the detection of SNP TSC0011034
aatatccataac

SEQ ID NO: 282865 - DNA, 12 bp, Artificial Sequence
  Oligonucleotide primer for the detection of SNP TSC0011034
tttatattttat

SEQ ID NO: 282866 - DNA, 12 bp, Artificial Sequence
  Oligonucleotide primer for the detection of SNP TSC0011037
acaaaacatcaa

SEQ ID NO: 282867 - DNA, 12 bp, Artificial Sequence
  Oligonucleotide primer for the detection of SNP TSC0011037
gaaagtaaggtt

SEQ ID NO: 282868 - DNA, 12 bp, Artificial Sequence
  Oligonucleotide primer for the detection of SNP TSC0011037
aaaaacaaaatt

SEQ ID NO: 282869 - DNA, 12 bp, Artificial Sequence
  Oligonucleotide primer for the detection of SNP TSC0011037
ataagatattaa

SEQ ID NO: 282870 - DNA, 12 bp, Artificial Sequence
  Oligonucleotide primer for the detection of SNP TSC0011038
aaatacatattc

SEQ ID NO: 282871 - DNA, 12 bp, Artificial Sequence
  Oligonucleotide primer for the detection of SNP TSC0011038
taggtaatattg

SEQ ID NO: 282872 - DNA, 12 bp, Artificial Sequence
  Oligonucleotide primer for the detection of SNP TSC0011038
caaacaacacta

SEQ ID NO: 282873 - DNA, 12 bp, Artificial Sequence
  Oligonucleotide primer for the detection of SNP TSC0011038
gagtatatattt

SEQ ID NO: 282874 - DNA, 12 bp, Artificial Sequence
  Oligonucleotide primer for the detection of SNP TSC0011039
ttacccaaaatc

SEQ ID NO: 282875 - DNA, 12 bp, Artificial Sequence
  Oligonucleotide primer for the detection of SNP TSC0011039
gtggtggaggtg

SEQ ID NO: 282876 - DNA, 12 bp, Artificial Sequence
  Oligonucleotide primer for the detection of SNP TSC0011039
gtggtggaggcg

SEQ ID NO: 282877 - DNA, 12 bp, Artificial Sequence
  Oligonucleotide primer for the detection of SNP TSC0011039
taataaaaacga

SEQ ID NO: 282878 - DNA, 12 bp, Artificial Sequence
  Oligonukleotid-Primer
tatttaaagttt

SEQ ID NO: 282879 - DNA, 12 bp, Artificial Sequence
  Oligonucleotide primer for the detection of SNP TSC0011040
cataacacacca

SEQ ID NO: 282880 - DNA, 12 bp, Artificial Sequence
  Oligonucleotide primer for the detection of SNP TSC0011040
cataacacgcca

SEQ ID NO: 282881 - DNA, 12 bp, Artificial Sequence
  Oligonucleotide primer for the detection of SNP TSC0011040
cgtaacacacca

SEQ ID NO: 282882 - DNA, 12 bp, Artificial Sequence
  Oligonucleotide primer for the detection of SNP TSC0011040
cgtaacacgcca

SEQ ID NO: 282883 - DNA, 12 bp, Artificial Sequence
  Oligonucleotide primer for the detection of SNP TSC0011040
taagattttagt

SEQ ID NO: 282884 - DNA, 12 bp, Artificial Sequence
  Oligonucleotide primer for the detection of SNP TSC0011040
taaaactttaat

SEQ ID NO: 282885 - DNA, 12 bp, Artificial Sequence
  Oligonucleotide primer for the detection of SNP TSC0011040
tgtgatatgtta

SEQ ID NO: 282886 - DNA, 12 bp, Artificial Sequence
  Oligonucleotide primer for the detection of SNP TSC0011040
cgtgatatgtta

SEQ ID NO: 282887 - DNA, 12 bp, Artificial Sequence
  Oligonucleotide primer for the detection of SNP TSC0011040
tgtgatacgtta

SEQ ID NO: 282888 - DNA, 12 bp, Artificial Sequence
  Oligonucleotide primer for the detection of SNP TSC0011040
cgtgatacgtta

SEQ ID NO: 282889 - DNA, 12 bp, Artificial Sequence
  Oligonucleotide primer for the detection of SNP TSC0011041
ctctaaaattat

SEQ ID NO: 282890 - DNA, 12 bp, Artificial Sequence
  Oligonucleotide primer for the detection of SNP TSC0011041
tgatttaattaa

SEQ ID NO: 282891 - DNA, 12 bp, Artificial Sequence
  Oligonucleotide primer for the detection of SNP TSC0011042
aatataaaatac

SEQ ID NO: 282892 - DNA, 12 bp, Artificial Sequence
  Oligonucleotide primer for the detection of SNP TSC0011042
tgataagtatta

SEQ ID NO: 282893 - DNA, 12 bp, Artificial Sequence
  Oligonucleotide primer for the detection of SNP TSC0011043
ctaattctaaaa

SEQ ID NO: 282894 - DNA, 12 bp, Artificial Sequence
  Oligonucleotide primer for the detection of SNP TSC0011043
atttttaaagat

SEQ ID NO: 282895 - DNA, 12 bp, Artificial Sequence
  Oligonucleotide primer for the detection of SNP TSC0011043
atttttaaaaat

SEQ ID NO: 282896 - DNA, 12 bp, Artificial Sequence
  Oligonucleotide primer for the detection of SNP TSC0011043
ttgattttaaag

SEQ ID NO: 282897 - DNA, 12 bp, Artificial Sequence
  Oligonucleotide primer for the detection of SNP TSC0011044
ccctttttctat

SEQ ID NO: 282898 - DNA, 12 bp, Artificial Sequence
  Oligonucleotide primer for the detection of SNP TSC0011044
gaataaaattaa

SEQ ID NO: 282899 - DNA, 12 bp, Artificial Sequence
  Oligonucleotide primer for the detection of SNP TSC0011045
aaacgaaactct

SEQ ID NO: 282900 - DNA, 12 bp, Artificial Sequence
  Oligonucleotide primer for the detection of SNP TSC0011045
ttggtgtttaga

SEQ ID NO: 282901 - DNA, 12 bp, Artificial Sequence
  Oligonucleotide primer for the detection of SNP TSC0011045
tcggtgtttaga

SEQ ID NO: 282902 - DNA, 12 bp, Artificial Sequence
  Oligonucleotide primer for the detection of SNP TSC0011046
ttctaaaactat

SEQ ID NO: 282903 - DNA, 12 bp, Artificial Sequence
  Oligonucleotide primer for the detection of SNP TSC0011046
attagtgaaaaa

SEQ ID NO: 282904 - DNA, 12 bp, Artificial Sequence
  Oligonucleotide primer for the detection of SNP TSC0011048
cctttctattcc

SEQ ID NO: 282905 - DNA, 12 bp, Artificial Sequence
  Oligonucleotide primer for the detection of SNP TSC0011048
aaaggaagttta

SEQ ID NO: 282906 - DNA, 12 bp, Artificial Sequence
  Oligonucleotide primer for the detection of SNP TSC0011049
acccacaaaatc

SEQ ID NO: 282907 - DNA, 12 bp, Artificial Sequence
  Oligonucleotide primer for the detection of SNP TSC0011049
atagagatagtg

SEQ ID NO: 282908 - DNA, 12 bp, Artificial Sequence
  Oligonucleotide primer for the detection of SNP TSC0011049
caaaaacaataa

SEQ ID NO: 282909 - DNA, 12 bp, Artificial Sequence
  Oligonucleotide primer for the detection of SNP TSC0011049
tttataaggttt

SEQ ID NO: 282910 - DNA, 12 bp, Artificial Sequence
  Oligonucleotide primer for the detection of SNP TSC0011050
actaccccaact

SEQ ID NO: 282911 - DNA, 12 bp, Artificial Sequence
  Oligonucleotide primer for the detection of SNP TSC0011050
tgttgggggtag

SEQ ID NO: 282912 - DNA, 12 bp, Artificial Sequence
  Oligonucleotide primer for the detection of SNP TSC0011053
acaaaaaaaata

SEQ ID NO: 282913 - DNA, 12 bp, Artificial Sequence
  Oligonucleotide primer for the detection of SNP TSC0011053
ttatttaattat

SEQ ID NO: 282914 - DNA, 12 bp, Artificial Sequence
  Oligonucleotide primer for the detection of SNP TSC0011053
tatttaaccata

SEQ ID NO: 282915 - DNA, 12 bp, Artificial Sequence
  Oligonucleotide primer for the detection of SNP TSC0011053
tataaaaagagt

SEQ ID NO: 282916 - DNA, 12 bp, Artificial Sequence
  Oligonucleotide primer for the detection of SNP TSC0011054
attataatactc

SEQ ID NO: 282917 - DNA, 12 bp, Artificial Sequence
  Oligonucleotide primer for the detection of SNP TSC0011054
tagaatttattg

SEQ ID NO: 282918 - DNA, 12 bp, Artificial Sequence
  Oligonucleotide primer for the detection of SNP TSC0011055
gagttaagtttt

SEQ ID NO: 282919 - DNA, 12 bp, Artificial Sequence
  Oligonucleotide primer for the detection of SNP TSC0011055
aaaatcaaactc

SEQ ID NO: 282920 - DNA, 12 bp, Artificial Sequence
  Oligonucleotide primer for the detection of SNP TSC0011055
gtaataatgatt

SEQ ID NO: 282921 - DNA, 12 bp, Artificial Sequence
  Oligonucleotide primer for the detection of SNP TSC0011055
gtaataatgatc

SEQ ID NO: 282922 - DNA, 12 bp, Artificial Sequence
  Oligonucleotide primer for the detection of SNP TSC0011056
gagatttttggg

SEQ ID NO: 282923 - DNA, 12 bp, Artificial Sequence
  Oligonucleotide primer for the detection of SNP TSC0011056
aaaatttctaaa

SEQ ID NO: 282924 - DNA, 12 bp, Artificial Sequence
  Oligonucleotide primer for the detection of SNP TSC0011059
caaatcaccttt

SEQ ID NO: 282925 - DNA, 12 bp, Artificial Sequence
  Oligonucleotide primer for the detection of SNP TSC0011059
ttatgttataaa

SEQ ID NO: 282926 - DNA, 12 bp, Artificial Sequence
  Oligonucleotide primer for the detection of SNP TSC0011060
aaatcactaaac

SEQ ID NO: 282927 - DNA, 12 bp, Artificial Sequence
  Oligonucleotide primer for the detection of SNP TSC0011060
tttaaattttgg

SEQ ID NO: 282928 - DNA, 12 bp, Artificial Sequence
  Oligonucleotide primer for the detection of SNP TSC0011061
tattaaccaaac

SEQ ID NO: 282929 - DNA, 12 bp, Artificial Sequence
  Oligonucleotide primer for the detection of SNP TSC0011061
aggagtttaaaa

SEQ ID NO: 282930 - DNA, 12 bp, Artificial Sequence
  Oligonucleotide primer for the detection of SNP TSC0011061
aaaaattcaaaa

SEQ ID NO: 282931 - DNA, 12 bp, Artificial Sequence
  Oligonucleotide primer for the detection of SNP TSC0011061
tgttggttaggt

SEQ ID NO: 282932 - DNA, 12 bp, Artificial Sequence
  Oligonucleotide primer for the detection of SNP TSC0011062
aataccttaaaa

SEQ ID NO: 282933 - DNA, 12 bp, Artificial Sequence
  Oligonucleotide primer for the detection of SNP TSC0011062
attagtttttat

SEQ ID NO: 282934 - DNA, 12 bp, Artificial Sequence
  Oligonucleotide primer for the detection of SNP TSC0011062
accaattcctac

SEQ ID NO: 282935 - DNA, 12 bp, Artificial Sequence
  Oligonucleotide primer for the detection of SNP TSC0011062
agtattttaaaa

SEQ ID NO: 282936 - DNA, 12 bp, Artificial Sequence
  Oligonucleotide primer for the detection of SNP TSC0011063
cttatctctttc

SEQ ID NO: 282937 - DNA, 12 bp, Artificial Sequence
  Oligonucleotide primer for the detection of SNP TSC0011063
ttagttgtttag

SEQ ID NO: 282938 - DNA, 12 bp, Artificial Sequence
  Oligonucleotide primer for the detection of SNP TSC0011064
atctaataaaat

SEQ ID NO: 282939 - DNA, 12 bp, Artificial Sequence
  Oligonucleotide primer for the detection of SNP TSC0011064
tttatttagtta

SEQ ID NO: 282940 - DNA, 12 bp, Artificial Sequence
  Oligonucleotide primer for the detection of SNP TSC0011065
aaaaacataaac

SEQ ID NO: 282941 - DNA, 12 bp, Artificial Sequence
  Oligonucleotide primer for the detection of SNP TSC0011065
aaaaacgtaaac

SEQ ID NO: 282942 - DNA, 12 bp, Artificial Sequence
  Oligonucleotide primer for the detection of SNP TSC0011065
tagtttataata

SEQ ID NO: 282943 - DNA, 12 bp, Artificial Sequence
  Oligonucleotide primer for the detection of SNP TSC0011065
caattcacaata

SEQ ID NO: 282944 - DNA, 12 bp, Artificial Sequence
  Oligonucleotide primer for the detection of SNP TSC0011065
aggagtgtgaat

SEQ ID NO: 282945 - DNA, 12 bp, Artificial Sequence
  Oligonucleotide primer for the detection of SNP TSC0011065
aggagcgtgaat

SEQ ID NO: 282946 - DNA, 12 bp, Artificial Sequence
  Oligonucleotide primer for the detection of SNP TSC0011066
tcttttcaacct

SEQ ID NO: 282947 - DNA, 12 bp, Artificial Sequence
  Oligonucleotide primer for the detection of SNP TSC0011066
aaattttattta

SEQ ID NO: 282948 - DNA, 12 bp, Artificial Sequence
  unsure (4): Oligonucleotide primer for the detection of SNP TSC0011067
actntcacactc

SEQ ID NO: 282949 - DNA, 12 bp, Artificial Sequence
  Oligonucleotide primer for the detection of SNP TSC0011067
agttaagattaa

SEQ ID NO: 282950 - DNA, 12 bp, Artificial Sequence
  Oligonucleotide primer for the detection of SNP TSC0011067
aattaaaaccaa

SEQ ID NO: 282951 - DNA, 12 bp, Artificial Sequence
  unsure (4): Oligonucleotide primer for the detection of SNP TSC0011067
gttnttatattt

SEQ ID NO: 282952 - DNA, 12 bp, Artificial Sequence
  Oligonucleotide primer for the detection of SNP TSC0011068
acccgcctcaac

SEQ ID NO: 282953 - DNA, 12 bp, Artificial Sequence
  Oligonucleotide primer for the detection of SNP TSC0011068
gcccacctcaac

SEQ ID NO: 282954 - DNA, 12 bp, Artificial Sequence
  Oligonucleotide primer for the detection of SNP TSC0011068
acccgcctcgac

SEQ ID NO: 282955 - DNA, 12 bp, Artificial Sequence
  Oligonucleotide primer for the detection of SNP TSC0011068
gcccacctcgac

SEQ ID NO: 282956 - DNA, 12 bp, Artificial Sequence
  Oligonucleotide primer for the detection of SNP TSC0011068
gcccgcctcaac

SEQ ID NO: 282957 - DNA, 12 bp, Artificial Sequence
  Oligonucleotide primer for the detection of SNP TSC0011068
gcccgcctcgac

SEQ ID NO: 282958 - DNA, 12 bp, Artificial Sequence
  Oligonucleotide primer for the detection of SNP TSC0011068
agtattttggga

SEQ ID NO: 282959 - DNA, 12 bp, Artificial Sequence
  Oligonucleotide primer for the detection of SNP TSC0011070
aaaactaaccaa

SEQ ID NO: 282960 - DNA, 12 bp, Artificial Sequence
  Oligonucleotide primer for the detection of SNP TSC0011070
ttaaattgagat

SEQ ID NO: 282961 - DNA, 12 bp, Artificial Sequence
  Oligonucleotide primer for the detection of SNP TSC0011070
ctaaattaaaat

SEQ ID NO: 282962 - DNA, 12 bp, Artificial Sequence
  Oligonucleotide primer for the detection of SNP TSC0011070
aattggttagtt

SEQ ID NO: 282963 - DNA, 12 bp, Artificial Sequence
  Oligonukleotid-Primer
ttaatttttttg

SEQ ID NO: 282964 - DNA, 12 bp, Artificial Sequence
  Oligonucleotide primer for the detection of SNP TSC0011071
ctaattttttta

SEQ ID NO: 282965 - DNA, 12 bp, Artificial Sequence
  Oligonucleotide primer for the detection of SNP TSC0011071
atataaaaaaaa

SEQ ID NO: 282966 - DNA, 12 bp, Artificial Sequence
  Oligonucleotide primer for the detection of SNP TSC0011073
atttaataaaat

SEQ ID NO: 282967 - DNA, 12 bp, Artificial Sequence
  Oligonucleotide primer for the detection of SNP TSC0011073
gttattatgtga

SEQ ID NO: 282968 - DNA, 12 bp, Artificial Sequence
  Oligonucleotide primer for the detection of SNP TSC0011074
caacataattac

SEQ ID NO: 282969 - DNA, 12 bp, Artificial Sequence
  Oligonucleotide primer for the detection of SNP TSC0011074
attatataaatg

SEQ ID NO: 282970 - DNA, 12 bp, Artificial Sequence
  Oligonucleotide primer for the detection of SNP TSC0011074
attatacaaata

SEQ ID NO: 282971 - DNA, 12 bp, Artificial Sequence
  Oligonucleotide primer for the detection of SNP TSC0011074
taatataattat

SEQ ID NO: 282972 - DNA, 12 bp, Artificial Sequence
  Oligonucleotide primer for the detection of SNP TSC0011078
caacaactcact

SEQ ID NO: 282973 - DNA, 12 bp, Artificial Sequence
  Oligonucleotide primer for the detection of SNP TSC0011078
tgtaaaagttta

SEQ ID NO: 282974 - DNA, 12 bp, Artificial Sequence
  Oligonucleotide primer for the detection of SNP TSC0011079
acttaatatata

SEQ ID NO: 282975 - DNA, 12 bp, Artificial Sequence
  Oligonucleotide primer for the detection of SNP TSC0011079
ggagttaataga

SEQ ID NO: 282976 - DNA, 12 bp, Artificial Sequence
  Oligonucleotide primer for the detection of SNP TSC0011080
accacccacccc

SEQ ID NO: 282977 - DNA, 12 bp, Artificial Sequence
  Oligonucleotide primer for the detection of SNP TSC0011080
ggtagttggggt

SEQ ID NO: 282978 - DNA, 12 bp, Artificial Sequence
  Oligonucleotide primer for the detection of SNP TSC0011080
ggtagtcggggt

SEQ ID NO: 282979 - DNA, 12 bp, Artificial Sequence
  Oligonucleotide primer for the detection of SNP TSC0011080
aaacaatcaaaa

SEQ ID NO: 282980 - DNA, 12 bp, Artificial Sequence
  Oligonucleotide primer for the detection of SNP TSC0011080
aaacaatcgaaa

SEQ ID NO: 282981 - DNA, 12 bp, Artificial Sequence
  Oligonucleotide primer for the detection of SNP TSC0011080
gttatttatttt

SEQ ID NO: 282982 - DNA, 12 bp, Artificial Sequence
  Oligonucleotide primer for the detection of SNP TSC0011080
gttatttatttc

SEQ ID NO: 282983 - DNA, 12 bp, Artificial Sequence
  Oligonucleotide primer for the detection of SNP TSC0011081
gttagaattgat

SEQ ID NO: 282984 - DNA, 12 bp, Artificial Sequence
  Oligonucleotide primer for the detection of SNP TSC0011081
gttagaattgac

SEQ ID NO: 282985 - DNA, 12 bp, Artificial Sequence
  Oligonucleotide primer for the detection of SNP TSC0011081
caccaaaattaa

SEQ ID NO: 282986 - DNA, 12 bp, Artificial Sequence
  Oligonucleotide primer for the detection of SNP TSC0011081
cgccaaaattaa

SEQ ID NO: 282987 - DNA, 12 bp, Artificial Sequence
  Oligonucleotide primer for the detection of SNP TSC0011081
ggaaggtaaaga

SEQ ID NO: 282988 - DNA, 12 bp, Artificial Sequence
  Oligonucleotide primer for the detection of SNP TSC0011082
aaatacaaccaa

SEQ ID NO: 282989 - DNA, 12 bp, Artificial Sequence
  Oligonucleotide primer for the detection of SNP TSC0011082
aggtatagttga

SEQ ID NO: 282990 - DNA, 12 bp, Artificial Sequence
  Oligonucleotide primer for the detection of SNP TSC0011082
aggtatagtcga

SEQ ID NO: 282991 - DNA, 12 bp, Artificial Sequence
  Oligonucleotide primer for the detection of SNP TSC0011082
aaacacaatcaa

SEQ ID NO: 282992 - DNA, 12 bp, Artificial Sequence
  Oligonucleotide primer for the detection of SNP TSC0011082
aaacacaatcga

SEQ ID NO: 282993 - DNA, 12 bp, Artificial Sequence
  Oligonucleotide primer for the detection of SNP TSC0011082
aaatatagttag

SEQ ID NO: 282994 - DNA, 12 bp, Artificial Sequence
  Oligonucleotide primer for the detection of SNP TSC0011083
acttcattactc

SEQ ID NO: 282995 - DNA, 12 bp, Artificial Sequence
  Oligonucleotide primer for the detection of SNP TSC0011083
ggttgtatttta

SEQ ID NO: 282996 - DNA, 12 bp, Artificial Sequence
  Oligonucleotide primer for the detection of SNP TSC0011084
aaaaaccaaaat

SEQ ID NO: 282997 - DNA, 12 bp, Artificial Sequence
  Oligonucleotide primer for the detection of SNP TSC0011084
aaaaaccgaaat

SEQ ID NO: 282998 - DNA, 12 bp, Artificial Sequence
  Oligonucleotide primer for the detection of SNP TSC0011084
tggttaatgtga

SEQ ID NO: 282999 - DNA, 12 bp, Artificial Sequence
  Oligonucleotide primer for the detection of SNP TSC0011084
taaccaatataa

SEQ ID NO: 283000 - DNA, 12 bp, Artificial Sequence
  Oligonucleotide primer for the detection of SNP TSC0011084
ggaggttgagat

SEQ ID NO: 283001 - DNA, 12 bp, Artificial Sequence
  Oligonucleotide primer for the detection of SNP TSC0011084
ggaggtcgagat

SEQ ID NO: 283002 - DNA, 12 bp, Artificial Sequence
  Oligonucleotide primer for the detection of SNP TSC0011088
acttactacaaa

SEQ ID NO: 283003 - DNA, 12 bp, Artificial Sequence
  Oligonucleotide primer for the detection of SNP TSC0011088
aataattattgt

SEQ ID NO: 283004 - DNA, 12 bp, Artificial Sequence
  Oligonucleotide primer for the detection of SNP TSC0011088
aataattatcgt

SEQ ID NO: 283005 - DNA, 12 bp, Artificial Sequence
  Oligonucleotide primer for the detection of SNP TSC0011088
aaacaattacca

SEQ ID NO: 283006 - DNA, 12 bp, Artificial Sequence
  Oligonucleotide primer for the detection of SNP TSC0011088
aaacaattaccg

SEQ ID NO: 283007 - DNA, 12 bp, Artificial Sequence
  Oligonucleotide primer for the detection of SNP TSC0011088
agtttattgtag

SEQ ID NO: 283008 - DNA, 12 bp, Artificial Sequence
  Oligonucleotide primer for the detection of SNP TSC0011092
aaattataccac

SEQ ID NO: 283009 - DNA, 12 bp, Artificial Sequence
  Oligonucleotide primer for the detection of SNP TSC0011092
ggttgagttata

SEQ ID NO: 283010 - DNA, 12 bp, Artificial Sequence
  Oligonucleotide primer for the detection of SNP TSC0011093
ataaactttatc

SEQ ID NO: 283011 - DNA, 12 bp, Artificial Sequence
  Oligonucleotide primer for the detection of SNP TSC0011093
tgaggggtgtgg

SEQ ID NO: 283012 - DNA, 12 bp, Artificial Sequence
  Oligonucleotide primer for the detection of SNP TSC0011094
atccttccttcc

SEQ ID NO: 283013 - DNA, 12 bp, Artificial Sequence
  Oligonucleotide primer for the detection of SNP TSC0011094
atttggtgagaa

SEQ ID NO: 283014 - DNA, 12 bp, Artificial Sequence
  Oligonucleotide primer for the detection of SNP TSC0011094
atttggcgagaa

SEQ ID NO: 283015 - DNA, 12 bp, Artificial Sequence
  Oligonucleotide primer for the detection of SNP TSC0011099
ttattataaaat

SEQ ID NO: 283016 - DNA, 12 bp, Artificial Sequence
  Oligonucleotide primer for the detection of SNP TSC0011099
aaaaaaaaagaa

SEQ ID NO: 283017 - DNA, 12 bp, Artificial Sequence
  Oligonucleotide primer for the detection of SNP TSC0011100
ctcaaaaaaaca

SEQ ID NO: 283018 - DNA, 12 bp, Artificial Sequence
  Oligonucleotide primer for the detection of SNP TSC0011100
tttgtttgttgt

SEQ ID NO: 283019 - DNA, 12 bp, Artificial Sequence
  Oligonucleotide primer for the detection of SNP TSC0011100
tttatttattat

SEQ ID NO: 283020 - DNA, 12 bp, Artificial Sequence
  Oligonucleotide primer for the detection of SNP TSC0011100
tttaggaaaata

SEQ ID NO: 283021 - DNA, 12 bp, Artificial Sequence
  Oligonucleotide primer for the detection of SNP TSC0011101
aataacaaacac

SEQ ID NO: 283022 - DNA, 12 bp, Artificial Sequence
  Oligonucleotide primer for the detection of SNP TSC0011101
aataacaaacgc

SEQ ID NO: 283023 - DNA, 12 bp, Artificial Sequence
  Oligonucleotide primer for the detection of SNP TSC0011101
aataacgaacac

SEQ ID NO: 283024 - DNA, 12 bp, Artificial Sequence
  Oligonucleotide primer for the detection of SNP TSC0011101
aataacgaacgc

SEQ ID NO: 283025 - DNA, 12 bp, Artificial Sequence
  Oligonucleotide primer for the detection of SNP TSC0011104
caaaaccatact

SEQ ID NO: 283026 - DNA, 12 bp, Artificial Sequence
  Oligonucleotide primer for the detection of SNP TSC0011104
aaatataagaat

SEQ ID NO: 283027 - DNA, 12 bp, Artificial Sequence
  Oligonucleotide primer for the detection of SNP TSC0011104
aaacataaaaat

SEQ ID NO: 283028 - DNA, 12 bp, Artificial Sequence
  Oligonucleotide primer for the detection of SNP TSC0011104
tagggttatatt

SEQ ID NO: 283029 - DNA, 12 bp, Artificial Sequence
  Oligonucleotide primer for the detection of SNP TSC0011109
aaaaatatttat

SEQ ID NO: 283030 - DNA, 12 bp, Artificial Sequence
  Oligonucleotide primer for the detection of SNP TSC0011109
agtgtgatgagg

SEQ ID NO: 283031 - DNA, 12 bp, Artificial Sequence
  Oligonucleotide primer for the detection of SNP TSC0011109
agcgtgatgagg

SEQ ID NO: 283032 - DNA, 12 bp, Artificial Sequence
  Oligonukleotid-Primer
agtgcgatgagg

SEQ ID NO: 283033 - DNA, 12 bp, Artificial Sequence
  Oligonucleotide primer for the detection of SNP TSC0011109
agcgcgatgagg

SEQ ID NO: 283034 - DNA, 12 bp, Artificial Sequence
  Oligonucleotide primer for the detection of SNP TSC0011110
acaaaaacaaca

SEQ ID NO: 283035 - DNA, 12 bp, Artificial Sequence
  Oligonucleotide primer for the detection of SNP TSC0011110
acaaaaacgaca

SEQ ID NO: 283036 - DNA, 12 bp, Artificial Sequence
  Oligonucleotide primer for the detection of SNP TSC0011110
ttttattgttat

SEQ ID NO: 283037 - DNA, 12 bp, Artificial Sequence
  Oligonucleotide primer for the detection of SNP TSC0011110
tttcattattat

SEQ ID NO: 283038 - DNA, 12 bp, Artificial Sequence
  Oligonucleotide primer for the detection of SNP TSC0011110
atagaggtggta

SEQ ID NO: 283039 - DNA, 12 bp, Artificial Sequence
  Oligonucleotide primer for the detection of SNP TSC0011110
atagaggcggta

SEQ ID NO: 283040 - DNA, 12 bp, Artificial Sequence
  Oligonucleotide primer for the detection of SNP TSC0011111
atcaaaatatct

SEQ ID NO: 283041 - DNA, 12 bp, Artificial Sequence
  Oligonucleotide primer for the detection of SNP TSC0011111
tatagttgttta

SEQ ID NO: 283042 - DNA, 12 bp, Artificial Sequence
  Oligonucleotide primer for the detection of SNP TSC0011113
aacttatttttt

SEQ ID NO: 283043 - DNA, 12 bp, Artificial Sequence
  Oligonucleotide primer for the detection of SNP TSC0011113
aaataataataa

SEQ ID NO: 283044 - DNA, 12 bp, Artificial Sequence
  Oligonucleotide primer for the detection of SNP TSC0011113
gatttatttttt

SEQ ID NO: 283045 - DNA, 12 bp, Artificial Sequence
  Oligonucleotide primer for the detection of SNP TSC0011114
tactctaattta

SEQ ID NO: 283046 - DNA, 12 bp, Artificial Sequence
  Oligonucleotide primer for the detection of SNP TSC0011114
attggagaaaga

SEQ ID NO: 283047 - DNA, 12 bp, Artificial Sequence
  Oligonucleotide primer for the detection of SNP TSC0011114
tattttaatttg

SEQ ID NO: 283048 - DNA, 12 bp, Artificial Sequence
  Oligonucleotide primer for the detection of SNP TSC0011117
aaaccccatcct

SEQ ID NO: 283049 - DNA, 12 bp, Artificial Sequence
  Oligonucleotide primer for the detection of SNP TSC0011117
ttttggtttggg

SEQ ID NO: 283050 - DNA, 12 bp, Artificial Sequence
  Oligonucleotide primer for the detection of SNP TSC0011120
ctacaaaaaatc

SEQ ID NO: 283051 - DNA, 12 bp, Artificial Sequence
  Oligonucleotide primer for the detection of SNP TSC0011120
gtagtgtgtgta

SEQ ID NO: 283052 - DNA, 12 bp, Artificial Sequence
  Oligonucleotide primer for the detection of SNP TSC0011121
agaaatatttgt

SEQ ID NO: 283053 - DNA, 12 bp, Artificial Sequence
  Oligonucleotide primer for the detection of SNP TSC0011121
gtggaaatgagg

SEQ ID NO: 283054 - DNA, 12 bp, Artificial Sequence
  Oligonucleotide primer for the detection of SNP TSC0011122
taaatattatcc

SEQ ID NO: 283055 - DNA, 12 bp, Artificial Sequence
  Oligonucleotide primer for the detection of SNP TSC0011122
taagtgataaaa

SEQ ID NO: 283056 - DNA, 12 bp, Artificial Sequence
  Oligonucleotide primer for the detection of SNP TSC0011123
ctttacacaaac

SEQ ID NO: 283057 - DNA, 12 bp, Artificial Sequence
  Oligonucleotide primer for the detection of SNP TSC0011123
ggggatttttta

SEQ ID NO: 283058 - DNA, 12 bp, Artificial Sequence
  Oligonucleotide primer for the detection of SNP TSC0011125
acctcaaacttc

SEQ ID NO: 283059 - DNA, 12 bp, Artificial Sequence
  Oligonucleotide primer for the detection of SNP TSC0011125
ggattttttgag

SEQ ID NO: 283060 - DNA, 12 bp, Artificial Sequence
  Oligonucleotide primer for the detection of SNP TSC0011125
aaatcttctaaa

SEQ ID NO: 283061 - DNA, 12 bp, Artificial Sequence
  Oligonucleotide primer for the detection of SNP TSC0011128
aattccctttac

SEQ ID NO: 283062 - DNA, 12 bp, Artificial Sequence
  Oligonucleotide primer for the detection of SNP TSC0011128
aaggaggttgga

SEQ ID NO: 283063 - DNA, 12 bp, Artificial Sequence
  Oligonucleotide primer for the detection of SNP TSC0011129
ctttaactttct

SEQ ID NO: 283064 - DNA, 12 bp, Artificial Sequence
  Oligonucleotide primer for the detection of SNP TSC0011129
aaattgtataaa

SEQ ID NO: 283065 - DNA, 12 bp, Artificial Sequence
  Oligonucleotide primer for the detection of SNP TSC0011130
aaaaaaaattat

SEQ ID NO: 283066 - DNA, 12 bp, Artificial Sequence
  Oligonucleotide primer for the detection of SNP TSC0011130
aggtggatgtta

SEQ ID NO: 283067 - DNA, 12 bp, Artificial Sequence
  Oligonucleotide primer for the detection of SNP TSC0011131
aaccaaataaat

SEQ ID NO: 283068 - DNA, 12 bp, Artificial Sequence
  Oligonucleotide primer for the detection of SNP TSC0011131
aaccgaataaat

SEQ ID NO: 283069 - DNA, 12 bp, Artificial Sequence
  Oligonucleotide primer for the detection of SNP TSC0011131
gagttagatggg

SEQ ID NO: 283070 - DNA, 12 bp, Artificial Sequence
  Oligonucleotide primer for the detection of SNP TSC0011131
gagttagacggg

SEQ ID NO: 283071 - DNA, 12 bp, Artificial Sequence
  Oligonucleotide primer for the detection of SNP TSC0011131
aaattaaacaaa

SEQ ID NO: 283072 - DNA, 12 bp, Artificial Sequence
  Oligonucleotide primer for the detection of SNP TSC0011131
aaattaaacgaa

SEQ ID NO: 283073 - DNA, 12 bp, Artificial Sequence
  Oligonucleotide primer for the detection of SNP TSC0011131
ggttgggtgggt

SEQ ID NO: 283074 - DNA, 12 bp, Artificial Sequence
  Oligonucleotide primer for the detection of SNP TSC0011131
ggtcgggtgggt

SEQ ID NO: 283075 - DNA, 12 bp, Artificial Sequence
  Oligonucleotide primer for the detection of SNP TSC0011132
cacccccaacta

SEQ ID NO: 283076 - DNA, 12 bp, Artificial Sequence
  Oligonucleotide primer for the detection of SNP TSC0011132
cacccccgacta

SEQ ID NO: 283077 - DNA, 12 bp, Artificial Sequence
  Oligonucleotide primer for the detection of SNP TSC0011132
cgcccccaacta

SEQ ID NO: 283078 - DNA, 12 bp, Artificial Sequence
  Oligonucleotide primer for the detection of SNP TSC0011132
cgcccccgacta

SEQ ID NO: 283079 - DNA, 12 bp, Artificial Sequence
  Oligonucleotide primer for the detection of SNP TSC0011132
ttggggtgtggt

SEQ ID NO: 283080 - DNA, 12 bp, Artificial Sequence
  Oligonucleotide primer for the detection of SNP TSC0011132
ctaaaatataat

SEQ ID NO: 283081 - DNA, 12 bp, Artificial Sequence
  Oligonucleotide primer for the detection of SNP TSC0011132
tgtttttggttg

SEQ ID NO: 283082 - DNA, 12 bp, Artificial Sequence
  Oligonucleotide primer for the detection of SNP TSC0011132
cgtttttggttg

SEQ ID NO: 283083 - DNA, 12 bp, Artificial Sequence
  Oligonucleotide primer for the detection of SNP TSC0011132
tgttttcggttg

SEQ ID NO: 283084 - DNA, 12 bp, Artificial Sequence
  Oligonucleotide primer for the detection of SNP TSC0011132
cgttttcggttg

SEQ ID NO: 283085 - DNA, 12 bp, Artificial Sequence
  Oligonucleotide primer for the detection of SNP TSC0011137
ataaaaataact

SEQ ID NO: 283086 - DNA, 12 bp, Artificial Sequence
  Oligonucleotide primer for the detection of SNP TSC0011137
atgttttattta

SEQ ID NO: 283087 - DNA, 12 bp, Artificial Sequence
  Oligonucleotide primer for the detection of SNP TSC0011137
acgttttattta

SEQ ID NO: 283088 - DNA, 12 bp, Artificial Sequence
  Oligonucleotide primer for the detection of SNP TSC0011139
acctaccacaca

SEQ ID NO: 283089 - DNA, 12 bp, Artificial Sequence
  Oligonucleotide primer for the detection of SNP TSC0011139
attttaaatggt

SEQ ID NO: 283090 - DNA, 12 bp, Artificial Sequence
  Oligonucleotide primer for the detection of SNP TSC0011140
cctaccacacac

SEQ ID NO: 283091 - DNA, 12 bp, Artificial Sequence
  Oligonucleotide primer for the detection of SNP TSC0011140
ttttaaatggtg

SEQ ID NO: 283092 - DNA, 12 bp, Artificial Sequence
  Oligonucleotide primer for the detection of SNP TSC0011141
tgtatatttttt

SEQ ID NO: 283093 - DNA, 12 bp, Artificial Sequence
  Oligonucleotide primer for the detection of SNP TSC0011141
tacacatttttt

SEQ ID NO: 283094 - DNA, 12 bp, Artificial Sequence
  Oligonucleotide primer for the detection of SNP TSC0011141
aagaaaataaat

SEQ ID NO: 283095 - DNA, 12 bp, Artificial Sequence
  Oligonucleotide primer for the detection of SNP TSC0011142
ccttaatccacc

SEQ ID NO: 283096 - DNA, 12 bp, Artificial Sequence
  Oligonucleotide primer for the detection of SNP TSC0011142
agagggaggtgg

SEQ ID NO: 283097 - DNA, 12 bp, Artificial Sequence
  Oligonucleotide primer for the detection of SNP TSC0011143
cctatctcaaat

SEQ ID NO: 283098 - DNA, 12 bp, Artificial Sequence
  Oligonucleotide primer for the detection of SNP TSC0011143
gtattgttataa

SEQ ID NO: 283099 - DNA, 12 bp, Artificial Sequence
  Oligonucleotide primer for the detection of SNP TSC0011143
acattactataa

SEQ ID NO: 283100 - DNA, 12 bp, Artificial Sequence
  Oligonucleotide primer for the detection of SNP TSC0011143
tttgttttaggt

SEQ ID NO: 283101 - DNA, 12 bp, Artificial Sequence
  Oligonucleotide primer for the detection of SNP TSC0011144
aaccctcaactt

SEQ ID NO: 283102 - DNA, 12 bp, Artificial Sequence
  Oligonucleotide primer for the detection of SNP TSC0011144
gggtatattaag

SEQ ID NO: 283103 - DNA, 12 bp, Artificial Sequence
  Oligonucleotide primer for the detection of SNP TSC0011145
attcattaaacc

SEQ ID NO: 283104 - DNA, 12 bp, Artificial Sequence
  Oligonucleotide primer for the detection of SNP TSC0011145
tggttaataaag

SEQ ID NO: 283105 - DNA, 12 bp, Artificial Sequence
  Oligonucleotide primer for the detection of SNP TSC0011148
cacaaaaattcc

SEQ ID NO: 283106 - DNA, 12 bp, Artificial Sequence
  Oligonucleotide primer for the detection of SNP TSC0011148
tttgatattgaa

SEQ ID NO: 283107 - DNA, 12 bp, Artificial Sequence
  Oligonucleotide primer for the detection of SNP TSC0011153
aaaccatataat

SEQ ID NO: 283108 - DNA, 12 bp, Artificial Sequence
  Oligonucleotide primer for the detection of SNP TSC0011153
taaataatatag

SEQ ID NO: 283109 - DNA, 12 bp, Artificial Sequence
  Oligonucleotide primer for the detection of SNP TSC0011154
aactttccaacc

SEQ ID NO: 283110 - DNA, 12 bp, Artificial Sequence
  Oligonucleotide primer for the detection of SNP TSC0011154
tttaagaattta

SEQ ID NO: 283111 - DNA, 12 bp, Artificial Sequence
  Oligonucleotide primer for the detection of SNP TSC0011155
ttaatattaaat

SEQ ID NO: 283112 - DNA, 12 bp, Artificial Sequence
  Oligonucleotide primer for the detection of SNP TSC0011155
gaaaaaatatat

SEQ ID NO: 283113 - DNA, 12 bp, Artificial Sequence
  Oligonucleotide primer for the detection of SNP TSC0011155
aaaaaaacatac

SEQ ID NO: 283114 - DNA, 12 bp, Artificial Sequence
  Oligonucleotide primer for the detection of SNP TSC0011155
ttgatgttgaat

SEQ ID NO: 283115 - DNA, 12 bp, Artificial Sequence
  Oligonucleotide primer for the detection of SNP TSC0011156
atctatattact

SEQ ID NO: 283116 - DNA, 12 bp, Artificial Sequence
  Oligonucleotide primer for the detection of SNP TSC0011156
atagtttatatg

SEQ ID NO: 283117 - DNA, 12 bp, Artificial Sequence
  Oligonucleotide primer for the detection of SNP TSC0011156
atagtttatacg

SEQ ID NO: 283118 - DNA, 12 bp, Artificial Sequence
  Oligonucleotide primer for the detection of SNP TSC0011157
tatgattatgag

SEQ ID NO: 283119 - DNA, 12 bp, Artificial Sequence
  Oligonucleotide primer for the detection of SNP TSC0011157
tataattataaa

SEQ ID NO: 283120 - DNA, 12 bp, Artificial Sequence
  Oligonucleotide primer for the detection of SNP TSC0011157
aatttttaaaga

SEQ ID NO: 283121 - DNA, 12 bp, Artificial Sequence
  Oligonucleotide primer for the detection of SNP TSC0011158
atatcttttaaa

SEQ ID NO: 283122 - DNA, 12 bp, Artificial Sequence
  Oligonucleotide primer for the detection of SNP TSC0011158
ttaattgtgttt

SEQ ID NO: 283123 - DNA, 12 bp, Artificial Sequence
  Oligonucleotide primer for the detection of SNP TSC0011158
cttaattatatc

SEQ ID NO: 283124 - DNA, 12 bp, Artificial Sequence
  Oligonucleotide primer for the detection of SNP TSC0011158
ttgtattttttg

SEQ ID NO: 283125 - DNA, 12 bp, Artificial Sequence
  Oligonucleotide primer for the detection of SNP TSC0011159
ttttgaatatta

SEQ ID NO: 283126 - DNA, 12 bp, Artificial Sequence
  Oligonucleotide primer for the detection of SNP TSC0011159
ttctaaacatca

SEQ ID NO: 283127 - DNA, 12 bp, Artificial Sequence
  Oligonucleotide primer for the detection of SNP TSC0011159
agtaagagagtt

SEQ ID NO: 283128 - DNA, 12 bp, Artificial Sequence
  Oligonucleotide primer for the detection of SNP TSC0011160
tccaacctaaaa

SEQ ID NO: 283129 - DNA, 12 bp, Artificial Sequence
  Oligonucleotide primer for the detection of SNP TSC0011160
tttttcctctta

SEQ ID NO: 283130 - DNA, 12 bp, Artificial Sequence
  Oligonucleotide primer for the detection of SNP TSC0011160
tttagtttgggg

SEQ ID NO: 283131 - DNA, 12 bp, Artificial Sequence
  Oligonucleotide primer for the detection of SNP TSC0011162
aaccacaaaaaa

SEQ ID NO: 283132 - DNA, 12 bp, Artificial Sequence
  Oligonucleotide primer for the detection of SNP TSC0011162
gattggttatgt

SEQ ID NO: 283133 - DNA, 12 bp, Artificial Sequence
  Oligonucleotide primer for the detection of SNP TSC0011162
gattggttacgt

SEQ ID NO: 283134 - DNA, 12 bp, Artificial Sequence
  Oligonucleotide primer for the detection of SNP TSC0011162
aactaaccacat

SEQ ID NO: 283135 - DNA, 12 bp, Artificial Sequence
  Oligonucleotide primer for the detection of SNP TSC0011162
aactaaccacgt

SEQ ID NO: 283136 - DNA, 12 bp, Artificial Sequence
  Oligonucleotide primer for the detection of SNP TSC0011162
agttataaagag

SEQ ID NO: 283137 - DNA, 12 bp, Artificial Sequence
  Oligonucleotide primer for the detection of SNP TSC0011163
acctaaatacat

SEQ ID NO: 283138 - DNA, 12 bp, Artificial Sequence
  Oligonucleotide primer for the detection of SNP TSC0011163
tatttattaggg

SEQ ID NO: 283139 - DNA, 12 bp, Artificial Sequence
  Oligonucleotide primer for the detection of SNP TSC0011164
tattcaaaaatt

SEQ ID NO: 283140 - DNA, 12 bp, Artificial Sequence
  Oligonucleotide primer for the detection of SNP TSC0011165
aatctctaaata

SEQ ID NO: 283141 - DNA, 12 bp, Artificial Sequence
  Oligonucleotide primer for the detection of SNP TSC0011165
tagtttgtagtt

SEQ ID NO: 283142 - DNA, 12 bp, Artificial Sequence
  Oligonucleotide primer for the detection of SNP TSC0011165
caacttataacc

SEQ ID NO: 283143 - DNA, 12 bp, Artificial Sequence
  Oligonucleotide primer for the detection of SNP TSC0011165
ggtttttgggta

SEQ ID NO: 283144 - DNA, 12 bp, Artificial Sequence
  Oligonucleotide primer for the detection of SNP TSC0011166
aaatacaaataa

SEQ ID NO: 283145 - DNA, 12 bp, Artificial Sequence
  Oligonukleotid-Primer
ttttatagttta

SEQ ID NO: 283146 - DNA, 12 bp, Artificial Sequence
  Oligonucleotide primer for the detection of SNP TSC0011169
ttataatatatc

SEQ ID NO: 283147 - DNA, 12 bp, Artificial Sequence
  Oligonucleotide primer for the detection of SNP TSC0011169
atgaaatatgta

SEQ ID NO: 283148 - DNA, 12 bp, Artificial Sequence
  Oligonucleotide primer for the detection of SNP TSC0011169
ataaaacatata

SEQ ID NO: 283149 - DNA, 12 bp, Artificial Sequence
  Oligonucleotide primer for the detection of SNP TSC0011169
ttatagtatatt

SEQ ID NO: 283150 - DNA, 12 bp, Artificial Sequence
  Oligonucleotide primer for the detection of SNP TSC0011172
taataaattcat

SEQ ID NO: 283151 - DNA, 12 bp, Artificial Sequence
  Oligonucleotide primer for the detection of SNP TSC0011172
tttaatttgttg

SEQ ID NO: 283152 - DNA, 12 bp, Artificial Sequence
  Oligonucleotide primer for the detection of SNP TSC0011175
atcaaaatcaaa

SEQ ID NO: 283153 - DNA, 12 bp, Artificial Sequence
  Oligonucleotide primer for the detection of SNP TSC0011175
gtagagatttat

SEQ ID NO: 283154 - DNA, 12 bp, Artificial Sequence
  Oligonucleotide primer for the detection of SNP TSC0011175
caaaaatctaca

SEQ ID NO: 283155 - DNA, 12 bp, Artificial Sequence
  Oligonucleotide primer for the detection of SNP TSC0011175
ttagaattaaat

SEQ ID NO: 283156 - DNA, 12 bp, Artificial Sequence
  Oligonucleotide primer for the detection of SNP TSC0011176
attatccccact

SEQ ID NO: 283157 - DNA, 12 bp, Artificial Sequence
  Oligonucleotide primer for the detection of SNP TSC0011176
aagttttatggt

SEQ ID NO: 283158 - DNA, 12 bp, Artificial Sequence
  Oligonucleotide primer for the detection of SNP TSC0011176
aaacctcataat

SEQ ID NO: 283159 - DNA, 12 bp, Artificial Sequence
  Oligonucleotide primer for the detection of SNP TSC0011176
attgtttttatt

SEQ ID NO: 283160 - DNA, 12 bp, Artificial Sequence
  Oligonucleotide primer for the detection of SNP TSC0011177
aaaaaaataata

SEQ ID NO: 283161 - DNA, 12 bp, Artificial Sequence
  Oligonucleotide primer for the detection of SNP TSC0011177
aaatttattgtt

SEQ ID NO: 283162 - DNA, 12 bp, Artificial Sequence
  Oligonucleotide primer for the detection of SNP TSC0011177
caaatttattac

SEQ ID NO: 283163 - DNA, 12 bp, Artificial Sequence
  Oligonucleotide primer for the detection of SNP TSC0011177
ggaaggtaatgt

SEQ ID NO: 283164 - DNA, 12 bp, Artificial Sequence
  Oligonucleotide primer for the detection of SNP TSC0011178
ttaaatttattg

SEQ ID NO: 283165 - DNA, 12 bp, Artificial Sequence
  Oligonucleotide primer for the detection of SNP TSC0011178
tcaaatttatta

SEQ ID NO: 283166 - DNA, 12 bp, Artificial Sequence
  Oligonucleotide primer for the detection of SNP TSC0011178
agggaaggtaat

SEQ ID NO: 283167 - DNA, 12 bp, Artificial Sequence
  Oligonucleotide primer for the detection of SNP TSC0011179
ataacaaattac

SEQ ID NO: 283168 - DNA, 12 bp, Artificial Sequence
  Oligonucleotide primer for the detection of SNP TSC0011179
tattaaatttgg

SEQ ID NO: 283169 - DNA, 12 bp, Artificial Sequence
  Oligonucleotide primer for the detection of SNP TSC0011182
ataacttataac

SEQ ID NO: 283170 - DNA, 12 bp, Artificial Sequence
  Oligonucleotide primer for the detection of SNP TSC0011182
gtaacttataac

SEQ ID NO: 283171 - DNA, 12 bp, Artificial Sequence
  Oligonucleotide primer for the detection of SNP TSC0011182
taaaattttgtt

SEQ ID NO: 283172 - DNA, 12 bp, Artificial Sequence
  Oligonucleotide primer for the detection of SNP TSC0011183
taaaaataacac

SEQ ID NO: 283173 - DNA, 12 bp, Artificial Sequence
  Oligonucleotide primer for the detection of SNP TSC0011183
attaaatataaa

SEQ ID NO: 283174 - DNA, 12 bp, Artificial Sequence
  Oligonucleotide primer for the detection of SNP TSC0011184
ccataaatttat

SEQ ID NO: 283175 - DNA, 12 bp, Artificial Sequence
  Oligonucleotide primer for the detection of SNP TSC0011184
gggagataatag

SEQ ID NO: 283176 - DNA, 12 bp, Artificial Sequence
  Oligonucleotide primer for the detection of SNP TSC0011186
aatatggtgaaa

SEQ ID NO: 283177 - DNA, 12 bp, Artificial Sequence
  Oligonucleotide primer for the detection of SNP TSC0011189
caaaaactatac

SEQ ID NO: 283178 - DNA, 12 bp, Artificial Sequence
  Oligonucleotide primer for the detection of SNP TSC0011189
cgaaaactatac

SEQ ID NO: 283179 - DNA, 12 bp, Artificial Sequence
  Oligonucleotide primer for the detection of SNP TSC0011189
gtgagggtttta

SEQ ID NO: 283180 - DNA, 12 bp, Artificial Sequence
  Oligonucleotide primer for the detection of SNP TSC0011189
gcgagggtttta

SEQ ID NO: 283181 - DNA, 12 bp, Artificial Sequence
  Oligonucleotide primer for the detection of SNP TSC0011190
caaacataaacc

SEQ ID NO: 283182 - DNA, 12 bp, Artificial Sequence
  Oligonucleotide primer for the detection of SNP TSC0011190
tggttgggtgtg

SEQ ID NO: 283183 - DNA, 12 bp, Artificial Sequence
  Oligonucleotide primer for the detection of SNP TSC0011191
tcatttattaat

SEQ ID NO: 283184 - DNA, 12 bp, Artificial Sequence
  Oligonucleotide primer for the detection of SNP TSC0011191
aaatgatttata

SEQ ID NO: 283185 - DNA, 12 bp, Artificial Sequence
  Oligonucleotide primer for the detection of SNP TSC0011192
aaatactaaaat

SEQ ID NO: 283186 - DNA, 12 bp, Artificial Sequence
  Oligonucleotide primer for the detection of SNP TSC0011192
gtttatgtttgt

SEQ ID NO: 283187 - DNA, 12 bp, Artificial Sequence
  Oligonucleotide primer for the detection of SNP TSC0011192
gtttacgtttgt

SEQ ID NO: 283188 - DNA, 12 bp, Artificial Sequence
  Oligonucleotide primer for the detection of SNP TSC0011192
actcacacctat

SEQ ID NO: 283189 - DNA, 12 bp, Artificial Sequence
  Oligonucleotide primer for the detection of SNP TSC0011192
actcacgcctat

SEQ ID NO: 283190 - DNA, 12 bp, Artificial Sequence
  Oligonucleotide primer for the detection of SNP TSC0011192
aagtgttgggat

SEQ ID NO: 283191 - DNA, 12 bp, Artificial Sequence
  Oligonucleotide primer for the detection of SNP TSC0011196
tcaatatttcta

SEQ ID NO: 283192 - DNA, 12 bp, Artificial Sequence
  Oligonucleotide primer for the detection of SNP TSC0011196
tattgggttgga

SEQ ID NO: 283193 - DNA, 12 bp, Artificial Sequence
  Oligonucleotide primer for the detection of SNP TSC0011196
tactaaactaaa

SEQ ID NO: 283194 - DNA, 12 bp, Artificial Sequence
  Oligonucleotide primer for the detection of SNP TSC0011196
ttagtatttttg

SEQ ID NO: 283195 - DNA, 12 bp, Artificial Sequence
  Oligonucleotide primer for the detection of SNP TSC0011197
aatacaaccaac

SEQ ID NO: 283196 - DNA, 12 bp, Artificial Sequence
  Oligonucleotide primer for the detection of SNP TSC0011197
aatacaaccgac

SEQ ID NO: 283197 - DNA, 12 bp, Artificial Sequence
  Oligonucleotide primer for the detection of SNP TSC0011197
tatttattttaa

SEQ ID NO: 283198 - DNA, 12 bp, Artificial Sequence
  Oligonucleotide primer for the detection of SNP TSC0011199
cataaaaatatt

SEQ ID NO: 283199 - DNA, 12 bp, Artificial Sequence
  Oligonucleotide primer for the detection of SNP TSC0011199
tttattgtaata

SEQ ID NO: 283200 - DNA, 12 bp, Artificial Sequence
  Oligonucleotide primer for the detection of SNP TSC0011199
tccattataata

SEQ ID NO: 283201 - DNA, 12 bp, Artificial Sequence
  Oligonucleotide primer for the detection of SNP TSC0011199
tatgaaaatgtt

SEQ ID NO: 283202 - DNA, 12 bp, Artificial Sequence
  Oligonucleotide primer for the detection of SNP TSC0011200
acacccttacca

SEQ ID NO: 283203 - DNA, 12 bp, Artificial Sequence
  Oligonucleotide primer for the detection of SNP TSC0011200
acacccttaccg

SEQ ID NO: 283204 - DNA, 12 bp, Artificial Sequence
  Oligonucleotide primer for the detection of SNP TSC0011200
gttttttagtga

SEQ ID NO: 283205 - DNA, 12 bp, Artificial Sequence
  Oligonucleotide primer for the detection of SNP TSC0011201
aaataaacacca

SEQ ID NO: 283206 - DNA, 12 bp, Artificial Sequence
  Oligonucleotide primer for the detection of SNP TSC0011201
ttttagggagaa

SEQ ID NO: 283207 - DNA, 12 bp, Artificial Sequence
  Oligonucleotide primer for the detection of SNP TSC0011201
gaatgaatatta

SEQ ID NO: 283208 - DNA, 12 bp, Artificial Sequence
  Oligonucleotide primer for the detection of SNP TSC0011203
accaaaaatact

SEQ ID NO: 283209 - DNA, 12 bp, Artificial Sequence
  Oligonucleotide primer for the detection of SNP TSC0011203
accgaaaatact

SEQ ID NO: 283210 - DNA, 12 bp, Artificial Sequence
  Oligonucleotide primer for the detection of SNP TSC0011203
tagatattgtaa

SEQ ID NO: 283211 - DNA, 12 bp, Artificial Sequence
  Oligonucleotide primer for the detection of SNP TSC0011204
atacaaataaaa

SEQ ID NO: 283212 - DNA, 12 bp, Artificial Sequence
  Oligonucleotide primer for the detection of SNP TSC0011204
attattgataat

SEQ ID NO: 283213 - DNA, 12 bp, Artificial Sequence
  Oligonucleotide primer for the detection of SNP TSC0011204
attaataataaa

SEQ ID NO: 283214 - DNA, 12 bp, Artificial Sequence
  Oligonucleotide primer for the detection of SNP TSC0011204
tgatataaatga

SEQ ID NO: 283215 - DNA, 12 bp, Artificial Sequence
  Oligonucleotide primer for the detection of SNP TSC0011205
acaaacatccct

SEQ ID NO: 283216 - DNA, 12 bp, Artificial Sequence
  Oligonucleotide primer for the detection of SNP TSC0011205
agaagggttaag

SEQ ID NO: 283217 - DNA, 12 bp, Artificial Sequence
  Oligonucleotide primer for the detection of SNP TSC0011205
ataaatattttt

SEQ ID NO: 283218 - DNA, 12 bp, Artificial Sequence
  Oligonucleotide primer for the detection of SNP TSC0011206
taataataccct

SEQ ID NO: 283219 - DNA, 12 bp, Artificial Sequence
  Oligonucleotide primer for the detection of SNP TSC0011206
ttatatttgtta

SEQ ID NO: 283220 - DNA, 12 bp, Artificial Sequence
  Oligonucleotide primer for the detection of SNP TSC0011208
ttttttggttta

SEQ ID NO: 283221 - DNA, 12 bp, Artificial Sequence
  Oligonucleotide primer for the detection of SNP TSC0011211
caaaacaaatac

SEQ ID NO: 283222 - DNA, 12 bp, Artificial Sequence
  Oligonucleotide primer for the detection of SNP TSC0011211
gtgtttgtggta

SEQ ID NO: 283223 - DNA, 12 bp, Artificial Sequence
  Oligonucleotide primer for the detection of SNP TSC0011211
gcgtttgtggta

SEQ ID NO: 283224 - DNA, 12 bp, Artificial Sequence
  Oligonucleotide primer for the detection of SNP TSC0011213
aaaaaattacat

SEQ ID NO: 283225 - DNA, 12 bp, Artificial Sequence
  Oligonucleotide primer for the detection of SNP TSC0011213
gattagtttata

SEQ ID NO: 283226 - DNA, 12 bp, Artificial Sequence
  Oligonucleotide primer for the detection of SNP TSC0011214
taaatttcaaat

SEQ ID NO: 283227 - DNA, 12 bp, Artificial Sequence
  Oligonucleotide primer for the detection of SNP TSC0011214
ttttaaatttta

SEQ ID NO: 283228 - DNA, 12 bp, Artificial Sequence
  Oligonucleotide primer for the detection of SNP TSC0011214
ccctaaacccca

SEQ ID NO: 283229 - DNA, 12 bp, Artificial Sequence
  Oligonucleotide primer for the detection of SNP TSC0011214
tggattttagat

SEQ ID NO: 283230 - DNA, 12 bp, Artificial Sequence
  Oligonucleotide primer for the detection of SNP TSC0011215
tgagttgagatt

SEQ ID NO: 283231 - DNA, 12 bp, Artificial Sequence
  Oligonucleotide primer for the detection of SNP TSC0011215
tgagtcgagatt

SEQ ID NO: 283232 - DNA, 12 bp, Artificial Sequence
  Oligonucleotide primer for the detection of SNP TSC0011215
tgagttgagatc

SEQ ID NO: 283233 - DNA, 12 bp, Artificial Sequence
  Oligonucleotide primer for the detection of SNP TSC0011215
tgagtcgagatc

SEQ ID NO: 283234 - DNA, 12 bp, Artificial Sequence
  Oligonucleotide primer for the detection of SNP TSC0011215
taaaccaaaatc

SEQ ID NO: 283235 - DNA, 12 bp, Artificial Sequence
  Oligonucleotide primer for the detection of SNP TSC0011215
taaaccgaaatc

SEQ ID NO: 283236 - DNA, 12 bp, Artificial Sequence
  Oligonucleotide primer for the detection of SNP TSC0011220
aaaaacttacac

SEQ ID NO: 283237 - DNA, 12 bp, Artificial Sequence
  Oligonucleotide primer for the detection of SNP TSC0011220
ggattggtttta

SEQ ID NO: 283238 - DNA, 12 bp, Artificial Sequence
  Oligonucleotide primer for the detection of SNP TSC0011221
ctaaaattccac

SEQ ID NO: 283239 - DNA, 12 bp, Artificial Sequence
  Oligonucleotide primer for the detection of SNP TSC0011221
gatgtttagtga

SEQ ID NO: 283240 - DNA, 12 bp, Artificial Sequence
  Oligonucleotide primer for the detection of SNP TSC0011223
aaccctatctct

SEQ ID NO: 283241 - DNA, 12 bp, Artificial Sequence
  Oligonucleotide primer for the detection of SNP TSC0011223
tttgtattttta

SEQ ID NO: 283242 - DNA, 12 bp, Artificial Sequence
  Oligonucleotide primer for the detection of SNP TSC0011230
aactaacccatc

SEQ ID NO: 283243 - DNA, 12 bp, Artificial Sequence
  Oligonucleotide primer for the detection of SNP TSC0011230
gaggattatagg

SEQ ID NO: 283244 - DNA, 12 bp, Artificial Sequence
  Oligonucleotide primer for the detection of SNP TSC0011230
aaaaatcataaa

SEQ ID NO: 283245 - DNA, 12 bp, Artificial Sequence
  Oligonucleotide primer for the detection of SNP TSC0011230
ggttaatttatt

SEQ ID NO: 283246 - DNA, 12 bp, Artificial Sequence
  Oligonucleotide primer for the detection of SNP TSC0011232
aataacaaaaaa

SEQ ID NO: 283247 - DNA, 12 bp, Artificial Sequence
  Oligonucleotide primer for the detection of SNP TSC0011232
gatggtagagga

SEQ ID NO: 283248 - DNA, 12 bp, Artificial Sequence
  Oligonucleotide primer for the detection of SNP TSC0011233
tatataacttta

SEQ ID NO: 283249 - DNA, 12 bp, Artificial Sequence
  Oligonucleotide primer for the detection of SNP TSC0011233
tggatgattaat

SEQ ID NO: 283250 - DNA, 12 bp, Artificial Sequence
  Oligonukleotid-Primer
taaataactaac

SEQ ID NO: 283251 - DNA, 12 bp, Artificial Sequence
  Oligonucleotide primer for the detection of SNP TSC0011233
atgtatgatttt

SEQ ID NO: 283252 - DNA, 12 bp, Artificial Sequence
  Oligonucleotide primer for the detection of SNP TSC0011234
ttcattacctac

SEQ ID NO: 283253 - DNA, 12 bp, Artificial Sequence
  Oligonucleotide primer for the detection of SNP TSC0011234
aaatggatagag

SEQ ID NO: 283254 - DNA, 12 bp, Artificial Sequence
  Oligonucleotide primer for the detection of SNP TSC0011234
ttattgtttgtt

SEQ ID NO: 283255 - DNA, 12 bp, Artificial Sequence
  Oligonucleotide primer for the detection of SNP TSC0011235
tcatattttaaa

SEQ ID NO: 283256 - DNA, 12 bp, Artificial Sequence
  Oligonucleotide primer for the detection of SNP TSC0011235
taatggagggtt

SEQ ID NO: 283257 - DNA, 12 bp, Artificial Sequence
  Oligonucleotide primer for the detection of SNP TSC0011235
caataaaaaatt

SEQ ID NO: 283258 - DNA, 12 bp, Artificial Sequence
  Oligonucleotide primer for the detection of SNP TSC0011235
ttatattttgaa

SEQ ID NO: 283259 - DNA, 12 bp, Artificial Sequence
  Oligonucleotide primer for the detection of SNP TSC0011237
tataaattttca

SEQ ID NO: 283260 - DNA, 12 bp, Artificial Sequence
  Oligonucleotide primer for the detection of SNP TSC0011237
ggtgtgtgtttt

SEQ ID NO: 283261 - DNA, 12 bp, Artificial Sequence
  Oligonucleotide primer for the detection of SNP TSC0011237
ggtgcgtgtttt

SEQ ID NO: 283262 - DNA, 12 bp, Artificial Sequence
  Oligonucleotide primer for the detection of SNP TSC0011237
atacatacccta

SEQ ID NO: 283263 - DNA, 12 bp, Artificial Sequence
  Oligonucleotide primer for the detection of SNP TSC0011237
atacgtacccta

SEQ ID NO: 283264 - DNA, 12 bp, Artificial Sequence
  Oligonucleotide primer for the detection of SNP TSC0011237
atagatttttat

SEQ ID NO: 283265 - DNA, 12 bp, Artificial Sequence
  Oligonucleotide primer for the detection of SNP TSC0011237
atagatttttac

SEQ ID NO: 283266 - DNA, 12 bp, Artificial Sequence
  Oligonucleotide primer for the detection of SNP TSC0011238
aattaactctac

SEQ ID NO: 283267 - DNA, 12 bp, Artificial Sequence
  Oligonucleotide primer for the detection of SNP TSC0011238
aaaattaatata

SEQ ID NO: 283268 - DNA, 12 bp, Artificial Sequence
  Oligonucleotide primer for the detection of SNP TSC0011240
ttaaaaaaaact

SEQ ID NO: 283269 - DNA, 12 bp, Artificial Sequence
  Oligonucleotide primer for the detection of SNP TSC0011240
ttatgttgtata

SEQ ID NO: 283270 - DNA, 12 bp, Artificial Sequence
  Oligonucleotide primer for the detection of SNP TSC0011240
ttacgttgtata

SEQ ID NO: 283271 - DNA, 12 bp, Artificial Sequence
  Oligonucleotide primer for the detection of SNP TSC0011240
ccacactacaca

SEQ ID NO: 283272 - DNA, 12 bp, Artificial Sequence
  Oligonucleotide primer for the detection of SNP TSC0011240
ccacgctacaca

SEQ ID NO: 283273 - DNA, 12 bp, Artificial Sequence
  Oligonucleotide primer for the detection of SNP TSC0011240
ttagaagaagtt

SEQ ID NO: 283274 - DNA, 12 bp, Artificial Sequence
  Oligonucleotide primer for the detection of SNP TSC0011246
tatttgggagat

SEQ ID NO: 283275 - DNA, 12 bp, Artificial Sequence
  Oligonucleotide primer for the detection of SNP TSC0011246
tattcgggagat

SEQ ID NO: 283276 - DNA, 12 bp, Artificial Sequence
  Oligonucleotide primer for the detection of SNP TSC0011247
acttaaacctaa

SEQ ID NO: 283277 - DNA, 12 bp, Artificial Sequence
  Oligonucleotide primer for the detection of SNP TSC0011247
gcttaaacctaa

SEQ ID NO: 283278 - DNA, 12 bp, Artificial Sequence
  Oligonucleotide primer for the detection of SNP TSC0011247
taattttcgttt

SEQ ID NO: 283279 - DNA, 12 bp, Artificial Sequence
  Oligonucleotide primer for the detection of SNP TSC0011247
acaacctccacc

SEQ ID NO: 283280 - DNA, 12 bp, Artificial Sequence
  Oligonucleotide primer for the detection of SNP TSC0011247
acaacctccgcc

SEQ ID NO: 283281 - DNA, 12 bp, Artificial Sequence
  Oligonucleotide primer for the detection of SNP TSC0011247
gtttgaatttgg

SEQ ID NO: 283282 - DNA, 12 bp, Artificial Sequence
  Oligonucleotide primer for the detection of SNP TSC0011248
tacaacctctaa

SEQ ID NO: 283283 - DNA, 12 bp, Artificial Sequence
  Oligonucleotide primer for the detection of SNP TSC0011248
acctcctctact

SEQ ID NO: 283284 - DNA, 12 bp, Artificial Sequence
  Oligonucleotide primer for the detection of SNP TSC0011248
tgtagtttttga

SEQ ID NO: 283285 - DNA, 12 bp, Artificial Sequence
  Oligonucleotide primer for the detection of SNP TSC0011249
acttaccacaaa

SEQ ID NO: 283286 - DNA, 12 bp, Artificial Sequence
  Oligonucleotide primer for the detection of SNP TSC0011249
acttaccacgaa

SEQ ID NO: 283287 - DNA, 12 bp, Artificial Sequence
  Oligonucleotide primer for the detection of SNP TSC0011249
acttaccgcaaa

SEQ ID NO: 283288 - DNA, 12 bp, Artificial Sequence
  Oligonucleotide primer for the detection of SNP TSC0011249
acttaccgcgaa

SEQ ID NO: 283289 - DNA, 12 bp, Artificial Sequence
  Oligonucleotide primer for the detection of SNP TSC0011249
ttatatttgtga

SEQ ID NO: 283290 - DNA, 12 bp, Artificial Sequence
  Oligonucleotide primer for the detection of SNP TSC0011249
tcatatttataa

SEQ ID NO: 283291 - DNA, 12 bp, Artificial Sequence
  Oligonucleotide primer for the detection of SNP TSC0011249
atttgttgtgag

SEQ ID NO: 283292 - DNA, 12 bp, Artificial Sequence
  Oligonucleotide primer for the detection of SNP TSC0011249
atttgtcgtgag

SEQ ID NO: 283293 - DNA, 12 bp, Artificial Sequence
  Oligonucleotide primer for the detection of SNP TSC0011249
atttgttgcgag

SEQ ID NO: 283294 - DNA, 12 bp, Artificial Sequence
  Oligonucleotide primer for the detection of SNP TSC0011249
atttgtcgcgag

SEQ ID NO: 283295 - DNA, 12 bp, Artificial Sequence
  Oligonucleotide primer for the detection of SNP TSC0011250
attaataaataa

SEQ ID NO: 283296 - DNA, 12 bp, Artificial Sequence
  Oligonucleotide primer for the detection of SNP TSC0011251
ttattatttgtt

SEQ ID NO: 283297 - DNA, 12 bp, Artificial Sequence
  Oligonucleotide primer for the detection of SNP TSC0011251
ttattatttatt

SEQ ID NO: 283298 - DNA, 12 bp, Artificial Sequence
  Oligonucleotide primer for the detection of SNP TSC0011251
aaaaatgaagat

SEQ ID NO: 283299 - DNA, 12 bp, Artificial Sequence
  Oligonucleotide primer for the detection of SNP TSC0011252
ttctatattaaa

SEQ ID NO: 283300 - DNA, 12 bp, Artificial Sequence
  Oligonucleotide primer for the detection of SNP TSC0011252
gtgaattatttt

SEQ ID NO: 283301 - DNA, 12 bp, Artificial Sequence
  Oligonucleotide primer for the detection of SNP TSC0011252
ataaattatttt

SEQ ID NO: 283302 - DNA, 12 bp, Artificial Sequence
  Oligonucleotide primer for the detection of SNP TSC0011252
ttttgtgttaga

SEQ ID NO: 283303 - DNA, 12 bp, Artificial Sequence
  Oligonucleotide primer for the detection of SNP TSC0011255
cctaaactcaaa

SEQ ID NO: 283304 - DNA, 12 bp, Artificial Sequence
  Oligonucleotide primer for the detection of SNP TSC0011255
gataggtagatt

SEQ ID NO: 283305 - DNA, 12 bp, Artificial Sequence
  Oligonucleotide primer for the detection of SNP TSC0011255
aacaaacaaatt

SEQ ID NO: 283306 - DNA, 12 bp, Artificial Sequence
  Oligonucleotide primer for the detection of SNP TSC0011255
tttttgagttta

SEQ ID NO: 283307 - DNA, 12 bp, Artificial Sequence
  Oligonucleotide primer for the detection of SNP TSC0011256
cacaatcttaac

SEQ ID NO: 283308 - DNA, 12 bp, Artificial Sequence
  Oligonucleotide primer for the detection of SNP TSC0011256
agaagttgtagt

SEQ ID NO: 283309 - DNA, 12 bp, Artificial Sequence
  Oligonucleotide primer for the detection of SNP TSC0011256
caaaaattacaa

SEQ ID NO: 283310 - DNA, 12 bp, Artificial Sequence
  Oligonucleotide primer for the detection of SNP TSC0011256
ataattttggtt

SEQ ID NO: 283311 - DNA, 12 bp, Artificial Sequence
  Oligonucleotide primer for the detection of SNP TSC0011259
cccctttcccct

SEQ ID NO: 283312 - DNA, 12 bp, Artificial Sequence
  Oligonucleotide primer for the detection of SNP TSC0011259
tattatttttgg

SEQ ID NO: 283313 - DNA, 12 bp, Artificial Sequence
  Oligonucleotide primer for the detection of SNP TSC0011260
aaaatacttaca

SEQ ID NO: 283314 - DNA, 12 bp, Artificial Sequence
  Oligonucleotide primer for the detection of SNP TSC0011260
atgtgtgtttgt

SEQ ID NO: 283315 - DNA, 12 bp, Artificial Sequence
  Oligonukleotid-Primer
atatatatttat

SEQ ID NO: 283316 - DNA, 12 bp, Artificial Sequence
  Oligonucleotide primer for the detection of SNP TSC0011260
ggaatatttata

SEQ ID NO: 283317 - DNA, 12 bp, Artificial Sequence
  Oligonucleotide primer for the detection of SNP TSC0011261
attacaataaac

SEQ ID NO: 283318 - DNA, 12 bp, Artificial Sequence
  Oligonucleotide primer for the detection of SNP TSC0011261
gtagtggtatga

SEQ ID NO: 283319 - DNA, 12 bp, Artificial Sequence
  Oligonucleotide primer for the detection of SNP TSC0011261
acaataacataa

SEQ ID NO: 283320 - DNA, 12 bp, Artificial Sequence
  Oligonucleotide primer for the detection of SNP TSC0011261
gttgtagtgagt

SEQ ID NO: 283321 - DNA, 12 bp, Artificial Sequence
  Oligonucleotide primer for the detection of SNP TSC0011262
tttattcattca

SEQ ID NO: 283322 - DNA, 12 bp, Artificial Sequence
  Oligonucleotide primer for the detection of SNP TSC0011262
ttttaaaaatgt

SEQ ID NO: 283323 - DNA, 12 bp, Artificial Sequence
  Oligonucleotide primer for the detection of SNP TSC0011262
ttttaaaaacgt

SEQ ID NO: 283324 - DNA, 12 bp, Artificial Sequence
  Oligonucleotide primer for the detection of SNP TSC0011262
ctcaaaaacata

SEQ ID NO: 283325 - DNA, 12 bp, Artificial Sequence
  Oligonucleotide primer for the detection of SNP TSC0011262
ctcaaaaacgta

SEQ ID NO: 283326 - DNA, 12 bp, Artificial Sequence
  Oligonucleotide primer for the detection of SNP TSC0011263
attttattatta

SEQ ID NO: 283327 - DNA, 12 bp, Artificial Sequence
  Oligonucleotide primer for the detection of SNP TSC0011263
aagaaagaaata

SEQ ID NO: 283328 - DNA, 12 bp, Artificial Sequence
  Oligonucleotide primer for the detection of SNP TSC0011263
gttttgttgttg

SEQ ID NO: 283329 - DNA, 12 bp, Artificial Sequence
  Oligonucleotide primer for the detection of SNP TSC0011264
aaaaaacatcat

SEQ ID NO: 283330 - DNA, 12 bp, Artificial Sequence
  Oligonucleotide primer for the detection of SNP TSC0011264
aaaaaacatcgt

SEQ ID NO: 283331 - DNA, 12 bp, Artificial Sequence
  Oligonucleotide primer for the detection of SNP TSC0011264
taagttgtgaag

SEQ ID NO: 283332 - DNA, 12 bp, Artificial Sequence
  Oligonucleotide primer for the detection of SNP TSC0011265
ttcctactacca

SEQ ID NO: 283333 - DNA, 12 bp, Artificial Sequence
  Oligonucleotide primer for the detection of SNP TSC0011265
ttgggagtttga

SEQ ID NO: 283334 - DNA, 12 bp, Artificial Sequence
  Oligonucleotide primer for the detection of SNP TSC0011265
ttaaaaacttaa

SEQ ID NO: 283335 - DNA, 12 bp, Artificial Sequence
  Oligonucleotide primer for the detection of SNP TSC0011265
tttttattgtta

SEQ ID NO: 283336 - DNA, 12 bp, Artificial Sequence
  Oligonucleotide primer for the detection of SNP TSC0011266
ttatacaactat

SEQ ID NO: 283337 - DNA, 12 bp, Artificial Sequence
  Oligonucleotide primer for the detection of SNP TSC0011266
atatttataaag

SEQ ID NO: 283338 - DNA, 12 bp, Artificial Sequence
  Oligonucleotide primer for the detection of SNP TSC0011267
tcacccatacac

SEQ ID NO: 283339 - DNA, 12 bp, Artificial Sequence
  Oligonucleotide primer for the detection of SNP TSC0011267
tcgcccatacac

SEQ ID NO: 283340 - DNA, 12 bp, Artificial Sequence
  Oligonucleotide primer for the detection of SNP TSC0011267
ttttttatatag

SEQ ID NO: 283341 - DNA, 12 bp, Artificial Sequence
  Oligonucleotide primer for the detection of SNP TSC0011268
aacctacaaacc

SEQ ID NO: 283342 - DNA, 12 bp, Artificial Sequence
  Oligonucleotide primer for the detection of SNP TSC0011268
aacctacgaacc

SEQ ID NO: 283343 - DNA, 12 bp, Artificial Sequence
  Oligonucleotide primer for the detection of SNP TSC0011268
ttggtagattag

SEQ ID NO: 283344 - DNA, 12 bp, Artificial Sequence
  Oligonucleotide primer for the detection of SNP TSC0011269
aatttctatctt

SEQ ID NO: 283345 - DNA, 12 bp, Artificial Sequence
  Oligonucleotide primer for the detection of SNP TSC0011269
ataaatattttg

SEQ ID NO: 283346 - DNA, 12 bp, Artificial Sequence
  Oligonucleotide primer for the detection of SNP TSC0011270
ttaattattaat

SEQ ID NO: 283347 - DNA, 12 bp, Artificial Sequence
  Oligonucleotide primer for the detection of SNP TSC0011270
aatttttctcca

SEQ ID NO: 283348 - DNA, 12 bp, Artificial Sequence
  Oligonucleotide primer for the detection of SNP TSC0011270
aattgttaattt

SEQ ID NO: 283349 - DNA, 12 bp, Artificial Sequence
  Oligonucleotide primer for the detection of SNP TSC0011271
tgtgtgtgtata

SEQ ID NO: 283350 - DNA, 12 bp, Artificial Sequence
  Oligonucleotide primer for the detection of SNP TSC0011271
tatatatataca

SEQ ID NO: 283351 - DNA, 12 bp, Artificial Sequence
  Oligonucleotide primer for the detection of SNP TSC0011271
gttgggaaagaa

SEQ ID NO: 283352 - DNA, 12 bp, Artificial Sequence
  Oligonucleotide primer for the detection of SNP TSC0011273
aaattcaacaaa

SEQ ID NO: 283353 - DNA, 12 bp, Artificial Sequence
  Oligonucleotide primer for the detection of SNP TSC0011273
tgtatgttataa

SEQ ID NO: 283354 - DNA, 12 bp, Artificial Sequence
  Oligonucleotide primer for the detection of SNP TSC0011273
atatattacaaa

SEQ ID NO: 283355 - DNA, 12 bp, Artificial Sequence
  Oligonucleotide primer for the detection of SNP TSC0011273
agatttaataaa

SEQ ID NO: 283356 - DNA, 12 bp, Artificial Sequence
  Oligonucleotide primer for the detection of SNP TSC0011274
ttgtagtaatgg

SEQ ID NO: 283357 - DNA, 12 bp, Artificial Sequence
  Oligonucleotide primer for the detection of SNP TSC0011275
acaaatacccac

SEQ ID NO: 283358 - DNA, 12 bp, Artificial Sequence
  Oligonucleotide primer for the detection of SNP TSC0011275
acaaatacccgc

SEQ ID NO: 283359 - DNA, 12 bp, Artificial Sequence
  Oligonucleotide primer for the detection of SNP TSC0011275
agttgagtgtta

SEQ ID NO: 283360 - DNA, 12 bp, Artificial Sequence
  Oligonucleotide primer for the detection of SNP TSC0011275
agtcgagtgtta

SEQ ID NO: 283361 - DNA, 12 bp, Artificial Sequence
  Oligonucleotide primer for the detection of SNP TSC0011275
aaccaaatatca

SEQ ID NO: 283362 - DNA, 12 bp, Artificial Sequence
  Oligonucleotide primer for the detection of SNP TSC0011275
aaccgaatatca

SEQ ID NO: 283363 - DNA, 12 bp, Artificial Sequence
  Oligonucleotide primer for the detection of SNP TSC0011275
ataggtgtttgt

SEQ ID NO: 283364 - DNA, 12 bp, Artificial Sequence
  Oligonucleotide primer for the detection of SNP TSC0011275
ataggtgttcgt

SEQ ID NO: 283365 - DNA, 12 bp, Artificial Sequence
  Oligonucleotide primer for the detection of SNP TSC0011276
ctctctcacaca

SEQ ID NO: 283366 - DNA, 12 bp, Artificial Sequence
  Oligonucleotide primer for the detection of SNP TSC0011277
aaattaattatc

SEQ ID NO: 283367 - DNA, 12 bp, Artificial Sequence
  Oligonucleotide primer for the detection of SNP TSC0011277
agttgtttgaaa

SEQ ID NO: 283368 - DNA, 12 bp, Artificial Sequence
  Oligonucleotide primer for the detection of SNP TSC0011277
aactatttaaaa

SEQ ID NO: 283369 - DNA, 12 bp, Artificial Sequence
  Oligonucleotide primer for the detection of SNP TSC0011277
gagttagttgtt

SEQ ID NO: 283370 - DNA, 12 bp, Artificial Sequence
  Oligonucleotide primer for the detection of SNP TSC0011278
cataccctaatc

SEQ ID NO: 283371 - DNA, 12 bp, Artificial Sequence
  Oligonucleotide primer for the detection of SNP TSC0011278
ggaggagagata

SEQ ID NO: 283372 - DNA, 12 bp, Artificial Sequence
  Oligonucleotide primer for the detection of SNP TSC0011279
tacaaatacctc

SEQ ID NO: 283373 - DNA, 12 bp, Artificial Sequence
  Oligonucleotide primer for the detection of SNP TSC0011279
tacgaatacctc

SEQ ID NO: 283374 - DNA, 12 bp, Artificial Sequence
  Oligonucleotide primer for the detection of SNP TSC0011279
agttgttttagg

SEQ ID NO: 283375 - DNA, 12 bp, Artificial Sequence
  Oligonucleotide primer for the detection of SNP TSC0011279
aactactttaaa

SEQ ID NO: 283376 - DNA, 12 bp, Artificial Sequence
  Oligonucleotide primer for the detection of SNP TSC0011279
tgtgagtgtttt

SEQ ID NO: 283377 - DNA, 12 bp, Artificial Sequence
  Oligonucleotide primer for the detection of SNP TSC0011279
tgcgagtgtttt

SEQ ID NO: 283378 - DNA, 12 bp, Artificial Sequence
  Oligonucleotide primer for the detection of SNP TSC0011279
tgtgagtgtttc

SEQ ID NO: 283379 - DNA, 12 bp, Artificial Sequence
  Oligonucleotide primer for the detection of SNP TSC0011279
tgcgagtgtttc

SEQ ID NO: 283380 - DNA, 12 bp, Artificial Sequence
  Oligonucleotide primer for the detection of SNP TSC0011283
atattatattaa

SEQ ID NO: 283381 - DNA, 12 bp, Artificial Sequence
  Oligonucleotide primer for the detection of SNP TSC0011283
taaaatagaata

SEQ ID NO: 283382 - DNA, 12 bp, Artificial Sequence
  Oligonucleotide primer for the detection of SNP TSC0011283
taaaataaaaca

SEQ ID NO: 283383 - DNA, 12 bp, Artificial Sequence
  Oligonucleotide primer for the detection of SNP TSC0011283
gtgttatattaa

SEQ ID NO: 283384 - DNA, 12 bp, Artificial Sequence
  Oligonucleotide primer for the detection of SNP TSC0011285
atcatacctatt

SEQ ID NO: 283385 - DNA, 12 bp, Artificial Sequence
  Oligonucleotide primer for the detection of SNP TSC0011285
aatttttttggg

SEQ ID NO: 283386 - DNA, 12 bp, Artificial Sequence
  Oligonucleotide primer for the detection of SNP TSC0011285
aattttttcggg

SEQ ID NO: 283387 - DNA, 12 bp, Artificial Sequence
  Oligonucleotide primer for the detection of SNP TSC0011286
ttcaactaatta

SEQ ID NO: 283388 - DNA, 12 bp, Artificial Sequence
  Oligonucleotide primer for the detection of SNP TSC0011286
ttttatattgat

SEQ ID NO: 283389 - DNA, 12 bp, Artificial Sequence
  Oligonucleotide primer for the detection of SNP TSC0011286
tctcacattaac

SEQ ID NO: 283390 - DNA, 12 bp, Artificial Sequence
  Oligonucleotide primer for the detection of SNP TSC0011286
tttagttaattg

SEQ ID NO: 283391 - DNA, 12 bp, Artificial Sequence
  Oligonucleotide primer for the detection of SNP TSC0011287
ctacctacaatc

SEQ ID NO: 283392 - DNA, 12 bp, Artificial Sequence
  Oligonucleotide primer for the detection of SNP TSC0011287
aaatttttggga

SEQ ID NO: 283393 - DNA, 12 bp, Artificial Sequence
  Oligonucleotide primer for the detection of SNP TSC0011288
agaaggttagag

SEQ ID NO: 283394 - DNA, 12 bp, Artificial Sequence
  Oligonucleotide primer for the detection of SNP TSC0011289
tcaactacttaa

SEQ ID NO: 283395 - DNA, 12 bp, Artificial Sequence
  Oligonucleotide primer for the detection of SNP TSC0011289
cccatcttaacc

SEQ ID NO: 283396 - DNA, 12 bp, Artificial Sequence
  Oligonucleotide primer for the detection of SNP TSC0011289
ttagttatttgg

SEQ ID NO: 283397 - DNA, 12 bp, Artificial Sequence
  Oligonucleotide primer for the detection of SNP TSC0011290
cacttctcaata

SEQ ID NO: 283398 - DNA, 12 bp, Artificial Sequence
  Oligonucleotide primer for the detection of SNP TSC0011290
aaagtgatagaa

SEQ ID NO: 283399 - DNA, 12 bp, Artificial Sequence
  Oligonucleotide primer for the detection of SNP TSC0011290
tattttttagta

SEQ ID NO: 283400 - DNA, 12 bp, Artificial Sequence
  Oligonucleotide primer for the detection of SNP TSC0011291
aaattttaatac

SEQ ID NO: 283401 - DNA, 12 bp, Artificial Sequence
  Oligonucleotide primer for the detection of SNP TSC0011291
aaattgataatg

SEQ ID NO: 283402 - DNA, 12 bp, Artificial Sequence
  Oligonucleotide primer for the detection of SNP TSC0011291
aaactaataata

SEQ ID NO: 283403 - DNA, 12 bp, Artificial Sequence
  Oligonucleotide primer for the detection of SNP TSC0011292
tctacactccta

SEQ ID NO: 283404 - DNA, 12 bp, Artificial Sequence
  Oligonukleotid-Primer
tttagagtggtt

SEQ ID NO: 283405 - DNA, 12 bp, Artificial Sequence
  Oligonucleotide primer for the detection of SNP TSC0011292
cccaaaataacc

SEQ ID NO: 283406 - DNA, 12 bp, Artificial Sequence
  Oligonucleotide primer for the detection of SNP TSC0011292
tttatatttttg

SEQ ID NO: 283407 - DNA, 12 bp, Artificial Sequence
  Oligonucleotide primer for the detection of SNP TSC0011293
aacacaaacaca

SEQ ID NO: 283408 - DNA, 12 bp, Artificial Sequence
  Oligonucleotide primer for the detection of SNP TSC0011293
attaagaaaatt

SEQ ID NO: 283409 - DNA, 12 bp, Artificial Sequence
  Oligonucleotide primer for the detection of SNP TSC0011293
attaaaaaaatc

SEQ ID NO: 283410 - DNA, 12 bp, Artificial Sequence
  Oligonucleotide primer for the detection of SNP TSC0011293
agtatagatata

SEQ ID NO: 283411 - DNA, 12 bp, Artificial Sequence
  Oligonucleotide primer for the detection of SNP TSC0011294
ctaactaaaact

SEQ ID NO: 283412 - DNA, 12 bp, Artificial Sequence
  Oligonucleotide primer for the detection of SNP TSC0011294
ttggttaaaatt

SEQ ID NO: 283413 - DNA, 12 bp, Artificial Sequence
  Oligonucleotide primer for the detection of SNP TSC0011295
caaaacaaatat

SEQ ID NO: 283414 - DNA, 12 bp, Artificial Sequence
  Oligonucleotide primer for the detection of SNP TSC0011295
attgtgatatta

SEQ ID NO: 283415 - DNA, 12 bp, Artificial Sequence
  Oligonucleotide primer for the detection of SNP TSC0011297
atcaaaaaccac

SEQ ID NO: 283416 - DNA, 12 bp, Artificial Sequence
  Oligonucleotide primer for the detection of SNP TSC0011297
ttttggttttgg

SEQ ID NO: 283417 - DNA, 12 bp, Artificial Sequence
  Oligonucleotide primer for the detection of SNP TSC0011297
ctctaaccctaa

SEQ ID NO: 283418 - DNA, 12 bp, Artificial Sequence
  Oligonucleotide primer for the detection of SNP TSC0011297
gttagaggttat

SEQ ID NO: 283419 - DNA, 12 bp, Artificial Sequence
  Oligonucleotide primer for the detection of SNP TSC0011303
aaacatacctaa

SEQ ID NO: 283420 - DNA, 12 bp, Artificial Sequence
  Oligonucleotide primer for the detection of SNP TSC0011303
ttgaatttttgt

SEQ ID NO: 283421 - DNA, 12 bp, Artificial Sequence
  Oligonucleotide primer for the detection of SNP TSC0011303
ttgaattttcgt

SEQ ID NO: 283422 - DNA, 12 bp, Artificial Sequence
  Oligonucleotide primer for the detection of SNP TSC0011303
ttaaattcccat

SEQ ID NO: 283423 - DNA, 12 bp, Artificial Sequence
  Oligonucleotide primer for the detection of SNP TSC0011303
ttaaattcccgt

SEQ ID NO: 283424 - DNA, 12 bp, Artificial Sequence
  Oligonucleotide primer for the detection of SNP TSC0011303
gggtatatttaa

SEQ ID NO: 283425 - DNA, 12 bp, Artificial Sequence
  Oligonucleotide primer for the detection of SNP TSC0011304
tcatcctcccca

SEQ ID NO: 283426 - DNA, 12 bp, Artificial Sequence
  Oligonucleotide primer for the detection of SNP TSC0011304
aatttatgtttt

SEQ ID NO: 283427 - DNA, 12 bp, Artificial Sequence
  Oligonucleotide primer for the detection of SNP TSC0011304
aacccatatttt

SEQ ID NO: 283428 - DNA, 12 bp, Artificial Sequence
  Oligonucleotide primer for the detection of SNP TSC0011305
ctctatctaaac

SEQ ID NO: 283429 - DNA, 12 bp, Artificial Sequence
  Oligonucleotide primer for the detection of SNP TSC0011305
ttaatgttttgg

SEQ ID NO: 283430 - DNA, 12 bp, Artificial Sequence
  Oligonucleotide primer for the detection of SNP TSC0011306
caaaaaattttt

SEQ ID NO: 283431 - DNA, 12 bp, Artificial Sequence
  Oligonucleotide primer for the detection of SNP TSC0011306
agtatatttgaa

SEQ ID NO: 283432 - DNA, 12 bp, Artificial Sequence
  Oligonucleotide primer for the detection of SNP TSC0011307
atattaatagag

SEQ ID NO: 283433 - DNA, 12 bp, Artificial Sequence
  Oligonucleotide primer for the detection of SNP TSC0011307
atattaataaaa

SEQ ID NO: 283434 - DNA, 12 bp, Artificial Sequence
  Oligonucleotide primer for the detection of SNP TSC0011307
tgataagtgtat

SEQ ID NO: 283435 - DNA, 12 bp, Artificial Sequence
  Oligonucleotide primer for the detection of SNP TSC0011308
taaatcttaaat

SEQ ID NO: 283436 - DNA, 12 bp, Artificial Sequence
  Oligonucleotide primer for the detection of SNP TSC0011308
tatagaaaataa

SEQ ID NO: 283437 - DNA, 12 bp, Artificial Sequence
  Oligonucleotide primer for the detection of SNP TSC0011308
taaaaaacaaaa

SEQ ID NO: 283438 - DNA, 12 bp, Artificial Sequence
  Oligonucleotide primer for the detection of SNP TSC0011308
gaattttgggtt

SEQ ID NO: 283439 - DNA, 12 bp, Artificial Sequence
  Oligonucleotide primer for the detection of SNP TSC0011308
gaattttgggtc

SEQ ID NO: 283440 - DNA, 12 bp, Artificial Sequence
  Oligonucleotide primer for the detection of SNP TSC0011309
ctaaatactaaa

SEQ ID NO: 283441 - DNA, 12 bp, Artificial Sequence
  Oligonucleotide primer for the detection of SNP TSC0011309
attgtatgaaaa

SEQ ID NO: 283442 - DNA, 12 bp, Artificial Sequence
  Oligonucleotide primer for the detection of SNP TSC0011309
attatataaaaa

SEQ ID NO: 283443 - DNA, 12 bp, Artificial Sequence
  Oligonucleotide primer for the detection of SNP TSC0011309
ttaggtattggg

SEQ ID NO: 283444 - DNA, 12 bp, Artificial Sequence
  Oligonucleotide primer for the detection of SNP TSC0011310
cttcaaaaaatc

SEQ ID NO: 283445 - DNA, 12 bp, Artificial Sequence
  Oligonucleotide primer for the detection of SNP TSC0011310
tagtattgtaag

SEQ ID NO: 283446 - DNA, 12 bp, Artificial Sequence
  Oligonucleotide primer for the detection of SNP TSC0011310
tagtatcgtaag

SEQ ID NO: 283447 - DNA, 12 bp, Artificial Sequence
  Oligonucleotide primer for the detection of SNP TSC0011312
aaatttcatttt

SEQ ID NO: 283448 - DNA, 12 bp, Artificial Sequence
  Oligonucleotide primer for the detection of SNP TSC0011312
tcaaaaacaaca

SEQ ID NO: 283449 - DNA, 12 bp, Artificial Sequence
  Oligonucleotide primer for the detection of SNP TSC0011312
aaattttatttt

SEQ ID NO: 283450 - DNA, 12 bp, Artificial Sequence
  Oligonucleotide primer for the detection of SNP TSC0011313
caaaaacctaac

SEQ ID NO: 283451 - DNA, 12 bp, Artificial Sequence
  Oligonucleotide primer for the detection of SNP TSC0011313
tattatttgtaa

SEQ ID NO: 283452 - DNA, 12 bp, Artificial Sequence
  Oligonucleotide primer for the detection of SNP TSC0011314
ttaggtttgttt

SEQ ID NO: 283453 - DNA, 12 bp, Artificial Sequence
  Oligonucleotide primer for the detection of SNP TSC0011314
ttaggtttgttc

SEQ ID NO: 283454 - DNA, 12 bp, Artificial Sequence
  Oligonucleotide primer for the detection of SNP TSC0011314
cctcaaacttat

SEQ ID NO: 283455 - DNA, 12 bp, Artificial Sequence
  Oligonucleotide primer for the detection of SNP TSC0011314
ggaagagataaa

SEQ ID NO: 283456 - DNA, 12 bp, Artificial Sequence
  Oligonucleotide primer for the detection of SNP TSC0011315
ttttttagtgta

SEQ ID NO: 283457 - DNA, 12 bp, Artificial Sequence
  Oligonucleotide primer for the detection of SNP TSC0011318
cccaccaccccc

SEQ ID NO: 283458 - DNA, 12 bp, Artificial Sequence
  Oligonucleotide primer for the detection of SNP TSC0011318
ataatggtattg

SEQ ID NO: 283459 - DNA, 12 bp, Artificial Sequence
  Oligonucleotide primer for the detection of SNP TSC0011319
tcactaatacca

SEQ ID NO: 283460 - DNA, 12 bp, Artificial Sequence
  Oligonucleotide primer for the detection of SNP TSC0011319
aattgatttttt

SEQ ID NO: 283461 - DNA, 12 bp, Artificial Sequence
  Oligonucleotide primer for the detection of SNP TSC0011319
aattaatctccc

SEQ ID NO: 283462 - DNA, 12 bp, Artificial Sequence
  Oligonucleotide primer for the detection of SNP TSC0011319
ttattgatgtta

SEQ ID NO: 283463 - DNA, 12 bp, Artificial Sequence
  Oligonucleotide primer for the detection of SNP TSC0011325
taaataattctt

SEQ ID NO: 283464 - DNA, 12 bp, Artificial Sequence
  Oligonucleotide primer for the detection of SNP TSC0011325
gtgtgttggtaa

SEQ ID NO: 283465 - DNA, 12 bp, Artificial Sequence
  Oligonucleotide primer for the detection of SNP TSC0011325
atatattaataa

SEQ ID NO: 283466 - DNA, 12 bp, Artificial Sequence
  Oligonucleotide primer for the detection of SNP TSC0011325
tgaataattttt

SEQ ID NO: 283467 - DNA, 12 bp, Artificial Sequence
  Oligonucleotide primer for the detection of SNP TSC0011326
aatccattacaa

SEQ ID NO: 283468 - DNA, 12 bp, Artificial Sequence
  Oligonucleotide primer for the detection of SNP TSC0011326
ttaaaagtttta

SEQ ID NO: 283469 - DNA, 12 bp, Artificial Sequence
  Oligonucleotide primer for the detection of SNP TSC0011326
ccaaaaatctta

SEQ ID NO: 283470 - DNA, 12 bp, Artificial Sequence
  Oligonucleotide primer for the detection of SNP TSC0011326
aatttattgtag

SEQ ID NO: 283471 - DNA, 12 bp, Artificial Sequence
  Oligonucleotide primer for the detection of SNP TSC0011327
gggattatttta

SEQ ID NO: 283472 - DNA, 12 bp, Artificial Sequence
  Oligonucleotide primer for the detection of SNP TSC0011327
aaaattatttta

SEQ ID NO: 283473 - DNA, 12 bp, Artificial Sequence
  Oligonucleotide primer for the detection of SNP TSC0011327
tagtaaaaaaaa

SEQ ID NO: 283474 - DNA, 12 bp, Artificial Sequence
  Oligonucleotide primer for the detection of SNP TSC0011328
ctatttaaatta

SEQ ID NO: 283475 - DNA, 12 bp, Artificial Sequence
  Oligonucleotide primer for the detection of SNP TSC0011328
agattttatttt

SEQ ID NO: 283476 - DNA, 12 bp, Artificial Sequence
  Oligonucleotide primer for the detection of SNP TSC0011328
aatcctattcta

SEQ ID NO: 283477 - DNA, 12 bp, Artificial Sequence
  Oligonucleotide primer for the detection of SNP TSC0011328
ttgtttgagttg

SEQ ID NO: 283478 - DNA, 12 bp, Artificial Sequence
  Oligonucleotide primer for the detection of SNP TSC0011329
aaaaaaactctc

SEQ ID NO: 283479 - DNA, 12 bp, Artificial Sequence
  Oligonucleotide primer for the detection of SNP TSC0011329
aaagaattgtta

SEQ ID NO: 283480 - DNA, 12 bp, Artificial Sequence
  Oligonucleotide primer for the detection of SNP TSC0011330
cacacatcttat

SEQ ID NO: 283481 - DNA, 12 bp, Artificial Sequence
  Oligonucleotide primer for the detection of SNP TSC0011330
attgagtgatta

SEQ ID NO: 283482 - DNA, 12 bp, Artificial Sequence
  Oligonucleotide primer for the detection of SNP TSC0011334
aaaaaaataccc

SEQ ID NO: 283483 - DNA, 12 bp, Artificial Sequence
  Oligonucleotide primer for the detection of SNP TSC0011339
ttccacacaaca

SEQ ID NO: 283484 - DNA, 12 bp, Artificial Sequence
  Oligonucleotide primer for the detection of SNP TSC0011339
aatggatttgtt

SEQ ID NO: 283485 - DNA, 12 bp, Artificial Sequence
  Oligonucleotide primer for the detection of SNP TSC0011339
aatggattcgtt

SEQ ID NO: 283486 - DNA, 12 bp, Artificial Sequence
  Oligonucleotide primer for the detection of SNP TSC0011339
ataaattcatta

SEQ ID NO: 283487 - DNA, 12 bp, Artificial Sequence
  Oligonucleotide primer for the detection of SNP TSC0011339
ataaattcgtta

SEQ ID NO: 283488 - DNA, 12 bp, Artificial Sequence
  Oligonucleotide primer for the detection of SNP TSC0011339
ttttatataata

SEQ ID NO: 283489 - DNA, 12 bp, Artificial Sequence
  Oligonucleotide primer for the detection of SNP TSC0011342
aaaacatttacc

SEQ ID NO: 283490 - DNA, 12 bp, Artificial Sequence
  Oligonucleotide primer for the detection of SNP TSC0011342
taattattatag

SEQ ID NO: 283491 - DNA, 12 bp, Artificial Sequence
  Oligonucleotide primer for the detection of SNP TSC0011342
taaccactacaa

SEQ ID NO: 283492 - DNA, 12 bp, Artificial Sequence
  Oligonucleotide primer for the detection of SNP TSC0011342
aaagtatttgtt

SEQ ID NO: 283493 - DNA, 12 bp, Artificial Sequence
  Oligonukleotid-Primer
aaccaaaacaaa

SEQ ID NO: 283494 - DNA, 12 bp, Artificial Sequence
  Oligonucleotide primer for the detection of SNP TSC0011343
aattaaaataaa

SEQ ID NO: 283495 - DNA, 12 bp, Artificial Sequence
  Oligonucleotide primer for the detection of SNP TSC0011344
ctactacataac

SEQ ID NO: 283496 - DNA, 12 bp, Artificial Sequence
  Oligonucleotide primer for the detection of SNP TSC0011345
cctcttaaattc

SEQ ID NO: 283497 - DNA, 12 bp, Artificial Sequence
  Oligonukleotid-Primer
atatttaaagaa

SEQ ID NO: 283498 - DNA, 12 bp, Artificial Sequence
  Oligonucleotide primer for the detection of SNP TSC0011348
ttaaaccaaaca

SEQ ID NO: 283499 - DNA, 12 bp, Artificial Sequence
  Oligonucleotide primer for the detection of SNP TSC0011348
gttatttgattt

SEQ ID NO: 283500 - DNA, 12 bp, Artificial Sequence
  Oligonucleotide primer for the detection of SNP TSC0011348
ttacttaattca

SEQ ID NO: 283501 - DNA, 12 bp, Artificial Sequence
  Oligonukleotid-Primer
gggttaagtatt

SEQ ID NO: 283502 - DNA, 12 bp, Artificial Sequence
  Oligonucleotide primer for the detection of SNP TSC0011349
aacaaacaaaat

SEQ ID NO: 283503 - DNA, 12 bp, Artificial Sequence
  Oligonucleotide primer for the detection of SNP TSC0011349
tattatttaaat

SEQ ID NO: 283504 - DNA, 12 bp, Artificial Sequence
  Oligonucleotide primer for the detection of SNP TSC0011349
tcaccacttaaa

SEQ ID NO: 283505 - DNA, 12 bp, Artificial Sequence
  Oligonukleotid-Primer
caaaaaaaaatt

SEQ ID NO: 283506 - DNA, 12 bp, Artificial Sequence
  Oligonucleotide primer for the detection of SNP TSC0011350
ttaaagtttata

SEQ ID NO: 283507 - DNA, 12 bp, Artificial Sequence
  Oligonucleotide primer for the detection of SNP TSC0011350
ccaaaatttata

SEQ ID NO: 283508 - DNA, 12 bp, Artificial Sequence
  Oligonucleotide primer for the detection of SNP TSC0011350
taaaggagagtt

SEQ ID NO: 283509 - DNA, 12 bp, Artificial Sequence
  Oligonucleotide primer for the detection of SNP TSC0011352
aatcttttaaaa

SEQ ID NO: 283510 - DNA, 12 bp, Artificial Sequence
  Oligonucleotide primer for the detection of SNP TSC0011352
ataattaaatta

SEQ ID NO: 283511 - DNA, 12 bp, Artificial Sequence
  Oligonucleotide primer for the detection of SNP TSC0011352
ttttttgagatt

SEQ ID NO: 283512 - DNA, 12 bp, Artificial Sequence
  Oligonucleotide primer for the detection of SNP TSC0011355
actacaatcttc

SEQ ID NO: 283513 - DNA, 12 bp, Artificial Sequence
  Oligonucleotide primer for the detection of SNP TSC0011355
aaaatttttagg

SEQ ID NO: 283514 - DNA, 12 bp, Artificial Sequence
  Oligonucleotide primer for the detection of SNP TSC0011356
ataacttaattt

SEQ ID NO: 283515 - DNA, 12 bp, Artificial Sequence
  Oligonucleotide primer for the detection of SNP TSC0011356
tatagaaagtaa

SEQ ID NO: 283516 - DNA, 12 bp, Artificial Sequence
  Oligonucleotide primer for the detection of SNP TSC0011356
tacaaaaaataa

SEQ ID NO: 283517 - DNA, 12 bp, Artificial Sequence
  Oligonucleotide primer for the detection of SNP TSC0011356
gtagtttagttt

SEQ ID NO: 283518 - DNA, 12 bp, Artificial Sequence
  Oligonucleotide primer for the detection of SNP TSC0011357
attaactaatct

SEQ ID NO: 283519 - DNA, 12 bp, Artificial Sequence
  Oligonucleotide primer for the detection of SNP TSC0011357
tataatataggg

SEQ ID NO: 283520 - DNA, 12 bp, Artificial Sequence
  Oligonucleotide primer for the detection of SNP TSC0011358
ataaatactacc

SEQ ID NO: 283521 - DNA, 12 bp, Artificial Sequence
  Oligonucleotide primer for the detection of SNP TSC0011358
tttggttgttta

SEQ ID NO: 283522 - DNA, 12 bp, Artificial Sequence
  Oligonucleotide primer for the detection of SNP TSC0011361
ctaaatatataa

SEQ ID NO: 283523 - DNA, 12 bp, Artificial Sequence
  Oligonucleotide primer for the detection of SNP TSC0011361
agagttttttat

SEQ ID NO: 283524 - DNA, 12 bp, Artificial Sequence
  Oligonucleotide primer for the detection of SNP TSC0011361
caaaattttcca

SEQ ID NO: 283525 - DNA, 12 bp, Artificial Sequence
  Oligonucleotide primer for the detection of SNP TSC0011361
tttaaatatatg

SEQ ID NO: 283526 - DNA, 12 bp, Artificial Sequence
  Oligonucleotide primer for the detection of SNP TSC0011362
acacttaaaaat

SEQ ID NO: 283527 - DNA, 12 bp, Artificial Sequence
  Oligonucleotide primer for the detection of SNP TSC0011362
aatagttattaa

SEQ ID NO: 283528 - DNA, 12 bp, Artificial Sequence
  Oligonucleotide primer for the detection of SNP TSC0011363
agaaatggtttt

SEQ ID NO: 283529 - DNA, 12 bp, Artificial Sequence
  Oligonucleotide primer for the detection of SNP TSC0011363
aaaataatttta

SEQ ID NO: 283530 - DNA, 12 bp, Artificial Sequence
  Oligonucleotide primer for the detection of SNP TSC0011363
aattttttaagt

SEQ ID NO: 283531 - DNA, 12 bp, Artificial Sequence
  Oligonucleotide primer for the detection of SNP TSC0011364
atttagatagaa

SEQ ID NO: 283532 - DNA, 12 bp, Artificial Sequence
  Oligonucleotide primer for the detection of SNP TSC0011364
atccaaacaaaa

SEQ ID NO: 283533 - DNA, 12 bp, Artificial Sequence
  Oligonucleotide primer for the detection of SNP TSC0011364
aaagaaataagt

SEQ ID NO: 283534 - DNA, 12 bp, Artificial Sequence
  Oligonucleotide primer for the detection of SNP TSC0011365
aaaactataaaa

SEQ ID NO: 283535 - DNA, 12 bp, Artificial Sequence
  Oligonucleotide primer for the detection of SNP TSC0011365
tttaggttttat

SEQ ID NO: 283536 - DNA, 12 bp, Artificial Sequence
  Oligonucleotide primer for the detection of SNP TSC0011365
ttctaaatttta

SEQ ID NO: 283537 - DNA, 12 bp, Artificial Sequence
  Oligonucleotide primer for the detection of SNP TSC0011367
aaaaactaccca

SEQ ID NO: 283538 - DNA, 12 bp, Artificial Sequence
  Oligonucleotide primer for the detection of SNP TSC0011367
gtagtggttttt

SEQ ID NO: 283539 - DNA, 12 bp, Artificial Sequence
  Oligonucleotide primer for the detection of SNP TSC0011367
tacaataatttc

SEQ ID NO: 283540 - DNA, 12 bp, Artificial Sequence
  Oligonucleotide primer for the detection of SNP TSC0011367
agggaattattt

SEQ ID NO: 283541 - DNA, 12 bp, Artificial Sequence
  Oligonucleotide primer for the detection of SNP TSC0011368
tatatttgattt

SEQ ID NO: 283542 - DNA, 12 bp, Artificial Sequence
  Oligonucleotide primer for the detection of SNP TSC0011368
acacttaactta

SEQ ID NO: 283543 - DNA, 12 bp, Artificial Sequence
  Oligonucleotide primer for the detection of SNP TSC0011368
gaaaatggtgtt

SEQ ID NO: 283544 - DNA, 12 bp, Artificial Sequence
  Oligonucleotide primer for the detection of SNP TSC0011369
cccaacatttaa

SEQ ID NO: 283545 - DNA, 12 bp, Artificial Sequence
  Oligonucleotide primer for the detection of SNP TSC0011369
tttttaagttta

SEQ ID NO: 283546 - DNA, 12 bp, Artificial Sequence
  Oligonucleotide primer for the detection of SNP TSC0011369
tcttcaaattca

SEQ ID NO: 283547 - DNA, 12 bp, Artificial Sequence
  Oligonucleotide primer for the detection of SNP TSC0011369
ttaatatttaat

SEQ ID NO: 283548 - DNA, 12 bp, Artificial Sequence
  Oligonucleotide primer for the detection of SNP TSC0011370
acatttttactt

SEQ ID NO: 283549 - DNA, 12 bp, Artificial Sequence
  Oligonucleotide primer for the detection of SNP TSC0011370
ttaaagaaaaaa

SEQ ID NO: 283550 - DNA, 12 bp, Artificial Sequence
  Oligonucleotide primer for the detection of SNP TSC0011376
ctcatctatccc

SEQ ID NO: 283551 - DNA, 12 bp, Artificial Sequence
  Oligonucleotide primer for the detection of SNP TSC0011376
gtatgttatttg

SEQ ID NO: 283552 - DNA, 12 bp, Artificial Sequence
  Oligonucleotide primer for the detection of SNP TSC0011377
aatctaccctca

SEQ ID NO: 283553 - DNA, 12 bp, Artificial Sequence
  Oligonucleotide primer for the detection of SNP TSC0011377
agaaggttgatt

SEQ ID NO: 283554 - DNA, 12 bp, Artificial Sequence
  Oligonucleotide primer for the detection of SNP TSC0011377
aaaaaattaatt

SEQ ID NO: 283555 - DNA, 12 bp, Artificial Sequence
  Oligonucleotide primer for the detection of SNP TSC0011377
gatttgttttta

SEQ ID NO: 283556 - DNA, 12 bp, Artificial Sequence
  Oligonucleotide primer for the detection of SNP TSC0011378
ttaaatattttt

SEQ ID NO: 283557 - DNA, 12 bp, Artificial Sequence
  Oligonucleotide primer for the detection of SNP TSC0011378
attttttgagtt

SEQ ID NO: 283558 - DNA, 12 bp, Artificial Sequence
  Oligonucleotide primer for the detection of SNP TSC0011379
attaatttatta

SEQ ID NO: 283559 - DNA, 12 bp, Artificial Sequence
  Oligonucleotide primer for the detection of SNP TSC0011384
atttaattggtt

SEQ ID NO: 283560 - DNA, 12 bp, Artificial Sequence
  Oligonucleotide primer for the detection of SNP TSC0011384
acctaattaatt

SEQ ID NO: 283561 - DNA, 12 bp, Artificial Sequence
  Oligonucleotide primer for the detection of SNP TSC0011384
gggggggtgaaa

SEQ ID NO: 283562 - DNA, 12 bp, Artificial Sequence
  Oligonucleotide primer for the detection of SNP TSC0011387
ctaattttcttc

SEQ ID NO: 283563 - DNA, 12 bp, Artificial Sequence
  Oligonucleotide primer for the detection of SNP TSC0011387
tatatagtattt

SEQ ID NO: 283564 - DNA, 12 bp, Artificial Sequence
  Oligonucleotide primer for the detection of SNP TSC0011387
tatataacactt

SEQ ID NO: 283565 - DNA, 12 bp, Artificial Sequence
  Oligonucleotide primer for the detection of SNP TSC0011387
taattttttttt

SEQ ID NO: 283566 - DNA, 12 bp, Artificial Sequence
  Oligonucleotide primer for the detection of SNP TSC0011390
atataaaccacc

SEQ ID NO: 283567 - DNA, 12 bp, Artificial Sequence
  Oligonucleotide primer for the detection of SNP TSC0011390
gtagagggttgg

SEQ ID NO: 283568 - DNA, 12 bp, Artificial Sequence
  Oligonucleotide primer for the detection of SNP TSC0011390
gtagagggtcgg

SEQ ID NO: 283569 - DNA, 12 bp, Artificial Sequence
  Oligonucleotide primer for the detection of SNP TSC0011390
ataaaaaaccaa

SEQ ID NO: 283570 - DNA, 12 bp, Artificial Sequence
  Oligonucleotide primer for the detection of SNP TSC0011390
ataaaaaaccga

SEQ ID NO: 283571 - DNA, 12 bp, Artificial Sequence
  Oligonucleotide primer for the detection of SNP TSC0011391
ctcccaaaatac

SEQ ID NO: 283572 - DNA, 12 bp, Artificial Sequence
  Oligonucleotide primer for the detection of SNP TSC0011391
tatttgtaattt

SEQ ID NO: 283573 - DNA, 12 bp, Artificial Sequence
  Oligonucleotide primer for the detection of SNP TSC0011391
tatttgtaattc

SEQ ID NO: 283574 - DNA, 12 bp, Artificial Sequence
  Oligonucleotide primer for the detection of SNP TSC0011391
cacctataatcc

SEQ ID NO: 283575 - DNA, 12 bp, Artificial Sequence
  Oligonucleotide primer for the detection of SNP TSC0011391
ttttaaagtgtt

SEQ ID NO: 283576 - DNA, 12 bp, Artificial Sequence
  Oligonucleotide primer for the detection of SNP TSC0011392
acacttaacaaa

SEQ ID NO: 283577 - DNA, 12 bp, Artificial Sequence
  Oligonucleotide primer for the detection of SNP TSC0011392
ttaaggttatat

SEQ ID NO: 283578 - DNA, 12 bp, Artificial Sequence
  Oligonucleotide primer for the detection of SNP TSC0011392
gtatttaataag

SEQ ID NO: 283579 - DNA, 12 bp, Artificial Sequence
  Oligonucleotide primer for the detection of SNP TSC0011393
aaaacacaaaca

SEQ ID NO: 283580 - DNA, 12 bp, Artificial Sequence
  Oligonucleotide primer for the detection of SNP TSC0011393
gtttaagaattt

SEQ ID NO: 283581 - DNA, 12 bp, Artificial Sequence
  Oligonucleotide primer for the detection of SNP TSC0011393
actcaaaaaccc

SEQ ID NO: 283582 - DNA, 12 bp, Artificial Sequence
  Oligonucleotide primer for the detection of SNP TSC0011393
gaaatatagata

SEQ ID NO: 283583 - DNA, 12 bp, Artificial Sequence
  Oligonucleotide primer for the detection of SNP TSC0011394
ataataaaacca

SEQ ID NO: 283584 - DNA, 12 bp, Artificial Sequence
  Oligonucleotide primer for the detection of SNP TSC0011394
gggtttagagat

SEQ ID NO: 283585 - DNA, 12 bp, Artificial Sequence
  Oligonucleotide primer for the detection of SNP TSC0011394
gtggtgggatta

SEQ ID NO: 283586 - DNA, 12 bp, Artificial Sequence
  Oligonucleotide primer for the detection of SNP TSC0011395
acaaaacccaac

SEQ ID NO: 283587 - DNA, 12 bp, Artificial Sequence
  Oligonucleotide primer for the detection of SNP TSC0011395
attttgtttaag

SEQ ID NO: 283588 - DNA, 12 bp, Artificial Sequence
  Oligonucleotide primer for the detection of SNP TSC0011395
atttcgtttaag

SEQ ID NO: 283589 - DNA, 12 bp, Artificial Sequence
  Oligonucleotide primer for the detection of SNP TSC0011396
taaccttccaac

SEQ ID NO: 283590 - DNA, 12 bp, Artificial Sequence
  Oligonucleotide primer for the detection of SNP TSC0011396
gttgtttaggag

SEQ ID NO: 283591 - DNA, 12 bp, Artificial Sequence
  Oligonucleotide primer for the detection of SNP TSC0011397
catcaattccta

SEQ ID NO: 283592 - DNA, 12 bp, Artificial Sequence
  Oligonucleotide primer for the detection of SNP TSC0011397
tttagttgtagg

SEQ ID NO: 283593 - DNA, 12 bp, Artificial Sequence
  Oligonucleotide primer for the detection of SNP TSC0011397
ttattagttttt

SEQ ID NO: 283594 - DNA, 12 bp, Artificial Sequence
  Oligonucleotide primer for the detection of SNP TSC0011400
ccattatcttca

SEQ ID NO: 283595 - DNA, 12 bp, Artificial Sequence
  Oligonucleotide primer for the detection of SNP TSC0011400
tatataagatat

SEQ ID NO: 283596 - DNA, 12 bp, Artificial Sequence
  Oligonucleotide primer for the detection of SNP TSC0011400
tatataaaatac

SEQ ID NO: 283597 - DNA, 12 bp, Artificial Sequence
  Oligonucleotide primer for the detection of SNP TSC0011403
acttatatatac

SEQ ID NO: 283598 - DNA, 12 bp, Artificial Sequence
  Oligonukleotid-Primer
aattttgtatga

SEQ ID NO: 283599 - DNA, 12 bp, Artificial Sequence
  Oligonucleotide primer for the detection of SNP TSC0011404
attaaaaaccat

SEQ ID NO: 283600 - DNA, 12 bp, Artificial Sequence
  Oligonucleotide primer for the detection of SNP TSC0011404
tagtttttagta

SEQ ID NO: 283601 - DNA, 12 bp, Artificial Sequence
  Oligonucleotide primer for the detection of SNP TSC0011405
tcacaccattac

SEQ ID NO: 283602 - DNA, 12 bp, Artificial Sequence
  Oligonukleotid-Primer
tcacgccattac

SEQ ID NO: 283603 - DNA, 12 bp, Artificial Sequence
  Oligonucleotide primer for the detection of SNP TSC0011406
tacctctaatcc

SEQ ID NO: 283604 - DNA, 12 bp, Artificial Sequence
  Oligonucleotide primer for the detection of SNP TSC0011406
ttttttaaagtg

SEQ ID NO: 283605 - DNA, 12 bp, Artificial Sequence
  Oligonucleotide primer for the detection of SNP TSC0011416
tcatatcccttt

SEQ ID NO: 283606 - DNA, 12 bp, Artificial Sequence
  Oligonukleotid-Primer
tcgtatcccttt

SEQ ID NO: 283607 - DNA, 12 bp, Artificial Sequence
  Oligonucleotide primer for the detection of SNP TSC0011417
aaccaaatacaa

SEQ ID NO: 283608 - DNA, 12 bp, Artificial Sequence
  Oligonucleotide primer for the detection of SNP TSC0011417
tattttgttata

SEQ ID NO: 283609 - DNA, 12 bp, Artificial Sequence
  Oligonucleotide primer for the detection of SNP TSC0011417
tattttactata

SEQ ID NO: 283610 - DNA, 12 bp, Artificial Sequence
  Oligonucleotide primer for the detection of SNP TSC0011417
attaaatgtaat

SEQ ID NO: 283611 - DNA, 12 bp, Artificial Sequence
  Oligonucleotide primer for the detection of SNP TSC0011417
attaaatgtaac

SEQ ID NO: 283612 - DNA, 12 bp, Artificial Sequence
  Oligonucleotide primer for the detection of SNP TSC0011418
acatcacacatc

SEQ ID NO: 283613 - DNA, 12 bp, Artificial Sequence
  Oligonucleotide primer for the detection of SNP TSC0011418
agaaaaatggta

SEQ ID NO: 283614 - DNA, 12 bp, Artificial Sequence
  Oligonucleotide primer for the detection of SNP TSC0011421
caaatttaattt

SEQ ID NO: 283615 - DNA, 12 bp, Artificial Sequence
  Oligonucleotide primer for the detection of SNP TSC0011421
ttgtatatgtaa

SEQ ID NO: 283616 - DNA, 12 bp, Artificial Sequence
  Oligonucleotide primer for the detection of SNP TSC0011422
aatattaattat

SEQ ID NO: 283617 - DNA, 12 bp, Artificial Sequence
  Oligonucleotide primer for the detection of SNP TSC0011423
tcaaaattatca

SEQ ID NO: 283618 - DNA, 12 bp, Artificial Sequence
  Oligonucleotide primer for the detection of SNP TSC0011423
agttaatagagt

SEQ ID NO: 283619 - DNA, 12 bp, Artificial Sequence
  Oligonucleotide primer for the detection of SNP TSC0011423
ttagaattgtta

SEQ ID NO: 283620 - DNA, 12 bp, Artificial Sequence
  Oligonucleotide primer for the detection of SNP TSC0011424
aaaattatctta

SEQ ID NO: 283621 - DNA, 12 bp, Artificial Sequence
  Oligonucleotide primer for the detection of SNP TSC0011424
atgtttgtttgt

SEQ ID NO: 283622 - DNA, 12 bp, Artificial Sequence
  Oligonucleotide primer for the detection of SNP TSC0011424
atatctatctat

SEQ ID NO: 283623 - DNA, 12 bp, Artificial Sequence
  Oligonucleotide primer for the detection of SNP TSC0011424
gaggttgttttg

SEQ ID NO: 283624 - DNA, 12 bp, Artificial Sequence
  Oligonucleotide primer for the detection of SNP TSC0011425
atcaactacctc

SEQ ID NO: 283625 - DNA, 12 bp, Artificial Sequence
  Oligonucleotide primer for the detection of SNP TSC0011425
tggtaggttaag

SEQ ID NO: 283626 - DNA, 12 bp, Artificial Sequence
  Oligonucleotide primer for the detection of SNP TSC0011428
aataaacaaatt

SEQ ID NO: 283627 - DNA, 12 bp, Artificial Sequence
  Oligonucleotide primer for the detection of SNP TSC0011428
aatggtgttggg

SEQ ID NO: 283628 - DNA, 12 bp, Artificial Sequence
  Oligonucleotide primer for the detection of SNP TSC0011429
caacacaaaaat

SEQ ID NO: 283629 - DNA, 12 bp, Artificial Sequence
  Oligonucleotide primer for the detection of SNP TSC0011429
cgacacaaaaat

SEQ ID NO: 283630 - DNA, 12 bp, Artificial Sequence
  Oligonucleotide primer for the detection of SNP TSC0011429
ttggagttaggg

SEQ ID NO: 283631 - DNA, 12 bp, Artificial Sequence
  Oligonucleotide primer for the detection of SNP TSC0011430
ggattgttaata

SEQ ID NO: 283632 - DNA, 12 bp, Artificial Sequence
  Oligonucleotide primer for the detection of SNP TSC0011431
gattgttaataa

SEQ ID NO: 283633 - DNA, 12 bp, Artificial Sequence
  Oligonucleotide primer for the detection of SNP TSC0011431
gagagaaagggt

SEQ ID NO: 283634 - DNA, 12 bp, Artificial Sequence
  Oligonucleotide primer for the detection of SNP TSC0011432
caattataattc

SEQ ID NO: 283635 - DNA, 12 bp, Artificial Sequence
  Oligonucleotide primer for the detection of SNP TSC0011432
gtataggtttta

SEQ ID NO: 283636 - DNA, 12 bp, Artificial Sequence
  Oligonucleotide primer for the detection of SNP TSC0011433
ataatatcattt

SEQ ID NO: 283637 - DNA, 12 bp, Artificial Sequence
  Oligonucleotide primer for the detection of SNP TSC0011433
ttttggaaaatg

SEQ ID NO: 283638 - DNA, 12 bp, Artificial Sequence
  Oligonucleotide primer for the detection of SNP TSC0011434
atttctatatat

SEQ ID NO: 283639 - DNA, 12 bp, Artificial Sequence
  Oligonucleotide primer for the detection of SNP TSC0011434
ttatgttggaaa

SEQ ID NO: 283640 - DNA, 12 bp, Artificial Sequence
  Oligonucleotide primer for the detection of SNP TSC0011438
tagtttgttaat

SEQ ID NO: 283641 - DNA, 12 bp, Artificial Sequence
  Oligonucleotide primer for the detection of SNP TSC0011438
acaacctatcaa

SEQ ID NO: 283642 - DNA, 12 bp, Artificial Sequence
  Oligonucleotide primer for the detection of SNP TSC0011438
ttattattgaat

SEQ ID NO: 283643 - DNA, 12 bp, Artificial Sequence
  Oligonucleotide primer for the detection of SNP TSC0011439
ccctattccctt

SEQ ID NO: 283644 - DNA, 12 bp, Artificial Sequence
  Oligonucleotide primer for the detection of SNP TSC0011439
aataatttaatg

SEQ ID NO: 283645 - DNA, 12 bp, Artificial Sequence
  Oligonucleotide primer for the detection of SNP TSC0011440
tccctattccct

SEQ ID NO: 283646 - DNA, 12 bp, Artificial Sequence
  Oligonucleotide primer for the detection of SNP TSC0011440
ataatttaatga

SEQ ID NO: 283647 - DNA, 12 bp, Artificial Sequence
  Oligonucleotide primer for the detection of SNP TSC0011441
aaaacataaaaa

SEQ ID NO: 283648 - DNA, 12 bp, Artificial Sequence
  Oligonucleotide primer for the detection of SNP TSC0011441
tgaaatattatg

SEQ ID NO: 283649 - DNA, 12 bp, Artificial Sequence
  Oligonucleotide primer for the detection of SNP TSC0011441
aaataccataaa

SEQ ID NO: 283650 - DNA, 12 bp, Artificial Sequence
  Oligonucleotide primer for the detection of SNP TSC0011441
aaggtataaaaa

SEQ ID NO: 283651 - DNA, 12 bp, Artificial Sequence
  Oligonucleotide primer for the detection of SNP TSC0011442
tgatatatatat

SEQ ID NO: 283652 - DNA, 12 bp, Artificial Sequence
  Oligonucleotide primer for the detection of SNP TSC0011442
taacatacacac

SEQ ID NO: 283653 - DNA, 12 bp, Artificial Sequence
  Oligonucleotide primer for the detection of SNP TSC0011442
gttggtaagggg

SEQ ID NO: 283654 - DNA, 12 bp, Artificial Sequence
  Oligonucleotide primer for the detection of SNP TSC0011443
ctccacaatcct

SEQ ID NO: 283655 - DNA, 12 bp, Artificial Sequence
  Oligonucleotide primer for the detection of SNP TSC0011443
ttggatgatatg

SEQ ID NO: 283656 - DNA, 12 bp, Artificial Sequence
  Oligonucleotide primer for the detection of SNP TSC0011444
agaaatttatgg

SEQ ID NO: 283657 - DNA, 12 bp, Artificial Sequence
  Oligonucleotide primer for the detection of SNP TSC0011445
gagatttttaat

SEQ ID NO: 283658 - DNA, 12 bp, Artificial Sequence
  Oligonucleotide primer for the detection of SNP TSC0011445
aaaatctccaat

SEQ ID NO: 283659 - DNA, 12 bp, Artificial Sequence
  Oligonucleotide primer for the detection of SNP TSC0011445
aaatatttggag

SEQ ID NO: 283660 - DNA, 12 bp, Artificial Sequence
  Oligonucleotide primer for the detection of SNP TSC0011446
aaaaattcataa

SEQ ID NO: 283661 - DNA, 12 bp, Artificial Sequence
  Oligonucleotide primer for the detection of SNP TSC0011446
agtaggaggatg

SEQ ID NO: 283662 - DNA, 12 bp, Artificial Sequence
  Oligonucleotide primer for the detection of SNP TSC0011448
taattaaatcac

SEQ ID NO: 283663 - DNA, 12 bp, Artificial Sequence
  Oligonucleotide primer for the detection of SNP TSC0011448
tgtttggtggaa

SEQ ID NO: 283664 - DNA, 12 bp, Artificial Sequence
  Oligonucleotide primer for the detection of SNP TSC0011450
cccattccccct

SEQ ID NO: 283665 - DNA, 12 bp, Artificial Sequence
  Oligonucleotide primer for the detection of SNP TSC0011450
tggaagatgggg

SEQ ID NO: 283666 - DNA, 12 bp, Artificial Sequence
  Oligonucleotide primer for the detection of SNP TSC0011451
cacttaaaccta

SEQ ID NO: 283667 - DNA, 12 bp, Artificial Sequence
  Oligonucleotide primer for the detection of SNP TSC0011451
cgcttaaaccta

SEQ ID NO: 283668 - DNA, 12 bp, Artificial Sequence
  Oligonucleotide primer for the detection of SNP TSC0011451
aagttttgtttt

SEQ ID NO: 283669 - DNA, 12 bp, Artificial Sequence
  Oligonucleotide primer for the detection of SNP TSC0011451
aagtttcgtttt

SEQ ID NO: 283670 - DNA, 12 bp, Artificial Sequence
  Oligonucleotide primer for the detection of SNP TSC0011451
aaactccacctt

SEQ ID NO: 283671 - DNA, 12 bp, Artificial Sequence
  Oligonucleotide primer for the detection of SNP TSC0011451
aaactccgcctt

SEQ ID NO: 283672 - DNA, 12 bp, Artificial Sequence
  Oligonucleotide primer for the detection of SNP TSC0011451
ttgtttgaattt

SEQ ID NO: 283673 - DNA, 12 bp, Artificial Sequence
  Oligonucleotide primer for the detection of SNP TSC0011451
tcgtttgaattt

SEQ ID NO: 283674 - DNA, 12 bp, Artificial Sequence
  Oligonucleotide primer for the detection of SNP TSC0011452
ctataaaatatt

SEQ ID NO: 283675 - DNA, 12 bp, Artificial Sequence
  Oligonucleotide primer for the detection of SNP TSC0011452
tattagttaaag

SEQ ID NO: 283676 - DNA, 12 bp, Artificial Sequence
  Oligonucleotide primer for the detection of SNP TSC0011452
tattaattaaaa

SEQ ID NO: 283677 - DNA, 12 bp, Artificial Sequence
  Oligonucleotide primer for the detection of SNP TSC0011452
ttgtgaaatgtt

SEQ ID NO: 283678 - DNA, 12 bp, Artificial Sequence
  Oligonucleotide primer for the detection of SNP TSC0011453
ccttcaatttta

SEQ ID NO: 283679 - DNA, 12 bp, Artificial Sequence
  Oligonucleotide primer for the detection of SNP TSC0011453
aaattttgtttt

SEQ ID NO: 283680 - DNA, 12 bp, Artificial Sequence
  Oligonucleotide primer for the detection of SNP TSC0011453
aaattttatctt

SEQ ID NO: 283681 - DNA, 12 bp, Artificial Sequence
  Oligonucleotide primer for the detection of SNP TSC0011453
tttttaattttg

SEQ ID NO: 283682 - DNA, 12 bp, Artificial Sequence
  Oligonucleotide primer for the detection of SNP TSC0011454
aaaataaactat

SEQ ID NO: 283683 - DNA, 12 bp, Artificial Sequence
  Oligonucleotide primer for the detection of SNP TSC0011454
tgtagtggtatg

SEQ ID NO: 283684 - DNA, 12 bp, Artificial Sequence
  Oligonucleotide primer for the detection of SNP TSC0011454
cgtagtggtatg

SEQ ID NO: 283685 - DNA, 12 bp, Artificial Sequence
  Oligonucleotide primer for the detection of SNP TSC0011455
ggaggtagaggt

SEQ ID NO: 283686 - DNA, 12 bp, Artificial Sequence
  Oligonucleotide primer for the detection of SNP TSC0011456
caaactcccaac

SEQ ID NO: 283687 - DNA, 12 bp, Artificial Sequence
  Oligonucleotide primer for the detection of SNP TSC0011456
caaactcccgac

SEQ ID NO: 283688 - DNA, 12 bp, Artificial Sequence
  Oligonucleotide primer for the detection of SNP TSC0011456
ttgattatttga

SEQ ID NO: 283689 - DNA, 12 bp, Artificial Sequence
  Oligonucleotide primer for the detection of SNP TSC0011458
acaacatcaata

SEQ ID NO: 283690 - DNA, 12 bp, Artificial Sequence
  Oligonucleotide primer for the detection of SNP TSC0011458
ttagattagtgt

SEQ ID NO: 283691 - DNA, 12 bp, Artificial Sequence
  Oligonucleotide primer for the detection of SNP TSC0011458
tcaaattaatac

SEQ ID NO: 283692 - DNA, 12 bp, Artificial Sequence
  Oligonucleotide primer for the detection of SNP TSC0011458
atagtattagta

SEQ ID NO: 283693 - DNA, 12 bp, Artificial Sequence
  Oligonucleotide primer for the detection of SNP TSC0011459
tatacctaatat

SEQ ID NO: 283694 - DNA, 12 bp, Artificial Sequence
  Oligonucleotide primer for the detection of SNP TSC0011459
aattttatgagg

SEQ ID NO: 283695 - DNA, 12 bp, Artificial Sequence
  Oligonucleotide primer for the detection of SNP TSC0011461
ttcataaaccat

SEQ ID NO: 283696 - DNA, 12 bp, Artificial Sequence
  Oligonucleotide primer for the detection of SNP TSC0011461
gtattgttgtgg

SEQ ID NO: 283697 - DNA, 12 bp, Artificial Sequence
  Oligonucleotide primer for the detection of SNP TSC0011461
gtatcgttgtgg

SEQ ID NO: 283698 - DNA, 12 bp, Artificial Sequence
  Oligonucleotide primer for the detection of SNP TSC0011466
actcaaatttat

SEQ ID NO: 283699 - DNA, 12 bp, Artificial Sequence
  Oligonucleotide primer for the detection of SNP TSC0011466
ttataatttata

SEQ ID NO: 283700 - DNA, 12 bp, Artificial Sequence
  Oligonucleotide primer for the detection of SNP TSC0011466
ccataatttaca

SEQ ID NO: 283701 - DNA, 12 bp, Artificial Sequence
  Oligonucleotide primer for the detection of SNP TSC0011466
gtttagatttgt

SEQ ID NO: 283702 - DNA, 12 bp, Artificial Sequence
  Oligonucleotide primer for the detection of SNP TSC0011467
ccaatttaactt

SEQ ID NO: 283703 - DNA, 12 bp, Artificial Sequence
  Oligonucleotide primer for the detection of SNP TSC0011467
attttatataaa

SEQ ID NO: 283704 - DNA, 12 bp, Artificial Sequence
  Oligonucleotide primer for the detection of SNP TSC0011469
tcaaacaacacc

SEQ ID NO: 283705 - DNA, 12 bp, Artificial Sequence
  Oligonucleotide primer for the detection of SNP TSC0011469
tcgaacaacacc

SEQ ID NO: 283706 - DNA, 12 bp, Artificial Sequence
  Oligonucleotide primer for the detection of SNP TSC0011469
ttatagtgtagg

SEQ ID NO: 283707 - DNA, 12 bp, Artificial Sequence
  Oligonucleotide primer for the detection of SNP TSC0011470
tcaatattatta

SEQ ID NO: 283708 - DNA, 12 bp, Artificial Sequence
  Oligonucleotide primer for the detection of SNP TSC0011470
ttagggatttta

SEQ ID NO: 283709 - DNA, 12 bp, Artificial Sequence
  Oligonucleotide primer for the detection of SNP TSC0011470
ctaaaaatttta

SEQ ID NO: 283710 - DNA, 12 bp, Artificial Sequence
  Oligonucleotide primer for the detection of SNP TSC0011470
ttaatgttgtta

SEQ ID NO: 283711 - DNA, 12 bp, Artificial Sequence
  Oligonucleotide primer for the detection of SNP TSC0011471
aacctaattccc

SEQ ID NO: 283712 - DNA, 12 bp, Artificial Sequence
  Oligonucleotide primer for the detection of SNP TSC0011471
atatattgatgt

SEQ ID NO: 283713 - DNA, 12 bp, Artificial Sequence
  Oligonucleotide primer for the detection of SNP TSC0011472
acttttaaaata

SEQ ID NO: 283714 - DNA, 12 bp, Artificial Sequence
  Oligonucleotide primer for the detection of SNP TSC0011472
tatgtataaatt

SEQ ID NO: 283715 - DNA, 12 bp, Artificial Sequence
  Oligonucleotide primer for the detection of SNP TSC0011472
gtttttagaata

SEQ ID NO: 283716 - DNA, 12 bp, Artificial Sequence
  Oligonucleotide primer for the detection of SNP TSC0011473
aactaacctcaa

SEQ ID NO: 283717 - DNA, 12 bp, Artificial Sequence
  Oligonucleotide primer for the detection of SNP TSC0011473
ttatataaagtt

SEQ ID NO: 283718 - DNA, 12 bp, Artificial Sequence
  Oligonucleotide primer for the detection of SNP TSC0011473
tacacaaaacca

SEQ ID NO: 283719 - DNA, 12 bp, Artificial Sequence
  Oligonucleotide primer for the detection of SNP TSC0011473
aattaattttag

SEQ ID NO: 283720 - DNA, 12 bp, Artificial Sequence
  Oligonucleotide primer for the detection of SNP TSC0011474
aatatcaaacct

SEQ ID NO: 283721 - DNA, 12 bp, Artificial Sequence
  Oligonucleotide primer for the detection of SNP TSC0011474
aatatcgaacct

SEQ ID NO: 283722 - DNA, 12 bp, Artificial Sequence
  Oligonucleotide primer for the detection of SNP TSC0011474
aaaaattttttg

SEQ ID NO: 283723 - DNA, 12 bp, Artificial Sequence
  Oligonucleotide primer for the detection of SNP TSC0011474
aaaaattcttta

SEQ ID NO: 283724 - DNA, 12 bp, Artificial Sequence
  Oligonucleotide primer for the detection of SNP TSC0011474
gatattgagttt

SEQ ID NO: 283725 - DNA, 12 bp, Artificial Sequence
  Oligonucleotide primer for the detection of SNP TSC0011474
gatatcgagttt

SEQ ID NO: 283726 - DNA, 12 bp, Artificial Sequence
  Oligonucleotide primer for the detection of SNP TSC0011475
cactcaactatt

SEQ ID NO: 283727 - DNA, 12 bp, Artificial Sequence
  Oligonukleotid-Primer
ttgatattaaaa

SEQ ID NO: 283728 - DNA, 12 bp, Artificial Sequence
  Oligonucleotide primer for the detection of SNP TSC0011476
aaattaattttc

SEQ ID NO: 283729 - DNA, 12 bp, Artificial Sequence
  Oligonucleotide primer for the detection of SNP TSC0011476
tgtgtattgtgg

SEQ ID NO: 283730 - DNA, 12 bp, Artificial Sequence
  Oligonucleotide primer for the detection of SNP TSC0011478
aatacaaaattt

SEQ ID NO: 283731 - DNA, 12 bp, Artificial Sequence
  Oligonukleotid-Primer
aatacgaaattt

SEQ ID NO: 283732 - DNA, 12 bp, Artificial Sequence
  Oligonucleotide primer for the detection of SNP TSC0011478
tggttaatatgg

SEQ ID NO: 283733 - DNA, 12 bp, Artificial Sequence
  Oligonucleotide primer for the detection of SNP TSC0011478
tggttaatacgg

SEQ ID NO: 283734 - DNA, 12 bp, Artificial Sequence
  Oligonucleotide primer for the detection of SNP TSC0011479
aataattatttc

SEQ ID NO: 283735 - DNA, 12 bp, Artificial Sequence
  Oligonucleotide primer for the detection of SNP TSC0011479
aaaatataagaa

SEQ ID NO: 283736 - DNA, 12 bp, Artificial Sequence
  Oligonucleotide primer for the detection of SNP TSC0011482
ataacatccttt

SEQ ID NO: 283737 - DNA, 12 bp, Artificial Sequence
  Oligonucleotide primer for the detection of SNP TSC0011482
ttatagattaga

SEQ ID NO: 283738 - DNA, 12 bp, Artificial Sequence
  Oligonucleotide primer for the detection of SNP TSC0011483
tcaaataatcca

SEQ ID NO: 283739 - DNA, 12 bp, Artificial Sequence
  Oligonucleotide primer for the detection of SNP TSC0011483
agattgaggtgg

SEQ ID NO: 283740 - DNA, 12 bp, Artificial Sequence
  Oligonucleotide primer for the detection of SNP TSC0011483
agatcgaggtgg

SEQ ID NO: 283741 - DNA, 12 bp, Artificial Sequence
  Oligonucleotide primer for the detection of SNP TSC0011483
aaaccaaaataa

SEQ ID NO: 283742 - DNA, 12 bp, Artificial Sequence
  Oligonucleotide primer for the detection of SNP TSC0011483
aaaccgaaataa

SEQ ID NO: 283743 - DNA, 12 bp, Artificial Sequence
  Oligonucleotide primer for the detection of SNP TSC0011483
ttaagtgattta

SEQ ID NO: 283744 - DNA, 12 bp, Artificial Sequence
  Oligonucleotide primer for the detection of SNP TSC0011484
ctcttaaaaatt

SEQ ID NO: 283745 - DNA, 12 bp, Artificial Sequence
  Oligonucleotide primer for the detection of SNP TSC0011484
tttggtaattgt

SEQ ID NO: 283746 - DNA, 12 bp, Artificial Sequence
  Oligonucleotide primer for the detection of SNP TSC0011484
tttaataactac

SEQ ID NO: 283747 - DNA, 12 bp, Artificial Sequence
  Oligonucleotide primer for the detection of SNP TSC0011484
tttttgagggtt

SEQ ID NO: 283748 - DNA, 12 bp, Artificial Sequence
  Oligonucleotide primer for the detection of SNP TSC0011485
tctcttaaaaaa

SEQ ID NO: 283749 - DNA, 12 bp, Artificial Sequence
  Oligonucleotide primer for the detection of SNP TSC0011485
atattttaattt

SEQ ID NO: 283750 - DNA, 12 bp, Artificial Sequence
  Oligonucleotide primer for the detection of SNP TSC0011485
acacctcaaccc

SEQ ID NO: 283751 - DNA, 12 bp, Artificial Sequence
  Oligonucleotide primer for the detection of SNP TSC0011485
ttttttaagagg

SEQ ID NO: 283752 - DNA, 12 bp, Artificial Sequence
  Oligonucleotide primer for the detection of SNP TSC0011489
acaatattaaaa

SEQ ID NO: 283753 - DNA, 12 bp, Artificial Sequence
  Oligonucleotide primer for the detection of SNP TSC0011489
atttttgaagga

SEQ ID NO: 283754 - DNA, 12 bp, Artificial Sequence
  Oligonucleotide primer for the detection of SNP TSC0011489
actcttaaaaaa

SEQ ID NO: 283755 - DNA, 12 bp, Artificial Sequence
  Oligonucleotide primer for the detection of SNP TSC0011489
atagtattagaa

SEQ ID NO: 283756 - DNA, 12 bp, Artificial Sequence
  Oligonucleotide primer for the detection of SNP TSC0011493
aaacatattatt

SEQ ID NO: 283757 - DNA, 12 bp, Artificial Sequence
  Oligonucleotide primer for the detection of SNP TSC0011493
gtttaattaaga

SEQ ID NO: 283758 - DNA, 12 bp, Artificial Sequence
  Oligonucleotide primer for the detection of SNP TSC0011493
acccaatcaaaa

SEQ ID NO: 283759 - DNA, 12 bp, Artificial Sequence
  Oligonucleotide primer for the detection of SNP TSC0011493
ggatatattatt

SEQ ID NO: 283760 - DNA, 12 bp, Artificial Sequence
  Oligonucleotide primer for the detection of SNP TSC0011494
gtgttttggtag

SEQ ID NO: 283761 - DNA, 12 bp, Artificial Sequence
  Oligonucleotide primer for the detection of SNP TSC0011494
atatcctaataa

SEQ ID NO: 283762 - DNA, 12 bp, Artificial Sequence
  Oligonucleotide primer for the detection of SNP TSC0011494
tggttggggtag

SEQ ID NO: 283763 - DNA, 12 bp, Artificial Sequence
  Oligonucleotide primer for the detection of SNP TSC0011495
ctaaaatacatc

SEQ ID NO: 283764 - DNA, 12 bp, Artificial Sequence
  Oligonucleotide primer for the detection of SNP TSC0011495
ttagtagatttg

SEQ ID NO: 283765 - DNA, 12 bp, Artificial Sequence
  Oligonucleotide primer for the detection of SNP TSC0011495
tcaataaatcta

SEQ ID NO: 283766 - DNA, 12 bp, Artificial Sequence
  Oligonucleotide primer for the detection of SNP TSC0011495
ttgggatatatt

SEQ ID NO: 283767 - DNA, 12 bp, Artificial Sequence
  Oligonucleotide primer for the detection of SNP TSC0011498
aataaaaataca

SEQ ID NO: 283768 - DNA, 12 bp, Artificial Sequence
  Oligonucleotide primer for the detection of SNP TSC0011498
gtgttaaaaaat

SEQ ID NO: 283769 - DNA, 12 bp, Artificial Sequence
  Oligonucleotide primer for the detection of SNP TSC0011498
gatgaaaatata

SEQ ID NO: 283770 - DNA, 12 bp, Artificial Sequence
  Oligonucleotide primer for the detection of SNP TSC0011500
caaatactcata

SEQ ID NO: 283771 - DNA, 12 bp, Artificial Sequence
  Oligonucleotide primer for the detection of SNP TSC0011500
ttagttttatgt

SEQ ID NO: 283772 - DNA, 12 bp, Artificial Sequence
  Oligonucleotide primer for the detection of SNP TSC0011500
ccaatcctatac

SEQ ID NO: 283773 - DNA, 12 bp, Artificial Sequence
  Oligonucleotide primer for the detection of SNP TSC0011500
taggtgtttatg

SEQ ID NO: 283774 - DNA, 12 bp, Artificial Sequence
  Oligonucleotide primer for the detection of SNP TSC0011501
tatttaccacat

SEQ ID NO: 283775 - DNA, 12 bp, Artificial Sequence
  Oligonucleotide primer for the detection of SNP TSC0011504
ctatttcatcac

SEQ ID NO: 283776 - DNA, 12 bp, Artificial Sequence
  Oligonucleotide primer for the detection of SNP TSC0011504
tagtaatgaata

SEQ ID NO: 283777 - DNA, 12 bp, Artificial Sequence
  Oligonucleotide primer for the detection of SNP TSC0011505
ttttaaatacac

SEQ ID NO: 283778 - DNA, 12 bp, Artificial Sequence
  Oligonucleotide primer for the detection of SNP TSC0011505
ttttaaatacgc

SEQ ID NO: 283779 - DNA, 12 bp, Artificial Sequence
  Oligonucleotide primer for the detection of SNP TSC0011505
aaatttgttgag

SEQ ID NO: 283780 - DNA, 12 bp, Artificial Sequence
  Oligonucleotide primer for the detection of SNP TSC0011505
aaacctactaaa

SEQ ID NO: 283781 - DNA, 12 bp, Artificial Sequence
  Oligonucleotide primer for the detection of SNP TSC0011505
ttttaggtatgt

SEQ ID NO: 283782 - DNA, 12 bp, Artificial Sequence
  Oligonucleotide primer for the detection of SNP TSC0011505
ttttaggtacgt

SEQ ID NO: 283783 - DNA, 12 bp, Artificial Sequence
  Oligonucleotide primer for the detection of SNP TSC0011506
tctaataaattc

SEQ ID NO: 283784 - DNA, 12 bp, Artificial Sequence
  Oligonucleotide primer for the detection of SNP TSC0011506
aggtttttattg

SEQ ID NO: 283785 - DNA, 12 bp, Artificial Sequence
  Oligonucleotide primer for the detection of SNP TSC0011506
aaattcttacta

SEQ ID NO: 283786 - DNA, 12 bp, Artificial Sequence
  Oligonucleotide primer for the detection of SNP TSC0011507
caaatcaatttt

SEQ ID NO: 283787 - DNA, 12 bp, Artificial Sequence
  Oligonucleotide primer for the detection of SNP TSC0011507
aagtttttttta

SEQ ID NO: 283788 - DNA, 12 bp, Artificial Sequence
  Oligonucleotide primer for the detection of SNP TSC0011508
ggtaaaatagta

SEQ ID NO: 283789 - DNA, 12 bp, Artificial Sequence
  Oligonucleotide primer for the detection of SNP TSC0011510
ttatctttaaac

SEQ ID NO: 283790 - DNA, 12 bp, Artificial Sequence
  Oligonucleotide primer for the detection of SNP TSC0011510
agggtatttgta

SEQ ID NO: 283791 - DNA, 12 bp, Artificial Sequence
  Oligonucleotide primer for the detection of SNP TSC0011511
cttcccaaaaaa

SEQ ID NO: 283792 - DNA, 12 bp, Artificial Sequence
  Oligonucleotide primer for the detection of SNP TSC0011511
aattcccttctc

SEQ ID NO: 283793 - DNA, 12 bp, Artificial Sequence
  Oligonucleotide primer for the detection of SNP TSC0011512
acactcccataa

SEQ ID NO: 283794 - DNA, 12 bp, Artificial Sequence
  Oligonucleotide primer for the detection of SNP TSC0011512
acactcccgtaa

SEQ ID NO: 283795 - DNA, 12 bp, Artificial Sequence
  Oligonucleotide primer for the detection of SNP TSC0011512
aatggtgataat

SEQ ID NO: 283796 - DNA, 12 bp, Artificial Sequence
  Oligonucleotide primer for the detection of SNP TSC0011512
aacggtgataat

SEQ ID NO: 283797 - DNA, 12 bp, Artificial Sequence
  Oligonucleotide primer for the detection of SNP TSC0011512
aacaataataac

SEQ ID NO: 283798 - DNA, 12 bp, Artificial Sequence
  Oligonucleotide primer for the detection of SNP TSC0011512
aacgataataac

SEQ ID NO: 283799 - DNA, 12 bp, Artificial Sequence
  Oligonucleotide primer for the detection of SNP TSC0011512
atatttttgtgg

SEQ ID NO: 283800 - DNA, 12 bp, Artificial Sequence
  Oligonucleotide primer for the detection of SNP TSC0011512
atattttcgtgg

SEQ ID NO: 283801 - DNA, 12 bp, Artificial Sequence
  Oligonucleotide primer for the detection of SNP TSC0011513
aacaattaccaa

SEQ ID NO: 283802 - DNA, 12 bp, Artificial Sequence
  Oligonucleotide primer for the detection of SNP TSC0011513
aacaattaccga

SEQ ID NO: 283803 - DNA, 12 bp, Artificial Sequence
  Oligonucleotide primer for the detection of SNP TSC0011513
aacgattaccaa

SEQ ID NO: 283804 - DNA, 12 bp, Artificial Sequence
  Oligonucleotide primer for the detection of SNP TSC0011513
aacgattaccga

SEQ ID NO: 283805 - DNA, 12 bp, Artificial Sequence
  Oligonucleotide primer for the detection of SNP TSC0011513
gtgtggtggttt

SEQ ID NO: 283806 - DNA, 12 bp, Artificial Sequence
  Oligonucleotide primer for the detection of SNP TSC0011513
gcgtggtggttt

SEQ ID NO: 283807 - DNA, 12 bp, Artificial Sequence
  Oligonucleotide primer for the detection of SNP TSC0011513
acgtaataactc

SEQ ID NO: 283808 - DNA, 12 bp, Artificial Sequence
  Oligonucleotide primer for the detection of SNP TSC0011513
ggtgattattga

SEQ ID NO: 283809 - DNA, 12 bp, Artificial Sequence
  Oligonucleotide primer for the detection of SNP TSC0011513
ggcgattattga

SEQ ID NO: 283810 - DNA, 12 bp, Artificial Sequence
  Oligonucleotide primer for the detection of SNP TSC0011513
ggtgattatcga

SEQ ID NO: 283811 - DNA, 12 bp, Artificial Sequence
  Oligonucleotide primer for the detection of SNP TSC0011513
ggcgattatcga

SEQ ID NO: 283812 - DNA, 12 bp, Artificial Sequence
  Oligonucleotide primer for the detection of SNP TSC0011515
atttactcaccc

SEQ ID NO: 283813 - DNA, 12 bp, Artificial Sequence
  Oligonucleotide primer for the detection of SNP TSC0011515
aataaatgtgtg

SEQ ID NO: 283814 - DNA, 12 bp, Artificial Sequence
  Oligonucleotide primer for the detection of SNP TSC0011515
aataaacgtgtg

SEQ ID NO: 283815 - DNA, 12 bp, Artificial Sequence
  Oligonucleotide primer for the detection of SNP TSC0011516
accccaatatac

SEQ ID NO: 283816 - DNA, 12 bp, Artificial Sequence
  Oligonucleotide primer for the detection of SNP TSC0011519
ctactatacctc

SEQ ID NO: 283817 - DNA, 12 bp, Artificial Sequence
  Oligonucleotide primer for the detection of SNP TSC0011519
tggaggggagaa

SEQ ID NO: 283818 - DNA, 12 bp, Artificial Sequence
  Oligonucleotide primer for the detection of SNP TSC0011519
ttattatgtttt

SEQ ID NO: 283819 - DNA, 12 bp, Artificial Sequence
  Oligonucleotide primer for the detection of SNP TSC0011524
tttattaatttc

SEQ ID NO: 283820 - DNA, 12 bp, Artificial Sequence
  Oligonucleotide primer for the detection of SNP TSC0011524
aattaatgatag

SEQ ID NO: 283821 - DNA, 12 bp, Artificial Sequence
  Oligonucleotide primer for the detection of SNP TSC0011524
aattaacgatag

SEQ ID NO: 283822 - DNA, 12 bp, Artificial Sequence
  Oligonucleotide primer for the detection of SNP TSC0011524
aattaacaataa

SEQ ID NO: 283823 - DNA, 12 bp, Artificial Sequence
  Oligonucleotide primer for the detection of SNP TSC0011524
aattaacgataa

SEQ ID NO: 283824 - DNA, 12 bp, Artificial Sequence
  Oligonucleotide primer for the detection of SNP TSC0011524
tttgttaatttt

SEQ ID NO: 283825 - DNA, 12 bp, Artificial Sequence
  Oligonucleotide primer for the detection of SNP TSC0011528
tacaaatcaatc

SEQ ID NO: 283826 - DNA, 12 bp, Artificial Sequence
  Oligonucleotide primer for the detection of SNP TSC0011528
taatggttgagg

SEQ ID NO: 283827 - DNA, 12 bp, Artificial Sequence
  Oligonucleotide primer for the detection of SNP TSC0011528
aataactaaaaa

SEQ ID NO: 283828 - DNA, 12 bp, Artificial Sequence
  Oligonucleotide primer for the detection of SNP TSC0011528
tataaattagtt

SEQ ID NO: 283829 - DNA, 12 bp, Artificial Sequence
  Oligonucleotide primer for the detection of SNP TSC0011529
cataattctttc

SEQ ID NO: 283830 - DNA, 12 bp, Artificial Sequence
  Oligonucleotide primer for the detection of SNP TSC0011529
agtatatgatgt

SEQ ID NO: 283831 - DNA, 12 bp, Artificial Sequence
  Oligonucleotide primer for the detection of SNP TSC0011529
agtatacgatgt

SEQ ID NO: 283832 - DNA, 12 bp, Artificial Sequence
  Oligonucleotide primer for the detection of SNP TSC0011529
agtatatgacgt

SEQ ID NO: 283833 - DNA, 12 bp, Artificial Sequence
  Oligonucleotide primer for the detection of SNP TSC0011529
agtatacgacgt

SEQ ID NO: 283834 - DNA, 12 bp, Artificial Sequence
  Oligonucleotide primer for the detection of SNP TSC0011529
acacacaacaca

SEQ ID NO: 283835 - DNA, 12 bp, Artificial Sequence
  Oligonucleotide primer for the detection of SNP TSC0011529
acacacaacgca

SEQ ID NO: 283836 - DNA, 12 bp, Artificial Sequence
  Oligonucleotide primer for the detection of SNP TSC0011529
acacacgacaca

SEQ ID NO: 283837 - DNA, 12 bp, Artificial Sequence
  Oligonucleotide primer for the detection of SNP TSC0011529
acacacgacgca

SEQ ID NO: 283838 - DNA, 12 bp, Artificial Sequence
  Oligonucleotide primer for the detection of SNP TSC0011529
tatgattttttt

SEQ ID NO: 283839 - DNA, 12 bp, Artificial Sequence
  Oligonucleotide primer for the detection of SNP TSC0011529
tatgattttttc

SEQ ID NO: 283840 - DNA, 12 bp, Artificial Sequence
  Oligonucleotide primer for the detection of SNP TSC0011530
actcatataatt

SEQ ID NO: 283841 - DNA, 12 bp, Artificial Sequence
  Oligonucleotide primer for the detection of SNP TSC0011530
ttaatattttta

SEQ ID NO: 283842 - DNA, 12 bp, Artificial Sequence
  Oligonucleotide primer for the detection of SNP TSC0011530
ctaatatcctca

SEQ ID NO: 283843 - DNA, 12 bp, Artificial Sequence
  Oligonucleotide primer for the detection of SNP TSC0011530
gtttatgtagtt

SEQ ID NO: 283844 - DNA, 12 bp, Artificial Sequence
  Oligonucleotide primer for the detection of SNP TSC0011531
tatttcccttac

SEQ ID NO: 283845 - DNA, 12 bp, Artificial Sequence
  Oligonucleotide primer for the detection of SNP TSC0011531
atttgttaagta

SEQ ID NO: 283846 - DNA, 12 bp, Artificial Sequence
  Oligonucleotide primer for the detection of SNP TSC0011532
aatacaaacaat

SEQ ID NO: 283847 - DNA, 12 bp, Artificial Sequence
  Oligonucleotide primer for the detection of SNP TSC0011532
aatacgaacaat

SEQ ID NO: 283848 - DNA, 12 bp, Artificial Sequence
  Oligonucleotide primer for the detection of SNP TSC0011532
taaaaaaaaaag

SEQ ID NO: 283849 - DNA, 12 bp, Artificial Sequence
  Oligonucleotide primer for the detection of SNP TSC0011533
aaaaataaacaa

SEQ ID NO: 283850 - DNA, 12 bp, Artificial Sequence
  Oligonucleotide primer for the detection of SNP TSC0011533
taatttggatta

SEQ ID NO: 283851 - DNA, 12 bp, Artificial Sequence
  Oligonucleotide primer for the detection of SNP TSC0011535
ccctaatttcta

SEQ ID NO: 283852 - DNA, 12 bp, Artificial Sequence
  Oligonucleotide primer for the detection of SNP TSC0011535
taatcccattta

SEQ ID NO: 283853 - DNA, 12 bp, Artificial Sequence
  Oligonucleotide primer for the detection of SNP TSC0011535
attttaattttt

SEQ ID NO: 283854 - DNA, 12 bp, Artificial Sequence
  Oligonucleotide primer for the detection of SNP TSC0011536
tttgtatttatg

SEQ ID NO: 283855 - DNA, 12 bp, Artificial Sequence
  Oligonucleotide primer for the detection of SNP TSC0011536
tttatatttata

SEQ ID NO: 283856 - DNA, 12 bp, Artificial Sequence
  Oligonucleotide primer for the detection of SNP TSC0011536
atttttatatga

SEQ ID NO: 283857 - DNA, 12 bp, Artificial Sequence
  Oligonucleotide primer for the detection of SNP TSC0011539
aaaccataaata

SEQ ID NO: 283858 - DNA, 12 bp, Artificial Sequence
  Oligonucleotide primer for the detection of SNP TSC0011539
ttgtttgattat

SEQ ID NO: 283859 - DNA, 12 bp, Artificial Sequence
  Oligonucleotide primer for the detection of SNP TSC0011539
ttacttaattat

SEQ ID NO: 283860 - DNA, 12 bp, Artificial Sequence
  Oligonucleotide primer for the detection of SNP TSC0011539
gaattataaatg

SEQ ID NO: 283861 - DNA, 12 bp, Artificial Sequence
  Oligonucleotide primer for the detection of SNP TSC0011540
aaaacacactat

SEQ ID NO: 283862 - DNA, 12 bp, Artificial Sequence
  Oligonucleotide primer for the detection of SNP TSC0011540
gtggaataatga

SEQ ID NO: 283863 - DNA, 12 bp, Artificial Sequence
  Oligonucleotide primer for the detection of SNP TSC0011541
aaaaccattaaa

SEQ ID NO: 283864 - DNA, 12 bp, Artificial Sequence
  Oligonucleotide primer for the detection of SNP TSC0011541
aaaaccgttaaa

SEQ ID NO: 283865 - DNA, 12 bp, Artificial Sequence
  Oligonucleotide primer for the detection of SNP TSC0011541
aatgtttatagt

SEQ ID NO: 283866 - DNA, 12 bp, Artificial Sequence
  Oligonucleotide primer for the detection of SNP TSC0011541
tacctacaacaa

SEQ ID NO: 283867 - DNA, 12 bp, Artificial Sequence
  Oligonucleotide primer for the detection of SNP TSC0011541
agaattgttgaa

SEQ ID NO: 283868 - DNA, 12 bp, Artificial Sequence
  Oligonucleotide primer for the detection of SNP TSC0011541
agaatcgttgaa

SEQ ID NO: 283869 - DNA, 12 bp, Artificial Sequence
  Oligonucleotide primer for the detection of SNP TSC0011542
aaatataaactt

SEQ ID NO: 283870 - DNA, 12 bp, Artificial Sequence
  Oligonucleotide primer for the detection of SNP TSC0011542
tatattgagaaa

SEQ ID NO: 283871 - DNA, 12 bp, Artificial Sequence
  Oligonucleotide primer for the detection of SNP TSC0011542
tacattaaaaaa

SEQ ID NO: 283872 - DNA, 12 bp, Artificial Sequence
  Oligonucleotide primer for the detection of SNP TSC0011542
aaatataaattt

SEQ ID NO: 283873 - DNA, 12 bp, Artificial Sequence
  Oligonucleotide primer for the detection of SNP TSC0011543
atcaatacaatt

SEQ ID NO: 283874 - DNA, 12 bp, Artificial Sequence
  Oligonucleotide primer for the detection of SNP TSC0011543
gttggattttat

SEQ ID NO: 283875 - DNA, 12 bp, Artificial Sequence
  Oligonucleotide primer for the detection of SNP TSC0011544
tcaaaaaaaatt

SEQ ID NO: 283876 - DNA, 12 bp, Artificial Sequence
  Oligonucleotide primer for the detection of SNP TSC0011544
tgatatataaaa

SEQ ID NO: 283877 - DNA, 12 bp, Artificial Sequence
  Oligonucleotide primer for the detection of SNP TSC0011545
aaatattactat

SEQ ID NO: 283878 - DNA, 12 bp, Artificial Sequence
  Oligonucleotide primer for the detection of SNP TSC0011545
ttatttagttta

SEQ ID NO: 283879 - DNA, 12 bp, Artificial Sequence
  Oligonucleotide primer for the detection of SNP TSC0011545
ttacctaattta

SEQ ID NO: 283880 - DNA, 12 bp, Artificial Sequence
  Oligonucleotide primer for the detection of SNP TSC0011545
aaatgttattat

SEQ ID NO: 283881 - DNA, 12 bp, Artificial Sequence
  Oligonukleotid-Primer
catataattttt

SEQ ID NO: 283882 - DNA, 12 bp, Artificial Sequence
  Oligonucleotide primer for the detection of SNP TSC0011547
gttagatgttaa

SEQ ID NO: 283883 - DNA, 12 bp, Artificial Sequence
  Oligonucleotide primer for the detection of SNP TSC0011548
tctctaaacaat

SEQ ID NO: 283884 - DNA, 12 bp, Artificial Sequence
  Oligonucleotide primer for the detection of SNP TSC0011553
acacacacacat

SEQ ID NO: 283885 - DNA, 12 bp, Artificial Sequence
  Oligonukleotid-Primer
tgtgtatatata

SEQ ID NO: 283886 - DNA, 12 bp, Artificial Sequence
  Oligonucleotide primer for the detection of SNP TSC0011555
aatttaaattac

SEQ ID NO: 283887 - DNA, 12 bp, Artificial Sequence
  Oligonucleotide primer for the detection of SNP TSC0011555
tttaaaaaatta

SEQ ID NO: 283888 - DNA, 12 bp, Artificial Sequence
  Oligonucleotide primer for the detection of SNP TSC0011556
atgtgtttaatt

SEQ ID NO: 283889 - DNA, 12 bp, Artificial Sequence
  Oligonukleotid-Primer
atatatccaacc

SEQ ID NO: 283890 - DNA, 12 bp, Artificial Sequence
  Oligonucleotide primer for the detection of SNP TSC0011556
agagtaatagtg

SEQ ID NO: 283891 - DNA, 12 bp, Artificial Sequence
  Oligonucleotide primer for the detection of SNP TSC0011557
tttaatcccaaa

SEQ ID NO: 283892 - DNA, 12 bp, Artificial Sequence
  Oligonucleotide primer for the detection of SNP TSC0011557
ttaagaaattat

SEQ ID NO: 283893 - DNA, 12 bp, Artificial Sequence
  Oligonucleotide primer for the detection of SNP TSC0011557
ccaaaaaatcac

SEQ ID NO: 283894 - DNA, 12 bp, Artificial Sequence
  Oligonucleotide primer for the detection of SNP TSC0011557
tttgattttaaa

SEQ ID NO: 283895 - DNA, 12 bp, Artificial Sequence
  Oligonucleotide primer for the detection of SNP TSC0011559
caaaataaaact

SEQ ID NO: 283896 - DNA, 12 bp, Artificial Sequence
  Oligonucleotide primer for the detection of SNP TSC0011559
tttcttttaaaa

SEQ ID NO: 283897 - DNA, 12 bp, Artificial Sequence
  Oligonucleotide primer for the detection of SNP TSC0011559
gagtaagatttt

SEQ ID NO: 283898 - DNA, 12 bp, Artificial Sequence
  Oligonucleotide primer for the detection of SNP TSC0011559
gagtaagatttc

SEQ ID NO: 283899 - DNA, 12 bp, Artificial Sequence
  Oligonucleotide primer for the detection of SNP TSC0011560
accaaaatcact

SEQ ID NO: 283900 - DNA, 12 bp, Artificial Sequence
  Oligonucleotide primer for the detection of SNP TSC0011560
accaaaatcgct

SEQ ID NO: 283901 - DNA, 12 bp, Artificial Sequence
  Oligonucleotide primer for the detection of SNP TSC0011560
accgaaatcact

SEQ ID NO: 283902 - DNA, 12 bp, Artificial Sequence
  Oligonucleotide primer for the detection of SNP TSC0011560
accgaaatcgct

SEQ ID NO: 283903 - DNA, 12 bp, Artificial Sequence
  Oligonucleotide primer for the detection of SNP TSC0011561
ggttggttttga

SEQ ID NO: 283904 - DNA, 12 bp, Artificial Sequence
  Oligonucleotide primer for the detection of SNP TSC0011561
aactaatcttaa

SEQ ID NO: 283905 - DNA, 12 bp, Artificial Sequence
  Oligonucleotide primer for the detection of SNP TSC0011561
atgaggttagga

SEQ ID NO: 283906 - DNA, 12 bp, Artificial Sequence
  Oligonucleotide primer for the detection of SNP TSC0011565
gaataaaaaatt

SEQ ID NO: 283907 - DNA, 12 bp, Artificial Sequence
  Oligonucleotide primer for the detection of SNP TSC0011565
gattttaaaatt

SEQ ID NO: 283908 - DNA, 12 bp, Artificial Sequence
  Oligonucleotide primer for the detection of SNP TSC0011565
taactctaaaat

SEQ ID NO: 283909 - DNA, 12 bp, Artificial Sequence
  Oligonucleotide primer for the detection of SNP TSC0011565
gggtgaaaagtt

SEQ ID NO: 283910 - DNA, 12 bp, Artificial Sequence
  Oligonucleotide primer for the detection of SNP TSC0011566
cccttaccccac

SEQ ID NO: 283911 - DNA, 12 bp, Artificial Sequence
  Oligonucleotide primer for the detection of SNP TSC0011566
ttttaaaatagg

SEQ ID NO: 283912 - DNA, 12 bp, Artificial Sequence
  Oligonucleotide primer for the detection of SNP TSC0011567
taataaaactaa

SEQ ID NO: 283913 - DNA, 12 bp, Artificial Sequence
  Oligonucleotide primer for the detection of SNP TSC0011567
ttttagtagttt

SEQ ID NO: 283914 - DNA, 12 bp, Artificial Sequence
  Oligonucleotide primer for the detection of SNP TSC0011567
cctccaacaacc

SEQ ID NO: 283915 - DNA, 12 bp, Artificial Sequence
  Oligonucleotide primer for the detection of SNP TSC0011567
tagtggagttgg

SEQ ID NO: 283916 - DNA, 12 bp, Artificial Sequence
  Oligonucleotide primer for the detection of SNP TSC0011568
acaacaaaacaa

SEQ ID NO: 283917 - DNA, 12 bp, Artificial Sequence
  Oligonucleotide primer for the detection of SNP TSC0011568
tttaatagtaaa

SEQ ID NO: 283918 - DNA, 12 bp, Artificial Sequence
  Oligonucleotide primer for the detection of SNP TSC0011568
tctaataacaaa

SEQ ID NO: 283919 - DNA, 12 bp, Artificial Sequence
  Oligonucleotide primer for the detection of SNP TSC0011568
taataaggtaat

SEQ ID NO: 283920 - DNA, 12 bp, Artificial Sequence
  Oligonucleotide primer for the detection of SNP TSC0011569
ctaacaacaaaa

SEQ ID NO: 283921 - DNA, 12 bp, Artificial Sequence
  Oligonucleotide primer for the detection of SNP TSC0011569
atagtaaatgtt

SEQ ID NO: 283922 - DNA, 12 bp, Artificial Sequence
  Oligonucleotide primer for the detection of SNP TSC0011569
ataacaaatatt

SEQ ID NO: 283923 - DNA, 12 bp, Artificial Sequence
  Oligonucleotide primer for the detection of SNP TSC0011569
aattaataataa

SEQ ID NO: 283924 - DNA, 12 bp, Artificial Sequence
  Oligonucleotide primer for the detection of SNP TSC0011573
ccacatactacc

SEQ ID NO: 283925 - DNA, 12 bp, Artificial Sequence
  Oligonucleotide primer for the detection of SNP TSC0011573
attttttgggaa

SEQ ID NO: 283926 - DNA, 12 bp, Artificial Sequence
  Oligonucleotide primer for the detection of SNP TSC0011573
atttttcgggaa

SEQ ID NO: 283927 - DNA, 12 bp, Artificial Sequence
  Oligonucleotide primer for the detection of SNP TSC0011575
ccatatactcac

SEQ ID NO: 283928 - DNA, 12 bp, Artificial Sequence
  Oligonucleotide primer for the detection of SNP TSC0011575
tataaggaatgg

SEQ ID NO: 283929 - DNA, 12 bp, Artificial Sequence
  Oligonucleotide primer for the detection of SNP TSC0011577
ctactctaatat

SEQ ID NO: 283930 - DNA, 12 bp, Artificial Sequence
  Oligonucleotide primer for the detection of SNP TSC0011577
atagtagattgg

SEQ ID NO: 283931 - DNA, 12 bp, Artificial Sequence
  Oligonucleotide primer for the detection of SNP TSC0011579
ttataaacattt

SEQ ID NO: 283932 - DNA, 12 bp, Artificial Sequence
  Oligonucleotide primer for the detection of SNP TSC0011579
gatattttaatg

SEQ ID NO: 283933 - DNA, 12 bp, Artificial Sequence
  Oligonucleotide primer for the detection of SNP TSC0011579
aacatcccaata

SEQ ID NO: 283934 - DNA, 12 bp, Artificial Sequence
  Oligonucleotide primer for the detection of SNP TSC0011579
ttataaatattt

SEQ ID NO: 283935 - DNA, 12 bp, Artificial Sequence
  Oligonucleotide primer for the detection of SNP TSC0011580
acaaacattact

SEQ ID NO: 283936 - DNA, 12 bp, Artificial Sequence
  Oligonucleotide primer for the detection of SNP TSC0011580
tgttgttgttta

SEQ ID NO: 283937 - DNA, 12 bp, Artificial Sequence
  Oligonucleotide primer for the detection of SNP TSC0011580
tattattattta

SEQ ID NO: 283938 - DNA, 12 bp, Artificial Sequence
  Oligonucleotide primer for the detection of SNP TSC0011580
atagatattatt

SEQ ID NO: 283939 - DNA, 12 bp, Artificial Sequence
  Oligonucleotide primer for the detection of SNP TSC0011581
ctaaccttaatc

SEQ ID NO: 283940 - DNA, 12 bp, Artificial Sequence
  Oligonucleotide primer for the detection of SNP TSC0011581
gggaggtagagg

SEQ ID NO: 283941 - DNA, 12 bp, Artificial Sequence
  Oligonucleotide primer for the detection of SNP TSC0011581
tggttttaattt

SEQ ID NO: 283942 - DNA, 12 bp, Artificial Sequence
  Oligonucleotide primer for the detection of SNP TSC0011583
aaaaaactactt

SEQ ID NO: 283943 - DNA, 12 bp, Artificial Sequence
  Oligonucleotide primer for the detection of SNP TSC0011583
ttataatggtag

SEQ ID NO: 283944 - DNA, 12 bp, Artificial Sequence
  Oligonucleotide primer for the detection of SNP TSC0011584
ttactaaaccta

SEQ ID NO: 283945 - DNA, 12 bp, Artificial Sequence
  Oligonucleotide primer for the detection of SNP TSC0011584
ttagggatattt

SEQ ID NO: 283946 - DNA, 12 bp, Artificial Sequence
  Oligonucleotide primer for the detection of SNP TSC0011584
caaaaacaccca

SEQ ID NO: 283947 - DNA, 12 bp, Artificial Sequence
  Oligonucleotide primer for the detection of SNP TSC0011585
tcaaactttcac

SEQ ID NO: 283948 - DNA, 12 bp, Artificial Sequence
  Oligonucleotide primer for the detection of SNP TSC0011585
ttaggtatgaag

SEQ ID NO: 283949 - DNA, 12 bp, Artificial Sequence
  Oligonucleotide primer for the detection of SNP TSC0011585
ccaaacataaaa

SEQ ID NO: 283950 - DNA, 12 bp, Artificial Sequence
  Oligonucleotide primer for the detection of SNP TSC0011585
ttagatttttac

SEQ ID NO: 283951 - DNA, 12 bp, Artificial Sequence
  Oligonucleotide primer for the detection of SNP TSC0011591
atatatttccta

SEQ ID NO: 283952 - DNA, 12 bp, Artificial Sequence
  Oligonucleotide primer for the detection of SNP TSC0011591
tattttttatgg

SEQ ID NO: 283953 - DNA, 12 bp, Artificial Sequence
  Oligonucleotide primer for the detection of SNP TSC0011591
caccttttataa

SEQ ID NO: 283954 - DNA, 12 bp, Artificial Sequence
  Oligonucleotide primer for the detection of SNP TSC0011592
gagattagtttg

SEQ ID NO: 283955 - DNA, 12 bp, Artificial Sequence
  Oligonucleotide primer for the detection of SNP TSC0011593
tatatatgtgta

SEQ ID NO: 283956 - DNA, 12 bp, Artificial Sequence
  Oligonucleotide primer for the detection of SNP TSC0011597
caattctcccac

SEQ ID NO: 283957 - DNA, 12 bp, Artificial Sequence
  Oligonucleotide primer for the detection of SNP TSC0011597
attttggaggtt

SEQ ID NO: 283958 - DNA, 12 bp, Artificial Sequence
  Oligonucleotide primer for the detection of SNP TSC0011597
cctaaaaactaa

SEQ ID NO: 283959 - DNA, 12 bp, Artificial Sequence
  Oligonucleotide primer for the detection of SNP TSC0011597
taatttttttat

SEQ ID NO: 283960 - DNA, 12 bp, Artificial Sequence
  Oligonucleotide primer for the detection of SNP TSC0011599
aatttactcctc

SEQ ID NO: 283961 - DNA, 12 bp, Artificial Sequence
  Oligonucleotide primer for the detection of SNP TSC0011599
taggagatattt

SEQ ID NO: 283962 - DNA, 12 bp, Artificial Sequence
  Oligonucleotide primer for the detection of SNP TSC0011599
aaaaaacaccca

SEQ ID NO: 283963 - DNA, 12 bp, Artificial Sequence
  Oligonucleotide primer for the detection of SNP TSC0011599
atttgttttttt

SEQ ID NO: 283964 - DNA, 12 bp, Artificial Sequence
  Oligonucleotide primer for the detection of SNP TSC0011602
tcttccttaatt

SEQ ID NO: 283965 - DNA, 12 bp, Artificial Sequence
  Oligonucleotide primer for the detection of SNP TSC0011602
gaaaagatatga

SEQ ID NO: 283966 - DNA, 12 bp, Artificial Sequence
  Oligonucleotide primer for the detection of SNP TSC0011602
aaaaaatataaa

SEQ ID NO: 283967 - DNA, 12 bp, Artificial Sequence
  Oligonucleotide primer for the detection of SNP TSC0011602
tttttttgattc

SEQ ID NO: 283968 - DNA, 12 bp, Artificial Sequence
  Oligonucleotide primer for the detection of SNP TSC0011603
ttttccacctca

SEQ ID NO: 283969 - DNA, 12 bp, Artificial Sequence
  Oligonucleotide primer for the detection of SNP TSC0011603
ttttttttgagt

SEQ ID NO: 283970 - DNA, 12 bp, Artificial Sequence
  Oligonucleotide primer for the detection of SNP TSC0011603
tctttcctaaat

SEQ ID NO: 283971 - DNA, 12 bp, Artificial Sequence
  Oligonucleotide primer for the detection of SNP TSC0011605
aacccaacccaa

SEQ ID NO: 283972 - DNA, 12 bp, Artificial Sequence
  Oligonucleotide primer for the detection of SNP TSC0011605
gtgtaggggtgt

SEQ ID NO: 283973 - DNA, 12 bp, Artificial Sequence
  Oligonucleotide primer for the detection of SNP TSC0011605
atacaaaaatat

SEQ ID NO: 283974 - DNA, 12 bp, Artificial Sequence
  Oligonucleotide primer for the detection of SNP TSC0011605
agtttagtttag

SEQ ID NO: 283975 - DNA, 12 bp, Artificial Sequence
  Oligonucleotide primer for the detection of SNP TSC0011606
ttctcttcaaat

SEQ ID NO: 283976 - DNA, 12 bp, Artificial Sequence
  Oligonucleotide primer for the detection of SNP TSC0011606
gtgaaagattta

SEQ ID NO: 283977 - DNA, 12 bp, Artificial Sequence
  Oligonucleotide primer for the detection of SNP TSC0011606
gcgaaagattta

SEQ ID NO: 283978 - DNA, 12 bp, Artificial Sequence
  Oligonucleotide primer for the detection of SNP TSC0011606
acgaaaaattta

SEQ ID NO: 283979 - DNA, 12 bp, Artificial Sequence
  Oligonucleotide primer for the detection of SNP TSC0011606
ttttttttagat

SEQ ID NO: 283980 - DNA, 12 bp, Artificial Sequence
  Oligonucleotide primer for the detection of SNP TSC0011607
caaacaacttct

SEQ ID NO: 283981 - DNA, 12 bp, Artificial Sequence
  Oligonucleotide primer for the detection of SNP TSC0011607
aagaagaggttg

SEQ ID NO: 283982 - DNA, 12 bp, Artificial Sequence
  Oligonucleotide primer for the detection of SNP TSC0011607
taaataattttt

SEQ ID NO: 283983 - DNA, 12 bp, Artificial Sequence
  Oligonucleotide primer for the detection of SNP TSC0011609
cacacactaaca

SEQ ID NO: 283984 - DNA, 12 bp, Artificial Sequence
  Oligonucleotide primer for the detection of SNP TSC0011609
cacacgctaaca

SEQ ID NO: 283985 - DNA, 12 bp, Artificial Sequence
  Oligonucleotide primer for the detection of SNP TSC0011609
ggttttgttttt

SEQ ID NO: 283986 - DNA, 12 bp, Artificial Sequence
  Oligonukleotid-Primer
aaccctatcttt

SEQ ID NO: 283987 - DNA, 12 bp, Artificial Sequence
  Oligonucleotide primer for the detection of SNP TSC0011609
tatatgttggta

SEQ ID NO: 283988 - DNA, 12 bp, Artificial Sequence
  Oligonucleotide primer for the detection of SNP TSC0011609
tatacgttggta

SEQ ID NO: 283989 - DNA, 12 bp, Artificial Sequence
  Oligonucleotide primer for the detection of SNP TSC0011610
actaacctacat

SEQ ID NO: 283990 - DNA, 12 bp, Artificial Sequence
  Oligonucleotide primer for the detection of SNP TSC0011610
aatgttttgttg

SEQ ID NO: 283991 - DNA, 12 bp, Artificial Sequence
  Oligonucleotide primer for the detection of SNP TSC0011610
aacgttttgttg

SEQ ID NO: 283992 - DNA, 12 bp, Artificial Sequence
  Oligonucleotide primer for the detection of SNP TSC0011612
gataaatttaaa

SEQ ID NO: 283993 - DNA, 12 bp, Artificial Sequence
  Oligonucleotide primer for the detection of SNP TSC0011612
aataaatttaaa

SEQ ID NO: 283994 - DNA, 12 bp, Artificial Sequence
  Oligonucleotide primer for the detection of SNP TSC0011613
tataatacaaaa

SEQ ID NO: 283995 - DNA, 12 bp, Artificial Sequence
  Oligonucleotide primer for the detection of SNP TSC0011613
gttttattagat

SEQ ID NO: 283996 - DNA, 12 bp, Artificial Sequence
  Oligonucleotide primer for the detection of SNP TSC0011613
aatcctaccaaa

SEQ ID NO: 283997 - DNA, 12 bp, Artificial Sequence
  Oligonucleotide primer for the detection of SNP TSC0011613
gtaatgtagagt

SEQ ID NO: 283998 - DNA, 12 bp, Artificial Sequence
  Oligonucleotide primer for the detection of SNP TSC0011614
gtggtagatgta

SEQ ID NO: 283999 - DNA, 12 bp, Artificial Sequence
  Oligonucleotide primer for the detection of SNP TSC0011614
gtggtagacgta

SEQ ID NO: 284000 - DNA, 12 bp, Artificial Sequence
  Oligonucleotide primer for the detection of SNP TSC0011614
ataataaacata

SEQ ID NO: 284001 - DNA, 12 bp, Artificial Sequence
  Oligonucleotide primer for the detection of SNP TSC0011614
ataataaacgta

SEQ ID NO: 284002 - DNA, 12 bp, Artificial Sequence
  Oligonucleotide primer for the detection of SNP TSC0011614
aaggtagatgat

SEQ ID NO: 284003 - DNA, 12 bp, Artificial Sequence
  Oligonucleotide primer for the detection of SNP TSC0011615
ccaaactaaacc

SEQ ID NO: 284004 - DNA, 12 bp, Artificial Sequence
  Oligonucleotide primer for the detection of SNP TSC0011615
ttagattattta

SEQ ID NO: 284005 - DNA, 12 bp, Artificial Sequence
  Oligonucleotide primer for the detection of SNP TSC0011616
actctttttttt

SEQ ID NO: 284006 - DNA, 12 bp, Artificial Sequence
  Oligonucleotide primer for the detection of SNP TSC0011616
attttttgttgg

SEQ ID NO: 284007 - DNA, 12 bp, Artificial Sequence
  Oligonucleotide primer for the detection of SNP TSC0011618
aaaaaacctaat

SEQ ID NO: 284008 - DNA, 12 bp, Artificial Sequence
  Oligonucleotide primer for the detection of SNP TSC0011618
taaattatattt

SEQ ID NO: 284009 - DNA, 12 bp, Artificial Sequence
  Oligonucleotide primer for the detection of SNP TSC0011618
aagggatttgat

SEQ ID NO: 284010 - DNA, 12 bp, Artificial Sequence
  Oligonucleotide primer for the detection of SNP TSC0011621
tttattctcaaa

SEQ ID NO: 284011 - DNA, 12 bp, Artificial Sequence
  Oligonucleotide primer for the detection of SNP TSC0011621
ttgggagatttt

SEQ ID NO: 284012 - DNA, 12 bp, Artificial Sequence
  Oligonucleotide primer for the detection of SNP TSC0011621
atttttaaaaaa

SEQ ID NO: 284013 - DNA, 12 bp, Artificial Sequence
  Oligonucleotide primer for the detection of SNP TSC0011627
aaaaaccaacct

SEQ ID NO: 284014 - DNA, 12 bp, Artificial Sequence
  Oligonucleotide primer for the detection of SNP TSC0011627
ttgttatgttag

SEQ ID NO: 284015 - DNA, 12 bp, Artificial Sequence
  Oligonucleotide primer for the detection of SNP TSC0011627
ttaccatattaa

SEQ ID NO: 284016 - DNA, 12 bp, Artificial Sequence
  Oligonucleotide primer for the detection of SNP TSC0011627
ggagattagttt

SEQ ID NO: 284017 - DNA, 12 bp, Artificial Sequence
  Oligonucleotide primer for the detection of SNP TSC0011628
atccacctacct

SEQ ID NO: 284018 - DNA, 12 bp, Artificial Sequence
  Oligonucleotide primer for the detection of SNP TSC0011628
atccgcctacct

SEQ ID NO: 284019 - DNA, 12 bp, Artificial Sequence
  Oligonucleotide primer for the detection of SNP TSC0011628
ttttttgggagg

SEQ ID NO: 284020 - DNA, 12 bp, Artificial Sequence
  Oligonucleotide primer for the detection of SNP TSC0011629
acatctcatata

SEQ ID NO: 284021 - DNA, 12 bp, Artificial Sequence
  Oligonucleotide primer for the detection of SNP TSC0011629
gtttgtatttat

SEQ ID NO: 284022 - DNA, 12 bp, Artificial Sequence
  Oligonucleotide primer for the detection of SNP TSC0011629
tattttatgtat

SEQ ID NO: 284023 - DNA, 12 bp, Artificial Sequence
  Oligonucleotide primer for the detection of SNP TSC0011629
tattttatgtac

SEQ ID NO: 284024 - DNA, 12 bp, Artificial Sequence
  Oligonucleotide primer for the detection of SNP TSC0011630
ctcacaaaacac

SEQ ID NO: 284025 - DNA, 12 bp, Artificial Sequence
  Oligonucleotide primer for the detection of SNP TSC0011630
ctcgcaaaacac

SEQ ID NO: 284026 - DNA, 12 bp, Artificial Sequence
  Oligonucleotide primer for the detection of SNP TSC0011630
gtgattgggaag

SEQ ID NO: 284027 - DNA, 12 bp, Artificial Sequence
  Oligonucleotide primer for the detection of SNP TSC0011630
gcgattgggaag

SEQ ID NO: 284028 - DNA, 12 bp, Artificial Sequence
  Oligonucleotide primer for the detection of SNP TSC0011630
gtgatcgggaag

SEQ ID NO: 284029 - DNA, 12 bp, Artificial Sequence
  Oligonucleotide primer for the detection of SNP TSC0011630
gcgatcgggaag

SEQ ID NO: 284030 - DNA, 12 bp, Artificial Sequence
  Oligonucleotide primer for the detection of SNP TSC0011630
acaaccgaaaaa

SEQ ID NO: 284031 - DNA, 12 bp, Artificial Sequence
  Oligonucleotide primer for the detection of SNP TSC0011630
acgaccaaaaaa

SEQ ID NO: 284032 - DNA, 12 bp, Artificial Sequence
  Oligonucleotide primer for the detection of SNP TSC0011630
acgaccgaaaaa

SEQ ID NO: 284033 - DNA, 12 bp, Artificial Sequence
  Oligonucleotide primer for the detection of SNP TSC0011630
tttgtagaatat

SEQ ID NO: 284034 - DNA, 12 bp, Artificial Sequence
  Oligonucleotide primer for the detection of SNP TSC0011630
ttcgtagaatat

SEQ ID NO: 284035 - DNA, 12 bp, Artificial Sequence
  Oligonucleotide primer for the detection of SNP TSC0011632
cttcaaataaat

SEQ ID NO: 284036 - DNA, 12 bp, Artificial Sequence
  Oligonucleotide primer for the detection of SNP TSC0011632
gtttgggattta

SEQ ID NO: 284037 - DNA, 12 bp, Artificial Sequence
  Oligonucleotide primer for the detection of SNP TSC0011633
cttcaaataaaa

SEQ ID NO: 284038 - DNA, 12 bp, Artificial Sequence
  Oligonucleotide primer for the detection of SNP TSC0011633
cttcgaataaaa

SEQ ID NO: 284039 - DNA, 12 bp, Artificial Sequence
  Oligonucleotide primer for the detection of SNP TSC0011633
tttttgtttgtt

SEQ ID NO: 284040 - DNA, 12 bp, Artificial Sequence
  Oligonucleotide primer for the detection of SNP TSC0011633
tttttgtttgtc

SEQ ID NO: 284041 - DNA, 12 bp, Artificial Sequence
  Oligonucleotide primer for the detection of SNP TSC0011633
ctcttacttacc

SEQ ID NO: 284042 - DNA, 12 bp, Artificial Sequence
  Oligonucleotide primer for the detection of SNP TSC0011633
ttttgggtggag

SEQ ID NO: 284043 - DNA, 12 bp, Artificial Sequence
  Oligonucleotide primer for the detection of SNP TSC0011633
tttcgggtggag

SEQ ID NO: 284044 - DNA, 12 bp, Artificial Sequence
  Oligonucleotide primer for the detection of SNP TSC0011634
acatttccacac

SEQ ID NO: 284045 - DNA, 12 bp, Artificial Sequence
  Oligonucleotide primer for the detection of SNP TSC0011634
gatttttaatta

SEQ ID NO: 284046 - DNA, 12 bp, Artificial Sequence
  Oligonucleotide primer for the detection of SNP TSC0011634
aactcctaatca

SEQ ID NO: 284047 - DNA, 12 bp, Artificial Sequence
  Oligonucleotide primer for the detection of SNP TSC0011636
caaaccctatcc

SEQ ID NO: 284048 - DNA, 12 bp, Artificial Sequence
  Oligonucleotide primer for the detection of SNP TSC0011636
gttttggaggtt

SEQ ID NO: 284049 - DNA, 12 bp, Artificial Sequence
  Oligonucleotide primer for the detection of SNP TSC0011636
gttttggaggtc

SEQ ID NO: 284050 - DNA, 12 bp, Artificial Sequence
  Oligonucleotide primer for the detection of SNP TSC0011636
attttaaaaacc

SEQ ID NO: 284051 - DNA, 12 bp, Artificial Sequence
  Oligonucleotide primer for the detection of SNP TSC0011638
tataacatatta

SEQ ID NO: 284052 - DNA, 12 bp, Artificial Sequence
  Oligonucleotide primer for the detection of SNP TSC0011638
ggattatatttt

SEQ ID NO: 284053 - DNA, 12 bp, Artificial Sequence
  Oligonucleotide primer for the detection of SNP TSC0011638
aaaaattacatc

SEQ ID NO: 284054 - DNA, 12 bp, Artificial Sequence
  Oligonucleotide primer for the detection of SNP TSC0011638
ttgtaatatatt

SEQ ID NO: 284055 - DNA, 12 bp, Artificial Sequence
  Oligonukleotid-Primer
acaaaccctccc

SEQ ID NO: 284056 - DNA, 12 bp, Artificial Sequence
  Oligonucleotide primer for the detection of SNP TSC0011639
tattttataagg

SEQ ID NO: 284057 - DNA, 12 bp, Artificial Sequence
  Oligonucleotide primer for the detection of SNP TSC0011639
tattttataaaa

SEQ ID NO: 284058 - DNA, 12 bp, Artificial Sequence
  Oligonucleotide primer for the detection of SNP TSC0011640
attaataaatac

SEQ ID NO: 284059 - DNA, 12 bp, Artificial Sequence
  Oligonucleotide primer for the detection of SNP TSC0011640
agatgattttga

SEQ ID NO: 284060 - DNA, 12 bp, Artificial Sequence
  Oligonucleotide primer for the detection of SNP TSC0011641
ccaaaaatacaa

SEQ ID NO: 284061 - DNA, 12 bp, Artificial Sequence
  Oligonucleotide primer for the detection of SNP TSC0011641
tattaggttagt

SEQ ID NO: 284062 - DNA, 12 bp, Artificial Sequence
  Oligonucleotide primer for the detection of SNP TSC0011641
ttagggatgtaa

SEQ ID NO: 284063 - DNA, 12 bp, Artificial Sequence
  Oligonucleotide primer for the detection of SNP TSC0011642
attatctctata

SEQ ID NO: 284064 - DNA, 12 bp, Artificial Sequence
  Oligonucleotide primer for the detection of SNP TSC0011642
tgagtagattaa

SEQ ID NO: 284065 - DNA, 12 bp, Artificial Sequence
  Oligonucleotide primer for the detection of SNP TSC0011642
aaacaaaccaaa

SEQ ID NO: 284066 - DNA, 12 bp, Artificial Sequence
  Oligonucleotide primer for the detection of SNP TSC0011642
tattgtttttgt

SEQ ID NO: 284067 - DNA, 12 bp, Artificial Sequence
  Oligonucleotide primer for the detection of SNP TSC0011643
ataccacaacaa

SEQ ID NO: 284068 - DNA, 12 bp, Artificial Sequence
  Oligonucleotide primer for the detection of SNP TSC0011643
ataccacaacga

SEQ ID NO: 284069 - DNA, 12 bp, Artificial Sequence
  Oligonucleotide primer for the detection of SNP TSC0011643
ttagttgttttt

SEQ ID NO: 284070 - DNA, 12 bp, Artificial Sequence
  Oligonucleotide primer for the detection of SNP TSC0011643
aaatcaactacc

SEQ ID NO: 284071 - DNA, 12 bp, Artificial Sequence
  Oligonucleotide primer for the detection of SNP TSC0011643
gtattataatgg

SEQ ID NO: 284072 - DNA, 12 bp, Artificial Sequence
  Oligonucleotide primer for the detection of SNP TSC0011643
gtattataacgg

SEQ ID NO: 284073 - DNA, 12 bp, Artificial Sequence
  Oligonucleotide primer for the detection of SNP TSC0011644
tcaacctaaaaa

SEQ ID NO: 284074 - DNA, 12 bp, Artificial Sequence
  Oligonucleotide primer for the detection of SNP TSC0011644
cccttcccttaa

SEQ ID NO: 284075 - DNA, 12 bp, Artificial Sequence
  Oligonucleotide primer for the detection of SNP TSC0011644
ttaatttaaaag

SEQ ID NO: 284076 - DNA, 12 bp, Artificial Sequence
  Oligonucleotide primer for the detection of SNP TSC0011646
ttcatccatata

SEQ ID NO: 284077 - DNA, 12 bp, Artificial Sequence
  Oligonucleotide primer for the detection of SNP TSC0011646
tttacattactt

SEQ ID NO: 284078 - DNA, 12 bp, Artificial Sequence
  Oligonucleotide primer for the detection of SNP TSC0011646
tttatttatgtg

SEQ ID NO: 284079 - DNA, 12 bp, Artificial Sequence
  Oligonucleotide primer for the detection of SNP TSC0011648
taaaaacactaa

SEQ ID NO: 284080 - DNA, 12 bp, Artificial Sequence
  Oligonucleotide primer for the detection of SNP TSC0011648
aattgtaagtat

SEQ ID NO: 284081 - DNA, 12 bp, Artificial Sequence
  Oligonucleotide primer for the detection of SNP TSC0011648
aaattataaaca

SEQ ID NO: 284082 - DNA, 12 bp, Artificial Sequence
  Oligonucleotide primer for the detection of SNP TSC0011648
aaaggtattagt

SEQ ID NO: 284083 - DNA, 12 bp, Artificial Sequence
  Oligonucleotide primer for the detection of SNP TSC0011649
ccctaaaatata

SEQ ID NO: 284084 - DNA, 12 bp, Artificial Sequence
  Oligonucleotide primer for the detection of SNP TSC0011649
ttgggttgtttt

SEQ ID NO: 284085 - DNA, 12 bp, Artificial Sequence
  Oligonucleotide primer for the detection of SNP TSC0011649
ctaaattatttc

SEQ ID NO: 284086 - DNA, 12 bp, Artificial Sequence
  Oligonucleotide primer for the detection of SNP TSC0011649
ttttagaatata

SEQ ID NO: 284087 - DNA, 12 bp, Artificial Sequence
  Oligonucleotide primer for the detection of SNP TSC0011650
ttttctactctt

SEQ ID NO: 284088 - DNA, 12 bp, Artificial Sequence
  Oligonucleotide primer for the detection of SNP TSC0011650
tagtagagattg

SEQ ID NO: 284089 - DNA, 12 bp, Artificial Sequence
  Oligonucleotide primer for the detection of SNP TSC0011651
acacaacaaaat

SEQ ID NO: 284090 - DNA, 12 bp, Artificial Sequence
  Oligonucleotide primer for the detection of SNP TSC0011651
acacaacgaaat

SEQ ID NO: 284091 - DNA, 12 bp, Artificial Sequence
  Oligonucleotide primer for the detection of SNP TSC0011651
tgtttgagagag

SEQ ID NO: 284092 - DNA, 12 bp, Artificial Sequence
  Oligonucleotide primer for the detection of SNP TSC0011652
acaccaatacat

SEQ ID NO: 284093 - DNA, 12 bp, Artificial Sequence
  Oligonucleotide primer for the detection of SNP TSC0011652
acaccaatacgt

SEQ ID NO: 284094 - DNA, 12 bp, Artificial Sequence
  Oligonucleotide primer for the detection of SNP TSC0011652
tatttaattgta

SEQ ID NO: 284095 - DNA, 12 bp, Artificial Sequence
  Oligonucleotide primer for the detection of SNP TSC0011654
aaatctcttatc

SEQ ID NO: 284096 - DNA, 12 bp, Artificial Sequence
  Oligonucleotide primer for the detection of SNP TSC0011655
acaaaaatcaaa

SEQ ID NO: 284097 - DNA, 12 bp, Artificial Sequence
  Oligonucleotide primer for the detection of SNP TSC0011655
gttaaaattgat

SEQ ID NO: 284098 - DNA, 12 bp, Artificial Sequence
  Oligonucleotide primer for the detection of SNP TSC0011655
ataggggttaag

SEQ ID NO: 284099 - DNA, 12 bp, Artificial Sequence
  Oligonucleotide primer for the detection of SNP TSC0011656
aaatatccaaat

SEQ ID NO: 284100 - DNA, 12 bp, Artificial Sequence
  Oligonucleotide primer for the detection of SNP TSC0011656
atgttttattag

SEQ ID NO: 284101 - DNA, 12 bp, Artificial Sequence
  Oligonucleotide primer for the detection of SNP TSC0011660
acacaacatcct

SEQ ID NO: 284102 - DNA, 12 bp, Artificial Sequence
  Oligonucleotide primer for the detection of SNP TSC0011660
ttatagtagatg

SEQ ID NO: 284103 - DNA, 12 bp, Artificial Sequence
  Oligonucleotide primer for the detection of SNP TSC0011661
ttctcccacaac

SEQ ID NO: 284104 - DNA, 12 bp, Artificial Sequence
  Oligonucleotide primer for the detection of SNP TSC0011661
tttgtataatat

SEQ ID NO: 284105 - DNA, 12 bp, Artificial Sequence
  Oligonucleotide primer for the detection of SNP TSC0011661
cctacacaacat

SEQ ID NO: 284106 - DNA, 12 bp, Artificial Sequence
  Oligonucleotide primer for the detection of SNP TSC0011662
atttttaacact

SEQ ID NO: 284107 - DNA, 12 bp, Artificial Sequence
  Oligonucleotide primer for the detection of SNP TSC0011662
tttaattatata

SEQ ID NO: 284108 - DNA, 12 bp, Artificial Sequence
  Oligonucleotide primer for the detection of SNP TSC0011663
actaaaacccta

SEQ ID NO: 284109 - DNA, 12 bp, Artificial Sequence
  Oligonucleotide primer for the detection of SNP TSC0011663
aatttttatttt

SEQ ID NO: 284110 - DNA, 12 bp, Artificial Sequence
  Oligonucleotide primer for the detection of SNP TSC0011663
aatttttatttc

SEQ ID NO: 284111 - DNA, 12 bp, Artificial Sequence
  Oligonucleotide primer for the detection of SNP TSC0011663
gttagaattttg

SEQ ID NO: 284112 - DNA, 12 bp, Artificial Sequence
  Oligonucleotide primer for the detection of SNP TSC0011664
ttacaactaaac

SEQ ID NO: 284113 - DNA, 12 bp, Artificial Sequence
  Oligonucleotide primer for the detection of SNP TSC0011664
gaatatatttta

SEQ ID NO: 284114 - DNA, 12 bp, Artificial Sequence
  Oligonucleotide primer for the detection of SNP TSC0011666
aaattataaata

SEQ ID NO: 284115 - DNA, 12 bp, Artificial Sequence
  Oligonucleotide primer for the detection of SNP TSC0011666
tattttaaagat

SEQ ID NO: 284116 - DNA, 12 bp, Artificial Sequence
  Oligonucleotide primer for the detection of SNP TSC0011666
tattctaaaaat

SEQ ID NO: 284117 - DNA, 12 bp, Artificial Sequence
  Oligonucleotide primer for the detection of SNP TSC0011666
aagttgtaaata

SEQ ID NO: 284118 - DNA, 12 bp, Artificial Sequence
  Oligonucleotide primer for the detection of SNP TSC0011667
attccctataat

SEQ ID NO: 284119 - DNA, 12 bp, Artificial Sequence
  Oligonucleotide primer for the detection of SNP TSC0011667
gaagagtagtgg

SEQ ID NO: 284120 - DNA, 12 bp, Artificial Sequence
  Oligonucleotide primer for the detection of SNP TSC0011668
tacaaaacaatc

SEQ ID NO: 284121 - DNA, 12 bp, Artificial Sequence
  Oligonucleotide primer for the detection of SNP TSC0011668
attattgtggtg

SEQ ID NO: 284122 - DNA, 12 bp, Artificial Sequence
  Oligonucleotide primer for the detection of SNP TSC0011668
attatcgtggtg

SEQ ID NO: 284123 - DNA, 12 bp, Artificial Sequence
  Oligonucleotide primer for the detection of SNP TSC0011671
cacatccaaaac

SEQ ID NO: 284124 - DNA, 12 bp, Artificial Sequence
  Oligonucleotide primer for the detection of SNP TSC0011671
cgcatccaaaac

SEQ ID NO: 284125 - DNA, 12 bp, Artificial Sequence
  Oligonucleotide primer for the detection of SNP TSC0011671
ttttaagtagga

SEQ ID NO: 284126 - DNA, 12 bp, Artificial Sequence
  Oligonucleotide primer for the detection of SNP TSC0011673
ccccctccctca

SEQ ID NO: 284127 - DNA, 12 bp, Artificial Sequence
  Oligonucleotide primer for the detection of SNP TSC0011673
gtagagattatt

SEQ ID NO: 284128 - DNA, 12 bp, Artificial Sequence
  Oligonucleotide primer for the detection of SNP TSC0011673
acaaaaaccact

SEQ ID NO: 284129 - DNA, 12 bp, Artificial Sequence
  Oligonucleotide primer for the detection of SNP TSC0011676
caaactactaaa

SEQ ID NO: 284130 - DNA, 12 bp, Artificial Sequence
  Oligonucleotide primer for the detection of SNP TSC0011676
ttgagggtttta

SEQ ID NO: 284131 - DNA, 12 bp, Artificial Sequence
  Oligonucleotide primer for the detection of SNP TSC0011676
taaaaacctcaa

SEQ ID NO: 284132 - DNA, 12 bp, Artificial Sequence
  Oligonucleotide primer for the detection of SNP TSC0011676
taaattgttaag

SEQ ID NO: 284133 - DNA, 12 bp, Artificial Sequence
  Oligonucleotide primer for the detection of SNP TSC0011680
tccataataact

SEQ ID NO: 284134 - DNA, 12 bp, Artificial Sequence
  Oligonucleotide primer for the detection of SNP TSC0011680
gattaaagtttt

SEQ ID NO: 284135 - DNA, 12 bp, Artificial Sequence
  Oligonucleotide primer for the detection of SNP TSC0011680
aattaaaatctc

SEQ ID NO: 284136 - DNA, 12 bp, Artificial Sequence
  Oligonucleotide primer for the detection of SNP TSC0011680
tttatgatagtt

SEQ ID NO: 284137 - DNA, 12 bp, Artificial Sequence
  Oligonucleotide primer for the detection of SNP TSC0011681
tttatttcactt

SEQ ID NO: 284138 - DNA, 12 bp, Artificial Sequence
  Oligonucleotide primer for the detection of SNP TSC0011685
attatttaaacc

SEQ ID NO: 284139 - DNA, 12 bp, Artificial Sequence
  Oligonucleotide primer for the detection of SNP TSC0011685
tgtaatttttat

SEQ ID NO: 284140 - DNA, 12 bp, Artificial Sequence
  Oligonucleotide primer for the detection of SNP TSC0011686
aacctaatcacc

SEQ ID NO: 284141 - DNA, 12 bp, Artificial Sequence
  Oligonucleotide primer for the detection of SNP TSC0011686
gtaattttggag

SEQ ID NO: 284142 - DNA, 12 bp, Artificial Sequence
  Oligonucleotide primer for the detection of SNP TSC0011687
aaaattaaccaa

SEQ ID NO: 284143 - DNA, 12 bp, Artificial Sequence
  Oligonucleotide primer for the detection of SNP TSC0011687
tgtataattatt

SEQ ID NO: 284144 - DNA, 12 bp, Artificial Sequence
  Oligonucleotide primer for the detection of SNP TSC0011687
tacacaaccact

SEQ ID NO: 284145 - DNA, 12 bp, Artificial Sequence
  Oligonucleotide primer for the detection of SNP TSC0011687
taaaattagtta

SEQ ID NO: 284146 - DNA, 12 bp, Artificial Sequence
  Oligonucleotide primer for the detection of SNP TSC0011688
tattattggtta

SEQ ID NO: 284147 - DNA, 12 bp, Artificial Sequence
  Oligonucleotide primer for the detection of SNP TSC0011688
cactactaacta

SEQ ID NO: 284148 - DNA, 12 bp, Artificial Sequence
  Oligonucleotide primer for the detection of SNP TSC0011688
atgtaaaaaaat

SEQ ID NO: 284149 - DNA, 12 bp, Artificial Sequence
  Oligonucleotide primer for the detection of SNP TSC0011690
aaaaatataccc

SEQ ID NO: 284150 - DNA, 12 bp, Artificial Sequence
  Oligonucleotide primer for the detection of SNP TSC0011690
aatttttggata

SEQ ID NO: 284151 - DNA, 12 bp, Artificial Sequence
  Oligonucleotide primer for the detection of SNP TSC0011691
cacacaataaat

SEQ ID NO: 284152 - DNA, 12 bp, Artificial Sequence
  Oligonucleotide primer for the detection of SNP TSC0011691
aaatgttagtgg

SEQ ID NO: 284153 - DNA, 12 bp, Artificial Sequence
  Oligonucleotide primer for the detection of SNP TSC0011691
aaacgttagtgg

SEQ ID NO: 284154 - DNA, 12 bp, Artificial Sequence
  Oligonucleotide primer for the detection of SNP TSC0011692
aaactaaccata

SEQ ID NO: 284155 - DNA, 12 bp, Artificial Sequence
  Oligonucleotide primer for the detection of SNP TSC0011692
aaactaaccgta

SEQ ID NO: 284156 - DNA, 12 bp, Artificial Sequence
  Oligonukleotid-Primer
agttgtgtgatt

SEQ ID NO: 284157 - DNA, 12 bp, Artificial Sequence
  Oligonucleotide primer for the detection of SNP TSC0011692
aactatataacc

SEQ ID NO: 284158 - DNA, 12 bp, Artificial Sequence
  Oligonucleotide primer for the detection of SNP TSC0011692
aagttggttgtg

SEQ ID NO: 284159 - DNA, 12 bp, Artificial Sequence
  Oligonucleotide primer for the detection of SNP TSC0011692
aagttggtcgtg

SEQ ID NO: 284160 - DNA, 12 bp, Artificial Sequence
  Oligonucleotide primer for the detection of SNP TSC0011693
ttgtaatgatat

SEQ ID NO: 284161 - DNA, 12 bp, Artificial Sequence
  Oligonucleotide primer for the detection of SNP TSC0011693
tcgtaatgatat

SEQ ID NO: 284162 - DNA, 12 bp, Artificial Sequence
  Oligonucleotide primer for the detection of SNP TSC0011693
taataacacaaa

SEQ ID NO: 284163 - DNA, 12 bp, Artificial Sequence
  Oligonucleotide primer for the detection of SNP TSC0011693
gttagataatat

SEQ ID NO: 284164 - DNA, 12 bp, Artificial Sequence
  Oligonucleotide primer for the detection of SNP TSC0011694
cttcaataaatt

SEQ ID NO: 284165 - DNA, 12 bp, Artificial Sequence
  Oligonucleotide primer for the detection of SNP TSC0011694
taaatagaaaga

SEQ ID NO: 284166 - DNA, 12 bp, Artificial Sequence
  Oligonucleotide primer for the detection of SNP TSC0011695
atttaaacttat

SEQ ID NO: 284167 - DNA, 12 bp, Artificial Sequence
  Oligonucleotide primer for the detection of SNP TSC0011695
gaaaaatattaa

SEQ ID NO: 284168 - DNA, 12 bp, Artificial Sequence
  Oligonucleotide primer for the detection of SNP TSC0011696
ttcactctttct

SEQ ID NO: 284169 - DNA, 12 bp, Artificial Sequence
  Oligonucleotide primer for the detection of SNP TSC0011696
ggtggtggtagg

SEQ ID NO: 284170 - DNA, 12 bp, Artificial Sequence
  Oligonucleotide primer for the detection of SNP TSC0011697
actatcctaaaa

SEQ ID NO: 284171 - DNA, 12 bp, Artificial Sequence
  Oligonucleotide primer for the detection of SNP TSC0011697
aaccctctcctc

SEQ ID NO: 284172 - DNA, 12 bp, Artificial Sequence
  Oligonucleotide primer for the detection of SNP TSC0011697
gttgttttgggg

SEQ ID NO: 284173 - DNA, 12 bp, Artificial Sequence
  Oligonucleotide primer for the detection of SNP TSC0011699
gtgtatagattt

SEQ ID NO: 284174 - DNA, 12 bp, Artificial Sequence
  Oligonucleotide primer for the detection of SNP TSC0011699
atacataaattt

SEQ ID NO: 284175 - DNA, 12 bp, Artificial Sequence
  Oligonucleotide primer for the detection of SNP TSC0011699
taaaggtagaaa

SEQ ID NO: 284176 - DNA, 12 bp, Artificial Sequence
  Oligonucleotide primer for the detection of SNP TSC0011700
aacttataaatc

SEQ ID NO: 284177 - DNA, 12 bp, Artificial Sequence
  Oligonucleotide primer for the detection of SNP TSC0011700
aggtatgtttag

SEQ ID NO: 284178 - DNA, 12 bp, Artificial Sequence
  Oligonucleotide primer for the detection of SNP TSC0011701
taatttacaaaa

SEQ ID NO: 284179 - DNA, 12 bp, Artificial Sequence
  Oligonucleotide primer for the detection of SNP TSC0011701
ttgtgtgtatat

SEQ ID NO: 284180 - DNA, 12 bp, Artificial Sequence
  Oligonucleotide primer for the detection of SNP TSC0011701
ttgcgtgtatat

SEQ ID NO: 284181 - DNA, 12 bp, Artificial Sequence
  Oligonucleotide primer for the detection of SNP TSC0011701
ctacatacacac

SEQ ID NO: 284182 - DNA, 12 bp, Artificial Sequence
  Oligonucleotide primer for the detection of SNP TSC0011701
ctacgtacacac

SEQ ID NO: 284183 - DNA, 12 bp, Artificial Sequence
  Oligonucleotide primer for the detection of SNP TSC0011701
taatttgtagag

SEQ ID NO: 284184 - DNA, 12 bp, Artificial Sequence
  Oligonucleotide primer for the detection of SNP TSC0011702
aatcaccaatct

SEQ ID NO: 284185 - DNA, 12 bp, Artificial Sequence
  Oligonucleotide primer for the detection of SNP TSC0011703
ttctctactata

SEQ ID NO: 284186 - DNA, 12 bp, Artificial Sequence
  Oligonucleotide primer for the detection of SNP TSC0011703
tttttaagggat

SEQ ID NO: 284187 - DNA, 12 bp, Artificial Sequence
  Oligonucleotide primer for the detection of SNP TSC0011703
tttttaagggac

SEQ ID NO: 284188 - DNA, 12 bp, Artificial Sequence
  Oligonucleotide primer for the detection of SNP TSC0011703
tttgttatgttt

SEQ ID NO: 284189 - DNA, 12 bp, Artificial Sequence
  Oligonucleotide primer for the detection of SNP TSC0011704
caattattaaat

SEQ ID NO: 284190 - DNA, 12 bp, Artificial Sequence
  Oligonucleotide primer for the detection of SNP TSC0011704
tattatatttaa

SEQ ID NO: 284191 - DNA, 12 bp, Artificial Sequence
  Oligonucleotide primer for the detection of SNP TSC0011711
tacttataaaaa

SEQ ID NO: 284192 - DNA, 12 bp, Artificial Sequence
  Oligonucleotide primer for the detection of SNP TSC0011711
ggtgttgttatt

SEQ ID NO: 284193 - DNA, 12 bp, Artificial Sequence
  Oligonucleotide primer for the detection of SNP TSC0011711
atattaccatta

SEQ ID NO: 284194 - DNA, 12 bp, Artificial Sequence
  Oligonucleotide primer for the detection of SNP TSC0011711
tgtttgtgaagg

SEQ ID NO: 284195 - DNA, 12 bp, Artificial Sequence
  Oligonucleotide primer for the detection of SNP TSC0011712
ccccatacctcc

SEQ ID NO: 284196 - DNA, 12 bp, Artificial Sequence
  Oligonucleotide primer for the detection of SNP TSC0011712
ttattagggata

SEQ ID NO: 284197 - DNA, 12 bp, Artificial Sequence
  Oligonucleotide primer for the detection of SNP TSC0011713
ttcactcaaaac

SEQ ID NO: 284198 - DNA, 12 bp, Artificial Sequence
  Oligonucleotide primer for the detection of SNP TSC0011713
gattaatgggaa

SEQ ID NO: 284199 - DNA, 12 bp, Artificial Sequence
  Oligonucleotide primer for the detection of SNP TSC0011713
gattaacgggaa

SEQ ID NO: 284200 - DNA, 12 bp, Artificial Sequence
  Oligonucleotide primer for the detection of SNP TSC0011713
aaccaacaaaaa

SEQ ID NO: 284201 - DNA, 12 bp, Artificial Sequence
  Oligonucleotide primer for the detection of SNP TSC0011713
aaccaacgaaaa

SEQ ID NO: 284202 - DNA, 12 bp, Artificial Sequence
  Oligonucleotide primer for the detection of SNP TSC0011713
tttatttaaagt

SEQ ID NO: 284203 - DNA, 12 bp, Artificial Sequence
  Oligonucleotide primer for the detection of SNP TSC0011714
aaaactcccatt

SEQ ID NO: 284204 - DNA, 12 bp, Artificial Sequence
  Oligonucleotide primer for the detection of SNP TSC0011714
aaaagaagagtg

SEQ ID NO: 284205 - DNA, 12 bp, Artificial Sequence
  Oligonucleotide primer for the detection of SNP TSC0011715
attattatgtgg

SEQ ID NO: 284206 - DNA, 12 bp, Artificial Sequence
  Oligonucleotide primer for the detection of SNP TSC0011715
attattacgtgg

SEQ ID NO: 284207 - DNA, 12 bp, Artificial Sequence
  Oligonucleotide primer for the detection of SNP TSC0011715
atcattacataa

SEQ ID NO: 284208 - DNA, 12 bp, Artificial Sequence
  Oligonucleotide primer for the detection of SNP TSC0011715
atcattacgtaa

SEQ ID NO: 284209 - DNA, 12 bp, Artificial Sequence
  Oligonucleotide primer for the detection of SNP TSC0011715
tgagaaggaggt

SEQ ID NO: 284210 - DNA, 12 bp, Artificial Sequence
  Oligonucleotide primer for the detection of SNP TSC0011716
caaaacccaacc

SEQ ID NO: 284211 - DNA, 12 bp, Artificial Sequence
  Oligonucleotide primer for the detection of SNP TSC0011716
taaggtgagtag

SEQ ID NO: 284212 - DNA, 12 bp, Artificial Sequence
  Oligonucleotide primer for the detection of SNP TSC0011717
aaactatcatca

SEQ ID NO: 284213 - DNA, 12 bp, Artificial Sequence
  Oligonucleotide primer for the detection of SNP TSC0011717
atttgttaggtt

SEQ ID NO: 284214 - DNA, 12 bp, Artificial Sequence
  Oligonucleotide primer for the detection of SNP TSC0011717
atctaccaaacc

SEQ ID NO: 284215 - DNA, 12 bp, Artificial Sequence
  Oligonucleotide primer for the detection of SNP TSC0011717
aggttgttatta

SEQ ID NO: 284216 - DNA, 12 bp, Artificial Sequence
  Oligonucleotide primer for the detection of SNP TSC0011718
ataataaataaa

SEQ ID NO: 284217 - DNA, 12 bp, Artificial Sequence
  Oligonucleotide primer for the detection of SNP TSC0011718
ggtattttattt

SEQ ID NO: 284218 - DNA, 12 bp, Artificial Sequence
  Oligonucleotide primer for the detection of SNP TSC0011718
taaacattttac

SEQ ID NO: 284219 - DNA, 12 bp, Artificial Sequence
  Oligonucleotide primer for the detection of SNP TSC0011718
agtataataaat

SEQ ID NO: 284220 - DNA, 12 bp, Artificial Sequence
  Oligonucleotide primer for the detection of SNP TSC0011721
aataccaaaata

SEQ ID NO: 284221 - DNA, 12 bp, Artificial Sequence
  Oligonucleotide primer for the detection of SNP TSC0011721
ttagtttgtaaa

SEQ ID NO: 284222 - DNA, 12 bp, Artificial Sequence
  Oligonucleotide primer for the detection of SNP TSC0011721
ctaacttacaaa

SEQ ID NO: 284223 - DNA, 12 bp, Artificial Sequence
  Oligonucleotide primer for the detection of SNP TSC0011721
gatattaagata

SEQ ID NO: 284224 - DNA, 12 bp, Artificial Sequence
  Oligonucleotide primer for the detection of SNP TSC0011732
ataccttttcta

SEQ ID NO: 284225 - DNA, 12 bp, Artificial Sequence
  Oligonucleotide primer for the detection of SNP TSC0011732
tttgtatgtaag

SEQ ID NO: 284226 - DNA, 12 bp, Artificial Sequence
  Oligonucleotide primer for the detection of SNP TSC0011732
cttacatacaaa

SEQ ID NO: 284227 - DNA, 12 bp, Artificial Sequence
  Oligonucleotide primer for the detection of SNP TSC0011733
ttaaaaaaattc

SEQ ID NO: 284228 - DNA, 12 bp, Artificial Sequence
  Oligonucleotide primer for the detection of SNP TSC0011733
aggtattatatg

SEQ ID NO: 284229 - DNA, 12 bp, Artificial Sequence
  Oligonucleotide primer for the detection of SNP TSC0011734
aggttttttttt

SEQ ID NO: 284230 - DNA, 12 bp, Artificial Sequence
  Oligonucleotide primer for the detection of SNP TSC0011734
aaattccttttt

SEQ ID NO: 284231 - DNA, 12 bp, Artificial Sequence
  Oligonucleotide primer for the detection of SNP TSC0011734
aaggtggtaaaa

SEQ ID NO: 284232 - DNA, 12 bp, Artificial Sequence
  Oligonucleotide primer for the detection of SNP TSC0011735
taataacacaca

SEQ ID NO: 284233 - DNA, 12 bp, Artificial Sequence
  Oligonucleotide primer for the detection of SNP TSC0011735
taataacacacg

SEQ ID NO: 284234 - DNA, 12 bp, Artificial Sequence
  Oligonucleotide primer for the detection of SNP TSC0011735
tgtaatatttat

SEQ ID NO: 284235 - DNA, 12 bp, Artificial Sequence
  Oligonucleotide primer for the detection of SNP TSC0011735
tataatacctat

SEQ ID NO: 284236 - DNA, 12 bp, Artificial Sequence
  Oligonucleotide primer for the detection of SNP TSC0011735
tagtggtatatg

SEQ ID NO: 284237 - DNA, 12 bp, Artificial Sequence
  Oligonucleotide primer for the detection of SNP TSC0011735
tagtggtatacg

SEQ ID NO: 284238 - DNA, 12 bp, Artificial Sequence
  Oligonucleotide primer for the detection of SNP TSC0011737
aaaatttattct

SEQ ID NO: 284239 - DNA, 12 bp, Artificial Sequence
  Oligonucleotide primer for the detection of SNP TSC0011737
gaaatttattct

SEQ ID NO: 284240 - DNA, 12 bp, Artificial Sequence
  Oligonucleotide primer for the detection of SNP TSC0011738
ttctctccatac

SEQ ID NO: 284241 - DNA, 12 bp, Artificial Sequence
  Oligonucleotide primer for the detection of SNP TSC0011738
gtatgatggtag

SEQ ID NO: 284242 - DNA, 12 bp, Artificial Sequence
  Oligonucleotide primer for the detection of SNP TSC0011738
gtatgacggtag

SEQ ID NO: 284243 - DNA, 12 bp, Artificial Sequence
  Oligonucleotide primer for the detection of SNP TSC0011739
tctttcaaaaat

SEQ ID NO: 284244 - DNA, 12 bp, Artificial Sequence
  Oligonucleotide primer for the detection of SNP TSC0011739
ttatataaataa

SEQ ID NO: 284245 - DNA, 12 bp, Artificial Sequence
  Oligonucleotide primer for the detection of SNP TSC0011741
ccaattactaac

SEQ ID NO: 284246 - DNA, 12 bp, Artificial Sequence
  Oligonucleotide primer for the detection of SNP TSC0011741
atttacatttta

SEQ ID NO: 284247 - DNA, 12 bp, Artificial Sequence
  Oligonucleotide primer for the detection of SNP TSC0011741
ttagttgttaat

SEQ ID NO: 284248 - DNA, 12 bp, Artificial Sequence
  Oligonucleotide primer for the detection of SNP TSC0011742
tttactactctc

SEQ ID NO: 284249 - DNA, 12 bp, Artificial Sequence
  Oligonucleotide primer for the detection of SNP TSC0011742
aattgaattatg

SEQ ID NO: 284250 - DNA, 12 bp, Artificial Sequence
  Oligonucleotide primer for the detection of SNP TSC0011742
aattaaattata

SEQ ID NO: 284251 - DNA, 12 bp, Artificial Sequence
  Oligonucleotide primer for the detection of SNP TSC0011742
tttattgttttt

SEQ ID NO: 284252 - DNA, 12 bp, Artificial Sequence
  Oligonucleotide primer for the detection of SNP TSC0011743
tattcatttatt

SEQ ID NO: 284253 - DNA, 12 bp, Artificial Sequence
  Oligonukleotid-Primer
tgaataagtaaa

SEQ ID NO: 284254 - DNA, 12 bp, Artificial Sequence
  Oligonucleotide primer for the detection of SNP TSC0011744
ccacccaaacta

SEQ ID NO: 284255 - DNA, 12 bp, Artificial Sequence
  Oligonucleotide primer for the detection of SNP TSC0011744
gttgtgtttttt

SEQ ID NO: 284256 - DNA, 12 bp, Artificial Sequence
  Oligonucleotide primer for the detection of SNP TSC0011744
gttgcgtttttt

SEQ ID NO: 284257 - DNA, 12 bp, Artificial Sequence
  Oligonucleotide primer for the detection of SNP TSC0011744
aactacatcttc

SEQ ID NO: 284258 - DNA, 12 bp, Artificial Sequence
  Oligonucleotide primer for the detection of SNP TSC0011744
aactacgtcttc

SEQ ID NO: 284259 - DNA, 12 bp, Artificial Sequence
  Oligonucleotide primer for the detection of SNP TSC0011744
ttatttaggttg

SEQ ID NO: 284260 - DNA, 12 bp, Artificial Sequence
  Oligonucleotide primer for the detection of SNP TSC0011745
aataacatacac

SEQ ID NO: 284261 - DNA, 12 bp, Artificial Sequence
  Oligonucleotide primer for the detection of SNP TSC0011745
attttattgatg

SEQ ID NO: 284262 - DNA, 12 bp, Artificial Sequence
  Oligonucleotide primer for the detection of SNP TSC0011745
attttattgacg

SEQ ID NO: 284263 - DNA, 12 bp, Artificial Sequence
  Oligonucleotide primer for the detection of SNP TSC0011746
aaacctccaaat

SEQ ID NO: 284264 - DNA, 12 bp, Artificial Sequence
  Oligonucleotide primer for the detection of SNP TSC0011746
gtttgggtaggg

SEQ ID NO: 284265 - DNA, 12 bp, Artificial Sequence
  Oligonucleotide primer for the detection of SNP TSC0011746
acctaaacaaaa

SEQ ID NO: 284266 - DNA, 12 bp, Artificial Sequence
  Oligonucleotide primer for the detection of SNP TSC0011746
aggtttttagat

SEQ ID NO: 284267 - DNA, 12 bp, Artificial Sequence
  Oligonucleotide primer for the detection of SNP TSC0011747
caaacctccaaa

SEQ ID NO: 284268 - DNA, 12 bp, Artificial Sequence
  Oligonucleotide primer for the detection of SNP TSC0011747
gggttttatttt

SEQ ID NO: 284269 - DNA, 12 bp, Artificial Sequence
  Oligonucleotide primer for the detection of SNP TSC0011747
aaaccccactcc

SEQ ID NO: 284270 - DNA, 12 bp, Artificial Sequence
  Oligonucleotide primer for the detection of SNP TSC0011747
ttaggtttttag

SEQ ID NO: 284271 - DNA, 12 bp, Artificial Sequence
  Oligonucleotide primer for the detection of SNP TSC0011748
taaatcacaaac

SEQ ID NO: 284272 - DNA, 12 bp, Artificial Sequence
  Oligonucleotide primer for the detection of SNP TSC0011748
taaatcacgaac

SEQ ID NO: 284273 - DNA, 12 bp, Artificial Sequence
  Oligonucleotide primer for the detection of SNP TSC0011748
tttttattttga

SEQ ID NO: 284274 - DNA, 12 bp, Artificial Sequence
  Oligonucleotide primer for the detection of SNP TSC0011748
tttttatttcga

SEQ ID NO: 284275 - DNA, 12 bp, Artificial Sequence
  Oligonucleotide primer for the detection of SNP TSC0011750
aataataataaa

SEQ ID NO: 284276 - DNA, 12 bp, Artificial Sequence
  Oligonucleotide primer for the detection of SNP TSC0011750
ggtggtggtggg

SEQ ID NO: 284277 - DNA, 12 bp, Artificial Sequence
  Oligonucleotide primer for the detection of SNP TSC0011751
ttattaattctt

SEQ ID NO: 284278 - DNA, 12 bp, Artificial Sequence
  Oligonucleotide primer for the detection of SNP TSC0011751
attgttatattg

SEQ ID NO: 284279 - DNA, 12 bp, Artificial Sequence
  Oligonucleotide primer for the detection of SNP TSC0011754
ttatttgggagg

SEQ ID NO: 284280 - DNA, 12 bp, Artificial Sequence
  Oligonucleotide primer for the detection of SNP TSC0011754
ttattcgggagg

SEQ ID NO: 284281 - DNA, 12 bp, Artificial Sequence
  Oligonucleotide primer for the detection of SNP TSC0011755
attacacactcc

SEQ ID NO: 284282 - DNA, 12 bp, Artificial Sequence
  Oligonucleotide primer for the detection of SNP TSC0011755
atatgtaaaata

SEQ ID NO: 284283 - DNA, 12 bp, Artificial Sequence
  Oligonucleotide primer for the detection of SNP TSC0011756
caccaatacata

SEQ ID NO: 284284 - DNA, 12 bp, Artificial Sequence
  Oligonucleotide primer for the detection of SNP TSC0011756
actccctatttt

SEQ ID NO: 284285 - DNA, 12 bp, Artificial Sequence
  Oligonucleotide primer for the detection of SNP TSC0011756
gtattaatatat

SEQ ID NO: 284286 - DNA, 12 bp, Artificial Sequence
  Oligonucleotide primer for the detection of SNP TSC0011757
taaattaacata

SEQ ID NO: 284287 - DNA, 12 bp, Artificial Sequence
  Oligonucleotide primer for the detection of SNP TSC0011757
taaattaacgta

SEQ ID NO: 284288 - DNA, 12 bp, Artificial Sequence
  Oligonucleotide primer for the detection of SNP TSC0011757
taggaaattaat

SEQ ID NO: 284289 - DNA, 12 bp, Artificial Sequence
  Oligonucleotide primer for the detection of SNP TSC0011757
tcaaaaaattaa

SEQ ID NO: 284290 - DNA, 12 bp, Artificial Sequence
  Oligonucleotide primer for the detection of SNP TSC0011757
tggattaatgtg

SEQ ID NO: 284291 - DNA, 12 bp, Artificial Sequence
  Oligonucleotide primer for the detection of SNP TSC0011757
tggattaacgtg

SEQ ID NO: 284292 - DNA, 12 bp, Artificial Sequence
  Oligonucleotide primer for the detection of SNP TSC0011758
aaaccctaaaac

SEQ ID NO: 284293 - DNA, 12 bp, Artificial Sequence
  Oligonucleotide primer for the detection of SNP TSC0011758
taatttatttag

SEQ ID NO: 284294 - DNA, 12 bp, Artificial Sequence
  Oligonucleotide primer for the detection of SNP TSC0011763
cctacactaaac

SEQ ID NO: 284295 - DNA, 12 bp, Artificial Sequence
  Oligonucleotide primer for the detection of SNP TSC0011763
atattatttgta

SEQ ID NO: 284296 - DNA, 12 bp, Artificial Sequence
  Oligonucleotide primer for the detection of SNP TSC0011764
aactctaaattc

SEQ ID NO: 284297 - DNA, 12 bp, Artificial Sequence
  Oligonucleotide primer for the detection of SNP TSC0011764
ggttgaaagttt

SEQ ID NO: 284298 - DNA, 12 bp, Artificial Sequence
  Oligonucleotide primer for the detection of SNP TSC0011764
caactaaaaacc

SEQ ID NO: 284299 - DNA, 12 bp, Artificial Sequence
  Oligonucleotide primer for the detection of SNP TSC0011764
cgactaaaaacc

SEQ ID NO: 284300 - DNA, 12 bp, Artificial Sequence
  Oligonucleotide primer for the detection of SNP TSC0011764
attttgggtttt

SEQ ID NO: 284301 - DNA, 12 bp, Artificial Sequence
  Oligonucleotide primer for the detection of SNP TSC0011765
ctttatcttatt

SEQ ID NO: 284302 - DNA, 12 bp, Artificial Sequence
  Oligonucleotide primer for the detection of SNP TSC0011765
ggggatatagta

SEQ ID NO: 284303 - DNA, 12 bp, Artificial Sequence
  Oligonucleotide primer for the detection of SNP TSC0011765
tttgttttattt

SEQ ID NO: 284304 - DNA, 12 bp, Artificial Sequence
  Oligonucleotide primer for the detection of SNP TSC0011770
aataaactatca

SEQ ID NO: 284305 - DNA, 12 bp, Artificial Sequence
  Oligonucleotide primer for the detection of SNP TSC0011770
ttaaattaaatt

SEQ ID NO: 284306 - DNA, 12 bp, Artificial Sequence
  Oligonucleotide primer for the detection of SNP TSC0011770
taaattaaacca

SEQ ID NO: 284307 - DNA, 12 bp, Artificial Sequence
  Oligonucleotide primer for the detection of SNP TSC0011770
agataaattatt

SEQ ID NO: 284308 - DNA, 12 bp, Artificial Sequence
  Oligonucleotide primer for the detection of SNP TSC0011772
aaaaaaattaaa

SEQ ID NO: 284309 - DNA, 12 bp, Artificial Sequence
  Oligonucleotide primer for the detection of SNP TSC0011772
attggagtttat

SEQ ID NO: 284310 - DNA, 12 bp, Artificial Sequence
  Oligonucleotide primer for the detection of SNP TSC0011772
attaaaactcat

SEQ ID NO: 284311 - DNA, 12 bp, Artificial Sequence
  Oligonucleotide primer for the detection of SNP TSC0011772
aaaaaagttaaa

SEQ ID NO: 284312 - DNA, 12 bp, Artificial Sequence
  Oligonucleotide primer for the detection of SNP TSC0011777
tttaaaaattac

SEQ ID NO: 284313 - DNA, 12 bp, Artificial Sequence
  Oligonucleotide primer for the detection of SNP TSC0011777
ttgattattata

SEQ ID NO: 284314 - DNA, 12 bp, Artificial Sequence
  Oligonucleotide primer for the detection of SNP TSC0011778
aaaaaataaatt

SEQ ID NO: 284315 - DNA, 12 bp, Artificial Sequence
  Oligonucleotide primer for the detection of SNP TSC0011778
tgtttaatataa

SEQ ID NO: 284316 - DNA, 12 bp, Artificial Sequence
  Oligonucleotide primer for the detection of SNP TSC0011779
acccaaactaaa

SEQ ID NO: 284317 - DNA, 12 bp, Artificial Sequence
  Oligonucleotide primer for the detection of SNP TSC0011779
acccgaactaaa

SEQ ID NO: 284318 - DNA, 12 bp, Artificial Sequence
  Oligonucleotide primer for the detection of SNP TSC0011779
ggtttagttagg

SEQ ID NO: 284319 - DNA, 12 bp, Artificial Sequence
  Oligonucleotide primer for the detection of SNP TSC0011779
aactcaaccaaa

SEQ ID NO: 284320 - DNA, 12 bp, Artificial Sequence
  Oligonucleotide primer for the detection of SNP TSC0011779
gtttgagttgag

SEQ ID NO: 284321 - DNA, 12 bp, Artificial Sequence
  Oligonucleotide primer for the detection of SNP TSC0011779
gttcgagttgag

SEQ ID NO: 284322 - DNA, 12 bp, Artificial Sequence
  Oligonucleotide primer for the detection of SNP TSC0011780
ttctccttctcc

SEQ ID NO: 284323 - DNA, 12 bp, Artificial Sequence
  Oligonucleotide primer for the detection of SNP TSC0011780
gggagagggaga

SEQ ID NO: 284324 - DNA, 12 bp, Artificial Sequence
  Oligonucleotide primer for the detection of SNP TSC0011783
ctccctctccct

SEQ ID NO: 284325 - DNA, 12 bp, Artificial Sequence
  Oligonucleotide primer for the detection of SNP TSC0011783
gagggagaagga

SEQ ID NO: 284326 - DNA, 12 bp, Artificial Sequence
  Oligonucleotide primer for the detection of SNP TSC0011784
aataactccact

SEQ ID NO: 284327 - DNA, 12 bp, Artificial Sequence
  Oligonucleotide primer for the detection of SNP TSC0011784
ttatgatgtttg

SEQ ID NO: 284328 - DNA, 12 bp, Artificial Sequence
  Oligonucleotide primer for the detection of SNP TSC0011784
ttatgacgtttg

SEQ ID NO: 284329 - DNA, 12 bp, Artificial Sequence
  Oligonucleotide primer for the detection of SNP TSC0011785
caaaaaacctcc

SEQ ID NO: 284330 - DNA, 12 bp, Artificial Sequence
  Oligonucleotide primer for the detection of SNP TSC0011785
tttagaaataag

SEQ ID NO: 284331 - DNA, 12 bp, Artificial Sequence
  Oligonucleotide primer for the detection of SNP TSC0011786
taccaaacaaat

SEQ ID NO: 284332 - DNA, 12 bp, Artificial Sequence
  Oligonucleotide primer for the detection of SNP TSC0011786
tttgttaatgtg

SEQ ID NO: 284333 - DNA, 12 bp, Artificial Sequence
  Oligonucleotide primer for the detection of SNP TSC0011787
attaaaactata

SEQ ID NO: 284334 - DNA, 12 bp, Artificial Sequence
  Oligonucleotide primer for the detection of SNP TSC0011787
gaatttaagatt

SEQ ID NO: 284335 - DNA, 12 bp, Artificial Sequence
  Oligonucleotide primer for the detection of SNP TSC0011787
aaattcaaaatt

SEQ ID NO: 284336 - DNA, 12 bp, Artificial Sequence
  Oligonucleotide primer for the detection of SNP TSC0011787
ttaaagttgtat

SEQ ID NO: 284337 - DNA, 12 bp, Artificial Sequence
  Oligonucleotide primer for the detection of SNP TSC0011788
ttacaacctcta

SEQ ID NO: 284338 - DNA, 12 bp, Artificial Sequence
  Oligonucleotide primer for the detection of SNP TSC0011788
ttatttagttgt

SEQ ID NO: 284339 - DNA, 12 bp, Artificial Sequence
  Oligonucleotide primer for the detection of SNP TSC0011788
ccattcaactac

SEQ ID NO: 284340 - DNA, 12 bp, Artificial Sequence
  Oligonucleotide primer for the detection of SNP TSC0011788
ttgtagtttttg

SEQ ID NO: 284341 - DNA, 12 bp, Artificial Sequence
  Oligonucleotide primer for the detection of SNP TSC0011789
aaaaatctcacc

SEQ ID NO: 284342 - DNA, 12 bp, Artificial Sequence
  Oligonucleotide primer for the detection of SNP TSC0011789
tagtttgtgtaa

SEQ ID NO: 284343 - DNA, 12 bp, Artificial Sequence
  Oligonucleotide primer for the detection of SNP TSC0011789
taacctatacaa

SEQ ID NO: 284344 - DNA, 12 bp, Artificial Sequence
  Oligonucleotide primer for the detection of SNP TSC0011789
aggggttttatt

SEQ ID NO: 284345 - DNA, 12 bp, Artificial Sequence
  Oligonucleotide primer for the detection of SNP TSC0011790
atttctccaaac

SEQ ID NO: 284346 - DNA, 12 bp, Artificial Sequence
  Oligonukleotid-Primer
gatagagtgata

SEQ ID NO: 284347 - DNA, 12 bp, Artificial Sequence
  Oligonucleotide primer for the detection of SNP TSC0011790
aacaaaataata

SEQ ID NO: 284348 - DNA, 12 bp, Artificial Sequence
  Oligonucleotide primer for the detection of SNP TSC0011790
atttttttagat

SEQ ID NO: 284349 - DNA, 12 bp, Artificial Sequence
  Oligonucleotide primer for the detection of SNP TSC0011791
agtgtattaata

SEQ ID NO: 284350 - DNA, 12 bp, Artificial Sequence
  Oligonucleotide primer for the detection of SNP TSC0011791
aatacaccaaca

SEQ ID NO: 284351 - DNA, 12 bp, Artificial Sequence
  Oligonucleotide primer for the detection of SNP TSC0011791
gagtaattggat

SEQ ID NO: 284352 - DNA, 12 bp, Artificial Sequence
  Oligonucleotide primer for the detection of SNP TSC0011791
gagtaattggac

SEQ ID NO: 284353 - DNA, 12 bp, Artificial Sequence
  Oligonucleotide primer for the detection of SNP TSC0011792
aaattaaaaatt

SEQ ID NO: 284354 - DNA, 12 bp, Artificial Sequence
  Oligonucleotide primer for the detection of SNP TSC0011792
ttttatgttttg

SEQ ID NO: 284355 - DNA, 12 bp, Artificial Sequence
  Oligonucleotide primer for the detection of SNP TSC0011793
taataaaataat

SEQ ID NO: 284356 - DNA, 12 bp, Artificial Sequence
  Oligonucleotide primer for the detection of SNP TSC0011793
atatatgtttaa

SEQ ID NO: 284357 - DNA, 12 bp, Artificial Sequence
  Oligonucleotide primer for the detection of SNP TSC0011794
aaaacttactaa

SEQ ID NO: 284358 - DNA, 12 bp, Artificial Sequence
  Oligonucleotide primer for the detection of SNP TSC0011794
ggtagaatgagt

SEQ ID NO: 284359 - DNA, 12 bp, Artificial Sequence
  Oligonucleotide primer for the detection of SNP TSC0011794
aataaaataaat

SEQ ID NO: 284360 - DNA, 12 bp, Artificial Sequence
  Oligonucleotide primer for the detection of SNP TSC0011794
ggagtttgttgg

SEQ ID NO: 284361 - DNA, 12 bp, Artificial Sequence
  Oligonucleotide primer for the detection of SNP TSC0011795
acctctttactt

SEQ ID NO: 284362 - DNA, 12 bp, Artificial Sequence
  Oligonucleotide primer for the detection of SNP TSC0011795
atgtttgtaata

SEQ ID NO: 284363 - DNA, 12 bp, Artificial Sequence
  Oligonucleotide primer for the detection of SNP TSC0011796
aaatccccaaac

SEQ ID NO: 284364 - DNA, 12 bp, Artificial Sequence
  Oligonucleotide primer for the detection of SNP TSC0011796
gtgtttttttat

SEQ ID NO: 284365 - DNA, 12 bp, Artificial Sequence
  Oligonucleotide primer for the detection of SNP TSC0011797
catataaaatca

SEQ ID NO: 284366 - DNA, 12 bp, Artificial Sequence
  Oligonucleotide primer for the detection of SNP TSC0011797
ttttattatatt

SEQ ID NO: 284367 - DNA, 12 bp, Artificial Sequence
  Oligonucleotide primer for the detection of SNP TSC0011797
ttccattacact

SEQ ID NO: 284368 - DNA, 12 bp, Artificial Sequence
  Oligonucleotide primer for the detection of SNP TSC0011797
tatatgaggtta

SEQ ID NO: 284369 - DNA, 12 bp, Artificial Sequence
  Oligonucleotide primer for the detection of SNP TSC0011798
ttttactaaata

SEQ ID NO: 284370 - DNA, 12 bp, Artificial Sequence
  Oligonucleotide primer for the detection of SNP TSC0011798
gtttttgttata

SEQ ID NO: 284371 - DNA, 12 bp, Artificial Sequence
  Oligonucleotide primer for the detection of SNP TSC0011798
acttctattata

SEQ ID NO: 284372 - DNA, 12 bp, Artificial Sequence
  Oligonucleotide primer for the detection of SNP TSC0011798
ttttattaggtg

SEQ ID NO: 284373 - DNA, 12 bp, Artificial Sequence
  Oligonucleotide primer for the detection of SNP TSC0011802
ttttttatatac

SEQ ID NO: 284374 - DNA, 12 bp, Artificial Sequence
  Oligonucleotide primer for the detection of SNP TSC0011802
ttcctcacacac

SEQ ID NO: 284375 - DNA, 12 bp, Artificial Sequence
  Oligonucleotide primer for the detection of SNP TSC0011802
aaaagaagttaa

SEQ ID NO: 284376 - DNA, 12 bp, Artificial Sequence
  Oligonucleotide primer for the detection of SNP TSC0011803
aaccaccctact

SEQ ID NO: 284377 - DNA, 12 bp, Artificial Sequence
  Oligonucleotide primer for the detection of SNP TSC0011803
ttgggaaatgag

SEQ ID NO: 284378 - DNA, 12 bp, Artificial Sequence
  Oligonucleotide primer for the detection of SNP TSC0011807
atcctatacaaa

SEQ ID NO: 284379 - DNA, 12 bp, Artificial Sequence
  Oligonucleotide primer for the detection of SNP TSC0011807
tttgatagtgtt

SEQ ID NO: 284380 - DNA, 12 bp, Artificial Sequence
  Oligonucleotide primer for the detection of SNP TSC0011807
tctaacaatacc

SEQ ID NO: 284381 - DNA, 12 bp, Artificial Sequence
  Oligonucleotide primer for the detection of SNP TSC0011807
ttatatagattt

SEQ ID NO: 284382 - DNA, 12 bp, Artificial Sequence
  Oligonucleotide primer for the detection of SNP TSC0011807
ttatatagattc

SEQ ID NO: 284383 - DNA, 12 bp, Artificial Sequence
  Oligonucleotide primer for the detection of SNP TSC0011809
ttaaacaaatat

SEQ ID NO: 284384 - DNA, 12 bp, Artificial Sequence
  Oligonucleotide primer for the detection of SNP TSC0011809
ttttatttaggg

SEQ ID NO: 284385 - DNA, 12 bp, Artificial Sequence
  Oligonucleotide primer for the detection of SNP TSC0011810
taaatcaaaaaa

SEQ ID NO: 284386 - DNA, 12 bp, Artificial Sequence
  Oligonucleotide primer for the detection of SNP TSC0011810
gggtgtttattg

SEQ ID NO: 284387 - DNA, 12 bp, Artificial Sequence
  Oligonucleotide primer for the detection of SNP TSC0011811
cactacaacctt

SEQ ID NO: 284388 - DNA, 12 bp, Artificial Sequence
  Oligonucleotide primer for the detection of SNP TSC0011811
tgagttttgaag

SEQ ID NO: 284389 - DNA, 12 bp, Artificial Sequence
  Oligonucleotide primer for the detection of SNP TSC0011812
atttataattta

SEQ ID NO: 284390 - DNA, 12 bp, Artificial Sequence
  Oligonucleotide primer for the detection of SNP TSC0011812
tataaaaataat

SEQ ID NO: 284391 - DNA, 12 bp, Artificial Sequence
  Oligonucleotide primer for the detection of SNP TSC0011812
ttacaaaaataa

SEQ ID NO: 284392 - DNA, 12 bp, Artificial Sequence
  Oligonucleotide primer for the detection of SNP TSC0011812
gtttatggtttg

SEQ ID NO: 284393 - DNA, 12 bp, Artificial Sequence
  Oligonucleotide primer for the detection of SNP TSC0011813
aaaaaaaactat

SEQ ID NO: 284394 - DNA, 12 bp, Artificial Sequence
  Oligonucleotide primer for the detection of SNP TSC0011813
tagtataggttg

SEQ ID NO: 284395 - DNA, 12 bp, Artificial Sequence
  Oligonucleotide primer for the detection of SNP TSC0011814
aaaaattacatt

SEQ ID NO: 284396 - DNA, 12 bp, Artificial Sequence
  Oligonucleotide primer for the detection of SNP TSC0011814
aaaaattacgtt

SEQ ID NO: 284397 - DNA, 12 bp, Artificial Sequence
  Oligonucleotide primer for the detection of SNP TSC0011814
gggattttattg

SEQ ID NO: 284398 - DNA, 12 bp, Artificial Sequence
  Oligonucleotide primer for the detection of SNP TSC0011815
cactacctacaa

SEQ ID NO: 284399 - DNA, 12 bp, Artificial Sequence
  Oligonucleotide primer for the detection of SNP TSC0011815
ggaagggattgt

SEQ ID NO: 284400 - DNA, 12 bp, Artificial Sequence
  Oligonucleotide primer for the detection of SNP TSC0011815
ggaagggattgc

SEQ ID NO: 284401 - DNA, 12 bp, Artificial Sequence
  Oligonucleotide primer for the detection of SNP TSC0011816
taaattttcatt

SEQ ID NO: 284402 - DNA, 12 bp, Artificial Sequence
  Oligonucleotide primer for the detection of SNP TSC0011816
tatattgttaga

SEQ ID NO: 284403 - DNA, 12 bp, Artificial Sequence
  Oligonucleotide primer for the detection of SNP TSC0011816
tatattactaaa

SEQ ID NO: 284404 - DNA, 12 bp, Artificial Sequence
  Oligonucleotide primer for the detection of SNP TSC0011816
tgggtttttatt

SEQ ID NO: 284405 - DNA, 12 bp, Artificial Sequence
  Oligonucleotide primer for the detection of SNP TSC0011822
tctatttatttt

SEQ ID NO: 284406 - DNA, 12 bp, Artificial Sequence
  Oligonucleotide primer for the detection of SNP TSC0011822
taaataatgaga

SEQ ID NO: 284407 - DNA, 12 bp, Artificial Sequence
  Oligonucleotide primer for the detection of SNP TSC0011822
taaataataaaa

SEQ ID NO: 284408 - DNA, 12 bp, Artificial Sequence
  Oligonucleotide primer for the detection of SNP TSC0011824
taaatatataaa

SEQ ID NO: 284409 - DNA, 12 bp, Artificial Sequence
  Oligonucleotide primer for the detection of SNP TSC0011824
atttagttattt

SEQ ID NO: 284410 - DNA, 12 bp, Artificial Sequence
  Oligonucleotide primer for the detection of SNP TSC0011824
atctaatcacct

SEQ ID NO: 284411 - DNA, 12 bp, Artificial Sequence
  Oligonucleotide primer for the detection of SNP TSC0011824
taggtgtgtgag

SEQ ID NO: 284412 - DNA, 12 bp, Artificial Sequence
  Oligonucleotide primer for the detection of SNP TSC0011825
tactaaaaactc

SEQ ID NO: 284413 - DNA, 12 bp, Artificial Sequence
  Oligonucleotide primer for the detection of SNP TSC0011825
ttttaggaagag

SEQ ID NO: 284414 - DNA, 12 bp, Artificial Sequence
  Oligonucleotide primer for the detection of SNP TSC0011825
tgttgggggttt

SEQ ID NO: 284415 - DNA, 12 bp, Artificial Sequence
  Oligonucleotide primer for the detection of SNP TSC0011826
ttacttcattcc

SEQ ID NO: 284416 - DNA, 12 bp, Artificial Sequence
  Oligonucleotide primer for the detection of SNP TSC0011826
tttagttgatgg

SEQ ID NO: 284417 - DNA, 12 bp, Artificial Sequence
  Oligonucleotide primer for the detection of SNP TSC0011826
tttagttgacgg

SEQ ID NO: 284418 - DNA, 12 bp, Artificial Sequence
  Oligonucleotide primer for the detection of SNP TSC0011827
gtttgaggggtt

SEQ ID NO: 284419 - DNA, 12 bp, Artificial Sequence
  Oligonucleotide primer for the detection of SNP TSC0011827
ttaaaaaattaa

SEQ ID NO: 284420 - DNA, 12 bp, Artificial Sequence
  Oligonucleotide primer for the detection of SNP TSC0011827
ggggggtttaga

SEQ ID NO: 284421 - DNA, 12 bp, Artificial Sequence
  Oligonucleotide primer for the detection of SNP TSC0011828
tagattttatta

SEQ ID NO: 284422 - DNA, 12 bp, Artificial Sequence
  Oligonucleotide primer for the detection of SNP TSC0011829
ctcaaataatcc

SEQ ID NO: 284423 - DNA, 12 bp, Artificial Sequence
  Oligonucleotide primer for the detection of SNP TSC0011829
gaggttggggtg

SEQ ID NO: 284424 - DNA, 12 bp, Artificial Sequence
  Oligonucleotide primer for the detection of SNP TSC0011829
gaggtcggggtg

SEQ ID NO: 284425 - DNA, 12 bp, Artificial Sequence
  Oligonucleotide primer for the detection of SNP TSC0011829
aaaaccgaaata

SEQ ID NO: 284426 - DNA, 12 bp, Artificial Sequence
  Oligonucleotide primer for the detection of SNP TSC0011830
tctaaattctcc

SEQ ID NO: 284427 - DNA, 12 bp, Artificial Sequence
  Oligonucleotide primer for the detection of SNP TSC0011830
ggaagttttttg

SEQ ID NO: 284428 - DNA, 12 bp, Artificial Sequence
  Oligonucleotide primer for the detection of SNP TSC0011831
aaatatctttat

SEQ ID NO: 284429 - DNA, 12 bp, Artificial Sequence
  Oligonucleotide primer for the detection of SNP TSC0011831
gtttttagggta

SEQ ID NO: 284430 - DNA, 12 bp, Artificial Sequence
  Oligonucleotide primer for the detection of SNP TSC0011831
acccccaaaata

SEQ ID NO: 284431 - DNA, 12 bp, Artificial Sequence
  Oligonucleotide primer for the detection of SNP TSC0011831
gcccccaaaata

SEQ ID NO: 284432 - DNA, 12 bp, Artificial Sequence
  Oligonucleotide primer for the detection of SNP TSC0011831
aaatatttttat

SEQ ID NO: 284433 - DNA, 12 bp, Artificial Sequence
  Oligonucleotide primer for the detection of SNP TSC0011832
taccaattttaa

SEQ ID NO: 284434 - DNA, 12 bp, Artificial Sequence
  Oligonucleotide primer for the detection of SNP TSC0011832
taaactcctctt

SEQ ID NO: 284435 - DNA, 12 bp, Artificial Sequence
  Oligonucleotide primer for the detection of SNP TSC0011832
tgttaattttaa

SEQ ID NO: 284436 - DNA, 12 bp, Artificial Sequence
  Oligonucleotide primer for the detection of SNP TSC0011833
catttaatataa

SEQ ID NO: 284437 - DNA, 12 bp, Artificial Sequence
  Oligonucleotide primer for the detection of SNP TSC0011833
gtaaagaatgtt

SEQ ID NO: 284438 - DNA, 12 bp, Artificial Sequence
  Oligonucleotide primer for the detection of SNP TSC0011833
gtaaagaatgtc

SEQ ID NO: 284439 - DNA, 12 bp, Artificial Sequence
  Oligonukleotid-Primer
ataaaaaatacc

SEQ ID NO: 284440 - DNA, 12 bp, Artificial Sequence
  Oligonucleotide primer for the detection of SNP TSC0011833
gtaaaaaatacc

SEQ ID NO: 284441 - DNA, 12 bp, Artificial Sequence
  Oligonucleotide primer for the detection of SNP TSC0011833
ttatttggtgtg

SEQ ID NO: 284442 - DNA, 12 bp, Artificial Sequence
  Oligonucleotide primer for the detection of SNP TSC0011834
aaccaaaaatat

SEQ ID NO: 284443 - DNA, 12 bp, Artificial Sequence
  Oligonucleotide primer for the detection of SNP TSC0011834
atttgtttttta

SEQ ID NO: 284444 - DNA, 12 bp, Artificial Sequence
  Oligonucleotide primer for the detection of SNP TSC0011835
attcatcaaact

SEQ ID NO: 284445 - DNA, 12 bp, Artificial Sequence
  Oligonucleotide primer for the detection of SNP TSC0011835
gggataggattg

SEQ ID NO: 284446 - DNA, 12 bp, Artificial Sequence
  Oligonucleotide primer for the detection of SNP TSC0011836
ctaaaatccccc

SEQ ID NO: 284447 - DNA, 12 bp, Artificial Sequence
  Oligonucleotide primer for the detection of SNP TSC0011836
agttttaggata

SEQ ID NO: 284448 - DNA, 12 bp, Artificial Sequence
  Oligonucleotide primer for the detection of SNP TSC0011837
aataacaatatc

SEQ ID NO: 284449 - DNA, 12 bp, Artificial Sequence
  Oligonucleotide primer for the detection of SNP TSC0011837
tacaataaacta

SEQ ID NO: 284450 - DNA, 12 bp, Artificial Sequence
  Oligonucleotide primer for the detection of SNP TSC0011837
agtggtagtatt

SEQ ID NO: 284451 - DNA, 12 bp, Artificial Sequence
  Oligonucleotide primer for the detection of SNP TSC0011838
aaacaaaaccct

SEQ ID NO: 284452 - DNA, 12 bp, Artificial Sequence
  Oligonucleotide primer for the detection of SNP TSC0011838
tttttttttgag

SEQ ID NO: 284453 - DNA, 12 bp, Artificial Sequence
  Oligonucleotide primer for the detection of SNP TSC0011840
taattccataca

SEQ ID NO: 284454 - DNA, 12 bp, Artificial Sequence
  Oligonucleotide primer for the detection of SNP TSC0011840
taattccatacg

SEQ ID NO: 284455 - DNA, 12 bp, Artificial Sequence
  Oligonucleotide primer for the detection of SNP TSC0011840
ttgttttaggaa

SEQ ID NO: 284456 - DNA, 12 bp, Artificial Sequence
  Oligonucleotide primer for the detection of SNP TSC0011840
ctatctcaaaaa

SEQ ID NO: 284457 - DNA, 12 bp, Artificial Sequence
  Oligonucleotide primer for the detection of SNP TSC0011840
taattttatatg

SEQ ID NO: 284458 - DNA, 12 bp, Artificial Sequence
  Oligonucleotide primer for the detection of SNP TSC0011840
taattttatacg

SEQ ID NO: 284459 - DNA, 12 bp, Artificial Sequence
  Oligonucleotide primer for the detection of SNP TSC0011841
atattttagtat

SEQ ID NO: 284460 - DNA, 12 bp, Artificial Sequence
  Oligonucleotide primer for the detection of SNP TSC0011841
atattttagtac

SEQ ID NO: 284461 - DNA, 12 bp, Artificial Sequence
  Oligonucleotide primer for the detection of SNP TSC0011841
atacttcaacac

SEQ ID NO: 284462 - DNA, 12 bp, Artificial Sequence
  Oligonucleotide primer for the detection of SNP TSC0011841
agtatgagttat

SEQ ID NO: 284463 - DNA, 12 bp, Artificial Sequence
  Oligonucleotide primer for the detection of SNP TSC0011841
agtatgagttac

SEQ ID NO: 284464 - DNA, 12 bp, Artificial Sequence
  Oligonucleotide primer for the detection of SNP TSC0011842
ctacccccctaa

SEQ ID NO: 284465 - DNA, 12 bp, Artificial Sequence
  Oligonucleotide primer for the detection of SNP TSC0011842
ggtgttggatat

SEQ ID NO: 284466 - DNA, 12 bp, Artificial Sequence
  Oligonucleotide primer for the detection of SNP TSC0011842
aatactaaacac

SEQ ID NO: 284467 - DNA, 12 bp, Artificial Sequence
  Oligonucleotide primer for the detection of SNP TSC0011842
ttgtttttttgg

SEQ ID NO: 284468 - DNA, 12 bp, Artificial Sequence
  Oligonucleotide primer for the detection of SNP TSC0011843
actacctctatc

SEQ ID NO: 284469 - DNA, 12 bp, Artificial Sequence
  Oligonucleotide primer for the detection of SNP TSC0011843
atattagggggg

SEQ ID NO: 284470 - DNA, 12 bp, Artificial Sequence
  Oligonucleotide primer for the detection of SNP TSC0011843
gttgtttttatt

SEQ ID NO: 284471 - DNA, 12 bp, Artificial Sequence
  Oligonucleotide primer for the detection of SNP TSC0011844
atctttaataac

SEQ ID NO: 284472 - DNA, 12 bp, Artificial Sequence
  Oligonucleotide primer for the detection of SNP TSC0011844
ttaaggtggata

SEQ ID NO: 284473 - DNA, 12 bp, Artificial Sequence
  Oligonucleotide primer for the detection of SNP TSC0011845
ctttaataacct

SEQ ID NO: 284474 - DNA, 12 bp, Artificial Sequence
  Oligonucleotide primer for the detection of SNP TSC0011845
atttaaggtgga

SEQ ID NO: 284475 - DNA, 12 bp, Artificial Sequence
  Oligonucleotide primer for the detection of SNP TSC0011847
atcctcccacct

SEQ ID NO: 284476 - DNA, 12 bp, Artificial Sequence
  Oligonucleotide primer for the detection of SNP TSC0011848
tccctaaacctc

SEQ ID NO: 284477 - DNA, 12 bp, Artificial Sequence
  Oligonucleotide primer for the detection of SNP TSC0011848
ttaggtggagaa

SEQ ID NO: 284478 - DNA, 12 bp, Artificial Sequence
  Oligonucleotide primer for the detection of SNP TSC0011849
cacccaaaaact

SEQ ID NO: 284479 - DNA, 12 bp, Artificial Sequence
  Oligonucleotide primer for the detection of SNP TSC0011849
cacccgaaaact

SEQ ID NO: 284480 - DNA, 12 bp, Artificial Sequence
  Oligonucleotide primer for the detection of SNP TSC0011849
ctttatttctaa

SEQ ID NO: 284481 - DNA, 12 bp, Artificial Sequence
  Oligonucleotide primer for the detection of SNP TSC0011849
tatttgaaagtt

SEQ ID NO: 284482 - DNA, 12 bp, Artificial Sequence
  Oligonucleotide primer for the detection of SNP TSC0011849
tattcgaaagtt

SEQ ID NO: 284483 - DNA, 12 bp, Artificial Sequence
  Oligonucleotide primer for the detection of SNP TSC0011850
atcatataacta

SEQ ID NO: 284484 - DNA, 12 bp, Artificial Sequence
  Oligonucleotide primer for the detection of SNP TSC0011850
tttttatttagg

SEQ ID NO: 284485 - DNA, 12 bp, Artificial Sequence
  Oligonucleotide primer for the detection of SNP TSC0011850
cttttatccaaa

SEQ ID NO: 284486 - DNA, 12 bp, Artificial Sequence
  Oligonucleotide primer for the detection of SNP TSC0011850
ttatatggttat

SEQ ID NO: 284487 - DNA, 12 bp, Artificial Sequence
  Oligonucleotide primer for the detection of SNP TSC0011854
ctacttccaccc

SEQ ID NO: 284488 - DNA, 12 bp, Artificial Sequence
  Oligonucleotide primer for the detection of SNP TSC0011854
taaataatttaa

SEQ ID NO: 284489 - DNA, 12 bp, Artificial Sequence
  Oligonucleotide primer for the detection of SNP TSC0011855
ctcaatttaacc

SEQ ID NO: 284490 - DNA, 12 bp, Artificial Sequence
  Oligonucleotide primer for the detection of SNP TSC0011855
aagtggaagtta

SEQ ID NO: 284491 - DNA, 12 bp, Artificial Sequence
  Oligonucleotide primer for the detection of SNP TSC0011855
aaataaaaatca

SEQ ID NO: 284492 - DNA, 12 bp, Artificial Sequence
  Oligonucleotide primer for the detection of SNP TSC0011855
tttagtttagtt

SEQ ID NO: 284493 - DNA, 12 bp, Artificial Sequence
  Oligonucleotide primer for the detection of SNP TSC0011856
cataacattaat

SEQ ID NO: 284494 - DNA, 12 bp, Artificial Sequence
  Oligonucleotide primer for the detection of SNP TSC0011856
ttaagggatagg

SEQ ID NO: 284495 - DNA, 12 bp, Artificial Sequence
  Oligonucleotide primer for the detection of SNP TSC0011859
tggtgagatttt

SEQ ID NO: 284496 - DNA, 12 bp, Artificial Sequence
  Oligonucleotide primer for the detection of SNP TSC0011859
cggtgagatttt

SEQ ID NO: 284497 - DNA, 12 bp, Artificial Sequence
  Oligonucleotide primer for the detection of SNP TSC0011859
caataaaacccc

SEQ ID NO: 284498 - DNA, 12 bp, Artificial Sequence
  Oligonucleotide primer for the detection of SNP TSC0011859
cgataaaacccc

SEQ ID NO: 284499 - DNA, 12 bp, Artificial Sequence
  Oligonucleotide primer for the detection of SNP TSC0011859
tttttgtagtga

SEQ ID NO: 284500 - DNA, 12 bp, Artificial Sequence
  Oligonucleotide primer for the detection of SNP TSC0011861
acacaaaacaca

SEQ ID NO: 284501 - DNA, 12 bp, Artificial Sequence
  Oligonucleotide primer for the detection of SNP TSC0011861
cctacatctaac

SEQ ID NO: 284502 - DNA, 12 bp, Artificial Sequence
  Oligonucleotide primer for the detection of SNP TSC0011862
cacctactcata

SEQ ID NO: 284503 - DNA, 12 bp, Artificial Sequence
  Oligonucleotide primer for the detection of SNP TSC0011862
atagttgtgatt

SEQ ID NO: 284504 - DNA, 12 bp, Artificial Sequence
  Oligonucleotide primer for the detection of SNP TSC0011862
acaattataact

SEQ ID NO: 284505 - DNA, 12 bp, Artificial Sequence
  Oligonucleotide primer for the detection of SNP TSC0011862
tatttgtttata

SEQ ID NO: 284506 - DNA, 12 bp, Artificial Sequence
  Oligonucleotide primer for the detection of SNP TSC0011863
ttccaaatttct

SEQ ID NO: 284507 - DNA, 12 bp, Artificial Sequence
  Oligonucleotide primer for the detection of SNP TSC0011863
agagaaggaggg

SEQ ID NO: 284508 - DNA, 12 bp, Artificial Sequence
  Oligonucleotide primer for the detection of SNP TSC0011864
cttatactaaaa

SEQ ID NO: 284509 - DNA, 12 bp, Artificial Sequence
  Oligonucleotide primer for the detection of SNP TSC0011864
tgtaaaggatgt

SEQ ID NO: 284510 - DNA, 12 bp, Artificial Sequence
  Oligonucleotide primer for the detection of SNP TSC0011864
tgtaaaggacgt

SEQ ID NO: 284511 - DNA, 12 bp, Artificial Sequence
  Oligonucleotide primer for the detection of SNP TSC0011864
tgtaaaggatgc

SEQ ID NO: 284512 - DNA, 12 bp, Artificial Sequence
  Oligonucleotide primer for the detection of SNP TSC0011864
tgtaaaggacgc

SEQ ID NO: 284513 - DNA, 12 bp, Artificial Sequence
  Oligonucleotide primer for the detection of SNP TSC0011864
tataaaaaacac

SEQ ID NO: 284514 - DNA, 12 bp, Artificial Sequence
  Oligonucleotide primer for the detection of SNP TSC0011864
tataaaaaacgc

SEQ ID NO: 284515 - DNA, 12 bp, Artificial Sequence
  Oligonucleotide primer for the detection of SNP TSC0011864
tttatattgagg

SEQ ID NO: 284516 - DNA, 12 bp, Artificial Sequence
  Oligonucleotide primer for the detection of SNP TSC0011865
attataaataac

SEQ ID NO: 284517 - DNA, 12 bp, Artificial Sequence
  Oligonucleotide primer for the detection of SNP TSC0011865
atatatgaaaag

SEQ ID NO: 284518 - DNA, 12 bp, Artificial Sequence
  Oligonucleotide primer for the detection of SNP TSC0011865
acacataaaaaa

SEQ ID NO: 284519 - DNA, 12 bp, Artificial Sequence
  Oligonucleotide primer for the detection of SNP TSC0011865
gtaaatagtttt

SEQ ID NO: 284520 - DNA, 12 bp, Artificial Sequence
  Oligonucleotide primer for the detection of SNP TSC0011867
aaaattaaaccc

SEQ ID NO: 284521 - DNA, 12 bp, Artificial Sequence
  Oligonucleotide primer for the detection of SNP TSC0011867
tttttagtatgg

SEQ ID NO: 284522 - DNA, 12 bp, Artificial Sequence
  Oligonucleotide primer for the detection of SNP TSC0011867
tctccaacataa

SEQ ID NO: 284523 - DNA, 12 bp, Artificial Sequence
  Oligonucleotide primer for the detection of SNP TSC0011867
ggggttaagttt

SEQ ID NO: 284524 - DNA, 12 bp, Artificial Sequence
  Oligonukleotid-Primer
cttacctcccac

SEQ ID NO: 284525 - DNA, 12 bp, Artificial Sequence
  Oligonucleotide primer for the detection of SNP TSC0011868
taagtgagggag

SEQ ID NO: 284526 - DNA, 12 bp, Artificial Sequence
  Oligonucleotide primer for the detection of SNP TSC0011868
caaataaaaaaa

SEQ ID NO: 284527 - DNA, 12 bp, Artificial Sequence
  Oligonucleotide primer for the detection of SNP TSC0011868
tttattttttat

SEQ ID NO: 284528 - DNA, 12 bp, Artificial Sequence
  Oligonucleotide primer for the detection of SNP TSC0011869
actcattcaaat

SEQ ID NO: 284529 - DNA, 12 bp, Artificial Sequence
  Oligonucleotide primer for the detection of SNP TSC0011869
ttttgatttgag

SEQ ID NO: 284530 - DNA, 12 bp, Artificial Sequence
  Oligonucleotide primer for the detection of SNP TSC0011870
aaaaactcattc

SEQ ID NO: 284531 - DNA, 12 bp, Artificial Sequence
  Oligonucleotide primer for the detection of SNP TSC0011870
tgatttgagtta

SEQ ID NO: 284532 - DNA, 12 bp, Artificial Sequence
  Oligonucleotide primer for the detection of SNP TSC0011871
ctaaaatttaaa

SEQ ID NO: 284533 - DNA, 12 bp, Artificial Sequence
  Oligonucleotide primer for the detection of SNP TSC0011871
agttagatgggt

SEQ ID NO: 284534 - DNA, 12 bp, Artificial Sequence
  Oligonucleotide primer for the detection of SNP TSC0011871
agttagacgggt

SEQ ID NO: 284535 - DNA, 12 bp, Artificial Sequence
  Oligonucleotide primer for the detection of SNP TSC0011871
aaccaaacaaac

SEQ ID NO: 284536 - DNA, 12 bp, Artificial Sequence
  Oligonucleotide primer for the detection of SNP TSC0011871
aaccaaacgaac

SEQ ID NO: 284537 - DNA, 12 bp, Artificial Sequence
  Oligonucleotide primer for the detection of SNP TSC0011871
ttaagatttgaa

SEQ ID NO: 284538 - DNA, 12 bp, Artificial Sequence
  Oligonucleotide primer for the detection of SNP TSC0011872
aaccctcaatcc

SEQ ID NO: 284539 - DNA, 12 bp, Artificial Sequence
  Oligonucleotide primer for the detection of SNP TSC0011872
tgttttaggtta

SEQ ID NO: 284540 - DNA, 12 bp, Artificial Sequence
  Oligonucleotide primer for the detection of SNP TSC0011874
caataaatcttt

SEQ ID NO: 284541 - DNA, 12 bp, Artificial Sequence
  Oligonucleotide primer for the detection of SNP TSC0011874
ttaataattaga

SEQ ID NO: 284542 - DNA, 12 bp, Artificial Sequence
  Oligonucleotide primer for the detection of SNP TSC0011875
aaacacaaaaaa

SEQ ID NO: 284543 - DNA, 12 bp, Artificial Sequence
  Oligonucleotide primer for the detection of SNP TSC0011875
atgtaatgtttt

SEQ ID NO: 284544 - DNA, 12 bp, Artificial Sequence
  Oligonucleotide primer for the detection of SNP TSC0011875
atgtaatgtttc

SEQ ID NO: 284545 - DNA, 12 bp, Artificial Sequence
  Oligonucleotide primer for the detection of SNP TSC0011875
atataatattcc

SEQ ID NO: 284546 - DNA, 12 bp, Artificial Sequence
  Oligonucleotide primer for the detection of SNP TSC0011875
gagtatagggag

SEQ ID NO: 284547 - DNA, 12 bp, Artificial Sequence
  Oligonucleotide primer for the detection of SNP TSC0011876
aaaaatctacct

SEQ ID NO: 284548 - DNA, 12 bp, Artificial Sequence
  Oligonucleotide primer for the detection of SNP TSC0011876
tatgatttattg

SEQ ID NO: 284549 - DNA, 12 bp, Artificial Sequence
  Oligonucleotide primer for the detection of SNP TSC0011876
tacgatttattg

SEQ ID NO: 284550 - DNA, 12 bp, Artificial Sequence
  Oligonucleotide primer for the detection of SNP TSC0011876
cacaacccacta

SEQ ID NO: 284551 - DNA, 12 bp, Artificial Sequence
  Oligonucleotide primer for the detection of SNP TSC0011876
cacgacccacta

SEQ ID NO: 284552 - DNA, 12 bp, Artificial Sequence
  Oligonucleotide primer for the detection of SNP TSC0011876
ggaagtttgttt

SEQ ID NO: 284553 - DNA, 12 bp, Artificial Sequence
  Oligonucleotide primer for the detection of SNP TSC0011877
tcaacacaacac

SEQ ID NO: 284554 - DNA, 12 bp, Artificial Sequence
  Oligonucleotide primer for the detection of SNP TSC0011878
ctttcttaattt

SEQ ID NO: 284555 - DNA, 12 bp, Artificial Sequence
  Oligonucleotide primer for the detection of SNP TSC0011878
tatttgattggt

SEQ ID NO: 284556 - DNA, 12 bp, Artificial Sequence
  Oligonucleotide primer for the detection of SNP TSC0011878
tattcgattggt

SEQ ID NO: 284557 - DNA, 12 bp, Artificial Sequence
  Oligonucleotide primer for the detection of SNP TSC0011878
acacccaattaa

SEQ ID NO: 284558 - DNA, 12 bp, Artificial Sequence
  Oligonucleotide primer for the detection of SNP TSC0011878
acacccgattaa

SEQ ID NO: 284559 - DNA, 12 bp, Artificial Sequence
  Oligonucleotide primer for the detection of SNP TSC0011878
ttttttggtttt

SEQ ID NO: 284560 - DNA, 12 bp, Artificial Sequence
  Oligonucleotide primer for the detection of SNP TSC0011878
ttttttggtttc

SEQ ID NO: 284561 - DNA, 12 bp, Artificial Sequence
  Oligonucleotide primer for the detection of SNP TSC0011879
atttctacatta

SEQ ID NO: 284562 - DNA, 12 bp, Artificial Sequence
  Oligonucleotide primer for the detection of SNP TSC0011879
tgggaagtgtat

SEQ ID NO: 284563 - DNA, 12 bp, Artificial Sequence
  Oligonucleotide primer for the detection of SNP TSC0011879
tgggaagcgtat

SEQ ID NO: 284564 - DNA, 12 bp, Artificial Sequence
  Oligonucleotide primer for the detection of SNP TSC0011879
ctaaaaaacata

SEQ ID NO: 284565 - DNA, 12 bp, Artificial Sequence
  Oligonucleotide primer for the detection of SNP TSC0011879
ctaaaaaacgta

SEQ ID NO: 284566 - DNA, 12 bp, Artificial Sequence
  Oligonucleotide primer for the detection of SNP TSC0011879
gtttttgtatta

SEQ ID NO: 284567 - DNA, 12 bp, Artificial Sequence
  Oligonucleotide primer for the detection of SNP TSC0011880
tatatctttcca

SEQ ID NO: 284568 - DNA, 12 bp, Artificial Sequence
  Oligonucleotide primer for the detection of SNP TSC0011880
tatatctttccg

SEQ ID NO: 284569 - DNA, 12 bp, Artificial Sequence
  Oligonucleotide primer for the detection of SNP TSC0011880
agttatatggga

SEQ ID NO: 284570 - DNA, 12 bp, Artificial Sequence
  Oligonucleotide primer for the detection of SNP TSC0011880
atcacataaaaa

SEQ ID NO: 284571 - DNA, 12 bp, Artificial Sequence
  Oligonucleotide primer for the detection of SNP TSC0011880
ttgtgttttttt

SEQ ID NO: 284572 - DNA, 12 bp, Artificial Sequence
  Oligonucleotide primer for the detection of SNP TSC0011880
ttgtgttttttc

SEQ ID NO: 284573 - DNA, 12 bp, Artificial Sequence
  Oligonucleotide primer for the detection of SNP TSC0011881
aaatttataatt

SEQ ID NO: 284574 - DNA, 12 bp, Artificial Sequence
  Oligonucleotide primer for the detection of SNP TSC0011881
aaatttataatc

SEQ ID NO: 284575 - DNA, 12 bp, Artificial Sequence
  Oligonucleotide primer for the detection of SNP TSC0011881
aaacttacaatc

SEQ ID NO: 284576 - DNA, 12 bp, Artificial Sequence
  Oligonucleotide primer for the detection of SNP TSC0011882
ttgttgattaag

SEQ ID NO: 284577 - DNA, 12 bp, Artificial Sequence
  Oligonucleotide primer for the detection of SNP TSC0011885
taaacaaaacct

SEQ ID NO: 284578 - DNA, 12 bp, Artificial Sequence
  Oligonucleotide primer for the detection of SNP TSC0011885
ttataaggattt

SEQ ID NO: 284579 - DNA, 12 bp, Artificial Sequence
  Oligonucleotide primer for the detection of SNP TSC0011885
tcataaaaactt

SEQ ID NO: 284580 - DNA, 12 bp, Artificial Sequence
  Oligonucleotide primer for the detection of SNP TSC0011885
tgggtagagttt

SEQ ID NO: 284581 - DNA, 12 bp, Artificial Sequence
  Oligonucleotide primer for the detection of SNP TSC0011886
aatctaaaattt

SEQ ID NO: 284582 - DNA, 12 bp, Artificial Sequence
  Oligonucleotide primer for the detection of SNP TSC0011886
agtttttgttta

SEQ ID NO: 284583 - DNA, 12 bp, Artificial Sequence
  Oligonucleotide primer for the detection of SNP TSC0011886
aatttttatcca

SEQ ID NO: 284584 - DNA, 12 bp, Artificial Sequence
  Oligonucleotide primer for the detection of SNP TSC0011886
aatttaaagttt

SEQ ID NO: 284585 - DNA, 12 bp, Artificial Sequence
  Oligonucleotide primer for the detection of SNP TSC0011887
accaacctaacc

SEQ ID NO: 284586 - DNA, 12 bp, Artificial Sequence
  Oligonucleotide primer for the detection of SNP TSC0011887
tggtaggggtgg

SEQ ID NO: 284587 - DNA, 12 bp, Artificial Sequence
  Oligonucleotide primer for the detection of SNP TSC0011889
acactaaaaatc

SEQ ID NO: 284588 - DNA, 12 bp, Artificial Sequence
  Oligonucleotide primer for the detection of SNP TSC0011889
aatagatatttt

SEQ ID NO: 284589 - DNA, 12 bp, Artificial Sequence
  Oligonucleotide primer for the detection of SNP TSC0011889
aatagatatttc

SEQ ID NO: 284590 - DNA, 12 bp, Artificial Sequence
  Oligonucleotide primer for the detection of SNP TSC0011889
attaaaaatttt

SEQ ID NO: 284591 - DNA, 12 bp, Artificial Sequence
  Oligonucleotide primer for the detection of SNP TSC0011890
acatacaaacta

SEQ ID NO: 284592 - DNA, 12 bp, Artificial Sequence
  Oligonucleotide primer for the detection of SNP TSC0011890
ctattatccttt

SEQ ID NO: 284593 - DNA, 12 bp, Artificial Sequence
  Oligonukleotid-Primer
gtatgtaaatta

SEQ ID NO: 284594 - DNA, 12 bp, Artificial Sequence
  Oligonucleotide primer for the detection of SNP TSC0011893
ctccctccctcc

SEQ ID NO: 284595 - DNA, 12 bp, Artificial Sequence
  Oligonucleotide primer for the detection of SNP TSC0011893
aggatggaaaga

SEQ ID NO: 284596 - DNA, 12 bp, Artificial Sequence
  Oligonucleotide primer for the detection of SNP TSC0011894
tccctccctccc

SEQ ID NO: 284597 - DNA, 12 bp, Artificial Sequence
  Oligonukleotid-Primer
gaggaaggatgg

SEQ ID NO: 284598 - DNA, 12 bp, Artificial Sequence
  Oligonucleotide primer for the detection of SNP TSC0011895
cctccctccctc

SEQ ID NO: 284599 - DNA, 12 bp, Artificial Sequence
  Oligonucleotide primer for the detection of SNP TSC0011895
ggaggaaggatg

SEQ ID NO: 284600 - DNA, 12 bp, Artificial Sequence
  Oligonucleotide primer for the detection of SNP TSC0011896
caacctcccaac

SEQ ID NO: 284601 - DNA, 12 bp, Artificial Sequence
  Oligonukleotid-Primer
ggttaagtggga

SEQ ID NO: 284602 - DNA, 12 bp, Artificial Sequence
  Oligonucleotide primer for the detection of SNP TSC0011897
atcaacaacaaa

SEQ ID NO: 284603 - DNA, 12 bp, Artificial Sequence
  Oligonucleotide primer for the detection of SNP TSC0011897
ttgttttaaatg

SEQ ID NO: 284604 - DNA, 12 bp, Artificial Sequence
  Oligonucleotide primer for the detection of SNP TSC0011897
ctattttaaata

SEQ ID NO: 284605 - DNA, 12 bp, Artificial Sequence
  Oligonucleotide primer for the detection of SNP TSC0011897
ttaatagtaaat

SEQ ID NO: 284606 - DNA, 12 bp, Artificial Sequence
  Oligonucleotide primer for the detection of SNP TSC0011899
caactactccca

SEQ ID NO: 284607 - DNA, 12 bp, Artificial Sequence
  Oligonucleotide primer for the detection of SNP TSC0011899
gggaggttgggg

SEQ ID NO: 284608 - DNA, 12 bp, Artificial Sequence
  Oligonucleotide primer for the detection of SNP TSC0011899
tagttgttttta

SEQ ID NO: 284609 - DNA, 12 bp, Artificial Sequence
  Oligonukleotid-Primer
taattccaacta

SEQ ID NO: 284610 - DNA, 12 bp, Artificial Sequence
  Oligonucleotide primer for the detection of SNP TSC0011901
aattttagttat

SEQ ID NO: 284611 - DNA, 12 bp, Artificial Sequence
  Oligonucleotide primer for the detection of SNP TSC0011902
acttcattatcc

SEQ ID NO: 284612 - DNA, 12 bp, Artificial Sequence
  Oligonucleotide primer for the detection of SNP TSC0011902
ttttgaaatatg

SEQ ID NO: 284613 - DNA, 12 bp, Artificial Sequence
  Oligonucleotide primer for the detection of SNP TSC0011902
ttttaaaacata

SEQ ID NO: 284614 - DNA, 12 bp, Artificial Sequence
  Oligonucleotide primer for the detection of SNP TSC0011904
actccctaccta

SEQ ID NO: 284615 - DNA, 12 bp, Artificial Sequence
  Oligonucleotide primer for the detection of SNP TSC0011904
tttgaaaggtgg

SEQ ID NO: 284616 - DNA, 12 bp, Artificial Sequence
  Oligonucleotide primer for the detection of SNP TSC0011904
cctaaaaaataa

SEQ ID NO: 284617 - DNA, 12 bp, Artificial Sequence
  Oligonucleotide primer for the detection of SNP TSC0011904
tgttttttgttt

SEQ ID NO: 284618 - DNA, 12 bp, Artificial Sequence
  Oligonucleotide primer for the detection of SNP TSC0011905
acaaaataaaat

SEQ ID NO: 284619 - DNA, 12 bp, Artificial Sequence
  Oligonucleotide primer for the detection of SNP TSC0011905
tatgataagaga

SEQ ID NO: 284620 - DNA, 12 bp, Artificial Sequence
  Oligonucleotide primer for the detection of SNP TSC0011906
attgttaaaatg

SEQ ID NO: 284621 - DNA, 12 bp, Artificial Sequence
  Oligonucleotide primer for the detection of SNP TSC0011906
actaccaaaata

SEQ ID NO: 284622 - DNA, 12 bp, Artificial Sequence
  Oligonucleotide primer for the detection of SNP TSC0011906
aatggaggggat

SEQ ID NO: 284623 - DNA, 12 bp, Artificial Sequence
  Oligonucleotide primer for the detection of SNP TSC0011906
aacggaggggat

SEQ ID NO: 284624 - DNA, 12 bp, Artificial Sequence
  Oligonucleotide primer for the detection of SNP TSC0011907
taaatacctaaa

SEQ ID NO: 284625 - DNA, 12 bp, Artificial Sequence
  Oligonucleotide primer for the detection of SNP TSC0011907
aacttttcccaa

SEQ ID NO: 284626 - DNA, 12 bp, Artificial Sequence
  Oligonucleotide primer for the detection of SNP TSC0011907
tttgaatatttg

SEQ ID NO: 284627 - DNA, 12 bp, Artificial Sequence
  Oligonucleotide primer for the detection of SNP TSC0011908
aaccatccctta

SEQ ID NO: 284628 - DNA, 12 bp, Artificial Sequence
  Oligonucleotide primer for the detection of SNP TSC0011908
ttagatggtaga

SEQ ID NO: 284629 - DNA, 12 bp, Artificial Sequence
  Oligonucleotide primer for the detection of SNP TSC0011908
ggttattttttg

SEQ ID NO: 284630 - DNA, 12 bp, Artificial Sequence
  Oligonucleotide primer for the detection of SNP TSC0011911
tatacttcaact

SEQ ID NO: 284631 - DNA, 12 bp, Artificial Sequence
  Oligonucleotide primer for the detection of SNP TSC0011911
tatacttcgact

SEQ ID NO: 284632 - DNA, 12 bp, Artificial Sequence
  Oligonucleotide primer for the detection of SNP TSC0011911
ttggtagtagaa

SEQ ID NO: 284633 - DNA, 12 bp, Artificial Sequence
  Oligonucleotide primer for the detection of SNP TSC0011911
taacaataaaaa

SEQ ID NO: 284634 - DNA, 12 bp, Artificial Sequence
  Oligonucleotide primer for the detection of SNP TSC0011911
tgtgttttggtt

SEQ ID NO: 284635 - DNA, 12 bp, Artificial Sequence
  Oligonucleotide primer for the detection of SNP TSC0011911
tgtgtttcggtt

SEQ ID NO: 284636 - DNA, 12 bp, Artificial Sequence
  Oligonucleotide primer for the detection of SNP TSC0011912
caactctatttc

SEQ ID NO: 284637 - DNA, 12 bp, Artificial Sequence
  Oligonucleotide primer for the detection of SNP TSC0011912
tttatagtagag

SEQ ID NO: 284638 - DNA, 12 bp, Artificial Sequence
  Oligonucleotide primer for the detection of SNP TSC0011912
ttcacaacaaaa

SEQ ID NO: 284639 - DNA, 12 bp, Artificial Sequence
  Oligonucleotide primer for the detection of SNP TSC0011913
ataaattaaaac

SEQ ID NO: 284640 - DNA, 12 bp, Artificial Sequence
  Oligonucleotide primer for the detection of SNP TSC0011913
tgttgggtatgg

SEQ ID NO: 284641 - DNA, 12 bp, Artificial Sequence
  Oligonucleotide primer for the detection of SNP TSC0011913
tactaaatataa

SEQ ID NO: 284642 - DNA, 12 bp, Artificial Sequence
  Oligonucleotide primer for the detection of SNP TSC0011913
atgggttagaat

SEQ ID NO: 284643 - DNA, 12 bp, Artificial Sequence
  Oligonucleotide primer for the detection of SNP TSC0011914
ttttatgaatga

SEQ ID NO: 284644 - DNA, 12 bp, Artificial Sequence
  Oligonucleotide primer for the detection of SNP TSC0011915
aaaccaaaactc

SEQ ID NO: 284645 - DNA, 12 bp, Artificial Sequence
  Oligonucleotide primer for the detection of SNP TSC0011915
ctacaactacaa

SEQ ID NO: 284646 - DNA, 12 bp, Artificial Sequence
  Oligonucleotide primer for the detection of SNP TSC0011915
gggttaggattt

SEQ ID NO: 284647 - DNA, 12 bp, Artificial Sequence
  Oligonucleotide primer for the detection of SNP TSC0011916
tattacataact

SEQ ID NO: 284648 - DNA, 12 bp, Artificial Sequence
  Oligonucleotide primer for the detection of SNP TSC0011916
gtgttgaattgg

SEQ ID NO: 284649 - DNA, 12 bp, Artificial Sequence
  Oligonucleotide primer for the detection of SNP TSC0011917
attattacttct

SEQ ID NO: 284650 - DNA, 12 bp, Artificial Sequence
  Oligonucleotide primer for the detection of SNP TSC0011918
aaaccccaaata

SEQ ID NO: 284651 - DNA, 12 bp, Artificial Sequence
  Oligonucleotide primer for the detection of SNP TSC0011918
ttagtattttgt

SEQ ID NO: 284652 - DNA, 12 bp, Artificial Sequence
  Oligonucleotide primer for the detection of SNP TSC0011918
taataccttata

SEQ ID NO: 284653 - DNA, 12 bp, Artificial Sequence
  Oligonucleotide primer for the detection of SNP TSC0011920
acaaattaaata

SEQ ID NO: 284654 - DNA, 12 bp, Artificial Sequence
  Oligonucleotide primer for the detection of SNP TSC0011920
ggttagaaatat

SEQ ID NO: 284655 - DNA, 12 bp, Artificial Sequence
  Oligonucleotide primer for the detection of SNP TSC0011920
ggttagaaatac

SEQ ID NO: 284656 - DNA, 12 bp, Artificial Sequence
  Oligonucleotide primer for the detection of SNP TSC0011920
attaaaaacaca

SEQ ID NO: 284657 - DNA, 12 bp, Artificial Sequence
  Oligonucleotide primer for the detection of SNP TSC0011920
attaaaaacacg

SEQ ID NO: 284658 - DNA, 12 bp, Artificial Sequence
  Oligonucleotide primer for the detection of SNP TSC0011920
taaattagatat

SEQ ID NO: 284659 - DNA, 12 bp, Artificial Sequence
  Oligonucleotide primer for the detection of SNP TSC0011921
ttccaaaacact

SEQ ID NO: 284660 - DNA, 12 bp, Artificial Sequence
  Oligonucleotide primer for the detection of SNP TSC0011921
ttccgaaacact

SEQ ID NO: 284661 - DNA, 12 bp, Artificial Sequence
  Oligonucleotide primer for the detection of SNP TSC0011921
agaatttagaga

SEQ ID NO: 284662 - DNA, 12 bp, Artificial Sequence
  Oligonucleotide primer for the detection of SNP TSC0011922
accacatcacac

SEQ ID NO: 284663 - DNA, 12 bp, Artificial Sequence
  Oligonucleotide primer for the detection of SNP TSC0011922
ttatagtatatg

SEQ ID NO: 284664 - DNA, 12 bp, Artificial Sequence
  Oligonucleotide primer for the detection of SNP TSC0011922
ttatagtatacg

SEQ ID NO: 284665 - DNA, 12 bp, Artificial Sequence
  Oligonucleotide primer for the detection of SNP TSC0011926
aacttacttttt

SEQ ID NO: 284666 - DNA, 12 bp, Artificial Sequence
  Oligonucleotide primer for the detection of SNP TSC0011926
gtgttataatgt

SEQ ID NO: 284667 - DNA, 12 bp, Artificial Sequence
  Oligonucleotide primer for the detection of SNP TSC0011926
atactataatat

SEQ ID NO: 284668 - DNA, 12 bp, Artificial Sequence
  Oligonucleotide primer for the detection of SNP TSC0011926
aatttatttttt

SEQ ID NO: 284669 - DNA, 12 bp, Artificial Sequence
  Oligonucleotide primer for the detection of SNP TSC0011927
taataatatctt

SEQ ID NO: 284670 - DNA, 12 bp, Artificial Sequence
  Oligonucleotide primer for the detection of SNP TSC0011927
tagttaagaata

SEQ ID NO: 284671 - DNA, 12 bp, Artificial Sequence
  Oligonucleotide primer for the detection of SNP TSC0011928
aaaatctcaata

SEQ ID NO: 284672 - DNA, 12 bp, Artificial Sequence
  Oligonucleotide primer for the detection of SNP TSC0011928
attgaatttttg

SEQ ID NO: 284673 - DNA, 12 bp, Artificial Sequence
  Oligonucleotide primer for the detection of SNP TSC0011928
ctaaatctttaa

SEQ ID NO: 284674 - DNA, 12 bp, Artificial Sequence
  Oligonucleotide primer for the detection of SNP TSC0011928
aattttaatatt

SEQ ID NO: 284675 - DNA, 12 bp, Artificial Sequence
  Oligonucleotide primer for the detection of SNP TSC0011934
ctctcatatata

SEQ ID NO: 284676 - DNA, 12 bp, Artificial Sequence
  Oligonucleotide primer for the detection of SNP TSC0011934
gtgtatttgtgt

SEQ ID NO: 284677 - DNA, 12 bp, Artificial Sequence
  Oligonucleotide primer for the detection of SNP TSC0011934
tatatacctata

SEQ ID NO: 284678 - DNA, 12 bp, Artificial Sequence
  Oligonucleotide primer for the detection of SNP TSC0011934
tttttatgtgtg

SEQ ID NO: 284679 - DNA, 12 bp, Artificial Sequence
  Oligonucleotide primer for the detection of SNP TSC0011935
aaacctaaaact

SEQ ID NO: 284680 - DNA, 12 bp, Artificial Sequence
  Oligonucleotide primer for the detection of SNP TSC0011935
ttaaaaaatggg

SEQ ID NO: 284681 - DNA, 12 bp, Artificial Sequence
  Oligonucleotide primer for the detection of SNP TSC0011941
aacaactactat

SEQ ID NO: 284682 - DNA, 12 bp, Artificial Sequence
  Oligonucleotide primer for the detection of SNP TSC0011941
gagaaatgataa

SEQ ID NO: 284683 - DNA, 12 bp, Artificial Sequence
  Oligonucleotide primer for the detection of SNP TSC0011941
aaaaaataataa

SEQ ID NO: 284684 - DNA, 12 bp, Artificial Sequence
  Oligonucleotide primer for the detection of SNP TSC0011942
ttcataaactat

SEQ ID NO: 284685 - DNA, 12 bp, Artificial Sequence
  Oligonucleotide primer for the detection of SNP TSC0011942
aaaaatttttaa

SEQ ID NO: 284686 - DNA, 12 bp, Artificial Sequence
  Oligonucleotide primer for the detection of SNP TSC0011944
tatctctatttt

SEQ ID NO: 284687 - DNA, 12 bp, Artificial Sequence
  Oligonucleotide primer for the detection of SNP TSC0011944
agtggtagaaag

SEQ ID NO: 284688 - DNA, 12 bp, Artificial Sequence
  Oligonucleotide primer for the detection of SNP TSC0011944
tgtttttatttt

SEQ ID NO: 284689 - DNA, 12 bp, Artificial Sequence
  Oligonucleotide primer for the detection of SNP TSC0011947
actaaatttccc

SEQ ID NO: 284690 - DNA, 12 bp, Artificial Sequence
  Oligonucleotide primer for the detection of SNP TSC0011947
atttttttgtat

SEQ ID NO: 284691 - DNA, 12 bp, Artificial Sequence
  Oligonucleotide primer for the detection of SNP TSC0011948
gagttgagattg

SEQ ID NO: 284692 - DNA, 12 bp, Artificial Sequence
  Oligonucleotide primer for the detection of SNP TSC0011948
gagtcgagattg

SEQ ID NO: 284693 - DNA, 12 bp, Artificial Sequence
  Oligonucleotide primer for the detection of SNP TSC0011948
gagttgagatcg

SEQ ID NO: 284694 - DNA, 12 bp, Artificial Sequence
  Oligonucleotide primer for the detection of SNP TSC0011948
gagtcgagatcg

SEQ ID NO: 284695 - DNA, 12 bp, Artificial Sequence
  Oligonucleotide primer for the detection of SNP TSC0011949
aatattttaccc

SEQ ID NO: 284696 - DNA, 12 bp, Artificial Sequence
  Oligonucleotide primer for the detection of SNP TSC0011949
taaagaagtata

SEQ ID NO: 284697 - DNA, 12 bp, Artificial Sequence
  Oligonucleotide primer for the detection of SNP TSC0011950
cctttcaatact

SEQ ID NO: 284698 - DNA, 12 bp, Artificial Sequence
  Oligonucleotide primer for the detection of SNP TSC0011950
gttgtaagattg

SEQ ID NO: 284699 - DNA, 12 bp, Artificial Sequence
  Oligonucleotide primer for the detection of SNP TSC0011952
acttctattctt

SEQ ID NO: 284700 - DNA, 12 bp, Artificial Sequence
  Oligonucleotide primer for the detection of SNP TSC0011952
tttgattaaaag

SEQ ID NO: 284701 - DNA, 12 bp, Artificial Sequence
  Oligonucleotide primer for the detection of SNP TSC0011952
ttcgattaaaag

SEQ ID NO: 284702 - DNA, 12 bp, Artificial Sequence
  Oligonucleotide primer for the detection of SNP TSC0011953
taaaaatacaaa

SEQ ID NO: 284703 - DNA, 12 bp, Artificial Sequence
  Oligonucleotide primer for the detection of SNP TSC0011953
ggatggggtttg

SEQ ID NO: 284704 - DNA, 12 bp, Artificial Sequence
  Oligonucleotide primer for the detection of SNP TSC0011953
aataaaacctaa

SEQ ID NO: 284705 - DNA, 12 bp, Artificial Sequence
  Oligonucleotide primer for the detection of SNP TSC0011953
aaaagtataaat

SEQ ID NO: 284706 - DNA, 12 bp, Artificial Sequence
  Oligonucleotide primer for the detection of SNP TSC0011954
caataatcaaca

SEQ ID NO: 284707 - DNA, 12 bp, Artificial Sequence
  Oligonucleotide primer for the detection of SNP TSC0011954
tttatatttttt

SEQ ID NO: 284708 - DNA, 12 bp, Artificial Sequence
  Oligonucleotide primer for the detection of SNP TSC0011954
ttcatatttctc

SEQ ID NO: 284709 - DNA, 12 bp, Artificial Sequence
  Oligonucleotide primer for the detection of SNP TSC0011954
tagtgattaata

SEQ ID NO: 284710 - DNA, 12 bp, Artificial Sequence
  Oligonucleotide primer for the detection of SNP TSC0011955
tattttgtattg

SEQ ID NO: 284711 - DNA, 12 bp, Artificial Sequence
  Oligonucleotide primer for the detection of SNP TSC0011956
aataaattaaaa

SEQ ID NO: 284712 - DNA, 12 bp, Artificial Sequence
  Oligonucleotide primer for the detection of SNP TSC0011956
gtttaaatatta

SEQ ID NO: 284713 - DNA, 12 bp, Artificial Sequence
  Oligonucleotide primer for the detection of SNP TSC0011956
actcaaatatca

SEQ ID NO: 284714 - DNA, 12 bp, Artificial Sequence
  Oligonukleotid-Primer
gataaattaaag

SEQ ID NO: 284715 - DNA, 12 bp, Artificial Sequence
  Oligonucleotide primer for the detection of SNP TSC0011965
tacaaattaatt

SEQ ID NO: 284716 - DNA, 12 bp, Artificial Sequence
  Oligonucleotide primer for the detection of SNP TSC0011965
atattttaataa

SEQ ID NO: 284717 - DNA, 12 bp, Artificial Sequence
  Oligonucleotide primer for the detection of SNP TSC0011966
caaaaaattccc

SEQ ID NO: 284718 - DNA, 12 bp, Artificial Sequence
  Oligonukleotid-Primer
ttttgtttggtt

SEQ ID NO: 284719 - DNA, 12 bp, Artificial Sequence
  Oligonucleotide primer for the detection of SNP TSC0011966
tttcgtttggtt

SEQ ID NO: 284720 - DNA, 12 bp, Artificial Sequence
  Oligonucleotide primer for the detection of SNP TSC0011966
cttcacttaact

SEQ ID NO: 284721 - DNA, 12 bp, Artificial Sequence
  Oligonucleotide primer for the detection of SNP TSC0011966
cttcgcttaact

SEQ ID NO: 284722 - DNA, 12 bp, Artificial Sequence
  Oligonucleotide primer for the detection of SNP TSC0011966
tagggaattttt

SEQ ID NO: 284723 - DNA, 12 bp, Artificial Sequence
  Oligonucleotide primer for the detection of SNP TSC0011967
gaattatttttt

SEQ ID NO: 284724 - DNA, 12 bp, Artificial Sequence
  Oligonucleotide primer for the detection of SNP TSC0011967
aaaccacccccc

SEQ ID NO: 284725 - DNA, 12 bp, Artificial Sequence
  Oligonucleotide primer for the detection of SNP TSC0011967
aaaaaaggggat

SEQ ID NO: 284726 - DNA, 12 bp, Artificial Sequence
  Oligonucleotide primer for the detection of SNP TSC0011968
aattatttttta

SEQ ID NO: 284727 - DNA, 12 bp, Artificial Sequence
  Oligonucleotide primer for the detection of SNP TSC0011968
aaccacccccca

SEQ ID NO: 284728 - DNA, 12 bp, Artificial Sequence
  Oligonucleotide primer for the detection of SNP TSC0011968
aaaaaaaagggg

SEQ ID NO: 284729 - DNA, 12 bp, Artificial Sequence
  Oligonucleotide primer for the detection of SNP TSC0011969
aaactattaaaa

SEQ ID NO: 284730 - DNA, 12 bp, Artificial Sequence
  Oligonucleotide primer for the detection of SNP TSC0011969
gagtttgtgaat

SEQ ID NO: 284731 - DNA, 12 bp, Artificial Sequence
  Oligonucleotide primer for the detection of SNP TSC0011969
aaacttataaat

SEQ ID NO: 284732 - DNA, 12 bp, Artificial Sequence
  Oligonucleotide primer for the detection of SNP TSC0011969
agttgttgaggt

SEQ ID NO: 284733 - DNA, 12 bp, Artificial Sequence
  Oligonucleotide primer for the detection of SNP TSC0011970
taacttccaact

SEQ ID NO: 284734 - DNA, 12 bp, Artificial Sequence
  Oligonucleotide primer for the detection of SNP TSC0011970
tgtataaattgg

SEQ ID NO: 284735 - DNA, 12 bp, Artificial Sequence
  Oligonucleotide primer for the detection of SNP TSC0011971
aatattacatta

SEQ ID NO: 284736 - DNA, 12 bp, Artificial Sequence
  Oligonucleotide primer for the detection of SNP TSC0011971
attatagtaata

SEQ ID NO: 284737 - DNA, 12 bp, Artificial Sequence
  Oligonucleotide primer for the detection of SNP TSC0011971
ccataacaataa

SEQ ID NO: 284738 - DNA, 12 bp, Artificial Sequence
  Oligonucleotide primer for the detection of SNP TSC0011971
tggtgttatatt

SEQ ID NO: 284739 - DNA, 12 bp, Artificial Sequence
  Oligonucleotide primer for the detection of SNP TSC0011976
acaacaaaaaca

SEQ ID NO: 284740 - DNA, 12 bp, Artificial Sequence
  Oligonucleotide primer for the detection of SNP TSC0011976
tttaagttttta

SEQ ID NO: 284741 - DNA, 12 bp, Artificial Sequence
  Oligonucleotide primer for the detection of SNP TSC0011976
aactcccaaaaa

SEQ ID NO: 284742 - DNA, 12 bp, Artificial Sequence
  Oligonucleotide primer for the detection of SNP TSC0011976
ggtagtaggggt

SEQ ID NO: 284743 - DNA, 12 bp, Artificial Sequence
  Oligonucleotide primer for the detection of SNP TSC0011980
ataaacaataaa

SEQ ID NO: 284744 - DNA, 12 bp, Artificial Sequence
  Oligonucleotide primer for the detection of SNP TSC0011980
tattgttttttt

SEQ ID NO: 284745 - DNA, 12 bp, Artificial Sequence
  Oligonucleotide primer for the detection of SNP TSC0011980
tcactatctttc

SEQ ID NO: 284746 - DNA, 12 bp, Artificial Sequence
  Oligonucleotide primer for the detection of SNP TSC0011980
gggatgaatagt

SEQ ID NO: 284747 - DNA, 12 bp, Artificial Sequence
  Oligonucleotide primer for the detection of SNP TSC0011982
caaaaataaact

SEQ ID NO: 284748 - DNA, 12 bp, Artificial Sequence
  Oligonucleotide primer for the detection of SNP TSC0011982
taattaatggta

SEQ ID NO: 284749 - DNA, 12 bp, Artificial Sequence
  Oligonucleotide primer for the detection of SNP TSC0011983
acaatatattat

SEQ ID NO: 284750 - DNA, 12 bp, Artificial Sequence
  Oligonucleotide primer for the detection of SNP TSC0011983
gttaagataatg

SEQ ID NO: 284751 - DNA, 12 bp, Artificial Sequence
  Oligonucleotide primer for the detection of SNP TSC0011984
actacaattttt

SEQ ID NO: 284752 - DNA, 12 bp, Artificial Sequence
  Oligonucleotide primer for the detection of SNP TSC0011984
agtagttttatg

SEQ ID NO: 284753 - DNA, 12 bp, Artificial Sequence
  Oligonucleotide primer for the detection of SNP TSC0011985
aacttttaaaaa

SEQ ID NO: 284754 - DNA, 12 bp, Artificial Sequence
  Oligonucleotide primer for the detection of SNP TSC0011985
ttttgattagtt

SEQ ID NO: 284755 - DNA, 12 bp, Artificial Sequence
  Oligonucleotide primer for the detection of SNP TSC0011985
ttctaattaatt

SEQ ID NO: 284756 - DNA, 12 bp, Artificial Sequence
  Oligonucleotide primer for the detection of SNP TSC0011985
agagtttttaaa

SEQ ID NO: 284757 - DNA, 12 bp, Artificial Sequence
  Oligonucleotide primer for the detection of SNP TSC0011986
attttgttgttt

SEQ ID NO: 284758 - DNA, 12 bp, Artificial Sequence
  Oligonucleotide primer for the detection of SNP TSC0011986
accttactacct

SEQ ID NO: 284759 - DNA, 12 bp, Artificial Sequence
  Oligonucleotide primer for the detection of SNP TSC0011986
gttgaggtaaga

SEQ ID NO: 284760 - DNA, 12 bp, Artificial Sequence
  Oligonucleotide primer for the detection of SNP TSC0011987
aaaatttacaaa

SEQ ID NO: 284761 - DNA, 12 bp, Artificial Sequence
  Oligonucleotide primer for the detection of SNP TSC0011987
aaaaatttatta

SEQ ID NO: 284762 - DNA, 12 bp, Artificial Sequence
  Oligonucleotide primer for the detection of SNP TSC0011987
aaaaacttacca

SEQ ID NO: 284763 - DNA, 12 bp, Artificial Sequence
  Oligonucleotide primer for the detection of SNP TSC0011987
gaagtttataag

SEQ ID NO: 284764 - DNA, 12 bp, Artificial Sequence
  Oligonucleotide primer for the detection of SNP TSC0011990
tactttccatcc

SEQ ID NO: 284765 - DNA, 12 bp, Artificial Sequence
  Oligonucleotide primer for the detection of SNP TSC0011990
tattttaatagt

SEQ ID NO: 284766 - DNA, 12 bp, Artificial Sequence
  Oligonucleotide primer for the detection of SNP TSC0011990
acctcaataaca

SEQ ID NO: 284767 - DNA, 12 bp, Artificial Sequence
  Oligonucleotide primer for the detection of SNP TSC0011991
caaaaaaaaacc

SEQ ID NO: 284768 - DNA, 12 bp, Artificial Sequence
  Oligonucleotide primer for the detection of SNP TSC0011991
tttggtggtttg

SEQ ID NO: 284769 - DNA, 12 bp, Artificial Sequence
  Oligonucleotide primer for the detection of SNP TSC0011992
tttataaatagt

SEQ ID NO: 284770 - DNA, 12 bp, Artificial Sequence
  Oligonucleotide primer for the detection of SNP TSC0011992
tttataaatagc

SEQ ID NO: 284771 - DNA, 12 bp, Artificial Sequence
  Oligonucleotide primer for the detection of SNP TSC0011992
ttcacaaacaac

SEQ ID NO: 284772 - DNA, 12 bp, Artificial Sequence
  Oligonucleotide primer for the detection of SNP TSC0011992
gaaaatggtaag

SEQ ID NO: 284773 - DNA, 12 bp, Artificial Sequence
  Oligonucleotide primer for the detection of SNP TSC0011993
aaattttccttt

SEQ ID NO: 284774 - DNA, 12 bp, Artificial Sequence
  Oligonucleotide primer for the detection of SNP TSC0011993
ttttttattgtg

SEQ ID NO: 284775 - DNA, 12 bp, Artificial Sequence
  Oligonucleotide primer for the detection of SNP TSC0011994
ctaattccttaa

SEQ ID NO: 284776 - DNA, 12 bp, Artificial Sequence
  Oligonucleotide primer for the detection of SNP TSC0011994
atttagagaaat

SEQ ID NO: 284777 - DNA, 12 bp, Artificial Sequence
  Oligonucleotide primer for the detection of SNP TSC0011994
acccaaaaaaat

SEQ ID NO: 284778 - DNA, 12 bp, Artificial Sequence
  Oligonucleotide primer for the detection of SNP TSC0011994
ttgattttttga

SEQ ID NO: 284779 - DNA, 12 bp, Artificial Sequence
  Oligonucleotide primer for the detection of SNP TSC0011995
acactccctaaa

SEQ ID NO: 284780 - DNA, 12 bp, Artificial Sequence
  Oligonucleotide primer for the detection of SNP TSC0011995
tattgttatatt

SEQ ID NO: 284781 - DNA, 12 bp, Artificial Sequence
  Oligonucleotide primer for the detection of SNP TSC0011995
tattgttatatc

SEQ ID NO: 284782 - DNA, 12 bp, Artificial Sequence
  Oligonucleotide primer for the detection of SNP TSC0011995
tactactacacc

SEQ ID NO: 284783 - DNA, 12 bp, Artificial Sequence
  Oligonucleotide primer for the detection of SNP TSC0011995
gtattttttgag

SEQ ID NO: 284784 - DNA, 12 bp, Artificial Sequence
  Oligonucleotide primer for the detection of SNP TSC0011996
ttccttcccaaa

SEQ ID NO: 284785 - DNA, 12 bp, Artificial Sequence
  Oligonucleotide primer for the detection of SNP TSC0011996
ttccttcccgaa

SEQ ID NO: 284786 - DNA, 12 bp, Artificial Sequence
  Oligonucleotide primer for the detection of SNP TSC0011996
ctccctccacct

SEQ ID NO: 284787 - DNA, 12 bp, Artificial Sequence
  Oligonucleotide primer for the detection of SNP TSC0011996
ttttttttcggg

SEQ ID NO: 284788 - DNA, 12 bp, Artificial Sequence
  Oligonucleotide primer for the detection of SNP TSC0011997
gttttttttttc

SEQ ID NO: 284789 - DNA, 12 bp, Artificial Sequence
  Oligonucleotide primer for the detection of SNP TSC0012000
accaaaataaac

SEQ ID NO: 284790 - DNA, 12 bp, Artificial Sequence
  Oligonucleotide primer for the detection of SNP TSC0012000
tgggtttatgta

SEQ ID NO: 284791 - DNA, 12 bp, Artificial Sequence
  Oligonucleotide primer for the detection of SNP TSC0012001
cttattttatct

SEQ ID NO: 284792 - DNA, 12 bp, Artificial Sequence
  Oligonucleotide primer for the detection of SNP TSC0012001
gtgagagggggg

SEQ ID NO: 284793 - DNA, 12 bp, Artificial Sequence
  Oligonucleotide primer for the detection of SNP TSC0012005
aattaacaaacc

SEQ ID NO: 284794 - DNA, 12 bp, Artificial Sequence
  Oligonucleotide primer for the detection of SNP TSC0012005
gattaggttatg

SEQ ID NO: 284795 - DNA, 12 bp, Artificial Sequence
  Oligonucleotide primer for the detection of SNP TSC0012005
gattaggttacg

SEQ ID NO: 284796 - DNA, 12 bp, Artificial Sequence
  Oligonucleotide primer for the detection of SNP TSC0012006
aaactcataaat

SEQ ID NO: 284797 - DNA, 12 bp, Artificial Sequence
  Oligonucleotide primer for the detection of SNP TSC0012006
aataattgagta

SEQ ID NO: 284798 - DNA, 12 bp, Artificial Sequence
  Oligonucleotide primer for the detection of SNP TSC0012006
aagtttatggat

SEQ ID NO: 284799 - DNA, 12 bp, Artificial Sequence
  Oligonucleotide primer for the detection of SNP TSC0012007
aatcatatatcc

SEQ ID NO: 284800 - DNA, 12 bp, Artificial Sequence
  Oligonucleotide primer for the detection of SNP TSC0012007
ttttaattgtga

SEQ ID NO: 284801 - DNA, 12 bp, Artificial Sequence
  Oligonucleotide primer for the detection of SNP TSC0012010
tccctcttcctt

SEQ ID NO: 284802 - DNA, 12 bp, Artificial Sequence
  Oligonucleotide primer for the detection of SNP TSC0012010
ttattaaaaaaa

SEQ ID NO: 284803 - DNA, 12 bp, Artificial Sequence
  Oligonucleotide primer for the detection of SNP TSC0012011
aaatctacatat

SEQ ID NO: 284804 - DNA, 12 bp, Artificial Sequence
  Oligonucleotide primer for the detection of SNP TSC0012011
aattttggagaa

SEQ ID NO: 284805 - DNA, 12 bp, Artificial Sequence
  Oligonucleotide primer for the detection of SNP TSC0012012
atttctaaatta

SEQ ID NO: 284806 - DNA, 12 bp, Artificial Sequence
  Oligonucleotide primer for the detection of SNP TSC0012012
tttttagaaatt

SEQ ID NO: 284807 - DNA, 12 bp, Artificial Sequence
  Oligonucleotide primer for the detection of SNP TSC0012012
atttttgagttg

SEQ ID NO: 284808 - DNA, 12 bp, Artificial Sequence
  Oligonucleotide primer for the detection of SNP TSC0012013
aaaaaataactt

SEQ ID NO: 284809 - DNA, 12 bp, Artificial Sequence
  Oligonucleotide primer for the detection of SNP TSC0012013
gtatatttttta

SEQ ID NO: 284810 - DNA, 12 bp, Artificial Sequence
  Oligonucleotide primer for the detection of SNP TSC0012013
atacatctccca

SEQ ID NO: 284811 - DNA, 12 bp, Artificial Sequence
  Oligonukleotid-Primer
gagagatagttt

SEQ ID NO: 284812 - DNA, 12 bp, Artificial Sequence
  Oligonucleotide primer for the detection of SNP TSC0012014
cacatcaaatcc

SEQ ID NO: 284813 - DNA, 12 bp, Artificial Sequence
  Oligonucleotide primer for the detection of SNP TSC0012014
agggtgtaagag

SEQ ID NO: 284814 - DNA, 12 bp, Artificial Sequence
  Oligonucleotide primer for the detection of SNP TSC0012014
agggcgtaagag

SEQ ID NO: 284815 - DNA, 12 bp, Artificial Sequence
  Oligonukleotid-Primer
tttcccaaattt

SEQ ID NO: 284816 - DNA, 12 bp, Artificial Sequence
  Oligonucleotide primer for the detection of SNP TSC0012017
tggattagttag

SEQ ID NO: 284817 - DNA, 12 bp, Artificial Sequence
  Oligonucleotide primer for the detection of SNP TSC0012018
taatactcaaat

SEQ ID NO: 284818 - DNA, 12 bp, Artificial Sequence
  Oligonucleotide primer for the detection of SNP TSC0012018
aggagaggtaga

SEQ ID NO: 284819 - DNA, 12 bp, Artificial Sequence
  Oligonucleotide primer for the detection of SNP TSC0012018
tgatatttaagt

SEQ ID NO: 284820 - DNA, 12 bp, Artificial Sequence
  Oligonucleotide primer for the detection of SNP TSC0012019
ataatactcaaa

SEQ ID NO: 284821 - DNA, 12 bp, Artificial Sequence
  Oligonucleotide primer for the detection of SNP TSC0012019
gagaggtagata

SEQ ID NO: 284822 - DNA, 12 bp, Artificial Sequence
  Oligonucleotide primer for the detection of SNP TSC0012019
atgatatttaag

SEQ ID NO: 284823 - DNA, 12 bp, Artificial Sequence
  Oligonucleotide primer for the detection of SNP TSC0012020
ttactccatcac

SEQ ID NO: 284824 - DNA, 12 bp, Artificial Sequence
  Oligonucleotide primer for the detection of SNP TSC0012020
ttactccatcgc

SEQ ID NO: 284825 - DNA, 12 bp, Artificial Sequence
  Oligonucleotide primer for the detection of SNP TSC0012020
ttactccgtcac

SEQ ID NO: 284826 - DNA, 12 bp, Artificial Sequence
  Oligonucleotide primer for the detection of SNP TSC0012020
ttactccgtcgc

SEQ ID NO: 284827 - DNA, 12 bp, Artificial Sequence
  Oligonucleotide primer for the detection of SNP TSC0012020
tattttagtttg

SEQ ID NO: 284828 - DNA, 12 bp, Artificial Sequence
  Oligonucleotide primer for the detection of SNP TSC0012021
aacaaaaaatat

SEQ ID NO: 284829 - DNA, 12 bp, Artificial Sequence
  Oligonucleotide primer for the detection of SNP TSC0012021
gtttgtagagat

SEQ ID NO: 284830 - DNA, 12 bp, Artificial Sequence
  Oligonucleotide primer for the detection of SNP TSC0012021
atctataaaaat

SEQ ID NO: 284831 - DNA, 12 bp, Artificial Sequence
  Oligonucleotide primer for the detection of SNP TSC0012021
taaaaggtgttt

SEQ ID NO: 284832 - DNA, 12 bp, Artificial Sequence
  Oligonucleotide primer for the detection of SNP TSC0012022
caaaatcaaaaa

SEQ ID NO: 284833 - DNA, 12 bp, Artificial Sequence
  Oligonucleotide primer for the detection of SNP TSC0012022
cgaaatcaaaaa

SEQ ID NO: 284834 - DNA, 12 bp, Artificial Sequence
  Oligonucleotide primer for the detection of SNP TSC0012022
ttaggttggttt

SEQ ID NO: 284835 - DNA, 12 bp, Artificial Sequence
  Oligonucleotide primer for the detection of SNP TSC0012022
ccaaattaatct

SEQ ID NO: 284836 - DNA, 12 bp, Artificial Sequence
  Oligonucleotide primer for the detection of SNP TSC0012022
tgaggttaggag

SEQ ID NO: 284837 - DNA, 12 bp, Artificial Sequence
  Oligonucleotide primer for the detection of SNP TSC0012022
cgaggttaggag

SEQ ID NO: 284838 - DNA, 12 bp, Artificial Sequence
  Oligonucleotide primer for the detection of SNP TSC0012025
ttacacatttct

SEQ ID NO: 284839 - DNA, 12 bp, Artificial Sequence
  Oligonucleotide primer for the detection of SNP TSC0012025
ttgagaggttaa

SEQ ID NO: 284840 - DNA, 12 bp, Artificial Sequence
  Oligonucleotide primer for the detection of SNP TSC0012026
aactacatataa

SEQ ID NO: 284841 - DNA, 12 bp, Artificial Sequence
  Oligonucleotide primer for the detection of SNP TSC0012026
aactacgtataa

SEQ ID NO: 284842 - DNA, 12 bp, Artificial Sequence
  Oligonucleotide primer for the detection of SNP TSC0012026
taagtatatttt

SEQ ID NO: 284843 - DNA, 12 bp, Artificial Sequence
  Oligonucleotide primer for the detection of SNP TSC0012026
attatgtataat

SEQ ID NO: 284844 - DNA, 12 bp, Artificial Sequence
  Oligonucleotide primer for the detection of SNP TSC0012026
attacgtataat

SEQ ID NO: 284845 - DNA, 12 bp, Artificial Sequence
  Oligonucleotide primer for the detection of SNP TSC0012028
tttggttagatg

SEQ ID NO: 284846 - DNA, 12 bp, Artificial Sequence
  Oligonucleotide primer for the detection of SNP TSC0012028
tttggttagacg

SEQ ID NO: 284847 - DNA, 12 bp, Artificial Sequence
  Oligonucleotide primer for the detection of SNP TSC0012028
tttaaccaaaca

SEQ ID NO: 284848 - DNA, 12 bp, Artificial Sequence
  Oligonucleotide primer for the detection of SNP TSC0012028
tttaaccaaacg

SEQ ID NO: 284849 - DNA, 12 bp, Artificial Sequence
  Oligonucleotide primer for the detection of SNP TSC0012028
ggtatgagttat

SEQ ID NO: 284850 - DNA, 12 bp, Artificial Sequence
  Oligonucleotide primer for the detection of SNP TSC0012029
ctaaccttaaaa

SEQ ID NO: 284851 - DNA, 12 bp, Artificial Sequence
  Oligonucleotide primer for the detection of SNP TSC0012029
ggaggttaaggt

SEQ ID NO: 284852 - DNA, 12 bp, Artificial Sequence
  Oligonucleotide primer for the detection of SNP TSC0012029
ggaggttaaggc

SEQ ID NO: 284853 - DNA, 12 bp, Artificial Sequence
  Oligonucleotide primer for the detection of SNP TSC0012029
aaaaaccaaaac

SEQ ID NO: 284854 - DNA, 12 bp, Artificial Sequence
  Oligonucleotide primer for the detection of SNP TSC0012029
ttgattttgaga

SEQ ID NO: 284855 - DNA, 12 bp, Artificial Sequence
  Oligonucleotide primer for the detection of SNP TSC0012030
caccaccacacc

SEQ ID NO: 284856 - DNA, 12 bp, Artificial Sequence
  Oligonucleotide primer for the detection of SNP TSC0012030
caccaccacgcc

SEQ ID NO: 284857 - DNA, 12 bp, Artificial Sequence
  Oligonucleotide primer for the detection of SNP TSC0012030
caccaccgcacc

SEQ ID NO: 284858 - DNA, 12 bp, Artificial Sequence
  Oligonucleotide primer for the detection of SNP TSC0012030
cgccaccacacc

SEQ ID NO: 284859 - DNA, 12 bp, Artificial Sequence
  Oligonucleotide primer for the detection of SNP TSC0012030
caccaccgcgcc

SEQ ID NO: 284860 - DNA, 12 bp, Artificial Sequence
  Oligonucleotide primer for the detection of SNP TSC0012030
cgccaccacgcc

SEQ ID NO: 284861 - DNA, 12 bp, Artificial Sequence
  Oligonucleotide primer for the detection of SNP TSC0012030
cgccaccgcacc

SEQ ID NO: 284862 - DNA, 12 bp, Artificial Sequence
  Oligonucleotide primer for the detection of SNP TSC0012030
cgccaccgcgcc

SEQ ID NO: 284863 - DNA, 12 bp, Artificial Sequence
  Oligonucleotide primer for the detection of SNP TSC0012030
atgaaaaattag

SEQ ID NO: 284864 - DNA, 12 bp, Artificial Sequence
  Oligonucleotide primer for the detection of SNP TSC0012030
tgttattgtgtt

SEQ ID NO: 284865 - DNA, 12 bp, Artificial Sequence
  Oligonucleotide primer for the detection of SNP TSC0012030
cgttattgtgtt

SEQ ID NO: 284866 - DNA, 12 bp, Artificial Sequence
  Oligonucleotide primer for the detection of SNP TSC0012030
tgttatcgtgtt

SEQ ID NO: 284867 - DNA, 12 bp, Artificial Sequence
  Oligonucleotide primer for the detection of SNP TSC0012030
tgttattgcgtt

SEQ ID NO: 284868 - DNA, 12 bp, Artificial Sequence
  Oligonukleotid-Primer
cgttatcgtgtt

SEQ ID NO: 284869 - DNA, 12 bp, Artificial Sequence
  Oligonucleotide primer for the detection of SNP TSC0012030
cgttattgcgtt

SEQ ID NO: 284870 - DNA, 12 bp, Artificial Sequence
  Oligonucleotide primer for the detection of SNP TSC0012030
tgttatcgcgtt

SEQ ID NO: 284871 - DNA, 12 bp, Artificial Sequence
  Oligonucleotide primer for the detection of SNP TSC0012030
cgttatcgcgtt

SEQ ID NO: 284872 - DNA, 12 bp, Artificial Sequence
  Oligonucleotide primer for the detection of SNP TSC0012031
taatatctcttt

SEQ ID NO: 284873 - DNA, 12 bp, Artificial Sequence
  Oligonucleotide primer for the detection of SNP TSC0012031
ttatatttggaa

SEQ ID NO: 284874 - DNA, 12 bp, Artificial Sequence
  Oligonucleotide primer for the detection of SNP TSC0012032
aacaaaattatc

SEQ ID NO: 284875 - DNA, 12 bp, Artificial Sequence
  Oligonucleotide primer for the detection of SNP TSC0012032
tgtgaagtggga

SEQ ID NO: 284876 - DNA, 12 bp, Artificial Sequence
  Oligonucleotide primer for the detection of SNP TSC0012033
ccacacccttcc

SEQ ID NO: 284877 - DNA, 12 bp, Artificial Sequence
  Oligonucleotide primer for the detection of SNP TSC0012033
tttttgagtttg

SEQ ID NO: 284878 - DNA, 12 bp, Artificial Sequence
  Oligonucleotide primer for the detection of SNP TSC0012034
aaaacaacatac

SEQ ID NO: 284879 - DNA, 12 bp, Artificial Sequence
  Oligonucleotide primer for the detection of SNP TSC0012034
aaaacgacatac

SEQ ID NO: 284880 - DNA, 12 bp, Artificial Sequence
  Oligonucleotide primer for the detection of SNP TSC0012038
taattattaaaa

SEQ ID NO: 284881 - DNA, 12 bp, Artificial Sequence
  Oligonucleotide primer for the detection of SNP TSC0012038
tattaggttata

SEQ ID NO: 284882 - DNA, 12 bp, Artificial Sequence
  Oligonucleotide primer for the detection of SNP TSC0012040
aaccaaacctta

SEQ ID NO: 284883 - DNA, 12 bp, Artificial Sequence
  Oligonucleotide primer for the detection of SNP TSC0012040
ttattttctctt

SEQ ID NO: 284884 - DNA, 12 bp, Artificial Sequence
  Oligonucleotide primer for the detection of SNP TSC0012040
ggttaggttttg

SEQ ID NO: 284885 - DNA, 12 bp, Artificial Sequence
  Oligonucleotide primer for the detection of SNP TSC0012041
caacttttcttt

SEQ ID NO: 284886 - DNA, 12 bp, Artificial Sequence
  Oligonucleotide primer for the detection of SNP TSC0012041
gtggttaaatgt

SEQ ID NO: 284887 - DNA, 12 bp, Artificial Sequence
  Oligonucleotide primer for the detection of SNP TSC0012042
ttaaaaaaattt

SEQ ID NO: 284888 - DNA, 12 bp, Artificial Sequence
  Oligonucleotide primer for the detection of SNP TSC0012042
aaaatttttatg

SEQ ID NO: 284889 - DNA, 12 bp, Artificial Sequence
  Oligonucleotide primer for the detection of SNP TSC0012043
aaactaactact

SEQ ID NO: 284890 - DNA, 12 bp, Artificial Sequence
  Oligonucleotide primer for the detection of SNP TSC0012043
ggtttttaggtg

SEQ ID NO: 284891 - DNA, 12 bp, Artificial Sequence
  Oligonucleotide primer for the detection of SNP TSC0012044
caaaatttaccc

SEQ ID NO: 284892 - DNA, 12 bp, Artificial Sequence
  Oligonucleotide primer for the detection of SNP TSC0012044
gaaatttttaga

SEQ ID NO: 284893 - DNA, 12 bp, Artificial Sequence
  Oligonucleotide primer for the detection of SNP TSC0012045
cttacccttaaa

SEQ ID NO: 284894 - DNA, 12 bp, Artificial Sequence
  Oligonucleotide primer for the detection of SNP TSC0012045
tgtatggtttta

SEQ ID NO: 284895 - DNA, 12 bp, Artificial Sequence
  Oligonucleotide primer for the detection of SNP TSC0012045
cgtatggtttta

SEQ ID NO: 284896 - DNA, 12 bp, Artificial Sequence
  Oligonucleotide primer for the detection of SNP TSC0012045
cacataatttca

SEQ ID NO: 284897 - DNA, 12 bp, Artificial Sequence
  Oligonucleotide primer for the detection of SNP TSC0012045
cgcataatttca

SEQ ID NO: 284898 - DNA, 12 bp, Artificial Sequence
  Oligonucleotide primer for the detection of SNP TSC0012045
tttgtttttggg

SEQ ID NO: 284899 - DNA, 12 bp, Artificial Sequence
  Oligonucleotide primer for the detection of SNP TSC0012046
ggtgggaatttt

SEQ ID NO: 284900 - DNA, 12 bp, Artificial Sequence
  Oligonucleotide primer for the detection of SNP TSC0012046
aataaaaatttc

SEQ ID NO: 284901 - DNA, 12 bp, Artificial Sequence
  Oligonucleotide primer for the detection of SNP TSC0012046
aatatgatttgg

SEQ ID NO: 284902 - DNA, 12 bp, Artificial Sequence
  Oligonucleotide primer for the detection of SNP TSC0012047
tcatcactaaat

SEQ ID NO: 284903 - DNA, 12 bp, Artificial Sequence
  Oligonucleotide primer for the detection of SNP TSC0012047
aggtgttgaata

SEQ ID NO: 284904 - DNA, 12 bp, Artificial Sequence
  Oligonucleotide primer for the detection of SNP TSC0012047
aaatactaaaca

SEQ ID NO: 284905 - DNA, 12 bp, Artificial Sequence
  Oligonucleotide primer for the detection of SNP TSC0012047
ttattattaaat

SEQ ID NO: 284906 - DNA, 12 bp, Artificial Sequence
  Oligonucleotide primer for the detection of SNP TSC0012048
atatatatttaa

SEQ ID NO: 284907 - DNA, 12 bp, Artificial Sequence
  Oligonucleotide primer for the detection of SNP TSC0012049
cccactaaataa

SEQ ID NO: 284908 - DNA, 12 bp, Artificial Sequence
  Oligonucleotide primer for the detection of SNP TSC0012049
tttttagattat

SEQ ID NO: 284909 - DNA, 12 bp, Artificial Sequence
  Oligonucleotide primer for the detection of SNP TSC0012049
tttctaaaccat

SEQ ID NO: 284910 - DNA, 12 bp, Artificial Sequence
  Oligonucleotide primer for the detection of SNP TSC0012049
gttttattaggt

SEQ ID NO: 284911 - DNA, 12 bp, Artificial Sequence
  Oligonucleotide primer for the detection of SNP TSC0012050
catttatacttt

SEQ ID NO: 284912 - DNA, 12 bp, Artificial Sequence
  Oligonucleotide primer for the detection of SNP TSC0012050
tagtagttatta

SEQ ID NO: 284913 - DNA, 12 bp, Artificial Sequence
  Oligonucleotide primer for the detection of SNP TSC0012053
attacccaaatt

SEQ ID NO: 284914 - DNA, 12 bp, Artificial Sequence
  Oligonucleotide primer for the detection of SNP TSC0012053
attgtattattg

SEQ ID NO: 284915 - DNA, 12 bp, Artificial Sequence
  Oligonucleotide primer for the detection of SNP TSC0012053
atcgtattattg

SEQ ID NO: 284916 - DNA, 12 bp, Artificial Sequence
  Oligonucleotide primer for the detection of SNP TSC0012053
atcacaccatta

SEQ ID NO: 284917 - DNA, 12 bp, Artificial Sequence
  Oligonucleotide primer for the detection of SNP TSC0012053
atcgcaccatta

SEQ ID NO: 284918 - DNA, 12 bp, Artificial Sequence
  Oligonucleotide primer for the detection of SNP TSC0012055
tacatttttaat

SEQ ID NO: 284919 - DNA, 12 bp, Artificial Sequence
  Oligonucleotide primer for the detection of SNP TSC0012055
ttgagtatgaat

SEQ ID NO: 284920 - DNA, 12 bp, Artificial Sequence
  Oligonucleotide primer for the detection of SNP TSC0012055
gtatttttggtt

SEQ ID NO: 284921 - DNA, 12 bp, Artificial Sequence
  Oligonucleotide primer for the detection of SNP TSC0012055
gtatttttggtc

SEQ ID NO: 284922 - DNA, 12 bp, Artificial Sequence
  Oligonucleotide primer for the detection of SNP TSC0012056
aatacaacaact

SEQ ID NO: 284923 - DNA, 12 bp, Artificial Sequence
  Oligonucleotide primer for the detection of SNP TSC0012056
aatacgacaact

SEQ ID NO: 284924 - DNA, 12 bp, Artificial Sequence
  Oligonucleotide primer for the detection of SNP TSC0012057
ctaccaaataac

SEQ ID NO: 284925 - DNA, 12 bp, Artificial Sequence
  Oligonucleotide primer for the detection of SNP TSC0012057
atggtagttggg

SEQ ID NO: 284926 - DNA, 12 bp, Artificial Sequence
  Oligonucleotide primer for the detection of SNP TSC0012057
acggtagttggg

SEQ ID NO: 284927 - DNA, 12 bp, Artificial Sequence
  Oligonucleotide primer for the detection of SNP TSC0012058
gagatatttttt

SEQ ID NO: 284928 - DNA, 12 bp, Artificial Sequence
  Oligonucleotide primer for the detection of SNP TSC0012058
aaaacatctctt

SEQ ID NO: 284929 - DNA, 12 bp, Artificial Sequence
  Oligonucleotide primer for the detection of SNP TSC0012058
aaggtaaggtaa

SEQ ID NO: 284930 - DNA, 12 bp, Artificial Sequence
  Oligonucleotide primer for the detection of SNP TSC0012059
taaagttttagt

SEQ ID NO: 284931 - DNA, 12 bp, Artificial Sequence
  Oligonucleotide primer for the detection of SNP TSC0012059
caaaaccccaat

SEQ ID NO: 284932 - DNA, 12 bp, Artificial Sequence
  Oligonucleotide primer for the detection of SNP TSC0012059
ttaaaaagtaaa

SEQ ID NO: 284933 - DNA, 12 bp, Artificial Sequence
  Oligonucleotide primer for the detection of SNP TSC0012060
aaagagatttta

SEQ ID NO: 284934 - DNA, 12 bp, Artificial Sequence
  Oligonucleotide primer for the detection of SNP TSC0012062
taataatacaaa

SEQ ID NO: 284935 - DNA, 12 bp, Artificial Sequence
  Oligonucleotide primer for the detection of SNP TSC0012062
gtgtttttgata

SEQ ID NO: 284936 - DNA, 12 bp, Artificial Sequence
  Oligonucleotide primer for the detection of SNP TSC0012062
gcgtttttgata

SEQ ID NO: 284937 - DNA, 12 bp, Artificial Sequence
  Oligonucleotide primer for the detection of SNP TSC0012062
acatccctaaca

SEQ ID NO: 284938 - DNA, 12 bp, Artificial Sequence
  Oligonucleotide primer for the detection of SNP TSC0012062
acgtccctaaca

SEQ ID NO: 284939 - DNA, 12 bp, Artificial Sequence
  Oligonucleotide primer for the detection of SNP TSC0012062
gatgatataggt

SEQ ID NO: 284940 - DNA, 12 bp, Artificial Sequence
  Oligonucleotide primer for the detection of SNP TSC0012063
aaaaaataatat

SEQ ID NO: 284941 - DNA, 12 bp, Artificial Sequence
  Oligonucleotide primer for the detection of SNP TSC0012063
gtttattttatt

SEQ ID NO: 284942 - DNA, 12 bp, Artificial Sequence
  Oligonucleotide primer for the detection of SNP TSC0012065
tcttacaaaaaa

SEQ ID NO: 284943 - DNA, 12 bp, Artificial Sequence
  Oligonucleotide primer for the detection of SNP TSC0012065
atgggagttgga

SEQ ID NO: 284944 - DNA, 12 bp, Artificial Sequence
  Oligonucleotide primer for the detection of SNP TSC0012065
ataaaaactaaa

SEQ ID NO: 284945 - DNA, 12 bp, Artificial Sequence
  Oligonucleotide primer for the detection of SNP TSC0012065
ttttgtaaaggg

SEQ ID NO: 284946 - DNA, 12 bp, Artificial Sequence
  Oligonucleotide primer for the detection of SNP TSC0012066
aacattctatac

SEQ ID NO: 284947 - DNA, 12 bp, Artificial Sequence
  Oligonucleotide primer for the detection of SNP TSC0012066
agggagtgtttt

SEQ ID NO: 284948 - DNA, 12 bp, Artificial Sequence
  Oligonucleotide primer for the detection of SNP TSC0012066
aaaaaatatcct

SEQ ID NO: 284949 - DNA, 12 bp, Artificial Sequence
  Oligonucleotide primer for the detection of SNP TSC0012066
ggtattttgtgt

SEQ ID NO: 284950 - DNA, 12 bp, Artificial Sequence
  Oligonucleotide primer for the detection of SNP TSC0012067
ctttccccaaac

SEQ ID NO: 284951 - DNA, 12 bp, Artificial Sequence
  Oligonucleotide primer for the detection of SNP TSC0012067
tgtgggagtaga

SEQ ID NO: 284952 - DNA, 12 bp, Artificial Sequence
  Oligonucleotide primer for the detection of SNP TSC0012069
atcaaaaacatc

SEQ ID NO: 284953 - DNA, 12 bp, Artificial Sequence
  Oligonucleotide primer for the detection of SNP TSC0012069
gagtaatttgaa

SEQ ID NO: 284954 - DNA, 12 bp, Artificial Sequence
  Oligonucleotide primer for the detection of SNP TSC0012070
attatccaaacc

SEQ ID NO: 284955 - DNA, 12 bp, Artificial Sequence
  Oligonucleotide primer for the detection of SNP TSC0012070
attttgtgatta

SEQ ID NO: 284956 - DNA, 12 bp, Artificial Sequence
  Oligonucleotide primer for the detection of SNP TSC0012071
agaagaaattat

SEQ ID NO: 284957 - DNA, 12 bp, Artificial Sequence
  Oligonucleotide primer for the detection of SNP TSC0012071
aatggaattgta

SEQ ID NO: 284958 - DNA, 12 bp, Artificial Sequence
  Oligonucleotide primer for the detection of SNP TSC0012072
aaatccacttac

SEQ ID NO: 284959 - DNA, 12 bp, Artificial Sequence
  Oligonucleotide primer for the detection of SNP TSC0012072
aaaaaaaattgg

SEQ ID NO: 284960 - DNA, 12 bp, Artificial Sequence
  Oligonucleotide primer for the detection of SNP TSC0012072
gggtttatttat

SEQ ID NO: 284961 - DNA, 12 bp, Artificial Sequence
  Oligonucleotide primer for the detection of SNP TSC0012073
ctcctattttca

SEQ ID NO: 284962 - DNA, 12 bp, Artificial Sequence
  Oligonucleotide primer for the detection of SNP TSC0012073
taggttttattt

SEQ ID NO: 284963 - DNA, 12 bp, Artificial Sequence
  Oligonucleotide primer for the detection of SNP TSC0012073
taaactttattc

SEQ ID NO: 284964 - DNA, 12 bp, Artificial Sequence
  Oligonucleotide primer for the detection of SNP TSC0012075
actcaaataatt

SEQ ID NO: 284965 - DNA, 12 bp, Artificial Sequence
  Oligonucleotide primer for the detection of SNP TSC0012075
ttggtttattta

SEQ ID NO: 284966 - DNA, 12 bp, Artificial Sequence
  Oligonucleotide primer for the detection of SNP TSC0012081
catattactcac

SEQ ID NO: 284967 - DNA, 12 bp, Artificial Sequence
  Oligonucleotide primer for the detection of SNP TSC0012081
agagtaagatgg

SEQ ID NO: 284968 - DNA, 12 bp, Artificial Sequence
  Oligonucleotide primer for the detection of SNP TSC0012082
catatacataca

SEQ ID NO: 284969 - DNA, 12 bp, Artificial Sequence
  Oligonucleotide primer for the detection of SNP TSC0012082
aggaaattatat

SEQ ID NO: 284970 - DNA, 12 bp, Artificial Sequence
  Oligonucleotide primer for the detection of SNP TSC0012083
aaacttaacttc

SEQ ID NO: 284971 - DNA, 12 bp, Artificial Sequence
  Oligonucleotide primer for the detection of SNP TSC0012083
agggaaagataa

SEQ ID NO: 284972 - DNA, 12 bp, Artificial Sequence
  Oligonucleotide primer for the detection of SNP TSC0012083
aaatttggtttt

SEQ ID NO: 284973 - DNA, 12 bp, Artificial Sequence
  Oligonucleotide primer for the detection of SNP TSC0012084
aatctcttaata

SEQ ID NO: 284974 - DNA, 12 bp, Artificial Sequence
  Oligonucleotide primer for the detection of SNP TSC0012084
agatgggttaag

SEQ ID NO: 284975 - DNA, 12 bp, Artificial Sequence
  Oligonucleotide primer for the detection of SNP TSC0012084
taaaccaaaaaa

SEQ ID NO: 284976 - DNA, 12 bp, Artificial Sequence
  Oligonucleotide primer for the detection of SNP TSC0012084
gattttttggtg

SEQ ID NO: 284977 - DNA, 12 bp, Artificial Sequence
  Oligonucleotide primer for the detection of SNP TSC0012086
attaaatattcc

SEQ ID NO: 284978 - DNA, 12 bp, Artificial Sequence
  Oligonucleotide primer for the detection of SNP TSC0012086
atttttagagtg

SEQ ID NO: 284979 - DNA, 12 bp, Artificial Sequence
  Oligonucleotide primer for the detection of SNP TSC0012086
acttctaaaata

SEQ ID NO: 284980 - DNA, 12 bp, Artificial Sequence
  Oligonucleotide primer for the detection of SNP TSC0012086
gttaagtgtttt

SEQ ID NO: 284981 - DNA, 12 bp, Artificial Sequence
  Oligonukleotid-Primer
gttaagtgtttc

SEQ ID NO: 284982 - DNA, 12 bp, Artificial Sequence
  Oligonucleotide primer for the detection of SNP TSC0012088
atttacaaaaca

SEQ ID NO: 284983 - DNA, 12 bp, Artificial Sequence
  Oligonucleotide primer for the detection of SNP TSC0012088
tataatggatgt

SEQ ID NO: 284984 - DNA, 12 bp, Artificial Sequence
  Oligonucleotide primer for the detection of SNP TSC0012088
ataaatataaaa

SEQ ID NO: 284985 - DNA, 12 bp, Artificial Sequence
  Oligonucleotide primer for the detection of SNP TSC0012088
gtttgtaaggta

SEQ ID NO: 284986 - DNA, 12 bp, Artificial Sequence
  Oligonucleotide primer for the detection of SNP TSC0012089
caacacattctc

SEQ ID NO: 284987 - DNA, 12 bp, Artificial Sequence
  Oligonucleotide primer for the detection of SNP TSC0012089
caacgcattctc

SEQ ID NO: 284988 - DNA, 12 bp, Artificial Sequence
  Oligonucleotide primer for the detection of SNP TSC0012089
attttagatgaa

SEQ ID NO: 284989 - DNA, 12 bp, Artificial Sequence
  Oligonucleotide primer for the detection of SNP TSC0012090
ttttacccacaa

SEQ ID NO: 284990 - DNA, 12 bp, Artificial Sequence
  Oligonucleotide primer for the detection of SNP TSC0012090
atatttttagtt

SEQ ID NO: 284991 - DNA, 12 bp, Artificial Sequence
  Oligonucleotide primer for the detection of SNP TSC0012090
atatttctaatt

SEQ ID NO: 284992 - DNA, 12 bp, Artificial Sequence
  Oligonucleotide primer for the detection of SNP TSC0012091
acataaaataat

SEQ ID NO: 284993 - DNA, 12 bp, Artificial Sequence
  Oligonucleotide primer for the detection of SNP TSC0012091
ggaatttattta

SEQ ID NO: 284994 - DNA, 12 bp, Artificial Sequence
  Oligonucleotide primer for the detection of SNP TSC0012092
aactcctaatac

SEQ ID NO: 284995 - DNA, 12 bp, Artificial Sequence
  Oligonucleotide primer for the detection of SNP TSC0012092
aaatgtttaggg

SEQ ID NO: 284996 - DNA, 12 bp, Artificial Sequence
  Oligonucleotide primer for the detection of SNP TSC0012092
aatacttaaaaa

SEQ ID NO: 284997 - DNA, 12 bp, Artificial Sequence
  Oligonucleotide primer for the detection of SNP TSC0012092
agtttttaatgt

SEQ ID NO: 284998 - DNA, 12 bp, Artificial Sequence
  Oligonucleotide primer for the detection of SNP TSC0012092
agtttttaatgc

SEQ ID NO: 284999 - DNA, 12 bp, Artificial Sequence
  Oligonucleotide primer for the detection of SNP TSC0012093
aaccctaaattt

SEQ ID NO: 285000 - DNA, 12 bp, Artificial Sequence
  Oligonucleotide primer for the detection of SNP TSC0012093
ttagtagtaaaa

SEQ ID NO: 285001 - DNA, 12 bp, Artificial Sequence
  Oligonucleotide primer for the detection of SNP TSC0012094
aaatccaaacct

SEQ ID NO: 285002 - DNA, 12 bp, Artificial Sequence
  Oligonucleotide primer for the detection of SNP TSC0012094
tttttattaata

SEQ ID NO: 285003 - DNA, 12 bp, Artificial Sequence
  Oligonucleotide primer for the detection of SNP TSC0012095
ctcccaactact

SEQ ID NO: 285004 - DNA, 12 bp, Artificial Sequence
  Oligonucleotide primer for the detection of SNP TSC0012097
ttcatcataata

SEQ ID NO: 285005 - DNA, 12 bp, Artificial Sequence
  Oligonucleotide primer for the detection of SNP TSC0012097
atgtattatttt

SEQ ID NO: 285006 - DNA, 12 bp, Artificial Sequence
  Oligonucleotide primer for the detection of SNP TSC0012097
atacaccatctc

SEQ ID NO: 285007 - DNA, 12 bp, Artificial Sequence
  Oligonucleotide primer for the detection of SNP TSC0012097
tttattataatg

SEQ ID NO: 285008 - DNA, 12 bp, Artificial Sequence
  Oligonucleotide primer for the detection of SNP TSC0012098
aaaaaataaacc

SEQ ID NO: 285009 - DNA, 12 bp, Artificial Sequence
  Oligonucleotide primer for the detection of SNP TSC0012098
ttgtagtgatta

SEQ ID NO: 285010 - DNA, 12 bp, Artificial Sequence
  Oligonucleotide primer for the detection of SNP TSC0012098
tcgtagtgatta

SEQ ID NO: 285011 - DNA, 12 bp, Artificial Sequence
  Oligonucleotide primer for the detection of SNP TSC0012099
tttaattcattt

SEQ ID NO: 285012 - DNA, 12 bp, Artificial Sequence
  Oligonucleotide primer for the detection of SNP TSC0012099
gaaatttattta

SEQ ID NO: 285013 - DNA, 12 bp, Artificial Sequence
  Oligonucleotide primer for the detection of SNP TSC0012102
aacctcctatct

SEQ ID NO: 285014 - DNA, 12 bp, Artificial Sequence
  Oligonucleotide primer for the detection of SNP TSC0012102
taagttatagga

SEQ ID NO: 285015 - DNA, 12 bp, Artificial Sequence
  Oligonucleotide primer for the detection of SNP TSC0012105
ccctataaccca

SEQ ID NO: 285016 - DNA, 12 bp, Artificial Sequence
  Oligonucleotide primer for the detection of SNP TSC0012105
agtagttggatt

SEQ ID NO: 285017 - DNA, 12 bp, Artificial Sequence
  Oligonucleotide primer for the detection of SNP TSC0012105
aactaaactaaa

SEQ ID NO: 285018 - DNA, 12 bp, Artificial Sequence
  Oligonucleotide primer for the detection of SNP TSC0012105
tttgtgatttat

SEQ ID NO: 285019 - DNA, 12 bp, Artificial Sequence
  Oligonucleotide primer for the detection of SNP TSC0012105
tttgtgatttac

SEQ ID NO: 285020 - DNA, 12 bp, Artificial Sequence
  Oligonucleotide primer for the detection of SNP TSC0012107
ttacaaataaac

SEQ ID NO: 285021 - DNA, 12 bp, Artificial Sequence
  Oligonucleotide primer for the detection of SNP TSC0012107
ttataaattaaa

SEQ ID NO: 285022 - DNA, 12 bp, Artificial Sequence
  Oligonucleotide primer for the detection of SNP TSC0012110
ttaaaaactaca

SEQ ID NO: 285023 - DNA, 12 bp, Artificial Sequence
  Oligonucleotide primer for the detection of SNP TSC0012110
agttgggtagat

SEQ ID NO: 285024 - DNA, 12 bp, Artificial Sequence
  Oligonucleotide primer for the detection of SNP TSC0012110
agtcgggtagat

SEQ ID NO: 285025 - DNA, 12 bp, Artificial Sequence
  Oligonucleotide primer for the detection of SNP TSC0012110
ttggaaattgta

SEQ ID NO: 285026 - DNA, 12 bp, Artificial Sequence
  Oligonucleotide primer for the detection of SNP TSC0012113
cccctcataaaa

SEQ ID NO: 285027 - DNA, 12 bp, Artificial Sequence
  Oligonucleotide primer for the detection of SNP TSC0012113
tggttttgatta

SEQ ID NO: 285028 - DNA, 12 bp, Artificial Sequence
  Oligonucleotide primer for the detection of SNP TSC0012113
cggttttgatta

SEQ ID NO: 285029 - DNA, 12 bp, Artificial Sequence
  Oligonucleotide primer for the detection of SNP TSC0012113
caatcctaacca

SEQ ID NO: 285030 - DNA, 12 bp, Artificial Sequence
  Oligonucleotide primer for the detection of SNP TSC0012113
cgatcctaacca

SEQ ID NO: 285031 - DNA, 12 bp, Artificial Sequence
  Oligonucleotide primer for the detection of SNP TSC0012113
gttttttatgga

SEQ ID NO: 285032 - DNA, 12 bp, Artificial Sequence
  Oligonucleotide primer for the detection of SNP TSC0012115
cacctaacaatt

SEQ ID NO: 285033 - DNA, 12 bp, Artificial Sequence
  Oligonucleotide primer for the detection of SNP TSC0012115
aaaataagaata

SEQ ID NO: 285034 - DNA, 12 bp, Artificial Sequence
  Oligonucleotide primer for the detection of SNP TSC0012118
attttgtataag

SEQ ID NO: 285035 - DNA, 12 bp, Artificial Sequence
  Oligonucleotide primer for the detection of SNP TSC0012118
atttcgtataag

SEQ ID NO: 285036 - DNA, 12 bp, Artificial Sequence
  Oligonucleotide primer for the detection of SNP TSC0012121
agtattataggg

SEQ ID NO: 285037 - DNA, 12 bp, Artificial Sequence
  Oligonucleotide primer for the detection of SNP TSC0012121
aatatcacaaaa

SEQ ID NO: 285038 - DNA, 12 bp, Artificial Sequence
  Oligonucleotide primer for the detection of SNP TSC0012121
ggagtagaaata

SEQ ID NO: 285039 - DNA, 12 bp, Artificial Sequence
  Oligonucleotide primer for the detection of SNP TSC0012123
taattaattttc

SEQ ID NO: 285040 - DNA, 12 bp, Artificial Sequence
  Oligonucleotide primer for the detection of SNP TSC0012123
ttttgtatttag

SEQ ID NO: 285041 - DNA, 12 bp, Artificial Sequence
  Oligonucleotide primer for the detection of SNP TSC0012123
tttcgtatttag

SEQ ID NO: 285042 - DNA, 12 bp, Artificial Sequence
  Oligonucleotide primer for the detection of SNP TSC0012124
ctcctaaaactt

SEQ ID NO: 285043 - DNA, 12 bp, Artificial Sequence
  Oligonucleotide primer for the detection of SNP TSC0012124
aagaggtagtta

SEQ ID NO: 285044 - DNA, 12 bp, Artificial Sequence
  Oligonucleotide primer for the detection of SNP TSC0012124
aaaataaccaaa

SEQ ID NO: 285045 - DNA, 12 bp, Artificial Sequence
  Oligonucleotide primer for the detection of SNP TSC0012124
tttttggggttt

SEQ ID NO: 285046 - DNA, 12 bp, Artificial Sequence
  Oligonucleotide primer for the detection of SNP TSC0012125
ttaaaataccac

SEQ ID NO: 285047 - DNA, 12 bp, Artificial Sequence
  Oligonucleotide primer for the detection of SNP TSC0012125
aatattatggtt

SEQ ID NO: 285048 - DNA, 12 bp, Artificial Sequence
  Oligonucleotide primer for the detection of SNP TSC0012125
ataccataatca

SEQ ID NO: 285049 - DNA, 12 bp, Artificial Sequence
  Oligonucleotide primer for the detection of SNP TSC0012125
aaaatgttattt

SEQ ID NO: 285050 - DNA, 12 bp, Artificial Sequence
  Oligonucleotide primer for the detection of SNP TSC0012126
aacaaatccata

SEQ ID NO: 285051 - DNA, 12 bp, Artificial Sequence
  Oligonucleotide primer for the detection of SNP TSC0012126
gagggtttatta

SEQ ID NO: 285052 - DNA, 12 bp, Artificial Sequence
  Oligonucleotide primer for the detection of SNP TSC0012126
taataggtttat

SEQ ID NO: 285053 - DNA, 12 bp, Artificial Sequence
  Oligonucleotide primer for the detection of SNP TSC0012127
cactacaaattt

SEQ ID NO: 285054 - DNA, 12 bp, Artificial Sequence
  Oligonucleotide primer for the detection of SNP TSC0012127
attggataaata

SEQ ID NO: 285055 - DNA, 12 bp, Artificial Sequence
  Oligonucleotide primer for the detection of SNP TSC0012128
aaataaataata

SEQ ID NO: 285056 - DNA, 12 bp, Artificial Sequence
  Oligonucleotide primer for the detection of SNP TSC0012128
aaaaatggattt

SEQ ID NO: 285057 - DNA, 12 bp, Artificial Sequence
  Oligonucleotide primer for the detection of SNP TSC0012128
aaaaaataaatc

SEQ ID NO: 285058 - DNA, 12 bp, Artificial Sequence
  Oligonucleotide primer for the detection of SNP TSC0012128
agaatgagtagt

SEQ ID NO: 285059 - DNA, 12 bp, Artificial Sequence
  Oligonucleotide primer for the detection of SNP TSC0012129
acaaataattta

SEQ ID NO: 285060 - DNA, 12 bp, Artificial Sequence
  Oligonucleotide primer for the detection of SNP TSC0012129
atgaaaaattat

SEQ ID NO: 285061 - DNA, 12 bp, Artificial Sequence
  Oligonucleotide primer for the detection of SNP TSC0012129
ataaaaaactac

SEQ ID NO: 285062 - DNA, 12 bp, Artificial Sequence
  Oligonucleotide primer for the detection of SNP TSC0012129
tatagataattt

SEQ ID NO: 285063 - DNA, 12 bp, Artificial Sequence
  Oligonucleotide primer for the detection of SNP TSC0012132
tgtataagtttg

SEQ ID NO: 285064 - DNA, 12 bp, Artificial Sequence
  Oligonucleotide primer for the detection of SNP TSC0012133
ctaaatacaacc

SEQ ID NO: 285065 - DNA, 12 bp, Artificial Sequence
  Oligonucleotide primer for the detection of SNP TSC0012133
attatggtggtg

SEQ ID NO: 285066 - DNA, 12 bp, Artificial Sequence
  Oligonucleotide primer for the detection of SNP TSC0012133
attatggcggtg

SEQ ID NO: 285067 - DNA, 12 bp, Artificial Sequence
  Oligonucleotide primer for the detection of SNP TSC0012133
attatggtggcg

SEQ ID NO: 285068 - DNA, 12 bp, Artificial Sequence
  Oligonucleotide primer for the detection of SNP TSC0012133
attatggcggcg

SEQ ID NO: 285069 - DNA, 12 bp, Artificial Sequence
  Oligonucleotide primer for the detection of SNP TSC0012134
aaaaatcaaccc

SEQ ID NO: 285070 - DNA, 12 bp, Artificial Sequence
  Oligonucleotide primer for the detection of SNP TSC0012134
aaaaatcgaccc

SEQ ID NO: 285071 - DNA, 12 bp, Artificial Sequence
  Oligonucleotide primer for the detection of SNP TSC0012134
aacacataaaca

SEQ ID NO: 285072 - DNA, 12 bp, Artificial Sequence
  Oligonucleotide primer for the detection of SNP TSC0012134
aggaattggttt

SEQ ID NO: 285073 - DNA, 12 bp, Artificial Sequence
  Oligonucleotide primer for the detection of SNP TSC0012134
aggaatcggttt

SEQ ID NO: 285074 - DNA, 12 bp, Artificial Sequence
  Oligonukleotid-Primer
aataaaaaaaac

SEQ ID NO: 285075 - DNA, 12 bp, Artificial Sequence
  Oligonucleotide primer for the detection of SNP TSC0012138
aaaaaaaataag

SEQ ID NO: 285076 - DNA, 12 bp, Artificial Sequence
  Oligonucleotide primer for the detection of SNP TSC0012138
gtgagaaaaatt

SEQ ID NO: 285077 - DNA, 12 bp, Artificial Sequence
  Oligonucleotide primer for the detection of SNP TSC0012139
atatatttacct

SEQ ID NO: 285078 - DNA, 12 bp, Artificial Sequence
  Oligonucleotide primer for the detection of SNP TSC0012139
taattaggatat

SEQ ID NO: 285079 - DNA, 12 bp, Artificial Sequence
  Oligonucleotide primer for the detection of SNP TSC0012139
taaccaaaatac

SEQ ID NO: 285080 - DNA, 12 bp, Artificial Sequence
  Oligonucleotide primer for the detection of SNP TSC0012139
atgtatttattt

SEQ ID NO: 285081 - DNA, 12 bp, Artificial Sequence
  Oligonucleotide primer for the detection of SNP TSC0012140
attataaaaaac

SEQ ID NO: 285082 - DNA, 12 bp, Artificial Sequence
  Oligonucleotide primer for the detection of SNP TSC0012140
aatttaaaatta

SEQ ID NO: 285083 - DNA, 12 bp, Artificial Sequence
  Oligonucleotide primer for the detection of SNP TSC0012142
tttcaactccat

SEQ ID NO: 285084 - DNA, 12 bp, Artificial Sequence
  Oligonucleotide primer for the detection of SNP TSC0012142
tttcaactccgt

SEQ ID NO: 285085 - DNA, 12 bp, Artificial Sequence
  Oligonucleotide primer for the detection of SNP TSC0012142
tagatggaaaga

SEQ ID NO: 285086 - DNA, 12 bp, Artificial Sequence
  Oligonucleotide primer for the detection of SNP TSC0012143
tacctaccatca

SEQ ID NO: 285087 - DNA, 12 bp, Artificial Sequence
  Oligonucleotide primer for the detection of SNP TSC0012144
taaaatcctaaa

SEQ ID NO: 285088 - DNA, 12 bp, Artificial Sequence
  Oligonucleotide primer for the detection of SNP TSC0012144
gattgttggggg

SEQ ID NO: 285089 - DNA, 12 bp, Artificial Sequence
  Oligonucleotide primer for the detection of SNP TSC0012144
aattattaaaaa

SEQ ID NO: 285090 - DNA, 12 bp, Artificial Sequence
  Oligonucleotide primer for the detection of SNP TSC0012144
ataaaattttaa

SEQ ID NO: 285091 - DNA, 12 bp, Artificial Sequence
  Oligonucleotide primer for the detection of SNP TSC0012145
acttaaaataat

SEQ ID NO: 285092 - DNA, 12 bp, Artificial Sequence
  Oligonucleotide primer for the detection of SNP TSC0012145
atggatgttgtg

SEQ ID NO: 285093 - DNA, 12 bp, Artificial Sequence
  Oligonucleotide primer for the detection of SNP TSC0012145
acggatgttgtg

SEQ ID NO: 285094 - DNA, 12 bp, Artificial Sequence
  Oligonucleotide primer for the detection of SNP TSC0012145
atggatgtcgtg

SEQ ID NO: 285095 - DNA, 12 bp, Artificial Sequence
  Oligonucleotide primer for the detection of SNP TSC0012145
acggatgtcgtg

SEQ ID NO: 285096 - DNA, 12 bp, Artificial Sequence
  Oligonucleotide primer for the detection of SNP TSC0012146
aaattttttacc

SEQ ID NO: 285097 - DNA, 12 bp, Artificial Sequence
  Oligonucleotide primer for the detection of SNP TSC0012146
gttttgaaggat

SEQ ID NO: 285098 - DNA, 12 bp, Artificial Sequence
  Oligonucleotide primer for the detection of SNP TSC0012146
ctttaaaaaaca

SEQ ID NO: 285099 - DNA, 12 bp, Artificial Sequence
  Oligonucleotide primer for the detection of SNP TSC0012146
aaattttttatt

SEQ ID NO: 285100 - DNA, 12 bp, Artificial Sequence
  Oligonucleotide primer for the detection of SNP TSC0012146
aaattttttatc

SEQ ID NO: 285101 - DNA, 12 bp, Artificial Sequence
  Oligonucleotide primer for the detection of SNP TSC0012150
acaaataccaaa

SEQ ID NO: 285102 - DNA, 12 bp, Artificial Sequence
  Oligonucleotide primer for the detection of SNP TSC0012150
gtttatgttaat

SEQ ID NO: 285103 - DNA, 12 bp, Artificial Sequence
  Oligonucleotide primer for the detection of SNP TSC0012150
tacctatactaa

SEQ ID NO: 285104 - DNA, 12 bp, Artificial Sequence
  Oligonucleotide primer for the detection of SNP TSC0012150
taaatgttagat

SEQ ID NO: 285105 - DNA, 12 bp, Artificial Sequence
  Oligonucleotide primer for the detection of SNP TSC0012152
atctttctctat

SEQ ID NO: 285106 - DNA, 12 bp, Artificial Sequence
  Oligonucleotide primer for the detection of SNP TSC0012152
agggaggaggga

SEQ ID NO: 285107 - DNA, 12 bp, Artificial Sequence
  Oligonucleotide primer for the detection of SNP TSC0012153
ctttaaataaat

SEQ ID NO: 285108 - DNA, 12 bp, Artificial Sequence
  Oligonucleotide primer for the detection of SNP TSC0012153
gtttaataaata

SEQ ID NO: 285109 - DNA, 12 bp, Artificial Sequence
  Oligonucleotide primer for the detection of SNP TSC0012154
aaaacctaatac

SEQ ID NO: 285110 - DNA, 12 bp, Artificial Sequence
  Oligonucleotide primer for the detection of SNP TSC0012154
aataaataccta

SEQ ID NO: 285111 - DNA, 12 bp, Artificial Sequence
  Oligonucleotide primer for the detection of SNP TSC0012154
agagtttggtat

SEQ ID NO: 285112 - DNA, 12 bp, Artificial Sequence
  Oligonucleotide primer for the detection of SNP TSC0012155
atttaattataa

SEQ ID NO: 285113 - DNA, 12 bp, Artificial Sequence
  Oligonucleotide primer for the detection of SNP TSC0012155
tgatggggttat

SEQ ID NO: 285114 - DNA, 12 bp, Artificial Sequence
  Oligonucleotide primer for the detection of SNP TSC0012155
taataaaaccac

SEQ ID NO: 285115 - DNA, 12 bp, Artificial Sequence
  Oligonucleotide primer for the detection of SNP TSC0012155
atttaattatgg

SEQ ID NO: 285116 - DNA, 12 bp, Artificial Sequence
  Oligonucleotide primer for the detection of SNP TSC0012157
actaactctcac

SEQ ID NO: 285117 - DNA, 12 bp, Artificial Sequence
  Oligonucleotide primer for the detection of SNP TSC0012157
ttgttttagttg

SEQ ID NO: 285118 - DNA, 12 bp, Artificial Sequence
  Oligonucleotide primer for the detection of SNP TSC0012158
acatctaaaaaa

SEQ ID NO: 285119 - DNA, 12 bp, Artificial Sequence
  Oligonucleotide primer for the detection of SNP TSC0012158
acgtctaaaaaa

SEQ ID NO: 285120 - DNA, 12 bp, Artificial Sequence
  Oligonucleotide primer for the detection of SNP TSC0012158
gtttaggttatg

SEQ ID NO: 285121 - DNA, 12 bp, Artificial Sequence
  Oligonucleotide primer for the detection of SNP TSC0012158
gtttaggttacg

SEQ ID NO: 285122 - DNA, 12 bp, Artificial Sequence
  Oligonucleotide primer for the detection of SNP TSC0012158
atttaaatcaca

SEQ ID NO: 285123 - DNA, 12 bp, Artificial Sequence
  Oligonucleotide primer for the detection of SNP TSC0012158
atttaaatcacg

SEQ ID NO: 285124 - DNA, 12 bp, Artificial Sequence
  Oligonucleotide primer for the detection of SNP TSC0012158
gtgtttggagga

SEQ ID NO: 285125 - DNA, 12 bp, Artificial Sequence
  Oligonucleotide primer for the detection of SNP TSC0012158
gcgtttggagga

SEQ ID NO: 285126 - DNA, 12 bp, Artificial Sequence
  Oligonucleotide primer for the detection of SNP TSC0012161
tgtgtgtgtgtg

SEQ ID NO: 285127 - DNA, 12 bp, Artificial Sequence
  Oligonucleotide primer for the detection of SNP TSC0012162
tcaacattaaca

SEQ ID NO: 285128 - DNA, 12 bp, Artificial Sequence
  Oligonucleotide primer for the detection of SNP TSC0012162
tgggatttttat

SEQ ID NO: 285129 - DNA, 12 bp, Artificial Sequence
  Oligonucleotide primer for the detection of SNP TSC0012162
taaaatttctac

SEQ ID NO: 285130 - DNA, 12 bp, Artificial Sequence
  Oligonucleotide primer for the detection of SNP TSC0012162
ttagtattggta

SEQ ID NO: 285131 - DNA, 12 bp, Artificial Sequence
  Oligonucleotide primer for the detection of SNP TSC0012163
tcttaccttact

SEQ ID NO: 285132 - DNA, 12 bp, Artificial Sequence
  Oligonucleotide primer for the detection of SNP TSC0012163
aaccttccaaaa

SEQ ID NO: 285133 - DNA, 12 bp, Artificial Sequence
  Oligonucleotide primer for the detection of SNP TSC0012164
cctaaaaaactc

SEQ ID NO: 285134 - DNA, 12 bp, Artificial Sequence
  Oligonucleotide primer for the detection of SNP TSC0012164
ttagtttgaggg

SEQ ID NO: 285135 - DNA, 12 bp, Artificial Sequence
  Oligonucleotide primer for the detection of SNP TSC0012165
ggaattataggt

SEQ ID NO: 285136 - DNA, 12 bp, Artificial Sequence
  Oligonucleotide primer for the detection of SNP TSC0012165
aaaactacaaac

SEQ ID NO: 285137 - DNA, 12 bp, Artificial Sequence
  Oligonucleotide primer for the detection of SNP TSC0012165
ggtatggtggga

SEQ ID NO: 285138 - DNA, 12 bp, Artificial Sequence
  Oligonucleotide primer for the detection of SNP TSC0012166
acacttccaaaa

SEQ ID NO: 285139 - DNA, 12 bp, Artificial Sequence
  Oligonucleotide primer for the detection of SNP TSC0012166
ggattttgtgtt

SEQ ID NO: 285140 - DNA, 12 bp, Artificial Sequence
  Oligonucleotide primer for the detection of SNP TSC0012166
ggatttcgtgtt

SEQ ID NO: 285141 - DNA, 12 bp, Artificial Sequence
  Oligonucleotide primer for the detection of SNP TSC0012166
aaaccccatacc

SEQ ID NO: 285142 - DNA, 12 bp, Artificial Sequence
  Oligonucleotide primer for the detection of SNP TSC0012166
aaaccccgtacc

SEQ ID NO: 285143 - DNA, 12 bp, Artificial Sequence
  Oligonucleotide primer for the detection of SNP TSC0012166
atatttttaaga

SEQ ID NO: 285144 - DNA, 12 bp, Artificial Sequence
  Oligonucleotide primer for the detection of SNP TSC0012167
tcctaaattccc

SEQ ID NO: 285145 - DNA, 12 bp, Artificial Sequence
  Oligonucleotide primer for the detection of SNP TSC0012167
ggagggaggaga

SEQ ID NO: 285146 - DNA, 12 bp, Artificial Sequence
  Oligonucleotide primer for the detection of SNP TSC0012171
atctccctccca

SEQ ID NO: 285147 - DNA, 12 bp, Artificial Sequence
  Oligonucleotide primer for the detection of SNP TSC0012171
ttggggatagaa

SEQ ID NO: 285148 - DNA, 12 bp, Artificial Sequence
  Oligonucleotide primer for the detection of SNP TSC0012171
atttttttttta

SEQ ID NO: 285149 - DNA, 12 bp, Artificial Sequence
  Oligonucleotide primer for the detection of SNP TSC0012173
ctattaaccaat

SEQ ID NO: 285150 - DNA, 12 bp, Artificial Sequence
  Oligonucleotide primer for the detection of SNP TSC0012174
tcaacaataata

SEQ ID NO: 285151 - DNA, 12 bp, Artificial Sequence
  Oligonucleotide primer for the detection of SNP TSC0012174
gttgttatattt

SEQ ID NO: 285152 - DNA, 12 bp, Artificial Sequence
  Oligonucleotide primer for the detection of SNP TSC0012174
tatcatacctaa

SEQ ID NO: 285153 - DNA, 12 bp, Artificial Sequence
  Oligonucleotide primer for the detection of SNP TSC0012174
tttaataatgat

SEQ ID NO: 285154 - DNA, 12 bp, Artificial Sequence
  Oligonucleotide primer for the detection of SNP TSC0012175
gtaatttttatt

SEQ ID NO: 285155 - DNA, 12 bp, Artificial Sequence
  Oligonucleotide primer for the detection of SNP TSC0012175
acaactcccact

SEQ ID NO: 285156 - DNA, 12 bp, Artificial Sequence
  Oligonucleotide primer for the detection of SNP TSC0012175
ggaggaaagagg

SEQ ID NO: 285157 - DNA, 12 bp, Artificial Sequence
  Oligonucleotide primer for the detection of SNP TSC0012177
tcaacaaaataa

SEQ ID NO: 285158 - DNA, 12 bp, Artificial Sequence
  Oligonucleotide primer for the detection of SNP TSC0012177
ccttaaccaccc

SEQ ID NO: 285159 - DNA, 12 bp, Artificial Sequence
  Oligonukleotid-Primer
gttagtagggtg

SEQ ID NO: 285160 - DNA, 12 bp, Artificial Sequence
  Oligonucleotide primer for the detection of SNP TSC0012178
catcttataaaa

SEQ ID NO: 285161 - DNA, 12 bp, Artificial Sequence
  Oligonucleotide primer for the detection of SNP TSC0012178
cgtcttataaaa

SEQ ID NO: 285162 - DNA, 12 bp, Artificial Sequence
  Oligonucleotide primer for the detection of SNP TSC0012178
gtagttatttat

SEQ ID NO: 285163 - DNA, 12 bp, Artificial Sequence
  Oligonucleotide primer for the detection of SNP TSC0012178
aacaaccaccta

SEQ ID NO: 285164 - DNA, 12 bp, Artificial Sequence
  Oligonucleotide primer for the detection of SNP TSC0012178
tgttttgtgggg

SEQ ID NO: 285165 - DNA, 12 bp, Artificial Sequence
  Oligonucleotide primer for the detection of SNP TSC0012178
cgttttgtgggg

SEQ ID NO: 285166 - DNA, 12 bp, Artificial Sequence
  Oligonucleotide primer for the detection of SNP TSC0012179
ttttttaacatc

SEQ ID NO: 285167 - DNA, 12 bp, Artificial Sequence
  Oligonucleotide primer for the detection of SNP TSC0012179
tttggtttttgg

SEQ ID NO: 285168 - DNA, 12 bp, Artificial Sequence
  Oligonucleotide primer for the detection of SNP TSC0012180
aatacttctaaa

SEQ ID NO: 285169 - DNA, 12 bp, Artificial Sequence
  Oligonucleotide primer for the detection of SNP TSC0012180
attcaccctaac

SEQ ID NO: 285170 - DNA, 12 bp, Artificial Sequence
  Oligonucleotide primer for the detection of SNP TSC0012180
gttcaccctaac

SEQ ID NO: 285171 - DNA, 12 bp, Artificial Sequence
  Oligonucleotide primer for the detection of SNP TSC0012180
agtgtttttaag

SEQ ID NO: 285172 - DNA, 12 bp, Artificial Sequence
  Oligonucleotide primer for the detection of SNP TSC0012181
ttgtattttttt

SEQ ID NO: 285173 - DNA, 12 bp, Artificial Sequence
  Oligonucleotide primer for the detection of SNP TSC0012181
tctatatctctc

SEQ ID NO: 285174 - DNA, 12 bp, Artificial Sequence
  Oligonucleotide primer for the detection of SNP TSC0012181
tttttttaaagg

SEQ ID NO: 285175 - DNA, 12 bp, Artificial Sequence
  Oligonucleotide primer for the detection of SNP TSC0012182
aagtaaggaata

SEQ ID NO: 285176 - DNA, 12 bp, Artificial Sequence
  Oligonucleotide primer for the detection of SNP TSC0012183
cctttcaaaatc

SEQ ID NO: 285177 - DNA, 12 bp, Artificial Sequence
  Oligonucleotide primer for the detection of SNP TSC0012183
gtcggtttttag

SEQ ID NO: 285178 - DNA, 12 bp, Artificial Sequence
  Oligonucleotide primer for the detection of SNP TSC0012184
acctataaaaaa

SEQ ID NO: 285179 - DNA, 12 bp, Artificial Sequence
  Oligonucleotide primer for the detection of SNP TSC0012184
ttttagttttaa

SEQ ID NO: 285180 - DNA, 12 bp, Artificial Sequence
  Oligonucleotide primer for the detection of SNP TSC0012184
cttcaattctaa

SEQ ID NO: 285181 - DNA, 12 bp, Artificial Sequence
  Oligonucleotide primer for the detection of SNP TSC0012184
tttatagaagat

SEQ ID NO: 285182 - DNA, 12 bp, Artificial Sequence
  Oligonucleotide primer for the detection of SNP TSC0012184
tttatagaagac

SEQ ID NO: 285183 - DNA, 12 bp, Artificial Sequence
  Oligonucleotide primer for the detection of SNP TSC0012185
aacaaatccaac

SEQ ID NO: 285184 - DNA, 12 bp, Artificial Sequence
  Oligonucleotide primer for the detection of SNP TSC0012185
gtgtttttgtaa

SEQ ID NO: 285185 - DNA, 12 bp, Artificial Sequence
  Oligonucleotide primer for the detection of SNP TSC0012186
actcatccaaca

SEQ ID NO: 285186 - DNA, 12 bp, Artificial Sequence
  Oligonucleotide primer for the detection of SNP TSC0012186
actcatccgaca

SEQ ID NO: 285187 - DNA, 12 bp, Artificial Sequence
  Oligonucleotide primer for the detection of SNP TSC0012186
tctttccatccc

SEQ ID NO: 285188 - DNA, 12 bp, Artificial Sequence
  Oligonucleotide primer for the detection of SNP TSC0012186
agtttatttgat

SEQ ID NO: 285189 - DNA, 12 bp, Artificial Sequence
  Oligonucleotide primer for the detection of SNP TSC0012186
agtttattcgat

SEQ ID NO: 285190 - DNA, 12 bp, Artificial Sequence
  Oligonucleotide primer for the detection of SNP TSC0012187
tattcatacaca

SEQ ID NO: 285191 - DNA, 12 bp, Artificial Sequence
  Oligonucleotide primer for the detection of SNP TSC0012187
gagtgtgtgtgt

SEQ ID NO: 285192 - DNA, 12 bp, Artificial Sequence
  Oligonucleotide primer for the detection of SNP TSC0012187
taaatatatata

SEQ ID NO: 285193 - DNA, 12 bp, Artificial Sequence
  Oligonucleotide primer for the detection of SNP TSC0012187
tatttatatata

SEQ ID NO: 285194 - DNA, 12 bp, Artificial Sequence
  Oligonucleotide primer for the detection of SNP TSC0012188
aaaatataacaa

SEQ ID NO: 285195 - DNA, 12 bp, Artificial Sequence
  Oligonucleotide primer for the detection of SNP TSC0012188
agaatattatgg

SEQ ID NO: 285196 - DNA, 12 bp, Artificial Sequence
  Oligonucleotide primer for the detection of SNP TSC0012188
aacactataaaa

SEQ ID NO: 285197 - DNA, 12 bp, Artificial Sequence
  Oligonucleotide primer for the detection of SNP TSC0012188
gagaagtgtaat

SEQ ID NO: 285198 - DNA, 12 bp, Artificial Sequence
  Oligonucleotide primer for the detection of SNP TSC0012191
tcaatatacaca

SEQ ID NO: 285199 - DNA, 12 bp, Artificial Sequence
  Oligonucleotide primer for the detection of SNP TSC0012191
ttatgagatatt

SEQ ID NO: 285200 - DNA, 12 bp, Artificial Sequence
  Oligonucleotide primer for the detection of SNP TSC0012191
cataaaacatta

SEQ ID NO: 285201 - DNA, 12 bp, Artificial Sequence
  Oligonucleotide primer for the detection of SNP TSC0012192
atctcaaaaaaa

SEQ ID NO: 285202 - DNA, 12 bp, Artificial Sequence
  Oligonucleotide primer for the detection of SNP TSC0012192
ttgttttggggg

SEQ ID NO: 285203 - DNA, 12 bp, Artificial Sequence
  Oligonucleotide primer for the detection of SNP TSC0012192
ttattttaaaaa

SEQ ID NO: 285204 - DNA, 12 bp, Artificial Sequence
  Oligonucleotide primer for the detection of SNP TSC0012192
attttgttttaa

SEQ ID NO: 285205 - DNA, 12 bp, Artificial Sequence
  Oligonucleotide primer for the detection of SNP TSC0012193
tactaacccacc

SEQ ID NO: 285206 - DNA, 12 bp, Artificial Sequence
  Oligonucleotide primer for the detection of SNP TSC0012193
ggtttgggagag

SEQ ID NO: 285207 - DNA, 12 bp, Artificial Sequence
  Oligonucleotide primer for the detection of SNP TSC0012193
tgttggtttatt

SEQ ID NO: 285208 - DNA, 12 bp, Artificial Sequence
  Oligonucleotide primer for the detection of SNP TSC0012194
accatacatatc

SEQ ID NO: 285209 - DNA, 12 bp, Artificial Sequence
  Oligonucleotide primer for the detection of SNP TSC0012194
gagggaaggtta

SEQ ID NO: 285210 - DNA, 12 bp, Artificial Sequence
  Oligonucleotide primer for the detection of SNP TSC0012195
aaaaaaaaactt

SEQ ID NO: 285211 - DNA, 12 bp, Artificial Sequence
  Oligonucleotide primer for the detection of SNP TSC0012195
ttgagaggaata

SEQ ID NO: 285212 - DNA, 12 bp, Artificial Sequence
  Oligonucleotide primer for the detection of SNP TSC0012196
caaacatctaat

SEQ ID NO: 285213 - DNA, 12 bp, Artificial Sequence
  Oligonucleotide primer for the detection of SNP TSC0012196
ttatgttttagg

SEQ ID NO: 285214 - DNA, 12 bp, Artificial Sequence
  Oligonucleotide primer for the detection of SNP TSC0012196
ccatattttaaa

SEQ ID NO: 285215 - DNA, 12 bp, Artificial Sequence
  Oligonucleotide primer for the detection of SNP TSC0012196
taaatatttgat

SEQ ID NO: 285216 - DNA, 12 bp, Artificial Sequence
  Oligonucleotide primer for the detection of SNP TSC0012198
gtagtaagtttt

SEQ ID NO: 285217 - DNA, 12 bp, Artificial Sequence
  Oligonucleotide primer for the detection of SNP TSC0012198
caacaaatccta

SEQ ID NO: 285218 - DNA, 12 bp, Artificial Sequence
  Oligonucleotide primer for the detection of SNP TSC0012198
gtgagggattgt

SEQ ID NO: 285219 - DNA, 12 bp, Artificial Sequence
  Oligonucleotide primer for the detection of SNP TSC0012199
actaataaaccc

SEQ ID NO: 285220 - DNA, 12 bp, Artificial Sequence
  Oligonucleotide primer for the detection of SNP TSC0012199
gctaataaaccc

SEQ ID NO: 285221 - DNA, 12 bp, Artificial Sequence
  Oligonucleotide primer for the detection of SNP TSC0012199
attgtgataaag

SEQ ID NO: 285222 - DNA, 12 bp, Artificial Sequence
  Oligonucleotide primer for the detection of SNP TSC0012199
actataacaaaa

SEQ ID NO: 285223 - DNA, 12 bp, Artificial Sequence
  Oligonucleotide primer for the detection of SNP TSC0012199
gttggtaagttt

SEQ ID NO: 285224 - DNA, 12 bp, Artificial Sequence
  Oligonucleotide primer for the detection of SNP TSC0012200
caaaaatttaaa

SEQ ID NO: 285225 - DNA, 12 bp, Artificial Sequence
  Oligonucleotide primer for the detection of SNP TSC0012200
tttttattgtag

SEQ ID NO: 285226 - DNA, 12 bp, Artificial Sequence
  Oligonucleotide primer for the detection of SNP TSC0012200
tttttatcgtag

SEQ ID NO: 285227 - DNA, 12 bp, Artificial Sequence
  Oligonucleotide primer for the detection of SNP TSC0012201
tcctccttacat

SEQ ID NO: 285228 - DNA, 12 bp, Artificial Sequence
  Oligonucleotide primer for the detection of SNP TSC0012201
tcctccttacgt

SEQ ID NO: 285229 - DNA, 12 bp, Artificial Sequence
  Oligonucleotide primer for the detection of SNP TSC0012201
tttgtaggagtg

SEQ ID NO: 285230 - DNA, 12 bp, Artificial Sequence
  Oligonucleotide primer for the detection of SNP TSC0012202
aaaaaatctttc

SEQ ID NO: 285231 - DNA, 12 bp, Artificial Sequence
  Oligonucleotide primer for the detection of SNP TSC0012202
tgtttgtaaaag

SEQ ID NO: 285232 - DNA, 12 bp, Artificial Sequence
  Oligonucleotide primer for the detection of SNP TSC0012202
cgtttgtaaaag

SEQ ID NO: 285233 - DNA, 12 bp, Artificial Sequence
  Oligonucleotide primer for the detection of SNP TSC0012204
actacactcaac

SEQ ID NO: 285234 - DNA, 12 bp, Artificial Sequence
  Oligonucleotide primer for the detection of SNP TSC0012204
tttgtgggtgta

SEQ ID NO: 285235 - DNA, 12 bp, Artificial Sequence
  Oligonucleotide primer for the detection of SNP TSC0012204
ttcgtgggtgta

SEQ ID NO: 285236 - DNA, 12 bp, Artificial Sequence
  Oligonucleotide primer for the detection of SNP TSC0012204
tccataaataca

SEQ ID NO: 285237 - DNA, 12 bp, Artificial Sequence
  Oligonucleotide primer for the detection of SNP TSC0012204
tccgtaaataca

SEQ ID NO: 285238 - DNA, 12 bp, Artificial Sequence
  Oligonucleotide primer for the detection of SNP TSC0012204
gttgtatttagt

SEQ ID NO: 285239 - DNA, 12 bp, Artificial Sequence
  Oligonucleotide primer for the detection of SNP TSC0012205
tttccaacaata

SEQ ID NO: 285240 - DNA, 12 bp, Artificial Sequence
  Oligonukleotid-Primer
atctcaattccc

SEQ ID NO: 285241 - DNA, 12 bp, Artificial Sequence
  Oligonucleotide primer for the detection of SNP TSC0012206
aaaaaggtgaga

SEQ ID NO: 285242 - DNA, 12 bp, Artificial Sequence
  Oligonucleotide primer for the detection of SNP TSC0012207
aactcaaatata

SEQ ID NO: 285243 - DNA, 12 bp, Artificial Sequence
  Oligonucleotide primer for the detection of SNP TSC0012207
gtattgtttgtg

SEQ ID NO: 285244 - DNA, 12 bp, Artificial Sequence
  Oligonucleotide primer for the detection of SNP TSC0012208
tatctcttaccc

SEQ ID NO: 285245 - DNA, 12 bp, Artificial Sequence
  Oligonucleotide primer for the detection of SNP TSC0012208
ttaggtttatag

SEQ ID NO: 285246 - DNA, 12 bp, Artificial Sequence
  Oligonucleotide primer for the detection of SNP TSC0012209
gttttgtttttg

SEQ ID NO: 285247 - DNA, 12 bp, Artificial Sequence
  Oligonucleotide primer for the detection of SNP TSC0012209
ctatccttaaaa

SEQ ID NO: 285248 - DNA, 12 bp, Artificial Sequence
  Oligonukleotid-Primer
ataggtttttta

SEQ ID NO: 285249 - DNA, 12 bp, Artificial Sequence
  Oligonucleotide primer for the detection of SNP TSC0012210
caattatatatt

SEQ ID NO: 285250 - DNA, 12 bp, Artificial Sequence
  Oligonucleotide primer for the detection of SNP TSC0012210
aaaggtatttag

SEQ ID NO: 285251 - DNA, 12 bp, Artificial Sequence
  Oligonucleotide primer for the detection of SNP TSC0012211
atatcgaaaatt

SEQ ID NO: 285252 - DNA, 12 bp, Artificial Sequence
  Oligonukleotid-Primer
ataaaattgtta

SEQ ID NO: 285253 - DNA, 12 bp, Artificial Sequence
  Oligonucleotide primer for the detection of SNP TSC0012212
cctaaaaataaa

SEQ ID NO: 285254 - DNA, 12 bp, Artificial Sequence
  Oligonucleotide primer for the detection of SNP TSC0012212
tttttatatatg

SEQ ID NO: 285255 - DNA, 12 bp, Artificial Sequence
  Oligonucleotide primer for the detection of SNP TSC0012212
cttttacatata

SEQ ID NO: 285256 - DNA, 12 bp, Artificial Sequence
  Oligonucleotide primer for the detection of SNP TSC0012212
tttgaaaatgaa

SEQ ID NO: 285257 - DNA, 12 bp, Artificial Sequence
  Oligonucleotide primer for the detection of SNP TSC0012213
ctaaattcctac

SEQ ID NO: 285258 - DNA, 12 bp, Artificial Sequence
  Oligonucleotide primer for the detection of SNP TSC0012213
atttgagggagg

SEQ ID NO: 285259 - DNA, 12 bp, Artificial Sequence
  Oligonucleotide primer for the detection of SNP TSC0012213
acctaaaaaaaa

SEQ ID NO: 285260 - DNA, 12 bp, Artificial Sequence
  Oligonucleotide primer for the detection of SNP TSC0012213
ttaagtttttgt

SEQ ID NO: 285261 - DNA, 12 bp, Artificial Sequence
  Oligonucleotide primer for the detection of SNP TSC0012218
gatatgttatta

SEQ ID NO: 285262 - DNA, 12 bp, Artificial Sequence
  Oligonucleotide primer for the detection of SNP TSC0012218
aacatactacca

SEQ ID NO: 285263 - DNA, 12 bp, Artificial Sequence
  Oligonucleotide primer for the detection of SNP TSC0012218
gaaaaatgagtt

SEQ ID NO: 285264 - DNA, 12 bp, Artificial Sequence
  Oligonucleotide primer for the detection of SNP TSC0012219
cccaaataacaa

SEQ ID NO: 285265 - DNA, 12 bp, Artificial Sequence
  Oligonucleotide primer for the detection of SNP TSC0012219
tgtgtttatagt

SEQ ID NO: 285266 - DNA, 12 bp, Artificial Sequence
  Oligonucleotide primer for the detection of SNP TSC0012219
tatacctataat

SEQ ID NO: 285267 - DNA, 12 bp, Artificial Sequence
  Oligonucleotide primer for the detection of SNP TSC0012219
tttaagtagtag

SEQ ID NO: 285268 - DNA, 12 bp, Artificial Sequence
  Oligonucleotide primer for the detection of SNP TSC0012220
attcccctaatc

SEQ ID NO: 285269 - DNA, 12 bp, Artificial Sequence
  Oligonucleotide primer for the detection of SNP TSC0012220
ggaaggaagtta

SEQ ID NO: 285270 - DNA, 12 bp, Artificial Sequence
  Oligonucleotide primer for the detection of SNP TSC0012221
ccccacctacca

SEQ ID NO: 285271 - DNA, 12 bp, Artificial Sequence
  Oligonucleotide primer for the detection of SNP TSC0012221
ccccacctaccg

SEQ ID NO: 285272 - DNA, 12 bp, Artificial Sequence
  Oligonucleotide primer for the detection of SNP TSC0012221
attatgggtttt

SEQ ID NO: 285273 - DNA, 12 bp, Artificial Sequence
  Oligonucleotide primer for the detection of SNP TSC0012221
accataaactct

SEQ ID NO: 285274 - DNA, 12 bp, Artificial Sequence
  Oligonucleotide primer for the detection of SNP TSC0012221
ttttatttattg

SEQ ID NO: 285275 - DNA, 12 bp, Artificial Sequence
  Oligonucleotide primer for the detection of SNP TSC0012221
ttttatttatcg

SEQ ID NO: 285276 - DNA, 12 bp, Artificial Sequence
  Oligonucleotide primer for the detection of SNP TSC0012222
tttaaaactcta

SEQ ID NO: 285277 - DNA, 12 bp, Artificial Sequence
  Oligonucleotide primer for the detection of SNP TSC0012222
tcctctctcttt

SEQ ID NO: 285278 - DNA, 12 bp, Artificial Sequence
  Oligonucleotide primer for the detection of SNP TSC0012222
ttttgaagtttt

SEQ ID NO: 285279 - DNA, 12 bp, Artificial Sequence
  Oligonucleotide primer for the detection of SNP TSC0012224
tcttttttttta

SEQ ID NO: 285280 - DNA, 12 bp, Artificial Sequence
  Oligonucleotide primer for the detection of SNP TSC0012224
tagatgaggttt

SEQ ID NO: 285281 - DNA, 12 bp, Artificial Sequence
  Oligonucleotide primer for the detection of SNP TSC0012224
taaataaaactc

SEQ ID NO: 285282 - DNA, 12 bp, Artificial Sequence
  Oligonucleotide primer for the detection of SNP TSC0012225
aaaaatatcttt

SEQ ID NO: 285283 - DNA, 12 bp, Artificial Sequence
  Oligonucleotide primer for the detection of SNP TSC0012225
ttttggtaaaaa

SEQ ID NO: 285284 - DNA, 12 bp, Artificial Sequence
  Oligonucleotide primer for the detection of SNP TSC0012225
tttcggtaaaaa

SEQ ID NO: 285285 - DNA, 12 bp, Artificial Sequence
  Oligonucleotide primer for the detection of SNP TSC0012225
ctccaacaaaaa

SEQ ID NO: 285286 - DNA, 12 bp, Artificial Sequence
  Oligonucleotide primer for the detection of SNP TSC0012225
ctccgacaaaaa

SEQ ID NO: 285287 - DNA, 12 bp, Artificial Sequence
  Oligonucleotide primer for the detection of SNP TSC0012225
gaaaatgttttt

SEQ ID NO: 285288 - DNA, 12 bp, Artificial Sequence
  Oligonucleotide primer for the detection of SNP TSC0012226
caaaaataacaa

SEQ ID NO: 285289 - DNA, 12 bp, Artificial Sequence
  Oligonucleotide primer for the detection of SNP TSC0012226
tttggaggggta

SEQ ID NO: 285290 - DNA, 12 bp, Artificial Sequence
  Oligonucleotide primer for the detection of SNP TSC0012226
cctaaaaaaaca

SEQ ID NO: 285291 - DNA, 12 bp, Artificial Sequence
  Oligonucleotide primer for the detection of SNP TSC0012226
ttagaaatggta

SEQ ID NO: 285292 - DNA, 12 bp, Artificial Sequence
  Oligonucleotide primer for the detection of SNP TSC0012230
cttcttcaaact

SEQ ID NO: 285293 - DNA, 12 bp, Artificial Sequence
  Oligonucleotide primer for the detection of SNP TSC0012231
aaccctttctta

SEQ ID NO: 285294 - DNA, 12 bp, Artificial Sequence
  Oligonucleotide primer for the detection of SNP TSC0012231
tatatagttgtt

SEQ ID NO: 285295 - DNA, 12 bp, Artificial Sequence
  Oligonucleotide primer for the detection of SNP TSC0012231
cacacaactacc

SEQ ID NO: 285296 - DNA, 12 bp, Artificial Sequence
  Oligonucleotide primer for the detection of SNP TSC0012232
ttaatcataaaa

SEQ ID NO: 285297 - DNA, 12 bp, Artificial Sequence
  Oligonucleotide primer for the detection of SNP TSC0012232
tatgagggtaga

SEQ ID NO: 285298 - DNA, 12 bp, Artificial Sequence
  Oligonucleotide primer for the detection of SNP TSC0012232
ttggttatgagg

SEQ ID NO: 285299 - DNA, 12 bp, Artificial Sequence
  Oligonucleotide primer for the detection of SNP TSC0012233
taaccttaaaca

SEQ ID NO: 285300 - DNA, 12 bp, Artificial Sequence
  Oligonucleotide primer for the detection of SNP TSC0012233
taagtgattgat

SEQ ID NO: 285301 - DNA, 12 bp, Artificial Sequence
  Oligonucleotide primer for the detection of SNP TSC0012233
taagtgattgac

SEQ ID NO: 285302 - DNA, 12 bp, Artificial Sequence
  Oligonucleotide primer for the detection of SNP TSC0012233
ccaaataactaa

SEQ ID NO: 285303 - DNA, 12 bp, Artificial Sequence
  Oligonucleotide primer for the detection of SNP TSC0012233
tgattttaagta

SEQ ID NO: 285304 - DNA, 12 bp, Artificial Sequence
  Oligonucleotide primer for the detection of SNP TSC0012235
ataaaatcccat

SEQ ID NO: 285305 - DNA, 12 bp, Artificial Sequence
  Oligonucleotide primer for the detection of SNP TSC0012235
ttagtgttttag

SEQ ID NO: 285306 - DNA, 12 bp, Artificial Sequence
  Oligonucleotide primer for the detection of SNP TSC0012236
aacctcaaacaa

SEQ ID NO: 285307 - DNA, 12 bp, Artificial Sequence
  Oligonucleotide primer for the detection of SNP TSC0012236
ggaggttgaggt

SEQ ID NO: 285308 - DNA, 12 bp, Artificial Sequence
  Oligonucleotide primer for the detection of SNP TSC0012236
aaaaactaaaac

SEQ ID NO: 285309 - DNA, 12 bp, Artificial Sequence
  Oligonucleotide primer for the detection of SNP TSC0012236
ggttttaagtaa

SEQ ID NO: 285310 - DNA, 12 bp, Artificial Sequence
  Oligonucleotide primer for the detection of SNP TSC0012237
aaaaataatttt

SEQ ID NO: 285311 - DNA, 12 bp, Artificial Sequence
  Oligonucleotide primer for the detection of SNP TSC0012237
taaattgttata

SEQ ID NO: 285312 - DNA, 12 bp, Artificial Sequence
  Oligonucleotide primer for the detection of SNP TSC0012238
cctcccaaattc

SEQ ID NO: 285313 - DNA, 12 bp, Artificial Sequence
  Oligonucleotide primer for the detection of SNP TSC0012238
cctcccgaattc

SEQ ID NO: 285314 - DNA, 12 bp, Artificial Sequence
  Oligonucleotide primer for the detection of SNP TSC0012238
gaggtaggagaa

SEQ ID NO: 285315 - DNA, 12 bp, Artificial Sequence
  Oligonucleotide primer for the detection of SNP TSC0012238
ttttttgagttt

SEQ ID NO: 285316 - DNA, 12 bp, Artificial Sequence
  Oligonucleotide primer for the detection of SNP TSC0012238
tttttcgagttt

SEQ ID NO: 285317 - DNA, 12 bp, Artificial Sequence
  Oligonucleotide primer for the detection of SNP TSC0012239
caaaatactctc

SEQ ID NO: 285318 - DNA, 12 bp, Artificial Sequence
  Oligonucleotide primer for the detection of SNP TSC0012239
ggagtagggtag

SEQ ID NO: 285319 - DNA, 12 bp, Artificial Sequence
  Oligonucleotide primer for the detection of SNP TSC0012239
aaaacaaaacaa

SEQ ID NO: 285320 - DNA, 12 bp, Artificial Sequence
  Oligonucleotide primer for the detection of SNP TSC0012239
taggatattttt

SEQ ID NO: 285321 - DNA, 12 bp, Artificial Sequence
  Oligonucleotide primer for the detection of SNP TSC0012240
ctacctttatct

SEQ ID NO: 285322 - DNA, 12 bp, Artificial Sequence
  Oligonucleotide primer for the detection of SNP TSC0012240
attataaataaa

SEQ ID NO: 285323 - DNA, 12 bp, Artificial Sequence
  Oligonucleotide primer for the detection of SNP TSC0012240
actataaataaa

SEQ ID NO: 285324 - DNA, 12 bp, Artificial Sequence
  Oligonucleotide primer for the detection of SNP TSC0012241
ccatattattct

SEQ ID NO: 285325 - DNA, 12 bp, Artificial Sequence
  Oligonucleotide primer for the detection of SNP TSC0012241
ccgtattattct

SEQ ID NO: 285326 - DNA, 12 bp, Artificial Sequence
  Oligonucleotide primer for the detection of SNP TSC0012241
tattaatgttta

SEQ ID NO: 285327 - DNA, 12 bp, Artificial Sequence
  Oligonucleotide primer for the detection of SNP TSC0012244
aaattccaataa

SEQ ID NO: 285328 - DNA, 12 bp, Artificial Sequence
  Oligonucleotide primer for the detection of SNP TSC0012244
ttgaagtaggag

SEQ ID NO: 285329 - DNA, 12 bp, Artificial Sequence
  Oligonukleotid-Primer
ctaaaacaaaaa

SEQ ID NO: 285330 - DNA, 12 bp, Artificial Sequence
  Oligonucleotide primer for the detection of SNP TSC0012244
ggttttagtgat

SEQ ID NO: 285331 - DNA, 12 bp, Artificial Sequence
  Oligonucleotide primer for the detection of SNP TSC0012245
tctatatactaa

SEQ ID NO: 285332 - DNA, 12 bp, Artificial Sequence
  Oligonucleotide primer for the detection of SNP TSC0012245
attgtatatgta

SEQ ID NO: 285333 - DNA, 12 bp, Artificial Sequence
  Oligonucleotide primer for the detection of SNP TSC0012245
attgtatacgta

SEQ ID NO: 285334 - DNA, 12 bp, Artificial Sequence
  Oligonucleotide primer for the detection of SNP TSC0012245
ttatacacataa

SEQ ID NO: 285335 - DNA, 12 bp, Artificial Sequence
  Oligonucleotide primer for the detection of SNP TSC0012245
ttatacacgtaa

SEQ ID NO: 285336 - DNA, 12 bp, Artificial Sequence
  Oligonucleotide primer for the detection of SNP TSC0012245
tatttgtgtatt

SEQ ID NO: 285337 - DNA, 12 bp, Artificial Sequence
  Oligonucleotide primer for the detection of SNP TSC0012248
ccaaaaatccta

SEQ ID NO: 285338 - DNA, 12 bp, Artificial Sequence
  Oligonucleotide primer for the detection of SNP TSC0012248
ttttgttaatgt

SEQ ID NO: 285339 - DNA, 12 bp, Artificial Sequence
  Oligonucleotide primer for the detection of SNP TSC0012248
tcttactaatac

SEQ ID NO: 285340 - DNA, 12 bp, Artificial Sequence
  Oligonucleotide primer for the detection of SNP TSC0012248
ttaggagtttta

SEQ ID NO: 285341 - DNA, 12 bp, Artificial Sequence
  Oligonucleotide primer for the detection of SNP TSC0012249
atcatatttata

SEQ ID NO: 285342 - DNA, 12 bp, Artificial Sequence
  Oligonucleotide primer for the detection of SNP TSC0012249
ctctccactacc

SEQ ID NO: 285343 - DNA, 12 bp, Artificial Sequence
  Oligonucleotide primer for the detection of SNP TSC0012249
ctctccgctacc

SEQ ID NO: 285344 - DNA, 12 bp, Artificial Sequence
  Oligonucleotide primer for the detection of SNP TSC0012249
gttatgtttgtg

SEQ ID NO: 285345 - DNA, 12 bp, Artificial Sequence
  Oligonucleotide primer for the detection of SNP TSC0012250
tctataatatat

SEQ ID NO: 285346 - DNA, 12 bp, Artificial Sequence
  Oligonucleotide primer for the detection of SNP TSC0012250
aggtttatatag

SEQ ID NO: 285347 - DNA, 12 bp, Artificial Sequence
  Oligonucleotide primer for the detection of SNP TSC0012251
tctataaaataa

SEQ ID NO: 285348 - DNA, 12 bp, Artificial Sequence
  Oligonucleotide primer for the detection of SNP TSC0012251
tttgaagtaatg

SEQ ID NO: 285349 - DNA, 12 bp, Artificial Sequence
  Oligonucleotide primer for the detection of SNP TSC0012251
tttataaaataa

SEQ ID NO: 285350 - DNA, 12 bp, Artificial Sequence
  Oligonucleotide primer for the detection of SNP TSC0012253
ataaacactttc

SEQ ID NO: 285351 - DNA, 12 bp, Artificial Sequence
  Oligonucleotide primer for the detection of SNP TSC0012253
gatattttagaa

SEQ ID NO: 285352 - DNA, 12 bp, Artificial Sequence
  Oligonucleotide primer for the detection of SNP TSC0012253
aacactccaaaa

SEQ ID NO: 285353 - DNA, 12 bp, Artificial Sequence
  Oligonucleotide primer for the detection of SNP TSC0012253
atgagtattttt

SEQ ID NO: 285354 - DNA, 12 bp, Artificial Sequence
  Oligonucleotide primer for the detection of SNP TSC0012254
atcaaaatcaac

SEQ ID NO: 285355 - DNA, 12 bp, Artificial Sequence
  Oligonucleotide primer for the detection of SNP TSC0012254
taatttatttaa

SEQ ID NO: 285356 - DNA, 12 bp, Artificial Sequence
  Oligonucleotide primer for the detection of SNP TSC0012254
caatccattcaa

SEQ ID NO: 285357 - DNA, 12 bp, Artificial Sequence
  Oligonucleotide primer for the detection of SNP TSC0012254
attaaaattaat

SEQ ID NO: 285358 - DNA, 12 bp, Artificial Sequence
  Oligonucleotide primer for the detection of SNP TSC0012255
aattctaccctc

SEQ ID NO: 285359 - DNA, 12 bp, Artificial Sequence
  Oligonucleotide primer for the detection of SNP TSC0012255
tttgttggtatg

SEQ ID NO: 285360 - DNA, 12 bp, Artificial Sequence
  Oligonucleotide primer for the detection of SNP TSC0012255
tttgttggtacg

SEQ ID NO: 285361 - DNA, 12 bp, Artificial Sequence
  Oligonucleotide primer for the detection of SNP TSC0012260
atatctatctaa

SEQ ID NO: 285362 - DNA, 12 bp, Artificial Sequence
  Oligonucleotide primer for the detection of SNP TSC0012260
gtgaaaaaggat

SEQ ID NO: 285363 - DNA, 12 bp, Artificial Sequence
  Oligonucleotide primer for the detection of SNP TSC0012260
atttgtttaatt

SEQ ID NO: 285364 - DNA, 12 bp, Artificial Sequence
  Oligonucleotide primer for the detection of SNP TSC0012261
cacactctatcc

SEQ ID NO: 285365 - DNA, 12 bp, Artificial Sequence
  Oligonucleotide primer for the detection of SNP TSC0012261
cacgctctatcc

SEQ ID NO: 285366 - DNA, 12 bp, Artificial Sequence
  Oligonucleotide primer for the detection of SNP TSC0012261
gtttattttttg

SEQ ID NO: 285367 - DNA, 12 bp, Artificial Sequence
  Oligonucleotide primer for the detection of SNP TSC0012264
ctacactccaac

SEQ ID NO: 285368 - DNA, 12 bp, Artificial Sequence
  Oligonucleotide primer for the detection of SNP TSC0012264
attgtgttgttt

SEQ ID NO: 285369 - DNA, 12 bp, Artificial Sequence
  Oligonucleotide primer for the detection of SNP TSC0012264
ctatattaccca

SEQ ID NO: 285370 - DNA, 12 bp, Artificial Sequence
  Oligonucleotide primer for the detection of SNP TSC0012264
ttgtattttagt

SEQ ID NO: 285371 - DNA, 12 bp, Artificial Sequence
  Oligonucleotide primer for the detection of SNP TSC0012265
aatcacttaaac

SEQ ID NO: 285372 - DNA, 12 bp, Artificial Sequence
  Oligonucleotide primer for the detection of SNP TSC0012265
attttatttttt

SEQ ID NO: 285373 - DNA, 12 bp, Artificial Sequence
  Oligonucleotide primer for the detection of SNP TSC0012265
ctctatctccca

SEQ ID NO: 285374 - DNA, 12 bp, Artificial Sequence
  Oligonucleotide primer for the detection of SNP TSC0012265
gattatttgaat

SEQ ID NO: 285375 - DNA, 12 bp, Artificial Sequence
  Oligonucleotide primer for the detection of SNP TSC0012266
acaatacaattc

SEQ ID NO: 285376 - DNA, 12 bp, Artificial Sequence
  Oligonucleotide primer for the detection of SNP TSC0012266
acaatacgattc

SEQ ID NO: 285377 - DNA, 12 bp, Artificial Sequence
  Oligonucleotide primer for the detection of SNP TSC0012266
gggttatgagtt

SEQ ID NO: 285378 - DNA, 12 bp, Artificial Sequence
  Oligonucleotide primer for the detection of SNP TSC0012266
aaattataaatt

SEQ ID NO: 285379 - DNA, 12 bp, Artificial Sequence
  Oligonucleotide primer for the detection of SNP TSC0012266
atagtgtggttt

SEQ ID NO: 285380 - DNA, 12 bp, Artificial Sequence
  Oligonucleotide primer for the detection of SNP TSC0012266
atagtgcggttt

SEQ ID NO: 285381 - DNA, 12 bp, Artificial Sequence
  Oligonucleotide primer for the detection of SNP TSC0012267
aacttaacatca

SEQ ID NO: 285382 - DNA, 12 bp, Artificial Sequence
  Oligonucleotide primer for the detection of SNP TSC0012267
ttagtttatttt

SEQ ID NO: 285383 - DNA, 12 bp, Artificial Sequence
  Oligonucleotide primer for the detection of SNP TSC0012267
ccaacttattcc

SEQ ID NO: 285384 - DNA, 12 bp, Artificial Sequence
  Oligonucleotide primer for the detection of SNP TSC0012267
agtttagtatta

SEQ ID NO: 285385 - DNA, 12 bp, Artificial Sequence
  Oligonucleotide primer for the detection of SNP TSC0012268
taaaaactaacc

SEQ ID NO: 285386 - DNA, 12 bp, Artificial Sequence
  Oligonucleotide primer for the detection of SNP TSC0012268
tggtttttttag

SEQ ID NO: 285387 - DNA, 12 bp, Artificial Sequence
  Oligonucleotide primer for the detection of SNP TSC0012268
taatcctcccaa

SEQ ID NO: 285388 - DNA, 12 bp, Artificial Sequence
  Oligonucleotide primer for the detection of SNP TSC0012268
tgggaattggtt

SEQ ID NO: 285389 - DNA, 12 bp, Artificial Sequence
  Oligonucleotide primer for the detection of SNP TSC0012269
tcccataaacac

SEQ ID NO: 285390 - DNA, 12 bp, Artificial Sequence
  Oligonucleotide primer for the detection of SNP TSC0012269
tcccataaacgc

SEQ ID NO: 285391 - DNA, 12 bp, Artificial Sequence
  Oligonucleotide primer for the detection of SNP TSC0012269
ttaggaagtgtg

SEQ ID NO: 285392 - DNA, 12 bp, Artificial Sequence
  Oligonucleotide primer for the detection of SNP TSC0012271
atgaaattttgg

SEQ ID NO: 285393 - DNA, 12 bp, Artificial Sequence
  Oligonucleotide primer for the detection of SNP TSC0012272
taatcaccacaa

SEQ ID NO: 285394 - DNA, 12 bp, Artificial Sequence
  Oligonucleotide primer for the detection of SNP TSC0012272
taatcaccacga

SEQ ID NO: 285395 - DNA, 12 bp, Artificial Sequence
  Oligonucleotide primer for the detection of SNP TSC0012272
ggtggtagggtt

SEQ ID NO: 285396 - DNA, 12 bp, Artificial Sequence
  Oligonucleotide primer for the detection of SNP TSC0012272
ggcggtagggtt

SEQ ID NO: 285397 - DNA, 12 bp, Artificial Sequence
  Oligonucleotide primer for the detection of SNP TSC0012272
acaacaaaacca

SEQ ID NO: 285398 - DNA, 12 bp, Artificial Sequence
  Oligonukleotid-Primer
acgacaaaacca

SEQ ID NO: 285399 - DNA, 12 bp, Artificial Sequence
  Oligonucleotide primer for the detection of SNP TSC0012272
gattattatgat

SEQ ID NO: 285400 - DNA, 12 bp, Artificial Sequence
  Oligonucleotide primer for the detection of SNP TSC0012272
gattattacgat

SEQ ID NO: 285401 - DNA, 12 bp, Artificial Sequence
  Oligonucleotide primer for the detection of SNP TSC0012275
catatatacccc

SEQ ID NO: 285402 - DNA, 12 bp, Artificial Sequence
  Oligonucleotide primer for the detection of SNP TSC0012275
cgtatatacccc

SEQ ID NO: 285403 - DNA, 12 bp, Artificial Sequence
  Oligonucleotide primer for the detection of SNP TSC0012276
tctcgaaaaaaa

SEQ ID NO: 285404 - DNA, 12 bp, Artificial Sequence
  Oligonucleotide primer for the detection of SNP TSC0012276
ggaatgtgttgt

SEQ ID NO: 285405 - DNA, 12 bp, Artificial Sequence
  Oligonucleotide primer for the detection of SNP TSC0012276
ggaacgtgttgt

SEQ ID NO: 285406 - DNA, 12 bp, Artificial Sequence
  Oligonucleotide primer for the detection of SNP TSC0012276
aaaacatattac

SEQ ID NO: 285407 - DNA, 12 bp, Artificial Sequence
  Oligonucleotide primer for the detection of SNP TSC0012276
aaaacgtattac

SEQ ID NO: 285408 - DNA, 12 bp, Artificial Sequence
  Oligonucleotide primer for the detection of SNP TSC0012276
ttttggaggaga

SEQ ID NO: 285409 - DNA, 12 bp, Artificial Sequence
  Oligonucleotide primer for the detection of SNP TSC0012276
tttcggaggaga

SEQ ID NO: 285410 - DNA, 12 bp, Artificial Sequence
  Oligonucleotide primer for the detection of SNP TSC0012277
taataaaaccca

SEQ ID NO: 285411 - DNA, 12 bp, Artificial Sequence
  Oligonucleotide primer for the detection of SNP TSC0012277
ttttaggagatt

SEQ ID NO: 285412 - DNA, 12 bp, Artificial Sequence
  Oligonucleotide primer for the detection of SNP TSC0012277
ttttaggagatc

SEQ ID NO: 285413 - DNA, 12 bp, Artificial Sequence
  Oligonucleotide primer for the detection of SNP TSC0012277
ctccctaaaaaa

SEQ ID NO: 285414 - DNA, 12 bp, Artificial Sequence
  Oligonucleotide primer for the detection of SNP TSC0012277
tggtgggattta

SEQ ID NO: 285415 - DNA, 12 bp, Artificial Sequence
  Oligonucleotide primer for the detection of SNP TSC0012278
aacacatatatt

SEQ ID NO: 285416 - DNA, 12 bp, Artificial Sequence
  Oligonucleotide primer for the detection of SNP TSC0012278
tatatgtgtgta

SEQ ID NO: 285417 - DNA, 12 bp, Artificial Sequence
  Oligonucleotide primer for the detection of SNP TSC0012278
aatatatatatt

SEQ ID NO: 285418 - DNA, 12 bp, Artificial Sequence
  Oligonucleotide primer for the detection of SNP TSC0012279
caattcaaattc

SEQ ID NO: 285419 - DNA, 12 bp, Artificial Sequence
  Oligonucleotide primer for the detection of SNP TSC0012279
cgattcaaattc

SEQ ID NO: 285420 - DNA, 12 bp, Artificial Sequence
  Oligonucleotide primer for the detection of SNP TSC0012279
gatgatgggtgg

SEQ ID NO: 285421 - DNA, 12 bp, Artificial Sequence
  Oligonucleotide primer for the detection of SNP TSC0012280
ctattaatctcc

SEQ ID NO: 285422 - DNA, 12 bp, Artificial Sequence
  Oligonucleotide primer for the detection of SNP TSC0012280
gagtgttggtgg

SEQ ID NO: 285423 - DNA, 12 bp, Artificial Sequence
  Oligonucleotide primer for the detection of SNP TSC0012280
aaatactaataa

SEQ ID NO: 285424 - DNA, 12 bp, Artificial Sequence
  Oligonucleotide primer for the detection of SNP TSC0012280
tgttgatttttt

SEQ ID NO: 285425 - DNA, 12 bp, Artificial Sequence
  Oligonucleotide primer for the detection of SNP TSC0012281
tttcacattttc

SEQ ID NO: 285426 - DNA, 12 bp, Artificial Sequence
  Oligonucleotide primer for the detection of SNP TSC0012281
tgattgatgttt

SEQ ID NO: 285427 - DNA, 12 bp, Artificial Sequence
  Oligonucleotide primer for the detection of SNP TSC0012282
attaatctcttc

SEQ ID NO: 285428 - DNA, 12 bp, Artificial Sequence
  Oligonucleotide primer for the detection of SNP TSC0012282
gataatttatta

SEQ ID NO: 285429 - DNA, 12 bp, Artificial Sequence
  Oligonucleotide primer for the detection of SNP TSC0012283
caacatataaaa

SEQ ID NO: 285430 - DNA, 12 bp, Artificial Sequence
  Oligonucleotide primer for the detection of SNP TSC0012283
tttagagtatat

SEQ ID NO: 285431 - DNA, 12 bp, Artificial Sequence
  Oligonucleotide primer for the detection of SNP TSC0012283
tctcaaaataca

SEQ ID NO: 285432 - DNA, 12 bp, Artificial Sequence
  Oligonucleotide primer for the detection of SNP TSC0012283
atagtatgtgaa

SEQ ID NO: 285433 - DNA, 12 bp, Artificial Sequence
  Oligonucleotide primer for the detection of SNP TSC0012286
tcatacaaacat

SEQ ID NO: 285434 - DNA, 12 bp, Artificial Sequence
  Oligonucleotide primer for the detection of SNP TSC0012286
tgagaagtaata

SEQ ID NO: 285435 - DNA, 12 bp, Artificial Sequence
  Oligonucleotide primer for the detection of SNP TSC0012286
taaaaaacaata

SEQ ID NO: 285436 - DNA, 12 bp, Artificial Sequence
  Oligonucleotide primer for the detection of SNP TSC0012286
ttatataaatat

SEQ ID NO: 285437 - DNA, 12 bp, Artificial Sequence
  Oligonucleotide primer for the detection of SNP TSC0012288
atgtatgtataa

SEQ ID NO: 285438 - DNA, 12 bp, Artificial Sequence
  Oligonucleotide primer for the detection of SNP TSC0012289
tagttttttgtt

SEQ ID NO: 285439 - DNA, 12 bp, Artificial Sequence
  Oligonucleotide primer for the detection of SNP TSC0012289
ctcaactcccta

SEQ ID NO: 285440 - DNA, 12 bp, Artificial Sequence
  Oligonucleotide primer for the detection of SNP TSC0012289
gagaagaaagat

SEQ ID NO: 285441 - DNA, 12 bp, Artificial Sequence
  Oligonucleotide primer for the detection of SNP TSC0012290
aacaaatacatt

SEQ ID NO: 285442 - DNA, 12 bp, Artificial Sequence
  Oligonucleotide primer for the detection of SNP TSC0012290
tgtttatgtaaa

SEQ ID NO: 285443 - DNA, 12 bp, Artificial Sequence
  Oligonucleotide primer for the detection of SNP TSC0012292
aatataaaaaat

SEQ ID NO: 285444 - DNA, 12 bp, Artificial Sequence
  Oligonucleotide primer for the detection of SNP TSC0012292
gaagaaatttag

SEQ ID NO: 285445 - DNA, 12 bp, Artificial Sequence
  Oligonucleotide primer for the detection of SNP TSC0012294
ctacattaatct

SEQ ID NO: 285446 - DNA, 12 bp, Artificial Sequence
  Oligonucleotide primer for the detection of SNP TSC0012294
tatagttaattg

SEQ ID NO: 285447 - DNA, 12 bp, Artificial Sequence
  Oligonucleotide primer for the detection of SNP TSC0012294
tacaactaatta

SEQ ID NO: 285448 - DNA, 12 bp, Artificial Sequence
  Oligonucleotide primer for the detection of SNP TSC0012294
ttgtattagttt

SEQ ID NO: 285449 - DNA, 12 bp, Artificial Sequence
  Oligonucleotide primer for the detection of SNP TSC0012295
tgaggttttgga

SEQ ID NO: 285450 - DNA, 12 bp, Artificial Sequence
  Oligonucleotide primer for the detection of SNP TSC0012296
ttacgtttgtaa

SEQ ID NO: 285451 - DNA, 12 bp, Artificial Sequence
  Oligonucleotide primer for the detection of SNP TSC0012297
ttttatattagt

SEQ ID NO: 285452 - DNA, 12 bp, Artificial Sequence
  Oligonucleotide primer for the detection of SNP TSC0012297
acctcacaccaa

SEQ ID NO: 285453 - DNA, 12 bp, Artificial Sequence
  Oligonucleotide primer for the detection of SNP TSC0012297
gcctcacaccaa

SEQ ID NO: 285454 - DNA, 12 bp, Artificial Sequence
  Oligonucleotide primer for the detection of SNP TSC0012297
gttgtgggaggt

SEQ ID NO: 285455 - DNA, 12 bp, Artificial Sequence
  Oligonucleotide primer for the detection of SNP TSC0012297
gttgtgggaggc

SEQ ID NO: 285456 - DNA, 12 bp, Artificial Sequence
  Oligonucleotide primer for the detection of SNP TSC0012298
actaaaataaat

SEQ ID NO: 285457 - DNA, 12 bp, Artificial Sequence
  Oligonucleotide primer for the detection of SNP TSC0012298
gggtaaaagtta

SEQ ID NO: 285458 - DNA, 12 bp, Artificial Sequence
  Oligonucleotide primer for the detection of SNP TSC0012298
aaataaaaacta

SEQ ID NO: 285459 - DNA, 12 bp, Artificial Sequence
  Oligonucleotide primer for the detection of SNP TSC0012298
gttgagatgaat

SEQ ID NO: 285460 - DNA, 12 bp, Artificial Sequence
  Oligonucleotide primer for the detection of SNP TSC0012299
cttttcaatttt

SEQ ID NO: 285461 - DNA, 12 bp, Artificial Sequence
  Oligonucleotide primer for the detection of SNP TSC0012299
taaaggtattag

SEQ ID NO: 285462 - DNA, 12 bp, Artificial Sequence
  Oligonucleotide primer for the detection of SNP TSC0012300
accaaatactaa

SEQ ID NO: 285463 - DNA, 12 bp, Artificial Sequence
  Oligonucleotide primer for the detection of SNP TSC0012300
atagtttatatt

SEQ ID NO: 285464 - DNA, 12 bp, Artificial Sequence
  Oligonucleotide primer for the detection of SNP TSC0012300
acaattcacact

SEQ ID NO: 285465 - DNA, 12 bp, Artificial Sequence
  Oligonucleotide primer for the detection of SNP TSC0012300
attagatgttgg

SEQ ID NO: 285466 - DNA, 12 bp, Artificial Sequence
  Oligonucleotide primer for the detection of SNP TSC0012301
ctaaaaaatcat

SEQ ID NO: 285467 - DNA, 12 bp, Artificial Sequence
  Oligonucleotide primer for the detection of SNP TSC0012301
actttttcctac

SEQ ID NO: 285468 - DNA, 12 bp, Artificial Sequence
  Oligonucleotide primer for the detection of SNP TSC0012301
ttgagaaattat

SEQ ID NO: 285469 - DNA, 12 bp, Artificial Sequence
  Oligonucleotide primer for the detection of SNP TSC0012302
attcattacaaa

SEQ ID NO: 285470 - DNA, 12 bp, Artificial Sequence
  Oligonucleotide primer for the detection of SNP TSC0012302
aattataaatat

SEQ ID NO: 285471 - DNA, 12 bp, Artificial Sequence
  Oligonucleotide primer for the detection of SNP TSC0012302
aattacaaacat

SEQ ID NO: 285472 - DNA, 12 bp, Artificial Sequence
  Oligonucleotide primer for the detection of SNP TSC0012302
tatttattgtaa

SEQ ID NO: 285473 - DNA, 12 bp, Artificial Sequence
  Oligonucleotide primer for the detection of SNP TSC0012303
agtagagatggg

SEQ ID NO: 285474 - DNA, 12 bp, Artificial Sequence
  Oligonucleotide primer for the detection of SNP TSC0012303
agtagagacggg

SEQ ID NO: 285475 - DNA, 12 bp, Artificial Sequence
  Oligonucleotide primer for the detection of SNP TSC0012304
ttaaacaaaaat

SEQ ID NO: 285476 - DNA, 12 bp, Artificial Sequence
  Oligonucleotide primer for the detection of SNP TSC0012304
ggtattgaagaa

SEQ ID NO: 285477 - DNA, 12 bp, Artificial Sequence
  Oligonucleotide primer for the detection of SNP TSC0012305
attattctcaat

SEQ ID NO: 285478 - DNA, 12 bp, Artificial Sequence
  Oligonucleotide primer for the detection of SNP TSC0012305
agaagaaagtta

SEQ ID NO: 285479 - DNA, 12 bp, Artificial Sequence
  Oligonucleotide primer for the detection of SNP TSC0012307
aacaaaactttt

SEQ ID NO: 285480 - DNA, 12 bp, Artificial Sequence
  Oligonucleotide primer for the detection of SNP TSC0012307
aagaaaaaataa

SEQ ID NO: 285481 - DNA, 12 bp, Artificial Sequence
  Oligonucleotide primer for the detection of SNP TSC0012309
aaaaaacaatct

SEQ ID NO: 285482 - DNA, 12 bp, Artificial Sequence
  Oligonucleotide primer for the detection of SNP TSC0012309
cactcctaaaaa

SEQ ID NO: 285483 - DNA, 12 bp, Artificial Sequence
  Oligonucleotide primer for the detection of SNP TSC0012309
aaagagtaattt

SEQ ID NO: 285484 - DNA, 12 bp, Artificial Sequence
  Oligonucleotide primer for the detection of SNP TSC0012310
ttctttaaaatc

SEQ ID NO: 285485 - DNA, 12 bp, Artificial Sequence
  Oligonucleotide primer for the detection of SNP TSC0012310
ttttttgtgatc

SEQ ID NO: 285486 - DNA, 12 bp, Artificial Sequence
  Oligonucleotide primer for the detection of SNP TSC0012310
attcctttataa

SEQ ID NO: 285487 - DNA, 12 bp, Artificial Sequence
  Oligonucleotide primer for the detection of SNP TSC0012315
tttccacttccc

SEQ ID NO: 285488 - DNA, 12 bp, Artificial Sequence
  Oligonucleotide primer for the detection of SNP TSC0012315
tgggatgtttaa

SEQ ID NO: 285489 - DNA, 12 bp, Artificial Sequence
  Oligonucleotide primer for the detection of SNP TSC0012316
ttaaaatcaaca

SEQ ID NO: 285490 - DNA, 12 bp, Artificial Sequence
  Oligonucleotide primer for the detection of SNP TSC0012316
ttaaaatcgaca

SEQ ID NO: 285491 - DNA, 12 bp, Artificial Sequence
  Oligonucleotide primer for the detection of SNP TSC0012316
gtatttagtaat

SEQ ID NO: 285492 - DNA, 12 bp, Artificial Sequence
  Oligonucleotide primer for the detection of SNP TSC0012316
aatatctaataa

SEQ ID NO: 285493 - DNA, 12 bp, Artificial Sequence
  Oligonucleotide primer for the detection of SNP TSC0012316
ttgaaattgata

SEQ ID NO: 285494 - DNA, 12 bp, Artificial Sequence
  Oligonucleotide primer for the detection of SNP TSC0012316
ttgaaatcgata

SEQ ID NO: 285495 - DNA, 12 bp, Artificial Sequence
  Oligonucleotide primer for the detection of SNP TSC0012317
acataaaaattc

SEQ ID NO: 285496 - DNA, 12 bp, Artificial Sequence
  Oligonucleotide primer for the detection of SNP TSC0012317
gggagtgttttg

SEQ ID NO: 285497 - DNA, 12 bp, Artificial Sequence
  Oligonucleotide primer for the detection of SNP TSC0012318
tacctaaacaac

SEQ ID NO: 285498 - DNA, 12 bp, Artificial Sequence
  Oligonucleotide primer for the detection of SNP TSC0012318
taagatgtttta

SEQ ID NO: 285499 - DNA, 12 bp, Artificial Sequence
  Oligonukleotid-Primer
taaaatactcca

SEQ ID NO: 285500 - DNA, 12 bp, Artificial Sequence
  Oligonucleotide primer for the detection of SNP TSC0012318
tgtttgaataat

SEQ ID NO: 285501 - DNA, 12 bp, Artificial Sequence
  Oligonucleotide primer for the detection of SNP TSC0012319
tcaacctcacac

SEQ ID NO: 285502 - DNA, 12 bp, Artificial Sequence
  Oligonucleotide primer for the detection of SNP TSC0012319
tcaacctcgcac

SEQ ID NO: 285503 - DNA, 12 bp, Artificial Sequence
  Oligonucleotide primer for the detection of SNP TSC0012319
acccaaaccata

SEQ ID NO: 285504 - DNA, 12 bp, Artificial Sequence
  Oligonucleotide primer for the detection of SNP TSC0012319
ttagttttgtat

SEQ ID NO: 285505 - DNA, 12 bp, Artificial Sequence
  Oligonucleotide primer for the detection of SNP TSC0012319
ttagtttcgtat

SEQ ID NO: 285506 - DNA, 12 bp, Artificial Sequence
  Oligonucleotide primer for the detection of SNP TSC0012320
aacccttataat

SEQ ID NO: 285507 - DNA, 12 bp, Artificial Sequence
  Oligonucleotide primer for the detection of SNP TSC0012320
tagaatgagatg

SEQ ID NO: 285508 - DNA, 12 bp, Artificial Sequence
  Oligonucleotide primer for the detection of SNP TSC0012321
atttaggaatag

SEQ ID NO: 285509 - DNA, 12 bp, Artificial Sequence
  Oligonucleotide primer for the detection of SNP TSC0012323
tcaactctccac

SEQ ID NO: 285510 - DNA, 12 bp, Artificial Sequence
  Oligonucleotide primer for the detection of SNP TSC0012323
tagttattgagt

SEQ ID NO: 285511 - DNA, 12 bp, Artificial Sequence
  Oligonucleotide primer for the detection of SNP TSC0012323
aactactaaaca

SEQ ID NO: 285512 - DNA, 12 bp, Artificial Sequence
  Oligonucleotide primer for the detection of SNP TSC0012323
ttaattttttat

SEQ ID NO: 285513 - DNA, 12 bp, Artificial Sequence
  Oligonucleotide primer for the detection of SNP TSC0012323
ttaattttttac

SEQ ID NO: 285514 - DNA, 12 bp, Artificial Sequence
  Oligonucleotide primer for the detection of SNP TSC0012324
accatcctaact

SEQ ID NO: 285515 - DNA, 12 bp, Artificial Sequence
  Oligonucleotide primer for the detection of SNP TSC0012324
ggggttttattg

SEQ ID NO: 285516 - DNA, 12 bp, Artificial Sequence
  Oligonucleotide primer for the detection of SNP TSC0012324
ggggttttatcg

SEQ ID NO: 285517 - DNA, 12 bp, Artificial Sequence
  Oligonucleotide primer for the detection of SNP TSC0012325
aaataatctctt

SEQ ID NO: 285518 - DNA, 12 bp, Artificial Sequence
  Oligonucleotide primer for the detection of SNP TSC0012325
aaattaaagggg

SEQ ID NO: 285519 - DNA, 12 bp, Artificial Sequence
  Oligonucleotide primer for the detection of SNP TSC0012326
aaaataaatatc

SEQ ID NO: 285520 - DNA, 12 bp, Artificial Sequence
  Oligonucleotide primer for the detection of SNP TSC0012326
gtgaatattgtg

SEQ ID NO: 285521 - DNA, 12 bp, Artificial Sequence
  Oligonucleotide primer for the detection of SNP TSC0012331
ataattctaatc

SEQ ID NO: 285522 - DNA, 12 bp, Artificial Sequence
  Oligonucleotide primer for the detection of SNP TSC0012331
ttggtagtatag

SEQ ID NO: 285523 - DNA, 12 bp, Artificial Sequence
  Oligonucleotide primer for the detection of SNP TSC0012331
tcggtagtatag

SEQ ID NO: 285524 - DNA, 12 bp, Artificial Sequence
  Oligonucleotide primer for the detection of SNP TSC0012333
gtttttgattat

SEQ ID NO: 285525 - DNA, 12 bp, Artificial Sequence
  Oligonucleotide primer for the detection of SNP TSC0012333
tccttaatcata

SEQ ID NO: 285526 - DNA, 12 bp, Artificial Sequence
  Oligonucleotide primer for the detection of SNP TSC0012333
agaggttaggat

SEQ ID NO: 285527 - DNA, 12 bp, Artificial Sequence
  Oligonucleotide primer for the detection of SNP TSC0012333
agaggttaggac

SEQ ID NO: 285528 - DNA, 12 bp, Artificial Sequence
  Oligonucleotide primer for the detection of SNP TSC0012336
tacaaaaaatat

SEQ ID NO: 285529 - DNA, 12 bp, Artificial Sequence
  Oligonucleotide primer for the detection of SNP TSC0012336
tacgaaaaatat

SEQ ID NO: 285530 - DNA, 12 bp, Artificial Sequence
  Oligonucleotide primer for the detection of SNP TSC0012336
gaatgaattaga

SEQ ID NO: 285531 - DNA, 12 bp, Artificial Sequence
  Oligonucleotide primer for the detection of SNP TSC0012337
aaccatttctcc

SEQ ID NO: 285532 - DNA, 12 bp, Artificial Sequence
  Oligonucleotide primer for the detection of SNP TSC0012337
tgggtttttgga

SEQ ID NO: 285533 - DNA, 12 bp, Artificial Sequence
  Oligonucleotide primer for the detection of SNP TSC0012339
agtgttgagggg

SEQ ID NO: 285534 - DNA, 12 bp, Artificial Sequence
  Oligonucleotide primer for the detection of SNP TSC0012340
taaacctaaact

SEQ ID NO: 285535 - DNA, 12 bp, Artificial Sequence
  Oligonucleotide primer for the detection of SNP TSC0012340
ttgtggatattg

SEQ ID NO: 285536 - DNA, 12 bp, Artificial Sequence
  Oligonucleotide primer for the detection of SNP TSC0012341
tcctataaacac

SEQ ID NO: 285537 - DNA, 12 bp, Artificial Sequence
  Oligonucleotide primer for the detection of SNP TSC0012341
gtttgggtttag

SEQ ID NO: 285538 - DNA, 12 bp, Artificial Sequence
  Oligonucleotide primer for the detection of SNP TSC0012341
acctaaactcaa

SEQ ID NO: 285539 - DNA, 12 bp, Artificial Sequence
  Oligonucleotide primer for the detection of SNP TSC0012341
ttttgtggatat

SEQ ID NO: 285540 - DNA, 12 bp, Artificial Sequence
  Oligonucleotide primer for the detection of SNP TSC0012342
acaactaaaaaa

SEQ ID NO: 285541 - DNA, 12 bp, Artificial Sequence
  Oligonucleotide primer for the detection of SNP TSC0012342
gttttgttgggt

SEQ ID NO: 285542 - DNA, 12 bp, Artificial Sequence
  Oligonucleotide primer for the detection of SNP TSC0012342
gttttgtcgggt

SEQ ID NO: 285543 - DNA, 12 bp, Artificial Sequence
  Oligonucleotide primer for the detection of SNP TSC0012342
gttttgttgggc

SEQ ID NO: 285544 - DNA, 12 bp, Artificial Sequence
  Oligonucleotide primer for the detection of SNP TSC0012342
gttttgtcgggc

SEQ ID NO: 285545 - DNA, 12 bp, Artificial Sequence
  Oligonucleotide primer for the detection of SNP TSC0012342
actctaccaaac

SEQ ID NO: 285546 - DNA, 12 bp, Artificial Sequence
  Oligonucleotide primer for the detection of SNP TSC0012342
actctaccgaac

SEQ ID NO: 285547 - DNA, 12 bp, Artificial Sequence
  Oligonucleotide primer for the detection of SNP TSC0012342
atagttaaggag

SEQ ID NO: 285548 - DNA, 12 bp, Artificial Sequence
  Oligonucleotide primer for the detection of SNP TSC0012345
aaaacaacaaat

SEQ ID NO: 285549 - DNA, 12 bp, Artificial Sequence
  Oligonucleotide primer for the detection of SNP TSC0012345
taggtagtttgg

SEQ ID NO: 285550 - DNA, 12 bp, Artificial Sequence
  Oligonucleotide primer for the detection of SNP TSC0012347
taaattaattct

SEQ ID NO: 285551 - DNA, 12 bp, Artificial Sequence
  Oligonucleotide primer for the detection of SNP TSC0012347
ttttttttaatg

SEQ ID NO: 285552 - DNA, 12 bp, Artificial Sequence
  Oligonucleotide primer for the detection of SNP TSC0012350
atccaaataact

SEQ ID NO: 285553 - DNA, 12 bp, Artificial Sequence
  Oligonucleotide primer for the detection of SNP TSC0012350
gtttattttgcg

SEQ ID NO: 285554 - DNA, 12 bp, Artificial Sequence
  Oligonucleotide primer for the detection of SNP TSC0012350
acccatcctaca

SEQ ID NO: 285555 - DNA, 12 bp, Artificial Sequence
  Oligonucleotide primer for the detection of SNP TSC0012350
acccatcctacg

SEQ ID NO: 285556 - DNA, 12 bp, Artificial Sequence
  Oligonucleotide primer for the detection of SNP TSC0012350
atttaggtggtt

SEQ ID NO: 285557 - DNA, 12 bp, Artificial Sequence
  Oligonucleotide primer for the detection of SNP TSC0012351
tttagtgtgtag

SEQ ID NO: 285558 - DNA, 12 bp, Artificial Sequence
  Oligonucleotide primer for the detection of SNP TSC0012351
ttaatatacaaa

SEQ ID NO: 285559 - DNA, 12 bp, Artificial Sequence
  Oligonucleotide primer for the detection of SNP TSC0012351
gaggaagaattt

SEQ ID NO: 285560 - DNA, 12 bp, Artificial Sequence
  Oligonucleotide primer for the detection of SNP TSC0012352
ccaaaataatct

SEQ ID NO: 285561 - DNA, 12 bp, Artificial Sequence
  Oligonucleotide primer for the detection of SNP TSC0012352
gaggttaagaga

SEQ ID NO: 285562 - DNA, 12 bp, Artificial Sequence
  Oligonucleotide primer for the detection of SNP TSC0012352
aaaatcaaaaaa

SEQ ID NO: 285563 - DNA, 12 bp, Artificial Sequence
  Oligonucleotide primer for the detection of SNP TSC0012352
gaaatcaaaaaa

SEQ ID NO: 285564 - DNA, 12 bp, Artificial Sequence
  Oligonucleotide primer for the detection of SNP TSC0012352
ttaggatggttt

SEQ ID NO: 285565 - DNA, 12 bp, Artificial Sequence
  Oligonucleotide primer for the detection of SNP TSC0012353
atctaataaatc

SEQ ID NO: 285566 - DNA, 12 bp, Artificial Sequence
  Oligonucleotide primer for the detection of SNP TSC0012353
tattttatagat

SEQ ID NO: 285567 - DNA, 12 bp, Artificial Sequence
  Oligonucleotide primer for the detection of SNP TSC0012353
cattctataaat

SEQ ID NO: 285568 - DNA, 12 bp, Artificial Sequence
  Oligonucleotide primer for the detection of SNP TSC0012353
atttagtaagtt

SEQ ID NO: 285569 - DNA, 12 bp, Artificial Sequence
  Oligonucleotide primer for the detection of SNP TSC0012354
ttaactaaacat

SEQ ID NO: 285570 - DNA, 12 bp, Artificial Sequence
  Oligonucleotide primer for the detection of SNP TSC0012354
tataggtgtttg

SEQ ID NO: 285571 - DNA, 12 bp, Artificial Sequence
  Oligonucleotide primer for the detection of SNP TSC0012354
tataggtgttcg

SEQ ID NO: 285572 - DNA, 12 bp, Artificial Sequence
  Oligonucleotide primer for the detection of SNP TSC0012354
tacaaataccca

SEQ ID NO: 285573 - DNA, 12 bp, Artificial Sequence
  Oligonucleotide primer for the detection of SNP TSC0012354
tacaaatacccg

SEQ ID NO: 285574 - DNA, 12 bp, Artificial Sequence
  Oligonucleotide primer for the detection of SNP TSC0012355
aatacaaaaaaa

SEQ ID NO: 285575 - DNA, 12 bp, Artificial Sequence
  Oligonucleotide primer for the detection of SNP TSC0012355
aatataaaaaaa

SEQ ID NO: 285576 - DNA, 12 bp, Artificial Sequence
  Oligonucleotide primer for the detection of SNP TSC0012356
attctacccaat

SEQ ID NO: 285577 - DNA, 12 bp, Artificial Sequence
  Oligonucleotide primer for the detection of SNP TSC0012356
tagtggaatata

SEQ ID NO: 285578 - DNA, 12 bp, Artificial Sequence
  Oligonucleotide primer for the detection of SNP TSC0012359
attacctctctt

SEQ ID NO: 285579 - DNA, 12 bp, Artificial Sequence
  Oligonucleotide primer for the detection of SNP TSC0012359
taagaaggaggg

SEQ ID NO: 285580 - DNA, 12 bp, Artificial Sequence
  Oligonucleotide primer for the detection of SNP TSC0012360
tcacacaacact

SEQ ID NO: 285581 - DNA, 12 bp, Artificial Sequence
  Oligonucleotide primer for the detection of SNP TSC0012360
aatgttttatta

SEQ ID NO: 285582 - DNA, 12 bp, Artificial Sequence
  Oligonucleotide primer for the detection of SNP TSC0012360
aatacttcatta

SEQ ID NO: 285583 - DNA, 12 bp, Artificial Sequence
  Oligonucleotide primer for the detection of SNP TSC0012362
acattaatattt

SEQ ID NO: 285584 - DNA, 12 bp, Artificial Sequence
  Oligonucleotide primer for the detection of SNP TSC0012362
agaggtatttga

SEQ ID NO: 285585 - DNA, 12 bp, Artificial Sequence
  Oligonucleotide primer for the detection of SNP TSC0012363
ctataaataaac

SEQ ID NO: 285586 - DNA, 12 bp, Artificial Sequence
  Oligonucleotide primer for the detection of SNP TSC0012363
ttagtaagatgg

SEQ ID NO: 285587 - DNA, 12 bp, Artificial Sequence
  Oligonucleotide primer for the detection of SNP TSC0012363
ttagtaagacgg

SEQ ID NO: 285588 - DNA, 12 bp, Artificial Sequence
  Oligonucleotide primer for the detection of SNP TSC0012364
tttgatgttttg

SEQ ID NO: 285589 - DNA, 12 bp, Artificial Sequence
  Oligonucleotide primer for the detection of SNP TSC0012364
ttcgatgttttg

SEQ ID NO: 285590 - DNA, 12 bp, Artificial Sequence
  Oligonucleotide primer for the detection of SNP TSC0012364
cccaatacccta

SEQ ID NO: 285591 - DNA, 12 bp, Artificial Sequence
  Oligonucleotide primer for the detection of SNP TSC0012364
cccgatacccta

SEQ ID NO: 285592 - DNA, 12 bp, Artificial Sequence
  Oligonukleotid-Primer
agaagggagtaa

SEQ ID NO: 285593 - DNA, 12 bp, Artificial Sequence
  Oligonucleotide primer for the detection of SNP TSC0012365
attctattctaa

SEQ ID NO: 285594 - DNA, 12 bp, Artificial Sequence
  Oligonucleotide primer for the detection of SNP TSC0012365
taaattatttat

SEQ ID NO: 285595 - DNA, 12 bp, Artificial Sequence
  Oligonucleotide primer for the detection of SNP TSC0012365
taaatcatccat

SEQ ID NO: 285596 - DNA, 12 bp, Artificial Sequence
  Oligonucleotide primer for the detection of SNP TSC0012365
gttttattttga

SEQ ID NO: 285597 - DNA, 12 bp, Artificial Sequence
  Oligonucleotide primer for the detection of SNP TSC0012366
caaatctaacct

SEQ ID NO: 285598 - DNA, 12 bp, Artificial Sequence
  Oligonucleotide primer for the detection of SNP TSC0012366
tttgttatggaa

SEQ ID NO: 285599 - DNA, 12 bp, Artificial Sequence
  Oligonucleotide primer for the detection of SNP TSC0012366
tttatcataaaa

SEQ ID NO: 285600 - DNA, 12 bp, Artificial Sequence
  Oligonucleotide primer for the detection of SNP TSC0012366
taagtttaattt

SEQ ID NO: 285601 - DNA, 12 bp, Artificial Sequence
  Oligonucleotide primer for the detection of SNP TSC0012369
aacctctaaaat

SEQ ID NO: 285602 - DNA, 12 bp, Artificial Sequence
  Oligonucleotide primer for the detection of SNP TSC0012369
tgaaatgttgaa

SEQ ID NO: 285603 - DNA, 12 bp, Artificial Sequence
  Oligonucleotide primer for the detection of SNP TSC0012370
ttaattttccaa

SEQ ID NO: 285604 - DNA, 12 bp, Artificial Sequence
  Oligonucleotide primer for the detection of SNP TSC0012370
aatttgtggttt

SEQ ID NO: 285605 - DNA, 12 bp, Artificial Sequence
  Oligonucleotide primer for the detection of SNP TSC0012370
ttgattttttaa

SEQ ID NO: 285606 - DNA, 12 bp, Artificial Sequence
  Oligonucleotide primer for the detection of SNP TSC0012374
ttctataccaat

SEQ ID NO: 285607 - DNA, 12 bp, Artificial Sequence
  Oligonucleotide primer for the detection of SNP TSC0012374
ttctataccgat

SEQ ID NO: 285608 - DNA, 12 bp, Artificial Sequence
  Oligonucleotide primer for the detection of SNP TSC0012374
tgattagaatag

SEQ ID NO: 285609 - DNA, 12 bp, Artificial Sequence
  Oligonucleotide primer for the detection of SNP TSC0012376
tactttcaatat

SEQ ID NO: 285610 - DNA, 12 bp, Artificial Sequence
  Oligonucleotide primer for the detection of SNP TSC0012376
tgtttttaatgt

SEQ ID NO: 285611 - DNA, 12 bp, Artificial Sequence
  Oligonucleotide primer for the detection of SNP TSC0012377
aaaatataactt

SEQ ID NO: 285612 - DNA, 12 bp, Artificial Sequence
  Oligonucleotide primer for the detection of SNP TSC0012377
gggagagaggta

SEQ ID NO: 285613 - DNA, 12 bp, Artificial Sequence
  Oligonucleotide primer for the detection of SNP TSC0012378
aaataaaaattc

SEQ ID NO: 285614 - DNA, 12 bp, Artificial Sequence
  Oligonucleotide primer for the detection of SNP TSC0012378
tttgttttggat

SEQ ID NO: 285615 - DNA, 12 bp, Artificial Sequence
  Oligonucleotide primer for the detection of SNP TSC0012378
tttgttttggac

SEQ ID NO: 285616 - DNA, 12 bp, Artificial Sequence
  Oligonucleotide primer for the detection of SNP TSC0012378
tttatcctaaac

SEQ ID NO: 285617 - DNA, 12 bp, Artificial Sequence
  Oligonucleotide primer for the detection of SNP TSC0012378
gagtgagggttt

SEQ ID NO: 285618 - DNA, 12 bp, Artificial Sequence
  Oligonucleotide primer for the detection of SNP TSC0012378
gagtgagggttc

SEQ ID NO: 285619 - DNA, 12 bp, Artificial Sequence
  Oligonucleotide primer for the detection of SNP TSC0012379
attatcaaaatt

SEQ ID NO: 285620 - DNA, 12 bp, Artificial Sequence
  Oligonucleotide primer for the detection of SNP TSC0012379
ttttataatttt

SEQ ID NO: 285621 - DNA, 12 bp, Artificial Sequence
  Oligonucleotide primer for the detection of SNP TSC0012379
aacttttataac

SEQ ID NO: 285622 - DNA, 12 bp, Artificial Sequence
  Oligonucleotide primer for the detection of SNP TSC0012379
attgttagagtt

SEQ ID NO: 285623 - DNA, 12 bp, Artificial Sequence
  Oligonucleotide primer for the detection of SNP TSC0012380
actcaacctttc

SEQ ID NO: 285624 - DNA, 12 bp, Artificial Sequence
  Oligonucleotide primer for the detection of SNP TSC0012380
tttttttagagg

SEQ ID NO: 285625 - DNA, 12 bp, Artificial Sequence
  Oligonucleotide primer for the detection of SNP TSC0012381
tctaaaacaaca

SEQ ID NO: 285626 - DNA, 12 bp, Artificial Sequence
  Oligonucleotide primer for the detection of SNP TSC0012381
attgaaagtatt

SEQ ID NO: 285627 - DNA, 12 bp, Artificial Sequence
  Oligonucleotide primer for the detection of SNP TSC0012381
attgaaagtatc

SEQ ID NO: 285628 - DNA, 12 bp, Artificial Sequence
  Oligonucleotide primer for the detection of SNP TSC0012381
ttggggtagtat

SEQ ID NO: 285629 - DNA, 12 bp, Artificial Sequence
  Oligonucleotide primer for the detection of SNP TSC0012382
tttctatataac

SEQ ID NO: 285630 - DNA, 12 bp, Artificial Sequence
  Oligonucleotide primer for the detection of SNP TSC0012382
actcaaattaaa

SEQ ID NO: 285631 - DNA, 12 bp, Artificial Sequence
  Oligonucleotide primer for the detection of SNP TSC0012382
tttttatataat

SEQ ID NO: 285632 - DNA, 12 bp, Artificial Sequence
  Oligonucleotide primer for the detection of SNP TSC0012383
aacaatcattca

SEQ ID NO: 285633 - DNA, 12 bp, Artificial Sequence
  Oligonucleotide primer for the detection of SNP TSC0012383
taggtttgttgg

SEQ ID NO: 285634 - DNA, 12 bp, Artificial Sequence
  Oligonucleotide primer for the detection of SNP TSC0012383
caaatttactaa

SEQ ID NO: 285635 - DNA, 12 bp, Artificial Sequence
  Oligonucleotide primer for the detection of SNP TSC0012384
catatcatcaaa

SEQ ID NO: 285636 - DNA, 12 bp, Artificial Sequence
  Oligonucleotide primer for the detection of SNP TSC0012384
ttaattagtgtt

SEQ ID NO: 285637 - DNA, 12 bp, Artificial Sequence
  Oligonucleotide primer for the detection of SNP TSC0012384
ttaattagcgtt

SEQ ID NO: 285638 - DNA, 12 bp, Artificial Sequence
  Oligonucleotide primer for the detection of SNP TSC0012384
tcttaatcaaca

SEQ ID NO: 285639 - DNA, 12 bp, Artificial Sequence
  Oligonucleotide primer for the detection of SNP TSC0012384
tcttaatcaacg

SEQ ID NO: 285640 - DNA, 12 bp, Artificial Sequence
  Oligonucleotide primer for the detection of SNP TSC0012384
tatgttattaag

SEQ ID NO: 285641 - DNA, 12 bp, Artificial Sequence
  Oligonucleotide primer for the detection of SNP TSC0012385
aaaaatatatca

SEQ ID NO: 285642 - DNA, 12 bp, Artificial Sequence
  Oligonucleotide primer for the detection of SNP TSC0012385
tttaatataaat

SEQ ID NO: 285643 - DNA, 12 bp, Artificial Sequence
  Oligonucleotide primer for the detection of SNP TSC0012385
ctcaatacaaat

SEQ ID NO: 285644 - DNA, 12 bp, Artificial Sequence
  Oligonucleotide primer for the detection of SNP TSC0012385
ggaggtgtgtta

SEQ ID NO: 285645 - DNA, 12 bp, Artificial Sequence
  Oligonucleotide primer for the detection of SNP TSC0012386
aaccactacacc

SEQ ID NO: 285646 - DNA, 12 bp, Artificial Sequence
  Oligonucleotide primer for the detection of SNP TSC0012386
atgtaaaattgg

SEQ ID NO: 285647 - DNA, 12 bp, Artificial Sequence
  Oligonucleotide primer for the detection of SNP TSC0012386
atacaaaattaa

SEQ ID NO: 285648 - DNA, 12 bp, Artificial Sequence
  Oligonucleotide primer for the detection of SNP TSC0012386
agttattgtatt

SEQ ID NO: 285649 - DNA, 12 bp, Artificial Sequence
  Oligonucleotide primer for the detection of SNP TSC0012387
ttctctaattcc

SEQ ID NO: 285650 - DNA, 12 bp, Artificial Sequence
  Oligonucleotide primer for the detection of SNP TSC0012387
agttgtatatag

SEQ ID NO: 285651 - DNA, 12 bp, Artificial Sequence
  Oligonucleotide primer for the detection of SNP TSC0012388
atcacaataata

SEQ ID NO: 285652 - DNA, 12 bp, Artificial Sequence
  Oligonucleotide primer for the detection of SNP TSC0012388
attggtagttga

SEQ ID NO: 285653 - DNA, 12 bp, Artificial Sequence
  Oligonucleotide primer for the detection of SNP TSC0012388
attaacaactaa

SEQ ID NO: 285654 - DNA, 12 bp, Artificial Sequence
  Oligonucleotide primer for the detection of SNP TSC0012388
tgttatagtgat

SEQ ID NO: 285655 - DNA, 12 bp, Artificial Sequence
  Oligonucleotide primer for the detection of SNP TSC0012391
actatcctaacc

SEQ ID NO: 285656 - DNA, 12 bp, Artificial Sequence
  Oligonucleotide primer for the detection of SNP TSC0012391
gtgggttttgga

SEQ ID NO: 285657 - DNA, 12 bp, Artificial Sequence
  Oligonucleotide primer for the detection of SNP TSC0012391
gtgggtttcgga

SEQ ID NO: 285658 - DNA, 12 bp, Artificial Sequence
  Oligonucleotide primer for the detection of SNP TSC0012392
aaaaaacctacg

SEQ ID NO: 285659 - DNA, 12 bp, Artificial Sequence
  Oligonucleotide primer for the detection of SNP TSC0012392
agttgaggtttt

SEQ ID NO: 285660 - DNA, 12 bp, Artificial Sequence
  Oligonucleotide primer for the detection of SNP TSC0012392
agtcgaggtttt

SEQ ID NO: 285661 - DNA, 12 bp, Artificial Sequence
  Oligonucleotide primer for the detection of SNP TSC0012392
aaccaaaatctc

SEQ ID NO: 285662 - DNA, 12 bp, Artificial Sequence
  Oligonucleotide primer for the detection of SNP TSC0012392
aaccgaaatctc

SEQ ID NO: 285663 - DNA, 12 bp, Artificial Sequence
  Oligonucleotide primer for the detection of SNP TSC0012392
gggggatttatg

SEQ ID NO: 285664 - DNA, 12 bp, Artificial Sequence
  Oligonucleotide primer for the detection of SNP TSC0012392
gggggatttacg

SEQ ID NO: 285665 - DNA, 12 bp, Artificial Sequence
  Oligonucleotide primer for the detection of SNP TSC0012393
acaaaacaacca

SEQ ID NO: 285666 - DNA, 12 bp, Artificial Sequence
  Oligonucleotide primer for the detection of SNP TSC0012393
ccctctaccctc

SEQ ID NO: 285667 - DNA, 12 bp, Artificial Sequence
  Oligonucleotide primer for the detection of SNP TSC0012393
ataaaatagtta

SEQ ID NO: 285668 - DNA, 12 bp, Artificial Sequence
  Oligonucleotide primer for the detection of SNP TSC0012394
aaacttaaaaat

SEQ ID NO: 285669 - DNA, 12 bp, Artificial Sequence
  Oligonucleotide primer for the detection of SNP TSC0012394
aatatattatta

SEQ ID NO: 285670 - DNA, 12 bp, Artificial Sequence
  Oligonucleotide primer for the detection of SNP TSC0012396
ttttatatttac

SEQ ID NO: 285671 - DNA, 12 bp, Artificial Sequence
  Oligonucleotide primer for the detection of SNP TSC0012396
tatagttttttt

SEQ ID NO: 285672 - DNA, 12 bp, Artificial Sequence
  Oligonucleotide primer for the detection of SNP TSC0012396
tataactttctc

SEQ ID NO: 285673 - DNA, 12 bp, Artificial Sequence
  Oligonukleotid-Primer
ttttatatttat

SEQ ID NO: 285674 - DNA, 12 bp, Artificial Sequence
  Oligonucleotide primer for the detection of SNP TSC0012397
tattcattcatt

SEQ ID NO: 285675 - DNA, 12 bp, Artificial Sequence
  Oligonucleotide primer for the detection of SNP TSC0012397
gaagttatttta

SEQ ID NO: 285676 - DNA, 12 bp, Artificial Sequence
  Oligonucleotide primer for the detection of SNP TSC0012397
aaatcattctaa

SEQ ID NO: 285677 - DNA, 12 bp, Artificial Sequence
  Oligonucleotide primer for the detection of SNP TSC0012397
tatttatttatt

SEQ ID NO: 285678 - DNA, 12 bp, Artificial Sequence
  Oligonucleotide primer for the detection of SNP TSC0012398
atattctcaaat

SEQ ID NO: 285679 - DNA, 12 bp, Artificial Sequence
  Oligonucleotide primer for the detection of SNP TSC0012398
gatattttgtta

SEQ ID NO: 285680 - DNA, 12 bp, Artificial Sequence
  Oligonucleotide primer for the detection of SNP TSC0012399
caacccattcac

SEQ ID NO: 285681 - DNA, 12 bp, Artificial Sequence
  Oligonucleotide primer for the detection of SNP TSC0012399
tatatatataag

SEQ ID NO: 285682 - DNA, 12 bp, Artificial Sequence
  Oligonucleotide primer for the detection of SNP TSC0012399
tacacatacaaa

SEQ ID NO: 285683 - DNA, 12 bp, Artificial Sequence
  Oligonucleotide primer for the detection of SNP TSC0012399
taatttatttat

SEQ ID NO: 285684 - DNA, 12 bp, Artificial Sequence
  Oligonucleotide primer for the detection of SNP TSC0012400
gtgggtggatta

SEQ ID NO: 285685 - DNA, 12 bp, Artificial Sequence
  Oligonucleotide primer for the detection of SNP TSC0012400
gcgggtggatta

SEQ ID NO: 285686 - DNA, 12 bp, Artificial Sequence
  Oligonucleotide primer for the detection of SNP TSC0012400
gtgggcggatta

SEQ ID NO: 285687 - DNA, 12 bp, Artificial Sequence
  Oligonucleotide primer for the detection of SNP TSC0012400
gcgggcggatta

SEQ ID NO: 285688 - DNA, 12 bp, Artificial Sequence
  Oligonucleotide primer for the detection of SNP TSC0012400
acaaacaaatca

SEQ ID NO: 285689 - DNA, 12 bp, Artificial Sequence
  Oligonucleotide primer for the detection of SNP TSC0012400
acaaacgaatca

SEQ ID NO: 285690 - DNA, 12 bp, Artificial Sequence
  Oligonucleotide primer for the detection of SNP TSC0012400
acgaacaaatca

SEQ ID NO: 285691 - DNA, 12 bp, Artificial Sequence
  Oligonucleotide primer for the detection of SNP TSC0012400
acgaacgaatca

SEQ ID NO: 285692 - DNA, 12 bp, Artificial Sequence
  Oligonucleotide primer for the detection of SNP TSC0012401
ctttcctttaat

SEQ ID NO: 285693 - DNA, 12 bp, Artificial Sequence
  Oligonucleotide primer for the detection of SNP TSC0012401
aaaggattagag

SEQ ID NO: 285694 - DNA, 12 bp, Artificial Sequence
  Oligonucleotide primer for the detection of SNP TSC0012403
ctatattctcta

SEQ ID NO: 285695 - DNA, 12 bp, Artificial Sequence
  Oligonucleotide primer for the detection of SNP TSC0012403
tagttaaatttt

SEQ ID NO: 285696 - DNA, 12 bp, Artificial Sequence
  Oligonucleotide primer for the detection of SNP TSC0012403
tagttaaatttc

SEQ ID NO: 285697 - DNA, 12 bp, Artificial Sequence
  Oligonucleotide primer for the detection of SNP TSC0012403
caaccaaactcc

SEQ ID NO: 285698 - DNA, 12 bp, Artificial Sequence
  Oligonucleotide primer for the detection of SNP TSC0012404
gatttatgttta

SEQ ID NO: 285699 - DNA, 12 bp, Artificial Sequence
  Oligonucleotide primer for the detection of SNP TSC0012404
gatttacgttta

SEQ ID NO: 285700 - DNA, 12 bp, Artificial Sequence
  Oligonucleotide primer for the detection of SNP TSC0012405
cccctatcttac

SEQ ID NO: 285701 - DNA, 12 bp, Artificial Sequence
  Oligonucleotide primer for the detection of SNP TSC0012406
ctcatttatccc

SEQ ID NO: 285702 - DNA, 12 bp, Artificial Sequence
  Oligonucleotide primer for the detection of SNP TSC0012406
atatattgggta

SEQ ID NO: 285703 - DNA, 12 bp, Artificial Sequence
  Oligonucleotide primer for the detection of SNP TSC0012407
taaactaaacaa

SEQ ID NO: 285704 - DNA, 12 bp, Artificial Sequence
  Oligonucleotide primer for the detection of SNP TSC0012407
atgaatatttat

SEQ ID NO: 285705 - DNA, 12 bp, Artificial Sequence
  Oligonucleotide primer for the detection of SNP TSC0012407
taaatatttaca

SEQ ID NO: 285706 - DNA, 12 bp, Artificial Sequence
  Oligonucleotide primer for the detection of SNP TSC0012407
tgagttgaataa

SEQ ID NO: 285707 - DNA, 12 bp, Artificial Sequence
  Oligonucleotide primer for the detection of SNP TSC0012408
aactcaaacaat

SEQ ID NO: 285708 - DNA, 12 bp, Artificial Sequence
  Oligonucleotide primer for the detection of SNP TSC0012408
aactcaaacgat

SEQ ID NO: 285709 - DNA, 12 bp, Artificial Sequence
  Oligonucleotide primer for the detection of SNP TSC0012408
tgaatgggtaga

SEQ ID NO: 285710 - DNA, 12 bp, Artificial Sequence
  Oligonucleotide primer for the detection of SNP TSC0012408
taaataaacaaa

SEQ ID NO: 285711 - DNA, 12 bp, Artificial Sequence
  Oligonucleotide primer for the detection of SNP TSC0012408
aatttaaatgat

SEQ ID NO: 285712 - DNA, 12 bp, Artificial Sequence
  Oligonucleotide primer for the detection of SNP TSC0012408
aatttaaacgat

SEQ ID NO: 285713 - DNA, 12 bp, Artificial Sequence
  Oligonucleotide primer for the detection of SNP TSC0012409
caaaaaacttat

SEQ ID NO: 285714 - DNA, 12 bp, Artificial Sequence
  Oligonucleotide primer for the detection of SNP TSC0012409
tatatttagaaa

SEQ ID NO: 285715 - DNA, 12 bp, Artificial Sequence
  Oligonucleotide primer for the detection of SNP TSC0012410
taacacaataac

SEQ ID NO: 285716 - DNA, 12 bp, Artificial Sequence
  Oligonucleotide primer for the detection of SNP TSC0012410
taacacgataac

SEQ ID NO: 285717 - DNA, 12 bp, Artificial Sequence
  Oligonucleotide primer for the detection of SNP TSC0012410
taacgcaataac

SEQ ID NO: 285718 - DNA, 12 bp, Artificial Sequence
  Oligonucleotide primer for the detection of SNP TSC0012410
taacgcgataac

SEQ ID NO: 285719 - DNA, 12 bp, Artificial Sequence
  Oligonucleotide primer for the detection of SNP TSC0012410
taaaactacaaa

SEQ ID NO: 285720 - DNA, 12 bp, Artificial Sequence
  Oligonucleotide primer for the detection of SNP TSC0012410
tgatgtggtggt

SEQ ID NO: 285721 - DNA, 12 bp, Artificial Sequence
  Oligonucleotide primer for the detection of SNP TSC0012410
tgacgtggtggt

SEQ ID NO: 285722 - DNA, 12 bp, Artificial Sequence
  Oligonucleotide primer for the detection of SNP TSC0012410
tgatgcggtggt

SEQ ID NO: 285723 - DNA, 12 bp, Artificial Sequence
  Oligonucleotide primer for the detection of SNP TSC0012410
tgatgtggtggc

SEQ ID NO: 285724 - DNA, 12 bp, Artificial Sequence
  Oligonucleotide primer for the detection of SNP TSC0012410
tgacgcggtggt

SEQ ID NO: 285725 - DNA, 12 bp, Artificial Sequence
  Oligonucleotide primer for the detection of SNP TSC0012410
tgacgtggtggc

SEQ ID NO: 285726 - DNA, 12 bp, Artificial Sequence
  Oligonucleotide primer for the detection of SNP TSC0012410
tgatgcggtggc

SEQ ID NO: 285727 - DNA, 12 bp, Artificial Sequence
  Oligonucleotide primer for the detection of SNP TSC0012410
tgacgcggtggc

SEQ ID NO: 285728 - DNA, 12 bp, Artificial Sequence
  Oligonucleotide primer for the detection of SNP TSC0012411
aaaaccatccta

SEQ ID NO: 285729 - DNA, 12 bp, Artificial Sequence
  Oligonucleotide primer for the detection of SNP TSC0012411
ttattgtgttag

SEQ ID NO: 285730 - DNA, 12 bp, Artificial Sequence
  Oligonucleotide primer for the detection of SNP TSC0012411
ttatcgtgttag

SEQ ID NO: 285731 - DNA, 12 bp, Artificial Sequence
  Oligonucleotide primer for the detection of SNP TSC0012411
tcaccatattaa

SEQ ID NO: 285732 - DNA, 12 bp, Artificial Sequence
  Oligonucleotide primer for the detection of SNP TSC0012411
tcaccgtattaa

SEQ ID NO: 285733 - DNA, 12 bp, Artificial Sequence
  Oligonucleotide primer for the detection of SNP TSC0012411
gagattattttg

SEQ ID NO: 285734 - DNA, 12 bp, Artificial Sequence
  Oligonucleotide primer for the detection of SNP TSC0012412
ttataaatatac

SEQ ID NO: 285735 - DNA, 12 bp, Artificial Sequence
  Oligonucleotide primer for the detection of SNP TSC0012412
taaagtttttat

SEQ ID NO: 285736 - DNA, 12 bp, Artificial Sequence
  Oligonucleotide primer for the detection of SNP TSC0012412
aaaacccttaca

SEQ ID NO: 285737 - DNA, 12 bp, Artificial Sequence
  Oligonucleotide primer for the detection of SNP TSC0012412
tgtaggtatatt

SEQ ID NO: 285738 - DNA, 12 bp, Artificial Sequence
  Oligonukleotid-Primer
ctaaacacaaaa

SEQ ID NO: 285739 - DNA, 12 bp, Artificial Sequence
  Oligonucleotide primer for the detection of SNP TSC0012413
tttttttcgttt

SEQ ID NO: 285740 - DNA, 12 bp, Artificial Sequence
  Oligonucleotide primer for the detection of SNP TSC0012413
cttctctcacct

SEQ ID NO: 285741 - DNA, 12 bp, Artificial Sequence
  Oligonucleotide primer for the detection of SNP TSC0012413
cttctctcgcct

SEQ ID NO: 285742 - DNA, 12 bp, Artificial Sequence
  Oligonucleotide primer for the detection of SNP TSC0012413
aattgggtataa

SEQ ID NO: 285743 - DNA, 12 bp, Artificial Sequence
  Oligonucleotide primer for the detection of SNP TSC0012414
ttaacttctcat

SEQ ID NO: 285744 - DNA, 12 bp, Artificial Sequence
  Oligonucleotide primer for the detection of SNP TSC0012414
aataaaaggaga

SEQ ID NO: 285745 - DNA, 12 bp, Artificial Sequence
  Oligonucleotide primer for the detection of SNP TSC0012415
ataatgtatata

SEQ ID NO: 285746 - DNA, 12 bp, Artificial Sequence
  Oligonucleotide primer for the detection of SNP TSC0012415
ataatatatata

SEQ ID NO: 285747 - DNA, 12 bp, Artificial Sequence
  Oligonucleotide primer for the detection of SNP TSC0012416
cctactaattcc

SEQ ID NO: 285748 - DNA, 12 bp, Artificial Sequence
  Oligonucleotide primer for the detection of SNP TSC0012416
aggtagagtaag

SEQ ID NO: 285749 - DNA, 12 bp, Artificial Sequence
  Oligonucleotide primer for the detection of SNP TSC0012417
cttacaatattc

SEQ ID NO: 285750 - DNA, 12 bp, Artificial Sequence
  Oligonucleotide primer for the detection of SNP TSC0012417
cttacgatattc

SEQ ID NO: 285751 - DNA, 12 bp, Artificial Sequence
  Oligonucleotide primer for the detection of SNP TSC0012418
cacacctaactc

SEQ ID NO: 285752 - DNA, 12 bp, Artificial Sequence
  Oligonucleotide primer for the detection of SNP TSC0012418
cacgcctaactc

SEQ ID NO: 285753 - DNA, 12 bp, Artificial Sequence
  Oligonucleotide primer for the detection of SNP TSC0012418
aggaaaataaga

SEQ ID NO: 285754 - DNA, 12 bp, Artificial Sequence
  Oligonucleotide primer for the detection of SNP TSC0012418
tatgtttggttt

SEQ ID NO: 285755 - DNA, 12 bp, Artificial Sequence
  Oligonucleotide primer for the detection of SNP TSC0012418
tacgtttggttt

SEQ ID NO: 285756 - DNA, 12 bp, Artificial Sequence
  Oligonucleotide primer for the detection of SNP TSC0012422
atataacaaaaa

SEQ ID NO: 285757 - DNA, 12 bp, Artificial Sequence
  Oligonucleotide primer for the detection of SNP TSC0012422
gttagattttgt

SEQ ID NO: 285758 - DNA, 12 bp, Artificial Sequence
  Oligonucleotide primer for the detection of SNP TSC0012422
accaaatcctac

SEQ ID NO: 285759 - DNA, 12 bp, Artificial Sequence
  Oligonucleotide primer for the detection of SNP TSC0012422
atatggtaaagg

SEQ ID NO: 285760 - DNA, 12 bp, Artificial Sequence
  Oligonucleotide primer for the detection of SNP TSC0012423
aaatcaaatatc

SEQ ID NO: 285761 - DNA, 12 bp, Artificial Sequence
  Oligonucleotide primer for the detection of SNP TSC0012423
tattgttttgta

SEQ ID NO: 285762 - DNA, 12 bp, Artificial Sequence
  Oligonucleotide primer for the detection of SNP TSC0012424
ccacctccaccc

SEQ ID NO: 285763 - DNA, 12 bp, Artificial Sequence
  Oligonucleotide primer for the detection of SNP TSC0012424
aatgaggtatgg

SEQ ID NO: 285764 - DNA, 12 bp, Artificial Sequence
  Oligonucleotide primer for the detection of SNP TSC0012424
aataaaacataa

SEQ ID NO: 285765 - DNA, 12 bp, Artificial Sequence
  Oligonucleotide primer for the detection of SNP TSC0012424
ttatttttattc

SEQ ID NO: 285766 - DNA, 12 bp, Artificial Sequence
  Oligonucleotide primer for the detection of SNP TSC0012427
tatattttaaaa

SEQ ID NO: 285767 - DNA, 12 bp, Artificial Sequence
  Oligonucleotide primer for the detection of SNP TSC0012427
tttgattgttat

SEQ ID NO: 285768 - DNA, 12 bp, Artificial Sequence
  Oligonucleotide primer for the detection of SNP TSC0012427
ctaattaccata

SEQ ID NO: 285769 - DNA, 12 bp, Artificial Sequence
  Oligonucleotide primer for the detection of SNP TSC0012429
acctaaatcatt

SEQ ID NO: 285770 - DNA, 12 bp, Artificial Sequence
  Oligonucleotide primer for the detection of SNP TSC0012429
tttgtaattata

SEQ ID NO: 285771 - DNA, 12 bp, Artificial Sequence
  Oligonucleotide primer for the detection of SNP TSC0012430
acctaattcctc

SEQ ID NO: 285772 - DNA, 12 bp, Artificial Sequence
  Oligonucleotide primer for the detection of SNP TSC0012430
gggggtgtgagg

SEQ ID NO: 285773 - DNA, 12 bp, Artificial Sequence
  Oligonucleotide primer for the detection of SNP TSC0012431
tcttaaattcat

SEQ ID NO: 285774 - DNA, 12 bp, Artificial Sequence
  Oligonucleotide primer for the detection of SNP TSC0012431
ttttggggtttt

SEQ ID NO: 285775 - DNA, 12 bp, Artificial Sequence
  Oligonucleotide primer for the detection of SNP TSC0012431
ccctaaaactcc

SEQ ID NO: 285776 - DNA, 12 bp, Artificial Sequence
  Oligonucleotide primer for the detection of SNP TSC0012431
ttttgggtttat

SEQ ID NO: 285777 - DNA, 12 bp, Artificial Sequence
  Oligonucleotide primer for the detection of SNP TSC0012436
tattaactaaat

SEQ ID NO: 285778 - DNA, 12 bp, Artificial Sequence
  Oligonucleotide primer for the detection of SNP TSC0012436
tggagaggggtg

SEQ ID NO: 285779 - DNA, 12 bp, Artificial Sequence
  Oligonucleotide primer for the detection of SNP TSC0012436
tattagttgagt

SEQ ID NO: 285780 - DNA, 12 bp, Artificial Sequence
  Oligonucleotide primer for the detection of SNP TSC0012437
caatatataact

SEQ ID NO: 285781 - DNA, 12 bp, Artificial Sequence
  Oligonucleotide primer for the detection of SNP TSC0012437
aactatatctat

SEQ ID NO: 285782 - DNA, 12 bp, Artificial Sequence
  Oligonucleotide primer for the detection of SNP TSC0012437
taatgtgtgatt

SEQ ID NO: 285783 - DNA, 12 bp, Artificial Sequence
  Oligonucleotide primer for the detection of SNP TSC0012438
aaattctcaaac

SEQ ID NO: 285784 - DNA, 12 bp, Artificial Sequence
  Oligonucleotide primer for the detection of SNP TSC0012438
aatattttatag

SEQ ID NO: 285785 - DNA, 12 bp, Artificial Sequence
  Oligonucleotide primer for the detection of SNP TSC0012439
tatcacactata

SEQ ID NO: 285786 - DNA, 12 bp, Artificial Sequence
  Oligonucleotide primer for the detection of SNP TSC0012439
tgataggtttat

SEQ ID NO: 285787 - DNA, 12 bp, Artificial Sequence
  Oligonucleotide primer for the detection of SNP TSC0012439
cgataggtttat

SEQ ID NO: 285788 - DNA, 12 bp, Artificial Sequence
  Oligonucleotide primer for the detection of SNP TSC0012439
caacaaacctac

SEQ ID NO: 285789 - DNA, 12 bp, Artificial Sequence
  Oligonucleotide primer for the detection of SNP TSC0012439
cgacaaacctac

SEQ ID NO: 285790 - DNA, 12 bp, Artificial Sequence
  Oligonucleotide primer for the detection of SNP TSC0012439
tattatattgtg

SEQ ID NO: 285791 - DNA, 12 bp, Artificial Sequence
  Oligonucleotide primer for the detection of SNP TSC0012440
atatacatcacc

SEQ ID NO: 285792 - DNA, 12 bp, Artificial Sequence
  Oligonucleotide primer for the detection of SNP TSC0012440
ataataatatag

SEQ ID NO: 285793 - DNA, 12 bp, Artificial Sequence
  Oligonucleotide primer for the detection of SNP TSC0012441
atacccaaacat

SEQ ID NO: 285794 - DNA, 12 bp, Artificial Sequence
  Oligonucleotide primer for the detection of SNP TSC0012441
aaaggagaaatg

SEQ ID NO: 285795 - DNA, 12 bp, Artificial Sequence
  Oligonucleotide primer for the detection of SNP TSC0012444
accttttatttc

SEQ ID NO: 285796 - DNA, 12 bp, Artificial Sequence
  Oligonucleotide primer for the detection of SNP TSC0012444
ttaggggtatga

SEQ ID NO: 285797 - DNA, 12 bp, Artificial Sequence
  Oligonucleotide primer for the detection of SNP TSC0012444
tcaaaaatataa

SEQ ID NO: 285798 - DNA, 12 bp, Artificial Sequence
  Oligonucleotide primer for the detection of SNP TSC0012448
aactttataaac

SEQ ID NO: 285799 - DNA, 12 bp, Artificial Sequence
  Oligonucleotide primer for the detection of SNP TSC0012448
tagagtttgtaa

SEQ ID NO: 285800 - DNA, 12 bp, Artificial Sequence
  Oligonucleotide primer for the detection of SNP TSC0012450
attttttaaaaa

SEQ ID NO: 285801 - DNA, 12 bp, Artificial Sequence
  Oligonucleotide primer for the detection of SNP TSC0012450
tgtattattgaa

SEQ ID NO: 285802 - DNA, 12 bp, Artificial Sequence
  Oligonucleotide primer for the detection of SNP TSC0012450
tataccattaaa

SEQ ID NO: 285803 - DNA, 12 bp, Artificial Sequence
  Oligonucleotide primer for the detection of SNP TSC0012450
gttttttgaaaa

SEQ ID NO: 285804 - DNA, 12 bp, Artificial Sequence
  Oligonucleotide primer for the detection of SNP TSC0012451
atatatataaaa

SEQ ID NO: 285805 - DNA, 12 bp, Artificial Sequence
  Oligonucleotide primer for the detection of SNP TSC0012451
tgtatatatata

SEQ ID NO: 285806 - DNA, 12 bp, Artificial Sequence
  Oligonucleotide primer for the detection of SNP TSC0012451
atatgtatatag

SEQ ID NO: 285807 - DNA, 12 bp, Artificial Sequence
  Oligonucleotide primer for the detection of SNP TSC0012452
ctttctaataaa

SEQ ID NO: 285808 - DNA, 12 bp, Artificial Sequence
  Oligonucleotide primer for the detection of SNP TSC0012452
gaaatggttatt

SEQ ID NO: 285809 - DNA, 12 bp, Artificial Sequence
  Oligonucleotide primer for the detection of SNP TSC0012452
gaaacggttatt

SEQ ID NO: 285810 - DNA, 12 bp, Artificial Sequence
  Oligonucleotide primer for the detection of SNP TSC0012452
aacaatcattaa

SEQ ID NO: 285811 - DNA, 12 bp, Artificial Sequence
  Oligonucleotide primer for the detection of SNP TSC0012452
aacgatcattaa

SEQ ID NO: 285812 - DNA, 12 bp, Artificial Sequence
  Oligonucleotide primer for the detection of SNP TSC0012452
ttttggtggatt

SEQ ID NO: 285813 - DNA, 12 bp, Artificial Sequence
  Oligonucleotide primer for the detection of SNP TSC0012455
tcctcaacctct

SEQ ID NO: 285814 - DNA, 12 bp, Artificial Sequence
  Oligonucleotide primer for the detection of SNP TSC0012455
tcctcgacctct

SEQ ID NO: 285815 - DNA, 12 bp, Artificial Sequence
  Oligonucleotide primer for the detection of SNP TSC0012455
ttagtattttag

SEQ ID NO: 285816 - DNA, 12 bp, Artificial Sequence
  Oligonucleotide primer for the detection of SNP TSC0012456
aaaccaaaaact

SEQ ID NO: 285817 - DNA, 12 bp, Artificial Sequence
  Oligonucleotide primer for the detection of SNP TSC0012456
agaattttttaa

SEQ ID NO: 285818 - DNA, 12 bp, Artificial Sequence
  Oligonucleotide primer for the detection of SNP TSC0012460
ttatcatcatca

SEQ ID NO: 285819 - DNA, 12 bp, Artificial Sequence
  Oligonucleotide primer for the detection of SNP TSC0012460
aatgatgataat

SEQ ID NO: 285820 - DNA, 12 bp, Artificial Sequence
  Oligonucleotide primer for the detection of SNP TSC0012461
aatacccataat

SEQ ID NO: 285821 - DNA, 12 bp, Artificial Sequence
  Oligonucleotide primer for the detection of SNP TSC0012462
aatacacataca

SEQ ID NO: 285822 - DNA, 12 bp, Artificial Sequence
  Oligonucleotide primer for the detection of SNP TSC0012462
aatacacgtaca

SEQ ID NO: 285823 - DNA, 12 bp, Artificial Sequence
  Oligonucleotide primer for the detection of SNP TSC0012462
gtttgtatgtgt

SEQ ID NO: 285824 - DNA, 12 bp, Artificial Sequence
  Oligonucleotide primer for the detection of SNP TSC0012462
gtttgtacgtgt

SEQ ID NO: 285825 - DNA, 12 bp, Artificial Sequence
  Oligonucleotide primer for the detection of SNP TSC0012462
atctatacatat

SEQ ID NO: 285826 - DNA, 12 bp, Artificial Sequence
  Oligonucleotide primer for the detection of SNP TSC0012462
atctatacgtat

SEQ ID NO: 285827 - DNA, 12 bp, Artificial Sequence
  Oligonukleotid-Primer
aatatatgtata

SEQ ID NO: 285828 - DNA, 12 bp, Artificial Sequence
  Oligonucleotide primer for the detection of SNP TSC0012462
aatatacgtata

SEQ ID NO: 285829 - DNA, 12 bp, Artificial Sequence
  Oligonucleotide primer for the detection of SNP TSC0012463
taaattataaaa

SEQ ID NO: 285830 - DNA, 12 bp, Artificial Sequence
  Oligonucleotide primer for the detection of SNP TSC0012463
gtgtttgttggt

SEQ ID NO: 285831 - DNA, 12 bp, Artificial Sequence
  Oligonucleotide primer for the detection of SNP TSC0012463
gtgttcgttggt

SEQ ID NO: 285832 - DNA, 12 bp, Artificial Sequence
  Oligonucleotide primer for the detection of SNP TSC0012463
atactcattaat

SEQ ID NO: 285833 - DNA, 12 bp, Artificial Sequence
  Oligonucleotide primer for the detection of SNP TSC0012463
atactcgttaat

SEQ ID NO: 285834 - DNA, 12 bp, Artificial Sequence
  Oligonucleotide primer for the detection of SNP TSC0012463
tgaattgtaaaa

SEQ ID NO: 285835 - DNA, 12 bp, Artificial Sequence
  Oligonucleotide primer for the detection of SNP TSC0012464
taaaaattttct

SEQ ID NO: 285836 - DNA, 12 bp, Artificial Sequence
  Oligonucleotide primer for the detection of SNP TSC0012464
ttaaaaaaagaa

SEQ ID NO: 285837 - DNA, 12 bp, Artificial Sequence
  Oligonucleotide primer for the detection of SNP TSC0012465
atctcaataatt

SEQ ID NO: 285838 - DNA, 12 bp, Artificial Sequence
  Oligonucleotide primer for the detection of SNP TSC0012465
atctcgataatt

SEQ ID NO: 285839 - DNA, 12 bp, Artificial Sequence
  Oligonucleotide primer for the detection of SNP TSC0012465
gattttttttaa

SEQ ID NO: 285840 - DNA, 12 bp, Artificial Sequence
  Oligonucleotide primer for the detection of SNP TSC0012466
atattccattta

SEQ ID NO: 285841 - DNA, 12 bp, Artificial Sequence
  Oligonucleotide primer for the detection of SNP TSC0012466
ttgttaatataa

SEQ ID NO: 285842 - DNA, 12 bp, Artificial Sequence
  Oligonucleotide primer for the detection of SNP TSC0012468
tatcaaatttac

SEQ ID NO: 285843 - DNA, 12 bp, Artificial Sequence
  Oligonucleotide primer for the detection of SNP TSC0012468
tcttattataat

SEQ ID NO: 285844 - DNA, 12 bp, Artificial Sequence
  Oligonucleotide primer for the detection of SNP TSC0012468
tattaaatttgt

SEQ ID NO: 285845 - DNA, 12 bp, Artificial Sequence
  Oligonucleotide primer for the detection of SNP TSC0012469
ataaaaacaatt

SEQ ID NO: 285846 - DNA, 12 bp, Artificial Sequence
  Oligonucleotide primer for the detection of SNP TSC0012470
ttcctttaaata

SEQ ID NO: 285847 - DNA, 12 bp, Artificial Sequence
  Oligonucleotide primer for the detection of SNP TSC0012470
aagtatttatat

SEQ ID NO: 285848 - DNA, 12 bp, Artificial Sequence
  Oligonucleotide primer for the detection of SNP TSC0012470
aaacactcacat

SEQ ID NO: 285849 - DNA, 12 bp, Artificial Sequence
  Oligonucleotide primer for the detection of SNP TSC0012470
ttttttgaatgt

SEQ ID NO: 285850 - DNA, 12 bp, Artificial Sequence
  Oligonucleotide primer for the detection of SNP TSC0012474
aataatcattac

SEQ ID NO: 285851 - DNA, 12 bp, Artificial Sequence
  Oligonucleotide primer for the detection of SNP TSC0012474
ttaggtaatgtg

SEQ ID NO: 285852 - DNA, 12 bp, Artificial Sequence
  Oligonucleotide primer for the detection of SNP TSC0012474
ttaggtaacgtg

SEQ ID NO: 285853 - DNA, 12 bp, Artificial Sequence
  Oligonucleotide primer for the detection of SNP TSC0012475
atctacttaaaa

SEQ ID NO: 285854 - DNA, 12 bp, Artificial Sequence
  Oligonucleotide primer for the detection of SNP TSC0012475
tgggtaatttta

SEQ ID NO: 285855 - DNA, 12 bp, Artificial Sequence
  Oligonucleotide primer for the detection of SNP TSC0012475
taaacaacttca

SEQ ID NO: 285856 - DNA, 12 bp, Artificial Sequence
  Oligonucleotide primer for the detection of SNP TSC0012475
atttgtttagaa

SEQ ID NO: 285857 - DNA, 12 bp, Artificial Sequence
  Oligonucleotide primer for the detection of SNP TSC0012479
tctcccttaact

SEQ ID NO: 285858 - DNA, 12 bp, Artificial Sequence
  Oligonucleotide primer for the detection of SNP TSC0012479
tataaattttta

SEQ ID NO: 285859 - DNA, 12 bp, Artificial Sequence
  Oligonucleotide primer for the detection of SNP TSC0012480
caatattaaaac

SEQ ID NO: 285860 - DNA, 12 bp, Artificial Sequence
  Oligonucleotide primer for the detection of SNP TSC0012480
atttgtaaatag

SEQ ID NO: 285861 - DNA, 12 bp, Artificial Sequence
  Oligonucleotide primer for the detection of SNP TSC0012480
atctataaataa

SEQ ID NO: 285862 - DNA, 12 bp, Artificial Sequence
  Oligonucleotide primer for the detection of SNP TSC0012480
taatgttaagat

SEQ ID NO: 285863 - DNA, 12 bp, Artificial Sequence
  Oligonucleotide primer for the detection of SNP TSC0012483
atttaccttctc

SEQ ID NO: 285864 - DNA, 12 bp, Artificial Sequence
  Oligonucleotide primer for the detection of SNP TSC0012483
agagatgataag

SEQ ID NO: 285865 - DNA, 12 bp, Artificial Sequence
  Oligonucleotide primer for the detection of SNP TSC0012484
ccaaccaactcc

SEQ ID NO: 285866 - DNA, 12 bp, Artificial Sequence
  Oligonucleotide primer for the detection of SNP TSC0012484
tagttggtaggt

SEQ ID NO: 285867 - DNA, 12 bp, Artificial Sequence
  Oligonucleotide primer for the detection of SNP TSC0012484
tagttggtaggc

SEQ ID NO: 285868 - DNA, 12 bp, Artificial Sequence
  Oligonucleotide primer for the detection of SNP TSC0012484
caactaacaaac

SEQ ID NO: 285869 - DNA, 12 bp, Artificial Sequence
  Oligonucleotide primer for the detection of SNP TSC0012484
tagttagttttt

SEQ ID NO: 285870 - DNA, 12 bp, Artificial Sequence
  Oligonucleotide primer for the detection of SNP TSC0012485
ctccaaaataat

SEQ ID NO: 285871 - DNA, 12 bp, Artificial Sequence
  Oligonucleotide primer for the detection of SNP TSC0012485
ttatggagttgt

SEQ ID NO: 285872 - DNA, 12 bp, Artificial Sequence
  Oligonucleotide primer for the detection of SNP TSC0012485
ttacggagttgt

SEQ ID NO: 285873 - DNA, 12 bp, Artificial Sequence
  Oligonucleotide primer for the detection of SNP TSC0012485
ctcacaaaatta

SEQ ID NO: 285874 - DNA, 12 bp, Artificial Sequence
  Oligonucleotide primer for the detection of SNP TSC0012485
ctcacgaaatta

SEQ ID NO: 285875 - DNA, 12 bp, Artificial Sequence
  Oligonucleotide primer for the detection of SNP TSC0012485
ttttagggtgat

SEQ ID NO: 285876 - DNA, 12 bp, Artificial Sequence
  Oligonucleotide primer for the detection of SNP TSC0012486
tactttaaaatc

SEQ ID NO: 285877 - DNA, 12 bp, Artificial Sequence
  Oligonucleotide primer for the detection of SNP TSC0012486
ataaaggattgg

SEQ ID NO: 285878 - DNA, 12 bp, Artificial Sequence
  Oligonucleotide primer for the detection of SNP TSC0012487
tttttacctctc

SEQ ID NO: 285879 - DNA, 12 bp, Artificial Sequence
  Oligonucleotide primer for the detection of SNP TSC0012487
tttggaaggtta

SEQ ID NO: 285880 - DNA, 12 bp, Artificial Sequence
  Oligonucleotide primer for the detection of SNP TSC0012488
taccaaaatatt

SEQ ID NO: 285881 - DNA, 12 bp, Artificial Sequence
  Oligonucleotide primer for the detection of SNP TSC0012488
aaaaaataagga

SEQ ID NO: 285882 - DNA, 12 bp, Artificial Sequence
  Oligonucleotide primer for the detection of SNP TSC0012489
ctttaaatttaa

SEQ ID NO: 285883 - DNA, 12 bp, Artificial Sequence
  Oligonucleotide primer for the detection of SNP TSC0012489
agaattaaataa

SEQ ID NO: 285884 - DNA, 12 bp, Artificial Sequence
  Oligonucleotide primer for the detection of SNP TSC0012489
aaaatcaaacaa

SEQ ID NO: 285885 - DNA, 12 bp, Artificial Sequence
  Oligonucleotide primer for the detection of SNP TSC0012489
ttttagatttga

SEQ ID NO: 285886 - DNA, 12 bp, Artificial Sequence
  Oligonucleotide primer for the detection of SNP TSC0012490
aacaaactccct

SEQ ID NO: 285887 - DNA, 12 bp, Artificial Sequence
  Oligonucleotide primer for the detection of SNP TSC0012490
tgaaagatagta

SEQ ID NO: 285888 - DNA, 12 bp, Artificial Sequence
  Oligonucleotide primer for the detection of SNP TSC0012493
cctcccatttca

SEQ ID NO: 285889 - DNA, 12 bp, Artificial Sequence
  Oligonucleotide primer for the detection of SNP TSC0012493
tttttgtaatat

SEQ ID NO: 285890 - DNA, 12 bp, Artificial Sequence
  Oligonucleotide primer for the detection of SNP TSC0012493
tttctataatac

SEQ ID NO: 285891 - DNA, 12 bp, Artificial Sequence
  Oligonucleotide primer for the detection of SNP TSC0012494
ttcatcttaaac

SEQ ID NO: 285892 - DNA, 12 bp, Artificial Sequence
  Oligonucleotide primer for the detection of SNP TSC0012494
gtagtaagtaga

SEQ ID NO: 285893 - DNA, 12 bp, Artificial Sequence
  Oligonucleotide primer for the detection of SNP TSC0012495
aaaatttcctct

SEQ ID NO: 285894 - DNA, 12 bp, Artificial Sequence
  Oligonucleotide primer for the detection of SNP TSC0012495
tatatgggaaga

SEQ ID NO: 285895 - DNA, 12 bp, Artificial Sequence
  Oligonucleotide primer for the detection of SNP TSC0012495
tatacgggaaga

SEQ ID NO: 285896 - DNA, 12 bp, Artificial Sequence
  Oligonucleotide primer for the detection of SNP TSC0012503
acataaaaaatt

SEQ ID NO: 285897 - DNA, 12 bp, Artificial Sequence
  Oligonucleotide primer for the detection of SNP TSC0012503
attgattattta

SEQ ID NO: 285898 - DNA, 12 bp, Artificial Sequence
  Oligonucleotide primer for the detection of SNP TSC0012503
attaaccatcta

SEQ ID NO: 285899 - DNA, 12 bp, Artificial Sequence
  Oligonucleotide primer for the detection of SNP TSC0012503
gtatggaagatt

SEQ ID NO: 285900 - DNA, 12 bp, Artificial Sequence
  Oligonucleotide primer for the detection of SNP TSC0012504
aaacattaaaac

SEQ ID NO: 285901 - DNA, 12 bp, Artificial Sequence
  Oligonucleotide primer for the detection of SNP TSC0012504
tttgttttgtat

SEQ ID NO: 285902 - DNA, 12 bp, Artificial Sequence
  Oligonucleotide primer for the detection of SNP TSC0012504
tttgtttcgtat

SEQ ID NO: 285903 - DNA, 12 bp, Artificial Sequence
  Oligonucleotide primer for the detection of SNP TSC0012504
tttatcccacat

SEQ ID NO: 285904 - DNA, 12 bp, Artificial Sequence
  Oligonucleotide primer for the detection of SNP TSC0012504
tttatcccgcat

SEQ ID NO: 285905 - DNA, 12 bp, Artificial Sequence
  Oligonucleotide primer for the detection of SNP TSC0012504
gggtattagggt

SEQ ID NO: 285906 - DNA, 12 bp, Artificial Sequence
  Oligonucleotide primer for the detection of SNP TSC0012505
taaaatcacaaa

SEQ ID NO: 285907 - DNA, 12 bp, Artificial Sequence
  Oligonucleotide primer for the detection of SNP TSC0012505
atagtggtttat

SEQ ID NO: 285908 - DNA, 12 bp, Artificial Sequence
  Oligonucleotide primer for the detection of SNP TSC0012505
atagtggtttac

SEQ ID NO: 285909 - DNA, 12 bp, Artificial Sequence
  Oligonucleotide primer for the detection of SNP TSC0012505
cacaataactca

SEQ ID NO: 285910 - DNA, 12 bp, Artificial Sequence
  Oligonucleotide primer for the detection of SNP TSC0012505
gttaggattata

SEQ ID NO: 285911 - DNA, 12 bp, Artificial Sequence
  Oligonucleotide primer for the detection of SNP TSC0012506
aacctcctaaat

SEQ ID NO: 285912 - DNA, 12 bp, Artificial Sequence
  Oligonukleotid-Primer
tgtagttttagt

SEQ ID NO: 285913 - DNA, 12 bp, Artificial Sequence
  Oligonucleotide primer for the detection of SNP TSC0012506
agttttttgagt

SEQ ID NO: 285914 - DNA, 12 bp, Artificial Sequence
  Oligonucleotide primer for the detection of SNP TSC0012507
ttttctcctaaa

SEQ ID NO: 285915 - DNA, 12 bp, Artificial Sequence
  Oligonucleotide primer for the detection of SNP TSC0012507
gaggattatttt

SEQ ID NO: 285916 - DNA, 12 bp, Artificial Sequence
  Oligonucleotide primer for the detection of SNP TSC0012507
taaaaactactc

SEQ ID NO: 285917 - DNA, 12 bp, Artificial Sequence
  Oligonucleotide primer for the detection of SNP TSC0012509
aataaaacaatc

SEQ ID NO: 285918 - DNA, 12 bp, Artificial Sequence
  Oligonucleotide primer for the detection of SNP TSC0012509
ttgaaaatggtg

SEQ ID NO: 285919 - DNA, 12 bp, Artificial Sequence
  Oligonucleotide primer for the detection of SNP TSC0012509
ctaaaaataata

SEQ ID NO: 285920 - DNA, 12 bp, Artificial Sequence
  Oligonucleotide primer for the detection of SNP TSC0012509
ggatagtttttt

SEQ ID NO: 285921 - DNA, 12 bp, Artificial Sequence
  Oligonucleotide primer for the detection of SNP TSC0012510
aaaaaaatccta

SEQ ID NO: 285922 - DNA, 12 bp, Artificial Sequence
  Oligonucleotide primer for the detection of SNP TSC0012510
gaggggggtatt

SEQ ID NO: 285923 - DNA, 12 bp, Artificial Sequence
  Oligonucleotide primer for the detection of SNP TSC0012510
aaggagttttgt

SEQ ID NO: 285924 - DNA, 12 bp, Artificial Sequence
  Oligonucleotide primer for the detection of SNP TSC0012511
tcataactaaaa

SEQ ID NO: 285925 - DNA, 12 bp, Artificial Sequence
  Oligonucleotide primer for the detection of SNP TSC0012511
tcgtaactaaaa

SEQ ID NO: 285926 - DNA, 12 bp, Artificial Sequence
  Oligonucleotide primer for the detection of SNP TSC0012511
ttgaatttattt

SEQ ID NO: 285927 - DNA, 12 bp, Artificial Sequence
  Oligonucleotide primer for the detection of SNP TSC0012511
tcgaatttattt

SEQ ID NO: 285928 - DNA, 12 bp, Artificial Sequence
  Oligonucleotide primer for the detection of SNP TSC0012511
tattcaaattta

SEQ ID NO: 285929 - DNA, 12 bp, Artificial Sequence
  Oligonucleotide primer for the detection of SNP TSC0012511
tattcgaattta

SEQ ID NO: 285930 - DNA, 12 bp, Artificial Sequence
  Oligonucleotide primer for the detection of SNP TSC0012511
taattgtaattg

SEQ ID NO: 285931 - DNA, 12 bp, Artificial Sequence
  Oligonucleotide primer for the detection of SNP TSC0012511
taatcgtaattg

SEQ ID NO: 285932 - DNA, 12 bp, Artificial Sequence
  Oligonucleotide primer for the detection of SNP TSC0012512
caaacttaaatt

SEQ ID NO: 285933 - DNA, 12 bp, Artificial Sequence
  Oligonucleotide primer for the detection of SNP TSC0012512
ttttttgtgtta

SEQ ID NO: 285934 - DNA, 12 bp, Artificial Sequence
  Oligonucleotide primer for the detection of SNP TSC0012513
caatataaaaaa

SEQ ID NO: 285935 - DNA, 12 bp, Artificial Sequence
  Oligonucleotide primer for the detection of SNP TSC0012513
ttttaatggggt

SEQ ID NO: 285936 - DNA, 12 bp, Artificial Sequence
  Oligonucleotide primer for the detection of SNP TSC0012513
ttccaataaaat

SEQ ID NO: 285937 - DNA, 12 bp, Artificial Sequence
  Oligonucleotide primer for the detection of SNP TSC0012513
tagtgtggggag

SEQ ID NO: 285938 - DNA, 12 bp, Artificial Sequence
  Oligonucleotide primer for the detection of SNP TSC0012514
aataaaaacaaa

SEQ ID NO: 285939 - DNA, 12 bp, Artificial Sequence
  Oligonucleotide primer for the detection of SNP TSC0012514
aataaaaacgaa

SEQ ID NO: 285940 - DNA, 12 bp, Artificial Sequence
  Oligonucleotide primer for the detection of SNP TSC0012514
agtggagatggg

SEQ ID NO: 285941 - DNA, 12 bp, Artificial Sequence
  Oligonucleotide primer for the detection of SNP TSC0012514
agtggagacggg

SEQ ID NO: 285942 - DNA, 12 bp, Artificial Sequence
  Oligonucleotide primer for the detection of SNP TSC0012515
tataacataaaa

SEQ ID NO: 285943 - DNA, 12 bp, Artificial Sequence
  Oligonucleotide primer for the detection of SNP TSC0012515
tgaaaggatgtt

SEQ ID NO: 285944 - DNA, 12 bp, Artificial Sequence
  Oligonucleotide primer for the detection of SNP TSC0012515
tgaaaggacgtt

SEQ ID NO: 285945 - DNA, 12 bp, Artificial Sequence
  Oligonucleotide primer for the detection of SNP TSC0012515
taaaaaaacatt

SEQ ID NO: 285946 - DNA, 12 bp, Artificial Sequence
  Oligonucleotide primer for the detection of SNP TSC0012515
taaaaaaacgtt

SEQ ID NO: 285947 - DNA, 12 bp, Artificial Sequence
  Oligonucleotide primer for the detection of SNP TSC0012515
atagtataaggt

SEQ ID NO: 285948 - DNA, 12 bp, Artificial Sequence
  Oligonucleotide primer for the detection of SNP TSC0012516
tcctaaaaaaaa

SEQ ID NO: 285949 - DNA, 12 bp, Artificial Sequence
  Oligonucleotide primer for the detection of SNP TSC0012516
gttataaaaaaa

SEQ ID NO: 285950 - DNA, 12 bp, Artificial Sequence
  Oligonucleotide primer for the detection of SNP TSC0012518
acaaatcaaaat

SEQ ID NO: 285951 - DNA, 12 bp, Artificial Sequence
  Oligonucleotide primer for the detection of SNP TSC0012518
gtttagtgtatg

SEQ ID NO: 285952 - DNA, 12 bp, Artificial Sequence
  Oligonucleotide primer for the detection of SNP TSC0012518
attcaatacata

SEQ ID NO: 285953 - DNA, 12 bp, Artificial Sequence
  Oligonucleotide primer for the detection of SNP TSC0012518
atagattagaat

SEQ ID NO: 285954 - DNA, 12 bp, Artificial Sequence
  Oligonucleotide primer for the detection of SNP TSC0012520
tttagatatttt

SEQ ID NO: 285955 - DNA, 12 bp, Artificial Sequence
  Oligonucleotide primer for the detection of SNP TSC0012520
tttaaacatttt

SEQ ID NO: 285956 - DNA, 12 bp, Artificial Sequence
  Oligonucleotide primer for the detection of SNP TSC0012520
ttttagtaaaat

SEQ ID NO: 285957 - DNA, 12 bp, Artificial Sequence
  Oligonucleotide primer for the detection of SNP TSC0012523
acaccacaatta

SEQ ID NO: 285958 - DNA, 12 bp, Artificial Sequence
  Oligonucleotide primer for the detection of SNP TSC0012523
acgccacaatta

SEQ ID NO: 285959 - DNA, 12 bp, Artificial Sequence
  Oligonucleotide primer for the detection of SNP TSC0012523
gtggtgttagtt

SEQ ID NO: 285960 - DNA, 12 bp, Artificial Sequence
  Oligonucleotide primer for the detection of SNP TSC0012523
aatgttatagtt

SEQ ID NO: 285961 - DNA, 12 bp, Artificial Sequence
  Oligonucleotide primer for the detection of SNP TSC0012523
aacgttatagtt

SEQ ID NO: 285962 - DNA, 12 bp, Artificial Sequence
  Oligonucleotide primer for the detection of SNP TSC0012524
aatactaaaatt

SEQ ID NO: 285963 - DNA, 12 bp, Artificial Sequence
  Oligonucleotide primer for the detection of SNP TSC0012524
taggggtttata

SEQ ID NO: 285964 - DNA, 12 bp, Artificial Sequence
  Oligonucleotide primer for the detection of SNP TSC0012525
cctcactcctta

SEQ ID NO: 285965 - DNA, 12 bp, Artificial Sequence
  Oligonucleotide primer for the detection of SNP TSC0012525
tttatttgagag

SEQ ID NO: 285966 - DNA, 12 bp, Artificial Sequence
  Oligonucleotide primer for the detection of SNP TSC0012526
tattaatatcta

SEQ ID NO: 285967 - DNA, 12 bp, Artificial Sequence
  Oligonucleotide primer for the detection of SNP TSC0012526
tttaattttatt

SEQ ID NO: 285968 - DNA, 12 bp, Artificial Sequence
  Oligonucleotide primer for the detection of SNP TSC0012526
cctaattctact

SEQ ID NO: 285969 - DNA, 12 bp, Artificial Sequence
  Oligonucleotide primer for the detection of SNP TSC0012526
tattgatgtttg

SEQ ID NO: 285970 - DNA, 12 bp, Artificial Sequence
  Oligonucleotide primer for the detection of SNP TSC0012527
tataatatttaa

SEQ ID NO: 285971 - DNA, 12 bp, Artificial Sequence
  Oligonucleotide primer for the detection of SNP TSC0012527
ttttggaaagtg

SEQ ID NO: 285972 - DNA, 12 bp, Artificial Sequence
  Oligonucleotide primer for the detection of SNP TSC0012528
atccaacaacac

SEQ ID NO: 285973 - DNA, 12 bp, Artificial Sequence
  Oligonucleotide primer for the detection of SNP TSC0012528
agtagttaagta

SEQ ID NO: 285974 - DNA, 12 bp, Artificial Sequence
  Oligonucleotide primer for the detection of SNP TSC0012530
cattatctaatt

SEQ ID NO: 285975 - DNA, 12 bp, Artificial Sequence
  Oligonucleotide primer for the detection of SNP TSC0012530
gggattgaagag

SEQ ID NO: 285976 - DNA, 12 bp, Artificial Sequence
  Oligonucleotide primer for the detection of SNP TSC0012531
caaattaacaac

SEQ ID NO: 285977 - DNA, 12 bp, Artificial Sequence
  Oligonucleotide primer for the detection of SNP TSC0012531
cgaattaacaac

SEQ ID NO: 285978 - DNA, 12 bp, Artificial Sequence
  Oligonucleotide primer for the detection of SNP TSC0012531
ttgtttatgatt

SEQ ID NO: 285979 - DNA, 12 bp, Artificial Sequence
  Oligonucleotide primer for the detection of SNP TSC0012531
tcgtttatgatt

SEQ ID NO: 285980 - DNA, 12 bp, Artificial Sequence
  Oligonucleotide primer for the detection of SNP TSC0012532
caccacttaact

SEQ ID NO: 285981 - DNA, 12 bp, Artificial Sequence
  Oligonucleotide primer for the detection of SNP TSC0012532
caccgcttaact

SEQ ID NO: 285982 - DNA, 12 bp, Artificial Sequence
  Oligonucleotide primer for the detection of SNP TSC0012532
actaattctcaa

SEQ ID NO: 285983 - DNA, 12 bp, Artificial Sequence
  Oligonucleotide primer for the detection of SNP TSC0012532
tattgtttgatt

SEQ ID NO: 285984 - DNA, 12 bp, Artificial Sequence
  Oligonucleotide primer for the detection of SNP TSC0012532
tatcgtttgatt

SEQ ID NO: 285985 - DNA, 12 bp, Artificial Sequence
  Oligonucleotide primer for the detection of SNP TSC0012533
tatttctacatc

SEQ ID NO: 285986 - DNA, 12 bp, Artificial Sequence
  Oligonucleotide primer for the detection of SNP TSC0012533
agtttatggaaa

SEQ ID NO: 285987 - DNA, 12 bp, Artificial Sequence
  Oligonucleotide primer for the detection of SNP TSC0012538
aaaaacacctcc

SEQ ID NO: 285988 - DNA, 12 bp, Artificial Sequence
  Oligonucleotide primer for the detection of SNP TSC0012538
gggtttttttga

SEQ ID NO: 285989 - DNA, 12 bp, Artificial Sequence
  Oligonucleotide primer for the detection of SNP TSC0012540
ctaaataattct

SEQ ID NO: 285990 - DNA, 12 bp, Artificial Sequence
  Oligonucleotide primer for the detection of SNP TSC0012540
agaaaataagag

SEQ ID NO: 285991 - DNA, 12 bp, Artificial Sequence
  Oligonucleotide primer for the detection of SNP TSC0012541
actcaataatct

SEQ ID NO: 285992 - DNA, 12 bp, Artificial Sequence
  Oligonucleotide primer for the detection of SNP TSC0012541
taggttatagtt

SEQ ID NO: 285993 - DNA, 12 bp, Artificial Sequence
  Oligonukleotid-Primer
taaattacaatt

SEQ ID NO: 285994 - DNA, 12 bp, Artificial Sequence
  Oligonucleotide primer for the detection of SNP TSC0012541
gtttagtgattt

SEQ ID NO: 285995 - DNA, 12 bp, Artificial Sequence
  Oligonucleotide primer for the detection of SNP TSC0012542
cttccccaactt

SEQ ID NO: 285996 - DNA, 12 bp, Artificial Sequence
  Oligonucleotide primer for the detection of SNP TSC0012542
taatttttgtgg

SEQ ID NO: 285997 - DNA, 12 bp, Artificial Sequence
  Oligonukleotid-Primer
tcctaccacctt

SEQ ID NO: 285998 - DNA, 12 bp, Artificial Sequence
  Oligonucleotide primer for the detection of SNP TSC0012547
aaaatttaaata

SEQ ID NO: 285999 - DNA, 12 bp, Artificial Sequence
  Oligonucleotide primer for the detection of SNP TSC0012547
ttcacccttccc

SEQ ID NO: 286000 - DNA, 12 bp, Artificial Sequence
  Oligonucleotide primer for the detection of SNP TSC0012547
aaggtttggata

SEQ ID NO: 286001 - DNA, 12 bp, Artificial Sequence
  Oligonukleotid-Primer
caaaaaattaaa

SEQ ID NO: 286002 - DNA, 12 bp, Artificial Sequence
  Oligonucleotide primer for the detection of SNP TSC0012549
ttaacttctcta

SEQ ID NO: 286003 - DNA, 12 bp, Artificial Sequence
  Oligonucleotide primer for the detection of SNP TSC0012549
agaaagttgggt

SEQ ID NO: 286004 - DNA, 12 bp, Artificial Sequence
  Oligonucleotide primer for the detection of SNP TSC0012550
ccatatcaatac

SEQ ID NO: 286005 - DNA, 12 bp, Artificial Sequence
  Oligonucleotide primer for the detection of SNP TSC0012550
agttattttttg

SEQ ID NO: 286006 - DNA, 12 bp, Artificial Sequence
  Oligonucleotide primer for the detection of SNP TSC0012550
aattattttcta

SEQ ID NO: 286007 - DNA, 12 bp, Artificial Sequence
  Oligonucleotide primer for the detection of SNP TSC0012550
ttatgttagtat

SEQ ID NO: 286008 - DNA, 12 bp, Artificial Sequence
  Oligonucleotide primer for the detection of SNP TSC0012550
ttatgttagtac

SEQ ID NO: 286009 - DNA, 12 bp, Artificial Sequence
  Oligonucleotide primer for the detection of SNP TSC0012551
actataaacaca

SEQ ID NO: 286010 - DNA, 12 bp, Artificial Sequence
  Oligonucleotide primer for the detection of SNP TSC0012551
ataatatctctt

SEQ ID NO: 286011 - DNA, 12 bp, Artificial Sequence
  Oligonucleotide primer for the detection of SNP TSC0012552
ggtttataagtt

SEQ ID NO: 286012 - DNA, 12 bp, Artificial Sequence
  Oligonucleotide primer for the detection of SNP TSC0012552
taaattcacaaa

SEQ ID NO: 286013 - DNA, 12 bp, Artificial Sequence
  Oligonucleotide primer for the detection of SNP TSC0012552
tgaagattgagg

SEQ ID NO: 286014 - DNA, 12 bp, Artificial Sequence
  Oligonucleotide primer for the detection of SNP TSC0012554
aacaaaataaat

SEQ ID NO: 286015 - DNA, 12 bp, Artificial Sequence
  Oligonucleotide primer for the detection of SNP TSC0012554
tggttggatttt

SEQ ID NO: 286016 - DNA, 12 bp, Artificial Sequence
  Oligonucleotide primer for the detection of SNP TSC0012554
attaactaaatc

SEQ ID NO: 286017 - DNA, 12 bp, Artificial Sequence
  Oligonucleotide primer for the detection of SNP TSC0012554
agtaaaataaat

SEQ ID NO: 286018 - DNA, 12 bp, Artificial Sequence
  Oligonucleotide primer for the detection of SNP TSC0012555
ccaccactacca

SEQ ID NO: 286019 - DNA, 12 bp, Artificial Sequence
  Oligonucleotide primer for the detection of SNP TSC0012555
ccaccactaccg

SEQ ID NO: 286020 - DNA, 12 bp, Artificial Sequence
  Oligonucleotide primer for the detection of SNP TSC0012555
ccaccgctacca

SEQ ID NO: 286021 - DNA, 12 bp, Artificial Sequence
  Oligonucleotide primer for the detection of SNP TSC0012555
ccaccgctaccg

SEQ ID NO: 286022 - DNA, 12 bp, Artificial Sequence
  Oligonucleotide primer for the detection of SNP TSC0012555
gttattttgtgg

SEQ ID NO: 286023 - DNA, 12 bp, Artificial Sequence
  Oligonucleotide primer for the detection of SNP TSC0012555
gttatttcgtgg

SEQ ID NO: 286024 - DNA, 12 bp, Artificial Sequence
  Oligonucleotide primer for the detection of SNP TSC0012555
gttattttgcgg

SEQ ID NO: 286025 - DNA, 12 bp, Artificial Sequence
  Oligonucleotide primer for the detection of SNP TSC0012555
gttatttcgcgg

SEQ ID NO: 286026 - DNA, 12 bp, Artificial Sequence
  Oligonucleotide primer for the detection of SNP TSC0012555
atcactccacaa

SEQ ID NO: 286027 - DNA, 12 bp, Artificial Sequence
  Oligonucleotide primer for the detection of SNP TSC0012555
atcactccacga

SEQ ID NO: 286028 - DNA, 12 bp, Artificial Sequence
  Oligonucleotide primer for the detection of SNP TSC0012555
atcactccgcaa

SEQ ID NO: 286029 - DNA, 12 bp, Artificial Sequence
  Oligonucleotide primer for the detection of SNP TSC0012555
gtcactccacaa

SEQ ID NO: 286030 - DNA, 12 bp, Artificial Sequence
  Oligonucleotide primer for the detection of SNP TSC0012555
atcactccgcga

SEQ ID NO: 286031 - DNA, 12 bp, Artificial Sequence
  Oligonucleotide primer for the detection of SNP TSC0012555
gtcactccacga

SEQ ID NO: 286032 - DNA, 12 bp, Artificial Sequence
  Oligonucleotide primer for the detection of SNP TSC0012555
gtcactccgcaa

SEQ ID NO: 286033 - DNA, 12 bp, Artificial Sequence
  Oligonucleotide primer for the detection of SNP TSC0012555
gtcactccgcga

SEQ ID NO: 286034 - DNA, 12 bp, Artificial Sequence
  Oligonucleotide primer for the detection of SNP TSC0012555
ttattgttgttg

SEQ ID NO: 286035 - DNA, 12 bp, Artificial Sequence
  Oligonucleotide primer for the detection of SNP TSC0012555
ttatcgttgttg

SEQ ID NO: 286036 - DNA, 12 bp, Artificial Sequence
  Oligonucleotide primer for the detection of SNP TSC0012555
ttattgttgtcg

SEQ ID NO: 286037 - DNA, 12 bp, Artificial Sequence
  Oligonucleotide primer for the detection of SNP TSC0012555
ttatcgttgtcg

SEQ ID NO: 286038 - DNA, 12 bp, Artificial Sequence
  Oligonucleotide primer for the detection of SNP TSC0012556
ttaaaacaatct

SEQ ID NO: 286039 - DNA, 12 bp, Artificial Sequence
  Oligonucleotide primer for the detection of SNP TSC0012556
ttggtgatagag

SEQ ID NO: 286040 - DNA, 12 bp, Artificial Sequence
  Oligonucleotide primer for the detection of SNP TSC0012556
ttggcgatagag

SEQ ID NO: 286041 - DNA, 12 bp, Artificial Sequence
  Oligonucleotide primer for the detection of SNP TSC0012556
ttaacgacaaaa

SEQ ID NO: 286042 - DNA, 12 bp, Artificial Sequence
  Oligonucleotide primer for the detection of SNP TSC0012556
ttgagatagttt

SEQ ID NO: 286043 - DNA, 12 bp, Artificial Sequence
  Oligonucleotide primer for the detection of SNP TSC0012557
aatatccccatc

SEQ ID NO: 286044 - DNA, 12 bp, Artificial Sequence
  Oligonucleotide primer for the detection of SNP TSC0012557
gatatccccatc

SEQ ID NO: 286045 - DNA, 12 bp, Artificial Sequence
  Oligonucleotide primer for the detection of SNP TSC0012557
ttataaagatag

SEQ ID NO: 286046 - DNA, 12 bp, Artificial Sequence
  Oligonucleotide primer for the detection of SNP TSC0012558
aataaaatcccc

SEQ ID NO: 286047 - DNA, 12 bp, Artificial Sequence
  Oligonucleotide primer for the detection of SNP TSC0012558
gtgatttagaaa

SEQ ID NO: 286048 - DNA, 12 bp, Artificial Sequence
  Oligonucleotide primer for the detection of SNP TSC0012558
ataactcaaaaa

SEQ ID NO: 286049 - DNA, 12 bp, Artificial Sequence
  Oligonucleotide primer for the detection of SNP TSC0012558
aataaagttttt

SEQ ID NO: 286050 - DNA, 12 bp, Artificial Sequence
  Oligonucleotide primer for the detection of SNP TSC0012559
ttaggttttaaa

SEQ ID NO: 286051 - DNA, 12 bp, Artificial Sequence
  Oligonucleotide primer for the detection of SNP TSC0012560
aagtagttttta

SEQ ID NO: 286052 - DNA, 12 bp, Artificial Sequence
  Oligonucleotide primer for the detection of SNP TSC0012562
aacactttcaaa

SEQ ID NO: 286053 - DNA, 12 bp, Artificial Sequence
  Oligonucleotide primer for the detection of SNP TSC0012562
aacactttcgaa

SEQ ID NO: 286054 - DNA, 12 bp, Artificial Sequence
  Oligonucleotide primer for the detection of SNP TSC0012562
ttttaagtgatt

SEQ ID NO: 286055 - DNA, 12 bp, Artificial Sequence
  Oligonucleotide primer for the detection of SNP TSC0012562
ttttaagcgatt

SEQ ID NO: 286056 - DNA, 12 bp, Artificial Sequence
  Oligonucleotide primer for the detection of SNP TSC0012562
ttttaagtgatc

SEQ ID NO: 286057 - DNA, 12 bp, Artificial Sequence
  Oligonucleotide primer for the detection of SNP TSC0012562
ttttaagcgatc

SEQ ID NO: 286058 - DNA, 12 bp, Artificial Sequence
  Oligonucleotide primer for the detection of SNP TSC0012562
cttcaaacaatc

SEQ ID NO: 286059 - DNA, 12 bp, Artificial Sequence
  Oligonucleotide primer for the detection of SNP TSC0012562
cttcaaacgatc

SEQ ID NO: 286060 - DNA, 12 bp, Artificial Sequence
  Oligonucleotide primer for the detection of SNP TSC0012562
taatatttttgg

SEQ ID NO: 286061 - DNA, 12 bp, Artificial Sequence
  Oligonucleotide primer for the detection of SNP TSC0012562
taatattttcgg

SEQ ID NO: 286062 - DNA, 12 bp, Artificial Sequence
  Oligonucleotide primer for the detection of SNP TSC0012565
ctcccatataac

SEQ ID NO: 286063 - DNA, 12 bp, Artificial Sequence
  Oligonucleotide primer for the detection of SNP TSC0012565
ggatatttggtg

SEQ ID NO: 286064 - DNA, 12 bp, Artificial Sequence
  Oligonucleotide primer for the detection of SNP TSC0012565
aaacacttaata

SEQ ID NO: 286065 - DNA, 12 bp, Artificial Sequence
  Oligonucleotide primer for the detection of SNP TSC0012565
gaacacttaata

SEQ ID NO: 286066 - DNA, 12 bp, Artificial Sequence
  Oligonucleotide primer for the detection of SNP TSC0012565
tttttatgtagt

SEQ ID NO: 286067 - DNA, 12 bp, Artificial Sequence
  Oligonucleotide primer for the detection of SNP TSC0012566
cccctaatttct

SEQ ID NO: 286068 - DNA, 12 bp, Artificial Sequence
  Oligonucleotide primer for the detection of SNP TSC0012566
agtattgttttg

SEQ ID NO: 286069 - DNA, 12 bp, Artificial Sequence
  Oligonucleotide primer for the detection of SNP TSC0012566
agtattgtttcg

SEQ ID NO: 286070 - DNA, 12 bp, Artificial Sequence
  Oligonucleotide primer for the detection of SNP TSC0012567
actctaaaacaa

SEQ ID NO: 286071 - DNA, 12 bp, Artificial Sequence
  Oligonucleotide primer for the detection of SNP TSC0012567
actctaaaacga

SEQ ID NO: 286072 - DNA, 12 bp, Artificial Sequence
  Oligonucleotide primer for the detection of SNP TSC0012567
atgttatgggtt

SEQ ID NO: 286073 - DNA, 12 bp, Artificial Sequence
  Oligonucleotide primer for the detection of SNP TSC0012567
ataccataaact

SEQ ID NO: 286074 - DNA, 12 bp, Artificial Sequence
  Oligonucleotide primer for the detection of SNP TSC0012567
gttttgaaacga

SEQ ID NO: 286075 - DNA, 12 bp, Artificial Sequence
  Oligonucleotide primer for the detection of SNP TSC0012568
actaaaacatat

SEQ ID NO: 286076 - DNA, 12 bp, Artificial Sequence
  Oligonucleotide primer for the detection of SNP TSC0012568
ttatgaagagta

SEQ ID NO: 286077 - DNA, 12 bp, Artificial Sequence
  Oligonucleotide primer for the detection of SNP TSC0012570
aaattaaataaa

SEQ ID NO: 286078 - DNA, 12 bp, Artificial Sequence
  Oligonucleotide primer for the detection of SNP TSC0012570
gtatgtattatt

SEQ ID NO: 286079 - DNA, 12 bp, Artificial Sequence
  Oligonucleotide primer for the detection of SNP TSC0012570
atatacaccacc

SEQ ID NO: 286080 - DNA, 12 bp, Artificial Sequence
  Oligonucleotide primer for the detection of SNP TSC0012570
aaattaggtggg

SEQ ID NO: 286081 - DNA, 12 bp, Artificial Sequence
  Oligonucleotide primer for the detection of SNP TSC0012571
agttattttgtt

SEQ ID NO: 286082 - DNA, 12 bp, Artificial Sequence
  Oligonucleotide primer for the detection of SNP TSC0012571
agttatttcgtt

SEQ ID NO: 286083 - DNA, 12 bp, Artificial Sequence
  Oligonucleotide primer for the detection of SNP TSC0012571
agttattttgtc

SEQ ID NO: 286084 - DNA, 12 bp, Artificial Sequence
  Oligonucleotide primer for the detection of SNP TSC0012571
agttatttcgtc

SEQ ID NO: 286085 - DNA, 12 bp, Artificial Sequence
  Oligonucleotide primer for the detection of SNP TSC0012571
aaccactccacc

SEQ ID NO: 286086 - DNA, 12 bp, Artificial Sequence
  Oligonucleotide primer for the detection of SNP TSC0012571
aaccactccgcc

SEQ ID NO: 286087 - DNA, 12 bp, Artificial Sequence
  Oligonucleotide primer for the detection of SNP TSC0012571
gaaagatgggtt

SEQ ID NO: 286088 - DNA, 12 bp, Artificial Sequence
  Oligonucleotide primer for the detection of SNP TSC0012571
gaaagatgggtc

SEQ ID NO: 286089 - DNA, 12 bp, Artificial Sequence
  Oligonucleotide primer for the detection of SNP TSC0012572
tatatttatcct

SEQ ID NO: 286090 - DNA, 12 bp, Artificial Sequence
  Oligonucleotide primer for the detection of SNP TSC0012572
gattggagatta

SEQ ID NO: 286091 - DNA, 12 bp, Artificial Sequence
  Oligonucleotide primer for the detection of SNP TSC0012573
aactccactttc

SEQ ID NO: 286092 - DNA, 12 bp, Artificial Sequence
  Oligonucleotide primer for the detection of SNP TSC0012573
ggaaaattggta

SEQ ID NO: 286093 - DNA, 12 bp, Artificial Sequence
  Oligonucleotide primer for the detection of SNP TSC0012574
aaatctcatccc

SEQ ID NO: 286094 - DNA, 12 bp, Artificial Sequence
  Oligonucleotide primer for the detection of SNP TSC0012574
tatttttttaag

SEQ ID NO: 286095 - DNA, 12 bp, Artificial Sequence
  Oligonucleotide primer for the detection of SNP TSC0012577
caataaaatcta

SEQ ID NO: 286096 - DNA, 12 bp, Artificial Sequence
  Oligonucleotide primer for the detection of SNP TSC0012577
tggtggtttagt

SEQ ID NO: 286097 - DNA, 12 bp, Artificial Sequence
  Oligonucleotide primer for the detection of SNP TSC0012577
taataatttaac

SEQ ID NO: 286098 - DNA, 12 bp, Artificial Sequence
  Oligonucleotide primer for the detection of SNP TSC0012577
taatggaattta

SEQ ID NO: 286099 - DNA, 12 bp, Artificial Sequence
  Oligonucleotide primer for the detection of SNP TSC0012578
aatgaagaagaa

SEQ ID NO: 286100 - DNA, 12 bp, Artificial Sequence
  Oligonucleotide primer for the detection of SNP TSC0012579
aaaaatcttcac

SEQ ID NO: 286101 - DNA, 12 bp, Artificial Sequence
  Oligonucleotide primer for the detection of SNP TSC0012579
tttttgtgttag

SEQ ID NO: 286102 - DNA, 12 bp, Artificial Sequence
  Oligonucleotide primer for the detection of SNP TSC0012579
tctctatatcaa

SEQ ID NO: 286103 - DNA, 12 bp, Artificial Sequence
  Oligonucleotide primer for the detection of SNP TSC0012579
gggggtttttat

SEQ ID NO: 286104 - DNA, 12 bp, Artificial Sequence
  Oligonucleotide primer for the detection of SNP TSC0012580
tataaataaccc

SEQ ID NO: 286105 - DNA, 12 bp, Artificial Sequence
  Oligonucleotide primer for the detection of SNP TSC0012580
tttaaataggta

SEQ ID NO: 286106 - DNA, 12 bp, Artificial Sequence
  Oligonucleotide primer for the detection of SNP TSC0012582
accatttccaac

SEQ ID NO: 286107 - DNA, 12 bp, Artificial Sequence
  Oligonucleotide primer for the detection of SNP TSC0012582
taagaaaattaa

SEQ ID NO: 286108 - DNA, 12 bp, Artificial Sequence
  Oligonucleotide primer for the detection of SNP TSC0012583
acaacttttaaa

SEQ ID NO: 286109 - DNA, 12 bp, Artificial Sequence
  Oligonucleotide primer for the detection of SNP TSC0012583
aagaaaaaaaaa

SEQ ID NO: 286110 - DNA, 12 bp, Artificial Sequence
  Oligonucleotide primer for the detection of SNP TSC0012583
gtaatttttaaa

SEQ ID NO: 286111 - DNA, 12 bp, Artificial Sequence
  Oligonucleotide primer for the detection of SNP TSC0012585
ttaaccaaacta

SEQ ID NO: 286112 - DNA, 12 bp, Artificial Sequence
  Oligonucleotide primer for the detection of SNP TSC0012585
atgagtttaaga

SEQ ID NO: 286113 - DNA, 12 bp, Artificial Sequence
  Oligonucleotide primer for the detection of SNP TSC0012585
acgagtttaaga

SEQ ID NO: 286114 - DNA, 12 bp, Artificial Sequence
  Oligonucleotide primer for the detection of SNP TSC0012585
acaaatttaaaa

SEQ ID NO: 286115 - DNA, 12 bp, Artificial Sequence
  Oligonucleotide primer for the detection of SNP TSC0012585
acgaatttaaaa

SEQ ID NO: 286116 - DNA, 12 bp, Artificial Sequence
  Oligonucleotide primer for the detection of SNP TSC0012586
attaaaaatatt

SEQ ID NO: 286117 - DNA, 12 bp, Artificial Sequence
  Oligonucleotide primer for the detection of SNP TSC0012586
actaaaaatatt

SEQ ID NO: 286118 - DNA, 12 bp, Artificial Sequence
  Oligonucleotide primer for the detection of SNP TSC0012587
ataatcacaact

SEQ ID NO: 286119 - DNA, 12 bp, Artificial Sequence
  Oligonucleotide primer for the detection of SNP TSC0012587
ataatcgcaact

SEQ ID NO: 286120 - DNA, 12 bp, Artificial Sequence
  Oligonucleotide primer for the detection of SNP TSC0012587
ttaaggttgtag

SEQ ID NO: 286121 - DNA, 12 bp, Artificial Sequence
  Oligonucleotide primer for the detection of SNP TSC0012588
tgtggttatatg

SEQ ID NO: 286122 - DNA, 12 bp, Artificial Sequence
  Oligonucleotide primer for the detection of SNP TSC0012588
cgtggttatatg

SEQ ID NO: 286123 - DNA, 12 bp, Artificial Sequence
  Oligonucleotide primer for the detection of SNP TSC0012592
ttccactaaaac

SEQ ID NO: 286124 - DNA, 12 bp, Artificial Sequence
  Oligonucleotide primer for the detection of SNP TSC0012592
aaaagaggtttg

SEQ ID NO: 286125 - DNA, 12 bp, Artificial Sequence
  Oligonucleotide primer for the detection of SNP TSC0012593
aaacactaaata

SEQ ID NO: 286126 - DNA, 12 bp, Artificial Sequence
  Oligonucleotide primer for the detection of SNP TSC0012593
gtatgatttgtt

SEQ ID NO: 286127 - DNA, 12 bp, Artificial Sequence
  Oligonucleotide primer for the detection of SNP TSC0012593
tataatctacca

SEQ ID NO: 286128 - DNA, 12 bp, Artificial Sequence
  Oligonucleotide primer for the detection of SNP TSC0012593
gatattgggtat

SEQ ID NO: 286129 - DNA, 12 bp, Artificial Sequence
  Oligonucleotide primer for the detection of SNP TSC0012594
catatacttaac

SEQ ID NO: 286130 - DNA, 12 bp, Artificial Sequence
  Oligonucleotide primer for the detection of SNP TSC0012594
attttattttat

SEQ ID NO: 286131 - DNA, 12 bp, Artificial Sequence
  Oligonucleotide primer for the detection of SNP TSC0012594
aatcttatttta

SEQ ID NO: 286132 - DNA, 12 bp, Artificial Sequence
  Oligonucleotide primer for the detection of SNP TSC0012594
tatgtgtttgat

SEQ ID NO: 286133 - DNA, 12 bp, Artificial Sequence
  Oligonucleotide primer for the detection of SNP TSC0012594
tatgtgtttgac

SEQ ID NO: 286134 - DNA, 12 bp, Artificial Sequence
  Oligonucleotide primer for the detection of SNP TSC0012595
aaaccaaaaatt

SEQ ID NO: 286135 - DNA, 12 bp, Artificial Sequence
  Oligonukleotid-Primer
taattaaactaa

SEQ ID NO: 286136 - DNA, 12 bp, Artificial Sequence
  Oligonucleotide primer for the detection of SNP TSC0012596
aaccactaaccc

SEQ ID NO: 286137 - DNA, 12 bp, Artificial Sequence
  Oligonucleotide primer for the detection of SNP TSC0012596
aaccgctaaccc

SEQ ID NO: 286138 - DNA, 12 bp, Artificial Sequence
  Oligonucleotide primer for the detection of SNP TSC0012596
gaaataagtata

SEQ ID NO: 286139 - DNA, 12 bp, Artificial Sequence
  Oligonukleotid-Primer
aaatacacatca

SEQ ID NO: 286140 - DNA, 12 bp, Artificial Sequence
  Oligonucleotide primer for the detection of SNP TSC0012597
aaatacgcatca

SEQ ID NO: 286141 - DNA, 12 bp, Artificial Sequence
  Oligonucleotide primer for the detection of SNP TSC0012597
gttgtatgttgt

SEQ ID NO: 286142 - DNA, 12 bp, Artificial Sequence
  Oligonucleotide primer for the detection of SNP TSC0012597
gttgtatgttgc

SEQ ID NO: 286143 - DNA, 12 bp, Artificial Sequence
  Oligonucleotide primer for the detection of SNP TSC0012597
actacatactac

SEQ ID NO: 286144 - DNA, 12 bp, Artificial Sequence
  Oligonucleotide primer for the detection of SNP TSC0012597
tgaatatgtatt

SEQ ID NO: 286145 - DNA, 12 bp, Artificial Sequence
  Oligonucleotide primer for the detection of SNP TSC0012597
tgaatacgtatt

SEQ ID NO: 286146 - DNA, 12 bp, Artificial Sequence
  Oligonucleotide primer for the detection of SNP TSC0012598
attctcaaattc

SEQ ID NO: 286147 - DNA, 12 bp, Artificial Sequence
  Oligonucleotide primer for the detection of SNP TSC0012598
tattttggggga

SEQ ID NO: 286148 - DNA, 12 bp, Artificial Sequence
  Oligonucleotide primer for the detection of SNP TSC0012600
atttaataacaa

SEQ ID NO: 286149 - DNA, 12 bp, Artificial Sequence
  Oligonucleotide primer for the detection of SNP TSC0012600
atatgagtaatt

SEQ ID NO: 286150 - DNA, 12 bp, Artificial Sequence
  Oligonucleotide primer for the detection of SNP TSC0012600
acataaacaatt

SEQ ID NO: 286151 - DNA, 12 bp, Artificial Sequence
  Oligonucleotide primer for the detection of SNP TSC0012600
gatttagtaata

SEQ ID NO: 286152 - DNA, 12 bp, Artificial Sequence
  Oligonucleotide primer for the detection of SNP TSC0012601
tacaaaacaaac

SEQ ID NO: 286153 - DNA, 12 bp, Artificial Sequence
  Oligonucleotide primer for the detection of SNP TSC0012601
taagattttggg

SEQ ID NO: 286154 - DNA, 12 bp, Artificial Sequence
  Oligonucleotide primer for the detection of SNP TSC0012602
tcccctaatctc

SEQ ID NO: 286155 - DNA, 12 bp, Artificial Sequence
  Oligonucleotide primer for the detection of SNP TSC0012602
agatggagtaga

SEQ ID NO: 286156 - DNA, 12 bp, Artificial Sequence
  Oligonucleotide primer for the detection of SNP TSC0012603
tttttatcccct

SEQ ID NO: 286157 - DNA, 12 bp, Artificial Sequence
  Oligonucleotide primer for the detection of SNP TSC0012603
gtagatttagag

SEQ ID NO: 286158 - DNA, 12 bp, Artificial Sequence
  Oligonucleotide primer for the detection of SNP TSC0012604
atttttatcccc

SEQ ID NO: 286159 - DNA, 12 bp, Artificial Sequence
  Oligonucleotide primer for the detection of SNP TSC0012604
tagatttagaga

SEQ ID NO: 286160 - DNA, 12 bp, Artificial Sequence
  Oligonucleotide primer for the detection of SNP TSC0012604
caaattcaaaaa

SEQ ID NO: 286161 - DNA, 12 bp, Artificial Sequence
  Oligonucleotide primer for the detection of SNP TSC0012604
atttttattttt

SEQ ID NO: 286162 - DNA, 12 bp, Artificial Sequence
  Oligonucleotide primer for the detection of SNP TSC0012605
accaccccaaca

SEQ ID NO: 286163 - DNA, 12 bp, Artificial Sequence
  Oligonucleotide primer for the detection of SNP TSC0012605
ttgaggatgtgt

SEQ ID NO: 286164 - DNA, 12 bp, Artificial Sequence
  Oligonucleotide primer for the detection of SNP TSC0012605
ctaaaaatatac

SEQ ID NO: 286165 - DNA, 12 bp, Artificial Sequence
  Oligonucleotide primer for the detection of SNP TSC0012605
gttattttaata

SEQ ID NO: 286166 - DNA, 12 bp, Artificial Sequence
  Oligonucleotide primer for the detection of SNP TSC0012606
atttctccactt

SEQ ID NO: 286167 - DNA, 12 bp, Artificial Sequence
  Oligonucleotide primer for the detection of SNP TSC0012607
tcaaacctatac

SEQ ID NO: 286168 - DNA, 12 bp, Artificial Sequence
  Oligonucleotide primer for the detection of SNP TSC0012607
gatttgagtggt

SEQ ID NO: 286169 - DNA, 12 bp, Artificial Sequence
  Oligonucleotide primer for the detection of SNP TSC0012607
gatttgagtggc

SEQ ID NO: 286170 - DNA, 12 bp, Artificial Sequence
  Oligonucleotide primer for the detection of SNP TSC0012607
aaatttaaataa

SEQ ID NO: 286171 - DNA, 12 bp, Artificial Sequence
  Oligonucleotide primer for the detection of SNP TSC0012607
tagatttgtatt

SEQ ID NO: 286172 - DNA, 12 bp, Artificial Sequence
  Oligonucleotide primer for the detection of SNP TSC0012608
ccttaacatctc

SEQ ID NO: 286173 - DNA, 12 bp, Artificial Sequence
  Oligonucleotide primer for the detection of SNP TSC0012608
ccttaacgtctc

SEQ ID NO: 286174 - DNA, 12 bp, Artificial Sequence
  Oligonucleotide primer for the detection of SNP TSC0012608
gtattttttaag

SEQ ID NO: 286175 - DNA, 12 bp, Artificial Sequence
  Oligonucleotide primer for the detection of SNP TSC0012608
acacctctcaaa

SEQ ID NO: 286176 - DNA, 12 bp, Artificial Sequence
  Oligonucleotide primer for the detection of SNP TSC0012608
ttttggtgtttt

SEQ ID NO: 286177 - DNA, 12 bp, Artificial Sequence
  Oligonucleotide primer for the detection of SNP TSC0012608
ttttggcgtttt

SEQ ID NO: 286178 - DNA, 12 bp, Artificial Sequence
  Oligonucleotide primer for the detection of SNP TSC0012609
aaacactaatct

SEQ ID NO: 286179 - DNA, 12 bp, Artificial Sequence
  Oligonucleotide primer for the detection of SNP TSC0012609
ttaaaaagttta

SEQ ID NO: 286180 - DNA, 12 bp, Artificial Sequence
  Oligonucleotide primer for the detection of SNP TSC0012610
ctacaattaata

SEQ ID NO: 286181 - DNA, 12 bp, Artificial Sequence
  Oligonucleotide primer for the detection of SNP TSC0012610
taggagtttagt

SEQ ID NO: 286182 - DNA, 12 bp, Artificial Sequence
  Oligonucleotide primer for the detection of SNP TSC0012610
ctaaaaactcaa

SEQ ID NO: 286183 - DNA, 12 bp, Artificial Sequence
  Oligonucleotide primer for the detection of SNP TSC0012610
aattagtatttt

SEQ ID NO: 286184 - DNA, 12 bp, Artificial Sequence
  Oligonucleotide primer for the detection of SNP TSC0012612
aaaaatatttac

SEQ ID NO: 286185 - DNA, 12 bp, Artificial Sequence
  Oligonucleotide primer for the detection of SNP TSC0012612
tttattaatggt

SEQ ID NO: 286186 - DNA, 12 bp, Artificial Sequence
  Oligonucleotide primer for the detection of SNP TSC0012612
cttaccaataac

SEQ ID NO: 286187 - DNA, 12 bp, Artificial Sequence
  Oligonucleotide primer for the detection of SNP TSC0012612
aggaatatttat

SEQ ID NO: 286188 - DNA, 12 bp, Artificial Sequence
  Oligonucleotide primer for the detection of SNP TSC0012615
atgtttgtttta

SEQ ID NO: 286189 - DNA, 12 bp, Artificial Sequence
  Oligonucleotide primer for the detection of SNP TSC0012616
accaccacacct

SEQ ID NO: 286190 - DNA, 12 bp, Artificial Sequence
  Oligonucleotide primer for the detection of SNP TSC0012616
ataaaaaaatta

SEQ ID NO: 286191 - DNA, 12 bp, Artificial Sequence
  Oligonucleotide primer for the detection of SNP TSC0012617
ttccaaaaaatc

SEQ ID NO: 286192 - DNA, 12 bp, Artificial Sequence
  Oligonucleotide primer for the detection of SNP TSC0012617
aataaaaaaagg

SEQ ID NO: 286193 - DNA, 12 bp, Artificial Sequence
  Oligonucleotide primer for the detection of SNP TSC0012618
ttgttttttaaa

SEQ ID NO: 286194 - DNA, 12 bp, Artificial Sequence
  Oligonucleotide primer for the detection of SNP TSC0012618
tcgttttttaaa

SEQ ID NO: 286195 - DNA, 12 bp, Artificial Sequence
  Oligonucleotide primer for the detection of SNP TSC0012619
tccaacacaacc

SEQ ID NO: 286196 - DNA, 12 bp, Artificial Sequence
  Oligonucleotide primer for the detection of SNP TSC0012619
agtttattttgt

SEQ ID NO: 286197 - DNA, 12 bp, Artificial Sequence
  Oligonucleotide primer for the detection of SNP TSC0012619
acccattctaca

SEQ ID NO: 286198 - DNA, 12 bp, Artificial Sequence
  Oligonucleotide primer for the detection of SNP TSC0012619
ttaatatagttt

SEQ ID NO: 286199 - DNA, 12 bp, Artificial Sequence
  Oligonucleotide primer for the detection of SNP TSC0012622
aaaatcaaataa

SEQ ID NO: 286200 - DNA, 12 bp, Artificial Sequence
  Oligonucleotide primer for the detection of SNP TSC0012622
ctccccaaaaaa

SEQ ID NO: 286201 - DNA, 12 bp, Artificial Sequence
  Oligonucleotide primer for the detection of SNP TSC0012622
gaaattagatga

SEQ ID NO: 286202 - DNA, 12 bp, Artificial Sequence
  Oligonucleotide primer for the detection of SNP TSC0012624
tatatcctacac

SEQ ID NO: 286203 - DNA, 12 bp, Artificial Sequence
  Oligonucleotide primer for the detection of SNP TSC0012624
tcttctaaacta

SEQ ID NO: 286204 - DNA, 12 bp, Artificial Sequence
  Oligonucleotide primer for the detection of SNP TSC0012624
tgtattttatat

SEQ ID NO: 286205 - DNA, 12 bp, Artificial Sequence
  Oligonucleotide primer for the detection of SNP TSC0012626
taacctataaac

SEQ ID NO: 286206 - DNA, 12 bp, Artificial Sequence
  Oligonucleotide primer for the detection of SNP TSC0012626
gtggttttaagg

SEQ ID NO: 286207 - DNA, 12 bp, Artificial Sequence
  Oligonucleotide primer for the detection of SNP TSC0012627
aaaattatctcc

SEQ ID NO: 286208 - DNA, 12 bp, Artificial Sequence
  Oligonucleotide primer for the detection of SNP TSC0012627
gttagtgaagtg

SEQ ID NO: 286209 - DNA, 12 bp, Artificial Sequence
  Oligonucleotide primer for the detection of SNP TSC0012627
gttagtgaagcg

SEQ ID NO: 286210 - DNA, 12 bp, Artificial Sequence
  Oligonucleotide primer for the detection of SNP TSC0012628
ctaaacaaaaac

SEQ ID NO: 286211 - DNA, 12 bp, Artificial Sequence
  Oligonucleotide primer for the detection of SNP TSC0012628
ctaaacgaaaac

SEQ ID NO: 286212 - DNA, 12 bp, Artificial Sequence
  Oligonucleotide primer for the detection of SNP TSC0012628
ttggtttttaag

SEQ ID NO: 286213 - DNA, 12 bp, Artificial Sequence
  Oligonucleotide primer for the detection of SNP TSC0012629
taacttcaaact

SEQ ID NO: 286214 - DNA, 12 bp, Artificial Sequence
  Oligonucleotide primer for the detection of SNP TSC0012629
gtagttttgtag

SEQ ID NO: 286215 - DNA, 12 bp, Artificial Sequence
  Oligonucleotide primer for the detection of SNP TSC0012632
acatttaattct

SEQ ID NO: 286216 - DNA, 12 bp, Artificial Sequence
  Oligonucleotide primer for the detection of SNP TSC0012632
tttaaaggattg

SEQ ID NO: 286217 - DNA, 12 bp, Artificial Sequence
  Oligonucleotide primer for the detection of SNP TSC0012634
attaatatattt

SEQ ID NO: 286218 - DNA, 12 bp, Artificial Sequence
  Oligonucleotide primer for the detection of SNP TSC0012634
gtaaatttttta

SEQ ID NO: 286219 - DNA, 12 bp, Artificial Sequence
  Oligonucleotide primer for the detection of SNP TSC0012635
cttttaaaaaac

SEQ ID NO: 286220 - DNA, 12 bp, Artificial Sequence
  Oligonucleotide primer for the detection of SNP TSC0012635
gtattatttaat

SEQ ID NO: 286221 - DNA, 12 bp, Artificial Sequence
  Oligonucleotide primer for the detection of SNP TSC0012635
gtattatttaac

SEQ ID NO: 286222 - DNA, 12 bp, Artificial Sequence
  Oligonucleotide primer for the detection of SNP TSC0012635
catattatttaa

SEQ ID NO: 286223 - DNA, 12 bp, Artificial Sequence
  Oligonucleotide primer for the detection of SNP TSC0012635
cgtattatttaa

SEQ ID NO: 286224 - DNA, 12 bp, Artificial Sequence
  Oligonucleotide primer for the detection of SNP TSC0012635
ttttaagaggtt

SEQ ID NO: 286225 - DNA, 12 bp, Artificial Sequence
  Oligonucleotide primer for the detection of SNP TSC0012636
aataaaatatac

SEQ ID NO: 286226 - DNA, 12 bp, Artificial Sequence
  Oligonucleotide primer for the detection of SNP TSC0012636
cgggaggtatta

SEQ ID NO: 286227 - DNA, 12 bp, Artificial Sequence
  Oligonucleotide primer for the detection of SNP TSC0012637
accaaaaaattc

SEQ ID NO: 286228 - DNA, 12 bp, Artificial Sequence
  Oligonucleotide primer for the detection of SNP TSC0012637
ttaagaatgaga

SEQ ID NO: 286229 - DNA, 12 bp, Artificial Sequence
  Oligonucleotide primer for the detection of SNP TSC0012638
caataaaaaccc

SEQ ID NO: 286230 - DNA, 12 bp, Artificial Sequence
  Oligonucleotide primer for the detection of SNP TSC0012638
cgataaaaaccc

SEQ ID NO: 286231 - DNA, 12 bp, Artificial Sequence
  Oligonucleotide primer for the detection of SNP TSC0012638
tagtatgaggta

SEQ ID NO: 286232 - DNA, 12 bp, Artificial Sequence
  Oligonucleotide primer for the detection of SNP TSC0012639
ctaaaaacaata

SEQ ID NO: 286233 - DNA, 12 bp, Artificial Sequence
  Oligonucleotide primer for the detection of SNP TSC0012639
aattagaaaaag

SEQ ID NO: 286234 - DNA, 12 bp, Artificial Sequence
  Oligonucleotide primer for the detection of SNP TSC0012639
ttgagggtagta

SEQ ID NO: 286235 - DNA, 12 bp, Artificial Sequence
  Oligonucleotide primer for the detection of SNP TSC0012640
tattaattttaa

SEQ ID NO: 286236 - DNA, 12 bp, Artificial Sequence
  Oligonukleotid-Primer
tttttaattttt

SEQ ID NO: 286237 - DNA, 12 bp, Artificial Sequence
  Oligonucleotide primer for the detection of SNP TSC0012640
cttctaacttct

SEQ ID NO: 286238 - DNA, 12 bp, Artificial Sequence
  Oligonucleotide primer for the detection of SNP TSC0012640
tgttagttttga

SEQ ID NO: 286239 - DNA, 12 bp, Artificial Sequence
  Oligonucleotide primer for the detection of SNP TSC0012642
aacaatttactt

SEQ ID NO: 286240 - DNA, 12 bp, Artificial Sequence
  Oligonucleotide primer for the detection of SNP TSC0012642
gtttgataatta

SEQ ID NO: 286241 - DNA, 12 bp, Artificial Sequence
  Oligonucleotide primer for the detection of SNP TSC0012643
accaatatctct

SEQ ID NO: 286242 - DNA, 12 bp, Artificial Sequence
  Oligonucleotide primer for the detection of SNP TSC0012643
gggttttgggag

SEQ ID NO: 286243 - DNA, 12 bp, Artificial Sequence
  Oligonucleotide primer for the detection of SNP TSC0012644
tataactcccaa

SEQ ID NO: 286244 - DNA, 12 bp, Artificial Sequence
  Oligonucleotide primer for the detection of SNP TSC0012644
atagtgggtatt

SEQ ID NO: 286245 - DNA, 12 bp, Artificial Sequence
  Oligonucleotide primer for the detection of SNP TSC0012644
aataataaatac

SEQ ID NO: 286246 - DNA, 12 bp, Artificial Sequence
  Oligonucleotide primer for the detection of SNP TSC0012645
tattaaaggtgt

SEQ ID NO: 286247 - DNA, 12 bp, Artificial Sequence
  Oligonucleotide primer for the detection of SNP TSC0012645
ctaccaaaaata

SEQ ID NO: 286248 - DNA, 12 bp, Artificial Sequence
  Oligonucleotide primer for the detection of SNP TSC0012645
gggttttgatag

SEQ ID NO: 286249 - DNA, 12 bp, Artificial Sequence
  Oligonucleotide primer for the detection of SNP TSC0012646
actcatttccat

SEQ ID NO: 286250 - DNA, 12 bp, Artificial Sequence
  Oligonucleotide primer for the detection of SNP TSC0012646
tgagtaggaaag

SEQ ID NO: 286251 - DNA, 12 bp, Artificial Sequence
  Oligonucleotide primer for the detection of SNP TSC0012648
atcatctactct

SEQ ID NO: 286252 - DNA, 12 bp, Artificial Sequence
  Oligonucleotide primer for the detection of SNP TSC0012648
atcgtctactct

SEQ ID NO: 286253 - DNA, 12 bp, Artificial Sequence
  Oligonucleotide primer for the detection of SNP TSC0012648
attaaggataat

SEQ ID NO: 286254 - DNA, 12 bp, Artificial Sequence
  Oligonucleotide primer for the detection of SNP TSC0012648
ttaaaaacaata

SEQ ID NO: 286255 - DNA, 12 bp, Artificial Sequence
  Oligonucleotide primer for the detection of SNP TSC0012648
attgtttatttt

SEQ ID NO: 286256 - DNA, 12 bp, Artificial Sequence
  Oligonucleotide primer for the detection of SNP TSC0012648
atcgtttatttt

SEQ ID NO: 286257 - DNA, 12 bp, Artificial Sequence
  Oligonucleotide primer for the detection of SNP TSC0012649
aataaatctttc

SEQ ID NO: 286258 - DNA, 12 bp, Artificial Sequence
  Oligonucleotide primer for the detection of SNP TSC0012649
aataaaattgat

SEQ ID NO: 286259 - DNA, 12 bp, Artificial Sequence
  Oligonucleotide primer for the detection of SNP TSC0012649
atggattttttt

SEQ ID NO: 286260 - DNA, 12 bp, Artificial Sequence
  Oligonucleotide primer for the detection of SNP TSC0012651
accaaaaaatat

SEQ ID NO: 286261 - DNA, 12 bp, Artificial Sequence
  Oligonucleotide primer for the detection of SNP TSC0012651
gtagtattagaa

SEQ ID NO: 286262 - DNA, 12 bp, Artificial Sequence
  Oligonucleotide primer for the detection of SNP TSC0012651
acaatatcaaaa

SEQ ID NO: 286263 - DNA, 12 bp, Artificial Sequence
  Oligonucleotide primer for the detection of SNP TSC0012651
attaaggagtat

SEQ ID NO: 286264 - DNA, 12 bp, Artificial Sequence
  Oligonucleotide primer for the detection of SNP TSC0012652
actaatcccaaa

SEQ ID NO: 286265 - DNA, 12 bp, Artificial Sequence
  Oligonucleotide primer for the detection of SNP TSC0012652
tttagaatgtgg

SEQ ID NO: 286266 - DNA, 12 bp, Artificial Sequence
  Oligonucleotide primer for the detection of SNP TSC0012652
tctaaaatataa

SEQ ID NO: 286267 - DNA, 12 bp, Artificial Sequence
  Oligonucleotide primer for the detection of SNP TSC0012652
ttagttttaaat

SEQ ID NO: 286268 - DNA, 12 bp, Artificial Sequence
  Oligonucleotide primer for the detection of SNP TSC0012653
actacacccaca

SEQ ID NO: 286269 - DNA, 12 bp, Artificial Sequence
  Oligonucleotide primer for the detection of SNP TSC0012653
ttaaggtgaatt

SEQ ID NO: 286270 - DNA, 12 bp, Artificial Sequence
  Oligonucleotide primer for the detection of SNP TSC0012653
cttaaaataaac

SEQ ID NO: 286271 - DNA, 12 bp, Artificial Sequence
  Oligonucleotide primer for the detection of SNP TSC0012653
tgttatatttat

SEQ ID NO: 286272 - DNA, 12 bp, Artificial Sequence
  Oligonucleotide primer for the detection of SNP TSC0012654
gtgtatattttt

SEQ ID NO: 286273 - DNA, 12 bp, Artificial Sequence
  Oligonucleotide primer for the detection of SNP TSC0012654
actatacatatc

SEQ ID NO: 286274 - DNA, 12 bp, Artificial Sequence
  Oligonucleotide primer for the detection of SNP TSC0012654
aaagaaagaaag

SEQ ID NO: 286275 - DNA, 12 bp, Artificial Sequence
  Oligonucleotide primer for the detection of SNP TSC0012655
caaaaaaacccc

SEQ ID NO: 286276 - DNA, 12 bp, Artificial Sequence
  Oligonucleotide primer for the detection of SNP TSC0012655
atatttgtgggg

SEQ ID NO: 286277 - DNA, 12 bp, Artificial Sequence
  Oligonucleotide primer for the detection of SNP TSC0012655
atattcgtgggg

SEQ ID NO: 286278 - DNA, 12 bp, Artificial Sequence
  Oligonucleotide primer for the detection of SNP TSC0012659
tatcaactatat

SEQ ID NO: 286279 - DNA, 12 bp, Artificial Sequence
  Oligonucleotide primer for the detection of SNP TSC0012659
tgttatgattga

SEQ ID NO: 286280 - DNA, 12 bp, Artificial Sequence
  Oligonucleotide primer for the detection of SNP TSC0012660
acactttaaaaa

SEQ ID NO: 286281 - DNA, 12 bp, Artificial Sequence
  Oligonucleotide primer for the detection of SNP TSC0012660
tttgtttgtttt

SEQ ID NO: 286282 - DNA, 12 bp, Artificial Sequence
  Oligonucleotide primer for the detection of SNP TSC0012660
ttcgtttgtttt

SEQ ID NO: 286283 - DNA, 12 bp, Artificial Sequence
  Oligonucleotide primer for the detection of SNP TSC0012660
tttgttcgtttt

SEQ ID NO: 286284 - DNA, 12 bp, Artificial Sequence
  Oligonucleotide primer for the detection of SNP TSC0012660
tttgtttgtttc

SEQ ID NO: 286285 - DNA, 12 bp, Artificial Sequence
  Oligonucleotide primer for the detection of SNP TSC0012660
ttcgttcgtttt

SEQ ID NO: 286286 - DNA, 12 bp, Artificial Sequence
  Oligonucleotide primer for the detection of SNP TSC0012660
ttcgtttgtttc

SEQ ID NO: 286287 - DNA, 12 bp, Artificial Sequence
  Oligonucleotide primer for the detection of SNP TSC0012660
tttgttcgtttc

SEQ ID NO: 286288 - DNA, 12 bp, Artificial Sequence
  Oligonucleotide primer for the detection of SNP TSC0012660
ttcgttcgtttc

SEQ ID NO: 286289 - DNA, 12 bp, Artificial Sequence
  Oligonucleotide primer for the detection of SNP TSC0012660
cacccacctcaa

SEQ ID NO: 286290 - DNA, 12 bp, Artificial Sequence
  Oligonucleotide primer for the detection of SNP TSC0012660
cacccacctcga

SEQ ID NO: 286291 - DNA, 12 bp, Artificial Sequence
  Oligonucleotide primer for the detection of SNP TSC0012660
cacccgcctcaa

SEQ ID NO: 286292 - DNA, 12 bp, Artificial Sequence
  Oligonucleotide primer for the detection of SNP TSC0012660
cgcccacctcaa

SEQ ID NO: 286293 - DNA, 12 bp, Artificial Sequence
  Oligonucleotide primer for the detection of SNP TSC0012660
cacccgcctcga

SEQ ID NO: 286294 - DNA, 12 bp, Artificial Sequence
  Oligonucleotide primer for the detection of SNP TSC0012660
cgcccacctcga

SEQ ID NO: 286295 - DNA, 12 bp, Artificial Sequence
  Oligonucleotide primer for the detection of SNP TSC0012660
cgcccgcctcaa

SEQ ID NO: 286296 - DNA, 12 bp, Artificial Sequence
  Oligonucleotide primer for the detection of SNP TSC0012660
cgcccgcctcga

SEQ ID NO: 286297 - DNA, 12 bp, Artificial Sequence
  Oligonukleotid-Primer
gtattttgggag

SEQ ID NO: 286298 - DNA, 12 bp, Artificial Sequence
  Oligonucleotide primer for the detection of SNP TSC0012661
aaacaaaacccc

SEQ ID NO: 286299 - DNA, 12 bp, Artificial Sequence
  Oligonucleotide primer for the detection of SNP TSC0012662
ctattaaaatac

SEQ ID NO: 286300 - DNA, 12 bp, Artificial Sequence
  Oligonucleotide primer for the detection of SNP TSC0012662
tggaggataggt

SEQ ID NO: 286301 - DNA, 12 bp, Artificial Sequence
  Oligonukleotid-Primer
ttgttgagatgt

SEQ ID NO: 286302 - DNA, 12 bp, Artificial Sequence
  Oligonucleotide primer for the detection of SNP TSC0012663
aaacacataaaa

SEQ ID NO: 286303 - DNA, 12 bp, Artificial Sequence
  Oligonucleotide primer for the detection of SNP TSC0012663
aaacacgtaaaa

SEQ ID NO: 286304 - DNA, 12 bp, Artificial Sequence
  Oligonucleotide primer for the detection of SNP TSC0012663
gtttagttgttt

SEQ ID NO: 286305 - DNA, 12 bp, Artificial Sequence
  Oligonucleotide primer for the detection of SNP TSC0012663
aacccaactacc

SEQ ID NO: 286306 - DNA, 12 bp, Artificial Sequence
  Oligonucleotide primer for the detection of SNP TSC0012663
gaagtatgtaag

SEQ ID NO: 286307 - DNA, 12 bp, Artificial Sequence
  Oligonucleotide primer for the detection of SNP TSC0012663
gaagtacgtaag

SEQ ID NO: 286308 - DNA, 12 bp, Artificial Sequence
  Oligonucleotide primer for the detection of SNP TSC0012664
aataaattttat

SEQ ID NO: 286309 - DNA, 12 bp, Artificial Sequence
  Oligonucleotide primer for the detection of SNP TSC0012664
tttaaatatgta

SEQ ID NO: 286310 - DNA, 12 bp, Artificial Sequence
  Oligonucleotide primer for the detection of SNP TSC0012664
cttaaatatata

SEQ ID NO: 286311 - DNA, 12 bp, Artificial Sequence
  Oligonucleotide primer for the detection of SNP TSC0012665
taaacaaaatct

SEQ ID NO: 286312 - DNA, 12 bp, Artificial Sequence
  Oligonucleotide primer for the detection of SNP TSC0012665
tggtgatagagt

SEQ ID NO: 286313 - DNA, 12 bp, Artificial Sequence
  Oligonucleotide primer for the detection of SNP TSC0012665
taataacaaaac

SEQ ID NO: 286314 - DNA, 12 bp, Artificial Sequence
  Oligonucleotide primer for the detection of SNP TSC0012665
tagatagagttt

SEQ ID NO: 286315 - DNA, 12 bp, Artificial Sequence
  Oligonucleotide primer for the detection of SNP TSC0012666
aatttaactctt

SEQ ID NO: 286316 - DNA, 12 bp, Artificial Sequence
  Oligonucleotide primer for the detection of SNP TSC0012666
attatagggata

SEQ ID NO: 286317 - DNA, 12 bp, Artificial Sequence
  Oligonucleotide primer for the detection of SNP TSC0012668
aatactaatccc

SEQ ID NO: 286318 - DNA, 12 bp, Artificial Sequence
  Oligonucleotide primer for the detection of SNP TSC0012668
ggggagggtagg

SEQ ID NO: 286319 - DNA, 12 bp, Artificial Sequence
  Oligonucleotide primer for the detection of SNP TSC0012669
tattaaaatacg

SEQ ID NO: 286320 - DNA, 12 bp, Artificial Sequence
  Oligonucleotide primer for the detection of SNP TSC0012669
ttattaaagtga

SEQ ID NO: 286321 - DNA, 12 bp, Artificial Sequence
  Oligonucleotide primer for the detection of SNP TSC0012670
ctaacattcatt

SEQ ID NO: 286322 - DNA, 12 bp, Artificial Sequence
  Oligonucleotide primer for the detection of SNP TSC0012670
ctaacgttcatt

SEQ ID NO: 286323 - DNA, 12 bp, Artificial Sequence
  Oligonucleotide primer for the detection of SNP TSC0012670
ttttaagttaga

SEQ ID NO: 286324 - DNA, 12 bp, Artificial Sequence
  Oligonucleotide primer for the detection of SNP TSC0012671
ttacaatcttaa

SEQ ID NO: 286325 - DNA, 12 bp, Artificial Sequence
  Oligonucleotide primer for the detection of SNP TSC0012671
atgaaaaatatt

SEQ ID NO: 286326 - DNA, 12 bp, Artificial Sequence
  Oligonucleotide primer for the detection of SNP TSC0012671
ccataaaaaaca

SEQ ID NO: 286327 - DNA, 12 bp, Artificial Sequence
  Oligonucleotide primer for the detection of SNP TSC0012671
attgtagttttg

SEQ ID NO: 286328 - DNA, 12 bp, Artificial Sequence
  Oligonucleotide primer for the detection of SNP TSC0012672
cctaaccacata

SEQ ID NO: 286329 - DNA, 12 bp, Artificial Sequence
  Oligonucleotide primer for the detection of SNP TSC0012672
cctaaccacgta

SEQ ID NO: 286330 - DNA, 12 bp, Artificial Sequence
  Oligonucleotide primer for the detection of SNP TSC0012672
gttttggttgtt

SEQ ID NO: 286331 - DNA, 12 bp, Artificial Sequence
  Oligonucleotide primer for the detection of SNP TSC0012672
gtttcggttgtt

SEQ ID NO: 286332 - DNA, 12 bp, Artificial Sequence
  Oligonucleotide primer for the detection of SNP TSC0012672
actccaactact

SEQ ID NO: 286333 - DNA, 12 bp, Artificial Sequence
  Oligonucleotide primer for the detection of SNP TSC0012672
actccgactact

SEQ ID NO: 286334 - DNA, 12 bp, Artificial Sequence
  Oligonucleotide primer for the detection of SNP TSC0012672
tttgattatgta

SEQ ID NO: 286335 - DNA, 12 bp, Artificial Sequence
  Oligonucleotide primer for the detection of SNP TSC0012672
tttgattacgta

SEQ ID NO: 286336 - DNA, 12 bp, Artificial Sequence
  Oligonucleotide primer for the detection of SNP TSC0012673
caatttcaatat

SEQ ID NO: 286337 - DNA, 12 bp, Artificial Sequence
  Oligonucleotide primer for the detection of SNP TSC0012673
gtaattttttta

SEQ ID NO: 286338 - DNA, 12 bp, Artificial Sequence
  Oligonucleotide primer for the detection of SNP TSC0012677
aaaacactctcc

SEQ ID NO: 286339 - DNA, 12 bp, Artificial Sequence
  Oligonucleotide primer for the detection of SNP TSC0012677
agttgtggggag

SEQ ID NO: 286340 - DNA, 12 bp, Artificial Sequence
  Oligonucleotide primer for the detection of SNP TSC0012677
agtcgtggggag

SEQ ID NO: 286341 - DNA, 12 bp, Artificial Sequence
  Oligonucleotide primer for the detection of SNP TSC0012677
agttgcggggag

SEQ ID NO: 286342 - DNA, 12 bp, Artificial Sequence
  Oligonucleotide primer for the detection of SNP TSC0012677
agtcgcggggag

SEQ ID NO: 286343 - DNA, 12 bp, Artificial Sequence
  Oligonucleotide primer for the detection of SNP TSC0012678
aaaaaaaaacca

SEQ ID NO: 286344 - DNA, 12 bp, Artificial Sequence
  Oligonucleotide primer for the detection of SNP TSC0012678
aaaaaaaaaccg

SEQ ID NO: 286345 - DNA, 12 bp, Artificial Sequence
  Oligonucleotide primer for the detection of SNP TSC0012678
acactctcccct

SEQ ID NO: 286346 - DNA, 12 bp, Artificial Sequence
  Oligonucleotide primer for the detection of SNP TSC0012678
agggagggagtt

SEQ ID NO: 286347 - DNA, 12 bp, Artificial Sequence
  Oligonucleotide primer for the detection of SNP TSC0012678
agggagggagtc

SEQ ID NO: 286348 - DNA, 12 bp, Artificial Sequence
  Oligonucleotide primer for the detection of SNP TSC0012679
ataaaatttaaa

SEQ ID NO: 286349 - DNA, 12 bp, Artificial Sequence
  Oligonucleotide primer for the detection of SNP TSC0012679
attttatttttg

SEQ ID NO: 286350 - DNA, 12 bp, Artificial Sequence
  Oligonucleotide primer for the detection of SNP TSC0012682
tttgttagttta

SEQ ID NO: 286351 - DNA, 12 bp, Artificial Sequence
  Oligonucleotide primer for the detection of SNP TSC0012684
ttggaatttgaa

SEQ ID NO: 286352 - DNA, 12 bp, Artificial Sequence
  Oligonucleotide primer for the detection of SNP TSC0012685
aaaattaaactt

SEQ ID NO: 286353 - DNA, 12 bp, Artificial Sequence
  Oligonucleotide primer for the detection of SNP TSC0012685
ggttttgatggg

SEQ ID NO: 286354 - DNA, 12 bp, Artificial Sequence
  Oligonucleotide primer for the detection of SNP TSC0012690
caaccctaaaac

SEQ ID NO: 286355 - DNA, 12 bp, Artificial Sequence
  Oligonucleotide primer for the detection of SNP TSC0012690
ttagagtaggga

SEQ ID NO: 286356 - DNA, 12 bp, Artificial Sequence
  Oligonucleotide primer for the detection of SNP TSC0012691
aaataaatacta

SEQ ID NO: 286357 - DNA, 12 bp, Artificial Sequence
  Oligonucleotide primer for the detection of SNP TSC0012691
aatgggtatatt

SEQ ID NO: 286358 - DNA, 12 bp, Artificial Sequence
  Oligonucleotide primer for the detection of SNP TSC0012691
aataaatacatt

SEQ ID NO: 286359 - DNA, 12 bp, Artificial Sequence
  Oligonucleotide primer for the detection of SNP TSC0012691
gagtgggtgttg

SEQ ID NO: 286360 - DNA, 12 bp, Artificial Sequence
  Oligonucleotide primer for the detection of SNP TSC0012692
caacatacttta

SEQ ID NO: 286361 - DNA, 12 bp, Artificial Sequence
  Oligonucleotide primer for the detection of SNP TSC0012692
cgacatacttta

SEQ ID NO: 286362 - DNA, 12 bp, Artificial Sequence
  Oligonucleotide primer for the detection of SNP TSC0012692
taaaaagaagat

SEQ ID NO: 286363 - DNA, 12 bp, Artificial Sequence
  Oligonucleotide primer for the detection of SNP TSC0012692
tggtatatttta

SEQ ID NO: 286364 - DNA, 12 bp, Artificial Sequence
  Oligonucleotide primer for the detection of SNP TSC0012692
cggtatatttta

SEQ ID NO: 286365 - DNA, 12 bp, Artificial Sequence
  Oligonucleotide primer for the detection of SNP TSC0012693
gtttttgtattg

SEQ ID NO: 286366 - DNA, 12 bp, Artificial Sequence
  Oligonucleotide primer for the detection of SNP TSC0012693
gtttttgtatcg

SEQ ID NO: 286367 - DNA, 12 bp, Artificial Sequence
  Oligonucleotide primer for the detection of SNP TSC0012694
aattaattttta

SEQ ID NO: 286368 - DNA, 12 bp, Artificial Sequence
  Oligonucleotide primer for the detection of SNP TSC0012694
tttttattaaaa

SEQ ID NO: 286369 - DNA, 12 bp, Artificial Sequence
  Oligonucleotide primer for the detection of SNP TSC0012695
tcaaacatctac

SEQ ID NO: 286370 - DNA, 12 bp, Artificial Sequence
  Oligonucleotide primer for the detection of SNP TSC0012696
acaaaaacacat

SEQ ID NO: 286371 - DNA, 12 bp, Artificial Sequence
  Oligonucleotide primer for the detection of SNP TSC0012696
cccattcttaaa

SEQ ID NO: 286372 - DNA, 12 bp, Artificial Sequence
  Oligonucleotide primer for the detection of SNP TSC0012696
ataaaagtatat

SEQ ID NO: 286373 - DNA, 12 bp, Artificial Sequence
  Oligonucleotide primer for the detection of SNP TSC0012697
acttcctatact

SEQ ID NO: 286374 - DNA, 12 bp, Artificial Sequence
  Oligonucleotide primer for the detection of SNP TSC0012697
gttattgttata

SEQ ID NO: 286375 - DNA, 12 bp, Artificial Sequence
  Oligonucleotide primer for the detection of SNP TSC0012702
tccaactaacct

SEQ ID NO: 286376 - DNA, 12 bp, Artificial Sequence
  Oligonucleotide primer for the detection of SNP TSC0012702
atcccctctcaa

SEQ ID NO: 286377 - DNA, 12 bp, Artificial Sequence
  Oligonucleotide primer for the detection of SNP TSC0012702
tttagttgattt

SEQ ID NO: 286378 - DNA, 12 bp, Artificial Sequence
  Oligonucleotide primer for the detection of SNP TSC0012703
cttcctctaccc

SEQ ID NO: 286379 - DNA, 12 bp, Artificial Sequence
  Oligonucleotide primer for the detection of SNP TSC0012703
attttttgtttg

SEQ ID NO: 286380 - DNA, 12 bp, Artificial Sequence
  Oligonucleotide primer for the detection of SNP TSC0012703
atttttcgtttg

SEQ ID NO: 286381 - DNA, 12 bp, Artificial Sequence
  Oligonucleotide primer for the detection of SNP TSC0012703
accctccaccta

SEQ ID NO: 286382 - DNA, 12 bp, Artificial Sequence
  Oligonucleotide primer for the detection of SNP TSC0012703
accctccgccta

SEQ ID NO: 286383 - DNA, 12 bp, Artificial Sequence
  Oligonucleotide primer for the detection of SNP TSC0012705
gggtgtggtggt

SEQ ID NO: 286384 - DNA, 12 bp, Artificial Sequence
  Oligonucleotide primer for the detection of SNP TSC0012705
gggtgtggtggc

SEQ ID NO: 286385 - DNA, 12 bp, Artificial Sequence
  Oligonucleotide primer for the detection of SNP TSC0012705
aaatataataac

SEQ ID NO: 286386 - DNA, 12 bp, Artificial Sequence
  Oligonucleotide primer for the detection of SNP TSC0012707
caaacaaaaccc

SEQ ID NO: 286387 - DNA, 12 bp, Artificial Sequence
  Oligonucleotide primer for the detection of SNP TSC0012707
gatttgataatt

SEQ ID NO: 286388 - DNA, 12 bp, Artificial Sequence
  Oligonucleotide primer for the detection of SNP TSC0012707
atttaacaatta

SEQ ID NO: 286389 - DNA, 12 bp, Artificial Sequence
  Oligonucleotide primer for the detection of SNP TSC0012707
tagataaggttt

SEQ ID NO: 286390 - DNA, 12 bp, Artificial Sequence
  Oligonucleotide primer for the detection of SNP TSC0012707
tagataaggttc

SEQ ID NO: 286391 - DNA, 12 bp, Artificial Sequence
  Oligonucleotide primer for the detection of SNP TSC0012708
atttctatctct

SEQ ID NO: 286392 - DNA, 12 bp, Artificial Sequence
  Oligonucleotide primer for the detection of SNP TSC0012709
tcttaactaacc

SEQ ID NO: 286393 - DNA, 12 bp, Artificial Sequence
  Oligonucleotide primer for the detection of SNP TSC0012709
tttaatatgaaa

SEQ ID NO: 286394 - DNA, 12 bp, Artificial Sequence
  Oligonucleotide primer for the detection of SNP TSC0012710
tttcctaaccac

SEQ ID NO: 286395 - DNA, 12 bp, Artificial Sequence
  Oligonucleotide primer for the detection of SNP TSC0012710
gttggaatttta

SEQ ID NO: 286396 - DNA, 12 bp, Artificial Sequence
  Oligonucleotide primer for the detection of SNP TSC0012710
attaaaacttta

SEQ ID NO: 286397 - DNA, 12 bp, Artificial Sequence
  Oligonucleotide primer for the detection of SNP TSC0012710
ttttttgattat

SEQ ID NO: 286398 - DNA, 12 bp, Artificial Sequence
  Oligonucleotide primer for the detection of SNP TSC0012711
caccataataca

SEQ ID NO: 286399 - DNA, 12 bp, Artificial Sequence
  Oligonucleotide primer for the detection of SNP TSC0012711
atataaaaaaat

SEQ ID NO: 286400 - DNA, 12 bp, Artificial Sequence
  Oligonucleotide primer for the detection of SNP TSC0012711
tattataatata

SEQ ID NO: 286401 - DNA, 12 bp, Artificial Sequence
  Oligonucleotide primer for the detection of SNP TSC0012712
cataacaaaaaa

SEQ ID NO: 286402 - DNA, 12 bp, Artificial Sequence
  Oligonukleotid-Primer
gaattattattt

SEQ ID NO: 286403 - DNA, 12 bp, Artificial Sequence
  Oligonucleotide primer for the detection of SNP TSC0012712
atcatcatttaa

SEQ ID NO: 286404 - DNA, 12 bp, Artificial Sequence
  Oligonucleotide primer for the detection of SNP TSC0012712
tatggtaaggaa

SEQ ID NO: 286405 - DNA, 12 bp, Artificial Sequence
  Oligonucleotide primer for the detection of SNP TSC0012715
atcattcactcc

SEQ ID NO: 286406 - DNA, 12 bp, Artificial Sequence
  Oligonucleotide primer for the detection of SNP TSC0012715
atcgttcactcc

SEQ ID NO: 286407 - DNA, 12 bp, Artificial Sequence
  Oligonucleotide primer for the detection of SNP TSC0012715
tgtttgttaggt

SEQ ID NO: 286408 - DNA, 12 bp, Artificial Sequence
  Oligonucleotide primer for the detection of SNP TSC0012715
tgtttgttaggc

SEQ ID NO: 286409 - DNA, 12 bp, Artificial Sequence
  Oligonucleotide primer for the detection of SNP TSC0012715
ctatctaccaaa

SEQ ID NO: 286410 - DNA, 12 bp, Artificial Sequence
  Oligonucleotide primer for the detection of SNP TSC0012715
gtcgtttatttt

SEQ ID NO: 286411 - DNA, 12 bp, Artificial Sequence
  Oligonucleotide primer for the detection of SNP TSC0012716
ccctacccctct

SEQ ID NO: 286412 - DNA, 12 bp, Artificial Sequence
  Oligonucleotide primer for the detection of SNP TSC0012716
ttaggggttatg

SEQ ID NO: 286413 - DNA, 12 bp, Artificial Sequence
  Oligonucleotide primer for the detection of SNP TSC0012717
tattctactaca

SEQ ID NO: 286414 - DNA, 12 bp, Artificial Sequence
  Oligonucleotide primer for the detection of SNP TSC0012717
taggttgtagtg

SEQ ID NO: 286415 - DNA, 12 bp, Artificial Sequence
  Oligonucleotide primer for the detection of SNP TSC0012717
taggttgtagcg

SEQ ID NO: 286416 - DNA, 12 bp, Artificial Sequence
  Oligonucleotide primer for the detection of SNP TSC0012717
caaactacaaca

SEQ ID NO: 286417 - DNA, 12 bp, Artificial Sequence
  Oligonucleotide primer for the detection of SNP TSC0012717
caaactacaacg

SEQ ID NO: 286418 - DNA, 12 bp, Artificial Sequence
  Oligonucleotide primer for the detection of SNP TSC0012718
aaatcatatact

SEQ ID NO: 286419 - DNA, 12 bp, Artificial Sequence
  Oligonucleotide primer for the detection of SNP TSC0012718
tttgttttagag

SEQ ID NO: 286420 - DNA, 12 bp, Artificial Sequence
  Oligonucleotide primer for the detection of SNP TSC0012722
ttctcctcttcc

SEQ ID NO: 286421 - DNA, 12 bp, Artificial Sequence
  Oligonucleotide primer for the detection of SNP TSC0012722
agatttgataag

SEQ ID NO: 286422 - DNA, 12 bp, Artificial Sequence
  Oligonucleotide primer for the detection of SNP TSC0012726
attaccaactct

SEQ ID NO: 286423 - DNA, 12 bp, Artificial Sequence
  Oligonucleotide primer for the detection of SNP TSC0012726
attaccgactct

SEQ ID NO: 286424 - DNA, 12 bp, Artificial Sequence
  Oligonucleotide primer for the detection of SNP TSC0012726
tgatttggatgt

SEQ ID NO: 286425 - DNA, 12 bp, Artificial Sequence
  Oligonucleotide primer for the detection of SNP TSC0012726
tgattcggatgt

SEQ ID NO: 286426 - DNA, 12 bp, Artificial Sequence
  Oligonucleotide primer for the detection of SNP TSC0012726
taactcaaatac

SEQ ID NO: 286427 - DNA, 12 bp, Artificial Sequence
  Oligonucleotide primer for the detection of SNP TSC0012726
taactcgaatac

SEQ ID NO: 286428 - DNA, 12 bp, Artificial Sequence
  Oligonucleotide primer for the detection of SNP TSC0012726
ttattgattttt

SEQ ID NO: 286429 - DNA, 12 bp, Artificial Sequence
  Oligonucleotide primer for the detection of SNP TSC0012726
ttatcgattttt

SEQ ID NO: 286430 - DNA, 12 bp, Artificial Sequence
  Oligonucleotide primer for the detection of SNP TSC0012726
ttattgattttc

SEQ ID NO: 286431 - DNA, 12 bp, Artificial Sequence
  Oligonucleotide primer for the detection of SNP TSC0012726
ttatcgattttc

SEQ ID NO: 286432 - DNA, 12 bp, Artificial Sequence
  Oligonucleotide primer for the detection of SNP TSC0012727
taaactaccaat

SEQ ID NO: 286433 - DNA, 12 bp, Artificial Sequence
  Oligonucleotide primer for the detection of SNP TSC0012727
aagaggatgtgg

SEQ ID NO: 286434 - DNA, 12 bp, Artificial Sequence
  Oligonucleotide primer for the detection of SNP TSC0012728
aaaaaatctaac

SEQ ID NO: 286435 - DNA, 12 bp, Artificial Sequence
  Oligonucleotide primer for the detection of SNP TSC0012728
aaaattaagttt

SEQ ID NO: 286436 - DNA, 12 bp, Artificial Sequence
  Oligonucleotide primer for the detection of SNP TSC0012728
aaaatcaaactt

SEQ ID NO: 286437 - DNA, 12 bp, Artificial Sequence
  Oligonucleotide primer for the detection of SNP TSC0012728
gaaagatttaat

SEQ ID NO: 286438 - DNA, 12 bp, Artificial Sequence
  Oligonucleotide primer for the detection of SNP TSC0012729
aaaataacatct

SEQ ID NO: 286439 - DNA, 12 bp, Artificial Sequence
  Oligonucleotide primer for the detection of SNP TSC0012729
gttgtattatta

SEQ ID NO: 286440 - DNA, 12 bp, Artificial Sequence
  Oligonucleotide primer for the detection of SNP TSC0012729
gtcgtattatta

SEQ ID NO: 286441 - DNA, 12 bp, Artificial Sequence
  Oligonucleotide primer for the detection of SNP TSC0012730
atttcctctacc

SEQ ID NO: 286442 - DNA, 12 bp, Artificial Sequence
  Oligonucleotide primer for the detection of SNP TSC0012730
attagtaatgta

SEQ ID NO: 286443 - DNA, 12 bp, Artificial Sequence
  Oligonucleotide primer for the detection of SNP TSC0012732
aactccaaattc

SEQ ID NO: 286444 - DNA, 12 bp, Artificial Sequence
  Oligonucleotide primer for the detection of SNP TSC0012732
atgagtttgtaa

SEQ ID NO: 286445 - DNA, 12 bp, Artificial Sequence
  Oligonucleotide primer for the detection of SNP TSC0012733
aatatatatact

SEQ ID NO: 286446 - DNA, 12 bp, Artificial Sequence
  Oligonucleotide primer for the detection of SNP TSC0012733
tatatatatgta

SEQ ID NO: 286447 - DNA, 12 bp, Artificial Sequence
  Oligonucleotide primer for the detection of SNP TSC0012733
tacatacataca

SEQ ID NO: 286448 - DNA, 12 bp, Artificial Sequence
  Oligonucleotide primer for the detection of SNP TSC0012733
aatgtatgtgtt

SEQ ID NO: 286449 - DNA, 12 bp, Artificial Sequence
  Oligonucleotide primer for the detection of SNP TSC0012734
ataacaactacc

SEQ ID NO: 286450 - DNA, 12 bp, Artificial Sequence
  Oligonucleotide primer for the detection of SNP TSC0012734
ggtattatttgg

SEQ ID NO: 286451 - DNA, 12 bp, Artificial Sequence
  Oligonucleotide primer for the detection of SNP TSC0012734
aacaccacctaa

SEQ ID NO: 286452 - DNA, 12 bp, Artificial Sequence
  Oligonucleotide primer for the detection of SNP TSC0012734
atagtagttgtt

SEQ ID NO: 286453 - DNA, 12 bp, Artificial Sequence
  Oligonucleotide primer for the detection of SNP TSC0012735
cgtgtgtgtgtg

SEQ ID NO: 286454 - DNA, 12 bp, Artificial Sequence
  Oligonucleotide primer for the detection of SNP TSC0012735
tgcgtgtgtgtg

SEQ ID NO: 286455 - DNA, 12 bp, Artificial Sequence
  Oligonucleotide primer for the detection of SNP TSC0012735
tgtgcgtgtgtg

SEQ ID NO: 286456 - DNA, 12 bp, Artificial Sequence
  Oligonucleotide primer for the detection of SNP TSC0012735
tgtgtgcgtgtg

SEQ ID NO: 286457 - DNA, 12 bp, Artificial Sequence
  Oligonucleotide primer for the detection of SNP TSC0012735
tgtgtgtgcgtg

SEQ ID NO: 286458 - DNA, 12 bp, Artificial Sequence
  Oligonucleotide primer for the detection of SNP TSC0012735
tgtgtgtgtgcg

SEQ ID NO: 286459 - DNA, 12 bp, Artificial Sequence
  Oligonucleotide primer for the detection of SNP TSC0012735
cgcgtgtgtgtg

SEQ ID NO: 286460 - DNA, 12 bp, Artificial Sequence
  Oligonucleotide primer for the detection of SNP TSC0012735
cgtgcgtgtgtg

SEQ ID NO: 286461 - DNA, 12 bp, Artificial Sequence
  Oligonucleotide primer for the detection of SNP TSC0012735
cgtgtgcgtgtg

SEQ ID NO: 286462 - DNA, 12 bp, Artificial Sequence
  Oligonucleotide primer for the detection of SNP TSC0012735
cgtgtgtgcgtg

SEQ ID NO: 286463 - DNA, 12 bp, Artificial Sequence
  Oligonukleotid-Primer
cgtgtgtgtgcg

SEQ ID NO: 286464 - DNA, 12 bp, Artificial Sequence
  Oligonucleotide primer for the detection of SNP TSC0012735
tgcgcgtgtgtg

SEQ ID NO: 286465 - DNA, 12 bp, Artificial Sequence
  Oligonucleotide primer for the detection of SNP TSC0012735
tgcgtgcgtgtg

SEQ ID NO: 286466 - DNA, 12 bp, Artificial Sequence
  Oligonucleotide primer for the detection of SNP TSC0012735
tgcgtgtgcgtg

SEQ ID NO: 286467 - DNA, 12 bp, Artificial Sequence
  Oligonucleotide primer for the detection of SNP TSC0012735
tgcgtgtgtgcg

SEQ ID NO: 286468 - DNA, 12 bp, Artificial Sequence
  Oligonucleotide primer for the detection of SNP TSC0012735
tgtgcgcgtgtg

SEQ ID NO: 286469 - DNA, 12 bp, Artificial Sequence
  Oligonucleotide primer for the detection of SNP TSC0012735
tgtgcgtgcgtg

SEQ ID NO: 286470 - DNA, 12 bp, Artificial Sequence
  Oligonucleotide primer for the detection of SNP TSC0012735
tgtgcgtgtgcg

SEQ ID NO: 286471 - DNA, 12 bp, Artificial Sequence
  Oligonucleotide primer for the detection of SNP TSC0012735
tgtgtgcgcgtg

SEQ ID NO: 286472 - DNA, 12 bp, Artificial Sequence
  Oligonucleotide primer for the detection of SNP TSC0012735
tgtgtgcgtgcg

SEQ ID NO: 286473 - DNA, 12 bp, Artificial Sequence
  Oligonucleotide primer for the detection of SNP TSC0012735
tgtgtgtgcgcg

SEQ ID NO: 286474 - DNA, 12 bp, Artificial Sequence
  Oligonucleotide primer for the detection of SNP TSC0012735
cgcgcgtgtgtg

SEQ ID NO: 286475 - DNA, 12 bp, Artificial Sequence
  Oligonucleotide primer for the detection of SNP TSC0012735
cgcgtgcgtgtg

SEQ ID NO: 286476 - DNA, 12 bp, Artificial Sequence
  Oligonucleotide primer for the detection of SNP TSC0012735
cgcgtgtgcgtg

SEQ ID NO: 286477 - DNA, 12 bp, Artificial Sequence
  Oligonucleotide primer for the detection of SNP TSC0012735
cgcgtgtgtgcg

SEQ ID NO: 286478 - DNA, 12 bp, Artificial Sequence
  Oligonucleotide primer for the detection of SNP TSC0012735
cgtgcgcgtgtg

SEQ ID NO: 286479 - DNA, 12 bp, Artificial Sequence
  Oligonucleotide primer for the detection of SNP TSC0012735
cgtgcgtgcgtg

SEQ ID NO: 286480 - DNA, 12 bp, Artificial Sequence
  Oligonucleotide primer for the detection of SNP TSC0012735
cgtgcgtgtgcg

SEQ ID NO: 286481 - DNA, 12 bp, Artificial Sequence
  Oligonucleotide primer for the detection of SNP TSC0012735
cgtgtgcgcgtg

SEQ ID NO: 286482 - DNA, 12 bp, Artificial Sequence
  Oligonucleotide primer for the detection of SNP TSC0012735
cgtgtgcgtgcg

SEQ ID NO: 286483 - DNA, 12 bp, Artificial Sequence
  Oligonucleotide primer for the detection of SNP TSC0012735
cgtgtgtgcgcg

SEQ ID NO: 286484 - DNA, 12 bp, Artificial Sequence
  Oligonucleotide primer for the detection of SNP TSC0012735
tgcgcgcgtgtg

SEQ ID NO: 286485 - DNA, 12 bp, Artificial Sequence
  Oligonucleotide primer for the detection of SNP TSC0012735
tgcgcgtgcgtg

SEQ ID NO: 286486 - DNA, 12 bp, Artificial Sequence
  Oligonucleotide primer for the detection of SNP TSC0012735
tgcgcgtgtgcg

SEQ ID NO: 286487 - DNA, 12 bp, Artificial Sequence
  Oligonucleotide primer for the detection of SNP TSC0012735
tgcgtgcgcgtg

SEQ ID NO: 286488 - DNA, 12 bp, Artificial Sequence
  Oligonucleotide primer for the detection of SNP TSC0012735
tgcgtgcgtgcg

SEQ ID NO: 286489 - DNA, 12 bp, Artificial Sequence
  Oligonucleotide primer for the detection of SNP TSC0012735
tgcgtgtgcgcg

SEQ ID NO: 286490 - DNA, 12 bp, Artificial Sequence
  Oligonucleotide primer for the detection of SNP TSC0012735
tgtgcgcgcgtg

SEQ ID NO: 286491 - DNA, 12 bp, Artificial Sequence
  Oligonucleotide primer for the detection of SNP TSC0012735
tgtgcgcgtgcg

SEQ ID NO: 286492 - DNA, 12 bp, Artificial Sequence
  Oligonucleotide primer for the detection of SNP TSC0012735
tgtgcgtgcgcg

SEQ ID NO: 286493 - DNA, 12 bp, Artificial Sequence
  Oligonucleotide primer for the detection of SNP TSC0012735
tgtgtgcgcgcg

SEQ ID NO: 286494 - DNA, 12 bp, Artificial Sequence
  Oligonucleotide primer for the detection of SNP TSC0012735
cgcgcgcgtgtg

SEQ ID NO: 286495 - DNA, 12 bp, Artificial Sequence
  Oligonucleotide primer for the detection of SNP TSC0012735
cgcgcgtgcgtg

SEQ ID NO: 286496 - DNA, 12 bp, Artificial Sequence
  Oligonukleotid-Primer
cgcgcgtgtgcg

SEQ ID NO: 286497 - DNA, 12 bp, Artificial Sequence
  Oligonucleotide primer for the detection of SNP TSC0012735
cgcgtgcgcgtg

SEQ ID NO: 286498 - DNA, 12 bp, Artificial Sequence
  Oligonucleotide primer for the detection of SNP TSC0012735
cgcgtgcgtgcg

SEQ ID NO: 286499 - DNA, 12 bp, Artificial Sequence
  Oligonucleotide primer for the detection of SNP TSC0012735
cgcgtgtgcgcg

SEQ ID NO: 286500 - DNA, 12 bp, Artificial Sequence
  Oligonucleotide primer for the detection of SNP TSC0012735
cgtgcgcgcgtg

SEQ ID NO: 286501 - DNA, 12 bp, Artificial Sequence
  Oligonucleotide primer for the detection of SNP TSC0012735
cgtgcgcgtgcg

SEQ ID NO: 286502 - DNA, 12 bp, Artificial Sequence
  Oligonucleotide primer for the detection of SNP TSC0012735
cgtgcgtgcgcg

SEQ ID NO: 286503 - DNA, 12 bp, Artificial Sequence
  Oligonucleotide primer for the detection of SNP TSC0012735
cgtgtgcgcgcg

SEQ ID NO: 286504 - DNA, 12 bp, Artificial Sequence
  Oligonucleotide primer for the detection of SNP TSC0012735
tgcgcgcgcgtg

SEQ ID NO: 286505 - DNA, 12 bp, Artificial Sequence
  Oligonucleotide primer for the detection of SNP TSC0012735
tgcgcgcgtgcg

SEQ ID NO: 286506 - DNA, 12 bp, Artificial Sequence
  Oligonucleotide primer for the detection of SNP TSC0012735
tgcgcgtgcgcg

SEQ ID NO: 286507 - DNA, 12 bp, Artificial Sequence
  Oligonucleotide primer for the detection of SNP TSC0012735
tgcgtgcgcgcg

SEQ ID NO: 286508 - DNA, 12 bp, Artificial Sequence
  Oligonucleotide primer for the detection of SNP TSC0012735
tgtgcgcgcgcg

SEQ ID NO: 286509 - DNA, 12 bp, Artificial Sequence
  Oligonucleotide primer for the detection of SNP TSC0012735
cgcgcgcgcgtg

SEQ ID NO: 286510 - DNA, 12 bp, Artificial Sequence
  Oligonucleotide primer for the detection of SNP TSC0012735
cgcgcgcgtgcg

SEQ ID NO: 286511 - DNA, 12 bp, Artificial Sequence
  Oligonucleotide primer for the detection of SNP TSC0012735
cgcgcgtgcgcg

SEQ ID NO: 286512 - DNA, 12 bp, Artificial Sequence
  Oligonucleotide primer for the detection of SNP TSC0012735
cgcgtgcgcgcg

SEQ ID NO: 286513 - DNA, 12 bp, Artificial Sequence
  Oligonucleotide primer for the detection of SNP TSC0012735
cgtgcgcgcgcg

SEQ ID NO: 286514 - DNA, 12 bp, Artificial Sequence
  Oligonucleotide primer for the detection of SNP TSC0012735
tgcgcgcgcgcg

SEQ ID NO: 286515 - DNA, 12 bp, Artificial Sequence
  Oligonucleotide primer for the detection of SNP TSC0012735
cgcgcgcgcgcg

SEQ ID NO: 286516 - DNA, 12 bp, Artificial Sequence
  Oligonucleotide primer for the detection of SNP TSC0012735
cacacacacgca

SEQ ID NO: 286517 - DNA, 12 bp, Artificial Sequence
  Oligonucleotide primer for the detection of SNP TSC0012735
cacacacgcaca

SEQ ID NO: 286518 - DNA, 12 bp, Artificial Sequence
  Oligonucleotide primer for the detection of SNP TSC0012735
cacacgcacaca

SEQ ID NO: 286519 - DNA, 12 bp, Artificial Sequence
  Oligonucleotide primer for the detection of SNP TSC0012735
cacgcacacaca

SEQ ID NO: 286520 - DNA, 12 bp, Artificial Sequence
  Oligonucleotide primer for the detection of SNP TSC0012735
cgcacacacaca

SEQ ID NO: 286521 - DNA, 12 bp, Artificial Sequence
  Oligonucleotide primer for the detection of SNP TSC0012735
cacacacacgcg

SEQ ID NO: 286522 - DNA, 12 bp, Artificial Sequence
  Oligonucleotide primer for the detection of SNP TSC0012735
cacacacgcacg

SEQ ID NO: 286523 - DNA, 12 bp, Artificial Sequence
  Oligonucleotide primer for the detection of SNP TSC0012735
cacacgcacacg

SEQ ID NO: 286524 - DNA, 12 bp, Artificial Sequence
  Oligonucleotide primer for the detection of SNP TSC0012735
cacgcacacacg

SEQ ID NO: 286525 - DNA, 12 bp, Artificial Sequence
  Oligonucleotide primer for the detection of SNP TSC0012735
cgcacacacacg

SEQ ID NO: 286526 - DNA, 12 bp, Artificial Sequence
  Oligonucleotide primer for the detection of SNP TSC0012735
cacacacgcgca

SEQ ID NO: 286527 - DNA, 12 bp, Artificial Sequence
  Oligonucleotide primer for the detection of SNP TSC0012735
cacacgcacgca

SEQ ID NO: 286528 - DNA, 12 bp, Artificial Sequence
  Oligonucleotide primer for the detection of SNP TSC0012735
cacgcacacgca

SEQ ID NO: 286529 - DNA, 12 bp, Artificial Sequence
  Oligonukleotid-Primer
cgcacacacgca

SEQ ID NO: 286530 - DNA, 12 bp, Artificial Sequence
  Oligonucleotide primer for the detection of SNP TSC0012735
cacacgcgcaca

SEQ ID NO: 286531 - DNA, 12 bp, Artificial Sequence
  Oligonucleotide primer for the detection of SNP TSC0012735
cacgcacgcaca

SEQ ID NO: 286532 - DNA, 12 bp, Artificial Sequence
  Oligonucleotide primer for the detection of SNP TSC0012735
cgcacacgcaca

SEQ ID NO: 286533 - DNA, 12 bp, Artificial Sequence
  Oligonucleotide primer for the detection of SNP TSC0012735
cacgcgcacaca

SEQ ID NO: 286534 - DNA, 12 bp, Artificial Sequence
  Oligonucleotide primer for the detection of SNP TSC0012735
cgcacgcacaca

SEQ ID NO: 286535 - DNA, 12 bp, Artificial Sequence
  Oligonucleotide primer for the detection of SNP TSC0012735
cgcgcacacaca

SEQ ID NO: 286536 - DNA, 12 bp, Artificial Sequence
  Oligonucleotide primer for the detection of SNP TSC0012735
cacacacgcgcg

SEQ ID NO: 286537 - DNA, 12 bp, Artificial Sequence
  Oligonucleotide primer for the detection of SNP TSC0012735
cacacgcacgcg

SEQ ID NO: 286538 - DNA, 12 bp, Artificial Sequence
  Oligonucleotide primer for the detection of SNP TSC0012735
cacgcacacgcg

SEQ ID NO: 286539 - DNA, 12 bp, Artificial Sequence
  Oligonucleotide primer for the detection of SNP TSC0012735
cgcacacacgcg

SEQ ID NO: 286540 - DNA, 12 bp, Artificial Sequence
  Oligonucleotide primer for the detection of SNP TSC0012735
cacacgcgcacg

SEQ ID NO: 286541 - DNA, 12 bp, Artificial Sequence
  Oligonucleotide primer for the detection of SNP TSC0012735
cacgcacgcacg

SEQ ID NO: 286542 - DNA, 12 bp, Artificial Sequence
  Oligonucleotide primer for the detection of SNP TSC0012735
cgcacacgcacg

SEQ ID NO: 286543 - DNA, 12 bp, Artificial Sequence
  Oligonucleotide primer for the detection of SNP TSC0012735
cacgcgcacacg

SEQ ID NO: 286544 - DNA, 12 bp, Artificial Sequence
  Oligonucleotide primer for the detection of SNP TSC0012735
cgcacgcacacg

SEQ ID NO: 286545 - DNA, 12 bp, Artificial Sequence
  Oligonucleotide primer for the detection of SNP TSC0012735
cgcgcacacacg

SEQ ID NO: 286546 - DNA, 12 bp, Artificial Sequence
  Oligonucleotide primer for the detection of SNP TSC0012735
cacacgcgcgca

SEQ ID NO: 286547 - DNA, 12 bp, Artificial Sequence
  Oligonucleotide primer for the detection of SNP TSC0012735
cacgcacgcgca

SEQ ID NO: 286548 - DNA, 12 bp, Artificial Sequence
  Oligonucleotide primer for the detection of SNP TSC0012735
cgcacacgcgca

SEQ ID NO: 286549 - DNA, 12 bp, Artificial Sequence
  Oligonucleotide primer for the detection of SNP TSC0012735
cacgcgcacgca

SEQ ID NO: 286550 - DNA, 12 bp, Artificial Sequence
  Oligonucleotide primer for the detection of SNP TSC0012735
cgcacgcacgca

SEQ ID NO: 286551 - DNA, 12 bp, Artificial Sequence
  Oligonucleotide primer for the detection of SNP TSC0012735
cgcgcacacgca

SEQ ID NO: 286552 - DNA, 12 bp, Artificial Sequence
  Oligonucleotide primer for the detection of SNP TSC0012735
cacgcgcgcaca

SEQ ID NO: 286553 - DNA, 12 bp, Artificial Sequence
  Oligonucleotide primer for the detection of SNP TSC0012735
cgcacgcgcaca

SEQ ID NO: 286554 - DNA, 12 bp, Artificial Sequence
  Oligonucleotide primer for the detection of SNP TSC0012735
cgcgcacgcaca

SEQ ID NO: 286555 - DNA, 12 bp, Artificial Sequence
  Oligonucleotide primer for the detection of SNP TSC0012735
cgcgcgcacaca

SEQ ID NO: 286556 - DNA, 12 bp, Artificial Sequence
  Oligonucleotide primer for the detection of SNP TSC0012735
cacacgcgcgcg

SEQ ID NO: 286557 - DNA, 12 bp, Artificial Sequence
  Oligonucleotide primer for the detection of SNP TSC0012735
cacgcacgcgcg

SEQ ID NO: 286558 - DNA, 12 bp, Artificial Sequence
  Oligonucleotide primer for the detection of SNP TSC0012735
cgcacacgcgcg

SEQ ID NO: 286559 - DNA, 12 bp, Artificial Sequence
  Oligonucleotide primer for the detection of SNP TSC0012735
cacgcgcacgcg

SEQ ID NO: 286560 - DNA, 12 bp, Artificial Sequence
  Oligonucleotide primer for the detection of SNP TSC0012735
cgcacgcacgcg

SEQ ID NO: 286561 - DNA, 12 bp, Artificial Sequence
  Oligonucleotide primer for the detection of SNP TSC0012735
cgcgcacacgcg

SEQ ID NO: 286562 - DNA, 12 bp, Artificial Sequence
  Oligonukleotid-Primer
cacgcgcgcacg

SEQ ID NO: 286563 - DNA, 12 bp, Artificial Sequence
  Oligonucleotide primer for the detection of SNP TSC0012735
cgcacgcgcacg

SEQ ID NO: 286564 - DNA, 12 bp, Artificial Sequence
  Oligonucleotide primer for the detection of SNP TSC0012735
cgcgcacgcacg

SEQ ID NO: 286565 - DNA, 12 bp, Artificial Sequence
  Oligonucleotide primer for the detection of SNP TSC0012735
cgcgcgcacacg

SEQ ID NO: 286566 - DNA, 12 bp, Artificial Sequence
  Oligonucleotide primer for the detection of SNP TSC0012735
cacgcgcgcgca

SEQ ID NO: 286567 - DNA, 12 bp, Artificial Sequence
  Oligonucleotide primer for the detection of SNP TSC0012735
cgcacgcgcgca

SEQ ID NO: 286568 - DNA, 12 bp, Artificial Sequence
  Oligonucleotide primer for the detection of SNP TSC0012735
cgcgcacgcgca

SEQ ID NO: 286569 - DNA, 12 bp, Artificial Sequence
  Oligonucleotide primer for the detection of SNP TSC0012735
cgcgcgcacgca

SEQ ID NO: 286570 - DNA, 12 bp, Artificial Sequence
  Oligonucleotide primer for the detection of SNP TSC0012735
cgcgcgcgcaca

SEQ ID NO: 286571 - DNA, 12 bp, Artificial Sequence
  Oligonucleotide primer for the detection of SNP TSC0012735
cacgcgcgcgcg

SEQ ID NO: 286572 - DNA, 12 bp, Artificial Sequence
  Oligonucleotide primer for the detection of SNP TSC0012735
cgcacgcgcgcg

SEQ ID NO: 286573 - DNA, 12 bp, Artificial Sequence
  Oligonucleotide primer for the detection of SNP TSC0012735
cgcgcacgcgcg

SEQ ID NO: 286574 - DNA, 12 bp, Artificial Sequence
  Oligonucleotide primer for the detection of SNP TSC0012735
cgcgcgcacgcg

SEQ ID NO: 286575 - DNA, 12 bp, Artificial Sequence
  Oligonucleotide primer for the detection of SNP TSC0012735
cgcgcgcgcacg

SEQ ID NO: 286576 - DNA, 12 bp, Artificial Sequence
  Oligonucleotide primer for the detection of SNP TSC0012735
cgcgcgcgcgca

SEQ ID NO: 286577 - DNA, 12 bp, Artificial Sequence
  Oligonucleotide primer for the detection of SNP TSC0012736
acatcctacact

SEQ ID NO: 286578 - DNA, 12 bp, Artificial Sequence
  Oligonucleotide primer for the detection of SNP TSC0012736
gtggggtattta

SEQ ID NO: 286579 - DNA, 12 bp, Artificial Sequence
  Oligonucleotide primer for the detection of SNP TSC0012736
ataaaacattca

SEQ ID NO: 286580 - DNA, 12 bp, Artificial Sequence
  Oligonucleotide primer for the detection of SNP TSC0012736
gtattttgtatt

SEQ ID NO: 286581 - DNA, 12 bp, Artificial Sequence
  Oligonucleotide primer for the detection of SNP TSC0012737
accaaattaatc

SEQ ID NO: 286582 - DNA, 12 bp, Artificial Sequence
  Oligonucleotide primer for the detection of SNP TSC0012737
caaaaccaaaaa

SEQ ID NO: 286583 - DNA, 12 bp, Artificial Sequence
  Oligonucleotide primer for the detection of SNP TSC0012738
acctcataaccc

SEQ ID NO: 286584 - DNA, 12 bp, Artificial Sequence
  Oligonucleotide primer for the detection of SNP TSC0012738
gtttttgattaa

SEQ ID NO: 286585 - DNA, 12 bp, Artificial Sequence
  Oligonucleotide primer for the detection of SNP TSC0012738
atttctaattaa

SEQ ID NO: 286586 - DNA, 12 bp, Artificial Sequence
  Oligonucleotide primer for the detection of SNP TSC0012738
gttttatgattt

SEQ ID NO: 286587 - DNA, 12 bp, Artificial Sequence
  Oligonucleotide primer for the detection of SNP TSC0012738
gttttatgattc

SEQ ID NO: 286588 - DNA, 12 bp, Artificial Sequence
  Oligonucleotide primer for the detection of SNP TSC0012739
acaacaacctca

SEQ ID NO: 286589 - DNA, 12 bp, Artificial Sequence
  Oligonucleotide primer for the detection of SNP TSC0012739
aatttgtgggtt

SEQ ID NO: 286590 - DNA, 12 bp, Artificial Sequence
  Oligonucleotide primer for the detection of SNP TSC0012739
aattcgtgggtt

SEQ ID NO: 286591 - DNA, 12 bp, Artificial Sequence
  Oligonucleotide primer for the detection of SNP TSC0012739
aatttgcgggtt

SEQ ID NO: 286592 - DNA, 12 bp, Artificial Sequence
  Oligonucleotide primer for the detection of SNP TSC0012739
aattcgcgggtt

SEQ ID NO: 286593 - DNA, 12 bp, Artificial Sequence
  Oligonucleotide primer for the detection of SNP TSC0012739
taactcacaaat

SEQ ID NO: 286594 - DNA, 12 bp, Artificial Sequence
  Oligonucleotide primer for the detection of SNP TSC0012739
taactcacgaat

SEQ ID NO: 286595 - DNA, 12 bp, Artificial Sequence
  Oligonucleotide primer for the detection of SNP TSC0012739
taactcgcaaat

SEQ ID NO: 286596 - DNA, 12 bp, Artificial Sequence
  Oligonucleotide primer for the detection of SNP TSC0012739
taactcgcgaat

SEQ ID NO: 286597 - DNA, 12 bp, Artificial Sequence
  Oligonucleotide primer for the detection of SNP TSC0012739
atagtagtttta

SEQ ID NO: 286598 - DNA, 12 bp, Artificial Sequence
  Oligonucleotide primer for the detection of SNP TSC0012740
ccaaactccaca

SEQ ID NO: 286599 - DNA, 12 bp, Artificial Sequence
  Oligonucleotide primer for the detection of SNP TSC0012740
ccaaactccacg

SEQ ID NO: 286600 - DNA, 12 bp, Artificial Sequence
  Oligonucleotide primer for the detection of SNP TSC0012740
ccaaactccgca

SEQ ID NO: 286601 - DNA, 12 bp, Artificial Sequence
  Oligonucleotide primer for the detection of SNP TSC0012740
ccaaactccgcg

SEQ ID NO: 286602 - DNA, 12 bp, Artificial Sequence
  Oligonucleotide primer for the detection of SNP TSC0012740
aatggatgtata

SEQ ID NO: 286603 - DNA, 12 bp, Artificial Sequence
  Oligonucleotide primer for the detection of SNP TSC0012740
aacggatgtata

SEQ ID NO: 286604 - DNA, 12 bp, Artificial Sequence
  Oligonucleotide primer for the detection of SNP TSC0012740
aatggacgtata

SEQ ID NO: 286605 - DNA, 12 bp, Artificial Sequence
  Oligonucleotide primer for the detection of SNP TSC0012740
aacggacgtata

SEQ ID NO: 286606 - DNA, 12 bp, Artificial Sequence
  Oligonucleotide primer for the detection of SNP TSC0012740
aacaaacgcaca

SEQ ID NO: 286607 - DNA, 12 bp, Artificial Sequence
  Oligonucleotide primer for the detection of SNP TSC0012740
aacgaacacaca

SEQ ID NO: 286608 - DNA, 12 bp, Artificial Sequence
  Oligonucleotide primer for the detection of SNP TSC0012740
aacgaacgcaca

SEQ ID NO: 286609 - DNA, 12 bp, Artificial Sequence
  Oligonucleotide primer for the detection of SNP TSC0012740
ttaggttttgtg

SEQ ID NO: 286610 - DNA, 12 bp, Artificial Sequence
  Oligonucleotide primer for the detection of SNP TSC0012740
ttaggtttcgtg

SEQ ID NO: 286611 - DNA, 12 bp, Artificial Sequence
  Oligonucleotide primer for the detection of SNP TSC0012740
ttaggttttgcg

SEQ ID NO: 286612 - DNA, 12 bp, Artificial Sequence
  Oligonucleotide primer for the detection of SNP TSC0012740
ttaggtttcgcg

SEQ ID NO: 286613 - DNA, 12 bp, Artificial Sequence
  Oligonucleotide primer for the detection of SNP TSC0012741
aaaaaaacaata

SEQ ID NO: 286614 - DNA, 12 bp, Artificial Sequence
  Oligonucleotide primer for the detection of SNP TSC0012741
ttttttaaaagt

SEQ ID NO: 286615 - DNA, 12 bp, Artificial Sequence
  Oligonucleotide primer for the detection of SNP TSC0012741
ttctccaaaaat

SEQ ID NO: 286616 - DNA, 12 bp, Artificial Sequence
  Oligonucleotide primer for the detection of SNP TSC0012741
aaagaggtagta

SEQ ID NO: 286617 - DNA, 12 bp, Artificial Sequence
  Oligonucleotide primer for the detection of SNP TSC0012742
tgagtgttatta

SEQ ID NO: 286618 - DNA, 12 bp, Artificial Sequence
  Oligonucleotide primer for the detection of SNP TSC0012742
cgagtgttatta

SEQ ID NO: 286619 - DNA, 12 bp, Artificial Sequence
  Oligonucleotide primer for the detection of SNP TSC0012742
caaataccacca

SEQ ID NO: 286620 - DNA, 12 bp, Artificial Sequence
  Oligonucleotide primer for the detection of SNP TSC0012742
cgaataccacca

SEQ ID NO: 286621 - DNA, 12 bp, Artificial Sequence
  Oligonucleotide primer for the detection of SNP TSC0012744
tattttttaaat

SEQ ID NO: 286622 - DNA, 12 bp, Artificial Sequence
  Oligonucleotide primer for the detection of SNP TSC0012744
ttttatttttat

SEQ ID NO: 286623 - DNA, 12 bp, Artificial Sequence
  Oligonucleotide primer for the detection of SNP TSC0012744
ccccatctctat

SEQ ID NO: 286624 - DNA, 12 bp, Artificial Sequence
  Oligonucleotide primer for the detection of SNP TSC0012744
tttaaatttttt

SEQ ID NO: 286625 - DNA, 12 bp, Artificial Sequence
  Oligonucleotide primer for the detection of SNP TSC0012745
tttacaaaaaac

SEQ ID NO: 286626 - DNA, 12 bp, Artificial Sequence
  Oligonucleotide primer for the detection of SNP TSC0012745
tttgtaaagagt

SEQ ID NO: 286627 - DNA, 12 bp, Artificial Sequence
  Oligonucleotide primer for the detection of SNP TSC0012745
tttgtaaagagc

SEQ ID NO: 286628 - DNA, 12 bp, Artificial Sequence
  Oligonucleotide primer for the detection of SNP TSC0012747
tcactataaaac

SEQ ID NO: 286629 - DNA, 12 bp, Artificial Sequence
  Oligonucleotide primer for the detection of SNP TSC0012747
tgttttggaata

SEQ ID NO: 286630 - DNA, 12 bp, Artificial Sequence
  Oligonucleotide primer for the detection of SNP TSC0012749
tttatcttatct

SEQ ID NO: 286631 - DNA, 12 bp, Artificial Sequence
  Oligonucleotide primer for the detection of SNP TSC0012749
agtaaaaataga

SEQ ID NO: 286632 - DNA, 12 bp, Artificial Sequence
  Oligonucleotide primer for the detection of SNP TSC0012750
taaacaaaaaat

SEQ ID NO: 286633 - DNA, 12 bp, Artificial Sequence
  Oligonucleotide primer for the detection of SNP TSC0012750
gtttaataaggg

SEQ ID NO: 286634 - DNA, 12 bp, Artificial Sequence
  Oligonucleotide primer for the detection of SNP TSC0012751
gtggtgcgattt

SEQ ID NO: 286635 - DNA, 12 bp, Artificial Sequence
  Oligonucleotide primer for the detection of SNP TSC0012751
gtggcgcgattt

SEQ ID NO: 286636 - DNA, 12 bp, Artificial Sequence
  Oligonucleotide primer for the detection of SNP TSC0012751
ataacgcgatct

SEQ ID NO: 286637 - DNA, 12 bp, Artificial Sequence
  Oligonucleotide primer for the detection of SNP TSC0012753
taactttacttc

SEQ ID NO: 286638 - DNA, 12 bp, Artificial Sequence
  Oligonucleotide primer for the detection of SNP TSC0012753
gttagggttata

SEQ ID NO: 286639 - DNA, 12 bp, Artificial Sequence
  Oligonucleotide primer for the detection of SNP TSC0012754
aactatcatcac

SEQ ID NO: 286640 - DNA, 12 bp, Artificial Sequence
  Oligonucleotide primer for the detection of SNP TSC0012754
ttatgtgtaatt

SEQ ID NO: 286641 - DNA, 12 bp, Artificial Sequence
  Oligonucleotide primer for the detection of SNP TSC0012754
ttatgtgtaatc

SEQ ID NO: 286642 - DNA, 12 bp, Artificial Sequence
  Oligonucleotide primer for the detection of SNP TSC0012754
aattatatacaa

SEQ ID NO: 286643 - DNA, 12 bp, Artificial Sequence
  Oligonucleotide primer for the detection of SNP TSC0012754
ggttgttattat

SEQ ID NO: 286644 - DNA, 12 bp, Artificial Sequence
  Oligonucleotide primer for the detection of SNP TSC0012755
aaaaaatcacta

SEQ ID NO: 286645 - DNA, 12 bp, Artificial Sequence
  Oligonucleotide primer for the detection of SNP TSC0012755
tattgatagatt

SEQ ID NO: 286646 - DNA, 12 bp, Artificial Sequence
  Oligonucleotide primer for the detection of SNP TSC0012755
tatcgatagatt

SEQ ID NO: 286647 - DNA, 12 bp, Artificial Sequence
  Oligonucleotide primer for the detection of SNP TSC0012755
atcatcaataaa

SEQ ID NO: 286648 - DNA, 12 bp, Artificial Sequence
  Oligonucleotide primer for the detection of SNP TSC0012755
atcatcgataaa

SEQ ID NO: 286649 - DNA, 12 bp, Artificial Sequence
  Oligonucleotide primer for the detection of SNP TSC0012755
ggggattattgt

SEQ ID NO: 286650 - DNA, 12 bp, Artificial Sequence
  Oligonucleotide primer for the detection of SNP TSC0012755
ggggattattgc

SEQ ID NO: 286651 - DNA, 12 bp, Artificial Sequence
  Oligonucleotide primer for the detection of SNP TSC0012756
aatccaaactcc

SEQ ID NO: 286652 - DNA, 12 bp, Artificial Sequence
  Oligonucleotide primer for the detection of SNP TSC0012756
taagattttttg

SEQ ID NO: 286653 - DNA, 12 bp, Artificial Sequence
  Oligonucleotide primer for the detection of SNP TSC0012756
aaaatttcttaa

SEQ ID NO: 286654 - DNA, 12 bp, Artificial Sequence
  Oligonucleotide primer for the detection of SNP TSC0012756
agtttagatttt

SEQ ID NO: 286655 - DNA, 12 bp, Artificial Sequence
  Oligonucleotide primer for the detection of SNP TSC0012757
atcccttcccta

SEQ ID NO: 286656 - DNA, 12 bp, Artificial Sequence
  Oligonucleotide primer for the detection of SNP TSC0012757
aggggagtttat

SEQ ID NO: 286657 - DNA, 12 bp, Artificial Sequence
  Oligonucleotide primer for the detection of SNP TSC0012757
aaaaaaacttat

SEQ ID NO: 286658 - DNA, 12 bp, Artificial Sequence
  Oligonucleotide primer for the detection of SNP TSC0012758
aaaaatgttttt

SEQ ID NO: 286659 - DNA, 12 bp, Artificial Sequence
  Oligonucleotide primer for the detection of SNP TSC0012758
gatatttggtaa

SEQ ID NO: 286660 - DNA, 12 bp, Artificial Sequence
  Oligonucleotide primer for the detection of SNP TSC0012760
tcccacataaaa

SEQ ID NO: 286661 - DNA, 12 bp, Artificial Sequence
  Oligonucleotide primer for the detection of SNP TSC0012760
ttttttataatt

SEQ ID NO: 286662 - DNA, 12 bp, Artificial Sequence
  Oligonucleotide primer for the detection of SNP TSC0012760
tttctcataatt

SEQ ID NO: 286663 - DNA, 12 bp, Artificial Sequence
  Oligonucleotide primer for the detection of SNP TSC0012760
tttttatatgaa

SEQ ID NO: 286664 - DNA, 12 bp, Artificial Sequence
  Oligonucleotide primer for the detection of SNP TSC0012763
aaaaaatacaat

SEQ ID NO: 286665 - DNA, 12 bp, Artificial Sequence
  Oligonucleotide primer for the detection of SNP TSC0012763
tatttaggatta

SEQ ID NO: 286666 - DNA, 12 bp, Artificial Sequence
  Oligonucleotide primer for the detection of SNP TSC0012765
aaatggatatat

SEQ ID NO: 286667 - DNA, 12 bp, Artificial Sequence
  Oligonucleotide primer for the detection of SNP TSC0012765
aaaataaacaca

SEQ ID NO: 286668 - DNA, 12 bp, Artificial Sequence
  Oligonucleotide primer for the detection of SNP TSC0012765
aataaaataagt

SEQ ID NO: 286669 - DNA, 12 bp, Artificial Sequence
  Oligonucleotide primer for the detection of SNP TSC0012766
aaatcaaccaaa

SEQ ID NO: 286670 - DNA, 12 bp, Artificial Sequence
  Oligonucleotide primer for the detection of SNP TSC0012766
aaacttcatttc

SEQ ID NO: 286671 - DNA, 12 bp, Artificial Sequence
  Oligonucleotide primer for the detection of SNP TSC0012766
agattagttaga

SEQ ID NO: 286672 - DNA, 12 bp, Artificial Sequence
  Oligonucleotide primer for the detection of SNP TSC0012768
atgttaaataaa

SEQ ID NO: 286673 - DNA, 12 bp, Artificial Sequence
  Oligonucleotide primer for the detection of SNP TSC0012769
tcacattttttc

SEQ ID NO: 286674 - DNA, 12 bp, Artificial Sequence
  Oligonucleotide primer for the detection of SNP TSC0012769
tatgtattaaaa

SEQ ID NO: 286675 - DNA, 12 bp, Artificial Sequence
  Oligonucleotide primer for the detection of SNP TSC0012776
aaaatttattaa

SEQ ID NO: 286676 - DNA, 12 bp, Artificial Sequence
  Oligonucleotide primer for the detection of SNP TSC0012776
tatgtatgatgt

SEQ ID NO: 286677 - DNA, 12 bp, Artificial Sequence
  Oligonucleotide primer for the detection of SNP TSC0012776
tatacataatac

SEQ ID NO: 286678 - DNA, 12 bp, Artificial Sequence
  Oligonucleotide primer for the detection of SNP TSC0012776
agatttattaat

SEQ ID NO: 286679 - DNA, 12 bp, Artificial Sequence
  Oligonucleotide primer for the detection of SNP TSC0012776
agatttattaac

SEQ ID NO: 286680 - DNA, 12 bp, Artificial Sequence
  Oligonucleotide primer for the detection of SNP TSC0012777
atattcacatat

SEQ ID NO: 286681 - DNA, 12 bp, Artificial Sequence
  Oligonucleotide primer for the detection of SNP TSC0012777
tgtgtttttgta

SEQ ID NO: 286682 - DNA, 12 bp, Artificial Sequence
  Oligonucleotide primer for the detection of SNP TSC0012777
tgtgttttcgta

SEQ ID NO: 286683 - DNA, 12 bp, Artificial Sequence
  Oligonucleotide primer for the detection of SNP TSC0012778
aaacttacttca

SEQ ID NO: 286684 - DNA, 12 bp, Artificial Sequence
  Oligonukleotid-Primer
aaaacctttaca

SEQ ID NO: 286685 - DNA, 12 bp, Artificial Sequence
  Oligonucleotide primer for the detection of SNP TSC0012778
gaagtttatttt

SEQ ID NO: 286686 - DNA, 12 bp, Artificial Sequence
  Oligonucleotide primer for the detection of SNP TSC0012779
ataatattaaaa

SEQ ID NO: 286687 - DNA, 12 bp, Artificial Sequence
  Oligonucleotide primer for the detection of SNP TSC0012779
ttattattggtt

SEQ ID NO: 286688 - DNA, 12 bp, Artificial Sequence
  Oligonucleotide primer for the detection of SNP TSC0012779
tctattactaac

SEQ ID NO: 286689 - DNA, 12 bp, Artificial Sequence
  Oligonucleotide primer for the detection of SNP TSC0012779
tatggtgttagg

SEQ ID NO: 286690 - DNA, 12 bp, Artificial Sequence
  Oligonucleotide primer for the detection of SNP TSC0012780
actacttaaaat

SEQ ID NO: 286691 - DNA, 12 bp, Artificial Sequence
  Oligonucleotide primer for the detection of SNP TSC0012780
tttcgttttggg

SEQ ID NO: 286692 - DNA, 12 bp, Artificial Sequence
  Oligonucleotide primer for the detection of SNP TSC0012782
aataaaatcaac

SEQ ID NO: 286693 - DNA, 12 bp, Artificial Sequence
  Oligonucleotide primer for the detection of SNP TSC0012782
atattggaaaaa

SEQ ID NO: 286694 - DNA, 12 bp, Artificial Sequence
  Oligonucleotide primer for the detection of SNP TSC0012783
ataaataaatat

SEQ ID NO: 286695 - DNA, 12 bp, Artificial Sequence
  Oligonucleotide primer for the detection of SNP TSC0012784
aaataaatatac

SEQ ID NO: 286696 - DNA, 12 bp, Artificial Sequence
  Oligonukleotid-Primer
ttcctccctccc

SEQ ID NO: 286697 - DNA, 12 bp, Artificial Sequence
  Oligonucleotide primer for the detection of SNP TSC0012785
aaaaggagagag

SEQ ID NO: 286698 - DNA, 12 bp, Artificial Sequence
  Oligonucleotide primer for the detection of SNP TSC0012786
caactttttttt

SEQ ID NO: 286699 - DNA, 12 bp, Artificial Sequence
  Oligonucleotide primer for the detection of SNP TSC0012786
gattttaaaagt

SEQ ID NO: 286700 - DNA, 12 bp, Artificial Sequence
  Oligonukleotid-Primer
taaaactctctc

SEQ ID NO: 286701 - DNA, 12 bp, Artificial Sequence
  Oligonucleotide primer for the detection of SNP TSC0012787
taaaagaaagag

SEQ ID NO: 286702 - DNA, 12 bp, Artificial Sequence
  Oligonucleotide primer for the detection of SNP TSC0012788
tttaattcttct

SEQ ID NO: 286703 - DNA, 12 bp, Artificial Sequence
  Oligonucleotide primer for the detection of SNP TSC0012788
aagaaaaattta

SEQ ID NO: 286704 - DNA, 12 bp, Artificial Sequence
  Oligonukleotid-Primer
ctaaataaaacc

SEQ ID NO: 286705 - DNA, 12 bp, Artificial Sequence
  Oligonucleotide primer for the detection of SNP TSC0012789
atgaataagttg

SEQ ID NO: 286706 - DNA, 12 bp, Artificial Sequence
  Oligonucleotide primer for the detection of SNP TSC0012789
atgaataagtcg

SEQ ID NO: 286707 - DNA, 12 bp, Artificial Sequence
  Oligonucleotide primer for the detection of SNP TSC0012789
ataaataaacca

SEQ ID NO: 286708 - DNA, 12 bp, Artificial Sequence
  Oligonucleotide primer for the detection of SNP TSC0012789
ataaataaaccg

SEQ ID NO: 286709 - DNA, 12 bp, Artificial Sequence
  Oligonucleotide primer for the detection of SNP TSC0012789
ttgggtggggtt

SEQ ID NO: 286710 - DNA, 12 bp, Artificial Sequence
  Oligonucleotide primer for the detection of SNP TSC0012789
ttgggtggggtc

SEQ ID NO: 286711 - DNA, 12 bp, Artificial Sequence
  Oligonucleotide primer for the detection of SNP TSC0012790
gtgggggataga

SEQ ID NO: 286712 - DNA, 12 bp, Artificial Sequence
  Oligonucleotide primer for the detection of SNP TSC0012790
gcgggggataga

SEQ ID NO: 286713 - DNA, 12 bp, Artificial Sequence
  Oligonucleotide primer for the detection of SNP TSC0012791
ttataattccct

SEQ ID NO: 286714 - DNA, 12 bp, Artificial Sequence
  Oligonucleotide primer for the detection of SNP TSC0012791
ttgttattgggg

SEQ ID NO: 286715 - DNA, 12 bp, Artificial Sequence
  Oligonucleotide primer for the detection of SNP TSC0012792
aactaaatatac

SEQ ID NO: 286716 - DNA, 12 bp, Artificial Sequence
  Oligonucleotide primer for the detection of SNP TSC0012792
tactactattta

SEQ ID NO: 286717 - DNA, 12 bp, Artificial Sequence
  Oligonucleotide primer for the detection of SNP TSC0012792
agttaaatatgt

SEQ ID NO: 286718 - DNA, 12 bp, Artificial Sequence
  Oligonucleotide primer for the detection of SNP TSC0012793
tttaaactaaat

SEQ ID NO: 286719 - DNA, 12 bp, Artificial Sequence
  Oligonucleotide primer for the detection of SNP TSC0012793
tttatttatttg

SEQ ID NO: 286720 - DNA, 12 bp, Artificial Sequence
  Oligonucleotide primer for the detection of SNP TSC0012793
tttatccattta

SEQ ID NO: 286721 - DNA, 12 bp, Artificial Sequence
  Oligonucleotide primer for the detection of SNP TSC0012793
tttaagttaaat

SEQ ID NO: 286722 - DNA, 12 bp, Artificial Sequence
  Oligonucleotide primer for the detection of SNP TSC0012794
tttaaattattt

SEQ ID NO: 286723 - DNA, 12 bp, Artificial Sequence
  Oligonucleotide primer for the detection of SNP TSC0012794
tgaatatgatta

SEQ ID NO: 286724 - DNA, 12 bp, Artificial Sequence
  Oligonucleotide primer for the detection of SNP TSC0012795
cctcacacaacc

SEQ ID NO: 286725 - DNA, 12 bp, Artificial Sequence
  Oligonucleotide primer for the detection of SNP TSC0012795
cctcacgcaacc

SEQ ID NO: 286726 - DNA, 12 bp, Artificial Sequence
  Oligonucleotide primer for the detection of SNP TSC0012795
ttaatatatata

SEQ ID NO: 286727 - DNA, 12 bp, Artificial Sequence
  Oligonucleotide primer for the detection of SNP TSC0012795
ctaacacacaca

SEQ ID NO: 286728 - DNA, 12 bp, Artificial Sequence
  Oligonucleotide primer for the detection of SNP TSC0012795
ttttatgtagtt

SEQ ID NO: 286729 - DNA, 12 bp, Artificial Sequence
  Oligonucleotide primer for the detection of SNP TSC0012795
ttttacgtagtt

SEQ ID NO: 286730 - DNA, 12 bp, Artificial Sequence
  Oligonucleotide primer for the detection of SNP TSC0012796
ctaccctattct

SEQ ID NO: 286731 - DNA, 12 bp, Artificial Sequence
  Oligonucleotide primer for the detection of SNP TSC0012796
agggtgttatgg

SEQ ID NO: 286732 - DNA, 12 bp, Artificial Sequence
  Oligonucleotide primer for the detection of SNP TSC0012797
aaaaaaatctac

SEQ ID NO: 286733 - DNA, 12 bp, Artificial Sequence
  Oligonucleotide primer for the detection of SNP TSC0012797
gatttaagggtt

SEQ ID NO: 286734 - DNA, 12 bp, Artificial Sequence
  Oligonucleotide primer for the detection of SNP TSC0012797
aactcaaaaatt

SEQ ID NO: 286735 - DNA, 12 bp, Artificial Sequence
  Oligonucleotide primer for the detection of SNP TSC0012797
aaggaaatttat

SEQ ID NO: 286736 - DNA, 12 bp, Artificial Sequence
  Oligonucleotide primer for the detection of SNP TSC0012798
aaaatacctttt

SEQ ID NO: 286737 - DNA, 12 bp, Artificial Sequence
  Oligonucleotide primer for the detection of SNP TSC0012798
gttgttttaata

SEQ ID NO: 286738 - DNA, 12 bp, Artificial Sequence
  Oligonucleotide primer for the detection of SNP TSC0012798
attactccaata

SEQ ID NO: 286739 - DNA, 12 bp, Artificial Sequence
  Oligonucleotide primer for the detection of SNP TSC0012798
gaagtgtttttt

SEQ ID NO: 286740 - DNA, 12 bp, Artificial Sequence
  Oligonucleotide primer for the detection of SNP TSC0012799
tcactaaataaa

SEQ ID NO: 286741 - DNA, 12 bp, Artificial Sequence
  Oligonucleotide primer for the detection of SNP TSC0012799
gagttgaataat

SEQ ID NO: 286742 - DNA, 12 bp, Artificial Sequence
  Oligonucleotide primer for the detection of SNP TSC0012799
aaaattaaataa

SEQ ID NO: 286743 - DNA, 12 bp, Artificial Sequence
  Oligonucleotide primer for the detection of SNP TSC0012799
ttattggataga

SEQ ID NO: 286744 - DNA, 12 bp, Artificial Sequence
  Oligonucleotide primer for the detection of SNP TSC0012804
tcaaaaacacta

SEQ ID NO: 286745 - DNA, 12 bp, Artificial Sequence
  Oligonucleotide primer for the detection of SNP TSC0012804
ggttggtaggag

SEQ ID NO: 286746 - DNA, 12 bp, Artificial Sequence
  Oligonucleotide primer for the detection of SNP TSC0012807
acaaataaaaaa

SEQ ID NO: 286747 - DNA, 12 bp, Artificial Sequence
  Oligonucleotide primer for the detection of SNP TSC0012807
gtatttaatttt

SEQ ID NO: 286748 - DNA, 12 bp, Artificial Sequence
  Oligonucleotide primer for the detection of SNP TSC0012807
atatccaatttt

SEQ ID NO: 286749 - DNA, 12 bp, Artificial Sequence
  Oligonucleotide primer for the detection of SNP TSC0012807
agtaaatggaga

SEQ ID NO: 286750 - DNA, 12 bp, Artificial Sequence
  Oligonucleotide primer for the detection of SNP TSC0012808
actacttatccc

SEQ ID NO: 286751 - DNA, 12 bp, Artificial Sequence
  Oligonucleotide primer for the detection of SNP TSC0012809
aaatatataact

SEQ ID NO: 286752 - DNA, 12 bp, Artificial Sequence
  Oligonucleotide primer for the detection of SNP TSC0012809
aattatttatta

SEQ ID NO: 286753 - DNA, 12 bp, Artificial Sequence
  Oligonucleotide primer for the detection of SNP TSC0012811
ctataaaaaaca

SEQ ID NO: 286754 - DNA, 12 bp, Artificial Sequence
  Oligonucleotide primer for the detection of SNP TSC0012811
gatgaggttttt

SEQ ID NO: 286755 - DNA, 12 bp, Artificial Sequence
  Oligonucleotide primer for the detection of SNP TSC0012811
ataaaatcctta

SEQ ID NO: 286756 - DNA, 12 bp, Artificial Sequence
  Oligonucleotide primer for the detection of SNP TSC0012811
tttgtaagaaat

SEQ ID NO: 286757 - DNA, 12 bp, Artificial Sequence
  Oligonucleotide primer for the detection of SNP TSC0012812
acattcacctac

SEQ ID NO: 286758 - DNA, 12 bp, Artificial Sequence
  Oligonucleotide primer for the detection of SNP TSC0012812
agttgtttgtta

SEQ ID NO: 286759 - DNA, 12 bp, Artificial Sequence
  Oligonucleotide primer for the detection of SNP TSC0012812
agtcgtttgtta

SEQ ID NO: 286760 - DNA, 12 bp, Artificial Sequence
  Oligonucleotide primer for the detection of SNP TSC0012812
aaccacctatca

SEQ ID NO: 286761 - DNA, 12 bp, Artificial Sequence
  Oligonucleotide primer for the detection of SNP TSC0012812
aaccgcctatca

SEQ ID NO: 286762 - DNA, 12 bp, Artificial Sequence
  Oligonucleotide primer for the detection of SNP TSC0012812
gtatttatttgt

SEQ ID NO: 286763 - DNA, 12 bp, Artificial Sequence
  Oligonucleotide primer for the detection of SNP TSC0012813
aaaatcttaaaa

SEQ ID NO: 286764 - DNA, 12 bp, Artificial Sequence
  Oligonucleotide primer for the detection of SNP TSC0012813
atactaattcca

SEQ ID NO: 286765 - DNA, 12 bp, Artificial Sequence
  Oligonucleotide primer for the detection of SNP TSC0012813
gtactaattcca

SEQ ID NO: 286766 - DNA, 12 bp, Artificial Sequence
  Oligonucleotide primer for the detection of SNP TSC0012813
aaggttttggag

SEQ ID NO: 286767 - DNA, 12 bp, Artificial Sequence
  Oligonucleotide primer for the detection of SNP TSC0012814
ctcaaaatcacc

SEQ ID NO: 286768 - DNA, 12 bp, Artificial Sequence
  Oligonucleotide primer for the detection of SNP TSC0012814
ctcaaaatcgcc

SEQ ID NO: 286769 - DNA, 12 bp, Artificial Sequence
  Oligonucleotide primer for the detection of SNP TSC0012814
tttttaagggag

SEQ ID NO: 286770 - DNA, 12 bp, Artificial Sequence
  Oligonucleotide primer for the detection of SNP TSC0012815
aacataatccac

SEQ ID NO: 286771 - DNA, 12 bp, Artificial Sequence
  Oligonucleotide primer for the detection of SNP TSC0012815
aaaagttgggta

SEQ ID NO: 286772 - DNA, 12 bp, Artificial Sequence
  Oligonucleotide primer for the detection of SNP TSC0012815
ggtataatttat

SEQ ID NO: 286773 - DNA, 12 bp, Artificial Sequence
  Oligonucleotide primer for the detection of SNP TSC0012816
cacttaataaat

SEQ ID NO: 286774 - DNA, 12 bp, Artificial Sequence
  Oligonucleotide primer for the detection of SNP TSC0012816
cgcttaataaat

SEQ ID NO: 286775 - DNA, 12 bp, Artificial Sequence
  Oligonucleotide primer for the detection of SNP TSC0012816
tggtttgtatta

SEQ ID NO: 286776 - DNA, 12 bp, Artificial Sequence
  Oligonucleotide primer for the detection of SNP TSC0012816
taatttatatta

SEQ ID NO: 286777 - DNA, 12 bp, Artificial Sequence
  Oligonukleotid-Primer
tgtttggtgagt

SEQ ID NO: 286778 - DNA, 12 bp, Artificial Sequence
  Oligonucleotide primer for the detection of SNP TSC0012816
cgtttggtgagt

SEQ ID NO: 286779 - DNA, 12 bp, Artificial Sequence
  Oligonucleotide primer for the detection of SNP TSC0012817
tccattttatat

SEQ ID NO: 286780 - DNA, 12 bp, Artificial Sequence
  Oligonucleotide primer for the detection of SNP TSC0012817
tttaaaatgaat

SEQ ID NO: 286781 - DNA, 12 bp, Artificial Sequence
  Oligonucleotide primer for the detection of SNP TSC0012817
tttaaaataaac

SEQ ID NO: 286782 - DNA, 12 bp, Artificial Sequence
  Oligonucleotide primer for the detection of SNP TSC0012817
tttattttatgt

SEQ ID NO: 286783 - DNA, 12 bp, Artificial Sequence
  Oligonucleotide primer for the detection of SNP TSC0012820
caaaaaacccta

SEQ ID NO: 286784 - DNA, 12 bp, Artificial Sequence
  Oligonucleotide primer for the detection of SNP TSC0012820
ttgtggaaggtt

SEQ ID NO: 286785 - DNA, 12 bp, Artificial Sequence
  Oligonucleotide primer for the detection of SNP TSC0012820
ttgcggaaggtt

SEQ ID NO: 286786 - DNA, 12 bp, Artificial Sequence
  Oligonucleotide primer for the detection of SNP TSC0012820
ttgtggaaggtc

SEQ ID NO: 286787 - DNA, 12 bp, Artificial Sequence
  Oligonucleotide primer for the detection of SNP TSC0012820
ttgcggaaggtc

SEQ ID NO: 286788 - DNA, 12 bp, Artificial Sequence
  Oligonucleotide primer for the detection of SNP TSC0012820
ctacaaaaaacc

SEQ ID NO: 286789 - DNA, 12 bp, Artificial Sequence
  Oligonucleotide primer for the detection of SNP TSC0012820
ctacgaaaaacc

SEQ ID NO: 286790 - DNA, 12 bp, Artificial Sequence
  Oligonucleotide primer for the detection of SNP TSC0012820
tagaggattttg

SEQ ID NO: 286791 - DNA, 12 bp, Artificial Sequence
  Oligonucleotide primer for the detection of SNP TSC0012821
aaaaaaaaatct

SEQ ID NO: 286792 - DNA, 12 bp, Artificial Sequence
  Oligonucleotide primer for the detection of SNP TSC0012821
aaagaatgaaaa

SEQ ID NO: 286793 - DNA, 12 bp, Artificial Sequence
  Oligonucleotide primer for the detection of SNP TSC0012824
acaaatccaaaa

SEQ ID NO: 286794 - DNA, 12 bp, Artificial Sequence
  Oligonucleotide primer for the detection of SNP TSC0012824
gtagatttaaaa

SEQ ID NO: 286795 - DNA, 12 bp, Artificial Sequence
  Oligonucleotide primer for the detection of SNP TSC0012825
atcctcctaaac

SEQ ID NO: 286796 - DNA, 12 bp, Artificial Sequence
  Oligonucleotide primer for the detection of SNP TSC0012825
tatttaagttat

SEQ ID NO: 286797 - DNA, 12 bp, Artificial Sequence
  Oligonucleotide primer for the detection of SNP TSC0012825
tatttaagttac

SEQ ID NO: 286798 - DNA, 12 bp, Artificial Sequence
  Oligonucleotide primer for the detection of SNP TSC0012825
tatttaaatcac

SEQ ID NO: 286799 - DNA, 12 bp, Artificial Sequence
  Oligonucleotide primer for the detection of SNP TSC0012826
aataaccatacc

SEQ ID NO: 286800 - DNA, 12 bp, Artificial Sequence
  Oligonucleotide primer for the detection of SNP TSC0012826
ggtggtaaggtt

SEQ ID NO: 286801 - DNA, 12 bp, Artificial Sequence
  Oligonucleotide primer for the detection of SNP TSC0012826
aataataaaatt

SEQ ID NO: 286802 - DNA, 12 bp, Artificial Sequence
  Oligonucleotide primer for the detection of SNP TSC0012826
gatggttatgtt

SEQ ID NO: 286803 - DNA, 12 bp, Artificial Sequence
  Oligonucleotide primer for the detection of SNP TSC0012827
acctatctcttc

SEQ ID NO: 286804 - DNA, 12 bp, Artificial Sequence
  Oligonucleotide primer for the detection of SNP TSC0012827
gtttgttgtagg

SEQ ID NO: 286805 - DNA, 12 bp, Artificial Sequence
  Oligonucleotide primer for the detection of SNP TSC0012830
aatacatctatt

SEQ ID NO: 286806 - DNA, 12 bp, Artificial Sequence
  Oligonucleotide primer for the detection of SNP TSC0012830
gtttatgggatg

SEQ ID NO: 286807 - DNA, 12 bp, Artificial Sequence
  Oligonucleotide primer for the detection of SNP TSC0012830
gtttacgggatg

SEQ ID NO: 286808 - DNA, 12 bp, Artificial Sequence
  Oligonucleotide primer for the detection of SNP TSC0012831
attcaaaaacaa

SEQ ID NO: 286809 - DNA, 12 bp, Artificial Sequence
  Oligonucleotide primer for the detection of SNP TSC0012831
attcaaaaacga

SEQ ID NO: 286810 - DNA, 12 bp, Artificial Sequence
  Oligonucleotide primer for the detection of SNP TSC0012831
gagattatttta

SEQ ID NO: 286811 - DNA, 12 bp, Artificial Sequence
  Oligonucleotide primer for the detection of SNP TSC0012831
aaaatcacttca

SEQ ID NO: 286812 - DNA, 12 bp, Artificial Sequence
  Oligonucleotide primer for the detection of SNP TSC0012831
gtttaaaaatga

SEQ ID NO: 286813 - DNA, 12 bp, Artificial Sequence
  Oligonucleotide primer for the detection of SNP TSC0012831
gtttaaaaacga

SEQ ID NO: 286814 - DNA, 12 bp, Artificial Sequence
  Oligonucleotide primer for the detection of SNP TSC0012832
ttcacacctcat

SEQ ID NO: 286815 - DNA, 12 bp, Artificial Sequence
  Oligonucleotide primer for the detection of SNP TSC0012832
ttgtttttttat

SEQ ID NO: 286816 - DNA, 12 bp, Artificial Sequence
  Oligonucleotide primer for the detection of SNP TSC0012832
cctatctctcca

SEQ ID NO: 286817 - DNA, 12 bp, Artificial Sequence
  Oligonucleotide primer for the detection of SNP TSC0012836
atcataactatc

SEQ ID NO: 286818 - DNA, 12 bp, Artificial Sequence
  Oligonucleotide primer for the detection of SNP TSC0012836
tatttttatgag

SEQ ID NO: 286819 - DNA, 12 bp, Artificial Sequence
  Oligonucleotide primer for the detection of SNP TSC0012837
atcccctacaat

SEQ ID NO: 286820 - DNA, 12 bp, Artificial Sequence
  Oligonucleotide primer for the detection of SNP TSC0012837
ttgaagggatag

SEQ ID NO: 286821 - DNA, 12 bp, Artificial Sequence
  Oligonucleotide primer for the detection of SNP TSC0012838
cttaaatacaaa

SEQ ID NO: 286822 - DNA, 12 bp, Artificial Sequence
  Oligonucleotide primer for the detection of SNP TSC0012838
tttttattaaat

SEQ ID NO: 286823 - DNA, 12 bp, Artificial Sequence
  Oligonucleotide primer for the detection of SNP TSC0012838
ttctattaaata

SEQ ID NO: 286824 - DNA, 12 bp, Artificial Sequence
  Oligonucleotide primer for the detection of SNP TSC0012838
aggtttaagtgt

SEQ ID NO: 286825 - DNA, 12 bp, Artificial Sequence
  Oligonucleotide primer for the detection of SNP TSC0012839
aaaatatattac

SEQ ID NO: 286826 - DNA, 12 bp, Artificial Sequence
  Oligonucleotide primer for the detection of SNP TSC0012839
gtgtgtaagtgt

SEQ ID NO: 286827 - DNA, 12 bp, Artificial Sequence
  Oligonucleotide primer for the detection of SNP TSC0012839
tataaatacaaa

SEQ ID NO: 286828 - DNA, 12 bp, Artificial Sequence
  Oligonucleotide primer for the detection of SNP TSC0012839
gaatgtgttatt

SEQ ID NO: 286829 - DNA, 12 bp, Artificial Sequence
  Oligonucleotide primer for the detection of SNP TSC0012840
tcaatttataac

SEQ ID NO: 286830 - DNA, 12 bp, Artificial Sequence
  Oligonucleotide primer for the detection of SNP TSC0012840
ttatttattttt

SEQ ID NO: 286831 - DNA, 12 bp, Artificial Sequence
  Oligonucleotide primer for the detection of SNP TSC0012840
taatcacctatc

SEQ ID NO: 286832 - DNA, 12 bp, Artificial Sequence
  Oligonucleotide primer for the detection of SNP TSC0012840
ttaatttgtaat

SEQ ID NO: 286833 - DNA, 12 bp, Artificial Sequence
  Oligonucleotide primer for the detection of SNP TSC0012840
ttaatttgtaac

SEQ ID NO: 286834 - DNA, 12 bp, Artificial Sequence
  Oligonucleotide primer for the detection of SNP TSC0012841
gattattttaat

SEQ ID NO: 286835 - DNA, 12 bp, Artificial Sequence
  Oligonucleotide primer for the detection of SNP TSC0012841
taattaccttaa

SEQ ID NO: 286836 - DNA, 12 bp, Artificial Sequence
  Oligonucleotide primer for the detection of SNP TSC0012841
gtgagagagttt

SEQ ID NO: 286837 - DNA, 12 bp, Artificial Sequence
  Oligonucleotide primer for the detection of SNP TSC0012842
aactttaaaaat

SEQ ID NO: 286838 - DNA, 12 bp, Artificial Sequence
  Oligonucleotide primer for the detection of SNP TSC0012842
gataaaatttta

SEQ ID NO: 286839 - DNA, 12 bp, Artificial Sequence
  Oligonucleotide primer for the detection of SNP TSC0012842
aacaaaatttta

SEQ ID NO: 286840 - DNA, 12 bp, Artificial Sequence
  Oligonucleotide primer for the detection of SNP TSC0012842
agttttaaagat

SEQ ID NO: 286841 - DNA, 12 bp, Artificial Sequence
  Oligonucleotide primer for the detection of SNP TSC0012843
acaatataaaat

SEQ ID NO: 286842 - DNA, 12 bp, Artificial Sequence
  Oligonucleotide primer for the detection of SNP TSC0012844
taatacaattcc

SEQ ID NO: 286843 - DNA, 12 bp, Artificial Sequence
  Oligonucleotide primer for the detection of SNP TSC0012844
taaatatgtaga

SEQ ID NO: 286844 - DNA, 12 bp, Artificial Sequence
  Oligonucleotide primer for the detection of SNP TSC0012848
atttggtgttag

SEQ ID NO: 286845 - DNA, 12 bp, Artificial Sequence
  Oligonucleotide primer for the detection of SNP TSC0012849
cataatctatcc

SEQ ID NO: 286846 - DNA, 12 bp, Artificial Sequence
  Oligonucleotide primer for the detection of SNP TSC0012849
cgtaatctatcc

SEQ ID NO: 286847 - DNA, 12 bp, Artificial Sequence
  Oligonucleotide primer for the detection of SNP TSC0012849
ttttatttttga

SEQ ID NO: 286848 - DNA, 12 bp, Artificial Sequence
  Oligonucleotide primer for the detection of SNP TSC0012849
ccccatccctaa

SEQ ID NO: 286849 - DNA, 12 bp, Artificial Sequence
  Oligonucleotide primer for the detection of SNP TSC0012849
tgtggtttgttt

SEQ ID NO: 286850 - DNA, 12 bp, Artificial Sequence
  Oligonucleotide primer for the detection of SNP TSC0012849
cgtggtttgttt

SEQ ID NO: 286851 - DNA, 12 bp, Artificial Sequence
  Oligonucleotide primer for the detection of SNP TSC0012850
caacttaaaact

SEQ ID NO: 286852 - DNA, 12 bp, Artificial Sequence
  Oligonucleotide primer for the detection of SNP TSC0012850
ttatggttttgg

SEQ ID NO: 286853 - DNA, 12 bp, Artificial Sequence
  Oligonucleotide primer for the detection of SNP TSC0012850
ttacggttttgg

SEQ ID NO: 286854 - DNA, 12 bp, Artificial Sequence
  Oligonucleotide primer for the detection of SNP TSC0012851
ggaggttttatt

SEQ ID NO: 286855 - DNA, 12 bp, Artificial Sequence
  Oligonucleotide primer for the detection of SNP TSC0012851
aaaaatttcatt

SEQ ID NO: 286856 - DNA, 12 bp, Artificial Sequence
  Oligonucleotide primer for the detection of SNP TSC0012854
ctaatctctcac

SEQ ID NO: 286857 - DNA, 12 bp, Artificial Sequence
  Oligonucleotide primer for the detection of SNP TSC0012854
tattgtgagtga

SEQ ID NO: 286858 - DNA, 12 bp, Artificial Sequence
  Oligonucleotide primer for the detection of SNP TSC0012855
tacttttaaaca

SEQ ID NO: 286859 - DNA, 12 bp, Artificial Sequence
  Oligonucleotide primer for the detection of SNP TSC0012855
tgagagattagg

SEQ ID NO: 286860 - DNA, 12 bp, Artificial Sequence
  Oligonucleotide primer for the detection of SNP TSC0012855
taaaaaatcaaa

SEQ ID NO: 286861 - DNA, 12 bp, Artificial Sequence
  Oligonucleotide primer for the detection of SNP TSC0012855
tgtttttaaata

SEQ ID NO: 286862 - DNA, 12 bp, Artificial Sequence
  Oligonucleotide primer for the detection of SNP TSC0012856
accaataacact

SEQ ID NO: 286863 - DNA, 12 bp, Artificial Sequence
  Oligonucleotide primer for the detection of SNP TSC0012856
tttggggtgata

SEQ ID NO: 286864 - DNA, 12 bp, Artificial Sequence
  Oligonucleotide primer for the detection of SNP TSC0012857
taatatattcat

SEQ ID NO: 286865 - DNA, 12 bp, Artificial Sequence
  Oligonucleotide primer for the detection of SNP TSC0012857
tgttataagtta

SEQ ID NO: 286866 - DNA, 12 bp, Artificial Sequence
  Oligonucleotide primer for the detection of SNP TSC0012858
aacttatcccat

SEQ ID NO: 286867 - DNA, 12 bp, Artificial Sequence
  Oligonucleotide primer for the detection of SNP TSC0012861
ttaatttcaact

SEQ ID NO: 286868 - DNA, 12 bp, Artificial Sequence
  Oligonucleotide primer for the detection of SNP TSC0012861
ataatatattta

SEQ ID NO: 286869 - DNA, 12 bp, Artificial Sequence
  Oligonucleotide primer for the detection of SNP TSC0012861
ataatacattca

SEQ ID NO: 286870 - DNA, 12 bp, Artificial Sequence
  Oligonukleotid-Primer
ttgattttaatt

SEQ ID NO: 286871 - DNA, 12 bp, Artificial Sequence
  Oligonucleotide primer for the detection of SNP TSC0012862
accaaatataat

SEQ ID NO: 286872 - DNA, 12 bp, Artificial Sequence
  Oligonucleotide primer for the detection of SNP TSC0012862
tataggtgtgtg

SEQ ID NO: 286873 - DNA, 12 bp, Artificial Sequence
  Oligonucleotide primer for the detection of SNP TSC0012863
tacaaataatta

SEQ ID NO: 286874 - DNA, 12 bp, Artificial Sequence
  Oligonukleotid-Primer
ctcattctccaa

SEQ ID NO: 286875 - DNA, 12 bp, Artificial Sequence
  Oligonucleotide primer for the detection of SNP TSC0012863
taagtggttgtt

SEQ ID NO: 286876 - DNA, 12 bp, Artificial Sequence
  Oligonucleotide primer for the detection of SNP TSC0012863
taagtggttgtc

SEQ ID NO: 286877 - DNA, 12 bp, Artificial Sequence
  Oligonucleotide primer for the detection of SNP TSC0012864
gatgttatggag

SEQ ID NO: 286878 - DNA, 12 bp, Artificial Sequence
  Oligonucleotide primer for the detection of SNP TSC0012864
atactataaaaa

SEQ ID NO: 286879 - DNA, 12 bp, Artificial Sequence
  Oligonucleotide primer for the detection of SNP TSC0012864
atagaattagga

SEQ ID NO: 286880 - DNA, 12 bp, Artificial Sequence
  Oligonucleotide primer for the detection of SNP TSC0012865
tgtgggggttat

SEQ ID NO: 286881 - DNA, 12 bp, Artificial Sequence
  Oligonucleotide primer for the detection of SNP TSC0012865
tataaaaatcac

SEQ ID NO: 286882 - DNA, 12 bp, Artificial Sequence
  Oligonucleotide primer for the detection of SNP TSC0012865
atgaaagattaa

SEQ ID NO: 286883 - DNA, 12 bp, Artificial Sequence
  Oligonucleotide primer for the detection of SNP TSC0012866
tgggaaggttga

SEQ ID NO: 286884 - DNA, 12 bp, Artificial Sequence
  Oligonucleotide primer for the detection of SNP TSC0012866
agtgatttattt

SEQ ID NO: 286885 - DNA, 12 bp, Artificial Sequence
  Oligonucleotide primer for the detection of SNP TSC0012866
agtgatttattc

SEQ ID NO: 286886 - DNA, 12 bp, Artificial Sequence
  Oligonucleotide primer for the detection of SNP TSC0012867
attataacacta

SEQ ID NO: 286887 - DNA, 12 bp, Artificial Sequence
  Oligonucleotide primer for the detection of SNP TSC0012867
tattttgagtta

SEQ ID NO: 286888 - DNA, 12 bp, Artificial Sequence
  Oligonucleotide primer for the detection of SNP TSC0012867
cattttaaatca

SEQ ID NO: 286889 - DNA, 12 bp, Artificial Sequence
  Oligonucleotide primer for the detection of SNP TSC0012867
gttatggtattg

SEQ ID NO: 286890 - DNA, 12 bp, Artificial Sequence
  Oligonucleotide primer for the detection of SNP TSC0012868
ctatcaattata

SEQ ID NO: 286891 - DNA, 12 bp, Artificial Sequence
  Oligonucleotide primer for the detection of SNP TSC0012868
gagttaatagtg

SEQ ID NO: 286892 - DNA, 12 bp, Artificial Sequence
  Oligonucleotide primer for the detection of SNP TSC0012868
aaatcaacaata

SEQ ID NO: 286893 - DNA, 12 bp, Artificial Sequence
  Oligonucleotide primer for the detection of SNP TSC0012868
ttattagttatg

SEQ ID NO: 286894 - DNA, 12 bp, Artificial Sequence
  Oligonucleotide primer for the detection of SNP TSC0012869
tcatccacctac

SEQ ID NO: 286895 - DNA, 12 bp, Artificial Sequence
  Oligonucleotide primer for the detection of SNP TSC0012869
ttttggatagta

SEQ ID NO: 286896 - DNA, 12 bp, Artificial Sequence
  Oligonucleotide primer for the detection of SNP TSC0012870
tctaaaatcacc

SEQ ID NO: 286897 - DNA, 12 bp, Artificial Sequence
  Oligonucleotide primer for the detection of SNP TSC0012870
atgtaagttatg

SEQ ID NO: 286898 - DNA, 12 bp, Artificial Sequence
  Oligonucleotide primer for the detection of SNP TSC0012870
acgtaagttatg

SEQ ID NO: 286899 - DNA, 12 bp, Artificial Sequence
  Oligonucleotide primer for the detection of SNP TSC0012870
atgtaagttacg

SEQ ID NO: 286900 - DNA, 12 bp, Artificial Sequence
  Oligonucleotide primer for the detection of SNP TSC0012870
acgtaagttacg

SEQ ID NO: 286901 - DNA, 12 bp, Artificial Sequence
  Oligonucleotide primer for the detection of SNP TSC0012870
acacaaaccaca

SEQ ID NO: 286902 - DNA, 12 bp, Artificial Sequence
  Oligonucleotide primer for the detection of SNP TSC0012870
acacaaaccacg

SEQ ID NO: 286903 - DNA, 12 bp, Artificial Sequence
  Oligonucleotide primer for the detection of SNP TSC0012870
acgcaaaccaca

SEQ ID NO: 286904 - DNA, 12 bp, Artificial Sequence
  Oligonucleotide primer for the detection of SNP TSC0012870
acgcaaaccacg

SEQ ID NO: 286905 - DNA, 12 bp, Artificial Sequence
  Oligonucleotide primer for the detection of SNP TSC0012870
tttgaaattatt

SEQ ID NO: 286906 - DNA, 12 bp, Artificial Sequence
  Oligonucleotide primer for the detection of SNP TSC0012871
tttggggtttga

SEQ ID NO: 286907 - DNA, 12 bp, Artificial Sequence
  Oligonucleotide primer for the detection of SNP TSC0012871
ttcggggtttga

SEQ ID NO: 286908 - DNA, 12 bp, Artificial Sequence
  Oligonucleotide primer for the detection of SNP TSC0012871
ctcaaaacctaa

SEQ ID NO: 286909 - DNA, 12 bp, Artificial Sequence
  Oligonucleotide primer for the detection of SNP TSC0012871
ctcgaaacctaa

SEQ ID NO: 286910 - DNA, 12 bp, Artificial Sequence
  Oligonucleotide primer for the detection of SNP TSC0012871
ggtggaggggag

SEQ ID NO: 286911 - DNA, 12 bp, Artificial Sequence
  Oligonucleotide primer for the detection of SNP TSC0012872
cctaaaaacaac

SEQ ID NO: 286912 - DNA, 12 bp, Artificial Sequence
  Oligonucleotide primer for the detection of SNP TSC0012872
ttgttggttgaa

SEQ ID NO: 286913 - DNA, 12 bp, Artificial Sequence
  Oligonucleotide primer for the detection of SNP TSC0012875
aaattctaaaat

SEQ ID NO: 286914 - DNA, 12 bp, Artificial Sequence
  Oligonucleotide primer for the detection of SNP TSC0012875
aaaatattcaaa

SEQ ID NO: 286915 - DNA, 12 bp, Artificial Sequence
  Oligonucleotide primer for the detection of SNP TSC0012875
aggttttgggat

SEQ ID NO: 286916 - DNA, 12 bp, Artificial Sequence
  Oligonucleotide primer for the detection of SNP TSC0012877
accaaacacctc

SEQ ID NO: 286917 - DNA, 12 bp, Artificial Sequence
  Oligonucleotide primer for the detection of SNP TSC0012877
accaaacgcctc

SEQ ID NO: 286918 - DNA, 12 bp, Artificial Sequence
  Oligonucleotide primer for the detection of SNP TSC0012877
atgttgtattta

SEQ ID NO: 286919 - DNA, 12 bp, Artificial Sequence
  Oligonucleotide primer for the detection of SNP TSC0012877
atactataccca

SEQ ID NO: 286920 - DNA, 12 bp, Artificial Sequence
  Oligonucleotide primer for the detection of SNP TSC0012877
gttagatgtttt

SEQ ID NO: 286921 - DNA, 12 bp, Artificial Sequence
  Oligonucleotide primer for the detection of SNP TSC0012877
gttagacgtttt

SEQ ID NO: 286922 - DNA, 12 bp, Artificial Sequence
  Oligonucleotide primer for the detection of SNP TSC0012878
ttcccttaaact

SEQ ID NO: 286923 - DNA, 12 bp, Artificial Sequence
  Oligonucleotide primer for the detection of SNP TSC0012878
gtaaaagttggg

SEQ ID NO: 286924 - DNA, 12 bp, Artificial Sequence
  Oligonucleotide primer for the detection of SNP TSC0012882
tataattttatc

SEQ ID NO: 286925 - DNA, 12 bp, Artificial Sequence
  Oligonucleotide primer for the detection of SNP TSC0012882
agttattttata

SEQ ID NO: 286926 - DNA, 12 bp, Artificial Sequence
  Oligonucleotide primer for the detection of SNP TSC0012883
caacacgtaaaa

SEQ ID NO: 286927 - DNA, 12 bp, Artificial Sequence
  Oligonucleotide primer for the detection of SNP TSC0012883
tataaagataaa

SEQ ID NO: 286928 - DNA, 12 bp, Artificial Sequence
  Oligonucleotide primer for the detection of SNP TSC0012883
tataaaaataaa

SEQ ID NO: 286929 - DNA, 12 bp, Artificial Sequence
  Oligonucleotide primer for the detection of SNP TSC0012883
tagtatgtggag

SEQ ID NO: 286930 - DNA, 12 bp, Artificial Sequence
  Oligonucleotide primer for the detection of SNP TSC0012883
tagtacgtggag

SEQ ID NO: 286931 - DNA, 12 bp, Artificial Sequence
  Oligonucleotide primer for the detection of SNP TSC0012884
ttcacttacaac

SEQ ID NO: 286932 - DNA, 12 bp, Artificial Sequence
  Oligonucleotide primer for the detection of SNP TSC0012884
attagttgtata

SEQ ID NO: 286933 - DNA, 12 bp, Artificial Sequence
  Oligonucleotide primer for the detection of SNP TSC0012885
tattgttgtata

SEQ ID NO: 286934 - DNA, 12 bp, Artificial Sequence
  Oligonucleotide primer for the detection of SNP TSC0012885
tattgtcgtata

SEQ ID NO: 286935 - DNA, 12 bp, Artificial Sequence
  Oligonucleotide primer for the detection of SNP TSC0012886
aactataatcaa

SEQ ID NO: 286936 - DNA, 12 bp, Artificial Sequence
  Oligonucleotide primer for the detection of SNP TSC0012886
attttatgttaa

SEQ ID NO: 286937 - DNA, 12 bp, Artificial Sequence
  Oligonucleotide primer for the detection of SNP TSC0012886
acctcatattaa

SEQ ID NO: 286938 - DNA, 12 bp, Artificial Sequence
  Oligonucleotide primer for the detection of SNP TSC0012886
gtagttatagtt

SEQ ID NO: 286939 - DNA, 12 bp, Artificial Sequence
  Oligonucleotide primer for the detection of SNP TSC0012887
aaacatctctaa

SEQ ID NO: 286940 - DNA, 12 bp, Artificial Sequence
  Oligonucleotide primer for the detection of SNP TSC0012887
aaacgtctctaa

SEQ ID NO: 286941 - DNA, 12 bp, Artificial Sequence
  Oligonucleotide primer for the detection of SNP TSC0012887
agttttaaagta

SEQ ID NO: 286942 - DNA, 12 bp, Artificial Sequence
  Oligonucleotide primer for the detection of SNP TSC0012887
aatctcaaaaca

SEQ ID NO: 286943 - DNA, 12 bp, Artificial Sequence
  Oligonukleotid-Primer
aaatgtttttgg

SEQ ID NO: 286944 - DNA, 12 bp, Artificial Sequence
  Oligonucleotide primer for the detection of SNP TSC0012887
aaacgtttttgg

SEQ ID NO: 286945 - DNA, 12 bp, Artificial Sequence
  Oligonucleotide primer for the detection of SNP TSC0012890
tacatatttact

SEQ ID NO: 286946 - DNA, 12 bp, Artificial Sequence
  Oligonucleotide primer for the detection of SNP TSC0012890
agatagaattta

SEQ ID NO: 286947 - DNA, 12 bp, Artificial Sequence
  Oligonukleotid-Primer
aaaatcatatat

SEQ ID NO: 286948 - DNA, 12 bp, Artificial Sequence
  Oligonucleotide primer for the detection of SNP TSC0012892
ttatgaaatttg

SEQ ID NO: 286949 - DNA, 12 bp, Artificial Sequence
  Oligonucleotide primer for the detection of SNP TSC0012893
aaaaaacgaaaa

SEQ ID NO: 286950 - DNA, 12 bp, Artificial Sequence
  Oligonucleotide primer for the detection of SNP TSC0012893
aggtttattata

SEQ ID NO: 286951 - DNA, 12 bp, Artificial Sequence
  Oligonucleotide primer for the detection of SNP TSC0012893
aaactcactaca

SEQ ID NO: 286952 - DNA, 12 bp, Artificial Sequence
  Oligonucleotide primer for the detection of SNP TSC0012893
gggaggtggagg

SEQ ID NO: 286953 - DNA, 12 bp, Artificial Sequence
  Oligonucleotide primer for the detection of SNP TSC0012893
gggaggcggagg

SEQ ID NO: 286954 - DNA, 12 bp, Artificial Sequence
  Oligonucleotide primer for the detection of SNP TSC0012894
taaccaaactaa

SEQ ID NO: 286955 - DNA, 12 bp, Artificial Sequence
  Oligonucleotide primer for the detection of SNP TSC0012895
tatctctactca

SEQ ID NO: 286956 - DNA, 12 bp, Artificial Sequence
  Oligonucleotide primer for the detection of SNP TSC0012895
gaattggaggtt

SEQ ID NO: 286957 - DNA, 12 bp, Artificial Sequence
  Oligonucleotide primer for the detection of SNP TSC0012895
tatttttgttta

SEQ ID NO: 286958 - DNA, 12 bp, Artificial Sequence
  Oligonucleotide primer for the detection of SNP TSC0012897
attttccctttt

SEQ ID NO: 286959 - DNA, 12 bp, Artificial Sequence
  Oligonucleotide primer for the detection of SNP TSC0012897
aaaacaattcct

SEQ ID NO: 286960 - DNA, 12 bp, Artificial Sequence
  Oligonucleotide primer for the detection of SNP TSC0012898
ttaaaaaaacta

SEQ ID NO: 286961 - DNA, 12 bp, Artificial Sequence
  Oligonucleotide primer for the detection of SNP TSC0012898
gttgtattgatt

SEQ ID NO: 286962 - DNA, 12 bp, Artificial Sequence
  Oligonucleotide primer for the detection of SNP TSC0012898
actatactaatt

SEQ ID NO: 286963 - DNA, 12 bp, Artificial Sequence
  Oligonucleotide primer for the detection of SNP TSC0012898
ttgaggaagtta

SEQ ID NO: 286964 - DNA, 12 bp, Artificial Sequence
  Oligonucleotide primer for the detection of SNP TSC0012899
aatatttgagaa

SEQ ID NO: 286965 - DNA, 12 bp, Artificial Sequence
  Oligonucleotide primer for the detection of SNP TSC0012900
tcaaaaaccacc

SEQ ID NO: 286966 - DNA, 12 bp, Artificial Sequence
  Oligonucleotide primer for the detection of SNP TSC0012900
tggggatttagg

SEQ ID NO: 286967 - DNA, 12 bp, Artificial Sequence
  Oligonucleotide primer for the detection of SNP TSC0012900
cggggatttagg

SEQ ID NO: 286968 - DNA, 12 bp, Artificial Sequence
  Oligonucleotide primer for the detection of SNP TSC0012901
aaaaacaacgcc

SEQ ID NO: 286969 - DNA, 12 bp, Artificial Sequence
  Oligonucleotide primer for the detection of SNP TSC0012901
aaaaacgacacc

SEQ ID NO: 286970 - DNA, 12 bp, Artificial Sequence
  Oligonucleotide primer for the detection of SNP TSC0012901
gaaaacaacacc

SEQ ID NO: 286971 - DNA, 12 bp, Artificial Sequence
  Oligonucleotide primer for the detection of SNP TSC0012901
aaaaacgacgcc

SEQ ID NO: 286972 - DNA, 12 bp, Artificial Sequence
  Oligonucleotide primer for the detection of SNP TSC0012901
gaaaacaacgcc

SEQ ID NO: 286973 - DNA, 12 bp, Artificial Sequence
  Oligonucleotide primer for the detection of SNP TSC0012901
gaaaacgacacc

SEQ ID NO: 286974 - DNA, 12 bp, Artificial Sequence
  Oligonucleotide primer for the detection of SNP TSC0012901
gaaaacgacgcc

SEQ ID NO: 286975 - DNA, 12 bp, Artificial Sequence
  Oligonucleotide primer for the detection of SNP TSC0012901
tattgaagggtt

SEQ ID NO: 286976 - DNA, 12 bp, Artificial Sequence
  Oligonucleotide primer for the detection of SNP TSC0012901
tattgaagggtc

SEQ ID NO: 286977 - DNA, 12 bp, Artificial Sequence
  Oligonucleotide primer for the detection of SNP TSC0012901
cactaaaaaacc

SEQ ID NO: 286978 - DNA, 12 bp, Artificial Sequence
  Oligonucleotide primer for the detection of SNP TSC0012901
agagtggtgttt

SEQ ID NO: 286979 - DNA, 12 bp, Artificial Sequence
  Oligonucleotide primer for the detection of SNP TSC0012901
agagcggtgttt

SEQ ID NO: 286980 - DNA, 12 bp, Artificial Sequence
  Oligonucleotide primer for the detection of SNP TSC0012901
agagtggcgttt

SEQ ID NO: 286981 - DNA, 12 bp, Artificial Sequence
  Oligonucleotide primer for the detection of SNP TSC0012901
agagcggcgttt

SEQ ID NO: 286982 - DNA, 12 bp, Artificial Sequence
  Oligonucleotide primer for the detection of SNP TSC0012902
ccaaatcccccc

SEQ ID NO: 286983 - DNA, 12 bp, Artificial Sequence
  Oligonucleotide primer for the detection of SNP TSC0012902
agatagagagag

SEQ ID NO: 286984 - DNA, 12 bp, Artificial Sequence
  Oligonucleotide primer for the detection of SNP TSC0012903
ttaatataactc

SEQ ID NO: 286985 - DNA, 12 bp, Artificial Sequence
  Oligonucleotide primer for the detection of SNP TSC0012903
atagtaaggtga

SEQ ID NO: 286986 - DNA, 12 bp, Artificial Sequence
  Oligonucleotide primer for the detection of SNP TSC0012905
aacaaaacaaac

SEQ ID NO: 286987 - DNA, 12 bp, Artificial Sequence
  Oligonucleotide primer for the detection of SNP TSC0012905
gtgttttagtta

SEQ ID NO: 286988 - DNA, 12 bp, Artificial Sequence
  Oligonucleotide primer for the detection of SNP TSC0012906
tttcttatacac

SEQ ID NO: 286989 - DNA, 12 bp, Artificial Sequence
  Oligonucleotide primer for the detection of SNP TSC0012906
tgtatgtatata

SEQ ID NO: 286990 - DNA, 12 bp, Artificial Sequence
  Oligonucleotide primer for the detection of SNP TSC0012907
aatatatattct

SEQ ID NO: 286991 - DNA, 12 bp, Artificial Sequence
  Oligonucleotide primer for the detection of SNP TSC0012907
caccaccttcca

SEQ ID NO: 286992 - DNA, 12 bp, Artificial Sequence
  Oligonucleotide primer for the detection of SNP TSC0012907
agtgtatatttt

SEQ ID NO: 286993 - DNA, 12 bp, Artificial Sequence
  Oligonucleotide primer for the detection of SNP TSC0012908
cttaactcctaa

SEQ ID NO: 286994 - DNA, 12 bp, Artificial Sequence
  Oligonucleotide primer for the detection of SNP TSC0012908
gtgttaagtatt

SEQ ID NO: 286995 - DNA, 12 bp, Artificial Sequence
  Oligonucleotide primer for the detection of SNP TSC0012908
actaaacactaa

SEQ ID NO: 286996 - DNA, 12 bp, Artificial Sequence
  Oligonucleotide primer for the detection of SNP TSC0012908
tttagtttttaa

SEQ ID NO: 286997 - DNA, 12 bp, Artificial Sequence
  Oligonucleotide primer for the detection of SNP TSC0012909
aattcaacaaat

SEQ ID NO: 286998 - DNA, 12 bp, Artificial Sequence
  Oligonucleotide primer for the detection of SNP TSC0012909
agttagttgtaa

SEQ ID NO: 286999 - DNA, 12 bp, Artificial Sequence
  Oligonucleotide primer for the detection of SNP TSC0012911
ctttctcaccat

SEQ ID NO: 287000 - DNA, 12 bp, Artificial Sequence
  Oligonucleotide primer for the detection of SNP TSC0012911
aaaatggaggta

SEQ ID NO: 287001 - DNA, 12 bp, Artificial Sequence
  Oligonucleotide primer for the detection of SNP TSC0012911
tttttttattat

SEQ ID NO: 287002 - DNA, 12 bp, Artificial Sequence
  Oligonucleotide primer for the detection of SNP TSC0012912
tcattttacctt

SEQ ID NO: 287003 - DNA, 12 bp, Artificial Sequence
  Oligonucleotide primer for the detection of SNP TSC0012912
ttagaagttaga

SEQ ID NO: 287004 - DNA, 12 bp, Artificial Sequence
  Oligonucleotide primer for the detection of SNP TSC0012913
cacaaatacaat

SEQ ID NO: 287005 - DNA, 12 bp, Artificial Sequence
  Oligonucleotide primer for the detection of SNP TSC0012913
gttgttttaagt

SEQ ID NO: 287006 - DNA, 12 bp, Artificial Sequence
  Oligonucleotide primer for the detection of SNP TSC0012913
attattttaaac

SEQ ID NO: 287007 - DNA, 12 bp, Artificial Sequence
  Oligonucleotide primer for the detection of SNP TSC0012915
caaccatcttac

SEQ ID NO: 287008 - DNA, 12 bp, Artificial Sequence
  Oligonucleotide primer for the detection of SNP TSC0012915
atatagttatag

SEQ ID NO: 287009 - DNA, 12 bp, Artificial Sequence
  Oligonucleotide primer for the detection of SNP TSC0012915
acacaattacaa

SEQ ID NO: 287010 - DNA, 12 bp, Artificial Sequence
  Oligonucleotide primer for the detection of SNP TSC0012915
taattattttat

SEQ ID NO: 287011 - DNA, 12 bp, Artificial Sequence
  Oligonucleotide primer for the detection of SNP TSC0012916
ttattaaactat

SEQ ID NO: 287012 - DNA, 12 bp, Artificial Sequence
  Oligonucleotide primer for the detection of SNP TSC0012916
aataaatgttaa

SEQ ID NO: 287013 - DNA, 12 bp, Artificial Sequence
  Oligonucleotide primer for the detection of SNP TSC0012917
caccactatact

SEQ ID NO: 287014 - DNA, 12 bp, Artificial Sequence
  Oligonucleotide primer for the detection of SNP TSC0012917
ttgtgatttagg

SEQ ID NO: 287015 - DNA, 12 bp, Artificial Sequence
  Oligonucleotide primer for the detection of SNP TSC0012920
cattacttccaa

SEQ ID NO: 287016 - DNA, 12 bp, Artificial Sequence
  Oligonucleotide primer for the detection of SNP TSC0012920
attttctactct

SEQ ID NO: 287017 - DNA, 12 bp, Artificial Sequence
  Oligonucleotide primer for the detection of SNP TSC0012920
tattatttttag

SEQ ID NO: 287018 - DNA, 12 bp, Artificial Sequence
  Oligonucleotide primer for the detection of SNP TSC0012921
ccaaaatcctaa

SEQ ID NO: 287019 - DNA, 12 bp, Artificial Sequence
  Oligonucleotide primer for the detection of SNP TSC0012921
ttagaatggttt

SEQ ID NO: 287020 - DNA, 12 bp, Artificial Sequence
  Oligonucleotide primer for the detection of SNP TSC0012921
aaataactcaaa

SEQ ID NO: 287021 - DNA, 12 bp, Artificial Sequence
  Oligonucleotide primer for the detection of SNP TSC0012921
gttagagtttta

SEQ ID NO: 287022 - DNA, 12 bp, Artificial Sequence
  Oligonucleotide primer for the detection of SNP TSC0012922
aaatcctacaat

SEQ ID NO: 287023 - DNA, 12 bp, Artificial Sequence
  Oligonucleotide primer for the detection of SNP TSC0012922
ttttagttattg

SEQ ID NO: 287024 - DNA, 12 bp, Artificial Sequence
  Oligonucleotide primer for the detection of SNP TSC0012922
ttttagttatcg

SEQ ID NO: 287025 - DNA, 12 bp, Artificial Sequence
  Oligonucleotide primer for the detection of SNP TSC0012925
ccttcttaaatc

SEQ ID NO: 287026 - DNA, 12 bp, Artificial Sequence
  Oligonucleotide primer for the detection of SNP TSC0012925
gaatttaagaaa

SEQ ID NO: 287027 - DNA, 12 bp, Artificial Sequence
  Oligonucleotide primer for the detection of SNP TSC0012926
tataaaataact

SEQ ID NO: 287028 - DNA, 12 bp, Artificial Sequence
  Oligonucleotide primer for the detection of SNP TSC0012926
tttattttttgt

SEQ ID NO: 287029 - DNA, 12 bp, Artificial Sequence
  Oligonucleotide primer for the detection of SNP TSC0012926
ctcattccctac

SEQ ID NO: 287030 - DNA, 12 bp, Artificial Sequence
  Oligonucleotide primer for the detection of SNP TSC0012926
tataaagtgatt

SEQ ID NO: 287031 - DNA, 12 bp, Artificial Sequence
  Oligonucleotide primer for the detection of SNP TSC0012927
taaccttaccca

SEQ ID NO: 287032 - DNA, 12 bp, Artificial Sequence
  Oligonucleotide primer for the detection of SNP TSC0012927
gttgatttttat

SEQ ID NO: 287033 - DNA, 12 bp, Artificial Sequence
  Oligonucleotide primer for the detection of SNP TSC0012927
gttgatttttac

SEQ ID NO: 287034 - DNA, 12 bp, Artificial Sequence
  Oligonucleotide primer for the detection of SNP TSC0012927
tattaactctca

SEQ ID NO: 287035 - DNA, 12 bp, Artificial Sequence
  Oligonucleotide primer for the detection of SNP TSC0012927
tggttttattta

SEQ ID NO: 287036 - DNA, 12 bp, Artificial Sequence
  Oligonukleotid-Primer
ataaaatacaca

SEQ ID NO: 287037 - DNA, 12 bp, Artificial Sequence
  Oligonucleotide primer for the detection of SNP TSC0012928
gaggggaggaat

SEQ ID NO: 287038 - DNA, 12 bp, Artificial Sequence
  Oligonucleotide primer for the detection of SNP TSC0012928
ataaaatatata

SEQ ID NO: 287039 - DNA, 12 bp, Artificial Sequence
  Oligonucleotide primer for the detection of SNP TSC0012929
caaccccaccac

SEQ ID NO: 287040 - DNA, 12 bp, Artificial Sequence
  Oligonucleotide primer for the detection of SNP TSC0012929
ttaggttttggg

SEQ ID NO: 287041 - DNA, 12 bp, Artificial Sequence
  Oligonucleotide primer for the detection of SNP TSC0012929
ttaggtttcggg

SEQ ID NO: 287042 - DNA, 12 bp, Artificial Sequence
  Oligonucleotide primer for the detection of SNP TSC0012930
ataataaacatc

SEQ ID NO: 287043 - DNA, 12 bp, Artificial Sequence
  Oligonucleotide primer for the detection of SNP TSC0012930
gtaaaaattata

SEQ ID NO: 287044 - DNA, 12 bp, Artificial Sequence
  Oligonucleotide primer for the detection of SNP TSC0012931
ctttacaaataa

SEQ ID NO: 287045 - DNA, 12 bp, Artificial Sequence
  Oligonucleotide primer for the detection of SNP TSC0012931
tgtatatataat

SEQ ID NO: 287046 - DNA, 12 bp, Artificial Sequence
  Oligonucleotide primer for the detection of SNP TSC0012931
tacatatataat

SEQ ID NO: 287047 - DNA, 12 bp, Artificial Sequence
  Oligonucleotide primer for the detection of SNP TSC0012931
ttttatagataa

SEQ ID NO: 287048 - DNA, 12 bp, Artificial Sequence
  Oligonucleotide primer for the detection of SNP TSC0012932
tatatataattt

SEQ ID NO: 287049 - DNA, 12 bp, Artificial Sequence
  Oligonucleotide primer for the detection of SNP TSC0012932
catacacaattt

SEQ ID NO: 287050 - DNA, 12 bp, Artificial Sequence
  Oligonucleotide primer for the detection of SNP TSC0012932
attaaaagaaat

SEQ ID NO: 287051 - DNA, 12 bp, Artificial Sequence
  Oligonucleotide primer for the detection of SNP TSC0012933
ctttacaaaaat

SEQ ID NO: 287052 - DNA, 12 bp, Artificial Sequence
  Oligonucleotide primer for the detection of SNP TSC0012933
aattttatgtta

SEQ ID NO: 287053 - DNA, 12 bp, Artificial Sequence
  Oligonucleotide primer for the detection of SNP TSC0012933
aattttacgtta

SEQ ID NO: 287054 - DNA, 12 bp, Artificial Sequence
  Oligonucleotide primer for the detection of SNP TSC0012935
taaaattatcac

SEQ ID NO: 287055 - DNA, 12 bp, Artificial Sequence
  Oligonucleotide primer for the detection of SNP TSC0012935
taatttgttttg

SEQ ID NO: 287056 - DNA, 12 bp, Artificial Sequence
  Oligonucleotide primer for the detection of SNP TSC0012937
tttctttacatc

SEQ ID NO: 287057 - DNA, 12 bp, Artificial Sequence
  Oligonucleotide primer for the detection of SNP TSC0012937
aagaattttgaa

SEQ ID NO: 287058 - DNA, 12 bp, Artificial Sequence
  Oligonucleotide primer for the detection of SNP TSC0012938
caattaaaaaaa

SEQ ID NO: 287059 - DNA, 12 bp, Artificial Sequence
  Oligonucleotide primer for the detection of SNP TSC0012938
ttttataaaaaa

SEQ ID NO: 287060 - DNA, 12 bp, Artificial Sequence
  Oligonucleotide primer for the detection of SNP TSC0012939
caaactcttaaa

SEQ ID NO: 287061 - DNA, 12 bp, Artificial Sequence
  Oligonucleotide primer for the detection of SNP TSC0012939
gaaaggattatt

SEQ ID NO: 287062 - DNA, 12 bp, Artificial Sequence
  Oligonucleotide primer for the detection of SNP TSC0012939
aaaaaaatcact

SEQ ID NO: 287063 - DNA, 12 bp, Artificial Sequence
  Oligonucleotide primer for the detection of SNP TSC0012939
taaatttttagg

SEQ ID NO: 287064 - DNA, 12 bp, Artificial Sequence
  Oligonucleotide primer for the detection of SNP TSC0012940
tatacccttttt

SEQ ID NO: 287065 - DNA, 12 bp, Artificial Sequence
  Oligonucleotide primer for the detection of SNP TSC0012942
ctataaaaccct

SEQ ID NO: 287066 - DNA, 12 bp, Artificial Sequence
  Oligonucleotide primer for the detection of SNP TSC0012942
ttattggtttta

SEQ ID NO: 287067 - DNA, 12 bp, Artificial Sequence
  Oligonucleotide primer for the detection of SNP TSC0012942
ttatcggtttta

SEQ ID NO: 287068 - DNA, 12 bp, Artificial Sequence
  Oligonucleotide primer for the detection of SNP TSC0012943
cttcttatacta

SEQ ID NO: 287069 - DNA, 12 bp, Artificial Sequence
  Oligonucleotide primer for the detection of SNP TSC0012943
agtaattgtttt

SEQ ID NO: 287070 - DNA, 12 bp, Artificial Sequence
  Oligonucleotide primer for the detection of SNP TSC0012943
acaactacccta

SEQ ID NO: 287071 - DNA, 12 bp, Artificial Sequence
  Oligonucleotide primer for the detection of SNP TSC0012943
gttttttgtatt

SEQ ID NO: 287072 - DNA, 12 bp, Artificial Sequence
  Oligonucleotide primer for the detection of SNP TSC0012944
taagtttgtgtt

SEQ ID NO: 287073 - DNA, 12 bp, Artificial Sequence
  Oligonucleotide primer for the detection of SNP TSC0012944
caaatttatatc

SEQ ID NO: 287074 - DNA, 12 bp, Artificial Sequence
  Oligonucleotide primer for the detection of SNP TSC0012944
aggattattggg

SEQ ID NO: 287075 - DNA, 12 bp, Artificial Sequence
  Oligonucleotide primer for the detection of SNP TSC0012949
ctttaaaaaaaa

SEQ ID NO: 287076 - DNA, 12 bp, Artificial Sequence
  Oligonucleotide primer for the detection of SNP TSC0012949
ttttagtttatt

SEQ ID NO: 287077 - DNA, 12 bp, Artificial Sequence
  Oligonucleotide primer for the detection of SNP TSC0012949
ctccaactcatt

SEQ ID NO: 287078 - DNA, 12 bp, Artificial Sequence
  Oligonucleotide primer for the detection of SNP TSC0012949
ttttgaaaaaaa

SEQ ID NO: 287079 - DNA, 12 bp, Artificial Sequence
  Oligonucleotide primer for the detection of SNP TSC0012950
acaaataccacc

SEQ ID NO: 287080 - DNA, 12 bp, Artificial Sequence
  Oligonucleotide primer for the detection of SNP TSC0012950
acgaataccacc

SEQ ID NO: 287081 - DNA, 12 bp, Artificial Sequence
  Oligonucleotide primer for the detection of SNP TSC0012950
gaagtttgtgtt

SEQ ID NO: 287082 - DNA, 12 bp, Artificial Sequence
  Oligonucleotide primer for the detection of SNP TSC0012950
aaaacctatacc

SEQ ID NO: 287083 - DNA, 12 bp, Artificial Sequence
  Oligonucleotide primer for the detection of SNP TSC0012950
gaaacctatacc

SEQ ID NO: 287084 - DNA, 12 bp, Artificial Sequence
  Oligonucleotide primer for the detection of SNP TSC0012950
gtgggtattatt

SEQ ID NO: 287085 - DNA, 12 bp, Artificial Sequence
  Oligonucleotide primer for the detection of SNP TSC0012950
gcgggtattatt

SEQ ID NO: 287086 - DNA, 12 bp, Artificial Sequence
  Oligonucleotide primer for the detection of SNP TSC0012951
caaactcacaca

SEQ ID NO: 287087 - DNA, 12 bp, Artificial Sequence
  Oligonucleotide primer for the detection of SNP TSC0012951
caaactcacacg

SEQ ID NO: 287088 - DNA, 12 bp, Artificial Sequence
  Oligonucleotide primer for the detection of SNP TSC0012951
caaactcgcaca

SEQ ID NO: 287089 - DNA, 12 bp, Artificial Sequence
  Oligonucleotide primer for the detection of SNP TSC0012951
caaactcgcacg

SEQ ID NO: 287090 - DNA, 12 bp, Artificial Sequence
  Oligonucleotide primer for the detection of SNP TSC0012951
aggttgtaggtt

SEQ ID NO: 287091 - DNA, 12 bp, Artificial Sequence
  Oligonucleotide primer for the detection of SNP TSC0012951
gaaactacaaac

SEQ ID NO: 287092 - DNA, 12 bp, Artificial Sequence
  Oligonucleotide primer for the detection of SNP TSC0012951
taaatttgtatg

SEQ ID NO: 287093 - DNA, 12 bp, Artificial Sequence
  Oligonucleotide primer for the detection of SNP TSC0012951
taaattcgtatg

SEQ ID NO: 287094 - DNA, 12 bp, Artificial Sequence
  Oligonucleotide primer for the detection of SNP TSC0012951
taaatttgtacg

SEQ ID NO: 287095 - DNA, 12 bp, Artificial Sequence
  Oligonucleotide primer for the detection of SNP TSC0012951
taaattcgtacg

SEQ ID NO: 287096 - DNA, 12 bp, Artificial Sequence
  Oligonucleotide primer for the detection of SNP TSC0012953
actaaaccccac

SEQ ID NO: 287097 - DNA, 12 bp, Artificial Sequence
  Oligonucleotide primer for the detection of SNP TSC0012953
ttttttgagatg

SEQ ID NO: 287098 - DNA, 12 bp, Artificial Sequence
  Oligonucleotide primer for the detection of SNP TSC0012953
ttttctaaaata

SEQ ID NO: 287099 - DNA, 12 bp, Artificial Sequence
  Oligonucleotide primer for the detection of SNP TSC0012953
attgagttttat

SEQ ID NO: 287100 - DNA, 12 bp, Artificial Sequence
  Oligonucleotide primer for the detection of SNP TSC0012953
attgagttttac

SEQ ID NO: 287101 - DNA, 12 bp, Artificial Sequence
  Oligonucleotide primer for the detection of SNP TSC0012954
tcatacttataa

SEQ ID NO: 287102 - DNA, 12 bp, Artificial Sequence
  Oligonucleotide primer for the detection of SNP TSC0012954
taaagtagttgg

SEQ ID NO: 287103 - DNA, 12 bp, Artificial Sequence
  Oligonucleotide primer for the detection of SNP TSC0012955
aatcaatcctaa

SEQ ID NO: 287104 - DNA, 12 bp, Artificial Sequence
  Oligonucleotide primer for the detection of SNP TSC0012955
tttagtgggttt

SEQ ID NO: 287105 - DNA, 12 bp, Artificial Sequence
  Oligonucleotide primer for the detection of SNP TSC0012955
cccaataaatct

SEQ ID NO: 287106 - DNA, 12 bp, Artificial Sequence
  Oligonucleotide primer for the detection of SNP TSC0012955
aattagttttgg

SEQ ID NO: 287107 - DNA, 12 bp, Artificial Sequence
  Oligonucleotide primer for the detection of SNP TSC0012956
aatataataaca

SEQ ID NO: 287108 - DNA, 12 bp, Artificial Sequence
  Oligonucleotide primer for the detection of SNP TSC0012956
gggattataggt

SEQ ID NO: 287109 - DNA, 12 bp, Artificial Sequence
  Oligonukleotid-Primer
aaattacaaata

SEQ ID NO: 287110 - DNA, 12 bp, Artificial Sequence
  Oligonucleotide primer for the detection of SNP TSC0012956
gtgtggtggtat

SEQ ID NO: 287111 - DNA, 12 bp, Artificial Sequence
  Oligonucleotide primer for the detection of SNP TSC0012957
aacccctacatc

SEQ ID NO: 287112 - DNA, 12 bp, Artificial Sequence
  Oligonucleotide primer for the detection of SNP TSC0012957
agggttgtttag

SEQ ID NO: 287113 - DNA, 12 bp, Artificial Sequence
  Oligonucleotide primer for the detection of SNP TSC0012957
agtttttgtatt

SEQ ID NO: 287114 - DNA, 12 bp, Artificial Sequence
  Oligonucleotide primer for the detection of SNP TSC0012958
tatcttttcttt

SEQ ID NO: 287115 - DNA, 12 bp, Artificial Sequence
  Oligonucleotide primer for the detection of SNP TSC0012958
aaagaaaagaaa

SEQ ID NO: 287116 - DNA, 12 bp, Artificial Sequence
  Oligonucleotide primer for the detection of SNP TSC0012959
taaatcaataaa

SEQ ID NO: 287117 - DNA, 12 bp, Artificial Sequence
  Oligonucleotide primer for the detection of SNP TSC0012959
aggaatagagtt

SEQ ID NO: 287118 - DNA, 12 bp, Artificial Sequence
  Oligonucleotide primer for the detection of SNP TSC0012959
aaaaataaaacc

SEQ ID NO: 287119 - DNA, 12 bp, Artificial Sequence
  Oligonucleotide primer for the detection of SNP TSC0012959
tgggttagtggg

SEQ ID NO: 287120 - DNA, 12 bp, Artificial Sequence
  Oligonucleotide primer for the detection of SNP TSC0012960
taaacaaccctt

SEQ ID NO: 287121 - DNA, 12 bp, Artificial Sequence
  Oligonucleotide primer for the detection of SNP TSC0012960
tttttcggttta

SEQ ID NO: 287122 - DNA, 12 bp, Artificial Sequence
  Oligonucleotide primer for the detection of SNP TSC0012960
ctctcaacttaa

SEQ ID NO: 287123 - DNA, 12 bp, Artificial Sequence
  Oligonucleotide primer for the detection of SNP TSC0012960
ctctcgacttaa

SEQ ID NO: 287124 - DNA, 12 bp, Artificial Sequence
  Oligonucleotide primer for the detection of SNP TSC0012960
taagtagttttt

SEQ ID NO: 287125 - DNA, 12 bp, Artificial Sequence
  Oligonucleotide primer for the detection of SNP TSC0012961
ttatctcaacaa

SEQ ID NO: 287126 - DNA, 12 bp, Artificial Sequence
  Oligonucleotide primer for the detection of SNP TSC0012961
gtattttaggaa

SEQ ID NO: 287127 - DNA, 12 bp, Artificial Sequence
  Oligonucleotide primer for the detection of SNP TSC0012961
acaccctaaaaa

SEQ ID NO: 287128 - DNA, 12 bp, Artificial Sequence
  Oligonucleotide primer for the detection of SNP TSC0012961
ggttattttagt

SEQ ID NO: 287129 - DNA, 12 bp, Artificial Sequence
  Oligonucleotide primer for the detection of SNP TSC0012962
ccccaaacattt

SEQ ID NO: 287130 - DNA, 12 bp, Artificial Sequence
  Oligonucleotide primer for the detection of SNP TSC0012962
ccccgaacattt

SEQ ID NO: 287131 - DNA, 12 bp, Artificial Sequence
  Oligonucleotide primer for the detection of SNP TSC0012962
ttgtttttcgtg

SEQ ID NO: 287132 - DNA, 12 bp, Artificial Sequence
  Oligonucleotide primer for the detection of SNP TSC0012963
atatcattattc

SEQ ID NO: 287133 - DNA, 12 bp, Artificial Sequence
  Oligonucleotide primer for the detection of SNP TSC0012963
tggggaagtaga

SEQ ID NO: 287134 - DNA, 12 bp, Artificial Sequence
  Oligonucleotide primer for the detection of SNP TSC0012964
ttggggatatta

SEQ ID NO: 287135 - DNA, 12 bp, Artificial Sequence
  Oligonucleotide primer for the detection of SNP TSC0012964
ctaaaaatatca

SEQ ID NO: 287136 - DNA, 12 bp, Artificial Sequence
  Oligonucleotide primer for the detection of SNP TSC0012964
aaataaagatag

SEQ ID NO: 287137 - DNA, 12 bp, Artificial Sequence
  Oligonucleotide primer for the detection of SNP TSC0012965
tcataccttaaa

SEQ ID NO: 287138 - DNA, 12 bp, Artificial Sequence
  Oligonucleotide primer for the detection of SNP TSC0012965
gttgattatgtg

SEQ ID NO: 287139 - DNA, 12 bp, Artificial Sequence
  Oligonucleotide primer for the detection of SNP TSC0012965
gtcgattatgtg

SEQ ID NO: 287140 - DNA, 12 bp, Artificial Sequence
  Oligonucleotide primer for the detection of SNP TSC0012965
accaaccatata

SEQ ID NO: 287141 - DNA, 12 bp, Artificial Sequence
  Oligonucleotide primer for the detection of SNP TSC0012965
accgaccatata

SEQ ID NO: 287142 - DNA, 12 bp, Artificial Sequence
  Oligonucleotide primer for the detection of SNP TSC0012965
ttatattttaag

SEQ ID NO: 287143 - DNA, 12 bp, Artificial Sequence
  Oligonucleotide primer for the detection of SNP TSC0012966
ttttacaataac

SEQ ID NO: 287144 - DNA, 12 bp, Artificial Sequence
  Oligonucleotide primer for the detection of SNP TSC0012966
ttttaaggtatg

SEQ ID NO: 287145 - DNA, 12 bp, Artificial Sequence
  Oligonucleotide primer for the detection of SNP TSC0012969
ccatcaaccaac

SEQ ID NO: 287146 - DNA, 12 bp, Artificial Sequence
  Oligonucleotide primer for the detection of SNP TSC0012970
aaataattcaaa

SEQ ID NO: 287147 - DNA, 12 bp, Artificial Sequence
  Oligonucleotide primer for the detection of SNP TSC0012970
tagagtagtttt

SEQ ID NO: 287148 - DNA, 12 bp, Artificial Sequence
  Oligonucleotide primer for the detection of SNP TSC0012970
caaaacaactcc

SEQ ID NO: 287149 - DNA, 12 bp, Artificial Sequence
  Oligonucleotide primer for the detection of SNP TSC0012970
gagtggtttaag

SEQ ID NO: 287150 - DNA, 12 bp, Artificial Sequence
  Oligonucleotide primer for the detection of SNP TSC0012971
atttaatctata

SEQ ID NO: 287151 - DNA, 12 bp, Artificial Sequence
  Oligonucleotide primer for the detection of SNP TSC0012971
ttataaggttgt

SEQ ID NO: 287152 - DNA, 12 bp, Artificial Sequence
  Oligonucleotide primer for the detection of SNP TSC0012971
tcacaaaattat

SEQ ID NO: 287153 - DNA, 12 bp, Artificial Sequence
  Oligonucleotide primer for the detection of SNP TSC0012971
atttaatttgta

SEQ ID NO: 287154 - DNA, 12 bp, Artificial Sequence
  Oligonucleotide primer for the detection of SNP TSC0012973
cctataaaaaaa

SEQ ID NO: 287155 - DNA, 12 bp, Artificial Sequence
  Oligonucleotide primer for the detection of SNP TSC0012973
ttaaagtttttt

SEQ ID NO: 287156 - DNA, 12 bp, Artificial Sequence
  Oligonucleotide primer for the detection of SNP TSC0012973
ccaaaatttttt

SEQ ID NO: 287157 - DNA, 12 bp, Artificial Sequence
  Oligonucleotide primer for the detection of SNP TSC0012973
tttgtgagaaaa

SEQ ID NO: 287158 - DNA, 12 bp, Artificial Sequence
  Oligonucleotide primer for the detection of SNP TSC0012974
aaaatacatact

SEQ ID NO: 287159 - DNA, 12 bp, Artificial Sequence
  Oligonucleotide primer for the detection of SNP TSC0012974
ttttgttgtgta

SEQ ID NO: 287160 - DNA, 12 bp, Artificial Sequence
  Oligonucleotide primer for the detection of SNP TSC0012978
accaaattacct

SEQ ID NO: 287161 - DNA, 12 bp, Artificial Sequence
  Oligonucleotide primer for the detection of SNP TSC0012978
accgaattacct

SEQ ID NO: 287162 - DNA, 12 bp, Artificial Sequence
  Oligonucleotide primer for the detection of SNP TSC0012978
tagttttagtta

SEQ ID NO: 287163 - DNA, 12 bp, Artificial Sequence
  Oligonucleotide primer for the detection of SNP TSC0012978
gttgagttgttt

SEQ ID NO: 287164 - DNA, 12 bp, Artificial Sequence
  Oligonucleotide primer for the detection of SNP TSC0012978
gtcgagttgttt

SEQ ID NO: 287165 - DNA, 12 bp, Artificial Sequence
  Oligonucleotide primer for the detection of SNP TSC0012979
ataccacaataa

SEQ ID NO: 287166 - DNA, 12 bp, Artificial Sequence
  Oligonucleotide primer for the detection of SNP TSC0012979
ataccacgataa

SEQ ID NO: 287167 - DNA, 12 bp, Artificial Sequence
  Oligonucleotide primer for the detection of SNP TSC0012979
tgaggttgtagt

SEQ ID NO: 287168 - DNA, 12 bp, Artificial Sequence
  Oligonucleotide primer for the detection of SNP TSC0012979
taaaactacaat

SEQ ID NO: 287169 - DNA, 12 bp, Artificial Sequence
  Oligonucleotide primer for the detection of SNP TSC0012979
gttatgatggtt

SEQ ID NO: 287170 - DNA, 12 bp, Artificial Sequence
  Oligonucleotide primer for the detection of SNP TSC0012979
gttacgatggtt

SEQ ID NO: 287171 - DNA, 12 bp, Artificial Sequence
  Oligonucleotide primer for the detection of SNP TSC0012980
atattaccctat

SEQ ID NO: 287172 - DNA, 12 bp, Artificial Sequence
  Oligonucleotide primer for the detection of SNP TSC0012980
tttaagtttggg

SEQ ID NO: 287173 - DNA, 12 bp, Artificial Sequence
  Oligonucleotide primer for the detection of SNP TSC0012981
cctttaaacaac

SEQ ID NO: 287174 - DNA, 12 bp, Artificial Sequence
  Oligonucleotide primer for the detection of SNP TSC0012981
tttggagtgttg

SEQ ID NO: 287175 - DNA, 12 bp, Artificial Sequence
  Oligonucleotide primer for the detection of SNP TSC0012982
ttggttggttgt

SEQ ID NO: 287176 - DNA, 12 bp, Artificial Sequence
  Oligonucleotide primer for the detection of SNP TSC0012982
ctaactaactac

SEQ ID NO: 287177 - DNA, 12 bp, Artificial Sequence
  Oligonucleotide primer for the detection of SNP TSC0012982
atagggatgaga

SEQ ID NO: 287178 - DNA, 12 bp, Artificial Sequence
  Oligonucleotide primer for the detection of SNP TSC0012983
tttataacatat

SEQ ID NO: 287179 - DNA, 12 bp, Artificial Sequence
  Oligonucleotide primer for the detection of SNP TSC0012983
taagttgtgtta

SEQ ID NO: 287180 - DNA, 12 bp, Artificial Sequence
  Oligonucleotide primer for the detection of SNP TSC0012984
aaaatctcatct

SEQ ID NO: 287181 - DNA, 12 bp, Artificial Sequence
  Oligonucleotide primer for the detection of SNP TSC0012984
gtggagtaggtg

SEQ ID NO: 287182 - DNA, 12 bp, Artificial Sequence
  Oligonucleotide primer for the detection of SNP TSC0012985
ttataaataata

SEQ ID NO: 287183 - DNA, 12 bp, Artificial Sequence
  Oligonucleotide primer for the detection of SNP TSC0012985
attatagaagat

SEQ ID NO: 287184 - DNA, 12 bp, Artificial Sequence
  Oligonucleotide primer for the detection of SNP TSC0012985
attacaaaaaat

SEQ ID NO: 287185 - DNA, 12 bp, Artificial Sequence
  Oligonucleotide primer for the detection of SNP TSC0012985
ttatgggtgata

SEQ ID NO: 287186 - DNA, 12 bp, Artificial Sequence
  Oligonucleotide primer for the detection of SNP TSC0012986
aatatattctct

SEQ ID NO: 287187 - DNA, 12 bp, Artificial Sequence
  Oligonucleotide primer for the detection of SNP TSC0012986
agtttgattgaa

SEQ ID NO: 287188 - DNA, 12 bp, Artificial Sequence
  Oligonucleotide primer for the detection of SNP TSC0012986
aacctaactaaa

SEQ ID NO: 287189 - DNA, 12 bp, Artificial Sequence
  Oligonucleotide primer for the detection of SNP TSC0012986
agtgtgtttttt

SEQ ID NO: 287190 - DNA, 12 bp, Artificial Sequence
  Oligonucleotide primer for the detection of SNP TSC0012987
ggatttggtttt

SEQ ID NO: 287191 - DNA, 12 bp, Artificial Sequence
  Oligonucleotide primer for the detection of SNP TSC0012987
aaacttaatctc

SEQ ID NO: 287192 - DNA, 12 bp, Artificial Sequence
  Oligonucleotide primer for the detection of SNP TSC0012987
aagaaagaggta

SEQ ID NO: 287193 - DNA, 12 bp, Artificial Sequence
  Oligonucleotide primer for the detection of SNP TSC0012988
ctaccaaaaaca

SEQ ID NO: 287194 - DNA, 12 bp, Artificial Sequence
  Oligonukleotid-Primer
gggatgtaggtt

SEQ ID NO: 287195 - DNA, 12 bp, Artificial Sequence
  Oligonucleotide primer for the detection of SNP TSC0012988
gttattaggaat

SEQ ID NO: 287196 - DNA, 12 bp, Artificial Sequence
  Oligonucleotide primer for the detection of SNP TSC0012989
tttaaaaatctt

SEQ ID NO: 287197 - DNA, 12 bp, Artificial Sequence
  Oligonucleotide primer for the detection of SNP TSC0012989
gaaaatagatta

SEQ ID NO: 287198 - DNA, 12 bp, Artificial Sequence
  Oligonukleotid-Primer
cacaaaaatttt

SEQ ID NO: 287199 - DNA, 12 bp, Artificial Sequence
  Oligonucleotide primer for the detection of SNP TSC0012990
ttattttaatag

SEQ ID NO: 287200 - DNA, 12 bp, Artificial Sequence
  Oligonucleotide primer for the detection of SNP TSC0012991
acataaactaaa

SEQ ID NO: 287201 - DNA, 12 bp, Artificial Sequence
  Oligonucleotide primer for the detection of SNP TSC0012991
gtttggtaattt

SEQ ID NO: 287202 - DNA, 12 bp, Artificial Sequence
  Oligonucleotide primer for the detection of SNP TSC0012991
atctaacaacct

SEQ ID NO: 287203 - DNA, 12 bp, Artificial Sequence
  Oligonucleotide primer for the detection of SNP TSC0012991
gtatgagttgag

SEQ ID NO: 287204 - DNA, 12 bp, Artificial Sequence
  Oligonucleotide primer for the detection of SNP TSC0012992
tcaattattttt

SEQ ID NO: 287205 - DNA, 12 bp, Artificial Sequence
  Oligonucleotide primer for the detection of SNP TSC0012992
aagataggaagg

SEQ ID NO: 287206 - DNA, 12 bp, Artificial Sequence
  Oligonucleotide primer for the detection of SNP TSC0012993
aatacccaacct

SEQ ID NO: 287207 - DNA, 12 bp, Artificial Sequence
  Oligonucleotide primer for the detection of SNP TSC0012993
tgaaaatggaga

SEQ ID NO: 287208 - DNA, 12 bp, Artificial Sequence
  Oligonucleotide primer for the detection of SNP TSC0012994
tttgtatttgta

SEQ ID NO: 287209 - DNA, 12 bp, Artificial Sequence
  Oligonucleotide primer for the detection of SNP TSC0012994
ttcgtatttgta

SEQ ID NO: 287210 - DNA, 12 bp, Artificial Sequence
  Oligonucleotide primer for the detection of SNP TSC0012995
ttccaccttccc

SEQ ID NO: 287211 - DNA, 12 bp, Artificial Sequence
  Oligonucleotide primer for the detection of SNP TSC0012995
agaaattatgta

SEQ ID NO: 287212 - DNA, 12 bp, Artificial Sequence
  Oligonucleotide primer for the detection of SNP TSC0012996
gttaatattata

SEQ ID NO: 287213 - DNA, 12 bp, Artificial Sequence
  Oligonucleotide primer for the detection of SNP TSC0013001
tcacattacact

SEQ ID NO: 287214 - DNA, 12 bp, Artificial Sequence
  Oligonucleotide primer for the detection of SNP TSC0013001
tcacgttacact

SEQ ID NO: 287215 - DNA, 12 bp, Artificial Sequence
  Oligonucleotide primer for the detection of SNP TSC0013001
tagtgaatagta

SEQ ID NO: 287216 - DNA, 12 bp, Artificial Sequence
  Oligonucleotide primer for the detection of SNP TSC0013001
ttatgttatatt

SEQ ID NO: 287217 - DNA, 12 bp, Artificial Sequence
  Oligonucleotide primer for the detection of SNP TSC0013001
ttacgttatatt

SEQ ID NO: 287218 - DNA, 12 bp, Artificial Sequence
  Oligonucleotide primer for the detection of SNP TSC0013002
ataatcaacaca

SEQ ID NO: 287219 - DNA, 12 bp, Artificial Sequence
  Oligonucleotide primer for the detection of SNP TSC0013002
aggtatgagttt

SEQ ID NO: 287220 - DNA, 12 bp, Artificial Sequence
  Oligonucleotide primer for the detection of SNP TSC0013002
ggtggttagtat

SEQ ID NO: 287221 - DNA, 12 bp, Artificial Sequence
  Oligonucleotide primer for the detection of SNP TSC0013003
actaaactaaat

SEQ ID NO: 287222 - DNA, 12 bp, Artificial Sequence
  Oligonucleotide primer for the detection of SNP TSC0013003
ggattgttgaag

SEQ ID NO: 287223 - DNA, 12 bp, Artificial Sequence
  Oligonucleotide primer for the detection of SNP TSC0013003
ggattgtcgaag

SEQ ID NO: 287224 - DNA, 12 bp, Artificial Sequence
  Oligonucleotide primer for the detection of SNP TSC0013006
ttacaaacaaat

SEQ ID NO: 287225 - DNA, 12 bp, Artificial Sequence
  Oligonucleotide primer for the detection of SNP TSC0013006
tgtgtaaaatta

SEQ ID NO: 287226 - DNA, 12 bp, Artificial Sequence
  Oligonucleotide primer for the detection of SNP TSC0013007
cacttcctaata

SEQ ID NO: 287227 - DNA, 12 bp, Artificial Sequence
  Oligonucleotide primer for the detection of SNP TSC0013007
atttgaaagttt

SEQ ID NO: 287228 - DNA, 12 bp, Artificial Sequence
  Oligonucleotide primer for the detection of SNP TSC0013007
atttaaaaatcc

SEQ ID NO: 287229 - DNA, 12 bp, Artificial Sequence
  Oligonucleotide primer for the detection of SNP TSC0013007
gtattttttgat

SEQ ID NO: 287230 - DNA, 12 bp, Artificial Sequence
  Oligonucleotide primer for the detection of SNP TSC0013008
aaaaaaaactcc

SEQ ID NO: 287231 - DNA, 12 bp, Artificial Sequence
  Oligonucleotide primer for the detection of SNP TSC0013008
ggaagtgtttaa

SEQ ID NO: 287232 - DNA, 12 bp, Artificial Sequence
  Oligonucleotide primer for the detection of SNP TSC0013010
ggttagattttg

SEQ ID NO: 287233 - DNA, 12 bp, Artificial Sequence
  Oligonucleotide primer for the detection of SNP TSC0013010
ggttagatttcg

SEQ ID NO: 287234 - DNA, 12 bp, Artificial Sequence
  Oligonucleotide primer for the detection of SNP TSC0013010
accaaaccccaa

SEQ ID NO: 287235 - DNA, 12 bp, Artificial Sequence
  Oligonucleotide primer for the detection of SNP TSC0013010
accaaaccccga

SEQ ID NO: 287236 - DNA, 12 bp, Artificial Sequence
  Oligonucleotide primer for the detection of SNP TSC0013010
tggggatagagg

SEQ ID NO: 287237 - DNA, 12 bp, Artificial Sequence
  Oligonucleotide primer for the detection of SNP TSC0013011
aaacacaatttc

SEQ ID NO: 287238 - DNA, 12 bp, Artificial Sequence
  Oligonucleotide primer for the detection of SNP TSC0013011
aaacacgatttc

SEQ ID NO: 287239 - DNA, 12 bp, Artificial Sequence
  Oligonucleotide primer for the detection of SNP TSC0013011
ataaggagttga

SEQ ID NO: 287240 - DNA, 12 bp, Artificial Sequence
  Oligonucleotide primer for the detection of SNP TSC0013012
catataccaaac

SEQ ID NO: 287241 - DNA, 12 bp, Artificial Sequence
  Oligonucleotide primer for the detection of SNP TSC0013012
ttgtgttttata

SEQ ID NO: 287242 - DNA, 12 bp, Artificial Sequence
  Oligonucleotide primer for the detection of SNP TSC0013012
ctatacttcaca

SEQ ID NO: 287243 - DNA, 12 bp, Artificial Sequence
  Oligonucleotide primer for the detection of SNP TSC0013012
tatgtgttaggt

SEQ ID NO: 287244 - DNA, 12 bp, Artificial Sequence
  Oligonucleotide primer for the detection of SNP TSC0013013
tattttaatttc

SEQ ID NO: 287245 - DNA, 12 bp, Artificial Sequence
  Oligonucleotide primer for the detection of SNP TSC0013013
tatatgatgata

SEQ ID NO: 287246 - DNA, 12 bp, Artificial Sequence
  Oligonucleotide primer for the detection of SNP TSC0013015
ccacaataaaat

SEQ ID NO: 287247 - DNA, 12 bp, Artificial Sequence
  Oligonucleotide primer for the detection of SNP TSC0013015
aaaggttttata

SEQ ID NO: 287248 - DNA, 12 bp, Artificial Sequence
  Oligonucleotide primer for the detection of SNP TSC0013015
aaaaactttata

SEQ ID NO: 287249 - DNA, 12 bp, Artificial Sequence
  Oligonucleotide primer for the detection of SNP TSC0013015
ttataatagaat

SEQ ID NO: 287250 - DNA, 12 bp, Artificial Sequence
  Oligonucleotide primer for the detection of SNP TSC0013016
atatcctcaaaa

SEQ ID NO: 287251 - DNA, 12 bp, Artificial Sequence
  Oligonucleotide primer for the detection of SNP TSC0013016
atatcctcgaaa

SEQ ID NO: 287252 - DNA, 12 bp, Artificial Sequence
  Oligonucleotide primer for the detection of SNP TSC0013016
ttggggggtgtt

SEQ ID NO: 287253 - DNA, 12 bp, Artificial Sequence
  Oligonucleotide primer for the detection of SNP TSC0013016
tcggggggtgtt

SEQ ID NO: 287254 - DNA, 12 bp, Artificial Sequence
  Oligonucleotide primer for the detection of SNP TSC0013016
ttggggggcgtt

SEQ ID NO: 287255 - DNA, 12 bp, Artificial Sequence
  Oligonucleotide primer for the detection of SNP TSC0013016
tcggggggcgtt

SEQ ID NO: 287256 - DNA, 12 bp, Artificial Sequence
  Oligonucleotide primer for the detection of SNP TSC0013016
ttcaaaaaacac

SEQ ID NO: 287257 - DNA, 12 bp, Artificial Sequence
  Oligonucleotide primer for the detection of SNP TSC0013016
ttcaaaaaacgc

SEQ ID NO: 287258 - DNA, 12 bp, Artificial Sequence
  Oligonucleotide primer for the detection of SNP TSC0013016
ttcgaaaaacac

SEQ ID NO: 287259 - DNA, 12 bp, Artificial Sequence
  Oligonucleotide primer for the detection of SNP TSC0013016
ttcgaaaaacgc

SEQ ID NO: 287260 - DNA, 12 bp, Artificial Sequence
  Oligonucleotide primer for the detection of SNP TSC0013016
aatatttttgag

SEQ ID NO: 287261 - DNA, 12 bp, Artificial Sequence
  Oligonucleotide primer for the detection of SNP TSC0013016
aatattttcgag

SEQ ID NO: 287262 - DNA, 12 bp, Artificial Sequence
  Oligonucleotide primer for the detection of SNP TSC0013017
taataattaatt

SEQ ID NO: 287263 - DNA, 12 bp, Artificial Sequence
  Oligonucleotide primer for the detection of SNP TSC0013017
aagttgatataa

SEQ ID NO: 287264 - DNA, 12 bp, Artificial Sequence
  Oligonucleotide primer for the detection of SNP TSC0013018
taaactaaactc

SEQ ID NO: 287265 - DNA, 12 bp, Artificial Sequence
  Oligonucleotide primer for the detection of SNP TSC0013018
aaaataaatgtg

SEQ ID NO: 287266 - DNA, 12 bp, Artificial Sequence
  Oligonucleotide primer for the detection of SNP TSC0013019
ttccctccttcc

SEQ ID NO: 287267 - DNA, 12 bp, Artificial Sequence
  Oligonucleotide primer for the detection of SNP TSC0013019
aaggaaggaagg

SEQ ID NO: 287268 - DNA, 12 bp, Artificial Sequence
  Oligonucleotide primer for the detection of SNP TSC0013021
aaacttataact

SEQ ID NO: 287269 - DNA, 12 bp, Artificial Sequence
  Oligonucleotide primer for the detection of SNP TSC0013021
ttttaataaatg

SEQ ID NO: 287270 - DNA, 12 bp, Artificial Sequence
  Oligonucleotide primer for the detection of SNP TSC0013023
ccacgcccaact

SEQ ID NO: 287271 - DNA, 12 bp, Artificial Sequence
  Oligonucleotide primer for the detection of SNP TSC0013023
taaaaatatata

SEQ ID NO: 287272 - DNA, 12 bp, Artificial Sequence
  Oligonucleotide primer for the detection of SNP TSC0013024
ataaaacaaaac

SEQ ID NO: 287273 - DNA, 12 bp, Artificial Sequence
  Oligonucleotide primer for the detection of SNP TSC0013024
ttggttttttga

SEQ ID NO: 287274 - DNA, 12 bp, Artificial Sequence
  Oligonucleotide primer for the detection of SNP TSC0013024
ctaatttcttaa

SEQ ID NO: 287275 - DNA, 12 bp, Artificial Sequence
  Oligonucleotide primer for the detection of SNP TSC0013024
gtggggtaagat

SEQ ID NO: 287276 - DNA, 12 bp, Artificial Sequence
  Oligonucleotide primer for the detection of SNP TSC0013025
ttaccccactcc

SEQ ID NO: 287277 - DNA, 12 bp, Artificial Sequence
  Oligonucleotide primer for the detection of SNP TSC0013025
taagaaagttag

SEQ ID NO: 287278 - DNA, 12 bp, Artificial Sequence
  Oligonucleotide primer for the detection of SNP TSC0013027
tataataacaca

SEQ ID NO: 287279 - DNA, 12 bp, Artificial Sequence
  Oligonucleotide primer for the detection of SNP TSC0013027
aactaaaattac

SEQ ID NO: 287280 - DNA, 12 bp, Artificial Sequence
  Oligonucleotide primer for the detection of SNP TSC0013027
tgtgatggtata

SEQ ID NO: 287281 - DNA, 12 bp, Artificial Sequence
  Oligonucleotide primer for the detection of SNP TSC0013028
tactacataata

SEQ ID NO: 287282 - DNA, 12 bp, Artificial Sequence
  Oligonucleotide primer for the detection of SNP TSC0013028
tgaaagtaatat

SEQ ID NO: 287283 - DNA, 12 bp, Artificial Sequence
  Oligonucleotide primer for the detection of SNP TSC0013028
taaaaataatac

SEQ ID NO: 287284 - DNA, 12 bp, Artificial Sequence
  Oligonucleotide primer for the detection of SNP TSC0013028
tgttatatggtg

SEQ ID NO: 287285 - DNA, 12 bp, Artificial Sequence
  Oligonucleotide primer for the detection of SNP TSC0013029
atataccaacat

SEQ ID NO: 287286 - DNA, 12 bp, Artificial Sequence
  Oligonucleotide primer for the detection of SNP TSC0013029
tgatggtgttta

SEQ ID NO: 287287 - DNA, 12 bp, Artificial Sequence
  Oligonucleotide primer for the detection of SNP TSC0013030
acctctccactt

SEQ ID NO: 287288 - DNA, 12 bp, Artificial Sequence
  Oligonucleotide primer for the detection of SNP TSC0013030
atgattgttgga

SEQ ID NO: 287289 - DNA, 12 bp, Artificial Sequence
  Oligonucleotide primer for the detection of SNP TSC0013030
ataactactaaa

SEQ ID NO: 287290 - DNA, 12 bp, Artificial Sequence
  Oligonucleotide primer for the detection of SNP TSC0013032
gtgagttgagat

SEQ ID NO: 287291 - DNA, 12 bp, Artificial Sequence
  Oligonucleotide primer for the detection of SNP TSC0013032
ataaactaaaat

SEQ ID NO: 287292 - DNA, 12 bp, Artificial Sequence
  Oligonucleotide primer for the detection of SNP TSC0013032
agtgtagtggta

SEQ ID NO: 287293 - DNA, 12 bp, Artificial Sequence
  Oligonucleotide primer for the detection of SNP TSC0013033
tattgtatttta

SEQ ID NO: 287294 - DNA, 12 bp, Artificial Sequence
  Oligonucleotide primer for the detection of SNP TSC0013033
tttgttatttag

SEQ ID NO: 287295 - DNA, 12 bp, Artificial Sequence
  Oligonucleotide primer for the detection of SNP TSC0013034
ctacactatccc

SEQ ID NO: 287296 - DNA, 12 bp, Artificial Sequence
  Oligonucleotide primer for the detection of SNP TSC0013034
atggaaggtagg

SEQ ID NO: 287297 - DNA, 12 bp, Artificial Sequence
  Oligonucleotide primer for the detection of SNP TSC0013035
taccattataat

SEQ ID NO: 287298 - DNA, 12 bp, Artificial Sequence
  Oligonucleotide primer for the detection of SNP TSC0013035
attatatgtagg

SEQ ID NO: 287299 - DNA, 12 bp, Artificial Sequence
  Oligonukleotid-Primer
attatacgtagg

SEQ ID NO: 287300 - DNA, 12 bp, Artificial Sequence
  Oligonucleotide primer for the detection of SNP TSC0013036
atcctacaaaaa

SEQ ID NO: 287301 - DNA, 12 bp, Artificial Sequence
  Oligonucleotide primer for the detection of SNP TSC0013036
gttttttggagt

SEQ ID NO: 287302 - DNA, 12 bp, Artificial Sequence
  Oligonucleotide primer for the detection of SNP TSC0013036
attttgtaaaaa

SEQ ID NO: 287303 - DNA, 12 bp, Artificial Sequence
  Oligonukleotid-Primer
ttaccatataat

SEQ ID NO: 287304 - DNA, 12 bp, Artificial Sequence
  Oligonucleotide primer for the detection of SNP TSC0013037
gttttattggta

SEQ ID NO: 287305 - DNA, 12 bp, Artificial Sequence
  Oligonucleotide primer for the detection of SNP TSC0013038
aatcaaaaaact

SEQ ID NO: 287306 - DNA, 12 bp, Artificial Sequence
  Oligonucleotide primer for the detection of SNP TSC0013038
aaaaaaaagatg

SEQ ID NO: 287307 - DNA, 12 bp, Artificial Sequence
  Oligonucleotide primer for the detection of SNP TSC0013038
aaaaaaaagacg

SEQ ID NO: 287308 - DNA, 12 bp, Artificial Sequence
  Oligonucleotide primer for the detection of SNP TSC0013039
ccctaaaaccaa

SEQ ID NO: 287309 - DNA, 12 bp, Artificial Sequence
  Oligonucleotide primer for the detection of SNP TSC0013039
tattgggtagtt

SEQ ID NO: 287310 - DNA, 12 bp, Artificial Sequence
  Oligonucleotide primer for the detection of SNP TSC0013039
tatcgggtagtt

SEQ ID NO: 287311 - DNA, 12 bp, Artificial Sequence
  Oligonucleotide primer for the detection of SNP TSC0013039
tattgggtagtc

SEQ ID NO: 287312 - DNA, 12 bp, Artificial Sequence
  Oligonucleotide primer for the detection of SNP TSC0013039
tatcgggtagtc

SEQ ID NO: 287313 - DNA, 12 bp, Artificial Sequence
  Oligonucleotide primer for the detection of SNP TSC0013039
catcaaacaatc

SEQ ID NO: 287314 - DNA, 12 bp, Artificial Sequence
  Oligonucleotide primer for the detection of SNP TSC0013039
catcgaacaatc

SEQ ID NO: 287315 - DNA, 12 bp, Artificial Sequence
  Oligonucleotide primer for the detection of SNP TSC0013039
ttttggagttaa

SEQ ID NO: 287316 - DNA, 12 bp, Artificial Sequence
  Oligonucleotide primer for the detection of SNP TSC0013040
atctaaaataat

SEQ ID NO: 287317 - DNA, 12 bp, Artificial Sequence
  Oligonucleotide primer for the detection of SNP TSC0013040
ttagggtttttg

SEQ ID NO: 287318 - DNA, 12 bp, Artificial Sequence
  Oligonucleotide primer for the detection of SNP TSC0013040
ccaaaatttcta

SEQ ID NO: 287319 - DNA, 12 bp, Artificial Sequence
  Oligonucleotide primer for the detection of SNP TSC0013040
gtttagggtggt

SEQ ID NO: 287320 - DNA, 12 bp, Artificial Sequence
  Oligonucleotide primer for the detection of SNP TSC0013041
cctttcatttcc

SEQ ID NO: 287321 - DNA, 12 bp, Artificial Sequence
  Oligonucleotide primer for the detection of SNP TSC0013041
aggagttttaaa

SEQ ID NO: 287322 - DNA, 12 bp, Artificial Sequence
  Oligonucleotide primer for the detection of SNP TSC0013041
aaaaattctaaa

SEQ ID NO: 287323 - DNA, 12 bp, Artificial Sequence
  Oligonucleotide primer for the detection of SNP TSC0013042
atctataaattt

SEQ ID NO: 287324 - DNA, 12 bp, Artificial Sequence
  Oligonucleotide primer for the detection of SNP TSC0013042
atattaaaagta

SEQ ID NO: 287325 - DNA, 12 bp, Artificial Sequence
  Oligonucleotide primer for the detection of SNP TSC0013043
aaaaatttaaac

SEQ ID NO: 287326 - DNA, 12 bp, Artificial Sequence
  Oligonucleotide primer for the detection of SNP TSC0013043
ggggattttaga

SEQ ID NO: 287327 - DNA, 12 bp, Artificial Sequence
  Oligonucleotide primer for the detection of SNP TSC0013044
acaaaccctata

SEQ ID NO: 287328 - DNA, 12 bp, Artificial Sequence
  Oligonucleotide primer for the detection of SNP TSC0013044
taaattttggta

SEQ ID NO: 287329 - DNA, 12 bp, Artificial Sequence
  Oligonucleotide primer for the detection of SNP TSC0013044
taaaccctaaca

SEQ ID NO: 287330 - DNA, 12 bp, Artificial Sequence
  Oligonucleotide primer for the detection of SNP TSC0013044
taggttttatat

SEQ ID NO: 287331 - DNA, 12 bp, Artificial Sequence
  Oligonucleotide primer for the detection of SNP TSC0013044
taggttttatac

SEQ ID NO: 287332 - DNA, 12 bp, Artificial Sequence
  Oligonucleotide primer for the detection of SNP TSC0013045
acaatcatcttc

SEQ ID NO: 287333 - DNA, 12 bp, Artificial Sequence
  Oligonucleotide primer for the detection of SNP TSC0013045
acgatcatcttc

SEQ ID NO: 287334 - DNA, 12 bp, Artificial Sequence
  Oligonucleotide primer for the detection of SNP TSC0013045
tatagttttaga

SEQ ID NO: 287335 - DNA, 12 bp, Artificial Sequence
  Oligonucleotide primer for the detection of SNP TSC0013046
ccttttaaactt

SEQ ID NO: 287336 - DNA, 12 bp, Artificial Sequence
  Oligonucleotide primer for the detection of SNP TSC0013047
ccctaacaccct

SEQ ID NO: 287337 - DNA, 12 bp, Artificial Sequence
  Oligonucleotide primer for the detection of SNP TSC0013047
aaggtaggtggg

SEQ ID NO: 287338 - DNA, 12 bp, Artificial Sequence
  Oligonucleotide primer for the detection of SNP TSC0013048
ttgtatttaata

SEQ ID NO: 287339 - DNA, 12 bp, Artificial Sequence
  Oligonucleotide primer for the detection of SNP TSC0013048
tatatttaataa

SEQ ID NO: 287340 - DNA, 12 bp, Artificial Sequence
  Oligonucleotide primer for the detection of SNP TSC0013048
gaggtataaata

SEQ ID NO: 287341 - DNA, 12 bp, Artificial Sequence
  Oligonucleotide primer for the detection of SNP TSC0013053
ccccacacctct

SEQ ID NO: 287342 - DNA, 12 bp, Artificial Sequence
  Oligonucleotide primer for the detection of SNP TSC0013053
tgtagaggggag

SEQ ID NO: 287343 - DNA, 12 bp, Artificial Sequence
  Oligonucleotide primer for the detection of SNP TSC0013054
ttactcattctc

SEQ ID NO: 287344 - DNA, 12 bp, Artificial Sequence
  Oligonucleotide primer for the detection of SNP TSC0013054
aaggtagttgta

SEQ ID NO: 287345 - DNA, 12 bp, Artificial Sequence
  Oligonucleotide primer for the detection of SNP TSC0013055
atacaatacctt

SEQ ID NO: 287346 - DNA, 12 bp, Artificial Sequence
  Oligonucleotide primer for the detection of SNP TSC0013055
gaatatttatta

SEQ ID NO: 287347 - DNA, 12 bp, Artificial Sequence
  Oligonucleotide primer for the detection of SNP TSC0013056
aaaaacccctaa

SEQ ID NO: 287348 - DNA, 12 bp, Artificial Sequence
  Oligonucleotide primer for the detection of SNP TSC0013056
gttgttgatgat

SEQ ID NO: 287349 - DNA, 12 bp, Artificial Sequence
  Oligonucleotide primer for the detection of SNP TSC0013056
aagggtttttgg

SEQ ID NO: 287350 - DNA, 12 bp, Artificial Sequence
  Oligonucleotide primer for the detection of SNP TSC0013058
aatcaatattcc

SEQ ID NO: 287351 - DNA, 12 bp, Artificial Sequence
  Oligonucleotide primer for the detection of SNP TSC0013058
tttattaggtaa

SEQ ID NO: 287352 - DNA, 12 bp, Artificial Sequence
  Oligonucleotide primer for the detection of SNP TSC0013059
tcatccaaaacc

SEQ ID NO: 287353 - DNA, 12 bp, Artificial Sequence
  Oligonucleotide primer for the detection of SNP TSC0013059
tcatccgaaacc

SEQ ID NO: 287354 - DNA, 12 bp, Artificial Sequence
  Oligonucleotide primer for the detection of SNP TSC0013059
attgtggattta

SEQ ID NO: 287355 - DNA, 12 bp, Artificial Sequence
  Oligonucleotide primer for the detection of SNP TSC0013059
attgcggattta

SEQ ID NO: 287356 - DNA, 12 bp, Artificial Sequence
  Oligonucleotide primer for the detection of SNP TSC0013061
ccaaaaccacca

SEQ ID NO: 287357 - DNA, 12 bp, Artificial Sequence
  Oligonucleotide primer for the detection of SNP TSC0013061
gtatgtattgat

SEQ ID NO: 287358 - DNA, 12 bp, Artificial Sequence
  Oligonucleotide primer for the detection of SNP TSC0013061
catatattaata

SEQ ID NO: 287359 - DNA, 12 bp, Artificial Sequence
  Oligonucleotide primer for the detection of SNP TSC0013061
ttaaagttatta

SEQ ID NO: 287360 - DNA, 12 bp, Artificial Sequence
  Oligonucleotide primer for the detection of SNP TSC0013062
acaaaaaaaact

SEQ ID NO: 287361 - DNA, 12 bp, Artificial Sequence
  Oligonucleotide primer for the detection of SNP TSC0013062
tttggtatgtta

SEQ ID NO: 287362 - DNA, 12 bp, Artificial Sequence
  Oligonucleotide primer for the detection of SNP TSC0013063
ttattcccttct

SEQ ID NO: 287363 - DNA, 12 bp, Artificial Sequence
  Oligonucleotide primer for the detection of SNP TSC0013063
gtaatttgataa

SEQ ID NO: 287364 - DNA, 12 bp, Artificial Sequence
  Oligonucleotide primer for the detection of SNP TSC0013063
ataacttaacaa

SEQ ID NO: 287365 - DNA, 12 bp, Artificial Sequence
  Oligonucleotide primer for the detection of SNP TSC0013064
aaatcccccaaa

SEQ ID NO: 287366 - DNA, 12 bp, Artificial Sequence
  Oligonucleotide primer for the detection of SNP TSC0013064
aaaagtttgggt

SEQ ID NO: 287367 - DNA, 12 bp, Artificial Sequence
  Oligonucleotide primer for the detection of SNP TSC0013064
aaaagtttgggc

SEQ ID NO: 287368 - DNA, 12 bp, Artificial Sequence
  Oligonucleotide primer for the detection of SNP TSC0013064
aaaatttaaaca

SEQ ID NO: 287369 - DNA, 12 bp, Artificial Sequence
  Oligonucleotide primer for the detection of SNP TSC0013064
aaaatttaaacg

SEQ ID NO: 287370 - DNA, 12 bp, Artificial Sequence
  Oligonucleotide primer for the detection of SNP TSC0013064
taaattttttaa

SEQ ID NO: 287371 - DNA, 12 bp, Artificial Sequence
  Oligonucleotide primer for the detection of SNP TSC0013065
taggttgagtgt

SEQ ID NO: 287372 - DNA, 12 bp, Artificial Sequence
  Oligonucleotide primer for the detection of SNP TSC0013065
taggtcgagtgt

SEQ ID NO: 287373 - DNA, 12 bp, Artificial Sequence
  Oligonucleotide primer for the detection of SNP TSC0013065
taggttgagcgt

SEQ ID NO: 287374 - DNA, 12 bp, Artificial Sequence
  Oligonucleotide primer for the detection of SNP TSC0013065
taggttgagtgc

SEQ ID NO: 287375 - DNA, 12 bp, Artificial Sequence
  Oligonucleotide primer for the detection of SNP TSC0013065
taggtcgagcgt

SEQ ID NO: 287376 - DNA, 12 bp, Artificial Sequence
  Oligonucleotide primer for the detection of SNP TSC0013065
taggtcgagtgc

SEQ ID NO: 287377 - DNA, 12 bp, Artificial Sequence
  Oligonucleotide primer for the detection of SNP TSC0013065
taggttgagcgc

SEQ ID NO: 287378 - DNA, 12 bp, Artificial Sequence
  Oligonucleotide primer for the detection of SNP TSC0013065
taggtcgagcgc

SEQ ID NO: 287379 - DNA, 12 bp, Artificial Sequence
  Oligonucleotide primer for the detection of SNP TSC0013065
tcaaaccaaaca

SEQ ID NO: 287380 - DNA, 12 bp, Artificial Sequence
  Oligonukleotid-Primer
tcaaaccaaacg

SEQ ID NO: 287381 - DNA, 12 bp, Artificial Sequence
  Oligonucleotide primer for the detection of SNP TSC0013065
tcaaaccgaaca

SEQ ID NO: 287382 - DNA, 12 bp, Artificial Sequence
  Oligonucleotide primer for the detection of SNP TSC0013065
tcaaaccgaacg

SEQ ID NO: 287383 - DNA, 12 bp, Artificial Sequence
  Oligonucleotide primer for the detection of SNP TSC0013066
attaatcaaact

SEQ ID NO: 287384 - DNA, 12 bp, Artificial Sequence
  Oligonucleotide primer for the detection of SNP TSC0013066
tgggagtttgag

SEQ ID NO: 287385 - DNA, 12 bp, Artificial Sequence
  Oligonucleotide primer for the detection of SNP TSC0013066
cgggagtttgag

SEQ ID NO: 287386 - DNA, 12 bp, Artificial Sequence
  Oligonucleotide primer for the detection of SNP TSC0013068
catttaaaaaac

SEQ ID NO: 287387 - DNA, 12 bp, Artificial Sequence
  Oligonucleotide primer for the detection of SNP TSC0013068
aggaggtttagg

SEQ ID NO: 287388 - DNA, 12 bp, Artificial Sequence
  Oligonucleotide primer for the detection of SNP TSC0013069
aatatcatccta

SEQ ID NO: 287389 - DNA, 12 bp, Artificial Sequence
  Oligonucleotide primer for the detection of SNP TSC0013069
tagatttatata

SEQ ID NO: 287390 - DNA, 12 bp, Artificial Sequence
  Oligonucleotide primer for the detection of SNP TSC0013069
caaattcacaca

SEQ ID NO: 287391 - DNA, 12 bp, Artificial Sequence
  Oligonucleotide primer for the detection of SNP TSC0013069
gtgttattttgt

SEQ ID NO: 287392 - DNA, 12 bp, Artificial Sequence
  Oligonucleotide primer for the detection of SNP TSC0013070
ccattaaacact

SEQ ID NO: 287393 - DNA, 12 bp, Artificial Sequence
  Oligonucleotide primer for the detection of SNP TSC0013070
gagtatgatgtg

SEQ ID NO: 287394 - DNA, 12 bp, Artificial Sequence
  Oligonucleotide primer for the detection of SNP TSC0013070
gagtacgatgtg

SEQ ID NO: 287395 - DNA, 12 bp, Artificial Sequence
  Oligonucleotide primer for the detection of SNP TSC0013072
tttttctttttt

SEQ ID NO: 287396 - DNA, 12 bp, Artificial Sequence
  Oligonucleotide primer for the detection of SNP TSC0013073
ctctcttttttc

SEQ ID NO: 287397 - DNA, 12 bp, Artificial Sequence
  Oligonucleotide primer for the detection of SNP TSC0013076
ttcatatcttat

SEQ ID NO: 287398 - DNA, 12 bp, Artificial Sequence
  Oligonucleotide primer for the detection of SNP TSC0013076
ttatacttctaa

SEQ ID NO: 287399 - DNA, 12 bp, Artificial Sequence
  Oligonucleotide primer for the detection of SNP TSC0013076
tttatattttgt

SEQ ID NO: 287400 - DNA, 12 bp, Artificial Sequence
  Oligonucleotide primer for the detection of SNP TSC0013077
taaataacataa

SEQ ID NO: 287401 - DNA, 12 bp, Artificial Sequence
  Oligonucleotide primer for the detection of SNP TSC0013077
ggtttatttttt

SEQ ID NO: 287402 - DNA, 12 bp, Artificial Sequence
  Oligonucleotide primer for the detection of SNP TSC0013077
atccatccccta

SEQ ID NO: 287403 - DNA, 12 bp, Artificial Sequence
  Oligonucleotide primer for the detection of SNP TSC0013077
atgggtggtatg

SEQ ID NO: 287404 - DNA, 12 bp, Artificial Sequence
  Oligonucleotide primer for the detection of SNP TSC0013078
aaatataaaata

SEQ ID NO: 287405 - DNA, 12 bp, Artificial Sequence
  Oligonucleotide primer for the detection of SNP TSC0013078
ggaaggtattgt

SEQ ID NO: 287406 - DNA, 12 bp, Artificial Sequence
  Oligonucleotide primer for the detection of SNP TSC0013078
ggaaggtatcgt

SEQ ID NO: 287407 - DNA, 12 bp, Artificial Sequence
  Oligonucleotide primer for the detection of SNP TSC0013078
aaaaaatatcac

SEQ ID NO: 287408 - DNA, 12 bp, Artificial Sequence
  Oligonucleotide primer for the detection of SNP TSC0013078
aaaaaatatcgc

SEQ ID NO: 287409 - DNA, 12 bp, Artificial Sequence
  Oligonucleotide primer for the detection of SNP TSC0013078
gggtgtagggta

SEQ ID NO: 287410 - DNA, 12 bp, Artificial Sequence
  Oligonucleotide primer for the detection of SNP TSC0013079
gaaaaaaaaacc

SEQ ID NO: 287411 - DNA, 12 bp, Artificial Sequence
  Oligonucleotide primer for the detection of SNP TSC0013079
tttatgtatggg

SEQ ID NO: 287412 - DNA, 12 bp, Artificial Sequence
  Oligonucleotide primer for the detection of SNP TSC0013079
tttacgtatggg

SEQ ID NO: 287413 - DNA, 12 bp, Artificial Sequence
  Oligonucleotide primer for the detection of SNP TSC0013079
tttatgtacggg

SEQ ID NO: 287414 - DNA, 12 bp, Artificial Sequence
  Oligonucleotide primer for the detection of SNP TSC0013079
tttacgtacggg

SEQ ID NO: 287415 - DNA, 12 bp, Artificial Sequence
  Oligonucleotide primer for the detection of SNP TSC0013081
tttttttgttgt

SEQ ID NO: 287416 - DNA, 12 bp, Artificial Sequence
  Oligonucleotide primer for the detection of SNP TSC0013081
ttcccctactat

SEQ ID NO: 287417 - DNA, 12 bp, Artificial Sequence
  Oligonucleotide primer for the detection of SNP TSC0013081
tggggaagagag

SEQ ID NO: 287418 - DNA, 12 bp, Artificial Sequence
  Oligonucleotide primer for the detection of SNP TSC0013083
caacttttactc

SEQ ID NO: 287419 - DNA, 12 bp, Artificial Sequence
  Oligonucleotide primer for the detection of SNP TSC0013083
tttagagaagaa

SEQ ID NO: 287420 - DNA, 12 bp, Artificial Sequence
  Oligonucleotide primer for the detection of SNP TSC0013084
aaaaaacaattt

SEQ ID NO: 287421 - DNA, 12 bp, Artificial Sequence
  Oligonucleotide primer for the detection of SNP TSC0013084
tttatgtatgga

SEQ ID NO: 287422 - DNA, 12 bp, Artificial Sequence
  Oligonucleotide primer for the detection of SNP TSC0013085
tcatatttaaac

SEQ ID NO: 287423 - DNA, 12 bp, Artificial Sequence
  Oligonucleotide primer for the detection of SNP TSC0013085
ggttggggatta

SEQ ID NO: 287424 - DNA, 12 bp, Artificial Sequence
  Oligonucleotide primer for the detection of SNP TSC0013086
ttaattctcttt

SEQ ID NO: 287425 - DNA, 12 bp, Artificial Sequence
  Oligonucleotide primer for the detection of SNP TSC0013086
tttaaatatgat

SEQ ID NO: 287426 - DNA, 12 bp, Artificial Sequence
  Oligonucleotide primer for the detection of SNP TSC0013086
atttaaacataa

SEQ ID NO: 287427 - DNA, 12 bp, Artificial Sequence
  Oligonucleotide primer for the detection of SNP TSC0013087
ctataaacaaca

SEQ ID NO: 287428 - DNA, 12 bp, Artificial Sequence
  Oligonucleotide primer for the detection of SNP TSC0013087
ataaggttttgt

SEQ ID NO: 287429 - DNA, 12 bp, Artificial Sequence
  Oligonucleotide primer for the detection of SNP TSC0013087
ataaggttttgc

SEQ ID NO: 287430 - DNA, 12 bp, Artificial Sequence
  Oligonucleotide primer for the detection of SNP TSC0013087
aacaaaatctta

SEQ ID NO: 287431 - DNA, 12 bp, Artificial Sequence
  Oligonucleotide primer for the detection of SNP TSC0013087
tgtgggtaatat

SEQ ID NO: 287432 - DNA, 12 bp, Artificial Sequence
  Oligonucleotide primer for the detection of SNP TSC0013088
atctttcttaat

SEQ ID NO: 287433 - DNA, 12 bp, Artificial Sequence
  Oligonucleotide primer for the detection of SNP TSC0013088
gttttgaatgga

SEQ ID NO: 287434 - DNA, 12 bp, Artificial Sequence
  Oligonucleotide primer for the detection of SNP TSC0013089
tccatctattct

SEQ ID NO: 287435 - DNA, 12 bp, Artificial Sequence
  Oligonucleotide primer for the detection of SNP TSC0013089
tccgtctattct

SEQ ID NO: 287436 - DNA, 12 bp, Artificial Sequence
  Oligonucleotide primer for the detection of SNP TSC0013089
agattagttttg

SEQ ID NO: 287437 - DNA, 12 bp, Artificial Sequence
  Oligonucleotide primer for the detection of SNP TSC0013090
aaaccaactcct

SEQ ID NO: 287438 - DNA, 12 bp, Artificial Sequence
  Oligonucleotide primer for the detection of SNP TSC0013090
tgggttgttatg

SEQ ID NO: 287439 - DNA, 12 bp, Artificial Sequence
  Oligonucleotide primer for the detection of SNP TSC0013091
tccttctaattt

SEQ ID NO: 287440 - DNA, 12 bp, Artificial Sequence
  Oligonucleotide primer for the detection of SNP TSC0013091
ttgttaagggta

SEQ ID NO: 287441 - DNA, 12 bp, Artificial Sequence
  Oligonucleotide primer for the detection of SNP TSC0013092
tttcttaaaact

SEQ ID NO: 287442 - DNA, 12 bp, Artificial Sequence
  Oligonucleotide primer for the detection of SNP TSC0013092
tagagttttaaa

SEQ ID NO: 287443 - DNA, 12 bp, Artificial Sequence
  Oligonucleotide primer for the detection of SNP TSC0013093
acaatactctaa

SEQ ID NO: 287444 - DNA, 12 bp, Artificial Sequence
  Oligonucleotide primer for the detection of SNP TSC0013093
tttgtagagaat

SEQ ID NO: 287445 - DNA, 12 bp, Artificial Sequence
  Oligonucleotide primer for the detection of SNP TSC0013093
ataatattttgg

SEQ ID NO: 287446 - DNA, 12 bp, Artificial Sequence
  Oligonucleotide primer for the detection of SNP TSC0013094
tcaaccaattac

SEQ ID NO: 287447 - DNA, 12 bp, Artificial Sequence
  Oligonucleotide primer for the detection of SNP TSC0013094
ttggaattagag

SEQ ID NO: 287448 - DNA, 12 bp, Artificial Sequence
  Oligonucleotide primer for the detection of SNP TSC0013094
tcggaattagag

SEQ ID NO: 287449 - DNA, 12 bp, Artificial Sequence
  Oligonucleotide primer for the detection of SNP TSC0013095
cctaatcccaac

SEQ ID NO: 287450 - DNA, 12 bp, Artificial Sequence
  Oligonucleotide primer for the detection of SNP TSC0013095
aagatagtttta

SEQ ID NO: 287451 - DNA, 12 bp, Artificial Sequence
  Oligonucleotide primer for the detection of SNP TSC0013096
aaaaaatccatt

SEQ ID NO: 287452 - DNA, 12 bp, Artificial Sequence
  Oligonucleotide primer for the detection of SNP TSC0013096
ataattgaggaa

SEQ ID NO: 287453 - DNA, 12 bp, Artificial Sequence
  Oligonucleotide primer for the detection of SNP TSC0013097
tttaatttacat

SEQ ID NO: 287454 - DNA, 12 bp, Artificial Sequence
  Oligonucleotide primer for the detection of SNP TSC0013097
aggggatagtgg

SEQ ID NO: 287455 - DNA, 12 bp, Artificial Sequence
  Oligonucleotide primer for the detection of SNP TSC0013098
cctcaacctata

SEQ ID NO: 287456 - DNA, 12 bp, Artificial Sequence
  Oligonucleotide primer for the detection of SNP TSC0013098
aagattatgatt

SEQ ID NO: 287457 - DNA, 12 bp, Artificial Sequence
  Oligonucleotide primer for the detection of SNP TSC0013098
aaaattataatc

SEQ ID NO: 287458 - DNA, 12 bp, Artificial Sequence
  Oligonucleotide primer for the detection of SNP TSC0013099
ctcccaaaactt

SEQ ID NO: 287459 - DNA, 12 bp, Artificial Sequence
  Oligonucleotide primer for the detection of SNP TSC0013099
ttagaattgtaa

SEQ ID NO: 287460 - DNA, 12 bp, Artificial Sequence
  Oligonucleotide primer for the detection of SNP TSC0013100
acaattcacaat

SEQ ID NO: 287461 - DNA, 12 bp, Artificial Sequence
  Oligonucleotide primer for the detection of SNP TSC0013100
attggagtatga

SEQ ID NO: 287462 - DNA, 12 bp, Artificial Sequence
  Oligonucleotide primer for the detection of SNP TSC0013101
tcataaaaatct

SEQ ID NO: 287463 - DNA, 12 bp, Artificial Sequence
  Oligonucleotide primer for the detection of SNP TSC0013101
taaatgataagg

SEQ ID NO: 287464 - DNA, 12 bp, Artificial Sequence
  Oligonucleotide primer for the detection of SNP TSC0013102
aaattctataac

SEQ ID NO: 287465 - DNA, 12 bp, Artificial Sequence
  Oligonucleotide primer for the detection of SNP TSC0013102
gaggttatttaa

SEQ ID NO: 287466 - DNA, 12 bp, Artificial Sequence
  Oligonucleotide primer for the detection of SNP TSC0013105
tcaacctcaaaa

SEQ ID NO: 287467 - DNA, 12 bp, Artificial Sequence
  Oligonucleotide primer for the detection of SNP TSC0013105
gtatggtttgtt

SEQ ID NO: 287468 - DNA, 12 bp, Artificial Sequence
  Oligonucleotide primer for the detection of SNP TSC0013105
atataacttatt

SEQ ID NO: 287469 - DNA, 12 bp, Artificial Sequence
  Oligonucleotide primer for the detection of SNP TSC0013105
attagttttaga

SEQ ID NO: 287470 - DNA, 12 bp, Artificial Sequence
  Oligonucleotide primer for the detection of SNP TSC0013106
taaacaaaacaa

SEQ ID NO: 287471 - DNA, 12 bp, Artificial Sequence
  Oligonucleotide primer for the detection of SNP TSC0013106
ttttattatgtt

SEQ ID NO: 287472 - DNA, 12 bp, Artificial Sequence
  Oligonucleotide primer for the detection of SNP TSC0013106
ttccatcatatc

SEQ ID NO: 287473 - DNA, 12 bp, Artificial Sequence
  Oligonucleotide primer for the detection of SNP TSC0013106
taaatagggtag

SEQ ID NO: 287474 - DNA, 12 bp, Artificial Sequence
  Oligonucleotide primer for the detection of SNP TSC0013107
ccccaatctttc

SEQ ID NO: 287475 - DNA, 12 bp, Artificial Sequence
  Oligonucleotide primer for the detection of SNP TSC0013107
ttaatataatgg

SEQ ID NO: 287476 - DNA, 12 bp, Artificial Sequence
  Oligonucleotide primer for the detection of SNP TSC0013107
ccaacacaataa

SEQ ID NO: 287477 - DNA, 12 bp, Artificial Sequence
  Oligonucleotide primer for the detection of SNP TSC0013107
ttttaatttttt

SEQ ID NO: 287478 - DNA, 12 bp, Artificial Sequence
  Oligonucleotide primer for the detection of SNP TSC0013109
ctcctttattac

SEQ ID NO: 287479 - DNA, 12 bp, Artificial Sequence
  Oligonucleotide primer for the detection of SNP TSC0013109
ggtaggaaagga

SEQ ID NO: 287480 - DNA, 12 bp, Artificial Sequence
  Oligonucleotide primer for the detection of SNP TSC0013110
ttattttaaata

SEQ ID NO: 287481 - DNA, 12 bp, Artificial Sequence
  Oligonucleotide primer for the detection of SNP TSC0013110
ataatagtattt

SEQ ID NO: 287482 - DNA, 12 bp, Artificial Sequence
  Oligonucleotide primer for the detection of SNP TSC0013110
ataataacattt

SEQ ID NO: 287483 - DNA, 12 bp, Artificial Sequence
  Oligonucleotide primer for the detection of SNP TSC0013110
ttgttttagata

SEQ ID NO: 287484 - DNA, 12 bp, Artificial Sequence
  Oligonucleotide primer for the detection of SNP TSC0013111
taaaacatttcc

SEQ ID NO: 287485 - DNA, 12 bp, Artificial Sequence
  Oligonucleotide primer for the detection of SNP TSC0013111
taagatgttgga

SEQ ID NO: 287486 - DNA, 12 bp, Artificial Sequence
  Oligonucleotide primer for the detection of SNP TSC0013112
ctaaactaaaaa

SEQ ID NO: 287487 - DNA, 12 bp, Artificial Sequence
  Oligonucleotide primer for the detection of SNP TSC0013112
ttggttttgttt

SEQ ID NO: 287488 - DNA, 12 bp, Artificial Sequence
  Oligonucleotide primer for the detection of SNP TSC0013112
ttggttttgttc

SEQ ID NO: 287489 - DNA, 12 bp, Artificial Sequence
  Oligonukleotid-Primer
cctaactctatt

SEQ ID NO: 287490 - DNA, 12 bp, Artificial Sequence
  Oligonucleotide primer for the detection of SNP TSC0013112
tttgggttggaa

SEQ ID NO: 287491 - DNA, 12 bp, Artificial Sequence
  Oligonucleotide primer for the detection of SNP TSC0013115
caatacccaata

SEQ ID NO: 287492 - DNA, 12 bp, Artificial Sequence
  Oligonucleotide primer for the detection of SNP TSC0013115
agaatgagaaat

SEQ ID NO: 287493 - DNA, 12 bp, Artificial Sequence
  Oligonucleotide primer for the detection of SNP TSC0013115
tagtgtttaata

SEQ ID NO: 287494 - DNA, 12 bp, Artificial Sequence
  Oligonucleotide primer for the detection of SNP TSC0013116
cccataactcac

SEQ ID NO: 287495 - DNA, 12 bp, Artificial Sequence
  Oligonucleotide primer for the detection of SNP TSC0013116
cccgtaactcac

SEQ ID NO: 287496 - DNA, 12 bp, Artificial Sequence
  Oligonucleotide primer for the detection of SNP TSC0013116
gatgatgttgag

SEQ ID NO: 287497 - DNA, 12 bp, Artificial Sequence
  Oligonucleotide primer for the detection of SNP TSC0013117
ctccatttcttc

SEQ ID NO: 287498 - DNA, 12 bp, Artificial Sequence
  Oligonucleotide primer for the detection of SNP TSC0013117
gaaaaatatata

SEQ ID NO: 287499 - DNA, 12 bp, Artificial Sequence
  Oligonucleotide primer for the detection of SNP TSC0013118
aaattaacttta

SEQ ID NO: 287500 - DNA, 12 bp, Artificial Sequence
  Oligonucleotide primer for the detection of SNP TSC0013118
atattggaaagt

SEQ ID NO: 287501 - DNA, 12 bp, Artificial Sequence
  Oligonucleotide primer for the detection of SNP TSC0013118
atattaaaaaat

SEQ ID NO: 287502 - DNA, 12 bp, Artificial Sequence
  Oligonucleotide primer for the detection of SNP TSC0013118
aaattaattttg

SEQ ID NO: 287503 - DNA, 12 bp, Artificial Sequence
  Oligonucleotide primer for the detection of SNP TSC0013119
cacatacttttt

SEQ ID NO: 287504 - DNA, 12 bp, Artificial Sequence
  Oligonucleotide primer for the detection of SNP TSC0013119
attgtgttttta

SEQ ID NO: 287505 - DNA, 12 bp, Artificial Sequence
  Oligonucleotide primer for the detection of SNP TSC0013119
attatattctca

SEQ ID NO: 287506 - DNA, 12 bp, Artificial Sequence
  Oligonucleotide primer for the detection of SNP TSC0013119
tatatatttttt

SEQ ID NO: 287507 - DNA, 12 bp, Artificial Sequence
  Oligonucleotide primer for the detection of SNP TSC0013120
ataaaacttaac

SEQ ID NO: 287508 - DNA, 12 bp, Artificial Sequence
  Oligonucleotide primer for the detection of SNP TSC0013120
gaggttttttaa

SEQ ID NO: 287509 - DNA, 12 bp, Artificial Sequence
  Oligonucleotide primer for the detection of SNP TSC0013121
tactttaaaaaa

SEQ ID NO: 287510 - DNA, 12 bp, Artificial Sequence
  Oligonucleotide primer for the detection of SNP TSC0013121
attataaaatat

SEQ ID NO: 287511 - DNA, 12 bp, Artificial Sequence
  Oligonucleotide primer for the detection of SNP TSC0013121
ccataaaataca

SEQ ID NO: 287512 - DNA, 12 bp, Artificial Sequence
  Oligonucleotide primer for the detection of SNP TSC0013121
atattttaaaag

SEQ ID NO: 287513 - DNA, 12 bp, Artificial Sequence
  Oligonucleotide primer for the detection of SNP TSC0013122
aaaacaaacaaa

SEQ ID NO: 287514 - DNA, 12 bp, Artificial Sequence
  Oligonucleotide primer for the detection of SNP TSC0013123
taactcacaatc

SEQ ID NO: 287515 - DNA, 12 bp, Artificial Sequence
  Oligonucleotide primer for the detection of SNP TSC0013125
ttataaaaaatt

SEQ ID NO: 287516 - DNA, 12 bp, Artificial Sequence
  Oligonucleotide primer for the detection of SNP TSC0013125
ctacaaaaaatt

SEQ ID NO: 287517 - DNA, 12 bp, Artificial Sequence
  Oligonucleotide primer for the detection of SNP TSC0013126
actaaaaccaca

SEQ ID NO: 287518 - DNA, 12 bp, Artificial Sequence
  Oligonucleotide primer for the detection of SNP TSC0013126
ggtggtatgtag

SEQ ID NO: 287519 - DNA, 12 bp, Artificial Sequence
  Oligonucleotide primer for the detection of SNP TSC0013126
aataacatacaa

SEQ ID NO: 287520 - DNA, 12 bp, Artificial Sequence
  Oligonucleotide primer for the detection of SNP TSC0013128
atttcataaaac

SEQ ID NO: 287521 - DNA, 12 bp, Artificial Sequence
  Oligonucleotide primer for the detection of SNP TSC0013128
agttatttatat

SEQ ID NO: 287522 - DNA, 12 bp, Artificial Sequence
  Oligonucleotide primer for the detection of SNP TSC0013128
tcattcatataa

SEQ ID NO: 287523 - DNA, 12 bp, Artificial Sequence
  Oligonucleotide primer for the detection of SNP TSC0013128
ttttatagagtt

SEQ ID NO: 287524 - DNA, 12 bp, Artificial Sequence
  Oligonucleotide primer for the detection of SNP TSC0013129
cccaactccttc

SEQ ID NO: 287525 - DNA, 12 bp, Artificial Sequence
  Oligonucleotide primer for the detection of SNP TSC0013129
ttaggttttagg

SEQ ID NO: 287526 - DNA, 12 bp, Artificial Sequence
  Oligonucleotide primer for the detection of SNP TSC0013129
ccaaactctaaa

SEQ ID NO: 287527 - DNA, 12 bp, Artificial Sequence
  Oligonucleotide primer for the detection of SNP TSC0013130
ttacctcaacct

SEQ ID NO: 287528 - DNA, 12 bp, Artificial Sequence
  Oligonucleotide primer for the detection of SNP TSC0013131
taatctcaactc

SEQ ID NO: 287529 - DNA, 12 bp, Artificial Sequence
  Oligonucleotide primer for the detection of SNP TSC0013131
gtagaggtggta

SEQ ID NO: 287530 - DNA, 12 bp, Artificial Sequence
  Oligonucleotide primer for the detection of SNP TSC0013133
agtagttggatg

SEQ ID NO: 287531 - DNA, 12 bp, Artificial Sequence
  Oligonucleotide primer for the detection of SNP TSC0013133
agtagtcggatg

SEQ ID NO: 287532 - DNA, 12 bp, Artificial Sequence
  Oligonucleotide primer for the detection of SNP TSC0013133
aacaaccaaata

SEQ ID NO: 287533 - DNA, 12 bp, Artificial Sequence
  Oligonucleotide primer for the detection of SNP TSC0013133
aacaaccgaata

SEQ ID NO: 287534 - DNA, 12 bp, Artificial Sequence
  Oligonucleotide primer for the detection of SNP TSC0013134
attcccatatat

SEQ ID NO: 287535 - DNA, 12 bp, Artificial Sequence
  Oligonucleotide primer for the detection of SNP TSC0013134
attcccgtatat

SEQ ID NO: 287536 - DNA, 12 bp, Artificial Sequence
  Oligonucleotide primer for the detection of SNP TSC0013134
gggttttttata

SEQ ID NO: 287537 - DNA, 12 bp, Artificial Sequence
  Oligonucleotide primer for the detection of SNP TSC0013134
aaatccctcaca

SEQ ID NO: 287538 - DNA, 12 bp, Artificial Sequence
  Oligonucleotide primer for the detection of SNP TSC0013134
tttttgtgtgtt

SEQ ID NO: 287539 - DNA, 12 bp, Artificial Sequence
  Oligonucleotide primer for the detection of SNP TSC0013134
ttttcgtgtgtt

SEQ ID NO: 287540 - DNA, 12 bp, Artificial Sequence
  Oligonucleotide primer for the detection of SNP TSC0013136
cgttttagaaaa

SEQ ID NO: 287541 - DNA, 12 bp, Artificial Sequence
  Oligonucleotide primer for the detection of SNP TSC0013138
ttccctaacaat

SEQ ID NO: 287542 - DNA, 12 bp, Artificial Sequence
  Oligonucleotide primer for the detection of SNP TSC0013138
gaggaatataaa

SEQ ID NO: 287543 - DNA, 12 bp, Artificial Sequence
  Oligonucleotide primer for the detection of SNP TSC0013144
tcaaaacataca

SEQ ID NO: 287544 - DNA, 12 bp, Artificial Sequence
  Oligonucleotide primer for the detection of SNP TSC0013144
aataaattgatt

SEQ ID NO: 287545 - DNA, 12 bp, Artificial Sequence
  Oligonucleotide primer for the detection of SNP TSC0013144
aacaaattaatt

SEQ ID NO: 287546 - DNA, 12 bp, Artificial Sequence
  Oligonucleotide primer for the detection of SNP TSC0013144
ttaaaatatata

SEQ ID NO: 287547 - DNA, 12 bp, Artificial Sequence
  Oligonucleotide primer for the detection of SNP TSC0013145
catttcttttta

SEQ ID NO: 287548 - DNA, 12 bp, Artificial Sequence
  Oligonucleotide primer for the detection of SNP TSC0013145
tatgtatgtttt

SEQ ID NO: 287549 - DNA, 12 bp, Artificial Sequence
  Oligonucleotide primer for the detection of SNP TSC0013145
tatatatatttt

SEQ ID NO: 287550 - DNA, 12 bp, Artificial Sequence
  Oligonucleotide primer for the detection of SNP TSC0013146
atcaaaccacaa

SEQ ID NO: 287551 - DNA, 12 bp, Artificial Sequence
  Oligonucleotide primer for the detection of SNP TSC0013146
aaagataattgt

SEQ ID NO: 287552 - DNA, 12 bp, Artificial Sequence
  Oligonucleotide primer for the detection of SNP TSC0013146
caaaaacaacta

SEQ ID NO: 287553 - DNA, 12 bp, Artificial Sequence
  Oligonucleotide primer for the detection of SNP TSC0013146
gattaagttata

SEQ ID NO: 287554 - DNA, 12 bp, Artificial Sequence
  Oligonucleotide primer for the detection of SNP TSC0013151
attctaaaattc

SEQ ID NO: 287555 - DNA, 12 bp, Artificial Sequence
  Oligonucleotide primer for the detection of SNP TSC0013151
tatttaggattg

SEQ ID NO: 287556 - DNA, 12 bp, Artificial Sequence
  Oligonucleotide primer for the detection of SNP TSC0013151
tacctaaaatta

SEQ ID NO: 287557 - DNA, 12 bp, Artificial Sequence
  Oligonucleotide primer for the detection of SNP TSC0013151
gttttagggttt

SEQ ID NO: 287558 - DNA, 12 bp, Artificial Sequence
  Oligonucleotide primer for the detection of SNP TSC0013153
actaaaataacc

SEQ ID NO: 287559 - DNA, 12 bp, Artificial Sequence
  Oligonucleotide primer for the detection of SNP TSC0013153
gatgaagggagg

SEQ ID NO: 287560 - DNA, 12 bp, Artificial Sequence
  Oligonucleotide primer for the detection of SNP TSC0013155
tattttttaagt

SEQ ID NO: 287561 - DNA, 12 bp, Artificial Sequence
  Oligonucleotide primer for the detection of SNP TSC0013155
tattttttaagc

SEQ ID NO: 287562 - DNA, 12 bp, Artificial Sequence
  Oligonucleotide primer for the detection of SNP TSC0013155
tactttttaaac

SEQ ID NO: 287563 - DNA, 12 bp, Artificial Sequence
  Oligonucleotide primer for the detection of SNP TSC0013155
gtatatggtagg

SEQ ID NO: 287564 - DNA, 12 bp, Artificial Sequence
  Oligonucleotide primer for the detection of SNP TSC0013156
attacatctccc

SEQ ID NO: 287565 - DNA, 12 bp, Artificial Sequence
  Oligonucleotide primer for the detection of SNP TSC0013156
gttacatctccc

SEQ ID NO: 287566 - DNA, 12 bp, Artificial Sequence
  Oligonucleotide primer for the detection of SNP TSC0013156
atgtgtttgata

SEQ ID NO: 287567 - DNA, 12 bp, Artificial Sequence
  Oligonucleotide primer for the detection of SNP TSC0013157
aaataattccat

SEQ ID NO: 287568 - DNA, 12 bp, Artificial Sequence
  Oligonucleotide primer for the detection of SNP TSC0013157
tataaggtataa

SEQ ID NO: 287569 - DNA, 12 bp, Artificial Sequence
  Oligonucleotide primer for the detection of SNP TSC0013157
cataaaacataa

SEQ ID NO: 287570 - DNA, 12 bp, Artificial Sequence
  Oligonucleotide primer for the detection of SNP TSC0013157
aaatggttttat

SEQ ID NO: 287571 - DNA, 12 bp, Artificial Sequence
  Oligonucleotide primer for the detection of SNP TSC0013158
taaatttcatac

SEQ ID NO: 287572 - DNA, 12 bp, Artificial Sequence
  Oligonucleotide primer for the detection of SNP TSC0013158
gaattgtgttag

SEQ ID NO: 287573 - DNA, 12 bp, Artificial Sequence
  Oligonucleotide primer for the detection of SNP TSC0013159
actctaataaaa

SEQ ID NO: 287574 - DNA, 12 bp, Artificial Sequence
  Oligonucleotide primer for the detection of SNP TSC0013159
gtataagattta

SEQ ID NO: 287575 - DNA, 12 bp, Artificial Sequence
  Oligonucleotide primer for the detection of SNP TSC0013159
acaaaattcaaa

SEQ ID NO: 287576 - DNA, 12 bp, Artificial Sequence
  Oligonucleotide primer for the detection of SNP TSC0013159
gaattttggtga

SEQ ID NO: 287577 - DNA, 12 bp, Artificial Sequence
  Oligonucleotide primer for the detection of SNP TSC0013160
aataaactaaca

SEQ ID NO: 287578 - DNA, 12 bp, Artificial Sequence
  Oligonucleotide primer for the detection of SNP TSC0013160
aggttggagtgt

SEQ ID NO: 287579 - DNA, 12 bp, Artificial Sequence
  Oligonucleotide primer for the detection of SNP TSC0013160
aaactaaaatac

SEQ ID NO: 287580 - DNA, 12 bp, Artificial Sequence
  Oligonucleotide primer for the detection of SNP TSC0013160
agtgagttgata

SEQ ID NO: 287581 - DNA, 12 bp, Artificial Sequence
  Oligonucleotide primer for the detection of SNP TSC0013161
ccacccacctcc

SEQ ID NO: 287582 - DNA, 12 bp, Artificial Sequence
  Oligonucleotide primer for the detection of SNP TSC0013161
tagtagagtggg

SEQ ID NO: 287583 - DNA, 12 bp, Artificial Sequence
  Oligonucleotide primer for the detection of SNP TSC0013161
tagtagagcggg

SEQ ID NO: 287584 - DNA, 12 bp, Artificial Sequence
  Oligonucleotide primer for the detection of SNP TSC0013163
aaatccaaattc

SEQ ID NO: 287585 - DNA, 12 bp, Artificial Sequence
  Oligonucleotide primer for the detection of SNP TSC0013163
tgtgggtatgtg

SEQ ID NO: 287586 - DNA, 12 bp, Artificial Sequence
  Oligonucleotide primer for the detection of SNP TSC0013164
ttccacttatta

SEQ ID NO: 287587 - DNA, 12 bp, Artificial Sequence
  Oligonucleotide primer for the detection of SNP TSC0013164
ctttttctactt

SEQ ID NO: 287588 - DNA, 12 bp, Artificial Sequence
  Oligonucleotide primer for the detection of SNP TSC0013164
ttttatttgttg

SEQ ID NO: 287589 - DNA, 12 bp, Artificial Sequence
  Oligonucleotide primer for the detection of SNP TSC0013165
atactattaaac

SEQ ID NO: 287590 - DNA, 12 bp, Artificial Sequence
  Oligonucleotide primer for the detection of SNP TSC0013165
attttttatttg

SEQ ID NO: 287591 - DNA, 12 bp, Artificial Sequence
  Oligonucleotide primer for the detection of SNP TSC0013165
atctctcactta

SEQ ID NO: 287592 - DNA, 12 bp, Artificial Sequence
  Oligonucleotide primer for the detection of SNP TSC0013165
atgttgttggat

SEQ ID NO: 287593 - DNA, 12 bp, Artificial Sequence
  Oligonucleotide primer for the detection of SNP TSC0013167
actcccactcac

SEQ ID NO: 287594 - DNA, 12 bp, Artificial Sequence
  Oligonucleotide primer for the detection of SNP TSC0013167
actcccactcgc

SEQ ID NO: 287595 - DNA, 12 bp, Artificial Sequence
  Oligonucleotide primer for the detection of SNP TSC0013167
gatgtgggtttg

SEQ ID NO: 287596 - DNA, 12 bp, Artificial Sequence
  Oligonucleotide primer for the detection of SNP TSC0013167
gacgtgggtttg

SEQ ID NO: 287597 - DNA, 12 bp, Artificial Sequence
  Oligonucleotide primer for the detection of SNP TSC0013167
gatgtgggttcg

SEQ ID NO: 287598 - DNA, 12 bp, Artificial Sequence
  Oligonucleotide primer for the detection of SNP TSC0013167
gacgtgggttcg

SEQ ID NO: 287599 - DNA, 12 bp, Artificial Sequence
  Oligonucleotide primer for the detection of SNP TSC0013167
aacataaatcca

SEQ ID NO: 287600 - DNA, 12 bp, Artificial Sequence
  Oligonucleotide primer for the detection of SNP TSC0013167
aacataaatccg

SEQ ID NO: 287601 - DNA, 12 bp, Artificial Sequence
  Oligonucleotide primer for the detection of SNP TSC0013167
aacgtaaatcca

SEQ ID NO: 287602 - DNA, 12 bp, Artificial Sequence
  Oligonucleotide primer for the detection of SNP TSC0013167
aacgtaaatccg

SEQ ID NO: 287603 - DNA, 12 bp, Artificial Sequence
  Oligonucleotide primer for the detection of SNP TSC0013167
gtttttatttgt

SEQ ID NO: 287604 - DNA, 12 bp, Artificial Sequence
  Oligonucleotide primer for the detection of SNP TSC0013167
gtttttattcgt

SEQ ID NO: 287605 - DNA, 12 bp, Artificial Sequence
  Oligonucleotide primer for the detection of SNP TSC0013168
cactataatcat

SEQ ID NO: 287606 - DNA, 12 bp, Artificial Sequence
  Oligonucleotide primer for the detection of SNP TSC0013168
cactataatcgt

SEQ ID NO: 287607 - DNA, 12 bp, Artificial Sequence
  Oligonucleotide primer for the detection of SNP TSC0013168
tagagtgtggta

SEQ ID NO: 287608 - DNA, 12 bp, Artificial Sequence
  Oligonucleotide primer for the detection of SNP TSC0013168
tagagcgtggta

SEQ ID NO: 287609 - DNA, 12 bp, Artificial Sequence
  Oligonucleotide primer for the detection of SNP TSC0013168
tagagtgcggta

SEQ ID NO: 287610 - DNA, 12 bp, Artificial Sequence
  Oligonucleotide primer for the detection of SNP TSC0013168
tagagcgcggta

SEQ ID NO: 287611 - DNA, 12 bp, Artificial Sequence
  Oligonucleotide primer for the detection of SNP TSC0013168
caaaacacaaca

SEQ ID NO: 287612 - DNA, 12 bp, Artificial Sequence
  Oligonucleotide primer for the detection of SNP TSC0013168
caaaacacgaca

SEQ ID NO: 287613 - DNA, 12 bp, Artificial Sequence
  Oligonucleotide primer for the detection of SNP TSC0013168
caaaacgcaaca

SEQ ID NO: 287614 - DNA, 12 bp, Artificial Sequence
  Oligonucleotide primer for the detection of SNP TSC0013168
caaaacgcgaca

SEQ ID NO: 287615 - DNA, 12 bp, Artificial Sequence
  Oligonucleotide primer for the detection of SNP TSC0013168
tattatgattgt

SEQ ID NO: 287616 - DNA, 12 bp, Artificial Sequence
  Oligonucleotide primer for the detection of SNP TSC0013168
tattatgatcgt

SEQ ID NO: 287617 - DNA, 12 bp, Artificial Sequence
  Oligonucleotide primer for the detection of SNP TSC0013169
acccaaaacaac

SEQ ID NO: 287618 - DNA, 12 bp, Artificial Sequence
  Oligonucleotide primer for the detection of SNP TSC0013169
tggtattttgag

SEQ ID NO: 287619 - DNA, 12 bp, Artificial Sequence
  Oligonucleotide primer for the detection of SNP TSC0013169
taacactctaaa

SEQ ID NO: 287620 - DNA, 12 bp, Artificial Sequence
  Oligonucleotide primer for the detection of SNP TSC0013169
gtttaagataat

SEQ ID NO: 287621 - DNA, 12 bp, Artificial Sequence
  Oligonucleotide primer for the detection of SNP TSC0013169
gtttaagataac

SEQ ID NO: 287622 - DNA, 12 bp, Artificial Sequence
  Oligonucleotide primer for the detection of SNP TSC0013170
aaaaatctacat

SEQ ID NO: 287623 - DNA, 12 bp, Artificial Sequence
  Oligonucleotide primer for the detection of SNP TSC0013170
tgatggttagag

SEQ ID NO: 287624 - DNA, 12 bp, Artificial Sequence
  Oligonucleotide primer for the detection of SNP TSC0013171
taactacataac

SEQ ID NO: 287625 - DNA, 12 bp, Artificial Sequence
  Oligonucleotide primer for the detection of SNP TSC0013171
aaaagagaaagg

SEQ ID NO: 287626 - DNA, 12 bp, Artificial Sequence
  Oligonucleotide primer for the detection of SNP TSC0013172
actaataaacct

SEQ ID NO: 287627 - DNA, 12 bp, Artificial Sequence
  Oligonucleotide primer for the detection of SNP TSC0013172
ttggttggatgt

SEQ ID NO: 287628 - DNA, 12 bp, Artificial Sequence
  Oligonucleotide primer for the detection of SNP TSC0013172
ttaactaaatac

SEQ ID NO: 287629 - DNA, 12 bp, Artificial Sequence
  Oligonucleotide primer for the detection of SNP TSC0013172
tggtgaattttt

SEQ ID NO: 287630 - DNA, 12 bp, Artificial Sequence
  Oligonucleotide primer for the detection of SNP TSC0013172
tggtgaattttc

SEQ ID NO: 287631 - DNA, 12 bp, Artificial Sequence
  Oligonucleotide primer for the detection of SNP TSC0013173
cctcattctatt

SEQ ID NO: 287632 - DNA, 12 bp, Artificial Sequence
  Oligonucleotide primer for the detection of SNP TSC0013174
ataaacaaaaaa

SEQ ID NO: 287633 - DNA, 12 bp, Artificial Sequence
  Oligonucleotide primer for the detection of SNP TSC0013175
acatatctctaa

SEQ ID NO: 287634 - DNA, 12 bp, Artificial Sequence
  Oligonucleotide primer for the detection of SNP TSC0013175
tactataaccct

SEQ ID NO: 287635 - DNA, 12 bp, Artificial Sequence
  Oligonucleotide primer for the detection of SNP TSC0013177
aataactcaata

SEQ ID NO: 287636 - DNA, 12 bp, Artificial Sequence
  Oligonucleotide primer for the detection of SNP TSC0013177
tttgattatatt

SEQ ID NO: 287637 - DNA, 12 bp, Artificial Sequence
  Oligonucleotide primer for the detection of SNP TSC0013177
tctaattatatt

SEQ ID NO: 287638 - DNA, 12 bp, Artificial Sequence
  Oligonucleotide primer for the detection of SNP TSC0013177
tggtggtttaat

SEQ ID NO: 287639 - DNA, 12 bp, Artificial Sequence
  Oligonucleotide primer for the detection of SNP TSC0013178
atggtggtttaa

SEQ ID NO: 287640 - DNA, 12 bp, Artificial Sequence
  Oligonucleotide primer for the detection of SNP TSC0013183
ttatattaccca

SEQ ID NO: 287641 - DNA, 12 bp, Artificial Sequence
  Oligonucleotide primer for the detection of SNP TSC0013183
ctacacttcaac

SEQ ID NO: 287642 - DNA, 12 bp, Artificial Sequence
  Oligonucleotide primer for the detection of SNP TSC0013183
gttgtgttgttt

SEQ ID NO: 287643 - DNA, 12 bp, Artificial Sequence
  Oligonucleotide primer for the detection of SNP TSC0013188
caaatacaaaac

SEQ ID NO: 287644 - DNA, 12 bp, Artificial Sequence
  Oligonucleotide primer for the detection of SNP TSC0013188
aggaagaggatg

SEQ ID NO: 287645 - DNA, 12 bp, Artificial Sequence
  Oligonucleotide primer for the detection of SNP TSC0013189
tttaaatttaaa

SEQ ID NO: 287646 - DNA, 12 bp, Artificial Sequence
  Oligonucleotide primer for the detection of SNP TSC0013189
tttgaaattttt

SEQ ID NO: 287647 - DNA, 12 bp, Artificial Sequence
  Oligonucleotide primer for the detection of SNP TSC0013189
tttgaaattttc

SEQ ID NO: 287648 - DNA, 12 bp, Artificial Sequence
  Oligonucleotide primer for the detection of SNP TSC0013189
tttgggtttgaa

SEQ ID NO: 287649 - DNA, 12 bp, Artificial Sequence
  Oligonucleotide primer for the detection of SNP TSC0013190
attttattaata

SEQ ID NO: 287650 - DNA, 12 bp, Artificial Sequence
  Oligonucleotide primer for the detection of SNP TSC0013190
aaattttttgtt

SEQ ID NO: 287651 - DNA, 12 bp, Artificial Sequence
  Oligonucleotide primer for the detection of SNP TSC0013190
gttttattaatg

SEQ ID NO: 287652 - DNA, 12 bp, Artificial Sequence
  Oligonucleotide primer for the detection of SNP TSC0013191
tatcttactcta

SEQ ID NO: 287653 - DNA, 12 bp, Artificial Sequence
  Oligonucleotide primer for the detection of SNP TSC0013191
gtatgttagttt

SEQ ID NO: 287654 - DNA, 12 bp, Artificial Sequence
  Oligonucleotide primer for the detection of SNP TSC0013191
acataccaacct

SEQ ID NO: 287655 - DNA, 12 bp, Artificial Sequence
  Oligonucleotide primer for the detection of SNP TSC0013191
tgttttgttttg

SEQ ID NO: 287656 - DNA, 12 bp, Artificial Sequence
  Oligonucleotide primer for the detection of SNP TSC0013192
taaacaaactat

SEQ ID NO: 287657 - DNA, 12 bp, Artificial Sequence
  Oligonucleotide primer for the detection of SNP TSC0013192
tgtagtggtata

SEQ ID NO: 287658 - DNA, 12 bp, Artificial Sequence
  Oligonucleotide primer for the detection of SNP TSC0013193
ttactttaatcc

SEQ ID NO: 287659 - DNA, 12 bp, Artificial Sequence
  Oligonucleotide primer for the detection of SNP TSC0013193
aagtaaaaatga

SEQ ID NO: 287660 - DNA, 12 bp, Artificial Sequence
  Oligonucleotide primer for the detection of SNP TSC0013193
ttattttaattt

SEQ ID NO: 287661 - DNA, 12 bp, Artificial Sequence
  Oligonucleotide primer for the detection of SNP TSC0013194
attatactttaa

SEQ ID NO: 287662 - DNA, 12 bp, Artificial Sequence
  Oligonucleotide primer for the detection of SNP TSC0013194
aaaaagggaaaa

SEQ ID NO: 287663 - DNA, 12 bp, Artificial Sequence
  Oligonucleotide primer for the detection of SNP TSC0013194
gttatgttttaa

SEQ ID NO: 287664 - DNA, 12 bp, Artificial Sequence
  Oligonucleotide primer for the detection of SNP TSC0013196
tacacacctaaa

SEQ ID NO: 287665 - DNA, 12 bp, Artificial Sequence
  Oligonucleotide primer for the detection of SNP TSC0013196
tacacgcctaaa

SEQ ID NO: 287666 - DNA, 12 bp, Artificial Sequence
  Oligonucleotide primer for the detection of SNP TSC0013196
ttttgggttaat

SEQ ID NO: 287667 - DNA, 12 bp, Artificial Sequence
  Oligonukleotid-Primer
ttttaaactaat

SEQ ID NO: 287668 - DNA, 12 bp, Artificial Sequence
  Oligonucleotide primer for the detection of SNP TSC0013196
attatacgttta

SEQ ID NO: 287669 - DNA, 12 bp, Artificial Sequence
  Oligonucleotide primer for the detection of SNP TSC0013197
ccaacaactaca

SEQ ID NO: 287670 - DNA, 12 bp, Artificial Sequence
  Oligonucleotide primer for the detection of SNP TSC0013197
gggttaatattt

SEQ ID NO: 287671 - DNA, 12 bp, Artificial Sequence
  Oligonucleotide primer for the detection of SNP TSC0013197
aaactaatacct

SEQ ID NO: 287672 - DNA, 12 bp, Artificial Sequence
  Oligonucleotide primer for the detection of SNP TSC0013197
ttagtaattata

SEQ ID NO: 287673 - DNA, 12 bp, Artificial Sequence
  Oligonucleotide primer for the detection of SNP TSC0013198
cttatatatacc

SEQ ID NO: 287674 - DNA, 12 bp, Artificial Sequence
  Oligonucleotide primer for the detection of SNP TSC0013198
aagatggtaata

SEQ ID NO: 287675 - DNA, 12 bp, Artificial Sequence
  Oligonucleotide primer for the detection of SNP TSC0013199
cctctactttat

SEQ ID NO: 287676 - DNA, 12 bp, Artificial Sequence
  Oligonucleotide primer for the detection of SNP TSC0013199
gtatggtagtaa

SEQ ID NO: 287677 - DNA, 12 bp, Artificial Sequence
  Oligonucleotide primer for the detection of SNP TSC0013200
aatactaataaa

SEQ ID NO: 287678 - DNA, 12 bp, Artificial Sequence
  Oligonucleotide primer for the detection of SNP TSC0013200
ggaatatataat

SEQ ID NO: 287679 - DNA, 12 bp, Artificial Sequence
  Oligonucleotide primer for the detection of SNP TSC0013200
aaaatatataat

SEQ ID NO: 287680 - DNA, 12 bp, Artificial Sequence
  Oligonucleotide primer for the detection of SNP TSC0013200
aaggtattaata

SEQ ID NO: 287681 - DNA, 12 bp, Artificial Sequence
  Oligonucleotide primer for the detection of SNP TSC0013201
tctataacttca

SEQ ID NO: 287682 - DNA, 12 bp, Artificial Sequence
  Oligonucleotide primer for the detection of SNP TSC0013201
gaaagaaaaggt

SEQ ID NO: 287683 - DNA, 12 bp, Artificial Sequence
  Oligonucleotide primer for the detection of SNP TSC0013204
cttcccacataa

SEQ ID NO: 287684 - DNA, 12 bp, Artificial Sequence
  Oligonucleotide primer for the detection of SNP TSC0013204
atttgtatgtgt

SEQ ID NO: 287685 - DNA, 12 bp, Artificial Sequence
  Oligonucleotide primer for the detection of SNP TSC0013204
cctacatatata

SEQ ID NO: 287686 - DNA, 12 bp, Artificial Sequence
  Oligonucleotide primer for the detection of SNP TSC0013204
tttttatatgat

SEQ ID NO: 287687 - DNA, 12 bp, Artificial Sequence
  Oligonucleotide primer for the detection of SNP TSC0013205
ctccaaaaaaac

SEQ ID NO: 287688 - DNA, 12 bp, Artificial Sequence
  Oligonucleotide primer for the detection of SNP TSC0013205
aatggggtttgg

SEQ ID NO: 287689 - DNA, 12 bp, Artificial Sequence
  Oligonucleotide primer for the detection of SNP TSC0013206
catccctaaaac

SEQ ID NO: 287690 - DNA, 12 bp, Artificial Sequence
  Oligonucleotide primer for the detection of SNP TSC0013206
cgtccctaaaac

SEQ ID NO: 287691 - DNA, 12 bp, Artificial Sequence
  Oligonucleotide primer for the detection of SNP TSC0013206
ggtgttttttgg

SEQ ID NO: 287692 - DNA, 12 bp, Artificial Sequence
  Oligonucleotide primer for the detection of SNP TSC0013206
ggcgttttttgg

SEQ ID NO: 287693 - DNA, 12 bp, Artificial Sequence
  Oligonucleotide primer for the detection of SNP TSC0013208
atataaagatta

SEQ ID NO: 287694 - DNA, 12 bp, Artificial Sequence
  Oligonucleotide primer for the detection of SNP TSC0013209
actaacaaatct

SEQ ID NO: 287695 - DNA, 12 bp, Artificial Sequence
  Oligonucleotide primer for the detection of SNP TSC0013209
gagttataaata

SEQ ID NO: 287696 - DNA, 12 bp, Artificial Sequence
  Oligonucleotide primer for the detection of SNP TSC0013211
ttattgtagttt

SEQ ID NO: 287697 - DNA, 12 bp, Artificial Sequence
  Oligonucleotide primer for the detection of SNP TSC0013211
tcactacaatct

SEQ ID NO: 287698 - DNA, 12 bp, Artificial Sequence
  Oligonucleotide primer for the detection of SNP TSC0013211
ttgaagtagata

SEQ ID NO: 287699 - DNA, 12 bp, Artificial Sequence
  Oligonucleotide primer for the detection of SNP TSC0013212
ccctctctattt

SEQ ID NO: 287700 - DNA, 12 bp, Artificial Sequence
  Oligonucleotide primer for the detection of SNP TSC0013212
agtggtgggggg

SEQ ID NO: 287701 - DNA, 12 bp, Artificial Sequence
  Oligonucleotide primer for the detection of SNP TSC0013214
caccaacataca

SEQ ID NO: 287702 - DNA, 12 bp, Artificial Sequence
  Oligonucleotide primer for the detection of SNP TSC0013214
caccgacataca

SEQ ID NO: 287703 - DNA, 12 bp, Artificial Sequence
  Oligonucleotide primer for the detection of SNP TSC0013214
tggaaagtgttt

SEQ ID NO: 287704 - DNA, 12 bp, Artificial Sequence
  Oligonucleotide primer for the detection of SNP TSC0013214
taaaaaatatcc

SEQ ID NO: 287705 - DNA, 12 bp, Artificial Sequence
  Oligonucleotide primer for the detection of SNP TSC0013214
tattgatatgta

SEQ ID NO: 287706 - DNA, 12 bp, Artificial Sequence
  Oligonucleotide primer for the detection of SNP TSC0013214
tatcgatatgta

SEQ ID NO: 287707 - DNA, 12 bp, Artificial Sequence
  Oligonucleotide primer for the detection of SNP TSC0013215
tttaccttttac

SEQ ID NO: 287708 - DNA, 12 bp, Artificial Sequence
  Oligonucleotide primer for the detection of SNP TSC0013215
aaatttggtttg

SEQ ID NO: 287709 - DNA, 12 bp, Artificial Sequence
  Oligonucleotide primer for the detection of SNP TSC0013216
taaaaaaaaatt

SEQ ID NO: 287710 - DNA, 12 bp, Artificial Sequence
  Oligonucleotide primer for the detection of SNP TSC0013216
ataatattatag

SEQ ID NO: 287711 - DNA, 12 bp, Artificial Sequence
  Oligonucleotide primer for the detection of SNP TSC0013217
ctaacattaaac

SEQ ID NO: 287712 - DNA, 12 bp, Artificial Sequence
  Oligonucleotide primer for the detection of SNP TSC0013217
agtattaagaga

SEQ ID NO: 287713 - DNA, 12 bp, Artificial Sequence
  Oligonucleotide primer for the detection of SNP TSC0013217
aatactaaaaaa

SEQ ID NO: 287714 - DNA, 12 bp, Artificial Sequence
  Oligonucleotide primer for the detection of SNP TSC0013217
ttggtattgggt

SEQ ID NO: 287715 - DNA, 12 bp, Artificial Sequence
  Oligonucleotide primer for the detection of SNP TSC0013218
cccaaaaatcca

SEQ ID NO: 287716 - DNA, 12 bp, Artificial Sequence
  Oligonucleotide primer for the detection of SNP TSC0013218
attttaggggtt

SEQ ID NO: 287717 - DNA, 12 bp, Artificial Sequence
  Oligonucleotide primer for the detection of SNP TSC0013218
tccaaaaactaa

SEQ ID NO: 287718 - DNA, 12 bp, Artificial Sequence
  Oligonucleotide primer for the detection of SNP TSC0013218
ttttaggggttt

SEQ ID NO: 287719 - DNA, 12 bp, Artificial Sequence
  Oligonucleotide primer for the detection of SNP TSC0013219
ctccacctatct

SEQ ID NO: 287720 - DNA, 12 bp, Artificial Sequence
  Oligonucleotide primer for the detection of SNP TSC0013219
ggataattgaag

SEQ ID NO: 287721 - DNA, 12 bp, Artificial Sequence
  Oligonucleotide primer for the detection of SNP TSC0013220
tgtttcgttttt

SEQ ID NO: 287722 - DNA, 12 bp, Artificial Sequence
  Oligonucleotide primer for the detection of SNP TSC0013220
tatcccatcttt

SEQ ID NO: 287723 - DNA, 12 bp, Artificial Sequence
  Oligonucleotide primer for the detection of SNP TSC0013220
tatcccgtcttt

SEQ ID NO: 287724 - DNA, 12 bp, Artificial Sequence
  Oligonucleotide primer for the detection of SNP TSC0013220
gtagttttgttg

SEQ ID NO: 287725 - DNA, 12 bp, Artificial Sequence
  Oligonucleotide primer for the detection of SNP TSC0013221
ttaataaacacc

SEQ ID NO: 287726 - DNA, 12 bp, Artificial Sequence
  Oligonucleotide primer for the detection of SNP TSC0013221
gaggtaaattag

SEQ ID NO: 287727 - DNA, 12 bp, Artificial Sequence
  Oligonucleotide primer for the detection of SNP TSC0013222
attactcttttc

SEQ ID NO: 287728 - DNA, 12 bp, Artificial Sequence
  Oligonucleotide primer for the detection of SNP TSC0013222
tggaaagtggaa

SEQ ID NO: 287729 - DNA, 12 bp, Artificial Sequence
  Oligonucleotide primer for the detection of SNP TSC0013223
gtttgttatagg

SEQ ID NO: 287730 - DNA, 12 bp, Artificial Sequence
  Oligonucleotide primer for the detection of SNP TSC0013226
cataaaaaaacc

SEQ ID NO: 287731 - DNA, 12 bp, Artificial Sequence
  Oligonucleotide primer for the detection of SNP TSC0013226
ggtaggaaggtt

SEQ ID NO: 287732 - DNA, 12 bp, Artificial Sequence
  Oligonucleotide primer for the detection of SNP TSC0013226
ggtaggaaggtc

SEQ ID NO: 287733 - DNA, 12 bp, Artificial Sequence
  Oligonucleotide primer for the detection of SNP TSC0013226
aacaaaaaaacc

SEQ ID NO: 287734 - DNA, 12 bp, Artificial Sequence
  Oligonucleotide primer for the detection of SNP TSC0013226
tatggaaggatt

SEQ ID NO: 287735 - DNA, 12 bp, Artificial Sequence
  Oligonucleotide primer for the detection of SNP TSC0013226
tatggaaggatc

SEQ ID NO: 287736 - DNA, 12 bp, Artificial Sequence
  Oligonucleotide primer for the detection of SNP TSC0013227
tacataaaaaaa

SEQ ID NO: 287737 - DNA, 12 bp, Artificial Sequence
  Oligonucleotide primer for the detection of SNP TSC0013227
taggaaggtttg

SEQ ID NO: 287738 - DNA, 12 bp, Artificial Sequence
  Oligonucleotide primer for the detection of SNP TSC0013227
taggaaggttcg

SEQ ID NO: 287739 - DNA, 12 bp, Artificial Sequence
  Oligonucleotide primer for the detection of SNP TSC0013227
caaaaaaaccca

SEQ ID NO: 287740 - DNA, 12 bp, Artificial Sequence
  Oligonucleotide primer for the detection of SNP TSC0013227
caaaaaaacccg

SEQ ID NO: 287741 - DNA, 12 bp, Artificial Sequence
  Oligonucleotide primer for the detection of SNP TSC0013227
tgtatggaagga

SEQ ID NO: 287742 - DNA, 12 bp, Artificial Sequence
  Oligonucleotide primer for the detection of SNP TSC0013228
acacaaaaaccc

SEQ ID NO: 287743 - DNA, 12 bp, Artificial Sequence
  Oligonucleotide primer for the detection of SNP TSC0013228
gattttttgaag

SEQ ID NO: 287744 - DNA, 12 bp, Artificial Sequence
  Oligonucleotide primer for the detection of SNP TSC0013228
aacttcctaaaa

SEQ ID NO: 287745 - DNA, 12 bp, Artificial Sequence
  Oligonucleotide primer for the detection of SNP TSC0013228
atataggggttt

SEQ ID NO: 287746 - DNA, 12 bp, Artificial Sequence
  Oligonucleotide primer for the detection of SNP TSC0013231
aacctctccaac

SEQ ID NO: 287747 - DNA, 12 bp, Artificial Sequence
  Oligonucleotide primer for the detection of SNP TSC0013231
aacctctccgac

SEQ ID NO: 287748 - DNA, 12 bp, Artificial Sequence
  Oligonucleotide primer for the detection of SNP TSC0013231
gagttgtttaga

SEQ ID NO: 287749 - DNA, 12 bp, Artificial Sequence
  Oligonucleotide primer for the detection of SNP TSC0013231
aaactattcaaa

SEQ ID NO: 287750 - DNA, 12 bp, Artificial Sequence
  Oligonucleotide primer for the detection of SNP TSC0013231
aatttttttggt

SEQ ID NO: 287751 - DNA, 12 bp, Artificial Sequence
  Oligonucleotide primer for the detection of SNP TSC0013231
aattttttcggt

SEQ ID NO: 287752 - DNA, 12 bp, Artificial Sequence
  Oligonucleotide primer for the detection of SNP TSC0013232
ccaaaacttccc

SEQ ID NO: 287753 - DNA, 12 bp, Artificial Sequence
  Oligonucleotide primer for the detection of SNP TSC0013232
tgggttagggta

SEQ ID NO: 287754 - DNA, 12 bp, Artificial Sequence
  Oligonucleotide primer for the detection of SNP TSC0013232
cgggttagggta

SEQ ID NO: 287755 - DNA, 12 bp, Artificial Sequence
  Oligonucleotide primer for the detection of SNP TSC0013235
ttctcccaaaac

SEQ ID NO: 287756 - DNA, 12 bp, Artificial Sequence
  Oligonucleotide primer for the detection of SNP TSC0013235
gttataagtata

SEQ ID NO: 287757 - DNA, 12 bp, Artificial Sequence
  Oligonucleotide primer for the detection of SNP TSC0013236
cctttaatctcc

SEQ ID NO: 287758 - DNA, 12 bp, Artificial Sequence
  Oligonucleotide primer for the detection of SNP TSC0013236
tgttggattagg

SEQ ID NO: 287759 - DNA, 12 bp, Artificial Sequence
  Oligonucleotide primer for the detection of SNP TSC0013237
aataatttactc

SEQ ID NO: 287760 - DNA, 12 bp, Artificial Sequence
  Oligonucleotide primer for the detection of SNP TSC0013237
agtagtattgtg

SEQ ID NO: 287761 - DNA, 12 bp, Artificial Sequence
  Oligonucleotide primer for the detection of SNP TSC0013238
tacttaaaattc

SEQ ID NO: 287762 - DNA, 12 bp, Artificial Sequence
  Oligonucleotide primer for the detection of SNP TSC0013238
taagtgaagtga

SEQ ID NO: 287763 - DNA, 12 bp, Artificial Sequence
  Oligonucleotide primer for the detection of SNP TSC0013239
agttttattttg

SEQ ID NO: 287764 - DNA, 12 bp, Artificial Sequence
  Oligonucleotide primer for the detection of SNP TSC0013241
tatatttattat

SEQ ID NO: 287765 - DNA, 12 bp, Artificial Sequence
  Oligonucleotide primer for the detection of SNP TSC0013241
tacttattataa

SEQ ID NO: 287766 - DNA, 12 bp, Artificial Sequence
  Oligonucleotide primer for the detection of SNP TSC0013242
tcactacaacct

SEQ ID NO: 287767 - DNA, 12 bp, Artificial Sequence
  Oligonucleotide primer for the detection of SNP TSC0013242
taaatttagatg

SEQ ID NO: 287768 - DNA, 12 bp, Artificial Sequence
  Oligonucleotide primer for the detection of SNP TSC0013242
taaactcaaata

SEQ ID NO: 287769 - DNA, 12 bp, Artificial Sequence
  Oligonucleotide primer for the detection of SNP TSC0013243
tttgttatttta

SEQ ID NO: 287770 - DNA, 12 bp, Artificial Sequence
  Oligonucleotide primer for the detection of SNP TSC0013244
atacttttattt

SEQ ID NO: 287771 - DNA, 12 bp, Artificial Sequence
  Oligonucleotide primer for the detection of SNP TSC0013244
gttgttttaaaa

SEQ ID NO: 287772 - DNA, 12 bp, Artificial Sequence
  Oligonucleotide primer for the detection of SNP TSC0013245
atttcaatctct

SEQ ID NO: 287773 - DNA, 12 bp, Artificial Sequence
  Oligonucleotide primer for the detection of SNP TSC0013245
ataaatagaaaa

SEQ ID NO: 287774 - DNA, 12 bp, Artificial Sequence
  Oligonucleotide primer for the detection of SNP TSC0013246
aaaataacgaaa

SEQ ID NO: 287775 - DNA, 12 bp, Artificial Sequence
  Oligonucleotide primer for the detection of SNP TSC0013246
agagattgaaat

SEQ ID NO: 287776 - DNA, 12 bp, Artificial Sequence
  Oligonucleotide primer for the detection of SNP TSC0013246
aagataatgggg

SEQ ID NO: 287777 - DNA, 12 bp, Artificial Sequence
  Oligonucleotide primer for the detection of SNP TSC0013246
aagataacgggg

SEQ ID NO: 287778 - DNA, 12 bp, Artificial Sequence
  Oligonucleotide primer for the detection of SNP TSC0013247
ttatacaaaaaa

SEQ ID NO: 287779 - DNA, 12 bp, Artificial Sequence
  Oligonucleotide primer for the detection of SNP TSC0013247
tttttattatat

SEQ ID NO: 287780 - DNA, 12 bp, Artificial Sequence
  Oligonukleotid-Primer
ttcttatcatac

SEQ ID NO: 287781 - DNA, 12 bp, Artificial Sequence
  Oligonucleotide primer for the detection of SNP TSC0013247
ttatgtaggagg

SEQ ID NO: 287782 - DNA, 12 bp, Artificial Sequence
  Oligonucleotide primer for the detection of SNP TSC0013248
cctatcattccc

SEQ ID NO: 287783 - DNA, 12 bp, Artificial Sequence
  Oligonucleotide primer for the detection of SNP TSC0013248
ttttttgtggaa

SEQ ID NO: 287784 - DNA, 12 bp, Artificial Sequence
  Oligonukleotid-Primer
tttctttctttt

SEQ ID NO: 287785 - DNA, 12 bp, Artificial Sequence
  Oligonucleotide primer for the detection of SNP TSC0013251
taagtgattttg

SEQ ID NO: 287786 - DNA, 12 bp, Artificial Sequence
  Oligonucleotide primer for the detection of SNP TSC0013251
caaataatccta

SEQ ID NO: 287787 - DNA, 12 bp, Artificial Sequence
  Oligonucleotide primer for the detection of SNP TSC0013252
actccaatatcc

SEQ ID NO: 287788 - DNA, 12 bp, Artificial Sequence
  Oligonukleotid-Primer
tatatagttaga

SEQ ID NO: 287789 - DNA, 12 bp, Artificial Sequence
  Oligonucleotide primer for the detection of SNP TSC0013253
taaaaaactatt

SEQ ID NO: 287790 - DNA, 12 bp, Artificial Sequence
  Oligonucleotide primer for the detection of SNP TSC0013253
tttaataattta

SEQ ID NO: 287791 - DNA, 12 bp, Artificial Sequence
  Oligonucleotide primer for the detection of SNP TSC0013254
ctaacctcacaa

SEQ ID NO: 287792 - DNA, 12 bp, Artificial Sequence
  Oligonukleotid-Primer
ctaacctcacga

SEQ ID NO: 287793 - DNA, 12 bp, Artificial Sequence
  Oligonucleotide primer for the detection of SNP TSC0013254
ctaacctcgcaa

SEQ ID NO: 287794 - DNA, 12 bp, Artificial Sequence
  Oligonucleotide primer for the detection of SNP TSC0013254
ctaacctcgcga

SEQ ID NO: 287795 - DNA, 12 bp, Artificial Sequence
  Oligonucleotide primer for the detection of SNP TSC0013254
tttttatttatt

SEQ ID NO: 287796 - DNA, 12 bp, Artificial Sequence
  Oligonucleotide primer for the detection of SNP TSC0013254
tttttatttatc

SEQ ID NO: 287797 - DNA, 12 bp, Artificial Sequence
  Oligonucleotide primer for the detection of SNP TSC0013254
tcctactcacca

SEQ ID NO: 287798 - DNA, 12 bp, Artificial Sequence
  Oligonucleotide primer for the detection of SNP TSC0013254
tcctactcaccg

SEQ ID NO: 287799 - DNA, 12 bp, Artificial Sequence
  Oligonucleotide primer for the detection of SNP TSC0013254
ttagttttgtgg

SEQ ID NO: 287800 - DNA, 12 bp, Artificial Sequence
  Oligonucleotide primer for the detection of SNP TSC0013254
ttagtttcgtgg

SEQ ID NO: 287801 - DNA, 12 bp, Artificial Sequence
  Oligonucleotide primer for the detection of SNP TSC0013254
ttagttttgcgg

SEQ ID NO: 287802 - DNA, 12 bp, Artificial Sequence
  Oligonucleotide primer for the detection of SNP TSC0013254
ttagtttcgcgg

SEQ ID NO: 287803 - DNA, 12 bp, Artificial Sequence
  Oligonucleotide primer for the detection of SNP TSC0013256
gagtttttattt

SEQ ID NO: 287804 - DNA, 12 bp, Artificial Sequence
  Oligonucleotide primer for the detection of SNP TSC0013256
ataaattttcac

SEQ ID NO: 287805 - DNA, 12 bp, Artificial Sequence
  Oligonucleotide primer for the detection of SNP TSC0013256
tatttatgaagt

SEQ ID NO: 287806 - DNA, 12 bp, Artificial Sequence
  Oligonucleotide primer for the detection of SNP TSC0013257
taatacttaaaa

SEQ ID NO: 287807 - DNA, 12 bp, Artificial Sequence
  Oligonucleotide primer for the detection of SNP TSC0013257
atagtaggttat

SEQ ID NO: 287808 - DNA, 12 bp, Artificial Sequence
  Oligonucleotide primer for the detection of SNP TSC0013257
acaataaatcac

SEQ ID NO: 287809 - DNA, 12 bp, Artificial Sequence
  Oligonucleotide primer for the detection of SNP TSC0013257
taatatttagga

SEQ ID NO: 287810 - DNA, 12 bp, Artificial Sequence
  Oligonucleotide primer for the detection of SNP TSC0013258
aactaacaaacc

SEQ ID NO: 287811 - DNA, 12 bp, Artificial Sequence
  Oligonucleotide primer for the detection of SNP TSC0013258
ttttagtatttg

SEQ ID NO: 287812 - DNA, 12 bp, Artificial Sequence
  Oligonucleotide primer for the detection of SNP TSC0013258
ctttaacattta

SEQ ID NO: 287813 - DNA, 12 bp, Artificial Sequence
  Oligonucleotide primer for the detection of SNP TSC0013258
gattaataggtt

SEQ ID NO: 287814 - DNA, 12 bp, Artificial Sequence
  Oligonucleotide primer for the detection of SNP TSC0013259
ctaaaataactt

SEQ ID NO: 287815 - DNA, 12 bp, Artificial Sequence
  Oligonucleotide primer for the detection of SNP TSC0013259
tatttttaaagg

SEQ ID NO: 287816 - DNA, 12 bp, Artificial Sequence
  Oligonucleotide primer for the detection of SNP TSC0013262
taactccctaac

SEQ ID NO: 287817 - DNA, 12 bp, Artificial Sequence
  Oligonucleotide primer for the detection of SNP TSC0013262
ggtaggggtgag

SEQ ID NO: 287818 - DNA, 12 bp, Artificial Sequence
  Oligonucleotide primer for the detection of SNP TSC0013263
gaggttaggaga

SEQ ID NO: 287819 - DNA, 12 bp, Artificial Sequence
  Oligonucleotide primer for the detection of SNP TSC0013264
ttaaaaaaatcc

SEQ ID NO: 287820 - DNA, 12 bp, Artificial Sequence
  Oligonucleotide primer for the detection of SNP TSC0013264
taggtgtttaga

SEQ ID NO: 287821 - DNA, 12 bp, Artificial Sequence
  Oligonucleotide primer for the detection of SNP TSC0013265
cctaaaacaaaa

SEQ ID NO: 287822 - DNA, 12 bp, Artificial Sequence
  Oligonucleotide primer for the detection of SNP TSC0013265
tatgatagttgt

SEQ ID NO: 287823 - DNA, 12 bp, Artificial Sequence
  Oligonucleotide primer for the detection of SNP TSC0013265
tatgatagttgc

SEQ ID NO: 287824 - DNA, 12 bp, Artificial Sequence
  Oligonucleotide primer for the detection of SNP TSC0013265
ataacaactaca

SEQ ID NO: 287825 - DNA, 12 bp, Artificial Sequence
  Oligonucleotide primer for the detection of SNP TSC0013265
ataacaactacg

SEQ ID NO: 287826 - DNA, 12 bp, Artificial Sequence
  Oligonucleotide primer for the detection of SNP TSC0013267
tactattatttt

SEQ ID NO: 287827 - DNA, 12 bp, Artificial Sequence
  Oligonucleotide primer for the detection of SNP TSC0013269
catatttactct

SEQ ID NO: 287828 - DNA, 12 bp, Artificial Sequence
  Oligonucleotide primer for the detection of SNP TSC0013269
cgtatttactct

SEQ ID NO: 287829 - DNA, 12 bp, Artificial Sequence
  Oligonucleotide primer for the detection of SNP TSC0013269
ttttggttagga

SEQ ID NO: 287830 - DNA, 12 bp, Artificial Sequence
  Oligonucleotide primer for the detection of SNP TSC0013270
aatctaaattac

SEQ ID NO: 287831 - DNA, 12 bp, Artificial Sequence
  Oligonucleotide primer for the detection of SNP TSC0013270
tatttggaaaga

SEQ ID NO: 287832 - DNA, 12 bp, Artificial Sequence
  Oligonucleotide primer for the detection of SNP TSC0013271
aaaaaccttaca

SEQ ID NO: 287833 - DNA, 12 bp, Artificial Sequence
  Oligonucleotide primer for the detection of SNP TSC0013271
gttgtatgtgtt

SEQ ID NO: 287834 - DNA, 12 bp, Artificial Sequence
  Oligonucleotide primer for the detection of SNP TSC0013271
gtcgtatgtgtt

SEQ ID NO: 287835 - DNA, 12 bp, Artificial Sequence
  Oligonucleotide primer for the detection of SNP TSC0013271
aaaccatatata

SEQ ID NO: 287836 - DNA, 12 bp, Artificial Sequence
  Oligonucleotide primer for the detection of SNP TSC0013271
aaaccgtatata

SEQ ID NO: 287837 - DNA, 12 bp, Artificial Sequence
  Oligonucleotide primer for the detection of SNP TSC0013271
aaaaaattttat

SEQ ID NO: 287838 - DNA, 12 bp, Artificial Sequence
  Oligonucleotide primer for the detection of SNP TSC0013272
ctaataaaaaaa

SEQ ID NO: 287839 - DNA, 12 bp, Artificial Sequence
  Oligonucleotide primer for the detection of SNP TSC0013272
tgggtattttat

SEQ ID NO: 287840 - DNA, 12 bp, Artificial Sequence
  Oligonucleotide primer for the detection of SNP TSC0013272
tgggtattttac

SEQ ID NO: 287841 - DNA, 12 bp, Artificial Sequence
  Oligonucleotide primer for the detection of SNP TSC0013272
taaatatcccac

SEQ ID NO: 287842 - DNA, 12 bp, Artificial Sequence
  Oligonucleotide primer for the detection of SNP TSC0013272
ttttgatggaag

SEQ ID NO: 287843 - DNA, 12 bp, Artificial Sequence
  Oligonucleotide primer for the detection of SNP TSC0013273
caaaatttaata

SEQ ID NO: 287844 - DNA, 12 bp, Artificial Sequence
  Oligonucleotide primer for the detection of SNP TSC0013273
tgggttgttggt

SEQ ID NO: 287845 - DNA, 12 bp, Artificial Sequence
  Oligonucleotide primer for the detection of SNP TSC0013273
taaactattaat

SEQ ID NO: 287846 - DNA, 12 bp, Artificial Sequence
  Oligonucleotide primer for the detection of SNP TSC0013273
tagagtttaatg

SEQ ID NO: 287847 - DNA, 12 bp, Artificial Sequence
  Oligonucleotide primer for the detection of SNP TSC0013274
tacaaaaaactt

SEQ ID NO: 287848 - DNA, 12 bp, Artificial Sequence
  Oligonucleotide primer for the detection of SNP TSC0013274
tacgaaaaactt

SEQ ID NO: 287849 - DNA, 12 bp, Artificial Sequence
  Oligonucleotide primer for the detection of SNP TSC0013274
ttttagaattaa

SEQ ID NO: 287850 - DNA, 12 bp, Artificial Sequence
  Oligonucleotide primer for the detection of SNP TSC0013275
ttcttccaaact

SEQ ID NO: 287851 - DNA, 12 bp, Artificial Sequence
  Oligonucleotide primer for the detection of SNP TSC0013275
gaaaaatggatt

SEQ ID NO: 287852 - DNA, 12 bp, Artificial Sequence
  Oligonucleotide primer for the detection of SNP TSC0013275
ttttttaggttc

SEQ ID NO: 287853 - DNA, 12 bp, Artificial Sequence
  Oligonucleotide primer for the detection of SNP TSC0013276
aattaatcacta

SEQ ID NO: 287854 - DNA, 12 bp, Artificial Sequence
  Oligonucleotide primer for the detection of SNP TSC0013276
agtgataggttg

SEQ ID NO: 287855 - DNA, 12 bp, Artificial Sequence
  Oligonucleotide primer for the detection of SNP TSC0013276
aataacaaatta

SEQ ID NO: 287856 - DNA, 12 bp, Artificial Sequence
  Oligonucleotide primer for the detection of SNP TSC0013276
taattaattatt

SEQ ID NO: 287857 - DNA, 12 bp, Artificial Sequence
  Oligonucleotide primer for the detection of SNP TSC0013277
tttttttattgg

SEQ ID NO: 287858 - DNA, 12 bp, Artificial Sequence
  Oligonucleotide primer for the detection of SNP TSC0013281
ctaatttttttt

SEQ ID NO: 287859 - DNA, 12 bp, Artificial Sequence
  Oligonucleotide primer for the detection of SNP TSC0013281
ttaataaaaatt

SEQ ID NO: 287860 - DNA, 12 bp, Artificial Sequence
  Oligonucleotide primer for the detection of SNP TSC0013281
ctaataaaaatt

SEQ ID NO: 287861 - DNA, 12 bp, Artificial Sequence
  Oligonucleotide primer for the detection of SNP TSC0013282
aattacaaatac

SEQ ID NO: 287862 - DNA, 12 bp, Artificial Sequence
  Oligonucleotide primer for the detection of SNP TSC0013282
aggtgtggtgtt

SEQ ID NO: 287863 - DNA, 12 bp, Artificial Sequence
  Oligonucleotide primer for the detection of SNP TSC0013282
aatataatacca

SEQ ID NO: 287864 - DNA, 12 bp, Artificial Sequence
  Oligonucleotide primer for the detection of SNP TSC0013282
gattataggtgt

SEQ ID NO: 287865 - DNA, 12 bp, Artificial Sequence
  Oligonucleotide primer for the detection of SNP TSC0013284
gtgtttggtata

SEQ ID NO: 287866 - DNA, 12 bp, Artificial Sequence
  Oligonucleotide primer for the detection of SNP TSC0013284
gtgttcggtata

SEQ ID NO: 287867 - DNA, 12 bp, Artificial Sequence
  Oligonucleotide primer for the detection of SNP TSC0013284
atactcaacata

SEQ ID NO: 287868 - DNA, 12 bp, Artificial Sequence
  Oligonucleotide primer for the detection of SNP TSC0013284
atactcgacata

SEQ ID NO: 287869 - DNA, 12 bp, Artificial Sequence
  Oligonucleotide primer for the detection of SNP TSC0013284
tttagaaaaggg

SEQ ID NO: 287870 - DNA, 12 bp, Artificial Sequence
  Oligonucleotide primer for the detection of SNP TSC0013288
acccaataactc

SEQ ID NO: 287871 - DNA, 12 bp, Artificial Sequence
  Oligonucleotide primer for the detection of SNP TSC0013288
gtttagtggttt

SEQ ID NO: 287872 - DNA, 12 bp, Artificial Sequence
  Oligonucleotide primer for the detection of SNP TSC0013289
aatacaatttta

SEQ ID NO: 287873 - DNA, 12 bp, Artificial Sequence
  Oligonukleotid-Primer
tgaaaaggaggt

SEQ ID NO: 287874 - DNA, 12 bp, Artificial Sequence
  Oligonucleotide primer for the detection of SNP TSC0013289
aatataattttg

SEQ ID NO: 287875 - DNA, 12 bp, Artificial Sequence
  Oligonucleotide primer for the detection of SNP TSC0013290
ctcaactatatt

SEQ ID NO: 287876 - DNA, 12 bp, Artificial Sequence
  Oligonucleotide primer for the detection of SNP TSC0013290
ttttataaataa

SEQ ID NO: 287877 - DNA, 12 bp, Artificial Sequence
  Oligonucleotide primer for the detection of SNP TSC0013290
ctttacaaacaa

SEQ ID NO: 287878 - DNA, 12 bp, Artificial Sequence
  Oligonucleotide primer for the detection of SNP TSC0013290
tttaattgtatt

SEQ ID NO: 287879 - DNA, 12 bp, Artificial Sequence
  Oligonucleotide primer for the detection of SNP TSC0013291
cattataaattc

SEQ ID NO: 287880 - DNA, 12 bp, Artificial Sequence
  Oligonucleotide primer for the detection of SNP TSC0013291
aaaattttagaa

SEQ ID NO: 287881 - DNA, 12 bp, Artificial Sequence
  Oligonucleotide primer for the detection of SNP TSC0013293
tatccacatttc

SEQ ID NO: 287882 - DNA, 12 bp, Artificial Sequence
  Oligonucleotide primer for the detection of SNP TSC0013293
ggttgtttgtta

SEQ ID NO: 287883 - DNA, 12 bp, Artificial Sequence
  Oligonucleotide primer for the detection of SNP TSC0013294
caaaaactcaac

SEQ ID NO: 287884 - DNA, 12 bp, Artificial Sequence
  Oligonucleotide primer for the detection of SNP TSC0013294
ttgttaagagta

SEQ ID NO: 287885 - DNA, 12 bp, Artificial Sequence
  Oligonucleotide primer for the detection of SNP TSC0013294
ctactaaaaaca

SEQ ID NO: 287886 - DNA, 12 bp, Artificial Sequence
  Oligonucleotide primer for the detection of SNP TSC0013294
taaggatttagt

SEQ ID NO: 287887 - DNA, 12 bp, Artificial Sequence
  Oligonucleotide primer for the detection of SNP TSC0013295
agatgttgagtg

SEQ ID NO: 287888 - DNA, 12 bp, Artificial Sequence
  Oligonucleotide primer for the detection of SNP TSC0013295
agacgttgagtg

SEQ ID NO: 287889 - DNA, 12 bp, Artificial Sequence
  Oligonucleotide primer for the detection of SNP TSC0013296
tttaatacctac

SEQ ID NO: 287890 - DNA, 12 bp, Artificial Sequence
  Oligonucleotide primer for the detection of SNP TSC0013296
gttttagtatag

SEQ ID NO: 287891 - DNA, 12 bp, Artificial Sequence
  Oligonucleotide primer for the detection of SNP TSC0013297
ttttgaatattt

SEQ ID NO: 287892 - DNA, 12 bp, Artificial Sequence
  Oligonucleotide primer for the detection of SNP TSC0013297
cctaaacaccca

SEQ ID NO: 287893 - DNA, 12 bp, Artificial Sequence
  Oligonucleotide primer for the detection of SNP TSC0013297
gtaaggaagatg

SEQ ID NO: 287894 - DNA, 12 bp, Artificial Sequence
  Oligonucleotide primer for the detection of SNP TSC0013298
aaacccaaactc

SEQ ID NO: 287895 - DNA, 12 bp, Artificial Sequence
  Oligonucleotide primer for the detection of SNP TSC0013298
attttttttgta

SEQ ID NO: 287896 - DNA, 12 bp, Artificial Sequence
  Oligonucleotide primer for the detection of SNP TSC0013298
atcttccttaca

SEQ ID NO: 287897 - DNA, 12 bp, Artificial Sequence
  Oligonucleotide primer for the detection of SNP TSC0013298
aagtttaaattt

SEQ ID NO: 287898 - DNA, 12 bp, Artificial Sequence
  Oligonucleotide primer for the detection of SNP TSC0013299
aactatttttat

SEQ ID NO: 287899 - DNA, 12 bp, Artificial Sequence
  Oligonucleotide primer for the detection of SNP TSC0013299
agattaaataaa

SEQ ID NO: 287900 - DNA, 12 bp, Artificial Sequence
  Oligonucleotide primer for the detection of SNP TSC0013301
actactaccaaa

SEQ ID NO: 287901 - DNA, 12 bp, Artificial Sequence
  Oligonucleotide primer for the detection of SNP TSC0013301
aatttttgttat

SEQ ID NO: 287902 - DNA, 12 bp, Artificial Sequence
  Oligonucleotide primer for the detection of SNP TSC0013301
atttctaccata

SEQ ID NO: 287903 - DNA, 12 bp, Artificial Sequence
  Oligonucleotide primer for the detection of SNP TSC0013301
gttgttgttaaa

SEQ ID NO: 287904 - DNA, 12 bp, Artificial Sequence
  Oligonucleotide primer for the detection of SNP TSC0013302
tttcttttcttt

SEQ ID NO: 287905 - DNA, 12 bp, Artificial Sequence
  Oligonucleotide primer for the detection of SNP TSC0013304
ttgaggtttgga

SEQ ID NO: 287906 - DNA, 12 bp, Artificial Sequence
  Oligonucleotide primer for the detection of SNP TSC0013304
ttaaaatctaaa

SEQ ID NO: 287907 - DNA, 12 bp, Artificial Sequence
  Oligonucleotide primer for the detection of SNP TSC0013304
agaaaggagttt

SEQ ID NO: 287908 - DNA, 12 bp, Artificial Sequence
  Oligonucleotide primer for the detection of SNP TSC0013306
atttaaccttat

SEQ ID NO: 287909 - DNA, 12 bp, Artificial Sequence
  Oligonucleotide primer for the detection of SNP TSC0013306
attagtatgtat

SEQ ID NO: 287910 - DNA, 12 bp, Artificial Sequence
  Oligonucleotide primer for the detection of SNP TSC0013306
attagtacgtat

SEQ ID NO: 287911 - DNA, 12 bp, Artificial Sequence
  Oligonucleotide primer for the detection of SNP TSC0013306
aactaatacaca

SEQ ID NO: 287912 - DNA, 12 bp, Artificial Sequence
  Oligonucleotide primer for the detection of SNP TSC0013306
aactaatacgca

SEQ ID NO: 287913 - DNA, 12 bp, Artificial Sequence
  Oligonucleotide primer for the detection of SNP TSC0013306
atttaattttgt

SEQ ID NO: 287914 - DNA, 12 bp, Artificial Sequence
  Oligonucleotide primer for the detection of SNP TSC0013307
ataatataatct

SEQ ID NO: 287915 - DNA, 12 bp, Artificial Sequence
  Oligonucleotide primer for the detection of SNP TSC0013307
tttgtaatttgg

SEQ ID NO: 287916 - DNA, 12 bp, Artificial Sequence
  Oligonucleotide primer for the detection of SNP TSC0013309
taaattaactat

SEQ ID NO: 287917 - DNA, 12 bp, Artificial Sequence
  Oligonucleotide primer for the detection of SNP TSC0013309
tatgtaaaagaa

SEQ ID NO: 287918 - DNA, 12 bp, Artificial Sequence
  Oligonucleotide primer for the detection of SNP TSC0013310
acacctatcttt

SEQ ID NO: 287919 - DNA, 12 bp, Artificial Sequence
  Oligonucleotide primer for the detection of SNP TSC0013310
ttataaggtatg

SEQ ID NO: 287920 - DNA, 12 bp, Artificial Sequence
  Oligonucleotide primer for the detection of SNP TSC0013311
gtaagtatgttg

SEQ ID NO: 287921 - DNA, 12 bp, Artificial Sequence
  Oligonucleotide primer for the detection of SNP TSC0013311
gtaagtacgttg

SEQ ID NO: 287922 - DNA, 12 bp, Artificial Sequence
  Oligonucleotide primer for the detection of SNP TSC0013311
gtaagtatgtcg

SEQ ID NO: 287923 - DNA, 12 bp, Artificial Sequence
  Oligonucleotide primer for the detection of SNP TSC0013311
gtaagtacgtcg

SEQ ID NO: 287924 - DNA, 12 bp, Artificial Sequence
  Oligonucleotide primer for the detection of SNP TSC0013311
aacacatcaaaa

SEQ ID NO: 287925 - DNA, 12 bp, Artificial Sequence
  Oligonucleotide primer for the detection of SNP TSC0013311
aacacatcgaaa

SEQ ID NO: 287926 - DNA, 12 bp, Artificial Sequence
  Oligonucleotide primer for the detection of SNP TSC0013311
aacacgtcaaaa

SEQ ID NO: 287927 - DNA, 12 bp, Artificial Sequence
  Oligonucleotide primer for the detection of SNP TSC0013311
aacacgtcgaaa

SEQ ID NO: 287928 - DNA, 12 bp, Artificial Sequence
  Oligonucleotide primer for the detection of SNP TSC0013312
caacctctacac

SEQ ID NO: 287929 - DNA, 12 bp, Artificial Sequence
  Oligonucleotide primer for the detection of SNP TSC0013312
attattgagggg

SEQ ID NO: 287930 - DNA, 12 bp, Artificial Sequence
  Oligonucleotide primer for the detection of SNP TSC0013313
tatacaaaccta

SEQ ID NO: 287931 - DNA, 12 bp, Artificial Sequence
  Oligonucleotide primer for the detection of SNP TSC0013313
ctccttaaactt

SEQ ID NO: 287932 - DNA, 12 bp, Artificial Sequence
  Oligonucleotide primer for the detection of SNP TSC0013313
tatgtaaatttg

SEQ ID NO: 287933 - DNA, 12 bp, Artificial Sequence
  Oligonucleotide primer for the detection of SNP TSC0013314
tcacatatctat

SEQ ID NO: 287934 - DNA, 12 bp, Artificial Sequence
  Oligonucleotide primer for the detection of SNP TSC0013314
tcacgtatctat

SEQ ID NO: 287935 - DNA, 12 bp, Artificial Sequence
  Oligonucleotide primer for the detection of SNP TSC0013314
ataaattaggta

SEQ ID NO: 287936 - DNA, 12 bp, Artificial Sequence
  Oligonucleotide primer for the detection of SNP TSC0013314
ataaatcaaata

SEQ ID NO: 287937 - DNA, 12 bp, Artificial Sequence
  Oligonucleotide primer for the detection of SNP TSC0013314
ttatgtatttat

SEQ ID NO: 287938 - DNA, 12 bp, Artificial Sequence
  Oligonucleotide primer for the detection of SNP TSC0013314
ttacgtatttat

SEQ ID NO: 287939 - DNA, 12 bp, Artificial Sequence
  Oligonucleotide primer for the detection of SNP TSC0013315
atctaaacaaac

SEQ ID NO: 287940 - DNA, 12 bp, Artificial Sequence
  Oligonucleotide primer for the detection of SNP TSC0013315
taaagtggaaag

SEQ ID NO: 287941 - DNA, 12 bp, Artificial Sequence
  Oligonucleotide primer for the detection of SNP TSC0013315
gtttaggtaaat

SEQ ID NO: 287942 - DNA, 12 bp, Artificial Sequence
  Oligonucleotide primer for the detection of SNP TSC0013316
caataaacttca

SEQ ID NO: 287943 - DNA, 12 bp, Artificial Sequence
  Oligonucleotide primer for the detection of SNP TSC0013316
aggagatattta

SEQ ID NO: 287944 - DNA, 12 bp, Artificial Sequence
  Oligonucleotide primer for the detection of SNP TSC0013317
cctcaaataaaa

SEQ ID NO: 287945 - DNA, 12 bp, Artificial Sequence
  Oligonucleotide primer for the detection of SNP TSC0013317
ttttaaattatg

SEQ ID NO: 287946 - DNA, 12 bp, Artificial Sequence
  Oligonucleotide primer for the detection of SNP TSC0013317
ctttaaatcata

SEQ ID NO: 287947 - DNA, 12 bp, Artificial Sequence
  Oligonucleotide primer for the detection of SNP TSC0013317
ttttaaatgaag

SEQ ID NO: 287948 - DNA, 12 bp, Artificial Sequence
  Oligonucleotide primer for the detection of SNP TSC0013319
cactacatcaac

SEQ ID NO: 287949 - DNA, 12 bp, Artificial Sequence
  Oligonucleotide primer for the detection of SNP TSC0013319
tttggtgaggaa

SEQ ID NO: 287950 - DNA, 12 bp, Artificial Sequence
  Oligonucleotide primer for the detection of SNP TSC0013319
cctaataaaaaa

SEQ ID NO: 287951 - DNA, 12 bp, Artificial Sequence
  Oligonucleotide primer for the detection of SNP TSC0013319
tattgtattaat

SEQ ID NO: 287952 - DNA, 12 bp, Artificial Sequence
  Oligonucleotide primer for the detection of SNP TSC0013320
atctacatacta

SEQ ID NO: 287953 - DNA, 12 bp, Artificial Sequence
  Oligonucleotide primer for the detection of SNP TSC0013320
tattgtaagttt

SEQ ID NO: 287954 - DNA, 12 bp, Artificial Sequence
  Oligonucleotide primer for the detection of SNP TSC0013320
tatcgtaagttt

SEQ ID NO: 287955 - DNA, 12 bp, Artificial Sequence
  Oligonucleotide primer for the detection of SNP TSC0013320
caccacaaaccc

SEQ ID NO: 287956 - DNA, 12 bp, Artificial Sequence
  Oligonucleotide primer for the detection of SNP TSC0013320
caccgcaaaccc

SEQ ID NO: 287957 - DNA, 12 bp, Artificial Sequence
  Oligonucleotide primer for the detection of SNP TSC0013320
atttgtatgttg

SEQ ID NO: 287958 - DNA, 12 bp, Artificial Sequence
  Oligonucleotide primer for the detection of SNP TSC0013321
accatctcccca

SEQ ID NO: 287959 - DNA, 12 bp, Artificial Sequence
  Oligonucleotide primer for the detection of SNP TSC0013321
accgtctcccca

SEQ ID NO: 287960 - DNA, 12 bp, Artificial Sequence
  Oligonucleotide primer for the detection of SNP TSC0013321
ttttatggtttt

SEQ ID NO: 287961 - DNA, 12 bp, Artificial Sequence
  Oligonucleotide primer for the detection of SNP TSC0013321
caatttctataa

SEQ ID NO: 287962 - DNA, 12 bp, Artificial Sequence
  Oligonukleotid-Primer
cgatttctataa

SEQ ID NO: 287963 - DNA, 12 bp, Artificial Sequence
  Oligonucleotide primer for the detection of SNP TSC0013321
agtcgttttttt

SEQ ID NO: 287964 - DNA, 12 bp, Artificial Sequence
  Oligonucleotide primer for the detection of SNP TSC0013322
aacataaacaac

SEQ ID NO: 287965 - DNA, 12 bp, Artificial Sequence
  Oligonucleotide primer for the detection of SNP TSC0013322
tgggtaggtagg

SEQ ID NO: 287966 - DNA, 12 bp, Artificial Sequence
  Oligonucleotide primer for the detection of SNP TSC0013322
cgggtaggtagg

SEQ ID NO: 287967 - DNA, 12 bp, Artificial Sequence
  Oligonucleotide primer for the detection of SNP TSC0013322
caaataaataaa

SEQ ID NO: 287968 - DNA, 12 bp, Artificial Sequence
  Oligonucleotide primer for the detection of SNP TSC0013322
cgaataaataaa

SEQ ID NO: 287969 - DNA, 12 bp, Artificial Sequence
  Oligonucleotide primer for the detection of SNP TSC0013322
gatataagtagt

SEQ ID NO: 287970 - DNA, 12 bp, Artificial Sequence
  Oligonucleotide primer for the detection of SNP TSC0013323
aaaaaatcttat

SEQ ID NO: 287971 - DNA, 12 bp, Artificial Sequence
  Oligonucleotide primer for the detection of SNP TSC0013323
tatattgtttta

SEQ ID NO: 287972 - DNA, 12 bp, Artificial Sequence
  Oligonucleotide primer for the detection of SNP TSC0013324
tctactctatac

SEQ ID NO: 287973 - DNA, 12 bp, Artificial Sequence
  Oligonucleotide primer for the detection of SNP TSC0013324
ttttgttaggtg

SEQ ID NO: 287974 - DNA, 12 bp, Artificial Sequence
  Oligonucleotide primer for the detection of SNP TSC0013324
tcttaccaaata

SEQ ID NO: 287975 - DNA, 12 bp, Artificial Sequence
  Oligonucleotide primer for the detection of SNP TSC0013324
attttgtatttt

SEQ ID NO: 287976 - DNA, 12 bp, Artificial Sequence
  Oligonucleotide primer for the detection of SNP TSC0013326
tagaaattgttt

SEQ ID NO: 287977 - DNA, 12 bp, Artificial Sequence
  Oligonucleotide primer for the detection of SNP TSC0013326
tatcaaaaacta

SEQ ID NO: 287978 - DNA, 12 bp, Artificial Sequence
  Oligonucleotide primer for the detection of SNP TSC0013326
ttaaaattgatg

SEQ ID NO: 287979 - DNA, 12 bp, Artificial Sequence
  Oligonucleotide primer for the detection of SNP TSC0013329
cctataattcat

SEQ ID NO: 287980 - DNA, 12 bp, Artificial Sequence
  Oligonucleotide primer for the detection of SNP TSC0013329
tttttgtttggg

SEQ ID NO: 287981 - DNA, 12 bp, Artificial Sequence
  Oligonucleotide primer for the detection of SNP TSC0013331
ctacattaaaac

SEQ ID NO: 287982 - DNA, 12 bp, Artificial Sequence
  Oligonucleotide primer for the detection of SNP TSC0013331
tagtgggaaaaa

SEQ ID NO: 287983 - DNA, 12 bp, Artificial Sequence
  Oligonucleotide primer for the detection of SNP TSC0013331
tagcgggaaaaa

SEQ ID NO: 287984 - DNA, 12 bp, Artificial Sequence
  Oligonucleotide primer for the detection of SNP TSC0013332
ctaccaaaccta

SEQ ID NO: 287985 - DNA, 12 bp, Artificial Sequence
  Oligonucleotide primer for the detection of SNP TSC0013332
ctaccgaaccta

SEQ ID NO: 287986 - DNA, 12 bp, Artificial Sequence
  Oligonucleotide primer for the detection of SNP TSC0013332
tttttagtagga

SEQ ID NO: 287987 - DNA, 12 bp, Artificial Sequence
  Oligonucleotide primer for the detection of SNP TSC0013332
cttccaacaaaa

SEQ ID NO: 287988 - DNA, 12 bp, Artificial Sequence
  Oligonucleotide primer for the detection of SNP TSC0013332
ttattgaattta

SEQ ID NO: 287989 - DNA, 12 bp, Artificial Sequence
  Oligonucleotide primer for the detection of SNP TSC0013332
ttatcgaattta

SEQ ID NO: 287990 - DNA, 12 bp, Artificial Sequence
  Oligonucleotide primer for the detection of SNP TSC0013333
ccacaataccac

SEQ ID NO: 287991 - DNA, 12 bp, Artificial Sequence
  Oligonucleotide primer for the detection of SNP TSC0013333
ggggatgggata

SEQ ID NO: 287992 - DNA, 12 bp, Artificial Sequence
  Oligonucleotide primer for the detection of SNP TSC0013338
agttatgtttag

SEQ ID NO: 287993 - DNA, 12 bp, Artificial Sequence
  Oligonucleotide primer for the detection of SNP TSC0013338
agttacgtttag

SEQ ID NO: 287994 - DNA, 12 bp, Artificial Sequence
  Oligonucleotide primer for the detection of SNP TSC0013338
aactacattcaa

SEQ ID NO: 287995 - DNA, 12 bp, Artificial Sequence
  Oligonucleotide primer for the detection of SNP TSC0013338
aactacgttcaa

SEQ ID NO: 287996 - DNA, 12 bp, Artificial Sequence
  Oligonucleotide primer for the detection of SNP TSC0013338
tgaagggaagtg

SEQ ID NO: 287997 - DNA, 12 bp, Artificial Sequence
  Oligonucleotide primer for the detection of SNP TSC0013339
ctaaaataaaaa

SEQ ID NO: 287998 - DNA, 12 bp, Artificial Sequence
  Oligonucleotide primer for the detection of SNP TSC0013339
gtttagttattt

SEQ ID NO: 287999 - DNA, 12 bp, Artificial Sequence
  Oligonucleotide primer for the detection of SNP TSC0013339
acattcaaccac

SEQ ID NO: 288000 - DNA, 12 bp, Artificial Sequence
  Oligonucleotide primer for the detection of SNP TSC0013339
acgttcaaccac

SEQ ID NO: 288001 - DNA, 12 bp, Artificial Sequence
  Oligonucleotide primer for the detection of SNP TSC0013339
ttgggatgaagg

SEQ ID NO: 288002 - DNA, 12 bp, Artificial Sequence
  Oligonucleotide primer for the detection of SNP TSC0013340
cctacaactcaa

SEQ ID NO: 288003 - DNA, 12 bp, Artificial Sequence
  Oligonucleotide primer for the detection of SNP TSC0013340
cctacaactcga

SEQ ID NO: 288004 - DNA, 12 bp, Artificial Sequence
  Oligonucleotide primer for the detection of SNP TSC0013340
ttggaataaggt

SEQ ID NO: 288005 - DNA, 12 bp, Artificial Sequence
  Oligonucleotide primer for the detection of SNP TSC0013340
tcggaataaggt

SEQ ID NO: 288006 - DNA, 12 bp, Artificial Sequence
  Oligonucleotide primer for the detection of SNP TSC0013340
ccaaaacaaaac

SEQ ID NO: 288007 - DNA, 12 bp, Artificial Sequence
  Oligonucleotide primer for the detection of SNP TSC0013340
ccgaaacaaaac

SEQ ID NO: 288008 - DNA, 12 bp, Artificial Sequence
  Oligonucleotide primer for the detection of SNP TSC0013340
tttgtagtttgg

SEQ ID NO: 288009 - DNA, 12 bp, Artificial Sequence
  Oligonucleotide primer for the detection of SNP TSC0013340
tttgtagttcgg

SEQ ID NO: 288010 - DNA, 12 bp, Artificial Sequence
  Oligonucleotide primer for the detection of SNP TSC0013341
taccacaaacta

SEQ ID NO: 288011 - DNA, 12 bp, Artificial Sequence
  Oligonucleotide primer for the detection of SNP TSC0013341
ggtggttgtgat

SEQ ID NO: 288012 - DNA, 12 bp, Artificial Sequence
  Oligonucleotide primer for the detection of SNP TSC0013341
ggcggttgtgat

SEQ ID NO: 288013 - DNA, 12 bp, Artificial Sequence
  Oligonucleotide primer for the detection of SNP TSC0013341
ggtggtcgtgat

SEQ ID NO: 288014 - DNA, 12 bp, Artificial Sequence
  Oligonucleotide primer for the detection of SNP TSC0013341
ggtggttgcgat

SEQ ID NO: 288015 - DNA, 12 bp, Artificial Sequence
  Oligonucleotide primer for the detection of SNP TSC0013341
ggcggtcgtgat

SEQ ID NO: 288016 - DNA, 12 bp, Artificial Sequence
  Oligonucleotide primer for the detection of SNP TSC0013341
ggcggttgcgat

SEQ ID NO: 288017 - DNA, 12 bp, Artificial Sequence
  Oligonucleotide primer for the detection of SNP TSC0013341
ggtggtcgcgat

SEQ ID NO: 288018 - DNA, 12 bp, Artificial Sequence
  Oligonucleotide primer for the detection of SNP TSC0013341
ggcggtcgcgat

SEQ ID NO: 288019 - DNA, 12 bp, Artificial Sequence
  Oligonukleotid-Primer
aacaaccacaat

SEQ ID NO: 288020 - DNA, 12 bp, Artificial Sequence
  Oligonucleotide primer for the detection of SNP TSC0013341
aacaaccacgat

SEQ ID NO: 288021 - DNA, 12 bp, Artificial Sequence
  Oligonucleotide primer for the detection of SNP TSC0013341
aacaaccgcaat

SEQ ID NO: 288022 - DNA, 12 bp, Artificial Sequence
  Oligonucleotide primer for the detection of SNP TSC0013341
aacgaccacaat

SEQ ID NO: 288023 - DNA, 12 bp, Artificial Sequence
  Oligonucleotide primer for the detection of SNP TSC0013341
aacaaccgcgat

SEQ ID NO: 288024 - DNA, 12 bp, Artificial Sequence
  Oligonucleotide primer for the detection of SNP TSC0013341
aacgaccacgat

SEQ ID NO: 288025 - DNA, 12 bp, Artificial Sequence
  Oligonucleotide primer for the detection of SNP TSC0013341
aacgaccgcaat

SEQ ID NO: 288026 - DNA, 12 bp, Artificial Sequence
  Oligonucleotide primer for the detection of SNP TSC0013341
aacgaccgcgat

SEQ ID NO: 288027 - DNA, 12 bp, Artificial Sequence
  Oligonucleotide primer for the detection of SNP TSC0013341
tattataagttg

SEQ ID NO: 288028 - DNA, 12 bp, Artificial Sequence
  Oligonucleotide primer for the detection of SNP TSC0013342
attcatatttaa

SEQ ID NO: 288029 - DNA, 12 bp, Artificial Sequence
  Oligonucleotide primer for the detection of SNP TSC0013342
taagaagggaat

SEQ ID NO: 288030 - DNA, 12 bp, Artificial Sequence
  Oligonucleotide primer for the detection of SNP TSC0013342
atttatatttgg

SEQ ID NO: 288031 - DNA, 12 bp, Artificial Sequence
  Oligonucleotide primer for the detection of SNP TSC0013343
tgttggggttta

SEQ ID NO: 288032 - DNA, 12 bp, Artificial Sequence
  Oligonucleotide primer for the detection of SNP TSC0013344
tcccttatcacc

SEQ ID NO: 288033 - DNA, 12 bp, Artificial Sequence
  Oligonucleotide primer for the detection of SNP TSC0013344
ttttatcgttta

SEQ ID NO: 288034 - DNA, 12 bp, Artificial Sequence
  Oligonucleotide primer for the detection of SNP TSC0013344
cctcaccaccca

SEQ ID NO: 288035 - DNA, 12 bp, Artificial Sequence
  Oligonucleotide primer for the detection of SNP TSC0013344
cctcaccgccca

SEQ ID NO: 288036 - DNA, 12 bp, Artificial Sequence
  Oligonucleotide primer for the detection of SNP TSC0013344
ttttttgttatt

SEQ ID NO: 288037 - DNA, 12 bp, Artificial Sequence
  Oligonucleotide primer for the detection of SNP TSC0013345
atcaataaaaat

SEQ ID NO: 288038 - DNA, 12 bp, Artificial Sequence
  Oligonucleotide primer for the detection of SNP TSC0013345
agtgtttgtaaa

SEQ ID NO: 288039 - DNA, 12 bp, Artificial Sequence
  Oligonucleotide primer for the detection of SNP TSC0013345
aatatctacaaa

SEQ ID NO: 288040 - DNA, 12 bp, Artificial Sequence
  Oligonucleotide primer for the detection of SNP TSC0013345
gttagtgaggat

SEQ ID NO: 288041 - DNA, 12 bp, Artificial Sequence
  Oligonucleotide primer for the detection of SNP TSC0013350
aatatatacttc

SEQ ID NO: 288042 - DNA, 12 bp, Artificial Sequence
  Oligonucleotide primer for the detection of SNP TSC0013350
agatttttaagg

SEQ ID NO: 288043 - DNA, 12 bp, Artificial Sequence
  Oligonucleotide primer for the detection of SNP TSC0013350
aaatctccaaaa

SEQ ID NO: 288044 - DNA, 12 bp, Artificial Sequence
  Oligonucleotide primer for the detection of SNP TSC0013350
gtgtgtgttttt

SEQ ID NO: 288045 - DNA, 12 bp, Artificial Sequence
  Oligonucleotide primer for the detection of SNP TSC0013351
tttttattattt

SEQ ID NO: 288046 - DNA, 12 bp, Artificial Sequence
  Oligonucleotide primer for the detection of SNP TSC0013351
ccttaccaccca

SEQ ID NO: 288047 - DNA, 12 bp, Artificial Sequence
  Oligonucleotide primer for the detection of SNP TSC0013351
taaagatgataa

SEQ ID NO: 288048 - DNA, 12 bp, Artificial Sequence
  Oligonucleotide primer for the detection of SNP TSC0013352
tcaacacaaaat

SEQ ID NO: 288049 - DNA, 12 bp, Artificial Sequence
  Oligonucleotide primer for the detection of SNP TSC0013352
acacataacata

SEQ ID NO: 288050 - DNA, 12 bp, Artificial Sequence
  Oligonucleotide primer for the detection of SNP TSC0013352
ttagtataaagt

SEQ ID NO: 288051 - DNA, 12 bp, Artificial Sequence
  Oligonucleotide primer for the detection of SNP TSC0013353
aaaaaacatatc

SEQ ID NO: 288052 - DNA, 12 bp, Artificial Sequence
  Oligonucleotide primer for the detection of SNP TSC0013353
cggttttttttt

SEQ ID NO: 288053 - DNA, 12 bp, Artificial Sequence
  Oligonucleotide primer for the detection of SNP TSC0013353
ctcaacctttcc

SEQ ID NO: 288054 - DNA, 12 bp, Artificial Sequence
  Oligonucleotide primer for the detection of SNP TSC0013353
ctcgacctttcc

SEQ ID NO: 288055 - DNA, 12 bp, Artificial Sequence
  Oligonucleotide primer for the detection of SNP TSC0013353
gagtatattttt

SEQ ID NO: 288056 - DNA, 12 bp, Artificial Sequence
  Oligonucleotide primer for the detection of SNP TSC0013354
aaatcaaacaca

SEQ ID NO: 288057 - DNA, 12 bp, Artificial Sequence
  Oligonucleotide primer for the detection of SNP TSC0013354
tttttagttgtt

SEQ ID NO: 288058 - DNA, 12 bp, Artificial Sequence
  Oligonucleotide primer for the detection of SNP TSC0013354
tccctaactatt

SEQ ID NO: 288059 - DNA, 12 bp, Artificial Sequence
  Oligonucleotide primer for the detection of SNP TSC0013354
ggattaaatata

SEQ ID NO: 288060 - DNA, 12 bp, Artificial Sequence
  Oligonucleotide primer for the detection of SNP TSC0013355
atatcttcactt

SEQ ID NO: 288061 - DNA, 12 bp, Artificial Sequence
  Oligonucleotide primer for the detection of SNP TSC0013355
ctatctactttt

SEQ ID NO: 288062 - DNA, 12 bp, Artificial Sequence
  Oligonucleotide primer for the detection of SNP TSC0013356
caacttataaaa

SEQ ID NO: 288063 - DNA, 12 bp, Artificial Sequence
  Oligonucleotide primer for the detection of SNP TSC0013356
aaaaaaaattca

SEQ ID NO: 288064 - DNA, 12 bp, Artificial Sequence
  Oligonucleotide primer for the detection of SNP TSC0013356
ttaatttataga

SEQ ID NO: 288065 - DNA, 12 bp, Artificial Sequence
  Oligonucleotide primer for the detection of SNP TSC0013358
ttccacatacca

SEQ ID NO: 288066 - DNA, 12 bp, Artificial Sequence
  Oligonucleotide primer for the detection of SNP TSC0013358
aggaaaggtatt

SEQ ID NO: 288067 - DNA, 12 bp, Artificial Sequence
  Oligonucleotide primer for the detection of SNP TSC0013358
aaaaaaatatta

SEQ ID NO: 288068 - DNA, 12 bp, Artificial Sequence
  Oligonucleotide primer for the detection of SNP TSC0013358
tttatatattat

SEQ ID NO: 288069 - DNA, 12 bp, Artificial Sequence
  Oligonucleotide primer for the detection of SNP TSC0013359
tccattcttaca

SEQ ID NO: 288070 - DNA, 12 bp, Artificial Sequence
  Oligonucleotide primer for the detection of SNP TSC0013359
taaatatgaagt

SEQ ID NO: 288071 - DNA, 12 bp, Artificial Sequence
  Oligonucleotide primer for the detection of SNP TSC0013359
acaaacataaaa

SEQ ID NO: 288072 - DNA, 12 bp, Artificial Sequence
  Oligonucleotide primer for the detection of SNP TSC0013359
atttttatattc

SEQ ID NO: 288073 - DNA, 12 bp, Artificial Sequence
  Oligonucleotide primer for the detection of SNP TSC0013360
aaaacactcact

SEQ ID NO: 288074 - DNA, 12 bp, Artificial Sequence
  Oligonucleotide primer for the detection of SNP TSC0013360
aaaacactcgct

SEQ ID NO: 288075 - DNA, 12 bp, Artificial Sequence
  Oligonucleotide primer for the detection of SNP TSC0013360
gaaacactcact

SEQ ID NO: 288076 - DNA, 12 bp, Artificial Sequence
  Oligonucleotide primer for the detection of SNP TSC0013360
gaaacactcgct

SEQ ID NO: 288077 - DNA, 12 bp, Artificial Sequence
  Oligonucleotide primer for the detection of SNP TSC0013360
gagttataaagg

SEQ ID NO: 288078 - DNA, 12 bp, Artificial Sequence
  Oligonucleotide primer for the detection of SNP TSC0013363
ttaaatacattt

SEQ ID NO: 288079 - DNA, 12 bp, Artificial Sequence
  Oligonucleotide primer for the detection of SNP TSC0013363
tgggtttagatg

SEQ ID NO: 288080 - DNA, 12 bp, Artificial Sequence
  Oligonucleotide primer for the detection of SNP TSC0013364
ccacaattctcc

SEQ ID NO: 288081 - DNA, 12 bp, Artificial Sequence
  Oligonucleotide primer for the detection of SNP TSC0013364
gtagatgttatg

SEQ ID NO: 288082 - DNA, 12 bp, Artificial Sequence
  Oligonucleotide primer for the detection of SNP TSC0013365
cccccaatctat

SEQ ID NO: 288083 - DNA, 12 bp, Artificial Sequence
  Oligonucleotide primer for the detection of SNP TSC0013365
aaagtgtagaag

SEQ ID NO: 288084 - DNA, 12 bp, Artificial Sequence
  Oligonucleotide primer for the detection of SNP TSC0013366
tctatattcaaa

SEQ ID NO: 288085 - DNA, 12 bp, Artificial Sequence
  Oligonucleotide primer for the detection of SNP TSC0013366
attatagatgaa

SEQ ID NO: 288086 - DNA, 12 bp, Artificial Sequence
  Oligonucleotide primer for the detection of SNP TSC0013366
attatagacgaa

SEQ ID NO: 288087 - DNA, 12 bp, Artificial Sequence
  Oligonucleotide primer for the detection of SNP TSC0013366
atcacaaacaaa

SEQ ID NO: 288088 - DNA, 12 bp, Artificial Sequence
  Oligonucleotide primer for the detection of SNP TSC0013366
atcacaaacgaa

SEQ ID NO: 288089 - DNA, 12 bp, Artificial Sequence
  Oligonucleotide primer for the detection of SNP TSC0013366
tttgtgtttagg

SEQ ID NO: 288090 - DNA, 12 bp, Artificial Sequence
  Oligonucleotide primer for the detection of SNP TSC0013367
cttcaaaccact

SEQ ID NO: 288091 - DNA, 12 bp, Artificial Sequence
  Oligonucleotide primer for the detection of SNP TSC0013367
ggtgggtaagta

SEQ ID NO: 288092 - DNA, 12 bp, Artificial Sequence
  Oligonucleotide primer for the detection of SNP TSC0013371
aattcttcacac

SEQ ID NO: 288093 - DNA, 12 bp, Artificial Sequence
  Oligonucleotide primer for the detection of SNP TSC0013371
aattcttcgcac

SEQ ID NO: 288094 - DNA, 12 bp, Artificial Sequence
  Oligonucleotide primer for the detection of SNP TSC0013371
tgattaggttga

SEQ ID NO: 288095 - DNA, 12 bp, Artificial Sequence
  Oligonucleotide primer for the detection of SNP TSC0013372
accatactaaaa

SEQ ID NO: 288096 - DNA, 12 bp, Artificial Sequence
  Oligonukleotid-Primer
tggaggtaaggt

SEQ ID NO: 288097 - DNA, 12 bp, Artificial Sequence
  Oligonucleotide primer for the detection of SNP TSC0013372
ttaaaaacaaaa

SEQ ID NO: 288098 - DNA, 12 bp, Artificial Sequence
  Oligonucleotide primer for the detection of SNP TSC0013372
aaatattatgtt

SEQ ID NO: 288099 - DNA, 12 bp, Artificial Sequence
  Oligonucleotide primer for the detection of SNP TSC0013373
acatacaataac

SEQ ID NO: 288100 - DNA, 12 bp, Artificial Sequence
  Oligonucleotide primer for the detection of SNP TSC0013373
acatacgataac

SEQ ID NO: 288101 - DNA, 12 bp, Artificial Sequence
  Oligonucleotide primer for the detection of SNP TSC0013373
acctcaatttta

SEQ ID NO: 288102 - DNA, 12 bp, Artificial Sequence
  Oligonucleotide primer for the detection of SNP TSC0013373
tatatggtagtt

SEQ ID NO: 288103 - DNA, 12 bp, Artificial Sequence
  Oligonucleotide primer for the detection of SNP TSC0013373
tatacggtagtt

SEQ ID NO: 288104 - DNA, 12 bp, Artificial Sequence
  Oligonucleotide primer for the detection of SNP TSC0013375
taatttataaaa

SEQ ID NO: 288105 - DNA, 12 bp, Artificial Sequence
  Oligonucleotide primer for the detection of SNP TSC0013375
gttaatgaaatt

SEQ ID NO: 288106 - DNA, 12 bp, Artificial Sequence
  Oligonucleotide primer for the detection of SNP TSC0013375
gttaatgaaatc

SEQ ID NO: 288107 - DNA, 12 bp, Artificial Sequence
  Oligonucleotide primer for the detection of SNP TSC0013375
aaaccaataaaa

SEQ ID NO: 288108 - DNA, 12 bp, Artificial Sequence
  Oligonucleotide primer for the detection of SNP TSC0013375
ataatttataaa

SEQ ID NO: 288109 - DNA, 12 bp, Artificial Sequence
  Oligonucleotide primer for the detection of SNP TSC0013376
aataataaatat

SEQ ID NO: 288110 - DNA, 12 bp, Artificial Sequence
  Oligonucleotide primer for the detection of SNP TSC0013376
agaagggattaa

SEQ ID NO: 288111 - DNA, 12 bp, Artificial Sequence
  Oligonucleotide primer for the detection of SNP TSC0013376
aatggtaagtgt

SEQ ID NO: 288112 - DNA, 12 bp, Artificial Sequence
  Oligonucleotide primer for the detection of SNP TSC0013379
attaaatttatc

SEQ ID NO: 288113 - DNA, 12 bp, Artificial Sequence
  Oligonucleotide primer for the detection of SNP TSC0013379
atggaggagata

SEQ ID NO: 288114 - DNA, 12 bp, Artificial Sequence
  Oligonucleotide primer for the detection of SNP TSC0013380
taacctcaacca

SEQ ID NO: 288115 - DNA, 12 bp, Artificial Sequence
  Oligonucleotide primer for the detection of SNP TSC0013380
gggataaagatt

SEQ ID NO: 288116 - DNA, 12 bp, Artificial Sequence
  Oligonucleotide primer for the detection of SNP TSC0013380
gggataaagatc

SEQ ID NO: 288117 - DNA, 12 bp, Artificial Sequence
  Oligonucleotide primer for the detection of SNP TSC0013380
cgaaacaaaaat

SEQ ID NO: 288118 - DNA, 12 bp, Artificial Sequence
  Oligonucleotide primer for the detection of SNP TSC0013381
ataactatattc

SEQ ID NO: 288119 - DNA, 12 bp, Artificial Sequence
  Oligonucleotide primer for the detection of SNP TSC0013381
gtttataataat

SEQ ID NO: 288120 - DNA, 12 bp, Artificial Sequence
  Oligonucleotide primer for the detection of SNP TSC0013381
cttataataata

SEQ ID NO: 288121 - DNA, 12 bp, Artificial Sequence
  Oligonucleotide primer for the detection of SNP TSC0013381
atgattatgttt

SEQ ID NO: 288122 - DNA, 12 bp, Artificial Sequence
  Oligonucleotide primer for the detection of SNP TSC0013381
atgattatgttc

SEQ ID NO: 288123 - DNA, 12 bp, Artificial Sequence
  Oligonucleotide primer for the detection of SNP TSC0013383
aattcctctcac

SEQ ID NO: 288124 - DNA, 12 bp, Artificial Sequence
  Oligonucleotide primer for the detection of SNP TSC0013383
gaaatagtatgg

SEQ ID NO: 288125 - DNA, 12 bp, Artificial Sequence
  Oligonucleotide primer for the detection of SNP TSC0013383
aaaacaacataa

SEQ ID NO: 288126 - DNA, 12 bp, Artificial Sequence
  Oligonucleotide primer for the detection of SNP TSC0013383
ggttttttttat

SEQ ID NO: 288127 - DNA, 12 bp, Artificial Sequence
  Oligonucleotide primer for the detection of SNP TSC0013389
catattccaaaa

SEQ ID NO: 288128 - DNA, 12 bp, Artificial Sequence
  Oligonucleotide primer for the detection of SNP TSC0013389
cgtattccaaaa

SEQ ID NO: 288129 - DNA, 12 bp, Artificial Sequence
  Oligonucleotide primer for the detection of SNP TSC0013389
tattataaatag

SEQ ID NO: 288130 - DNA, 12 bp, Artificial Sequence
  Oligonucleotide primer for the detection of SNP TSC0013389
cactataaataa

SEQ ID NO: 288131 - DNA, 12 bp, Artificial Sequence
  Oligonucleotide primer for the detection of SNP TSC0013389
tgtgttttaaag

SEQ ID NO: 288132 - DNA, 12 bp, Artificial Sequence
  Oligonucleotide primer for the detection of SNP TSC0013389
cgtgttttaaag

SEQ ID NO: 288133 - DNA, 12 bp, Artificial Sequence
  Oligonucleotide primer for the detection of SNP TSC0013392
ttttaaacaata

SEQ ID NO: 288134 - DNA, 12 bp, Artificial Sequence
  Oligonucleotide primer for the detection of SNP TSC0013392
aggatgtttagg

SEQ ID NO: 288135 - DNA, 12 bp, Artificial Sequence
  Oligonucleotide primer for the detection of SNP TSC0013392
atatttaaaaaa

SEQ ID NO: 288136 - DNA, 12 bp, Artificial Sequence
  Oligonucleotide primer for the detection of SNP TSC0013392
ttgaatagtatt

SEQ ID NO: 288137 - DNA, 12 bp, Artificial Sequence
  Oligonucleotide primer for the detection of SNP TSC0013393
aacaaaaacgac

SEQ ID NO: 288138 - DNA, 12 bp, Artificial Sequence
  Oligonucleotide primer for the detection of SNP TSC0013393
aacgaaaacaac

SEQ ID NO: 288139 - DNA, 12 bp, Artificial Sequence
  Oligonucleotide primer for the detection of SNP TSC0013393
aacgaaaacgac

SEQ ID NO: 288140 - DNA, 12 bp, Artificial Sequence
  Oligonucleotide primer for the detection of SNP TSC0013393
gtagggaaggtg

SEQ ID NO: 288141 - DNA, 12 bp, Artificial Sequence
  Oligonucleotide primer for the detection of SNP TSC0013393
ggtgagggtgat

SEQ ID NO: 288142 - DNA, 12 bp, Artificial Sequence
  Oligonucleotide primer for the detection of SNP TSC0013393
ggcgagggtgat

SEQ ID NO: 288143 - DNA, 12 bp, Artificial Sequence
  Oligonucleotide primer for the detection of SNP TSC0013393
ggtgagggcgat

SEQ ID NO: 288144 - DNA, 12 bp, Artificial Sequence
  Oligonucleotide primer for the detection of SNP TSC0013393
ggcgagggcgat

SEQ ID NO: 288145 - DNA, 12 bp, Artificial Sequence
  Oligonucleotide primer for the detection of SNP TSC0013394
aaaaaaataatc

SEQ ID NO: 288146 - DNA, 12 bp, Artificial Sequence
  Oligonucleotide primer for the detection of SNP TSC0013394
tataatttaaaa

SEQ ID NO: 288147 - DNA, 12 bp, Artificial Sequence
  Oligonucleotide primer for the detection of SNP TSC0013395
acatatactcca

SEQ ID NO: 288148 - DNA, 12 bp, Artificial Sequence
  Oligonucleotide primer for the detection of SNP TSC0013395
tattgatttagt

SEQ ID NO: 288149 - DNA, 12 bp, Artificial Sequence
  Oligonucleotide primer for the detection of SNP TSC0013395
ttattaactcaa

SEQ ID NO: 288150 - DNA, 12 bp, Artificial Sequence
  Oligonucleotide primer for the detection of SNP TSC0013395
gtatgtatttta

SEQ ID NO: 288151 - DNA, 12 bp, Artificial Sequence
  Oligonucleotide primer for the detection of SNP TSC0013396
aactataataat

SEQ ID NO: 288152 - DNA, 12 bp, Artificial Sequence
  Oligonucleotide primer for the detection of SNP TSC0013396
tttgaagttgaa

SEQ ID NO: 288153 - DNA, 12 bp, Artificial Sequence
  Oligonucleotide primer for the detection of SNP TSC0013399
aaatctttttac

SEQ ID NO: 288154 - DNA, 12 bp, Artificial Sequence
  Oligonucleotide primer for the detection of SNP TSC0013399
tatatatttgta

SEQ ID NO: 288155 - DNA, 12 bp, Artificial Sequence
  Oligonucleotide primer for the detection of SNP TSC0013400
taaataaaaaaa

SEQ ID NO: 288156 - DNA, 12 bp, Artificial Sequence
  Oligonucleotide primer for the detection of SNP TSC0013400
ttattttgagat

SEQ ID NO: 288157 - DNA, 12 bp, Artificial Sequence
  Oligonucleotide primer for the detection of SNP TSC0013400
ttatttcgagat

SEQ ID NO: 288158 - DNA, 12 bp, Artificial Sequence
  Oligonucleotide primer for the detection of SNP TSC0013400
ccaccccaaaat

SEQ ID NO: 288159 - DNA, 12 bp, Artificial Sequence
  Oligonucleotide primer for the detection of SNP TSC0013400
ccaccccgaaat

SEQ ID NO: 288160 - DNA, 12 bp, Artificial Sequence
  Oligonucleotide primer for the detection of SNP TSC0013400
tggataaggaaa

SEQ ID NO: 288161 - DNA, 12 bp, Artificial Sequence
  Oligonucleotide primer for the detection of SNP TSC0013403
ccctcattctaa

SEQ ID NO: 288162 - DNA, 12 bp, Artificial Sequence
  Oligonucleotide primer for the detection of SNP TSC0013403
agaattaggtag

SEQ ID NO: 288163 - DNA, 12 bp, Artificial Sequence
  Oligonucleotide primer for the detection of SNP TSC0013404
aattcataattc

SEQ ID NO: 288164 - DNA, 12 bp, Artificial Sequence
  Oligonucleotide primer for the detection of SNP TSC0013404
tgtggtttgaga

SEQ ID NO: 288165 - DNA, 12 bp, Artificial Sequence
  Oligonucleotide primer for the detection of SNP TSC0013405
tttaacactata

SEQ ID NO: 288166 - DNA, 12 bp, Artificial Sequence
  Oligonucleotide primer for the detection of SNP TSC0013405
ttggtaaaaaaa

SEQ ID NO: 288167 - DNA, 12 bp, Artificial Sequence
  Oligonucleotide primer for the detection of SNP TSC0013405
ttaacaaaaaaa

SEQ ID NO: 288168 - DNA, 12 bp, Artificial Sequence
  Oligonucleotide primer for the detection of SNP TSC0013405
ttttaatattat

SEQ ID NO: 288169 - DNA, 12 bp, Artificial Sequence
  Oligonukleotid-Primer
ctacctccctaa

SEQ ID NO: 288170 - DNA, 12 bp, Artificial Sequence
  Oligonucleotide primer for the detection of SNP TSC0013406
atgggttatagt

SEQ ID NO: 288171 - DNA, 12 bp, Artificial Sequence
  Oligonucleotide primer for the detection of SNP TSC0013406
acgggttatagt

SEQ ID NO: 288172 - DNA, 12 bp, Artificial Sequence
  Oligonucleotide primer for the detection of SNP TSC0013406
atgggttatagc

SEQ ID NO: 288173 - DNA, 12 bp, Artificial Sequence
  Oligonucleotide primer for the detection of SNP TSC0013406
acgggttatagc

SEQ ID NO: 288174 - DNA, 12 bp, Artificial Sequence
  Oligonucleotide primer for the detection of SNP TSC0013406
acaaaccataac

SEQ ID NO: 288175 - DNA, 12 bp, Artificial Sequence
  Oligonucleotide primer for the detection of SNP TSC0013406
acgaaccataac

SEQ ID NO: 288176 - DNA, 12 bp, Artificial Sequence
  Oligonucleotide primer for the detection of SNP TSC0013406
ttgtttttttag

SEQ ID NO: 288177 - DNA, 12 bp, Artificial Sequence
  Oligonucleotide primer for the detection of SNP TSC0013407
aataatattcta

SEQ ID NO: 288178 - DNA, 12 bp, Artificial Sequence
  Oligonucleotide primer for the detection of SNP TSC0013407
ttttatttcgtt

SEQ ID NO: 288179 - DNA, 12 bp, Artificial Sequence
  Oligonucleotide primer for the detection of SNP TSC0013407
ttttatttcgtc

SEQ ID NO: 288180 - DNA, 12 bp, Artificial Sequence
  Oligonucleotide primer for the detection of SNP TSC0013407
caccctactcca

SEQ ID NO: 288181 - DNA, 12 bp, Artificial Sequence
  Oligonucleotide primer for the detection of SNP TSC0013407
caccctactccg

SEQ ID NO: 288182 - DNA, 12 bp, Artificial Sequence
  Oligonucleotide primer for the detection of SNP TSC0013407
cgccctactcca

SEQ ID NO: 288183 - DNA, 12 bp, Artificial Sequence
  Oligonucleotide primer for the detection of SNP TSC0013407
cgccctactccg

SEQ ID NO: 288184 - DNA, 12 bp, Artificial Sequence
  Oligonucleotide primer for the detection of SNP TSC0013407
aataatgtttta

SEQ ID NO: 288185 - DNA, 12 bp, Artificial Sequence
  Oligonucleotide primer for the detection of SNP TSC0013408
aaactaaaaatc

SEQ ID NO: 288186 - DNA, 12 bp, Artificial Sequence
  Oligonucleotide primer for the detection of SNP TSC0013408
gatgttttattg

SEQ ID NO: 288187 - DNA, 12 bp, Artificial Sequence
  Oligonucleotide primer for the detection of SNP TSC0013408
gatgttttatcg

SEQ ID NO: 288188 - DNA, 12 bp, Artificial Sequence
  Oligonucleotide primer for the detection of SNP TSC0013408
aatattccatca

SEQ ID NO: 288189 - DNA, 12 bp, Artificial Sequence
  Oligonucleotide primer for the detection of SNP TSC0013408
aatattccatcg

SEQ ID NO: 288190 - DNA, 12 bp, Artificial Sequence
  Oligonucleotide primer for the detection of SNP TSC0013408
gagttaaaggtt

SEQ ID NO: 288191 - DNA, 12 bp, Artificial Sequence
  Oligonucleotide primer for the detection of SNP TSC0013409
aaaccttaaaat

SEQ ID NO: 288192 - DNA, 12 bp, Artificial Sequence
  Oligonucleotide primer for the detection of SNP TSC0013409
gagggaatgtaa

SEQ ID NO: 288193 - DNA, 12 bp, Artificial Sequence
  Oligonucleotide primer for the detection of SNP TSC0013410
aacatccacaac

SEQ ID NO: 288194 - DNA, 12 bp, Artificial Sequence
  Oligonucleotide primer for the detection of SNP TSC0013410
tatttttttaga

SEQ ID NO: 288195 - DNA, 12 bp, Artificial Sequence
  Oligonucleotide primer for the detection of SNP TSC0013411
aacttaacttaa

SEQ ID NO: 288196 - DNA, 12 bp, Artificial Sequence
  Oligonucleotide primer for the detection of SNP TSC0013411
agtattaatttt

SEQ ID NO: 288197 - DNA, 12 bp, Artificial Sequence
  Oligonucleotide primer for the detection of SNP TSC0013411
aacattaacctc

SEQ ID NO: 288198 - DNA, 12 bp, Artificial Sequence
  Oligonucleotide primer for the detection of SNP TSC0013411
aatttggtttgg

SEQ ID NO: 288199 - DNA, 12 bp, Artificial Sequence
  Oligonucleotide primer for the detection of SNP TSC0013413
attatagtatat

SEQ ID NO: 288200 - DNA, 12 bp, Artificial Sequence
  Oligonucleotide primer for the detection of SNP TSC0013413
actataacacac

SEQ ID NO: 288201 - DNA, 12 bp, Artificial Sequence
  Oligonucleotide primer for the detection of SNP TSC0013413
aagaaatagata

SEQ ID NO: 288202 - DNA, 12 bp, Artificial Sequence
  Oligonucleotide primer for the detection of SNP TSC0013414
tataaatatcaa

SEQ ID NO: 288203 - DNA, 12 bp, Artificial Sequence
  Oligonucleotide primer for the detection of SNP TSC0013414
agaaattgttag

SEQ ID NO: 288204 - DNA, 12 bp, Artificial Sequence
  Oligonucleotide primer for the detection of SNP TSC0013415
taacttatcacc

SEQ ID NO: 288205 - DNA, 12 bp, Artificial Sequence
  Oligonucleotide primer for the detection of SNP TSC0013415
gggttagtgtag

SEQ ID NO: 288206 - DNA, 12 bp, Artificial Sequence
  Oligonucleotide primer for the detection of SNP TSC0013416
cacacatataaa

SEQ ID NO: 288207 - DNA, 12 bp, Artificial Sequence
  Oligonucleotide primer for the detection of SNP TSC0013416
tactacattttt

SEQ ID NO: 288208 - DNA, 12 bp, Artificial Sequence
  Oligonucleotide primer for the detection of SNP TSC0013416
atatatatgtga

SEQ ID NO: 288209 - DNA, 12 bp, Artificial Sequence
  Oligonucleotide primer for the detection of SNP TSC0013417
aatacttcatat

SEQ ID NO: 288210 - DNA, 12 bp, Artificial Sequence
  Oligonucleotide primer for the detection of SNP TSC0013417
aaagatttagta

SEQ ID NO: 288211 - DNA, 12 bp, Artificial Sequence
  Oligonucleotide primer for the detection of SNP TSC0013418
aattaaatatac

SEQ ID NO: 288212 - DNA, 12 bp, Artificial Sequence
  Oligonucleotide primer for the detection of SNP TSC0013419
actaaactattc

SEQ ID NO: 288213 - DNA, 12 bp, Artificial Sequence
  Oligonucleotide primer for the detection of SNP TSC0013419
tattaggattag

SEQ ID NO: 288214 - DNA, 12 bp, Artificial Sequence
  Oligonucleotide primer for the detection of SNP TSC0013420
taaaaaataaat

SEQ ID NO: 288215 - DNA, 12 bp, Artificial Sequence
  Oligonucleotide primer for the detection of SNP TSC0013420
tatggaaattag

SEQ ID NO: 288216 - DNA, 12 bp, Artificial Sequence
  Oligonucleotide primer for the detection of SNP TSC0013421
aaccaaacaact

SEQ ID NO: 288217 - DNA, 12 bp, Artificial Sequence
  Oligonucleotide primer for the detection of SNP TSC0013421
gattttgaattg

SEQ ID NO: 288218 - DNA, 12 bp, Artificial Sequence
  Oligonucleotide primer for the detection of SNP TSC0013421
gatttcgaattg

SEQ ID NO: 288219 - DNA, 12 bp, Artificial Sequence
  Oligonucleotide primer for the detection of SNP TSC0013421
aacctcaaacta

SEQ ID NO: 288220 - DNA, 12 bp, Artificial Sequence
  Oligonucleotide primer for the detection of SNP TSC0013421
aacctcgaacta

SEQ ID NO: 288221 - DNA, 12 bp, Artificial Sequence
  Oligonucleotide primer for the detection of SNP TSC0013421
ggttaggtaatt

SEQ ID NO: 288222 - DNA, 12 bp, Artificial Sequence
  Oligonucleotide primer for the detection of SNP TSC0013422
cataaactctca

SEQ ID NO: 288223 - DNA, 12 bp, Artificial Sequence
  Oligonucleotide primer for the detection of SNP TSC0013422
gttttttagttt

SEQ ID NO: 288224 - DNA, 12 bp, Artificial Sequence
  Oligonucleotide primer for the detection of SNP TSC0013422
atcttctaacct

SEQ ID NO: 288225 - DNA, 12 bp, Artificial Sequence
  Oligonucleotide primer for the detection of SNP TSC0013422
tatgagttttta

SEQ ID NO: 288226 - DNA, 12 bp, Artificial Sequence
  Oligonucleotide primer for the detection of SNP TSC0013423
cataaaaaattc

SEQ ID NO: 288227 - DNA, 12 bp, Artificial Sequence
  Oligonucleotide primer for the detection of SNP TSC0013423
tagtatgaatta

SEQ ID NO: 288228 - DNA, 12 bp, Artificial Sequence
  Oligonucleotide primer for the detection of SNP TSC0013424
accacataatat

SEQ ID NO: 288229 - DNA, 12 bp, Artificial Sequence
  Oligonucleotide primer for the detection of SNP TSC0013424
gagggagttgtt

SEQ ID NO: 288230 - DNA, 12 bp, Artificial Sequence
  Oligonucleotide primer for the detection of SNP TSC0013424
gttatatggtgt

SEQ ID NO: 288231 - DNA, 12 bp, Artificial Sequence
  Oligonucleotide primer for the detection of SNP TSC0013425
ccctatctccat

SEQ ID NO: 288232 - DNA, 12 bp, Artificial Sequence
  Oligonucleotide primer for the detection of SNP TSC0013425
ttttgatttgta

SEQ ID NO: 288233 - DNA, 12 bp, Artificial Sequence
  Oligonucleotide primer for the detection of SNP TSC0013425
cctaacttataa

SEQ ID NO: 288234 - DNA, 12 bp, Artificial Sequence
  Oligonucleotide primer for the detection of SNP TSC0013425
ttttgtttttat

SEQ ID NO: 288235 - DNA, 12 bp, Artificial Sequence
  Oligonucleotide primer for the detection of SNP TSC0013429
atttgaattttt

SEQ ID NO: 288236 - DNA, 12 bp, Artificial Sequence
  Oligonucleotide primer for the detection of SNP TSC0013429
ttatctaaacct

SEQ ID NO: 288237 - DNA, 12 bp, Artificial Sequence
  Oligonucleotide primer for the detection of SNP TSC0013429
gtaaatatgata

SEQ ID NO: 288238 - DNA, 12 bp, Artificial Sequence
  Oligonucleotide primer for the detection of SNP TSC0013430
catttctactca

SEQ ID NO: 288239 - DNA, 12 bp, Artificial Sequence
  Oligonucleotide primer for the detection of SNP TSC0013430
ggtaattgttgt

SEQ ID NO: 288240 - DNA, 12 bp, Artificial Sequence
  Oligonucleotide primer for the detection of SNP TSC0013430
acaactattaca

SEQ ID NO: 288241 - DNA, 12 bp, Artificial Sequence
  Oligonucleotide primer for the detection of SNP TSC0013430
atttttatttat

SEQ ID NO: 288242 - DNA, 12 bp, Artificial Sequence
  Oligonucleotide primer for the detection of SNP TSC0013431
ttttttaactac

SEQ ID NO: 288243 - DNA, 12 bp, Artificial Sequence
  Oligonucleotide primer for the detection of SNP TSC0013431
tgttaggtaagg

SEQ ID NO: 288244 - DNA, 12 bp, Artificial Sequence
  Oligonucleotide primer for the detection of SNP TSC0013432
taatactaatac

SEQ ID NO: 288245 - DNA, 12 bp, Artificial Sequence
  Oligonucleotide primer for the detection of SNP TSC0013432
aaattataatga

SEQ ID NO: 288246 - DNA, 12 bp, Artificial Sequence
  Oligonucleotide primer for the detection of SNP TSC0013433
aaaatactttat

SEQ ID NO: 288247 - DNA, 12 bp, Artificial Sequence
  Oligonucleotide primer for the detection of SNP TSC0013433
taaaattattta

SEQ ID NO: 288248 - DNA, 12 bp, Artificial Sequence
  Oligonucleotide primer for the detection of SNP TSC0013433
taaaattattca

SEQ ID NO: 288249 - DNA, 12 bp, Artificial Sequence
  Oligonucleotide primer for the detection of SNP TSC0013433
agaatattttat

SEQ ID NO: 288250 - DNA, 12 bp, Artificial Sequence
  Oligonucleotide primer for the detection of SNP TSC0013434
taaaaaatttac

SEQ ID NO: 288251 - DNA, 12 bp, Artificial Sequence
  Oligonucleotide primer for the detection of SNP TSC0013434
ttggttgttagg

SEQ ID NO: 288252 - DNA, 12 bp, Artificial Sequence
  Oligonucleotide primer for the detection of SNP TSC0013434
ttaattatcaaa

SEQ ID NO: 288253 - DNA, 12 bp, Artificial Sequence
  Oligonucleotide primer for the detection of SNP TSC0013434
gaagatttgttt

SEQ ID NO: 288254 - DNA, 12 bp, Artificial Sequence
  Oligonukleotid-Primer
aaaaattttaca

SEQ ID NO: 288255 - DNA, 12 bp, Artificial Sequence
  Oligonucleotide primer for the detection of SNP TSC0013435
tagttgtgggtg

SEQ ID NO: 288256 - DNA, 12 bp, Artificial Sequence
  Oligonucleotide primer for the detection of SNP TSC0013435
taattataaata

SEQ ID NO: 288257 - DNA, 12 bp, Artificial Sequence
  Oligonucleotide primer for the detection of SNP TSC0013435
aaggattttata

SEQ ID NO: 288258 - DNA, 12 bp, Artificial Sequence
  Oligonucleotide primer for the detection of SNP TSC0013436
aatattaattac

SEQ ID NO: 288259 - DNA, 12 bp, Artificial Sequence
  Oligonucleotide primer for the detection of SNP TSC0013436
aaatttttttag

SEQ ID NO: 288260 - DNA, 12 bp, Artificial Sequence
  Oligonucleotide primer for the detection of SNP TSC0013437
ataaattcttac

SEQ ID NO: 288261 - DNA, 12 bp, Artificial Sequence
  Oligonucleotide primer for the detection of SNP TSC0013437
attatgaagaag

SEQ ID NO: 288262 - DNA, 12 bp, Artificial Sequence
  Oligonucleotide primer for the detection of SNP TSC0013437
tgggtttttgtt

SEQ ID NO: 288263 - DNA, 12 bp, Artificial Sequence
  Oligonucleotide primer for the detection of SNP TSC0013438
tcaatactaatc

SEQ ID NO: 288264 - DNA, 12 bp, Artificial Sequence
  Oligonucleotide primer for the detection of SNP TSC0013438
gggagaggttgg

SEQ ID NO: 288265 - DNA, 12 bp, Artificial Sequence
  Oligonucleotide primer for the detection of SNP TSC0013439
aaatataaacca

SEQ ID NO: 288266 - DNA, 12 bp, Artificial Sequence
  Oligonucleotide primer for the detection of SNP TSC0013439
tagaggttaggt

SEQ ID NO: 288267 - DNA, 12 bp, Artificial Sequence
  Oligonucleotide primer for the detection of SNP TSC0013439
caaaaaccaaat

SEQ ID NO: 288268 - DNA, 12 bp, Artificial Sequence
  Oligonucleotide primer for the detection of SNP TSC0013439
aggtgtgagtta

SEQ ID NO: 288269 - DNA, 12 bp, Artificial Sequence
  Oligonucleotide primer for the detection of SNP TSC0013440
aaccaaatacca

SEQ ID NO: 288270 - DNA, 12 bp, Artificial Sequence
  Oligonucleotide primer for the detection of SNP TSC0013440
aagttatttagt

SEQ ID NO: 288271 - DNA, 12 bp, Artificial Sequence
  Oligonucleotide primer for the detection of SNP TSC0013440
aaaccacccaac

SEQ ID NO: 288272 - DNA, 12 bp, Artificial Sequence
  Oligonucleotide primer for the detection of SNP TSC0013440
ggttaagtatta

SEQ ID NO: 288273 - DNA, 12 bp, Artificial Sequence
  Oligonucleotide primer for the detection of SNP TSC0013441
cccaaaaaactc

SEQ ID NO: 288274 - DNA, 12 bp, Artificial Sequence
  Oligonucleotide primer for the detection of SNP TSC0013441
cccgaaaaactc

SEQ ID NO: 288275 - DNA, 12 bp, Artificial Sequence
  Oligonucleotide primer for the detection of SNP TSC0013441
agttgtagagat

SEQ ID NO: 288276 - DNA, 12 bp, Artificial Sequence
  Oligonucleotide primer for the detection of SNP TSC0013441
agttgtagagac

SEQ ID NO: 288277 - DNA, 12 bp, Artificial Sequence
  Oligonucleotide primer for the detection of SNP TSC0013441
taactacaaaaa

SEQ ID NO: 288278 - DNA, 12 bp, Artificial Sequence
  Oligonucleotide primer for the detection of SNP TSC0013441
ttcgggggattt

SEQ ID NO: 288279 - DNA, 12 bp, Artificial Sequence
  Oligonucleotide primer for the detection of SNP TSC0013442
cctttaaataaa

SEQ ID NO: 288280 - DNA, 12 bp, Artificial Sequence
  Oligonucleotide primer for the detection of SNP TSC0013442
ttgttggaattt

SEQ ID NO: 288281 - DNA, 12 bp, Artificial Sequence
  Oligonucleotide primer for the detection of SNP TSC0013442
ctactaaaaccc

SEQ ID NO: 288282 - DNA, 12 bp, Artificial Sequence
  Oligonucleotide primer for the detection of SNP TSC0013442
tttttagatgag

SEQ ID NO: 288283 - DNA, 12 bp, Artificial Sequence
  Oligonucleotide primer for the detection of SNP TSC0013443
tgatttatttag

SEQ ID NO: 288284 - DNA, 12 bp, Artificial Sequence
  Oligonucleotide primer for the detection of SNP TSC0013444
catttttataaa

SEQ ID NO: 288285 - DNA, 12 bp, Artificial Sequence
  Oligonucleotide primer for the detection of SNP TSC0013444
ataatttaaata

SEQ ID NO: 288286 - DNA, 12 bp, Artificial Sequence
  Oligonucleotide primer for the detection of SNP TSC0013444
ataattcaaaca

SEQ ID NO: 288287 - DNA, 12 bp, Artificial Sequence
  Oligonucleotide primer for the detection of SNP TSC0013444
atatttttgtaa

SEQ ID NO: 288288 - DNA, 12 bp, Artificial Sequence
  Oligonucleotide primer for the detection of SNP TSC0013445
tacaactactac

SEQ ID NO: 288289 - DNA, 12 bp, Artificial Sequence
  Oligonucleotide primer for the detection of SNP TSC0013445
ttaagatgatta

SEQ ID NO: 288290 - DNA, 12 bp, Artificial Sequence
  Oligonucleotide primer for the detection of SNP TSC0013446
tttttagtagtt

SEQ ID NO: 288291 - DNA, 12 bp, Artificial Sequence
  Oligonucleotide primer for the detection of SNP TSC0013446
cttctaacaact

SEQ ID NO: 288292 - DNA, 12 bp, Artificial Sequence
  Oligonucleotide primer for the detection of SNP TSC0013446
aagtattatgga

SEQ ID NO: 288293 - DNA, 12 bp, Artificial Sequence
  Oligonucleotide primer for the detection of SNP TSC0013447
ccttatctatta

SEQ ID NO: 288294 - DNA, 12 bp, Artificial Sequence
  Oligonucleotide primer for the detection of SNP TSC0013447
aagatgaatttg

SEQ ID NO: 288295 - DNA, 12 bp, Artificial Sequence
  Oligonucleotide primer for the detection of SNP TSC0013447
aaataaacttaa

SEQ ID NO: 288296 - DNA, 12 bp, Artificial Sequence
  Oligonucleotide primer for the detection of SNP TSC0013447
ttgtttgttatt

SEQ ID NO: 288297 - DNA, 12 bp, Artificial Sequence
  Oligonucleotide primer for the detection of SNP TSC0013448
ctacaacacctt

SEQ ID NO: 288298 - DNA, 12 bp, Artificial Sequence
  Oligonucleotide primer for the detection of SNP TSC0013448
ctacgacacctt

SEQ ID NO: 288299 - DNA, 12 bp, Artificial Sequence
  Oligonucleotide primer for the detection of SNP TSC0013448
ttatgatagttg

SEQ ID NO: 288300 - DNA, 12 bp, Artificial Sequence
  Oligonucleotide primer for the detection of SNP TSC0013451
aaaaccaaaaac

SEQ ID NO: 288301 - DNA, 12 bp, Artificial Sequence
  Oligonucleotide primer for the detection of SNP TSC0013451
aaaaccgaaaac

SEQ ID NO: 288302 - DNA, 12 bp, Artificial Sequence
  Oligonucleotide primer for the detection of SNP TSC0013457
tttctaaatcac

SEQ ID NO: 288303 - DNA, 12 bp, Artificial Sequence
  Oligonucleotide primer for the detection of SNP TSC0013457
aattatagagta

SEQ ID NO: 288304 - DNA, 12 bp, Artificial Sequence
  Oligonucleotide primer for the detection of SNP TSC0013458
caaatacccaaa

SEQ ID NO: 288305 - DNA, 12 bp, Artificial Sequence
  Oligonucleotide primer for the detection of SNP TSC0013458
atttgagttatt

SEQ ID NO: 288306 - DNA, 12 bp, Artificial Sequence
  Oligonucleotide primer for the detection of SNP TSC0013458
acctaaactatc

SEQ ID NO: 288307 - DNA, 12 bp, Artificial Sequence
  Oligonucleotide primer for the detection of SNP TSC0013458
taaatatttaaa

SEQ ID NO: 288308 - DNA, 12 bp, Artificial Sequence
  Oligonucleotide primer for the detection of SNP TSC0013460
actcaacaaaaa

SEQ ID NO: 288309 - DNA, 12 bp, Artificial Sequence
  Oligonucleotide primer for the detection of SNP TSC0013460
attttttagttt

SEQ ID NO: 288310 - DNA, 12 bp, Artificial Sequence
  Oligonucleotide primer for the detection of SNP TSC0013460
atctcccaactc

SEQ ID NO: 288311 - DNA, 12 bp, Artificial Sequence
  Oligonucleotide primer for the detection of SNP TSC0013461
ttttttagtttc

SEQ ID NO: 288312 - DNA, 12 bp, Artificial Sequence
  Oligonucleotide primer for the detection of SNP TSC0013461
aatctcccaact

SEQ ID NO: 288313 - DNA, 12 bp, Artificial Sequence
  Oligonucleotide primer for the detection of SNP TSC0013461
gttgtttaataa

SEQ ID NO: 288314 - DNA, 12 bp, Artificial Sequence
  Oligonucleotide primer for the detection of SNP TSC0013462
tcctaccttcct

SEQ ID NO: 288315 - DNA, 12 bp, Artificial Sequence
  Oligonucleotide primer for the detection of SNP TSC0013462
gaaaggaggaag

SEQ ID NO: 288316 - DNA, 12 bp, Artificial Sequence
  Oligonucleotide primer for the detection of SNP TSC0013463
tctaaaacatat

SEQ ID NO: 288317 - DNA, 12 bp, Artificial Sequence
  Oligonucleotide primer for the detection of SNP TSC0013463
tttaattttaga

SEQ ID NO: 288318 - DNA, 12 bp, Artificial Sequence
  Oligonucleotide primer for the detection of SNP TSC0013463
ttcaattttaaa

SEQ ID NO: 288319 - DNA, 12 bp, Artificial Sequence
  Oligonucleotide primer for the detection of SNP TSC0013463
tttaaggtatat

SEQ ID NO: 288320 - DNA, 12 bp, Artificial Sequence
  Oligonucleotide primer for the detection of SNP TSC0013464
taaactaaacac

SEQ ID NO: 288321 - DNA, 12 bp, Artificial Sequence
  Oligonucleotide primer for the detection of SNP TSC0013464
ggagttaatttg

SEQ ID NO: 288322 - DNA, 12 bp, Artificial Sequence
  Oligonucleotide primer for the detection of SNP TSC0013465
aaccccaaaaac

SEQ ID NO: 288323 - DNA, 12 bp, Artificial Sequence
  Oligonucleotide primer for the detection of SNP TSC0013465
aaccccgaaaac

SEQ ID NO: 288324 - DNA, 12 bp, Artificial Sequence
  Oligonucleotide primer for the detection of SNP TSC0013465
ttggttttagta

SEQ ID NO: 288325 - DNA, 12 bp, Artificial Sequence
  Oligonucleotide primer for the detection of SNP TSC0013466
tataattcataa

SEQ ID NO: 288326 - DNA, 12 bp, Artificial Sequence
  Oligonucleotide primer for the detection of SNP TSC0013466
gagatgaaatgt

SEQ ID NO: 288327 - DNA, 12 bp, Artificial Sequence
  Oligonucleotide primer for the detection of SNP TSC0013466
atagtttataat

SEQ ID NO: 288328 - DNA, 12 bp, Artificial Sequence
  Oligonucleotide primer for the detection of SNP TSC0013468
catattttacaa

SEQ ID NO: 288329 - DNA, 12 bp, Artificial Sequence
  Oligonucleotide primer for the detection of SNP TSC0013468
atgtgtgaaatt

SEQ ID NO: 288330 - DNA, 12 bp, Artificial Sequence
  Oligonucleotide primer for the detection of SNP TSC0013468
atatataaaact

SEQ ID NO: 288331 - DNA, 12 bp, Artificial Sequence
  Oligonucleotide primer for the detection of SNP TSC0013468
tatattttatag

SEQ ID NO: 288332 - DNA, 12 bp, Artificial Sequence
  Oligonucleotide primer for the detection of SNP TSC0013469
ccaaaaaaatca

SEQ ID NO: 288333 - DNA, 12 bp, Artificial Sequence
  Oligonucleotide primer for the detection of SNP TSC0013469
atgttttatgtt

SEQ ID NO: 288334 - DNA, 12 bp, Artificial Sequence
  Oligonucleotide primer for the detection of SNP TSC0013469
atgttttacgtt

SEQ ID NO: 288335 - DNA, 12 bp, Artificial Sequence
  Oligonucleotide primer for the detection of SNP TSC0013469
atattttacatc

SEQ ID NO: 288336 - DNA, 12 bp, Artificial Sequence
  Oligonucleotide primer for the detection of SNP TSC0013469
atattttacgtc

SEQ ID NO: 288337 - DNA, 12 bp, Artificial Sequence
  Oligonucleotide primer for the detection of SNP TSC0013469
ttaagagagtta

SEQ ID NO: 288338 - DNA, 12 bp, Artificial Sequence
  Oligonucleotide primer for the detection of SNP TSC0013470
tacatacaaaat

SEQ ID NO: 288339 - DNA, 12 bp, Artificial Sequence
  Oligonukleotid-Primer
atagattttaaa

SEQ ID NO: 288340 - DNA, 12 bp, Artificial Sequence
  Oligonucleotide primer for the detection of SNP TSC0013470
acaaattttaaa

SEQ ID NO: 288341 - DNA, 12 bp, Artificial Sequence
  Oligonucleotide primer for the detection of SNP TSC0013470
tatatataagat

SEQ ID NO: 288342 - DNA, 12 bp, Artificial Sequence
  Oligonucleotide primer for the detection of SNP TSC0013471
aaaatcccccat

SEQ ID NO: 288343 - DNA, 12 bp, Artificial Sequence
  Oligonucleotide primer for the detection of SNP TSC0013471
aaaatcccccgt

SEQ ID NO: 288344 - DNA, 12 bp, Artificial Sequence
  Oligonucleotide primer for the detection of SNP TSC0013471
gtttgaagtggg

SEQ ID NO: 288345 - DNA, 12 bp, Artificial Sequence
  Oligonucleotide primer for the detection of SNP TSC0013472
ttaaccaaaaat

SEQ ID NO: 288346 - DNA, 12 bp, Artificial Sequence
  Oligonucleotide primer for the detection of SNP TSC0013472
gttgtttgaagt

SEQ ID NO: 288347 - DNA, 12 bp, Artificial Sequence
  Oligonucleotide primer for the detection of SNP TSC0013472
attacctaaaat

SEQ ID NO: 288348 - DNA, 12 bp, Artificial Sequence
  Oligonucleotide primer for the detection of SNP TSC0013472
ttgattaggggt

SEQ ID NO: 288349 - DNA, 12 bp, Artificial Sequence
  Oligonucleotide primer for the detection of SNP TSC0013473
aaactctacctc

SEQ ID NO: 288350 - DNA, 12 bp, Artificial Sequence
  Oligonucleotide primer for the detection of SNP TSC0013473
gttgatttgata

SEQ ID NO: 288351 - DNA, 12 bp, Artificial Sequence
  Oligonucleotide primer for the detection of SNP TSC0013474
ataaaccaaaat

SEQ ID NO: 288352 - DNA, 12 bp, Artificial Sequence
  Oligonucleotide primer for the detection of SNP TSC0013474
ataaaccgaaat

SEQ ID NO: 288353 - DNA, 12 bp, Artificial Sequence
  Oligonucleotide primer for the detection of SNP TSC0013474
aatacaataata

SEQ ID NO: 288354 - DNA, 12 bp, Artificial Sequence
  Oligonucleotide primer for the detection of SNP TSC0013474
gtgagtcgagat

SEQ ID NO: 288355 - DNA, 12 bp, Artificial Sequence
  Oligonucleotide primer for the detection of SNP TSC0013476
attttgtttatg

SEQ ID NO: 288356 - DNA, 12 bp, Artificial Sequence
  Oligonucleotide primer for the detection of SNP TSC0013476
attttgtttacg

SEQ ID NO: 288357 - DNA, 12 bp, Artificial Sequence
  Oligonucleotide primer for the detection of SNP TSC0013477
attaaactccaa

SEQ ID NO: 288358 - DNA, 12 bp, Artificial Sequence
  Oligonucleotide primer for the detection of SNP TSC0013477
ttattttaagtg

SEQ ID NO: 288359 - DNA, 12 bp, Artificial Sequence
  Oligonucleotide primer for the detection of SNP TSC0013477
tcactctaaata

SEQ ID NO: 288360 - DNA, 12 bp, Artificial Sequence
  Oligonucleotide primer for the detection of SNP TSC0013477
attgagttttag

SEQ ID NO: 288361 - DNA, 12 bp, Artificial Sequence
  Oligonucleotide primer for the detection of SNP TSC0013478
aaaaacatatct

SEQ ID NO: 288362 - DNA, 12 bp, Artificial Sequence
  Oligonucleotide primer for the detection of SNP TSC0013478
gagttatgtaag

SEQ ID NO: 288363 - DNA, 12 bp, Artificial Sequence
  Oligonucleotide primer for the detection of SNP TSC0013479
ttttcaataata

SEQ ID NO: 288364 - DNA, 12 bp, Artificial Sequence
  Oligonucleotide primer for the detection of SNP TSC0013479
atatattttagt

SEQ ID NO: 288365 - DNA, 12 bp, Artificial Sequence
  Oligonucleotide primer for the detection of SNP TSC0013479
acacattttaat

SEQ ID NO: 288366 - DNA, 12 bp, Artificial Sequence
  Oligonucleotide primer for the detection of SNP TSC0013479
tttttaatggtg

SEQ ID NO: 288367 - DNA, 12 bp, Artificial Sequence
  Oligonucleotide primer for the detection of SNP TSC0013480
cttcaatctcta

SEQ ID NO: 288368 - DNA, 12 bp, Artificial Sequence
  Oligonucleotide primer for the detection of SNP TSC0013480
gtattgttatgg

SEQ ID NO: 288369 - DNA, 12 bp, Artificial Sequence
  Oligonucleotide primer for the detection of SNP TSC0013480
atattatcataa

SEQ ID NO: 288370 - DNA, 12 bp, Artificial Sequence
  Oligonucleotide primer for the detection of SNP TSC0013480
tttttagttttt

SEQ ID NO: 288371 - DNA, 12 bp, Artificial Sequence
  Oligonucleotide primer for the detection of SNP TSC0013481
aatccactccaa

SEQ ID NO: 288372 - DNA, 12 bp, Artificial Sequence
  Oligonucleotide primer for the detection of SNP TSC0013481
ataaaaatttag

SEQ ID NO: 288373 - DNA, 12 bp, Artificial Sequence
  Oligonucleotide primer for the detection of SNP TSC0013481
acaaaaatccaa

SEQ ID NO: 288374 - DNA, 12 bp, Artificial Sequence
  Oligonucleotide primer for the detection of SNP TSC0013481
taatttatttta

SEQ ID NO: 288375 - DNA, 12 bp, Artificial Sequence
  Oligonucleotide primer for the detection of SNP TSC0013482
tctcaatttcat

SEQ ID NO: 288376 - DNA, 12 bp, Artificial Sequence
  Oligonucleotide primer for the detection of SNP TSC0013482
tattatagtatg

SEQ ID NO: 288377 - DNA, 12 bp, Artificial Sequence
  Oligonucleotide primer for the detection of SNP TSC0013483
atttaagtagaa

SEQ ID NO: 288378 - DNA, 12 bp, Artificial Sequence
  Oligonucleotide primer for the detection of SNP TSC0013484
ttcttccttcat

SEQ ID NO: 288379 - DNA, 12 bp, Artificial Sequence
  Oligonucleotide primer for the detection of SNP TSC0013484
gatagatttgaa

SEQ ID NO: 288380 - DNA, 12 bp, Artificial Sequence
  Oligonucleotide primer for the detection of SNP TSC0013485
atccccttctct

SEQ ID NO: 288381 - DNA, 12 bp, Artificial Sequence
  Oligonucleotide primer for the detection of SNP TSC0013485
gagagttattag

SEQ ID NO: 288382 - DNA, 12 bp, Artificial Sequence
  Oligonucleotide primer for the detection of SNP TSC0013486
cacccataaaaa

SEQ ID NO: 288383 - DNA, 12 bp, Artificial Sequence
  Oligonucleotide primer for the detection of SNP TSC0013486
gggtgtggtttt

SEQ ID NO: 288384 - DNA, 12 bp, Artificial Sequence
  Oligonucleotide primer for the detection of SNP TSC0013486
gggcgtggtttt

SEQ ID NO: 288385 - DNA, 12 bp, Artificial Sequence
  Oligonucleotide primer for the detection of SNP TSC0013486
gggtgtggtttc

SEQ ID NO: 288386 - DNA, 12 bp, Artificial Sequence
  Oligonucleotide primer for the detection of SNP TSC0013486
gggcgtggtttc

SEQ ID NO: 288387 - DNA, 12 bp, Artificial Sequence
  Oligonucleotide primer for the detection of SNP TSC0013486
taaacataacct

SEQ ID NO: 288388 - DNA, 12 bp, Artificial Sequence
  Oligonucleotide primer for the detection of SNP TSC0013486
taaacgtaacct

SEQ ID NO: 288389 - DNA, 12 bp, Artificial Sequence
  Oligonucleotide primer for the detection of SNP TSC0013486
tatatttataga

SEQ ID NO: 288390 - DNA, 12 bp, Artificial Sequence
  Oligonucleotide primer for the detection of SNP TSC0013487
tttaataaaaaa

SEQ ID NO: 288391 - DNA, 12 bp, Artificial Sequence
  Oligonucleotide primer for the detection of SNP TSC0013487
taggtatgagga

SEQ ID NO: 288392 - DNA, 12 bp, Artificial Sequence
  Oligonucleotide primer for the detection of SNP TSC0013487
taaacataaaaa

SEQ ID NO: 288393 - DNA, 12 bp, Artificial Sequence
  Oligonucleotide primer for the detection of SNP TSC0013487
tttgatggagag

SEQ ID NO: 288394 - DNA, 12 bp, Artificial Sequence
  Oligonucleotide primer for the detection of SNP TSC0013488
aatacttaaaca

SEQ ID NO: 288395 - DNA, 12 bp, Artificial Sequence
  Oligonucleotide primer for the detection of SNP TSC0013488
caatccccctcc

SEQ ID NO: 288396 - DNA, 12 bp, Artificial Sequence
  Oligonucleotide primer for the detection of SNP TSC0013488
aagtgtttggat

SEQ ID NO: 288397 - DNA, 12 bp, Artificial Sequence
  Oligonucleotide primer for the detection of SNP TSC0013489
cctaattttttt

SEQ ID NO: 288398 - DNA, 12 bp, Artificial Sequence
  Oligonucleotide primer for the detection of SNP TSC0013489
attgtatttttt

SEQ ID NO: 288399 - DNA, 12 bp, Artificial Sequence
  Oligonucleotide primer for the detection of SNP TSC0013490
ccatctaccacc

SEQ ID NO: 288400 - DNA, 12 bp, Artificial Sequence
  Oligonucleotide primer for the detection of SNP TSC0013490
aagaagaggaat

SEQ ID NO: 288401 - DNA, 12 bp, Artificial Sequence
  Oligonucleotide primer for the detection of SNP TSC0013490
ttatttgttatt

SEQ ID NO: 288402 - DNA, 12 bp, Artificial Sequence
  Oligonucleotide primer for the detection of SNP TSC0013491
tcccatttcatc

SEQ ID NO: 288403 - DNA, 12 bp, Artificial Sequence
  Oligonucleotide primer for the detection of SNP TSC0013491
gttgtgtgttga

SEQ ID NO: 288404 - DNA, 12 bp, Artificial Sequence
  Oligonucleotide primer for the detection of SNP TSC0013496
ttctccaaacta

SEQ ID NO: 288405 - DNA, 12 bp, Artificial Sequence
  Oligonucleotide primer for the detection of SNP TSC0013496
agttaataaaaa

SEQ ID NO: 288406 - DNA, 12 bp, Artificial Sequence
  Oligonucleotide primer for the detection of SNP TSC0013496
ttttttaaattg

SEQ ID NO: 288407 - DNA, 12 bp, Artificial Sequence
  Oligonucleotide primer for the detection of SNP TSC0013497
aacaactttaac

SEQ ID NO: 288408 - DNA, 12 bp, Artificial Sequence
  Oligonucleotide primer for the detection of SNP TSC0013497
tatttagggttg

SEQ ID NO: 288409 - DNA, 12 bp, Artificial Sequence
  Oligonucleotide primer for the detection of SNP TSC0013498
taaaaacattta

SEQ ID NO: 288410 - DNA, 12 bp, Artificial Sequence
  Oligonucleotide primer for the detection of SNP TSC0013498
atataaattttt

SEQ ID NO: 288411 - DNA, 12 bp, Artificial Sequence
  Oligonucleotide primer for the detection of SNP TSC0013498
acataaactccc

SEQ ID NO: 288412 - DNA, 12 bp, Artificial Sequence
  Oligonucleotide primer for the detection of SNP TSC0013498
atggggatattt

SEQ ID NO: 288413 - DNA, 12 bp, Artificial Sequence
  Oligonucleotide primer for the detection of SNP TSC0013499
tcaaaataacta

SEQ ID NO: 288414 - DNA, 12 bp, Artificial Sequence
  Oligonucleotide primer for the detection of SNP TSC0013499
atgtttttgttt

SEQ ID NO: 288415 - DNA, 12 bp, Artificial Sequence
  Oligonucleotide primer for the detection of SNP TSC0013499
tacctttactta

SEQ ID NO: 288416 - DNA, 12 bp, Artificial Sequence
  Oligonucleotide primer for the detection of SNP TSC0013499
taaaataattgt

SEQ ID NO: 288417 - DNA, 12 bp, Artificial Sequence
  Oligonucleotide primer for the detection of SNP TSC0013500
gacaaaacaaaa

SEQ ID NO: 288418 - DNA, 12 bp, Artificial Sequence
  Oligonucleotide primer for the detection of SNP TSC0013500
gacaaaacgaaa

SEQ ID NO: 288419 - DNA, 12 bp, Artificial Sequence
  Oligonucleotide primer for the detection of SNP TSC0013501
aacaatttccat

SEQ ID NO: 288420 - DNA, 12 bp, Artificial Sequence
  Oligonucleotide primer for the detection of SNP TSC0013501
ttttaggttatg

SEQ ID NO: 288421 - DNA, 12 bp, Artificial Sequence
  Oligonucleotide primer for the detection of SNP TSC0013502
tcctcaaaaaac

SEQ ID NO: 288422 - DNA, 12 bp, Artificial Sequence
  Oligonucleotide primer for the detection of SNP TSC0013502
tatttttattta

SEQ ID NO: 288423 - DNA, 12 bp, Artificial Sequence
  Oligonucleotide primer for the detection of SNP TSC0013504
ctaaaattaaaa

SEQ ID NO: 288424 - DNA, 12 bp, Artificial Sequence
  Oligonucleotide primer for the detection of SNP TSC0013504
ttgttgttttat

SEQ ID NO: 288425 - DNA, 12 bp, Artificial Sequence
  Oligonucleotide primer for the detection of SNP TSC0013504
actattccacaa

SEQ ID NO: 288426 - DNA, 12 bp, Artificial Sequence
  Oligonucleotide primer for the detection of SNP TSC0013504
ttgaaattaagg

SEQ ID NO: 288427 - DNA, 12 bp, Artificial Sequence
  Oligonucleotide primer for the detection of SNP TSC0013505
caataaaactct

SEQ ID NO: 288428 - DNA, 12 bp, Artificial Sequence
  Oligonucleotide primer for the detection of SNP TSC0013505
tttgtttttgag

SEQ ID NO: 288429 - DNA, 12 bp, Artificial Sequence
  Oligonucleotide primer for the detection of SNP TSC0013506
taaatctaacct

SEQ ID NO: 288430 - DNA, 12 bp, Artificial Sequence
  Oligonucleotide primer for the detection of SNP TSC0013506
tgtaataaaata

SEQ ID NO: 288431 - DNA, 12 bp, Artificial Sequence
  Oligonucleotide primer for the detection of SNP TSC0013508
atttattaaata

SEQ ID NO: 288432 - DNA, 12 bp, Artificial Sequence
  Oligonucleotide primer for the detection of SNP TSC0013508
ggttggatgtat

SEQ ID NO: 288433 - DNA, 12 bp, Artificial Sequence
  Oligonucleotide primer for the detection of SNP TSC0013508
ggtcggatgtat

SEQ ID NO: 288434 - DNA, 12 bp, Artificial Sequence
  Oligonucleotide primer for the detection of SNP TSC0013508
aatcaaatacac

SEQ ID NO: 288435 - DNA, 12 bp, Artificial Sequence
  Oligonucleotide primer for the detection of SNP TSC0013508
aatcgaatacac

SEQ ID NO: 288436 - DNA, 12 bp, Artificial Sequence
  Oligonucleotide primer for the detection of SNP TSC0013508
atttattgagtg

SEQ ID NO: 288437 - DNA, 12 bp, Artificial Sequence
  Oligonucleotide primer for the detection of SNP TSC0013509
tgaaatatgtta

SEQ ID NO: 288438 - DNA, 12 bp, Artificial Sequence
  Oligonucleotide primer for the detection of SNP TSC0013511
ccaaaaaccata

SEQ ID NO: 288439 - DNA, 12 bp, Artificial Sequence
  Oligonucleotide primer for the detection of SNP TSC0013511
ttatttagagtt

SEQ ID NO: 288440 - DNA, 12 bp, Artificial Sequence
  Oligonucleotide primer for the detection of SNP TSC0013511
ttcacccaaaac

SEQ ID NO: 288441 - DNA, 12 bp, Artificial Sequence
  Oligonucleotide primer for the detection of SNP TSC0013511
tagagattatgt

SEQ ID NO: 288442 - DNA, 12 bp, Artificial Sequence
  Oligonucleotide primer for the detection of SNP TSC0013512
accccaaaatac

SEQ ID NO: 288443 - DNA, 12 bp, Artificial Sequence
  Oligonucleotide primer for the detection of SNP TSC0013512
tgatatggttgg

SEQ ID NO: 288444 - DNA, 12 bp, Artificial Sequence
  Oligonucleotide primer for the detection of SNP TSC0013512
aatataactaaa

SEQ ID NO: 288445 - DNA, 12 bp, Artificial Sequence
  Oligonucleotide primer for the detection of SNP TSC0013512
gttttaaagtat

SEQ ID NO: 288446 - DNA, 12 bp, Artificial Sequence
  Oligonucleotide primer for the detection of SNP TSC0013513
taactaaaacct

SEQ ID NO: 288447 - DNA, 12 bp, Artificial Sequence
  Oligonucleotide primer for the detection of SNP TSC0013513
atagatgagaaa

SEQ ID NO: 288448 - DNA, 12 bp, Artificial Sequence
  Oligonucleotide primer for the detection of SNP TSC0013514
attccacatatt

SEQ ID NO: 288449 - DNA, 12 bp, Artificial Sequence
  Oligonucleotide primer for the detection of SNP TSC0013514
aattttatgaga

SEQ ID NO: 288450 - DNA, 12 bp, Artificial Sequence
  Oligonucleotide primer for the detection of SNP TSC0013515
aacaaaaatata

SEQ ID NO: 288451 - DNA, 12 bp, Artificial Sequence
  Oligonucleotide primer for the detection of SNP TSC0013515
atttataaatgg

SEQ ID NO: 288452 - DNA, 12 bp, Artificial Sequence
  Oligonucleotide primer for the detection of SNP TSC0013515
acctataaataa

SEQ ID NO: 288453 - DNA, 12 bp, Artificial Sequence
  Oligonucleotide primer for the detection of SNP TSC0013515
ataagggtatat

SEQ ID NO: 288454 - DNA, 12 bp, Artificial Sequence
  Oligonucleotide primer for the detection of SNP TSC0013516
ataaaacctact

SEQ ID NO: 288455 - DNA, 12 bp, Artificial Sequence
  Oligonucleotide primer for the detection of SNP TSC0013516
attgagtgttta

SEQ ID NO: 288456 - DNA, 12 bp, Artificial Sequence
  Oligonucleotide primer for the detection of SNP TSC0013517
actaataaaaat

SEQ ID NO: 288457 - DNA, 12 bp, Artificial Sequence
  Oligonucleotide primer for the detection of SNP TSC0013517
gtggtttttatt

SEQ ID NO: 288458 - DNA, 12 bp, Artificial Sequence
  Oligonucleotide primer for the detection of SNP TSC0013519
taaatatatctt

SEQ ID NO: 288459 - DNA, 12 bp, Artificial Sequence
  Oligonucleotide primer for the detection of SNP TSC0013519
tgtattgatgga

SEQ ID NO: 288460 - DNA, 12 bp, Artificial Sequence
  Oligonucleotide primer for the detection of SNP TSC0013523
ttataaaccaaa

SEQ ID NO: 288461 - DNA, 12 bp, Artificial Sequence
  Oligonucleotide primer for the detection of SNP TSC0013523
tagggtaaaatt

SEQ ID NO: 288462 - DNA, 12 bp, Artificial Sequence
  Oligonucleotide primer for the detection of SNP TSC0013523
ataaaataaaac

SEQ ID NO: 288463 - DNA, 12 bp, Artificial Sequence
  Oligonucleotide primer for the detection of SNP TSC0013523
aagttatgaatt

SEQ ID NO: 288464 - DNA, 12 bp, Artificial Sequence
  Oligonucleotide primer for the detection of SNP TSC0013524
catatcccaatc

SEQ ID NO: 288465 - DNA, 12 bp, Artificial Sequence
  Oligonucleotide primer for the detection of SNP TSC0013524
catatcccgatc

SEQ ID NO: 288466 - DNA, 12 bp, Artificial Sequence
  Oligonucleotide primer for the detection of SNP TSC0013524
gatgtttattta

SEQ ID NO: 288467 - DNA, 12 bp, Artificial Sequence
  Oligonucleotide primer for the detection of SNP TSC0013525
tttgtgtttggg

SEQ ID NO: 288468 - DNA, 12 bp, Artificial Sequence
  Oligonucleotide primer for the detection of SNP TSC0013526
aaaacataacac

SEQ ID NO: 288469 - DNA, 12 bp, Artificial Sequence
  Oligonucleotide primer for the detection of SNP TSC0013526
tttgagtatgtg

SEQ ID NO: 288470 - DNA, 12 bp, Artificial Sequence
  Oligonucleotide primer for the detection of SNP TSC0013529
aataaaaataac

SEQ ID NO: 288471 - DNA, 12 bp, Artificial Sequence
  Oligonucleotide primer for the detection of SNP TSC0013530
tcattacttaaa

SEQ ID NO: 288472 - DNA, 12 bp, Artificial Sequence
  Oligonucleotide primer for the detection of SNP TSC0013530
agtaaaggaatt

SEQ ID NO: 288473 - DNA, 12 bp, Artificial Sequence
  Oligonucleotide primer for the detection of SNP TSC0013530
ttattatttaaa

SEQ ID NO: 288474 - DNA, 12 bp, Artificial Sequence
  Oligonucleotide primer for the detection of SNP TSC0013533
aaatatctaaac

SEQ ID NO: 288475 - DNA, 12 bp, Artificial Sequence
  Oligonucleotide primer for the detection of SNP TSC0013533
gtttgtttatta

SEQ ID NO: 288476 - DNA, 12 bp, Artificial Sequence
  Oligonucleotide primer for the detection of SNP TSC0013535
taaaaaaactac

SEQ ID NO: 288477 - DNA, 12 bp, Artificial Sequence
  Oligonucleotide primer for the detection of SNP TSC0013535
aaggagtatgta

SEQ ID NO: 288478 - DNA, 12 bp, Artificial Sequence
  Oligonucleotide primer for the detection of SNP TSC0013536
aaaactacaata

SEQ ID NO: 288479 - DNA, 12 bp, Artificial Sequence
  Oligonucleotide primer for the detection of SNP TSC0013536
aaaactacgata

SEQ ID NO: 288480 - DNA, 12 bp, Artificial Sequence
  Oligonucleotide primer for the detection of SNP TSC0013536
agtagttttttt

SEQ ID NO: 288481 - DNA, 12 bp, Artificial Sequence
  Oligonucleotide primer for the detection of SNP TSC0013536
aacaaccccccc

SEQ ID NO: 288482 - DNA, 12 bp, Artificial Sequence
  Oligonucleotide primer for the detection of SNP TSC0013536
aaaattgtgatg

SEQ ID NO: 288483 - DNA, 12 bp, Artificial Sequence
  Oligonucleotide primer for the detection of SNP TSC0013536
aaaattgcgatg

SEQ ID NO: 288484 - DNA, 12 bp, Artificial Sequence
  Oligonucleotide primer for the detection of SNP TSC0013537
tatatttttctt

SEQ ID NO: 288485 - DNA, 12 bp, Artificial Sequence
  Oligonucleotide primer for the detection of SNP TSC0013537
aaattgaaataa

SEQ ID NO: 288486 - DNA, 12 bp, Artificial Sequence
  Oligonucleotide primer for the detection of SNP TSC0013538
actaaatcaaaa

SEQ ID NO: 288487 - DNA, 12 bp, Artificial Sequence
  Oligonucleotide primer for the detection of SNP TSC0013538
gatgattttggt

SEQ ID NO: 288488 - DNA, 12 bp, Artificial Sequence
  Oligonucleotide primer for the detection of SNP TSC0013538
aataactttaat

SEQ ID NO: 288489 - DNA, 12 bp, Artificial Sequence
  Oligonucleotide primer for the detection of SNP TSC0013538
gttgaattaaag

SEQ ID NO: 288490 - DNA, 12 bp, Artificial Sequence
  Oligonucleotide primer for the detection of SNP TSC0013539
tatccaaaccct

SEQ ID NO: 288491 - DNA, 12 bp, Artificial Sequence
  Oligonucleotide primer for the detection of SNP TSC0013539
tttagtgattgt

SEQ ID NO: 288492 - DNA, 12 bp, Artificial Sequence
  Oligonucleotide primer for the detection of SNP TSC0013539
tttagtgatcgt

SEQ ID NO: 288493 - DNA, 12 bp, Artificial Sequence
  Oligonucleotide primer for the detection of SNP TSC0013539
cccaataaccat

SEQ ID NO: 288494 - DNA, 12 bp, Artificial Sequence
  Oligonucleotide primer for the detection of SNP TSC0013539
cccaataaccgt

SEQ ID NO: 288495 - DNA, 12 bp, Artificial Sequence
  Oligonucleotide primer for the detection of SNP TSC0013540
ttcatattttta

SEQ ID NO: 288496 - DNA, 12 bp, Artificial Sequence
  Oligonucleotide primer for the detection of SNP TSC0013540
gtgtttggttat

SEQ ID NO: 288497 - DNA, 12 bp, Artificial Sequence
  Oligonucleotide primer for the detection of SNP TSC0013540
atatttaatcac

SEQ ID NO: 288498 - DNA, 12 bp, Artificial Sequence
  Oligonucleotide primer for the detection of SNP TSC0013541
tcttttccctcc

SEQ ID NO: 288499 - DNA, 12 bp, Artificial Sequence
  Oligonucleotide primer for the detection of SNP TSC0013541
ttttttaaaata

SEQ ID NO: 288500 - DNA, 12 bp, Artificial Sequence
  Oligonucleotide primer for the detection of SNP TSC0013542
cattcaaataat

SEQ ID NO: 288501 - DNA, 12 bp, Artificial Sequence
  Oligonucleotide primer for the detection of SNP TSC0013542
ttttatatttga

SEQ ID NO: 288502 - DNA, 12 bp, Artificial Sequence
  Oligonucleotide primer for the detection of SNP TSC0013543
tctacccacaaa

SEQ ID NO: 288503 - DNA, 12 bp, Artificial Sequence
  Oligonucleotide primer for the detection of SNP TSC0013543
taatttttgtgt

SEQ ID NO: 288504 - DNA, 12 bp, Artificial Sequence
  Oligonucleotide primer for the detection of SNP TSC0013543
ataatttctata

SEQ ID NO: 288505 - DNA, 12 bp, Artificial Sequence
  Oligonucleotide primer for the detection of SNP TSC0013543
gtttttatttat

SEQ ID NO: 288506 - DNA, 12 bp, Artificial Sequence
  Oligonucleotide primer for the detection of SNP TSC0013545
ccaattcttctc

SEQ ID NO: 288507 - DNA, 12 bp, Artificial Sequence
  Oligonucleotide primer for the detection of SNP TSC0013545
ttgtaaattggg

SEQ ID NO: 288508 - DNA, 12 bp, Artificial Sequence
  Oligonucleotide primer for the detection of SNP TSC0013546
aaaaaaaactaa

SEQ ID NO: 288509 - DNA, 12 bp, Artificial Sequence
  Oligonucleotide primer for the detection of SNP TSC0013546
aggtaaggttag

SEQ ID NO: 288510 - DNA, 12 bp, Artificial Sequence
  Oligonucleotide primer for the detection of SNP TSC0013546
aaacaaaaccaa

SEQ ID NO: 288511 - DNA, 12 bp, Artificial Sequence
  Oligonucleotide primer for the detection of SNP TSC0013546
agggggaattgg

SEQ ID NO: 288512 - DNA, 12 bp, Artificial Sequence
  Oligonucleotide primer for the detection of SNP TSC0013547
cacaaaaaaaac

SEQ ID NO: 288513 - DNA, 12 bp, Artificial Sequence
  Oligonucleotide primer for the detection of SNP TSC0013547
atttatatagag

SEQ ID NO: 288514 - DNA, 12 bp, Artificial Sequence
  Oligonucleotide primer for the detection of SNP TSC0013548
taatatatatat

SEQ ID NO: 288515 - DNA, 12 bp, Artificial Sequence
  Oligonucleotide primer for the detection of SNP TSC0013548
gaatatttttta

SEQ ID NO: 288516 - DNA, 12 bp, Artificial Sequence
  Oligonucleotide primer for the detection of SNP TSC0013549
acacatcaattt

SEQ ID NO: 288517 - DNA, 12 bp, Artificial Sequence
  Oligonucleotide primer for the detection of SNP TSC0013549
ggggattttgaa

SEQ ID NO: 288518 - DNA, 12 bp, Artificial Sequence
  Oligonucleotide primer for the detection of SNP TSC0013553
tgttgttttttt

SEQ ID NO: 288519 - DNA, 12 bp, Artificial Sequence
  Oligonucleotide primer for the detection of SNP TSC0013553
tattactcttct

SEQ ID NO: 288520 - DNA, 12 bp, Artificial Sequence
  Oligonucleotide primer for the detection of SNP TSC0013553
aggaaggagagg

SEQ ID NO: 288521 - DNA, 12 bp, Artificial Sequence
  Oligonucleotide primer for the detection of SNP TSC0013554
gttatgattatg

SEQ ID NO: 288522 - DNA, 12 bp, Artificial Sequence
  Oligonucleotide primer for the detection of SNP TSC0013554
accataatcata

SEQ ID NO: 288523 - DNA, 12 bp, Artificial Sequence
  Oligonucleotide primer for the detection of SNP TSC0013554
agattggagtgt

SEQ ID NO: 288524 - DNA, 12 bp, Artificial Sequence
  Oligonucleotide primer for the detection of SNP TSC0013555
ttgttttaaaaa

SEQ ID NO: 288525 - DNA, 12 bp, Artificial Sequence
  Oligonucleotide primer for the detection of SNP TSC0013556
aaaatatacccc

SEQ ID NO: 288526 - DNA, 12 bp, Artificial Sequence
  Oligonucleotide primer for the detection of SNP TSC0013556
gtggtattagta

SEQ ID NO: 288527 - DNA, 12 bp, Artificial Sequence
  Oligonucleotide primer for the detection of SNP TSC0013556
gcggtattagta

SEQ ID NO: 288528 - DNA, 12 bp, Artificial Sequence
  Oligonucleotide primer for the detection of SNP TSC0013559
ttttatagagtg

SEQ ID NO: 288529 - DNA, 12 bp, Artificial Sequence
  Oligonucleotide primer for the detection of SNP TSC0013560
ctacataaaatc

SEQ ID NO: 288530 - DNA, 12 bp, Artificial Sequence
  Oligonucleotide primer for the detection of SNP TSC0013560
gaatagttttgt

SEQ ID NO: 288531 - DNA, 12 bp, Artificial Sequence
  Oligonucleotide primer for the detection of SNP TSC0013560
gaatagttttgc

SEQ ID NO: 288532 - DNA, 12 bp, Artificial Sequence
  Oligonucleotide primer for the detection of SNP TSC0013560
taaacaacctta

SEQ ID NO: 288533 - DNA, 12 bp, Artificial Sequence
  Oligonucleotide primer for the detection of SNP TSC0013560
tgtataaaattt

SEQ ID NO: 288534 - DNA, 12 bp, Artificial Sequence
  Oligonucleotide primer for the detection of SNP TSC0013561
cataaaaattta

SEQ ID NO: 288535 - DNA, 12 bp, Artificial Sequence
  Oligonucleotide primer for the detection of SNP TSC0013561
gaaataatttgt

SEQ ID NO: 288536 - DNA, 12 bp, Artificial Sequence
  Oligonucleotide primer for the detection of SNP TSC0013561
aaaataatctat

SEQ ID NO: 288537 - DNA, 12 bp, Artificial Sequence
  Oligonucleotide primer for the detection of SNP TSC0013561
tatgggggtttg

SEQ ID NO: 288538 - DNA, 12 bp, Artificial Sequence
  Oligonucleotide primer for the detection of SNP TSC0013563
aaaacaaaactt

SEQ ID NO: 288539 - DNA, 12 bp, Artificial Sequence
  Oligonucleotide primer for the detection of SNP TSC0013563
tgttataatttg

SEQ ID NO: 288540 - DNA, 12 bp, Artificial Sequence
  Oligonucleotide primer for the detection of SNP TSC0013564
atatatcaatat

SEQ ID NO: 288541 - DNA, 12 bp, Artificial Sequence
  Oligonucleotide primer for the detection of SNP TSC0013564
tttagggtttag

SEQ ID NO: 288542 - DNA, 12 bp, Artificial Sequence
  Oligonucleotide primer for the detection of SNP TSC0013565
cacaccatttaa

SEQ ID NO: 288543 - DNA, 12 bp, Artificial Sequence
  Oligonucleotide primer for the detection of SNP TSC0013565
atatatgatttt

SEQ ID NO: 288544 - DNA, 12 bp, Artificial Sequence
  Oligonucleotide primer for the detection of SNP TSC0013565
acaatatataat

SEQ ID NO: 288545 - DNA, 12 bp, Artificial Sequence
  Oligonucleotide primer for the detection of SNP TSC0013565
tttatattattt

SEQ ID NO: 288546 - DNA, 12 bp, Artificial Sequence
  Oligonucleotide primer for the detection of SNP TSC0013571
tacaatattaat

SEQ ID NO: 288547 - DNA, 12 bp, Artificial Sequence
  Oligonucleotide primer for the detection of SNP TSC0013571
tgttttttgtat

SEQ ID NO: 288548 - DNA, 12 bp, Artificial Sequence
  Oligonucleotide primer for the detection of SNP TSC0013571
tatttcttacac

SEQ ID NO: 288549 - DNA, 12 bp, Artificial Sequence
  Oligonucleotide primer for the detection of SNP TSC0013571
tgtaatattaat

SEQ ID NO: 288550 - DNA, 12 bp, Artificial Sequence
  Oligonucleotide primer for the detection of SNP TSC0013572
aaccccactcaa

SEQ ID NO: 288551 - DNA, 12 bp, Artificial Sequence
  Oligonucleotide primer for the detection of SNP TSC0013572
ttggttgttata

SEQ ID NO: 288552 - DNA, 12 bp, Artificial Sequence
  Oligonucleotide primer for the detection of SNP TSC0013573
accataaacatt

SEQ ID NO: 288553 - DNA, 12 bp, Artificial Sequence
  Oligonucleotide primer for the detection of SNP TSC0013573
accataaacgtt

SEQ ID NO: 288554 - DNA, 12 bp, Artificial Sequence
  Oligonucleotide primer for the detection of SNP TSC0013573
accgtaaacatt

SEQ ID NO: 288555 - DNA, 12 bp, Artificial Sequence
  Oligonucleotide primer for the detection of SNP TSC0013573
accgtaaacgtt

SEQ ID NO: 288556 - DNA, 12 bp, Artificial Sequence
  Oligonucleotide primer for the detection of SNP TSC0013573
ttggaaaagtaa

SEQ ID NO: 288557 - DNA, 12 bp, Artificial Sequence
  Oligonucleotide primer for the detection of SNP TSC0013573
ctaaaaaaacaa

SEQ ID NO: 288558 - DNA, 12 bp, Artificial Sequence
  Oligonucleotide primer for the detection of SNP TSC0013573
gttgtgggtgtt

SEQ ID NO: 288559 - DNA, 12 bp, Artificial Sequence
  Oligonucleotide primer for the detection of SNP TSC0013573
gtcgtgggtgtt

SEQ ID NO: 288560 - DNA, 12 bp, Artificial Sequence
  Oligonucleotide primer for the detection of SNP TSC0013573
gttgtgggcgtt

SEQ ID NO: 288561 - DNA, 12 bp, Artificial Sequence
  Oligonucleotide primer for the detection of SNP TSC0013573
gtcgtgggcgtt

SEQ ID NO: 288562 - DNA, 12 bp, Artificial Sequence
  Oligonucleotide primer for the detection of SNP TSC0013577
aaaccttctaac

SEQ ID NO: 288563 - DNA, 12 bp, Artificial Sequence
  Oligonucleotide primer for the detection of SNP TSC0013577
tgttaggtttgg

SEQ ID NO: 288564 - DNA, 12 bp, Artificial Sequence
  Oligonucleotide primer for the detection of SNP TSC0013579
ttcaattaacac

SEQ ID NO: 288565 - DNA, 12 bp, Artificial Sequence
  Oligonucleotide primer for the detection of SNP TSC0013579
tgataattttta

SEQ ID NO: 288566 - DNA, 12 bp, Artificial Sequence
  Oligonucleotide primer for the detection of SNP TSC0013579
cgataattttta

SEQ ID NO: 288567 - DNA, 12 bp, Artificial Sequence
  Oligonucleotide primer for the detection of SNP TSC0013580
tcaattcctcta

SEQ ID NO: 288568 - DNA, 12 bp, Artificial Sequence
  Oligonucleotide primer for the detection of SNP TSC0013580
ggatggatggat

SEQ ID NO: 288569 - DNA, 12 bp, Artificial Sequence
  Oligonucleotide primer for the detection of SNP TSC0013581
aataaaacaaat

SEQ ID NO: 288570 - DNA, 12 bp, Artificial Sequence
  Oligonucleotide primer for the detection of SNP TSC0013581
tatttgtattta

SEQ ID NO: 288571 - DNA, 12 bp, Artificial Sequence
  Oligonucleotide primer for the detection of SNP TSC0013582
taacaaaaattt

SEQ ID NO: 288572 - DNA, 12 bp, Artificial Sequence
  Oligonucleotide primer for the detection of SNP TSC0013582
gatatgaatttt

SEQ ID NO: 288573 - DNA, 12 bp, Artificial Sequence
  Oligonucleotide primer for the detection of SNP TSC0013582
aacataaatttt

SEQ ID NO: 288574 - DNA, 12 bp, Artificial Sequence
  Oligonucleotide primer for the detection of SNP TSC0013582
tgatagaaattt

SEQ ID NO: 288575 - DNA, 12 bp, Artificial Sequence
  Oligonucleotide primer for the detection of SNP TSC0013583
tccaataaacat

SEQ ID NO: 288576 - DNA, 12 bp, Artificial Sequence
  Oligonucleotide primer for the detection of SNP TSC0013583
taaatatgaaaa

SEQ ID NO: 288577 - DNA, 12 bp, Artificial Sequence
  Oligonucleotide primer for the detection of SNP TSC0013583
taaatataaaaa

SEQ ID NO: 288578 - DNA, 12 bp, Artificial Sequence
  Oligonucleotide primer for the detection of SNP TSC0013584
cctatcaaaatc

SEQ ID NO: 288579 - DNA, 12 bp, Artificial Sequence
  Oligonucleotide primer for the detection of SNP TSC0013584
gtagtagaattg

SEQ ID NO: 288580 - DNA, 12 bp, Artificial Sequence
  Oligonucleotide primer for the detection of SNP TSC0013585
attatcaaaata

SEQ ID NO: 288581 - DNA, 12 bp, Artificial Sequence
  Oligonucleotide primer for the detection of SNP TSC0013585
gggttatattgt

SEQ ID NO: 288582 - DNA, 12 bp, Artificial Sequence
  Oligonucleotide primer for the detection of SNP TSC0013585
gggttatatcgt

SEQ ID NO: 288583 - DNA, 12 bp, Artificial Sequence
  Oligonucleotide primer for the detection of SNP TSC0013585
aaatcacaccat

SEQ ID NO: 288584 - DNA, 12 bp, Artificial Sequence
  Oligonucleotide primer for the detection of SNP TSC0013585
aaatcacaccgt

SEQ ID NO: 288585 - DNA, 12 bp, Artificial Sequence
  Oligonucleotide primer for the detection of SNP TSC0013585
gttattagagtg

SEQ ID NO: 288586 - DNA, 12 bp, Artificial Sequence
  Oligonucleotide primer for the detection of SNP TSC0013587
ataacctcctac

SEQ ID NO: 288587 - DNA, 12 bp, Artificial Sequence
  Oligonucleotide primer for the detection of SNP TSC0013587
ttatttgttttt

SEQ ID NO: 288588 - DNA, 12 bp, Artificial Sequence
  Oligonucleotide primer for the detection of SNP TSC0013587
tcacctattcct

SEQ ID NO: 288589 - DNA, 12 bp, Artificial Sequence
  Oligonucleotide primer for the detection of SNP TSC0013587
atagttttttgt

SEQ ID NO: 288590 - DNA, 12 bp, Artificial Sequence
  Oligonucleotide primer for the detection of SNP TSC0013588
tcccctaaaacc

SEQ ID NO: 288591 - DNA, 12 bp, Artificial Sequence
  Oligonucleotide primer for the detection of SNP TSC0013588
ttggaagagaag

SEQ ID NO: 288592 - DNA, 12 bp, Artificial Sequence
  Oligonucleotide primer for the detection of SNP TSC0013589
aactcactaaac

SEQ ID NO: 288593 - DNA, 12 bp, Artificial Sequence
  Oligonucleotide primer for the detection of SNP TSC0013589
attagggattat

SEQ ID NO: 288594 - DNA, 12 bp, Artificial Sequence
  Oligonucleotide primer for the detection of SNP TSC0013590
ttcaaaaaaaaa

SEQ ID NO: 288595 - DNA, 12 bp, Artificial Sequence
  Oligonucleotide primer for the detection of SNP TSC0013590
gtttgttttttt

SEQ ID NO: 288596 - DNA, 12 bp, Artificial Sequence
  Oligonucleotide primer for the detection of SNP TSC0013591
gtttgtttgttt

SEQ ID NO: 288597 - DNA, 12 bp, Artificial Sequence
  Oligonucleotide primer for the detection of SNP TSC0013592
aaaaaaaatcca

SEQ ID NO: 288598 - DNA, 12 bp, Artificial Sequence
  Oligonucleotide primer for the detection of SNP TSC0013592
tttttggatatt

SEQ ID NO: 288599 - DNA, 12 bp, Artificial Sequence
  Oligonucleotide primer for the detection of SNP TSC0013592
tttttggatatc

SEQ ID NO: 288600 - DNA, 12 bp, Artificial Sequence
  Oligonucleotide primer for the detection of SNP TSC0013592
cccctaaacacc

SEQ ID NO: 288601 - DNA, 12 bp, Artificial Sequence
  Oligonucleotide primer for the detection of SNP TSC0013592
aagaaggagttt

SEQ ID NO: 288602 - DNA, 12 bp, Artificial Sequence
  Oligonucleotide primer for the detection of SNP TSC0013593
taaataacaaca

SEQ ID NO: 288603 - DNA, 12 bp, Artificial Sequence
  Oligonucleotide primer for the detection of SNP TSC0013593
taaataacaacg

SEQ ID NO: 288604 - DNA, 12 bp, Artificial Sequence
  Oligonucleotide primer for the detection of SNP TSC0013593
atattttttttc

SEQ ID NO: 288605 - DNA, 12 bp, Artificial Sequence
  Oligonucleotide primer for the detection of SNP TSC0013593
caccttcttcca

SEQ ID NO: 288606 - DNA, 12 bp, Artificial Sequence
  Oligonucleotide primer for the detection of SNP TSC0013593
caccttcttccg

SEQ ID NO: 288607 - DNA, 12 bp, Artificial Sequence
  Oligonucleotide primer for the detection of SNP TSC0013593
gtgggtgatagt

SEQ ID NO: 288608 - DNA, 12 bp, Artificial Sequence
  Oligonucleotide primer for the detection of SNP TSC0013593
gtgggtgatagc

SEQ ID NO: 288609 - DNA, 12 bp, Artificial Sequence
  Oligonucleotide primer for the detection of SNP TSC0013595
aataacaacata

SEQ ID NO: 288610 - DNA, 12 bp, Artificial Sequence
  Oligonucleotide primer for the detection of SNP TSC0013595
ttataagagttt

SEQ ID NO: 288611 - DNA, 12 bp, Artificial Sequence
  Oligonucleotide primer for the detection of SNP TSC0013595
taatagtaatat

SEQ ID NO: 288612 - DNA, 12 bp, Artificial Sequence
  Oligonucleotide primer for the detection of SNP TSC0013596
ccaataaaatat

SEQ ID NO: 288613 - DNA, 12 bp, Artificial Sequence
  Oligonucleotide primer for the detection of SNP TSC0013596
ccgataaaatat

SEQ ID NO: 288614 - DNA, 12 bp, Artificial Sequence
  Oligonucleotide primer for the detection of SNP TSC0013596
gattttatgtta

SEQ ID NO: 288615 - DNA, 12 bp, Artificial Sequence
  Oligonucleotide primer for the detection of SNP TSC0013596
aatctcatatta

SEQ ID NO: 288616 - DNA, 12 bp, Artificial Sequence
  Oligonucleotide primer for the detection of SNP TSC0013596
ttggtgaagtgt

SEQ ID NO: 288617 - DNA, 12 bp, Artificial Sequence
  Oligonucleotide primer for the detection of SNP TSC0013596
tcggtgaagtgt

SEQ ID NO: 288618 - DNA, 12 bp, Artificial Sequence
  Oligonucleotide primer for the detection of SNP TSC0013597
tcatcttatttc

SEQ ID NO: 288619 - DNA, 12 bp, Artificial Sequence
  Oligonucleotide primer for the detection of SNP TSC0013597
gtaatattttta

SEQ ID NO: 288620 - DNA, 12 bp, Artificial Sequence
  Oligonucleotide primer for the detection of SNP TSC0013598
tattagtagtta

SEQ ID NO: 288621 - DNA, 12 bp, Artificial Sequence
  Oligonucleotide primer for the detection of SNP TSC0013601
aacacacatact

SEQ ID NO: 288622 - DNA, 12 bp, Artificial Sequence
  Oligonucleotide primer for the detection of SNP TSC0013601
atatctacccca

SEQ ID NO: 288623 - DNA, 12 bp, Artificial Sequence
  Oligonucleotide primer for the detection of SNP TSC0013601
ggtatatatgtt

SEQ ID NO: 288624 - DNA, 12 bp, Artificial Sequence
  Oligonucleotide primer for the detection of SNP TSC0013602
aaaaaactaata

SEQ ID NO: 288625 - DNA, 12 bp, Artificial Sequence
  Oligonucleotide primer for the detection of SNP TSC0013602
tatgtgtgttat

SEQ ID NO: 288626 - DNA, 12 bp, Artificial Sequence
  Oligonucleotide primer for the detection of SNP TSC0013602
catatataccat

SEQ ID NO: 288627 - DNA, 12 bp, Artificial Sequence
  Oligonucleotide primer for the detection of SNP TSC0013602
gggaagttggtg

SEQ ID NO: 288628 - DNA, 12 bp, Artificial Sequence
  Oligonucleotide primer for the detection of SNP TSC0013604
aaaatcaattaa

SEQ ID NO: 288629 - DNA, 12 bp, Artificial Sequence
  Oligonucleotide primer for the detection of SNP TSC0013604
attaagtttatg

SEQ ID NO: 288630 - DNA, 12 bp, Artificial Sequence
  Oligonucleotide primer for the detection of SNP TSC0013604
attaagtttacg

SEQ ID NO: 288631 - DNA, 12 bp, Artificial Sequence
  Oligonucleotide primer for the detection of SNP TSC0013605
acatacataact

SEQ ID NO: 288632 - DNA, 12 bp, Artificial Sequence
  Oligonucleotide primer for the detection of SNP TSC0013605
aggatgttatga

SEQ ID NO: 288633 - DNA, 12 bp, Artificial Sequence
  Oligonucleotide primer for the detection of SNP TSC0013606
aaccctaactcc

SEQ ID NO: 288634 - DNA, 12 bp, Artificial Sequence
  Oligonucleotide primer for the detection of SNP TSC0013606
gaccctaactcc

SEQ ID NO: 288635 - DNA, 12 bp, Artificial Sequence
  Oligonucleotide primer for the detection of SNP TSC0013606
tgggtttttgta

SEQ ID NO: 288636 - DNA, 12 bp, Artificial Sequence
  Oligonucleotide primer for the detection of SNP TSC0013606
taaacttctaca

SEQ ID NO: 288637 - DNA, 12 bp, Artificial Sequence
  Oligonucleotide primer for the detection of SNP TSC0013606
ggttttgatttt

SEQ ID NO: 288638 - DNA, 12 bp, Artificial Sequence
  Oligonucleotide primer for the detection of SNP TSC0013607
ttagagatatgg

SEQ ID NO: 288639 - DNA, 12 bp, Artificial Sequence
  Oligonucleotide primer for the detection of SNP TSC0013607
ctaaaaacataa

SEQ ID NO: 288640 - DNA, 12 bp, Artificial Sequence
  Oligonucleotide primer for the detection of SNP TSC0013607
aaagtaaaatat

SEQ ID NO: 288641 - DNA, 12 bp, Artificial Sequence
  Oligonucleotide primer for the detection of SNP TSC0013608
atattggttagg

SEQ ID NO: 288642 - DNA, 12 bp, Artificial Sequence
  Oligonucleotide primer for the detection of SNP TSC0013608
atatcggttagg

SEQ ID NO: 288643 - DNA, 12 bp, Artificial Sequence
  Oligonucleotide primer for the detection of SNP TSC0013609
ctaaaataacca

SEQ ID NO: 288644 - DNA, 12 bp, Artificial Sequence
  Oligonucleotide primer for the detection of SNP TSC0013609
gaaagataggtt

SEQ ID NO: 288645 - DNA, 12 bp, Artificial Sequence
  Oligonucleotide primer for the detection of SNP TSC0013609
gaaagataggtc

SEQ ID NO: 288646 - DNA, 12 bp, Artificial Sequence
  Oligonucleotide primer for the detection of SNP TSC0013609
ctaaaaaacaaa

SEQ ID NO: 288647 - DNA, 12 bp, Artificial Sequence
  Oligonucleotide primer for the detection of SNP TSC0013609
ttaaggtaatta

SEQ ID NO: 288648 - DNA, 12 bp, Artificial Sequence
  Oligonucleotide primer for the detection of SNP TSC0013610
ataacctcccct

SEQ ID NO: 288649 - DNA, 12 bp, Artificial Sequence
  Oligonucleotide primer for the detection of SNP TSC0013610
ggttttatagga

SEQ ID NO: 288650 - DNA, 12 bp, Artificial Sequence
  Oligonucleotide primer for the detection of SNP TSC0013612
taaccacaccaa

SEQ ID NO: 288651 - DNA, 12 bp, Artificial Sequence
  Oligonucleotide primer for the detection of SNP TSC0013612
taaccacaccga

SEQ ID NO: 288652 - DNA, 12 bp, Artificial Sequence
  Oligonucleotide primer for the detection of SNP TSC0013612
attcccttataa

SEQ ID NO: 288653 - DNA, 12 bp, Artificial Sequence
  Oligonucleotide primer for the detection of SNP TSC0013612
tggttatattga

SEQ ID NO: 288654 - DNA, 12 bp, Artificial Sequence
  Oligonucleotide primer for the detection of SNP TSC0013612
tggttatatcga

SEQ ID NO: 288655 - DNA, 12 bp, Artificial Sequence
  Oligonucleotide primer for the detection of SNP TSC0013613
taattacttaat

SEQ ID NO: 288656 - DNA, 12 bp, Artificial Sequence
  Oligonucleotide primer for the detection of SNP TSC0013613
gtataagttttg

SEQ ID NO: 288657 - DNA, 12 bp, Artificial Sequence
  Oligonucleotide primer for the detection of SNP TSC0013614
caaatatccatt

SEQ ID NO: 288658 - DNA, 12 bp, Artificial Sequence
  Oligonucleotide primer for the detection of SNP TSC0013614
cgaatatccatt

SEQ ID NO: 288659 - DNA, 12 bp, Artificial Sequence
  Oligonucleotide primer for the detection of SNP TSC0013615
tttataatttta

SEQ ID NO: 288660 - DNA, 12 bp, Artificial Sequence
  Oligonucleotide primer for the detection of SNP TSC0013615
aatatgttagat

SEQ ID NO: 288661 - DNA, 12 bp, Artificial Sequence
  Oligonucleotide primer for the detection of SNP TSC0013615
aatatgttagac

SEQ ID NO: 288662 - DNA, 12 bp, Artificial Sequence
  Oligonucleotide primer for the detection of SNP TSC0013615
aacatattaaac

SEQ ID NO: 288663 - DNA, 12 bp, Artificial Sequence
  Oligonucleotide primer for the detection of SNP TSC0013616
accttatcattc

SEQ ID NO: 288664 - DNA, 12 bp, Artificial Sequence
  Oligonucleotide primer for the detection of SNP TSC0013616
aataatgtggaa

SEQ ID NO: 288665 - DNA, 12 bp, Artificial Sequence
  Oligonucleotide primer for the detection of SNP TSC0013616
aataatgcggaa

SEQ ID NO: 288666 - DNA, 12 bp, Artificial Sequence
  Oligonucleotide primer for the detection of SNP TSC0013617
catttactatac

SEQ ID NO: 288667 - DNA, 12 bp, Artificial Sequence
  Oligonucleotide primer for the detection of SNP TSC0013617
tgtattttttta

SEQ ID NO: 288668 - DNA, 12 bp, Artificial Sequence
  Oligonucleotide primer for the detection of SNP TSC0013618
caacccaactac

SEQ ID NO: 288669 - DNA, 12 bp, Artificial Sequence
  Oligonucleotide primer for the detection of SNP TSC0013618
tggaagttttag

SEQ ID NO: 288670 - DNA, 12 bp, Artificial Sequence
  Oligonucleotide primer for the detection of SNP TSC0013623
aaacaaaccact

SEQ ID NO: 288671 - DNA, 12 bp, Artificial Sequence
  Oligonucleotide primer for the detection of SNP TSC0013623
taggtagataga

SEQ ID NO: 288672 - DNA, 12 bp, Artificial Sequence
  Oligonucleotide primer for the detection of SNP TSC0013623
aaacaaataaaa

SEQ ID NO: 288673 - DNA, 12 bp, Artificial Sequence
  Oligonucleotide primer for the detection of SNP TSC0013623
gtaggttatttt

SEQ ID NO: 288674 - DNA, 12 bp, Artificial Sequence
  Oligonucleotide primer for the detection of SNP TSC0013624
aaataaaaatct

SEQ ID NO: 288675 - DNA, 12 bp, Artificial Sequence
  Oligonucleotide primer for the detection of SNP TSC0013624
tgggtaatttag

SEQ ID NO: 288676 - DNA, 12 bp, Artificial Sequence
  Oligonucleotide primer for the detection of SNP TSC0013628
tcttacccccat

SEQ ID NO: 288677 - DNA, 12 bp, Artificial Sequence
  Oligonucleotide primer for the detection of SNP TSC0013628
tcttacccccgt

SEQ ID NO: 288678 - DNA, 12 bp, Artificial Sequence
  Oligonucleotide primer for the detection of SNP TSC0013628
tgtgaggatata

SEQ ID NO: 288679 - DNA, 12 bp, Artificial Sequence
  Oligonucleotide primer for the detection of SNP TSC0013628
tataaaaacaca

SEQ ID NO: 288680 - DNA, 12 bp, Artificial Sequence
  Oligonucleotide primer for the detection of SNP TSC0013628
ttttgttttcgt

SEQ ID NO: 288681 - DNA, 12 bp, Artificial Sequence
  Oligonucleotide primer for the detection of SNP TSC0013629
accattaaactc

SEQ ID NO: 288682 - DNA, 12 bp, Artificial Sequence
  Oligonucleotide primer for the detection of SNP TSC0013629
gtgagatgaata

SEQ ID NO: 288683 - DNA, 12 bp, Artificial Sequence
  Oligonucleotide primer for the detection of SNP TSC0013629
ataaaataaata

SEQ ID NO: 288684 - DNA, 12 bp, Artificial Sequence
  Oligonucleotide primer for the detection of SNP TSC0013629
gttattgagttt

SEQ ID NO: 288685 - DNA, 12 bp, Artificial Sequence
  Oligonucleotide primer for the detection of SNP TSC0013631
ttcaaattaccc

SEQ ID NO: 288686 - DNA, 12 bp, Artificial Sequence
  Oligonucleotide primer for the detection of SNP TSC0013631
tatttagatggg

SEQ ID NO: 288687 - DNA, 12 bp, Artificial Sequence
  Oligonucleotide primer for the detection of SNP TSC0013631
attcaaataaaa

SEQ ID NO: 288688 - DNA, 12 bp, Artificial Sequence
  Oligonucleotide primer for the detection of SNP TSC0013631
tttaagttgttc

SEQ ID NO: 288689 - DNA, 12 bp, Artificial Sequence
  Oligonucleotide primer for the detection of SNP TSC0013632
atttcttaccca

SEQ ID NO: 288690 - DNA, 12 bp, Artificial Sequence
  Oligonucleotide primer for the detection of SNP TSC0013632
atttcttacccg

SEQ ID NO: 288691 - DNA, 12 bp, Artificial Sequence
  Oligonucleotide primer for the detection of SNP TSC0013632
gtggagaaaagg

SEQ ID NO: 288692 - DNA, 12 bp, Artificial Sequence
  Oligonucleotide primer for the detection of SNP TSC0013632
gttttttattcg

SEQ ID NO: 288693 - DNA, 12 bp, Artificial Sequence
  Oligonucleotide primer for the detection of SNP TSC0013633
gggtaatatagt

SEQ ID NO: 288694 - DNA, 12 bp, Artificial Sequence
  Oligonucleotide primer for the detection of SNP TSC0013633
tagagatgagtt

SEQ ID NO: 288695 - DNA, 12 bp, Artificial Sequence
  Oligonucleotide primer for the detection of SNP TSC0013634
aatatagtaaga

SEQ ID NO: 288696 - DNA, 12 bp, Artificial Sequence
  Oligonucleotide primer for the detection of SNP TSC0013634
aatataacaaaa

SEQ ID NO: 288697 - DNA, 12 bp, Artificial Sequence
  Oligonucleotide primer for the detection of SNP TSC0013634
tgtagagatgag

SEQ ID NO: 288698 - DNA, 12 bp, Artificial Sequence
  Oligonucleotide primer for the detection of SNP TSC0013635
accttcttaaac

SEQ ID NO: 288699 - DNA, 12 bp, Artificial Sequence
  Oligonucleotide primer for the detection of SNP TSC0013635
aataaggggaag

SEQ ID NO: 288700 - DNA, 12 bp, Artificial Sequence
  Oligonucleotide primer for the detection of SNP TSC0013636
acacttaaacaa

SEQ ID NO: 288701 - DNA, 12 bp, Artificial Sequence
  Oligonucleotide primer for the detection of SNP TSC0013636
atacttcatact

SEQ ID NO: 288702 - DNA, 12 bp, Artificial Sequence
  Oligonucleotide primer for the detection of SNP TSC0013636
agtatttgggta

SEQ ID NO: 288703 - DNA, 12 bp, Artificial Sequence
  Oligonucleotide primer for the detection of SNP TSC0013637
aaataccaaata

SEQ ID NO: 288704 - DNA, 12 bp, Artificial Sequence
  Oligonucleotide primer for the detection of SNP TSC0013637
tttattaatttt

SEQ ID NO: 288705 - DNA, 12 bp, Artificial Sequence
  Oligonucleotide primer for the detection of SNP TSC0013637
cttactaatctt

SEQ ID NO: 288706 - DNA, 12 bp, Artificial Sequence
  Oligonucleotide primer for the detection of SNP TSC0013637
gaatgttagata

SEQ ID NO: 288707 - DNA, 12 bp, Artificial Sequence
  Oligonucleotide primer for the detection of SNP TSC0013638
atattactcttt

SEQ ID NO: 288708 - DNA, 12 bp, Artificial Sequence
  Oligonucleotide primer for the detection of SNP TSC0013638
tattttgtttgg

SEQ ID NO: 288709 - DNA, 12 bp, Artificial Sequence
  Oligonucleotide primer for the detection of SNP TSC0013639
cttaaccaaatc

SEQ ID NO: 288710 - DNA, 12 bp, Artificial Sequence
  Oligonucleotide primer for the detection of SNP TSC0013639
attataataaaa

SEQ ID NO: 288711 - DNA, 12 bp, Artificial Sequence
  Oligonucleotide primer for the detection of SNP TSC0013643
tattataataat

SEQ ID NO: 288712 - DNA, 12 bp, Artificial Sequence
  Oligonucleotide primer for the detection of SNP TSC0013643
attttttatgtg

SEQ ID NO: 288713 - DNA, 12 bp, Artificial Sequence
  Oligonucleotide primer for the detection of SNP TSC0013644
acaatactataa

SEQ ID NO: 288714 - DNA, 12 bp, Artificial Sequence
  Oligonucleotide primer for the detection of SNP TSC0013644
ttttatttaatt

SEQ ID NO: 288715 - DNA, 12 bp, Artificial Sequence
  Oligonucleotide primer for the detection of SNP TSC0013644
ttttatttaatc

SEQ ID NO: 288716 - DNA, 12 bp, Artificial Sequence
  Oligonucleotide primer for the detection of SNP TSC0013644
tcccatctaatc

SEQ ID NO: 288717 - DNA, 12 bp, Artificial Sequence
  Oligonucleotide primer for the detection of SNP TSC0013644
atgtagtgttgt

SEQ ID NO: 288718 - DNA, 12 bp, Artificial Sequence
  Oligonucleotide primer for the detection of SNP TSC0013645
attcccatcttc

SEQ ID NO: 288719 - DNA, 12 bp, Artificial Sequence
  Oligonucleotide primer for the detection of SNP TSC0013645
agaaagataggg

SEQ ID NO: 288720 - DNA, 12 bp, Artificial Sequence
  Oligonucleotide primer for the detection of SNP TSC0013646
tttataaataaa

SEQ ID NO: 288721 - DNA, 12 bp, Artificial Sequence
  Oligonucleotide primer for the detection of SNP TSC0013646
taagtaaagttg

SEQ ID NO: 288722 - DNA, 12 bp, Artificial Sequence
  Oligonucleotide primer for the detection of SNP TSC0013646
taaataaaacta

SEQ ID NO: 288723 - DNA, 12 bp, Artificial Sequence
  Oligonucleotide primer for the detection of SNP TSC0013646
tttgtggatgaa

SEQ ID NO: 288724 - DNA, 12 bp, Artificial Sequence
  Oligonucleotide primer for the detection of SNP TSC0013648
aaaataacgaat

SEQ ID NO: 288725 - DNA, 12 bp, Artificial Sequence
  Oligonucleotide primer for the detection of SNP TSC0013648
tttaaggtttta

SEQ ID NO: 288726 - DNA, 12 bp, Artificial Sequence
  Oligonucleotide primer for the detection of SNP TSC0013649
attcaatacttc

SEQ ID NO: 288727 - DNA, 12 bp, Artificial Sequence
  Oligonucleotide primer for the detection of SNP TSC0013649
attttttagggt

SEQ ID NO: 288728 - DNA, 12 bp, Artificial Sequence
  Oligonucleotide primer for the detection of SNP TSC0013649
attttttagggc

SEQ ID NO: 288729 - DNA, 12 bp, Artificial Sequence
  Oligonucleotide primer for the detection of SNP TSC0013649
actttccaaaac

SEQ ID NO: 288730 - DNA, 12 bp, Artificial Sequence
  Oligonucleotide primer for the detection of SNP TSC0013649
ttagtgtttttt

SEQ ID NO: 288731 - DNA, 12 bp, Artificial Sequence
  Oligonucleotide primer for the detection of SNP TSC0013650
aaccccatactc

SEQ ID NO: 288732 - DNA, 12 bp, Artificial Sequence
  Oligonucleotide primer for the detection of SNP TSC0013650
tattaggttatg

SEQ ID NO: 288733 - DNA, 12 bp, Artificial Sequence
  Oligonucleotide primer for the detection of SNP TSC0013650
tattaggttacg

SEQ ID NO: 288734 - DNA, 12 bp, Artificial Sequence
  Oligonucleotide primer for the detection of SNP TSC0013650
caccaaaccaca

SEQ ID NO: 288735 - DNA, 12 bp, Artificial Sequence
  Oligonucleotide primer for the detection of SNP TSC0013650
caccaaaccacg

SEQ ID NO: 288736 - DNA, 12 bp, Artificial Sequence
  Oligonucleotide primer for the detection of SNP TSC0013650
agttttatgttt

SEQ ID NO: 288737 - DNA, 12 bp, Artificial Sequence
  Oligonucleotide primer for the detection of SNP TSC0013651
gagaagttttag

SEQ ID NO: 288738 - DNA, 12 bp, Artificial Sequence
  Oligonucleotide primer for the detection of SNP TSC0013651
aaaaaattccaa

SEQ ID NO: 288739 - DNA, 12 bp, Artificial Sequence
  Oligonukleotid-Primer
aaaatgaaattg

SEQ ID NO: 288740 - DNA, 12 bp, Artificial Sequence
  Oligonucleotide primer for the detection of SNP TSC0013653
aaaaataaaact

SEQ ID NO: 288741 - DNA, 12 bp, Artificial Sequence
  Oligonucleotide primer for the detection of SNP TSC0013653
agagagggtgtt

SEQ ID NO: 288742 - DNA, 12 bp, Artificial Sequence
  Oligonucleotide primer for the detection of SNP TSC0013653
ggtgaggttttt

SEQ ID NO: 288743 - DNA, 12 bp, Artificial Sequence
  Oligonucleotide primer for the detection of SNP TSC0013653
ggtgaggttttc

SEQ ID NO: 288744 - DNA, 12 bp, Artificial Sequence
  Oligonucleotide primer for the detection of SNP TSC0013654
atcaccttatac

SEQ ID NO: 288745 - DNA, 12 bp, Artificial Sequence
  Oligonucleotide primer for the detection of SNP TSC0013654
atcgccttatac

SEQ ID NO: 288746 - DNA, 12 bp, Artificial Sequence
  Oligonucleotide primer for the detection of SNP TSC0013654
gagttgtttata

SEQ ID NO: 288747 - DNA, 12 bp, Artificial Sequence
  Oligonucleotide primer for the detection of SNP TSC0013654
aaactatccaca

SEQ ID NO: 288748 - DNA, 12 bp, Artificial Sequence
  Oligonucleotide primer for the detection of SNP TSC0013654
attgttttatgt

SEQ ID NO: 288749 - DNA, 12 bp, Artificial Sequence
  Oligonucleotide primer for the detection of SNP TSC0013654
atcgttttatgt

SEQ ID NO: 288750 - DNA, 12 bp, Artificial Sequence
  Oligonucleotide primer for the detection of SNP TSC0013655
ccccatctatcc

SEQ ID NO: 288751 - DNA, 12 bp, Artificial Sequence
  Oligonucleotide primer for the detection of SNP TSC0013655
ccccgtctatcc

SEQ ID NO: 288752 - DNA, 12 bp, Artificial Sequence
  Oligonucleotide primer for the detection of SNP TSC0013655
ggatggagtggg

SEQ ID NO: 288753 - DNA, 12 bp, Artificial Sequence
  Oligonucleotide primer for the detection of SNP TSC0013655
ttttgtttgttt

SEQ ID NO: 288754 - DNA, 12 bp, Artificial Sequence
  Oligonucleotide primer for the detection of SNP TSC0013655
tttcgtttgttt

SEQ ID NO: 288755 - DNA, 12 bp, Artificial Sequence
  Oligonucleotide primer for the detection of SNP TSC0013655
ttttgtttgttc

SEQ ID NO: 288756 - DNA, 12 bp, Artificial Sequence
  Oligonucleotide primer for the detection of SNP TSC0013655
tttcgtttgttc

SEQ ID NO: 288757 - DNA, 12 bp, Artificial Sequence
  Oligonucleotide primer for the detection of SNP TSC0013659
atcccataaatt

SEQ ID NO: 288758 - DNA, 12 bp, Artificial Sequence
  Oligonucleotide primer for the detection of SNP TSC0013659
atcccgtaaatt

SEQ ID NO: 288759 - DNA, 12 bp, Artificial Sequence
  Oligonucleotide primer for the detection of SNP TSC0013659
ataggttgttta

SEQ ID NO: 288760 - DNA, 12 bp, Artificial Sequence
  Oligonucleotide primer for the detection of SNP TSC0013660
aaccctctcccc

SEQ ID NO: 288761 - DNA, 12 bp, Artificial Sequence
  Oligonucleotide primer for the detection of SNP TSC0013660
ataataatagag

SEQ ID NO: 288762 - DNA, 12 bp, Artificial Sequence
  Oligonucleotide primer for the detection of SNP TSC0013661
tactccttaact

SEQ ID NO: 288763 - DNA, 12 bp, Artificial Sequence
  Oligonucleotide primer for the detection of SNP TSC0013661
tgatgtatttat

SEQ ID NO: 288764 - DNA, 12 bp, Artificial Sequence
  Oligonucleotide primer for the detection of SNP TSC0013661
cgatgtatttat

SEQ ID NO: 288765 - DNA, 12 bp, Artificial Sequence
  Oligonucleotide primer for the detection of SNP TSC0013661
caatatacctac

SEQ ID NO: 288766 - DNA, 12 bp, Artificial Sequence
  Oligonucleotide primer for the detection of SNP TSC0013661
cgatatacctac

SEQ ID NO: 288767 - DNA, 12 bp, Artificial Sequence
  Oligonucleotide primer for the detection of SNP TSC0013661
tgttttttggtt

SEQ ID NO: 288768 - DNA, 12 bp, Artificial Sequence
  Oligonucleotide primer for the detection of SNP TSC0013662
ttatactatctt

SEQ ID NO: 288769 - DNA, 12 bp, Artificial Sequence
  Oligonucleotide primer for the detection of SNP TSC0013662
atatctattcaa

SEQ ID NO: 288770 - DNA, 12 bp, Artificial Sequence
  Oligonucleotide primer for the detection of SNP TSC0013663
taacctcaacct

SEQ ID NO: 288771 - DNA, 12 bp, Artificial Sequence
  Oligonucleotide primer for the detection of SNP TSC0013664
attaaaaccccc

SEQ ID NO: 288772 - DNA, 12 bp, Artificial Sequence
  Oligonucleotide primer for the detection of SNP TSC0013664
agtagaattagg

SEQ ID NO: 288773 - DNA, 12 bp, Artificial Sequence
  Oligonucleotide primer for the detection of SNP TSC0013664
gttagggttttt

SEQ ID NO: 288774 - DNA, 12 bp, Artificial Sequence
  Oligonucleotide primer for the detection of SNP TSC0013665
agtgtatagagt

SEQ ID NO: 288775 - DNA, 12 bp, Artificial Sequence
  Oligonucleotide primer for the detection of SNP TSC0013665
tacacaaaataa

SEQ ID NO: 288776 - DNA, 12 bp, Artificial Sequence
  Oligonucleotide primer for the detection of SNP TSC0013665
tgtttaagagag

SEQ ID NO: 288777 - DNA, 12 bp, Artificial Sequence
  Oligonucleotide primer for the detection of SNP TSC0013666
ttcctacaaaat

SEQ ID NO: 288778 - DNA, 12 bp, Artificial Sequence
  Oligonucleotide primer for the detection of SNP TSC0013666
tggaaggtaatg

SEQ ID NO: 288779 - DNA, 12 bp, Artificial Sequence
  Oligonucleotide primer for the detection of SNP TSC0013667
ttacctaacttc

SEQ ID NO: 288780 - DNA, 12 bp, Artificial Sequence
  Oligonucleotide primer for the detection of SNP TSC0013667
tattttttattt

SEQ ID NO: 288781 - DNA, 12 bp, Artificial Sequence
  Oligonucleotide primer for the detection of SNP TSC0013667
tattttttattc

SEQ ID NO: 288782 - DNA, 12 bp, Artificial Sequence
  Oligonucleotide primer for the detection of SNP TSC0013667
ccacctcttact

SEQ ID NO: 288783 - DNA, 12 bp, Artificial Sequence
  Oligonucleotide primer for the detection of SNP TSC0013667
tgtttggttttt

SEQ ID NO: 288784 - DNA, 12 bp, Artificial Sequence
  Oligonucleotide primer for the detection of SNP TSC0013672
caaccatataat

SEQ ID NO: 288785 - DNA, 12 bp, Artificial Sequence
  Oligonucleotide primer for the detection of SNP TSC0013672
gagaggaggaaa

SEQ ID NO: 288786 - DNA, 12 bp, Artificial Sequence
  Oligonucleotide primer for the detection of SNP TSC0013677
aaaaaacctaac

SEQ ID NO: 288787 - DNA, 12 bp, Artificial Sequence
  Oligonucleotide primer for the detection of SNP TSC0013677
gaaaaacctaac

SEQ ID NO: 288788 - DNA, 12 bp, Artificial Sequence
  Oligonucleotide primer for the detection of SNP TSC0013677
tttatatatttg

SEQ ID NO: 288789 - DNA, 12 bp, Artificial Sequence
  Oligonucleotide primer for the detection of SNP TSC0013677
cctacacaccta

SEQ ID NO: 288790 - DNA, 12 bp, Artificial Sequence
  Oligonucleotide primer for the detection of SNP TSC0013677
gagaggtttgat

SEQ ID NO: 288791 - DNA, 12 bp, Artificial Sequence
  Oligonucleotide primer for the detection of SNP TSC0013677
gagaggtttgac

SEQ ID NO: 288792 - DNA, 12 bp, Artificial Sequence
  Oligonucleotide primer for the detection of SNP TSC0013678
ctctattcattt

SEQ ID NO: 288793 - DNA, 12 bp, Artificial Sequence
  Oligonucleotide primer for the detection of SNP TSC0013678
aaaagtttgaag

SEQ ID NO: 288794 - DNA, 12 bp, Artificial Sequence
  Oligonucleotide primer for the detection of SNP TSC0013679
acaaaaaataac

SEQ ID NO: 288795 - DNA, 12 bp, Artificial Sequence
  Oligonucleotide primer for the detection of SNP TSC0013679
tttggttttttg

SEQ ID NO: 288796 - DNA, 12 bp, Artificial Sequence
  Oligonucleotide primer for the detection of SNP TSC0013679
cttaatcctcta

SEQ ID NO: 288797 - DNA, 12 bp, Artificial Sequence
  Oligonucleotide primer for the detection of SNP TSC0013679
gtaggaagtaat

SEQ ID NO: 288798 - DNA, 12 bp, Artificial Sequence
  Oligonucleotide primer for the detection of SNP TSC0013680
tcctactacatt

SEQ ID NO: 288799 - DNA, 12 bp, Artificial Sequence
  Oligonucleotide primer for the detection of SNP TSC0013680
tttagagagggg

SEQ ID NO: 288800 - DNA, 12 bp, Artificial Sequence
  Oligonucleotide primer for the detection of SNP TSC0013681
taaaacacaaat

SEQ ID NO: 288801 - DNA, 12 bp, Artificial Sequence
  Oligonucleotide primer for the detection of SNP TSC0013681
tttaaaatattg

SEQ ID NO: 288802 - DNA, 12 bp, Artificial Sequence
  Oligonucleotide primer for the detection of SNP TSC0013684
tattggttttta

SEQ ID NO: 288803 - DNA, 12 bp, Artificial Sequence
  Oligonucleotide primer for the detection of SNP TSC0013684
cattaattttta

SEQ ID NO: 288804 - DNA, 12 bp, Artificial Sequence
  Oligonucleotide primer for the detection of SNP TSC0013684
agatttgtaaaa

SEQ ID NO: 288805 - DNA, 12 bp, Artificial Sequence
  Oligonucleotide primer for the detection of SNP TSC0013687
tataaataatta

SEQ ID NO: 288806 - DNA, 12 bp, Artificial Sequence
  Oligonucleotide primer for the detection of SNP TSC0013687
tttttgattaat

SEQ ID NO: 288807 - DNA, 12 bp, Artificial Sequence
  Oligonucleotide primer for the detection of SNP TSC0013687
ccccttaactaa

SEQ ID NO: 288808 - DNA, 12 bp, Artificial Sequence
  Oligonucleotide primer for the detection of SNP TSC0013687
ttgtaagtaatt

SEQ ID NO: 288809 - DNA, 12 bp, Artificial Sequence
  Oligonucleotide primer for the detection of SNP TSC0013688
tttatatataaa

SEQ ID NO: 288810 - DNA, 12 bp, Artificial Sequence
  Oligonucleotide primer for the detection of SNP TSC0013688
agtttgataaaa

SEQ ID NO: 288811 - DNA, 12 bp, Artificial Sequence
  Oligonucleotide primer for the detection of SNP TSC0013688
aacttaataaaa

SEQ ID NO: 288812 - DNA, 12 bp, Artificial Sequence
  Oligonucleotide primer for the detection of SNP TSC0013688
tttatatgtaaa

SEQ ID NO: 288813 - DNA, 12 bp, Artificial Sequence
  Oligonucleotide primer for the detection of SNP TSC0013689
tatataactact

SEQ ID NO: 288814 - DNA, 12 bp, Artificial Sequence
  Oligonucleotide primer for the detection of SNP TSC0013689
atttagttttta

SEQ ID NO: 288815 - DNA, 12 bp, Artificial Sequence
  Oligonucleotide primer for the detection of SNP TSC0013690
taccaaaaacca

SEQ ID NO: 288816 - DNA, 12 bp, Artificial Sequence
  Oligonucleotide primer for the detection of SNP TSC0013690
taccgaaaacca

SEQ ID NO: 288817 - DNA, 12 bp, Artificial Sequence
  Oligonucleotide primer for the detection of SNP TSC0013690
atattatttttt

SEQ ID NO: 288818 - DNA, 12 bp, Artificial Sequence
  Oligonucleotide primer for the detection of SNP TSC0013690
atatcaccctcc

SEQ ID NO: 288819 - DNA, 12 bp, Artificial Sequence
  Oligonucleotide primer for the detection of SNP TSC0013690
tgttggggatta

SEQ ID NO: 288820 - DNA, 12 bp, Artificial Sequence
  Oligonukleotid-Primer
tgtcggggatta

SEQ ID NO: 288821 - DNA, 12 bp, Artificial Sequence
  Oligonucleotide primer for the detection of SNP TSC0013691
aactccccacct

SEQ ID NO: 288822 - DNA, 12 bp, Artificial Sequence
  Oligonucleotide primer for the detection of SNP TSC0013691
gggggttgaggg

SEQ ID NO: 288823 - DNA, 12 bp, Artificial Sequence
  Oligonucleotide primer for the detection of SNP TSC0013693
aaaatataccta

SEQ ID NO: 288824 - DNA, 12 bp, Artificial Sequence
  Oligonukleotid-Primer
ggtaatatttag

SEQ ID NO: 288825 - DNA, 12 bp, Artificial Sequence
  Oligonucleotide primer for the detection of SNP TSC0013693
aacaatatctaa

SEQ ID NO: 288826 - DNA, 12 bp, Artificial Sequence
  Oligonucleotide primer for the detection of SNP TSC0013693
tgaaatatattt

SEQ ID NO: 288827 - DNA, 12 bp, Artificial Sequence
  Oligonucleotide primer for the detection of SNP TSC0013694
acaacccacaaa

SEQ ID NO: 288828 - DNA, 12 bp, Artificial Sequence
  Oligonucleotide primer for the detection of SNP TSC0013694
tttaattatatt

SEQ ID NO: 288829 - DNA, 12 bp, Artificial Sequence
  Oligonucleotide primer for the detection of SNP TSC0013694
ttcaactacatc

SEQ ID NO: 288830 - DNA, 12 bp, Artificial Sequence
  Oligonucleotide primer for the detection of SNP TSC0013694
atagtttataga

SEQ ID NO: 288831 - DNA, 12 bp, Artificial Sequence
  Oligonucleotide primer for the detection of SNP TSC0013695
tttatcttttat

SEQ ID NO: 288832 - DNA, 12 bp, Artificial Sequence
  Oligonucleotide primer for the detection of SNP TSC0013695
tgaaaatgaata

SEQ ID NO: 288833 - DNA, 12 bp, Artificial Sequence
  Oligonucleotide primer for the detection of SNP TSC0013696
aaatacatttat

SEQ ID NO: 288834 - DNA, 12 bp, Artificial Sequence
  Oligonucleotide primer for the detection of SNP TSC0013696
gaaaaaaaggta

SEQ ID NO: 288835 - DNA, 12 bp, Artificial Sequence
  Oligonucleotide primer for the detection of SNP TSC0013697
aaataaaacata

SEQ ID NO: 288836 - DNA, 12 bp, Artificial Sequence
  Oligonucleotide primer for the detection of SNP TSC0013697
gttaaaaattat

SEQ ID NO: 288837 - DNA, 12 bp, Artificial Sequence
  Oligonucleotide primer for the detection of SNP TSC0013697
ctaaaaatcaca

SEQ ID NO: 288838 - DNA, 12 bp, Artificial Sequence
  Oligonucleotide primer for the detection of SNP TSC0013697
gaataaaatata

SEQ ID NO: 288839 - DNA, 12 bp, Artificial Sequence
  Oligonucleotide primer for the detection of SNP TSC0013698
aaaacatttcct

SEQ ID NO: 288840 - DNA, 12 bp, Artificial Sequence
  Oligonucleotide primer for the detection of SNP TSC0013698
ggtgggtgtaag

SEQ ID NO: 288841 - DNA, 12 bp, Artificial Sequence
  Oligonucleotide primer for the detection of SNP TSC0013698
ggtgggcgtaag

SEQ ID NO: 288842 - DNA, 12 bp, Artificial Sequence
  Oligonucleotide primer for the detection of SNP TSC0013699
aaattacatacc

SEQ ID NO: 288843 - DNA, 12 bp, Artificial Sequence
  Oligonucleotide primer for the detection of SNP TSC0013699
tgtatgatagga

SEQ ID NO: 288844 - DNA, 12 bp, Artificial Sequence
  Oligonucleotide primer for the detection of SNP TSC0013699
tgtacgatagga

SEQ ID NO: 288845 - DNA, 12 bp, Artificial Sequence
  Oligonucleotide primer for the detection of SNP TSC0013700
caaaacccccac

SEQ ID NO: 288846 - DNA, 12 bp, Artificial Sequence
  Oligonucleotide primer for the detection of SNP TSC0013700
ggtattttttgg

SEQ ID NO: 288847 - DNA, 12 bp, Artificial Sequence
  Oligonucleotide primer for the detection of SNP TSC0013703
tctttaaaatac

SEQ ID NO: 288848 - DNA, 12 bp, Artificial Sequence
  Oligonucleotide primer for the detection of SNP TSC0013703
atagtttttaag

SEQ ID NO: 288849 - DNA, 12 bp, Artificial Sequence
  Oligonucleotide primer for the detection of SNP TSC0013704
caaaaaaaatct

SEQ ID NO: 288850 - DNA, 12 bp, Artificial Sequence
  Oligonucleotide primer for the detection of SNP TSC0013704
tagtattgttaa

SEQ ID NO: 288851 - DNA, 12 bp, Artificial Sequence
  Oligonucleotide primer for the detection of SNP TSC0013705
ttgtttataatt

SEQ ID NO: 288852 - DNA, 12 bp, Artificial Sequence
  Oligonucleotide primer for the detection of SNP TSC0013705
tatttataatca

SEQ ID NO: 288853 - DNA, 12 bp, Artificial Sequence
  Oligonucleotide primer for the detection of SNP TSC0013705
aaatttaattaa

SEQ ID NO: 288854 - DNA, 12 bp, Artificial Sequence
  Oligonucleotide primer for the detection of SNP TSC0013706
attatacataac

SEQ ID NO: 288855 - DNA, 12 bp, Artificial Sequence
  Oligonucleotide primer for the detection of SNP TSC0013706
attatacgtaac

SEQ ID NO: 288856 - DNA, 12 bp, Artificial Sequence
  Oligonucleotide primer for the detection of SNP TSC0013706
taaaatgaattt

SEQ ID NO: 288857 - DNA, 12 bp, Artificial Sequence
  Oligonucleotide primer for the detection of SNP TSC0013706
caaaataaacct

SEQ ID NO: 288858 - DNA, 12 bp, Artificial Sequence
  Oligonucleotide primer for the detection of SNP TSC0013706
attgtgtgtagt

SEQ ID NO: 288859 - DNA, 12 bp, Artificial Sequence
  Oligonucleotide primer for the detection of SNP TSC0013706
attgtgcgtagt

SEQ ID NO: 288860 - DNA, 12 bp, Artificial Sequence
  Oligonucleotide primer for the detection of SNP TSC0013707
acttacctataa

SEQ ID NO: 288861 - DNA, 12 bp, Artificial Sequence
  Oligonucleotide primer for the detection of SNP TSC0013707
ttgaatatggat

SEQ ID NO: 288862 - DNA, 12 bp, Artificial Sequence
  Oligonucleotide primer for the detection of SNP TSC0013707
ctaaatataaac

SEQ ID NO: 288863 - DNA, 12 bp, Artificial Sequence
  Oligonucleotide primer for the detection of SNP TSC0013707
gtttgtttgtag

SEQ ID NO: 288864 - DNA, 12 bp, Artificial Sequence
  Oligonucleotide primer for the detection of SNP TSC0013708
taaccctatttt

SEQ ID NO: 288865 - DNA, 12 bp, Artificial Sequence
  Oligonucleotide primer for the detection of SNP TSC0013708
ttttgatttata

SEQ ID NO: 288866 - DNA, 12 bp, Artificial Sequence
  Oligonucleotide primer for the detection of SNP TSC0013710
tccttctcaaac

SEQ ID NO: 288867 - DNA, 12 bp, Artificial Sequence
  Oligonucleotide primer for the detection of SNP TSC0013710
tgttgggttgtg

SEQ ID NO: 288868 - DNA, 12 bp, Artificial Sequence
  Oligonucleotide primer for the detection of SNP TSC0013710
cgttgggttgtg

SEQ ID NO: 288869 - DNA, 12 bp, Artificial Sequence
  Oligonucleotide primer for the detection of SNP TSC0013710
tgttgggtcgtg

SEQ ID NO: 288870 - DNA, 12 bp, Artificial Sequence
  Oligonucleotide primer for the detection of SNP TSC0013710
cgttgggtcgtg

SEQ ID NO: 288871 - DNA, 12 bp, Artificial Sequence
  Oligonucleotide primer for the detection of SNP TSC0013710
cactaaatcata

SEQ ID NO: 288872 - DNA, 12 bp, Artificial Sequence
  Oligonucleotide primer for the detection of SNP TSC0013710
cactaaatcgta

SEQ ID NO: 288873 - DNA, 12 bp, Artificial Sequence
  Oligonucleotide primer for the detection of SNP TSC0013710
cgctaaatcata

SEQ ID NO: 288874 - DNA, 12 bp, Artificial Sequence
  Oligonucleotide primer for the detection of SNP TSC0013710
cgctaaatcgta

SEQ ID NO: 288875 - DNA, 12 bp, Artificial Sequence
  Oligonucleotide primer for the detection of SNP TSC0013710
ttttttttaggt

SEQ ID NO: 288876 - DNA, 12 bp, Artificial Sequence
  Oligonucleotide primer for the detection of SNP TSC0013711
aacattattttt

SEQ ID NO: 288877 - DNA, 12 bp, Artificial Sequence
  Oligonucleotide primer for the detection of SNP TSC0013711
ggatatgtaata

SEQ ID NO: 288878 - DNA, 12 bp, Artificial Sequence
  Oligonucleotide primer for the detection of SNP TSC0013712
tttaattaaaac

SEQ ID NO: 288879 - DNA, 12 bp, Artificial Sequence
  Oligonucleotide primer for the detection of SNP TSC0013712
ttttggaggata

SEQ ID NO: 288880 - DNA, 12 bp, Artificial Sequence
  Oligonucleotide primer for the detection of SNP TSC0013712
tttcggaggata

SEQ ID NO: 288881 - DNA, 12 bp, Artificial Sequence
  Oligonucleotide primer for the detection of SNP TSC0013713
aaaatttaaaaa

SEQ ID NO: 288882 - DNA, 12 bp, Artificial Sequence
  Oligonucleotide primer for the detection of SNP TSC0013713
aaacctatcctc

SEQ ID NO: 288883 - DNA, 12 bp, Artificial Sequence
  Oligonucleotide primer for the detection of SNP TSC0013713
agggtttgaagg

SEQ ID NO: 288884 - DNA, 12 bp, Artificial Sequence
  Oligonucleotide primer for the detection of SNP TSC0013714
cccccaaaacct

SEQ ID NO: 288885 - DNA, 12 bp, Artificial Sequence
  Oligonucleotide primer for the detection of SNP TSC0013715
taccaattaata

SEQ ID NO: 288886 - DNA, 12 bp, Artificial Sequence
  Oligonucleotide primer for the detection of SNP TSC0013715
tagtagttgttt

SEQ ID NO: 288887 - DNA, 12 bp, Artificial Sequence
  Oligonucleotide primer for the detection of SNP TSC0013715
tagtagtcgttt

SEQ ID NO: 288888 - DNA, 12 bp, Artificial Sequence
  Oligonucleotide primer for the detection of SNP TSC0013715
caacaaccacct

SEQ ID NO: 288889 - DNA, 12 bp, Artificial Sequence
  Oligonucleotide primer for the detection of SNP TSC0013715
caacaaccgcct

SEQ ID NO: 288890 - DNA, 12 bp, Artificial Sequence
  Oligonucleotide primer for the detection of SNP TSC0013715
tattagttgata

SEQ ID NO: 288891 - DNA, 12 bp, Artificial Sequence
  Oligonucleotide primer for the detection of SNP TSC0013717
taaaatcatttc

SEQ ID NO: 288892 - DNA, 12 bp, Artificial Sequence
  Oligonucleotide primer for the detection of SNP TSC0013717
ttttagaggaga

SEQ ID NO: 288893 - DNA, 12 bp, Artificial Sequence
  Oligonucleotide primer for the detection of SNP TSC0013721
ttacaaaaaaac

SEQ ID NO: 288894 - DNA, 12 bp, Artificial Sequence
  Oligonucleotide primer for the detection of SNP TSC0013721
ggaggtgttttg

SEQ ID NO: 288895 - DNA, 12 bp, Artificial Sequence
  Oligonucleotide primer for the detection of SNP TSC0013722
atccatactctc

SEQ ID NO: 288896 - DNA, 12 bp, Artificial Sequence
  Oligonucleotide primer for the detection of SNP TSC0013722
atccgtactctc

SEQ ID NO: 288897 - DNA, 12 bp, Artificial Sequence
  Oligonucleotide primer for the detection of SNP TSC0013722
agttaattttat

SEQ ID NO: 288898 - DNA, 12 bp, Artificial Sequence
  Oligonucleotide primer for the detection of SNP TSC0013722
accaatctcaca

SEQ ID NO: 288899 - DNA, 12 bp, Artificial Sequence
  Oligonucleotide primer for the detection of SNP TSC0013722
ttcgtgtttttt

SEQ ID NO: 288900 - DNA, 12 bp, Artificial Sequence
  Oligonucleotide primer for the detection of SNP TSC0013725
caaaaaatacat

SEQ ID NO: 288901 - DNA, 12 bp, Artificial Sequence
  Oligonucleotide primer for the detection of SNP TSC0013725
tggatggtaaga

SEQ ID NO: 288902 - DNA, 12 bp, Artificial Sequence
  Oligonucleotide primer for the detection of SNP TSC0013725
cggatggtaaga

SEQ ID NO: 288903 - DNA, 12 bp, Artificial Sequence
  Oligonucleotide primer for the detection of SNP TSC0013725
caaataacaaaa

SEQ ID NO: 288904 - DNA, 12 bp, Artificial Sequence
  Oligonucleotide primer for the detection of SNP TSC0013725
cgaataacaaaa

SEQ ID NO: 288905 - DNA, 12 bp, Artificial Sequence
  Oligonukleotid-Primer
gggagtgtattt

SEQ ID NO: 288906 - DNA, 12 bp, Artificial Sequence
  Oligonucleotide primer for the detection of SNP TSC0013725
gggagtgtattc

SEQ ID NO: 288907 - DNA, 12 bp, Artificial Sequence
  Oligonucleotide primer for the detection of SNP TSC0013726
caaaaaattaac

SEQ ID NO: 288908 - DNA, 12 bp, Artificial Sequence
  Oligonucleotide primer for the detection of SNP TSC0013726
tgtgttattatg

SEQ ID NO: 288909 - DNA, 12 bp, Artificial Sequence
  Oligonucleotide primer for the detection of SNP TSC0013726
tataccaccata

SEQ ID NO: 288910 - DNA, 12 bp, Artificial Sequence
  Oligonucleotide primer for the detection of SNP TSC0013726
taaaaaattagt

SEQ ID NO: 288911 - DNA, 12 bp, Artificial Sequence
  Oligonucleotide primer for the detection of SNP TSC0013727
ataccttataaa

SEQ ID NO: 288912 - DNA, 12 bp, Artificial Sequence
  Oligonucleotide primer for the detection of SNP TSC0013727
agttattgtttt

SEQ ID NO: 288913 - DNA, 12 bp, Artificial Sequence
  Oligonucleotide primer for the detection of SNP TSC0013727
aaccactactcc

SEQ ID NO: 288914 - DNA, 12 bp, Artificial Sequence
  Oligonucleotide primer for the detection of SNP TSC0013727
atattttgtggg

SEQ ID NO: 288915 - DNA, 12 bp, Artificial Sequence
  Oligonucleotide primer for the detection of SNP TSC0013728
aatctctctacc

SEQ ID NO: 288916 - DNA, 12 bp, Artificial Sequence
  Oligonucleotide primer for the detection of SNP TSC0013728
gtgttatggaag

SEQ ID NO: 288917 - DNA, 12 bp, Artificial Sequence
  Oligonucleotide primer for the detection of SNP TSC0013729
tacatttcacac

SEQ ID NO: 288918 - DNA, 12 bp, Artificial Sequence
  Oligonucleotide primer for the detection of SNP TSC0013729
gttagagaaaat

SEQ ID NO: 288919 - DNA, 12 bp, Artificial Sequence
  Oligonucleotide primer for the detection of SNP TSC0013729
gttagagaaaac

SEQ ID NO: 288920 - DNA, 12 bp, Artificial Sequence
  Oligonucleotide primer for the detection of SNP TSC0013730
tacatctattct

SEQ ID NO: 288921 - DNA, 12 bp, Artificial Sequence
  Oligonucleotide primer for the detection of SNP TSC0013730
atataaaattat

SEQ ID NO: 288922 - DNA, 12 bp, Artificial Sequence
  Oligonucleotide primer for the detection of SNP TSC0013731
acttcaataaac

SEQ ID NO: 288923 - DNA, 12 bp, Artificial Sequence
  Oligonucleotide primer for the detection of SNP TSC0013731
gtgttgtggtta

SEQ ID NO: 288924 - DNA, 12 bp, Artificial Sequence
  Oligonucleotide primer for the detection of SNP TSC0013731
gtgtcgtggtta

SEQ ID NO: 288925 - DNA, 12 bp, Artificial Sequence
  Oligonucleotide primer for the detection of SNP TSC0013734
tggttagattta

SEQ ID NO: 288926 - DNA, 12 bp, Artificial Sequence
  Oligonucleotide primer for the detection of SNP TSC0013734
taaccaaactca

SEQ ID NO: 288927 - DNA, 12 bp, Artificial Sequence
  Oligonucleotide primer for the detection of SNP TSC0013734
gtaaagagaaat

SEQ ID NO: 288928 - DNA, 12 bp, Artificial Sequence
  Oligonucleotide primer for the detection of SNP TSC0013735
aacaaaaacacc

SEQ ID NO: 288929 - DNA, 12 bp, Artificial Sequence
  Oligonucleotide primer for the detection of SNP TSC0013735
tcaatttctcta

SEQ ID NO: 288930 - DNA, 12 bp, Artificial Sequence
  Oligonucleotide primer for the detection of SNP TSC0013735
aataaagatatt

SEQ ID NO: 288931 - DNA, 12 bp, Artificial Sequence
  Oligonucleotide primer for the detection of SNP TSC0013736
caaccaaaacct

SEQ ID NO: 288932 - DNA, 12 bp, Artificial Sequence
  Oligonucleotide primer for the detection of SNP TSC0013736
tttcgaatttta

SEQ ID NO: 288933 - DNA, 12 bp, Artificial Sequence
  Oligonucleotide primer for the detection of SNP TSC0013737
caaaaaccacaa

SEQ ID NO: 288934 - DNA, 12 bp, Artificial Sequence
  Oligonucleotide primer for the detection of SNP TSC0013737
cgaaaaccacaa

SEQ ID NO: 288935 - DNA, 12 bp, Artificial Sequence
  Oligonucleotide primer for the detection of SNP TSC0013737
agaaggagtatt

SEQ ID NO: 288936 - DNA, 12 bp, Artificial Sequence
  Oligonucleotide primer for the detection of SNP TSC0013737
aaaaaaaacacc

SEQ ID NO: 288937 - DNA, 12 bp, Artificial Sequence
  Oligonucleotide primer for the detection of SNP TSC0013737
tggaggttatag

SEQ ID NO: 288938 - DNA, 12 bp, Artificial Sequence
  Oligonucleotide primer for the detection of SNP TSC0013737
cggaggttatag

SEQ ID NO: 288939 - DNA, 12 bp, Artificial Sequence
  Oligonucleotide primer for the detection of SNP TSC0013738
taggtttatagt

SEQ ID NO: 288940 - DNA, 12 bp, Artificial Sequence
  Oligonucleotide primer for the detection of SNP TSC0013738
aaatttataata

SEQ ID NO: 288941 - DNA, 12 bp, Artificial Sequence
  Oligonucleotide primer for the detection of SNP TSC0013739
caccaaaactta

SEQ ID NO: 288942 - DNA, 12 bp, Artificial Sequence
  Oligonucleotide primer for the detection of SNP TSC0013739
gaatttataatt

SEQ ID NO: 288943 - DNA, 12 bp, Artificial Sequence
  Oligonucleotide primer for the detection of SNP TSC0013739
aaattcacaatt

SEQ ID NO: 288944 - DNA, 12 bp, Artificial Sequence
  Oligonucleotide primer for the detection of SNP TSC0013739
tattaagattta

SEQ ID NO: 288945 - DNA, 12 bp, Artificial Sequence
  Oligonucleotide primer for the detection of SNP TSC0013740
atatcttaaaat

SEQ ID NO: 288946 - DNA, 12 bp, Artificial Sequence
  Oligonucleotide primer for the detection of SNP TSC0013740
ttggtattgggg

SEQ ID NO: 288947 - DNA, 12 bp, Artificial Sequence
  Oligonucleotide primer for the detection of SNP TSC0013740
tcggtattgggg

SEQ ID NO: 288948 - DNA, 12 bp, Artificial Sequence
  Oligonucleotide primer for the detection of SNP TSC0013740
ccaacactaaaa

SEQ ID NO: 288949 - DNA, 12 bp, Artificial Sequence
  Oligonucleotide primer for the detection of SNP TSC0013740
ccgacactaaaa

SEQ ID NO: 288950 - DNA, 12 bp, Artificial Sequence
  Oligonucleotide primer for the detection of SNP TSC0013740
gtgttttggaat

SEQ ID NO: 288951 - DNA, 12 bp, Artificial Sequence
  Oligonucleotide primer for the detection of SNP TSC0013741
aaccattaaacc

SEQ ID NO: 288952 - DNA, 12 bp, Artificial Sequence
  Oligonucleotide primer for the detection of SNP TSC0013741
aataatgttaaa

SEQ ID NO: 288953 - DNA, 12 bp, Artificial Sequence
  Oligonucleotide primer for the detection of SNP TSC0013741
aacaatattaaa

SEQ ID NO: 288954 - DNA, 12 bp, Artificial Sequence
  Oligonucleotide primer for the detection of SNP TSC0013741
ggttattaagtt

SEQ ID NO: 288955 - DNA, 12 bp, Artificial Sequence
  Oligonucleotide primer for the detection of SNP TSC0013742
acaactttaaac

SEQ ID NO: 288956 - DNA, 12 bp, Artificial Sequence
  Oligonucleotide primer for the detection of SNP TSC0013742
acgactttaaac

SEQ ID NO: 288957 - DNA, 12 bp, Artificial Sequence
  Oligonucleotide primer for the detection of SNP TSC0013742
ttttatgtttag

SEQ ID NO: 288958 - DNA, 12 bp, Artificial Sequence
  Oligonucleotide primer for the detection of SNP TSC0013742
cttcatattcaa

SEQ ID NO: 288959 - DNA, 12 bp, Artificial Sequence
  Oligonucleotide primer for the detection of SNP TSC0013742
atggttttgagt

SEQ ID NO: 288960 - DNA, 12 bp, Artificial Sequence
  Oligonucleotide primer for the detection of SNP TSC0013742
acggttttgagt

SEQ ID NO: 288961 - DNA, 12 bp, Artificial Sequence
  Oligonucleotide primer for the detection of SNP TSC0013745
taataaacttta

SEQ ID NO: 288962 - DNA, 12 bp, Artificial Sequence
  Oligonucleotide primer for the detection of SNP TSC0013745
tttttttagttt

SEQ ID NO: 288963 - DNA, 12 bp, Artificial Sequence
  Oligonucleotide primer for the detection of SNP TSC0013745
tttttttagttc

SEQ ID NO: 288964 - DNA, 12 bp, Artificial Sequence
  Oligonucleotide primer for the detection of SNP TSC0013745
ttttttctctaa

SEQ ID NO: 288965 - DNA, 12 bp, Artificial Sequence
  Oligonucleotide primer for the detection of SNP TSC0013745
tagtaaatttta

SEQ ID NO: 288966 - DNA, 12 bp, Artificial Sequence
  Oligonucleotide primer for the detection of SNP TSC0013746
attttaaattct

SEQ ID NO: 288967 - DNA, 12 bp, Artificial Sequence
  Oligonucleotide primer for the detection of SNP TSC0013746
agtaaaatggta

SEQ ID NO: 288968 - DNA, 12 bp, Artificial Sequence
  Oligonucleotide primer for the detection of SNP TSC0013746
aacaaaataaca

SEQ ID NO: 288969 - DNA, 12 bp, Artificial Sequence
  Oligonucleotide primer for the detection of SNP TSC0013746
attttaaatttt

SEQ ID NO: 288970 - DNA, 12 bp, Artificial Sequence
  Oligonucleotide primer for the detection of SNP TSC0013747
ctaaccttaaca

SEQ ID NO: 288971 - DNA, 12 bp, Artificial Sequence
  Oligonucleotide primer for the detection of SNP TSC0013747
atgataatagag

SEQ ID NO: 288972 - DNA, 12 bp, Artificial Sequence
  Oligonucleotide primer for the detection of SNP TSC0013747
aacaacaaaaaa

SEQ ID NO: 288973 - DNA, 12 bp, Artificial Sequence
  Oligonucleotide primer for the detection of SNP TSC0013747
ttgattttagta

SEQ ID NO: 288974 - DNA, 12 bp, Artificial Sequence
  Oligonucleotide primer for the detection of SNP TSC0013749
taaaaaaatcta

SEQ ID NO: 288975 - DNA, 12 bp, Artificial Sequence
  Oligonucleotide primer for the detection of SNP TSC0013749
gttttgattgtt

SEQ ID NO: 288976 - DNA, 12 bp, Artificial Sequence
  Oligonucleotide primer for the detection of SNP TSC0013749
tagaggagtttg

SEQ ID NO: 288977 - DNA, 12 bp, Artificial Sequence
  Oligonucleotide primer for the detection of SNP TSC0013750
tattgtttttat

SEQ ID NO: 288978 - DNA, 12 bp, Artificial Sequence
  Oligonukleotid-Primer
attatcctcata

SEQ ID NO: 288979 - DNA, 12 bp, Artificial Sequence
  Oligonucleotide primer for the detection of SNP TSC0013750
aatagaaaagag

SEQ ID NO: 288980 - DNA, 12 bp, Artificial Sequence
  Oligonucleotide primer for the detection of SNP TSC0013751
cctttcctaact

SEQ ID NO: 288981 - DNA, 12 bp, Artificial Sequence
  Oligonucleotide primer for the detection of SNP TSC0013751
ttattattagta

SEQ ID NO: 288982 - DNA, 12 bp, Artificial Sequence
  Oligonukleotid-Primer
taaaattataaa

SEQ ID NO: 288983 - DNA, 12 bp, Artificial Sequence
  Oligonucleotide primer for the detection of SNP TSC0013754
atgagaaaaaaa

SEQ ID NO: 288984 - DNA, 12 bp, Artificial Sequence
  Oligonucleotide primer for the detection of SNP TSC0013754
taaaattgtagg

SEQ ID NO: 288985 - DNA, 12 bp, Artificial Sequence
  Oligonucleotide primer for the detection of SNP TSC0013755
taataataacaa

SEQ ID NO: 288986 - DNA, 12 bp, Artificial Sequence
  Oligonucleotide primer for the detection of SNP TSC0013755
tgtggtagattt

SEQ ID NO: 288987 - DNA, 12 bp, Artificial Sequence
  Oligonucleotide primer for the detection of SNP TSC0013755
tataacaaatct

SEQ ID NO: 288988 - DNA, 12 bp, Artificial Sequence
  Oligonucleotide primer for the detection of SNP TSC0013755
tagtaatagtaa

SEQ ID NO: 288989 - DNA, 12 bp, Artificial Sequence
  Oligonucleotide primer for the detection of SNP TSC0013756
tatagtaaaatt

SEQ ID NO: 288990 - DNA, 12 bp, Artificial Sequence
  Oligonucleotide primer for the detection of SNP TSC0013756
cacaacaaaacc

SEQ ID NO: 288991 - DNA, 12 bp, Artificial Sequence
  Oligonucleotide primer for the detection of SNP TSC0013757
tccacaattatc

SEQ ID NO: 288992 - DNA, 12 bp, Artificial Sequence
  Oligonucleotide primer for the detection of SNP TSC0013759
aactaaatattt

SEQ ID NO: 288993 - DNA, 12 bp, Artificial Sequence
  Oligonucleotide primer for the detection of SNP TSC0013759
aagtatagatga

SEQ ID NO: 288994 - DNA, 12 bp, Artificial Sequence
  Oligonucleotide primer for the detection of SNP TSC0013759
gattgagtattt

SEQ ID NO: 288995 - DNA, 12 bp, Artificial Sequence
  Oligonucleotide primer for the detection of SNP TSC0013760
ataaaataacca

SEQ ID NO: 288996 - DNA, 12 bp, Artificial Sequence
  Oligonucleotide primer for the detection of SNP TSC0013760
ttttatgtagat

SEQ ID NO: 288997 - DNA, 12 bp, Artificial Sequence
  Oligonucleotide primer for the detection of SNP TSC0013760
ccttatacaaac

SEQ ID NO: 288998 - DNA, 12 bp, Artificial Sequence
  Oligonucleotide primer for the detection of SNP TSC0013760
gtgaggtgatta

SEQ ID NO: 288999 - DNA, 12 bp, Artificial Sequence
  Oligonucleotide primer for the detection of SNP TSC0013761
aaatttctatcc

SEQ ID NO: 289000 - DNA, 12 bp, Artificial Sequence
  Oligonucleotide primer for the detection of SNP TSC0013761
tttattttttag

SEQ ID NO: 289001 - DNA, 12 bp, Artificial Sequence
  Oligonucleotide primer for the detection of SNP TSC0013762
tgattataggtg

SEQ ID NO: 289002 - DNA, 12 bp, Artificial Sequence
  Oligonucleotide primer for the detection of SNP TSC0013762
tgattataggcg

SEQ ID NO: 289003 - DNA, 12 bp, Artificial Sequence
  Oligonucleotide primer for the detection of SNP TSC0013762
taactataaaca

SEQ ID NO: 289004 - DNA, 12 bp, Artificial Sequence
  Oligonucleotide primer for the detection of SNP TSC0013762
taactataaacg

SEQ ID NO: 289005 - DNA, 12 bp, Artificial Sequence
  Oligonucleotide primer for the detection of SNP TSC0013762
tggaatggtggt

SEQ ID NO: 289006 - DNA, 12 bp, Artificial Sequence
  Oligonucleotide primer for the detection of SNP TSC0013762
tggaatggtggc

SEQ ID NO: 289007 - DNA, 12 bp, Artificial Sequence
  Oligonucleotide primer for the detection of SNP TSC0013763
aataattaatgt

SEQ ID NO: 289008 - DNA, 12 bp, Artificial Sequence
  Oligonucleotide primer for the detection of SNP TSC0013763
ataaccaatata

SEQ ID NO: 289009 - DNA, 12 bp, Artificial Sequence
  Oligonucleotide primer for the detection of SNP TSC0013763
aaagggggaaaa

SEQ ID NO: 289010 - DNA, 12 bp, Artificial Sequence
  Oligonucleotide primer for the detection of SNP TSC0013764
aacaaaaccacc

SEQ ID NO: 289011 - DNA, 12 bp, Artificial Sequence
  Oligonucleotide primer for the detection of SNP TSC0013764
aacaaaaccgcc

SEQ ID NO: 289012 - DNA, 12 bp, Artificial Sequence
  Oligonucleotide primer for the detection of SNP TSC0013765
atccactttctt

SEQ ID NO: 289013 - DNA, 12 bp, Artificial Sequence
  Oligonucleotide primer for the detection of SNP TSC0013765
tggaagagtgaa

SEQ ID NO: 289014 - DNA, 12 bp, Artificial Sequence
  Oligonucleotide primer for the detection of SNP TSC0013768
aataccttacat

SEQ ID NO: 289015 - DNA, 12 bp, Artificial Sequence
  Oligonucleotide primer for the detection of SNP TSC0013768
tatggtaggggt

SEQ ID NO: 289016 - DNA, 12 bp, Artificial Sequence
  Oligonucleotide primer for the detection of SNP TSC0013768
acataacaaaaa

SEQ ID NO: 289017 - DNA, 12 bp, Artificial Sequence
  Oligonucleotide primer for the detection of SNP TSC0013768
atgttttgtatt

SEQ ID NO: 289018 - DNA, 12 bp, Artificial Sequence
  Oligonucleotide primer for the detection of SNP TSC0013769
ctaaaaaaaatt

SEQ ID NO: 289019 - DNA, 12 bp, Artificial Sequence
  Oligonucleotide primer for the detection of SNP TSC0013769
ttttgtagtagg

SEQ ID NO: 289020 - DNA, 12 bp, Artificial Sequence
  Oligonucleotide primer for the detection of SNP TSC0013769
ttctacaacaaa

SEQ ID NO: 289021 - DNA, 12 bp, Artificial Sequence
  Oligonucleotide primer for the detection of SNP TSC0013769
ttaggaaagatt

SEQ ID NO: 289022 - DNA, 12 bp, Artificial Sequence
  Oligonucleotide primer for the detection of SNP TSC0013770
ccttaaaaaaaa

SEQ ID NO: 289023 - DNA, 12 bp, Artificial Sequence
  Oligonucleotide primer for the detection of SNP TSC0013770
gggtgtttttag

SEQ ID NO: 289024 - DNA, 12 bp, Artificial Sequence
  Oligonucleotide primer for the detection of SNP TSC0013770
aaatacttccaa

SEQ ID NO: 289025 - DNA, 12 bp, Artificial Sequence
  Oligonucleotide primer for the detection of SNP TSC0013770
ttttggaagagg

SEQ ID NO: 289026 - DNA, 12 bp, Artificial Sequence
  Oligonucleotide primer for the detection of SNP TSC0013771
aaccccctacac

SEQ ID NO: 289027 - DNA, 12 bp, Artificial Sequence
  Oligonucleotide primer for the detection of SNP TSC0013771
taggttggttag

SEQ ID NO: 289028 - DNA, 12 bp, Artificial Sequence
  Oligonucleotide primer for the detection of SNP TSC0013771
taggtcggttag

SEQ ID NO: 289029 - DNA, 12 bp, Artificial Sequence
  Oligonucleotide primer for the detection of SNP TSC0013771
taaaccgatcaa

SEQ ID NO: 289030 - DNA, 12 bp, Artificial Sequence
  Oligonucleotide primer for the detection of SNP TSC0013771
agttttttatat

SEQ ID NO: 289031 - DNA, 12 bp, Artificial Sequence
  Oligonucleotide primer for the detection of SNP TSC0013773
ataaacaaactt

SEQ ID NO: 289032 - DNA, 12 bp, Artificial Sequence
  Oligonucleotide primer for the detection of SNP TSC0013773
ttttataatagg

SEQ ID NO: 289033 - DNA, 12 bp, Artificial Sequence
  Oligonucleotide primer for the detection of SNP TSC0013773
ttttataataaa

SEQ ID NO: 289034 - DNA, 12 bp, Artificial Sequence
  Oligonucleotide primer for the detection of SNP TSC0013773
gtaggtaggttt

SEQ ID NO: 289035 - DNA, 12 bp, Artificial Sequence
  Oligonucleotide primer for the detection of SNP TSC0013774
taactttattct

SEQ ID NO: 289036 - DNA, 12 bp, Artificial Sequence
  Oligonucleotide primer for the detection of SNP TSC0013774
ttggaaaggata

SEQ ID NO: 289037 - DNA, 12 bp, Artificial Sequence
  Oligonucleotide primer for the detection of SNP TSC0013775
aatattcaacat

SEQ ID NO: 289038 - DNA, 12 bp, Artificial Sequence
  Oligonucleotide primer for the detection of SNP TSC0013775
aaattaaggata

SEQ ID NO: 289039 - DNA, 12 bp, Artificial Sequence
  Oligonucleotide primer for the detection of SNP TSC0013776
taattttaacat

SEQ ID NO: 289040 - DNA, 12 bp, Artificial Sequence
  Oligonucleotide primer for the detection of SNP TSC0013776
ttttagttagag

SEQ ID NO: 289041 - DNA, 12 bp, Artificial Sequence
  Oligonucleotide primer for the detection of SNP TSC0013778
attcttaacata

SEQ ID NO: 289042 - DNA, 12 bp, Artificial Sequence
  Oligonucleotide primer for the detection of SNP TSC0013778
catccttatctc

SEQ ID NO: 289043 - DNA, 12 bp, Artificial Sequence
  Oligonucleotide primer for the detection of SNP TSC0013778
atttttggtatg

SEQ ID NO: 289044 - DNA, 12 bp, Artificial Sequence
  Oligonucleotide primer for the detection of SNP TSC0013780
aattacattatc

SEQ ID NO: 289045 - DNA, 12 bp, Artificial Sequence
  Oligonucleotide primer for the detection of SNP TSC0013780
gattacattatc

SEQ ID NO: 289046 - DNA, 12 bp, Artificial Sequence
  Oligonucleotide primer for the detection of SNP TSC0013780
atgttatttgga

SEQ ID NO: 289047 - DNA, 12 bp, Artificial Sequence
  Oligonucleotide primer for the detection of SNP TSC0013780
atgttattcgga

SEQ ID NO: 289048 - DNA, 12 bp, Artificial Sequence
  Oligonucleotide primer for the detection of SNP TSC0013783
caaaactcatat

SEQ ID NO: 289049 - DNA, 12 bp, Artificial Sequence
  Oligonucleotide primer for the detection of SNP TSC0013783
tttatataaggg

SEQ ID NO: 289050 - DNA, 12 bp, Artificial Sequence
  Oligonucleotide primer for the detection of SNP TSC0013784
ttaatccacaat

SEQ ID NO: 289051 - DNA, 12 bp, Artificial Sequence
  Oligonucleotide primer for the detection of SNP TSC0013784
ataaaaattgag

SEQ ID NO: 289052 - DNA, 12 bp, Artificial Sequence
  Oligonucleotide primer for the detection of SNP TSC0013784
acaaaaactaaa

SEQ ID NO: 289053 - DNA, 12 bp, Artificial Sequence
  Oligonucleotide primer for the detection of SNP TSC0013784
ttgatttatagt

SEQ ID NO: 289054 - DNA, 12 bp, Artificial Sequence
  Oligonucleotide primer for the detection of SNP TSC0013785
aaataaccccat

SEQ ID NO: 289055 - DNA, 12 bp, Artificial Sequence
  Oligonucleotide primer for the detection of SNP TSC0013785
aaattgggaaag

SEQ ID NO: 289056 - DNA, 12 bp, Artificial Sequence
  Oligonucleotide primer for the detection of SNP TSC0013787
caacactcccca

SEQ ID NO: 289057 - DNA, 12 bp, Artificial Sequence
  Oligonucleotide primer for the detection of SNP TSC0013787
cgacactcccca

SEQ ID NO: 289058 - DNA, 12 bp, Artificial Sequence
  Oligonucleotide primer for the detection of SNP TSC0013787
tagtttttgttt

SEQ ID NO: 289059 - DNA, 12 bp, Artificial Sequence
  Oligonucleotide primer for the detection of SNP TSC0013787
tagttttcgttt

SEQ ID NO: 289060 - DNA, 12 bp, Artificial Sequence
  Oligonucleotide primer for the detection of SNP TSC0013787
caatccccacct

SEQ ID NO: 289061 - DNA, 12 bp, Artificial Sequence
  Oligonucleotide primer for the detection of SNP TSC0013787
caatccccgcct

SEQ ID NO: 289062 - DNA, 12 bp, Artificial Sequence
  Oligonucleotide primer for the detection of SNP TSC0013787
tggtatttttta

SEQ ID NO: 289063 - DNA, 12 bp, Artificial Sequence
  Oligonukleotid-Primer
cggtatttttta

SEQ ID NO: 289064 - DNA, 12 bp, Artificial Sequence
  Oligonucleotide primer for the detection of SNP TSC0013788
ctataatattct

SEQ ID NO: 289065 - DNA, 12 bp, Artificial Sequence
  Oligonucleotide primer for the detection of SNP TSC0013788
ttgaatattagg

SEQ ID NO: 289066 - DNA, 12 bp, Artificial Sequence
  Oligonucleotide primer for the detection of SNP TSC0013789
aaagggagagga

SEQ ID NO: 289067 - DNA, 12 bp, Artificial Sequence
  Oligonucleotide primer for the detection of SNP TSC0013790
tactataaacat

SEQ ID NO: 289068 - DNA, 12 bp, Artificial Sequence
  Oligonucleotide primer for the detection of SNP TSC0013790
ggtatggttaat

SEQ ID NO: 289069 - DNA, 12 bp, Artificial Sequence
  Oligonucleotide primer for the detection of SNP TSC0013790
ggtatggttaac

SEQ ID NO: 289070 - DNA, 12 bp, Artificial Sequence
  Oligonucleotide primer for the detection of SNP TSC0013790
cataattaacaa

SEQ ID NO: 289071 - DNA, 12 bp, Artificial Sequence
  Oligonucleotide primer for the detection of SNP TSC0013790
cataattaacga

SEQ ID NO: 289072 - DNA, 12 bp, Artificial Sequence
  Oligonucleotide primer for the detection of SNP TSC0013790
gttgtggatatt

SEQ ID NO: 289073 - DNA, 12 bp, Artificial Sequence
  Oligonucleotide primer for the detection of SNP TSC0013793
attaaattaatt

SEQ ID NO: 289074 - DNA, 12 bp, Artificial Sequence
  Oligonucleotide primer for the detection of SNP TSC0013793
aaataaaaagtg

SEQ ID NO: 289075 - DNA, 12 bp, Artificial Sequence
  Oligonucleotide primer for the detection of SNP TSC0013794
atctaaaaaaat

SEQ ID NO: 289076 - DNA, 12 bp, Artificial Sequence
  Oligonucleotide primer for the detection of SNP TSC0013794
gaagtttttaga

SEQ ID NO: 289077 - DNA, 12 bp, Artificial Sequence
  Oligonucleotide primer for the detection of SNP TSC0013795
tcattattaaat

SEQ ID NO: 289078 - DNA, 12 bp, Artificial Sequence
  Oligonucleotide primer for the detection of SNP TSC0013795
tttttaagaatg

SEQ ID NO: 289079 - DNA, 12 bp, Artificial Sequence
  Oligonucleotide primer for the detection of SNP TSC0013796
aaaaatcctctt

SEQ ID NO: 289080 - DNA, 12 bp, Artificial Sequence
  Oligonucleotide primer for the detection of SNP TSC0013796
atataaaagtag

SEQ ID NO: 289081 - DNA, 12 bp, Artificial Sequence
  Oligonucleotide primer for the detection of SNP TSC0013797
aaaattaataat

SEQ ID NO: 289082 - DNA, 12 bp, Artificial Sequence
  Oligonucleotide primer for the detection of SNP TSC0013797
ttaaaatattta

SEQ ID NO: 289083 - DNA, 12 bp, Artificial Sequence
  Oligonucleotide primer for the detection of SNP TSC0013797
taaaatatccaa

SEQ ID NO: 289084 - DNA, 12 bp, Artificial Sequence
  Oligonucleotide primer for the detection of SNP TSC0013797
gaagttggtgat

SEQ ID NO: 289085 - DNA, 12 bp, Artificial Sequence
  Oligonucleotide primer for the detection of SNP TSC0013798
aaaccccgaaaa

SEQ ID NO: 289086 - DNA, 12 bp, Artificial Sequence
  Oligonucleotide primer for the detection of SNP TSC0013798
tctaaatatctc

SEQ ID NO: 289087 - DNA, 12 bp, Artificial Sequence
  Oligonucleotide primer for the detection of SNP TSC0013798
gggttttgggaa

SEQ ID NO: 289088 - DNA, 12 bp, Artificial Sequence
  Oligonucleotide primer for the detection of SNP TSC0013798
gggtttcgggaa

SEQ ID NO: 289089 - DNA, 12 bp, Artificial Sequence
  Oligonucleotide primer for the detection of SNP TSC0013799
acttcaaaaaca

SEQ ID NO: 289090 - DNA, 12 bp, Artificial Sequence
  Oligonucleotide primer for the detection of SNP TSC0013799
tagtaagtaggt

SEQ ID NO: 289091 - DNA, 12 bp, Artificial Sequence
  Oligonucleotide primer for the detection of SNP TSC0013799
caataaacaaat

SEQ ID NO: 289092 - DNA, 12 bp, Artificial Sequence
  Oligonucleotide primer for the detection of SNP TSC0013799
gttttaaggata

SEQ ID NO: 289093 - DNA, 12 bp, Artificial Sequence
  Oligonucleotide primer for the detection of SNP TSC0013800
tcttctccccac

SEQ ID NO: 289094 - DNA, 12 bp, Artificial Sequence
  Oligonucleotide primer for the detection of SNP TSC0013800
tcttctccccgc

SEQ ID NO: 289095 - DNA, 12 bp, Artificial Sequence
  Oligonucleotide primer for the detection of SNP TSC0013800
gtagtagtagta

SEQ ID NO: 289096 - DNA, 12 bp, Artificial Sequence
  Oligonucleotide primer for the detection of SNP TSC0013802
ctctatctccaa

SEQ ID NO: 289097 - DNA, 12 bp, Artificial Sequence
  Oligonucleotide primer for the detection of SNP TSC0013802
tgagtaattatt

SEQ ID NO: 289098 - DNA, 12 bp, Artificial Sequence
  Oligonucleotide primer for the detection of SNP TSC0013802
ataaataaccat

SEQ ID NO: 289099 - DNA, 12 bp, Artificial Sequence
  Oligonucleotide primer for the detection of SNP TSC0013803
tttatagttgtt

SEQ ID NO: 289100 - DNA, 12 bp, Artificial Sequence
  Oligonucleotide primer for the detection of SNP TSC0013803
tttatagtcgtt

SEQ ID NO: 289101 - DNA, 12 bp, Artificial Sequence
  Oligonucleotide primer for the detection of SNP TSC0013803
atctcacaatca

SEQ ID NO: 289102 - DNA, 12 bp, Artificial Sequence
  Oligonucleotide primer for the detection of SNP TSC0013803
atctcacaatcg

SEQ ID NO: 289103 - DNA, 12 bp, Artificial Sequence
  Oligonucleotide primer for the detection of SNP TSC0013804
tagttgtttttt

SEQ ID NO: 289104 - DNA, 12 bp, Artificial Sequence
  Oligonucleotide primer for the detection of SNP TSC0013804
tagtcgtttttt

SEQ ID NO: 289105 - DNA, 12 bp, Artificial Sequence
  Oligonucleotide primer for the detection of SNP TSC0013804
acaatcattccc

SEQ ID NO: 289106 - DNA, 12 bp, Artificial Sequence
  Oligonucleotide primer for the detection of SNP TSC0013804
acaatcgttccc

SEQ ID NO: 289107 - DNA, 12 bp, Artificial Sequence
  Oligonucleotide primer for the detection of SNP TSC0013804
tttagttttaaa

SEQ ID NO: 289108 - DNA, 12 bp, Artificial Sequence
  Oligonucleotide primer for the detection of SNP TSC0013805
ataaaatataat

SEQ ID NO: 289109 - DNA, 12 bp, Artificial Sequence
  Oligonucleotide primer for the detection of SNP TSC0013805
gtaaaatataat

SEQ ID NO: 289110 - DNA, 12 bp, Artificial Sequence
  Oligonucleotide primer for the detection of SNP TSC0013805
ggatgagaaagt

SEQ ID NO: 289111 - DNA, 12 bp, Artificial Sequence
  Oligonucleotide primer for the detection of SNP TSC0013805
gtgaaatataat

SEQ ID NO: 289112 - DNA, 12 bp, Artificial Sequence
  Oligonucleotide primer for the detection of SNP TSC0013809
cactcttaaatc

SEQ ID NO: 289113 - DNA, 12 bp, Artificial Sequence
  Oligonucleotide primer for the detection of SNP TSC0013809
agaggtaataaa

SEQ ID NO: 289114 - DNA, 12 bp, Artificial Sequence
  Oligonucleotide primer for the detection of SNP TSC0013810
tatcaaaaaata

SEQ ID NO: 289115 - DNA, 12 bp, Artificial Sequence
  Oligonucleotide primer for the detection of SNP TSC0013810
atttttttttat

SEQ ID NO: 289116 - DNA, 12 bp, Artificial Sequence
  Oligonucleotide primer for the detection of SNP TSC0013810
tactctctctta

SEQ ID NO: 289117 - DNA, 12 bp, Artificial Sequence
  Oligonucleotide primer for the detection of SNP TSC0013810
attaaaaagtat

SEQ ID NO: 289118 - DNA, 12 bp, Artificial Sequence
  Oligonucleotide primer for the detection of SNP TSC0013811
aaacttaacaaa

SEQ ID NO: 289119 - DNA, 12 bp, Artificial Sequence
  Oligonucleotide primer for the detection of SNP TSC0013811
agttattagatt

SEQ ID NO: 289120 - DNA, 12 bp, Artificial Sequence
  Oligonucleotide primer for the detection of SNP TSC0013811
aactattaaatt

SEQ ID NO: 289121 - DNA, 12 bp, Artificial Sequence
  Oligonucleotide primer for the detection of SNP TSC0013811
aaatttgataaa

SEQ ID NO: 289122 - DNA, 12 bp, Artificial Sequence
  Oligonucleotide primer for the detection of SNP TSC0013814
taactaacattc

SEQ ID NO: 289123 - DNA, 12 bp, Artificial Sequence
  Oligonucleotide primer for the detection of SNP TSC0013814
attaaaagaaaa

SEQ ID NO: 289124 - DNA, 12 bp, Artificial Sequence
  Oligonucleotide primer for the detection of SNP TSC0013815
attatttcctac

SEQ ID NO: 289125 - DNA, 12 bp, Artificial Sequence
  Oligonucleotide primer for the detection of SNP TSC0013815
taaatattatag

SEQ ID NO: 289126 - DNA, 12 bp, Artificial Sequence
  Oligonucleotide primer for the detection of SNP TSC0013816
tcacacaaaatt

SEQ ID NO: 289127 - DNA, 12 bp, Artificial Sequence
  Oligonucleotide primer for the detection of SNP TSC0013816
agtatatattgg

SEQ ID NO: 289128 - DNA, 12 bp, Artificial Sequence
  Oligonucleotide primer for the detection of SNP TSC0013818
caacttccataa

SEQ ID NO: 289129 - DNA, 12 bp, Artificial Sequence
  Oligonucleotide primer for the detection of SNP TSC0013818
ggaagttttagt

SEQ ID NO: 289130 - DNA, 12 bp, Artificial Sequence
  Oligonucleotide primer for the detection of SNP TSC0013818
aaaaattccaac

SEQ ID NO: 289131 - DNA, 12 bp, Artificial Sequence
  Oligonucleotide primer for the detection of SNP TSC0013818
gaaaattccaac

SEQ ID NO: 289132 - DNA, 12 bp, Artificial Sequence
  Oligonucleotide primer for the detection of SNP TSC0013818
tagtttttatgg

SEQ ID NO: 289133 - DNA, 12 bp, Artificial Sequence
  Oligonucleotide primer for the detection of SNP TSC0013819
acatttaatcat

SEQ ID NO: 289134 - DNA, 12 bp, Artificial Sequence
  Oligonucleotide primer for the detection of SNP TSC0013819
ttagtgttttga

SEQ ID NO: 289135 - DNA, 12 bp, Artificial Sequence
  Oligonucleotide primer for the detection of SNP TSC0013819
ccaatattctaa

SEQ ID NO: 289136 - DNA, 12 bp, Artificial Sequence
  Oligonucleotide primer for the detection of SNP TSC0013819
gtatttagttat

SEQ ID NO: 289137 - DNA, 12 bp, Artificial Sequence
  Oligonucleotide primer for the detection of SNP TSC0013820
ttattaattacc

SEQ ID NO: 289138 - DNA, 12 bp, Artificial Sequence
  Oligonucleotide primer for the detection of SNP TSC0013820
taggtttattta

SEQ ID NO: 289139 - DNA, 12 bp, Artificial Sequence
  Oligonucleotide primer for the detection of SNP TSC0013820
taaacccatcta

SEQ ID NO: 289140 - DNA, 12 bp, Artificial Sequence
  Oligonucleotide primer for the detection of SNP TSC0013820
ttattagttgtt

SEQ ID NO: 289141 - DNA, 12 bp, Artificial Sequence
  Oligonucleotide primer for the detection of SNP TSC0013821
cttaaaattaaa

SEQ ID NO: 289142 - DNA, 12 bp, Artificial Sequence
  Oligonucleotide primer for the detection of SNP TSC0013821
ttatataaacaa

SEQ ID NO: 289143 - DNA, 12 bp, Artificial Sequence
  Oligonucleotide primer for the detection of SNP TSC0013821
tttaaaattagg

SEQ ID NO: 289144 - DNA, 12 bp, Artificial Sequence
  Oligonucleotide primer for the detection of SNP TSC0013822
aaacatatatat

SEQ ID NO: 289145 - DNA, 12 bp, Artificial Sequence
  Oligonucleotide primer for the detection of SNP TSC0013822
ttttttagtaga

SEQ ID NO: 289146 - DNA, 12 bp, Artificial Sequence
  Oligonucleotide primer for the detection of SNP TSC0013822
tcctctaataaa

SEQ ID NO: 289147 - DNA, 12 bp, Artificial Sequence
  Oligonucleotide primer for the detection of SNP TSC0013823
cccaattttctt

SEQ ID NO: 289148 - DNA, 12 bp, Artificial Sequence
  Oligonucleotide primer for the detection of SNP TSC0013823
gtatagggttgg

SEQ ID NO: 289149 - DNA, 12 bp, Artificial Sequence
  Oligonucleotide primer for the detection of SNP TSC0013824
tactaatccctc

SEQ ID NO: 289150 - DNA, 12 bp, Artificial Sequence
  Oligonucleotide primer for the detection of SNP TSC0013824
ttttagttttag

SEQ ID NO: 289151 - DNA, 12 bp, Artificial Sequence
  Oligonucleotide primer for the detection of SNP TSC0013826
tttaggtaatga

SEQ ID NO: 289152 - DNA, 12 bp, Artificial Sequence
  Oligonucleotide primer for the detection of SNP TSC0013826
tgtgtggggggg

SEQ ID NO: 289153 - DNA, 12 bp, Artificial Sequence
  Oligonucleotide primer for the detection of SNP TSC0013827
atgaattttttt

SEQ ID NO: 289154 - DNA, 12 bp, Artificial Sequence
  Oligonucleotide primer for the detection of SNP TSC0013827
ataaaccccccc

SEQ ID NO: 289155 - DNA, 12 bp, Artificial Sequence
  Oligonucleotide primer for the detection of SNP TSC0013828
cttcaaacacaa

SEQ ID NO: 289156 - DNA, 12 bp, Artificial Sequence
  Oligonucleotide primer for the detection of SNP TSC0013828
cttcaaacgcaa

SEQ ID NO: 289157 - DNA, 12 bp, Artificial Sequence
  Oligonucleotide primer for the detection of SNP TSC0013828
gtttagttgggt

SEQ ID NO: 289158 - DNA, 12 bp, Artificial Sequence
  Oligonucleotide primer for the detection of SNP TSC0013828
gtttagtcgggt

SEQ ID NO: 289159 - DNA, 12 bp, Artificial Sequence
  Oligonucleotide primer for the detection of SNP TSC0013828
acccaatcaaat

SEQ ID NO: 289160 - DNA, 12 bp, Artificial Sequence
  Oligonukleotid-Primer
acccaatcgaat

SEQ ID NO: 289161 - DNA, 12 bp, Artificial Sequence
  Oligonucleotide primer for the detection of SNP TSC0013828
gcccaatcaaat

SEQ ID NO: 289162 - DNA, 12 bp, Artificial Sequence
  Oligonucleotide primer for the detection of SNP TSC0013828
gcccaatcgaat

SEQ ID NO: 289163 - DNA, 12 bp, Artificial Sequence
  Oligonucleotide primer for the detection of SNP TSC0013828
ttttaggtgtag

SEQ ID NO: 289164 - DNA, 12 bp, Artificial Sequence
  Oligonucleotide primer for the detection of SNP TSC0013828
ttttaggcgtag

SEQ ID NO: 289165 - DNA, 12 bp, Artificial Sequence
  Oligonucleotide primer for the detection of SNP TSC0013829
aaactacaacaa

SEQ ID NO: 289166 - DNA, 12 bp, Artificial Sequence
  Oligonucleotide primer for the detection of SNP TSC0013829
aaactacaacga

SEQ ID NO: 289167 - DNA, 12 bp, Artificial Sequence
  Oligonucleotide primer for the detection of SNP TSC0013829
aaactacgacaa

SEQ ID NO: 289168 - DNA, 12 bp, Artificial Sequence
  Oligonucleotide primer for the detection of SNP TSC0013829
aaactacgacga

SEQ ID NO: 289169 - DNA, 12 bp, Artificial Sequence
  Oligonucleotide primer for the detection of SNP TSC0013829
ttggtgttgtgt

SEQ ID NO: 289170 - DNA, 12 bp, Artificial Sequence
  Oligonucleotide primer for the detection of SNP TSC0013829
ttggcgttgtgt

SEQ ID NO: 289171 - DNA, 12 bp, Artificial Sequence
  Oligonucleotide primer for the detection of SNP TSC0013829
ttggtgtcgtgt

SEQ ID NO: 289172 - DNA, 12 bp, Artificial Sequence
  Oligonucleotide primer for the detection of SNP TSC0013829
ttggtgttgcgt

SEQ ID NO: 289173 - DNA, 12 bp, Artificial Sequence
  Oligonucleotide primer for the detection of SNP TSC0013829
ttggcgtcgtgt

SEQ ID NO: 289174 - DNA, 12 bp, Artificial Sequence
  Oligonucleotide primer for the detection of SNP TSC0013829
ttggcgttgcgt

SEQ ID NO: 289175 - DNA, 12 bp, Artificial Sequence
  Oligonucleotide primer for the detection of SNP TSC0013829
ttggtgtcgcgt

SEQ ID NO: 289176 - DNA, 12 bp, Artificial Sequence
  Oligonucleotide primer for the detection of SNP TSC0013829
ttggcgtcgcgt

SEQ ID NO: 289177 - DNA, 12 bp, Artificial Sequence
  Oligonucleotide primer for the detection of SNP TSC0013829
ctaacaccacac

SEQ ID NO: 289178 - DNA, 12 bp, Artificial Sequence
  Oligonucleotide primer for the detection of SNP TSC0013829
ctaacaccacgc

SEQ ID NO: 289179 - DNA, 12 bp, Artificial Sequence
  Oligonucleotide primer for the detection of SNP TSC0013829
ctaacaccgcac

SEQ ID NO: 289180 - DNA, 12 bp, Artificial Sequence
  Oligonucleotide primer for the detection of SNP TSC0013829
ctaacgccacac

SEQ ID NO: 289181 - DNA, 12 bp, Artificial Sequence
  Oligonucleotide primer for the detection of SNP TSC0013829
ctaacaccgcgc

SEQ ID NO: 289182 - DNA, 12 bp, Artificial Sequence
  Oligonucleotide primer for the detection of SNP TSC0013829
ctaacgccacgc

SEQ ID NO: 289183 - DNA, 12 bp, Artificial Sequence
  Oligonucleotide primer for the detection of SNP TSC0013829
ctaacgccgcac

SEQ ID NO: 289184 - DNA, 12 bp, Artificial Sequence
  Oligonucleotide primer for the detection of SNP TSC0013829
ctaacgccgcgc

SEQ ID NO: 289185 - DNA, 12 bp, Artificial Sequence
  Oligonucleotide primer for the detection of SNP TSC0013829
gggttgtggtga

SEQ ID NO: 289186 - DNA, 12 bp, Artificial Sequence
  Oligonucleotide primer for the detection of SNP TSC0013829
gggttgcggtga

SEQ ID NO: 289187 - DNA, 12 bp, Artificial Sequence
  Oligonucleotide primer for the detection of SNP TSC0013829
gggttgtggcga

SEQ ID NO: 289188 - DNA, 12 bp, Artificial Sequence
  Oligonucleotide primer for the detection of SNP TSC0013829
gggttgcggcga

SEQ ID NO: 289189 - DNA, 12 bp, Artificial Sequence
  Oligonucleotide primer for the detection of SNP TSC0013830
ttgaggttagta

SEQ ID NO: 289190 - DNA, 12 bp, Artificial Sequence
  Oligonucleotide primer for the detection of SNP TSC0013830
ctaaaaccaaca

SEQ ID NO: 289191 - DNA, 12 bp, Artificial Sequence
  Oligonucleotide primer for the detection of SNP TSC0013830
tttgggaggaag

SEQ ID NO: 289192 - DNA, 12 bp, Artificial Sequence
  Oligonucleotide primer for the detection of SNP TSC0013831
ccaaatactacc

SEQ ID NO: 289193 - DNA, 12 bp, Artificial Sequence
  Oligonucleotide primer for the detection of SNP TSC0013831
aggtatgatgtg

SEQ ID NO: 289194 - DNA, 12 bp, Artificial Sequence
  Oligonucleotide primer for the detection of SNP TSC0013833
ccataatccaat

SEQ ID NO: 289195 - DNA, 12 bp, Artificial Sequence
  Oligonucleotide primer for the detection of SNP TSC0013833
ttaggtttggaa

SEQ ID NO: 289196 - DNA, 12 bp, Artificial Sequence
  Oligonucleotide primer for the detection of SNP TSC0013834
tcactcaattaa

SEQ ID NO: 289197 - DNA, 12 bp, Artificial Sequence
  Oligonucleotide primer for the detection of SNP TSC0013834
tcactcgattaa

SEQ ID NO: 289198 - DNA, 12 bp, Artificial Sequence
  Oligonucleotide primer for the detection of SNP TSC0013834
atttgtagttgt

SEQ ID NO: 289199 - DNA, 12 bp, Artificial Sequence
  Oligonucleotide primer for the detection of SNP TSC0013834
tctacaactata

SEQ ID NO: 289200 - DNA, 12 bp, Artificial Sequence
  Oligonucleotide primer for the detection of SNP TSC0013834
atttggttggtt

SEQ ID NO: 289201 - DNA, 12 bp, Artificial Sequence
  Oligonucleotide primer for the detection of SNP TSC0013834
attcggttggtt

SEQ ID NO: 289202 - DNA, 12 bp, Artificial Sequence
  Oligonucleotide primer for the detection of SNP TSC0013835
aactacctcaac

SEQ ID NO: 289203 - DNA, 12 bp, Artificial Sequence
  Oligonucleotide primer for the detection of SNP TSC0013835
agttatttggga

SEQ ID NO: 289204 - DNA, 12 bp, Artificial Sequence
  Oligonucleotide primer for the detection of SNP TSC0013835
agttattcggga

SEQ ID NO: 289205 - DNA, 12 bp, Artificial Sequence
  Oligonucleotide primer for the detection of SNP TSC0013839
tataatccttct

SEQ ID NO: 289206 - DNA, 12 bp, Artificial Sequence
  Oligonucleotide primer for the detection of SNP TSC0013839
tggatgttttgg

SEQ ID NO: 289207 - DNA, 12 bp, Artificial Sequence
  Oligonucleotide primer for the detection of SNP TSC0013839
tggatgtttcgg

SEQ ID NO: 289208 - DNA, 12 bp, Artificial Sequence
  Oligonucleotide primer for the detection of SNP TSC0013840
ttcatcaaaatt

SEQ ID NO: 289209 - DNA, 12 bp, Artificial Sequence
  Oligonucleotide primer for the detection of SNP TSC0013840
aaagttttttgg

SEQ ID NO: 289210 - DNA, 12 bp, Artificial Sequence
  Oligonucleotide primer for the detection of SNP TSC0013841
taaccatttaca

SEQ ID NO: 289211 - DNA, 12 bp, Artificial Sequence
  Oligonucleotide primer for the detection of SNP TSC0013841
agttaggttgtt

SEQ ID NO: 289212 - DNA, 12 bp, Artificial Sequence
  Oligonucleotide primer for the detection of SNP TSC0013841
aaccaaactact

SEQ ID NO: 289213 - DNA, 12 bp, Artificial Sequence
  Oligonukleotid-Primer
tgattatttgta

SEQ ID NO: 289214 - DNA, 12 bp, Artificial Sequence
  Oligonucleotide primer for the detection of SNP TSC0013842
acacaccaccac

SEQ ID NO: 289215 - DNA, 12 bp, Artificial Sequence
  Oligonucleotide primer for the detection of SNP TSC0013842
acacgccaccac

SEQ ID NO: 289216 - DNA, 12 bp, Artificial Sequence
  Oligonucleotide primer for the detection of SNP TSC0013842
acgcaccaccac

SEQ ID NO: 289217 - DNA, 12 bp, Artificial Sequence
  Oligonucleotide primer for the detection of SNP TSC0013842
acgcgccaccac

SEQ ID NO: 289218 - DNA, 12 bp, Artificial Sequence
  Oligonucleotide primer for the detection of SNP TSC0013842
aaaattaattag

SEQ ID NO: 289219 - DNA, 12 bp, Artificial Sequence
  Oligonucleotide primer for the detection of SNP TSC0013843
aaaattaaaaaa

SEQ ID NO: 289220 - DNA, 12 bp, Artificial Sequence
  Oligonucleotide primer for the detection of SNP TSC0013843
attgtagttttt

SEQ ID NO: 289221 - DNA, 12 bp, Artificial Sequence
  Oligonucleotide primer for the detection of SNP TSC0013843
atcgtagttttt

SEQ ID NO: 289222 - DNA, 12 bp, Artificial Sequence
  Oligonucleotide primer for the detection of SNP TSC0013843
accataacctcc

SEQ ID NO: 289223 - DNA, 12 bp, Artificial Sequence
  Oligonucleotide primer for the detection of SNP TSC0013843
accgtaacctcc

SEQ ID NO: 289224 - DNA, 12 bp, Artificial Sequence
  Oligonucleotide primer for the detection of SNP TSC0013843
gggattgggagg

SEQ ID NO: 289225 - DNA, 12 bp, Artificial Sequence
  Oligonucleotide primer for the detection of SNP TSC0013844
tataggtgtgta

SEQ ID NO: 289226 - DNA, 12 bp, Artificial Sequence
  Oligonucleotide primer for the detection of SNP TSC0013844
cacaaatataca

SEQ ID NO: 289227 - DNA, 12 bp, Artificial Sequence
  Oligonucleotide primer for the detection of SNP TSC0013845
caatacaaatac

SEQ ID NO: 289228 - DNA, 12 bp, Artificial Sequence
  Oligonucleotide primer for the detection of SNP TSC0013845
agtgtagaaata

SEQ ID NO: 289229 - DNA, 12 bp, Artificial Sequence
  Oligonucleotide primer for the detection of SNP TSC0013846
attatttttatt

SEQ ID NO: 289230 - DNA, 12 bp, Artificial Sequence
  Oligonucleotide primer for the detection of SNP TSC0013846
ttatgaatttta

SEQ ID NO: 289231 - DNA, 12 bp, Artificial Sequence
  Oligonucleotide primer for the detection of SNP TSC0013847
caatattcttaa

SEQ ID NO: 289232 - DNA, 12 bp, Artificial Sequence
  Oligonucleotide primer for the detection of SNP TSC0013847
gtattgaaaagt

SEQ ID NO: 289233 - DNA, 12 bp, Artificial Sequence
  Oligonucleotide primer for the detection of SNP TSC0013848
ccaacaaaaaat

SEQ ID NO: 289234 - DNA, 12 bp, Artificial Sequence
  Oligonucleotide primer for the detection of SNP TSC0013848
gttattatgata

SEQ ID NO: 289235 - DNA, 12 bp, Artificial Sequence
  Oligonucleotide primer for the detection of SNP TSC0013849
atacttaatacc

SEQ ID NO: 289236 - DNA, 12 bp, Artificial Sequence
  Oligonucleotide primer for the detection of SNP TSC0013849
atagtataaata

SEQ ID NO: 289237 - DNA, 12 bp, Artificial Sequence
  Oligonucleotide primer for the detection of SNP TSC0013850
cccttaaaattc

SEQ ID NO: 289238 - DNA, 12 bp, Artificial Sequence
  Oligonucleotide primer for the detection of SNP TSC0013850
gtaaatgaataa

SEQ ID NO: 289239 - DNA, 12 bp, Artificial Sequence
  Oligonucleotide primer for the detection of SNP TSC0013851
tttactatatca

SEQ ID NO: 289240 - DNA, 12 bp, Artificial Sequence
  Oligonucleotide primer for the detection of SNP TSC0013851
ttttaatttatt

SEQ ID NO: 289241 - DNA, 12 bp, Artificial Sequence
  Oligonucleotide primer for the detection of SNP TSC0013851
ttctaatctatt

SEQ ID NO: 289242 - DNA, 12 bp, Artificial Sequence
  Oligonucleotide primer for the detection of SNP TSC0013851
tttgttatgtta

SEQ ID NO: 289243 - DNA, 12 bp, Artificial Sequence
  Oligonucleotide primer for the detection of SNP TSC0013853
aaacgaaaataa

SEQ ID NO: 289244 - DNA, 12 bp, Artificial Sequence
  Oligonucleotide primer for the detection of SNP TSC0013853
atttgtgagttt

SEQ ID NO: 289245 - DNA, 12 bp, Artificial Sequence
  Oligonucleotide primer for the detection of SNP TSC0013853
atttgtgagttc

SEQ ID NO: 289246 - DNA, 12 bp, Artificial Sequence
  Oligonucleotide primer for the detection of SNP TSC0013853
acctataaatcc

SEQ ID NO: 289247 - DNA, 12 bp, Artificial Sequence
  Oligonucleotide primer for the detection of SNP TSC0013853
ggagtgagggtg

SEQ ID NO: 289248 - DNA, 12 bp, Artificial Sequence
  Oligonucleotide primer for the detection of SNP TSC0013853
ggagcgagggtg

SEQ ID NO: 289249 - DNA, 12 bp, Artificial Sequence
  Oligonucleotide primer for the detection of SNP TSC0013854
aaaatttctatt

SEQ ID NO: 289250 - DNA, 12 bp, Artificial Sequence
  Oligonucleotide primer for the detection of SNP TSC0013854
gtttataaaata

SEQ ID NO: 289251 - DNA, 12 bp, Artificial Sequence
  Oligonucleotide primer for the detection of SNP TSC0013856
aaactaattatt

SEQ ID NO: 289252 - DNA, 12 bp, Artificial Sequence
  Oligonucleotide primer for the detection of SNP TSC0013856
atatttaaaatg

SEQ ID NO: 289253 - DNA, 12 bp, Artificial Sequence
  Oligonucleotide primer for the detection of SNP TSC0013857
taataaaaaaac

SEQ ID NO: 289254 - DNA, 12 bp, Artificial Sequence
  Oligonucleotide primer for the detection of SNP TSC0013857
tttgagtttaga

SEQ ID NO: 289255 - DNA, 12 bp, Artificial Sequence
  Oligonucleotide primer for the detection of SNP TSC0013858
ctaaacacatct

SEQ ID NO: 289256 - DNA, 12 bp, Artificial Sequence
  Oligonucleotide primer for the detection of SNP TSC0013858
ttagagaaggga

SEQ ID NO: 289257 - DNA, 12 bp, Artificial Sequence
  Oligonucleotide primer for the detection of SNP TSC0013859
aacgccataaaa

SEQ ID NO: 289258 - DNA, 12 bp, Artificial Sequence
  Oligonucleotide primer for the detection of SNP TSC0013859
ggattaatatat

SEQ ID NO: 289259 - DNA, 12 bp, Artificial Sequence
  Oligonucleotide primer for the detection of SNP TSC0013859
aaactaatacat

SEQ ID NO: 289260 - DNA, 12 bp, Artificial Sequence
  Oligonucleotide primer for the detection of SNP TSC0013859
ggtgttatgaga

SEQ ID NO: 289261 - DNA, 12 bp, Artificial Sequence
  Oligonucleotide primer for the detection of SNP TSC0013859
ggcgttatgaga

SEQ ID NO: 289262 - DNA, 12 bp, Artificial Sequence
  Oligonucleotide primer for the detection of SNP TSC0013860
ccatcctaaata

SEQ ID NO: 289263 - DNA, 12 bp, Artificial Sequence
  Oligonucleotide primer for the detection of SNP TSC0013860
gattggaagaat

SEQ ID NO: 289264 - DNA, 12 bp, Artificial Sequence
  Oligonucleotide primer for the detection of SNP TSC0013860
aactaaaaaaat

SEQ ID NO: 289265 - DNA, 12 bp, Artificial Sequence
  Oligonucleotide primer for the detection of SNP TSC0013860
ttattttgagtg

SEQ ID NO: 289266 - DNA, 12 bp, Artificial Sequence
  Oligonucleotide primer for the detection of SNP TSC0013862
aatacattttct

SEQ ID NO: 289267 - DNA, 12 bp, Artificial Sequence
  Oligonucleotide primer for the detection of SNP TSC0013862
aattattatttg

SEQ ID NO: 289268 - DNA, 12 bp, Artificial Sequence
  Oligonucleotide primer for the detection of SNP TSC0013865
attactaacaaa

SEQ ID NO: 289269 - DNA, 12 bp, Artificial Sequence
  Oligonucleotide primer for the detection of SNP TSC0013865
aagtttaataga

SEQ ID NO: 289270 - DNA, 12 bp, Artificial Sequence
  Oligonucleotide primer for the detection of SNP TSC0013865
attgttaatagg

SEQ ID NO: 289271 - DNA, 12 bp, Artificial Sequence
  Oligonucleotide primer for the detection of SNP TSC0013866
aacaacacaaaa

SEQ ID NO: 289272 - DNA, 12 bp, Artificial Sequence
  Oligonucleotide primer for the detection of SNP TSC0013866
agaatttgttag

SEQ ID NO: 289273 - DNA, 12 bp, Artificial Sequence
  Oligonucleotide primer for the detection of SNP TSC0013866
aaaacctattaa

SEQ ID NO: 289274 - DNA, 12 bp, Artificial Sequence
  Oligonucleotide primer for the detection of SNP TSC0013866
tagtataagatt

SEQ ID NO: 289275 - DNA, 12 bp, Artificial Sequence
  Oligonucleotide primer for the detection of SNP TSC0013867
taataataatac

SEQ ID NO: 289276 - DNA, 12 bp, Artificial Sequence
  Oligonucleotide primer for the detection of SNP TSC0013867
aatatgtgtagg

SEQ ID NO: 289277 - DNA, 12 bp, Artificial Sequence
  Oligonucleotide primer for the detection of SNP TSC0013867
aatacgtgtagg

SEQ ID NO: 289278 - DNA, 12 bp, Artificial Sequence
  Oligonucleotide primer for the detection of SNP TSC0013868
ctcaactctaat

SEQ ID NO: 289279 - DNA, 12 bp, Artificial Sequence
  Oligonucleotide primer for the detection of SNP TSC0013869
ttaactaaacca

SEQ ID NO: 289280 - DNA, 12 bp, Artificial Sequence
  Oligonucleotide primer for the detection of SNP TSC0013869
aagtagagttgt

SEQ ID NO: 289281 - DNA, 12 bp, Artificial Sequence
  Oligonucleotide primer for the detection of SNP TSC0013869
aaataaaactat

SEQ ID NO: 289282 - DNA, 12 bp, Artificial Sequence
  Oligonucleotide primer for the detection of SNP TSC0013869
taattgaattat

SEQ ID NO: 289283 - DNA, 12 bp, Artificial Sequence
  Oligonucleotide primer for the detection of SNP TSC0013870
ataaaaacctat

SEQ ID NO: 289284 - DNA, 12 bp, Artificial Sequence
  Oligonucleotide primer for the detection of SNP TSC0013870
gtataaaattta

SEQ ID NO: 289285 - DNA, 12 bp, Artificial Sequence
  Oligonucleotide primer for the detection of SNP TSC0013870
acataaaaccca

SEQ ID NO: 289286 - DNA, 12 bp, Artificial Sequence
  Oligonucleotide primer for the detection of SNP TSC0013870
atagaggtttat

SEQ ID NO: 289287 - DNA, 12 bp, Artificial Sequence
  Oligonucleotide primer for the detection of SNP TSC0013873
taatatagtttt

SEQ ID NO: 289288 - DNA, 12 bp, Artificial Sequence
  Oligonucleotide primer for the detection of SNP TSC0013873
taacacaactct

SEQ ID NO: 289289 - DNA, 12 bp, Artificial Sequence
  Oligonucleotide primer for the detection of SNP TSC0013873
atgggaatagaa

SEQ ID NO: 289290 - DNA, 12 bp, Artificial Sequence
  Oligonucleotide primer for the detection of SNP TSC0013874
taaattaaacat

SEQ ID NO: 289291 - DNA, 12 bp, Artificial Sequence
  Oligonucleotide primer for the detection of SNP TSC0013874
tatggatgttta

SEQ ID NO: 289292 - DNA, 12 bp, Artificial Sequence
  Oligonucleotide primer for the detection of SNP TSC0013875
atctaaaccatc

SEQ ID NO: 289293 - DNA, 12 bp, Artificial Sequence
  Oligonucleotide primer for the detection of SNP TSC0013875
atctaaaccgtc

SEQ ID NO: 289294 - DNA, 12 bp, Artificial Sequence
  Oligonucleotide primer for the detection of SNP TSC0013875
gatatattgatg

SEQ ID NO: 289295 - DNA, 12 bp, Artificial Sequence
  Oligonucleotide primer for the detection of SNP TSC0013875
gatatatcgatg

SEQ ID NO: 289296 - DNA, 12 bp, Artificial Sequence
  Oligonucleotide primer for the detection of SNP TSC0013876
acatatatacat

SEQ ID NO: 289297 - DNA, 12 bp, Artificial Sequence
  Oligonucleotide primer for the detection of SNP TSC0013876
tttatgtatata

SEQ ID NO: 289298 - DNA, 12 bp, Artificial Sequence
  Oligonucleotide primer for the detection of SNP TSC0013877
ccttcctttacc

SEQ ID NO: 289299 - DNA, 12 bp, Artificial Sequence
  Oligonucleotide primer for the detection of SNP TSC0013877
agggtggttttg

SEQ ID NO: 289300 - DNA, 12 bp, Artificial Sequence
  Oligonucleotide primer for the detection of SNP TSC0013878
aaaataaaccta

SEQ ID NO: 289301 - DNA, 12 bp, Artificial Sequence
  Oligonucleotide primer for the detection of SNP TSC0013878
ttggggagatgg

SEQ ID NO: 289302 - DNA, 12 bp, Artificial Sequence
  Oligonucleotide primer for the detection of SNP TSC0013879
tactcccatata

SEQ ID NO: 289303 - DNA, 12 bp, Artificial Sequence
  Oligonucleotide primer for the detection of SNP TSC0013879
aaattaatagat

SEQ ID NO: 289304 - DNA, 12 bp, Artificial Sequence
  Oligonucleotide primer for the detection of SNP TSC0013879
aaattaataaat

SEQ ID NO: 289305 - DNA, 12 bp, Artificial Sequence
  Oligonucleotide primer for the detection of SNP TSC0013879
tgtttttatata

SEQ ID NO: 289306 - DNA, 12 bp, Artificial Sequence
  Oligonucleotide primer for the detection of SNP TSC0013880
atcacttaaaaa

SEQ ID NO: 289307 - DNA, 12 bp, Artificial Sequence
  Oligonucleotide primer for the detection of SNP TSC0013880
attagattttga

SEQ ID NO: 289308 - DNA, 12 bp, Artificial Sequence
  Oligonucleotide primer for the detection of SNP TSC0013880
ctaaactctaaa

SEQ ID NO: 289309 - DNA, 12 bp, Artificial Sequence
  Oligonucleotide primer for the detection of SNP TSC0013880
tattatttagag

SEQ ID NO: 289310 - DNA, 12 bp, Artificial Sequence
  Oligonucleotide primer for the detection of SNP TSC0013881
aaataaacaata

SEQ ID NO: 289311 - DNA, 12 bp, Artificial Sequence
  Oligonucleotide primer for the detection of SNP TSC0013881
ggtgtttggtag

SEQ ID NO: 289312 - DNA, 12 bp, Artificial Sequence
  Oligonucleotide primer for the detection of SNP TSC0013881
aatacttaacaa

SEQ ID NO: 289313 - DNA, 12 bp, Artificial Sequence
  Oligonucleotide primer for the detection of SNP TSC0013881
gaaatgagtagt

SEQ ID NO: 289314 - DNA, 12 bp, Artificial Sequence
  Oligonucleotide primer for the detection of SNP TSC0013882
ataaaacaatcc

SEQ ID NO: 289315 - DNA, 12 bp, Artificial Sequence
  Oligonucleotide primer for the detection of SNP TSC0013882
ataaaacgatcc

SEQ ID NO: 289316 - DNA, 12 bp, Artificial Sequence
  Oligonucleotide primer for the detection of SNP TSC0013882
tatattagtttg

SEQ ID NO: 289317 - DNA, 12 bp, Artificial Sequence
  Oligonucleotide primer for the detection of SNP TSC0013886
tggtgaggaggt

SEQ ID NO: 289318 - DNA, 12 bp, Artificial Sequence
  Oligonucleotide primer for the detection of SNP TSC0013887
attttacatatt

SEQ ID NO: 289319 - DNA, 12 bp, Artificial Sequence
  Oligonucleotide primer for the detection of SNP TSC0013887
gttttgattaaa

SEQ ID NO: 289320 - DNA, 12 bp, Artificial Sequence
  Oligonucleotide primer for the detection of SNP TSC0013887
gtttcgattaaa

SEQ ID NO: 289321 - DNA, 12 bp, Artificial Sequence
  Oligonucleotide primer for the detection of SNP TSC0013887
atctcaaccaaa

SEQ ID NO: 289322 - DNA, 12 bp, Artificial Sequence
  Oligonucleotide primer for the detection of SNP TSC0013887
atctcgaccaaa

SEQ ID NO: 289323 - DNA, 12 bp, Artificial Sequence
  Oligonucleotide primer for the detection of SNP TSC0013887
attttgtatgtt

SEQ ID NO: 289324 - DNA, 12 bp, Artificial Sequence
  Oligonucleotide primer for the detection of SNP TSC0013890
tcaaaataaact

SEQ ID NO: 289325 - DNA, 12 bp, Artificial Sequence
  Oligonucleotide primer for the detection of SNP TSC0013890
aattatttaaga

SEQ ID NO: 289326 - DNA, 12 bp, Artificial Sequence
  Oligonucleotide primer for the detection of SNP TSC0013891
ataaaaactcac

SEQ ID NO: 289327 - DNA, 12 bp, Artificial Sequence
  Oligonucleotide primer for the detection of SNP TSC0013891
gtgtttgttaag

SEQ ID NO: 289328 - DNA, 12 bp, Artificial Sequence
  Oligonucleotide primer for the detection of SNP TSC0013892
ttatatttatac

SEQ ID NO: 289329 - DNA, 12 bp, Artificial Sequence
  Oligonucleotide primer for the detection of SNP TSC0013892
ggagttaataag

SEQ ID NO: 289330 - DNA, 12 bp, Artificial Sequence
  Oligonucleotide primer for the detection of SNP TSC0013893
agatttatttta

SEQ ID NO: 289331 - DNA, 12 bp, Artificial Sequence
  Oligonucleotide primer for the detection of SNP TSC0013894
ttaaattactat

SEQ ID NO: 289332 - DNA, 12 bp, Artificial Sequence
  Oligonucleotide primer for the detection of SNP TSC0013894
atatggtttatg

SEQ ID NO: 289333 - DNA, 12 bp, Artificial Sequence
  Oligonucleotide primer for the detection of SNP TSC0013895
aacttctacatc

SEQ ID NO: 289334 - DNA, 12 bp, Artificial Sequence
  Oligonucleotide primer for the detection of SNP TSC0013895
gtggtaaagatg

SEQ ID NO: 289335 - DNA, 12 bp, Artificial Sequence
  Oligonucleotide primer for the detection of SNP TSC0013895
gtggtaaagacg

SEQ ID NO: 289336 - DNA, 12 bp, Artificial Sequence
  Oligonucleotide primer for the detection of SNP TSC0013896
acttaaaccaca

SEQ ID NO: 289337 - DNA, 12 bp, Artificial Sequence
  Oligonucleotide primer for the detection of SNP TSC0013896
taattggtttag

SEQ ID NO: 289338 - DNA, 12 bp, Artificial Sequence
  Oligonucleotide primer for the detection of SNP TSC0013896
aattaatctaaa

SEQ ID NO: 289339 - DNA, 12 bp, Artificial Sequence
  Oligonucleotide primer for the detection of SNP TSC0013896
tgtttgggttat

SEQ ID NO: 289340 - DNA, 12 bp, Artificial Sequence
  Oligonucleotide primer for the detection of SNP TSC0013898
taaacactcata

SEQ ID NO: 289341 - DNA, 12 bp, Artificial Sequence
  Oligonucleotide primer for the detection of SNP TSC0013898
taaacactcgta

SEQ ID NO: 289342 - DNA, 12 bp, Artificial Sequence
  Oligonucleotide primer for the detection of SNP TSC0013898
gaaaaagagaaa

SEQ ID NO: 289343 - DNA, 12 bp, Artificial Sequence
  Oligonucleotide primer for the detection of SNP TSC0013898
gatatttgtatt

SEQ ID NO: 289344 - DNA, 12 bp, Artificial Sequence
  Oligonucleotide primer for the detection of SNP TSC0013898
gatattcgtatt

SEQ ID NO: 289345 - DNA, 12 bp, Artificial Sequence
  Oligonucleotide primer for the detection of SNP TSC0013898
gatatttgtatc

SEQ ID NO: 289346 - DNA, 12 bp, Artificial Sequence
  Oligonucleotide primer for the detection of SNP TSC0013898
gatattcgtatc

SEQ ID NO: 289347 - DNA, 12 bp, Artificial Sequence
  Oligonucleotide primer for the detection of SNP TSC0013902
ttccttctctct

SEQ ID NO: 289348 - DNA, 12 bp, Artificial Sequence
  Oligonucleotide primer for the detection of SNP TSC0013902
aaattgaaagaa

SEQ ID NO: 289349 - DNA, 12 bp, Artificial Sequence
  Oligonucleotide primer for the detection of SNP TSC0013903
ataacactaata

SEQ ID NO: 289350 - DNA, 12 bp, Artificial Sequence
  Oligonucleotide primer for the detection of SNP TSC0013903
ataacgctaata

SEQ ID NO: 289351 - DNA, 12 bp, Artificial Sequence
  Oligonucleotide primer for the detection of SNP TSC0013903
ttagtttttttt

SEQ ID NO: 289352 - DNA, 12 bp, Artificial Sequence
  Oligonucleotide primer for the detection of SNP TSC0013903
cctaacctcctc

SEQ ID NO: 289353 - DNA, 12 bp, Artificial Sequence
  Oligonucleotide primer for the detection of SNP TSC0013903
gtggtgttgatg

SEQ ID NO: 289354 - DNA, 12 bp, Artificial Sequence
  Oligonucleotide primer for the detection of SNP TSC0013903
gtggcgttgatg

SEQ ID NO: 289355 - DNA, 12 bp, Artificial Sequence
  Oligonucleotide primer for the detection of SNP TSC0013904
taacctcctctc

SEQ ID NO: 289356 - DNA, 12 bp, Artificial Sequence
  Oligonucleotide primer for the detection of SNP TSC0013904
tggtggtgttga

SEQ ID NO: 289357 - DNA, 12 bp, Artificial Sequence
  Oligonucleotide primer for the detection of SNP TSC0013904
tggtggcgttga

SEQ ID NO: 289358 - DNA, 12 bp, Artificial Sequence
  Oligonucleotide primer for the detection of SNP TSC0013905
cttcttccacaa

SEQ ID NO: 289359 - DNA, 12 bp, Artificial Sequence
  Oligonucleotide primer for the detection of SNP TSC0013905
cttcttccacga

SEQ ID NO: 289360 - DNA, 12 bp, Artificial Sequence
  Oligonucleotide primer for the detection of SNP TSC0013905
tttaggggttta

SEQ ID NO: 289361 - DNA, 12 bp, Artificial Sequence
  Oligonucleotide primer for the detection of SNP TSC0013905
attttttttatg

SEQ ID NO: 289362 - DNA, 12 bp, Artificial Sequence
  Oligonucleotide primer for the detection of SNP TSC0013905
attttttttacg

SEQ ID NO: 289363 - DNA, 12 bp, Artificial Sequence
  Oligonucleotide primer for the detection of SNP TSC0013907
catcataataac

SEQ ID NO: 289364 - DNA, 12 bp, Artificial Sequence
  Oligonucleotide primer for the detection of SNP TSC0013907
catcgtaataac

SEQ ID NO: 289365 - DNA, 12 bp, Artificial Sequence
  Oligonucleotide primer for the detection of SNP TSC0013907
tggggttatagg

SEQ ID NO: 289366 - DNA, 12 bp, Artificial Sequence
  Oligonucleotide primer for the detection of SNP TSC0013907
cggggttatagg

SEQ ID NO: 289367 - DNA, 12 bp, Artificial Sequence
  Oligonucleotide primer for the detection of SNP TSC0013907
caaaactataaa

SEQ ID NO: 289368 - DNA, 12 bp, Artificial Sequence
  Oligonucleotide primer for the detection of SNP TSC0013907
cgaaactataaa

SEQ ID NO: 289369 - DNA, 12 bp, Artificial Sequence
  Oligonucleotide primer for the detection of SNP TSC0013907
tattgtggtgat

SEQ ID NO: 289370 - DNA, 12 bp, Artificial Sequence
  Oligonucleotide primer for the detection of SNP TSC0013907
tatcgtggtgat

SEQ ID NO: 289371 - DNA, 12 bp, Artificial Sequence
  Oligonucleotide primer for the detection of SNP TSC0013908
ataccaccacac

SEQ ID NO: 289372 - DNA, 12 bp, Artificial Sequence
  Oligonucleotide primer for the detection of SNP TSC0013908
aaaaattagtta

SEQ ID NO: 289373 - DNA, 12 bp, Artificial Sequence
  Oligonucleotide primer for the detection of SNP TSC0013909
taatttaacacc

SEQ ID NO: 289374 - DNA, 12 bp, Artificial Sequence
  Oligonucleotide primer for the detection of SNP TSC0013909
tagtatataaaa

SEQ ID NO: 289375 - DNA, 12 bp, Artificial Sequence
  Oligonucleotide primer for the detection of SNP TSC0013910
aaattcaaacaa

SEQ ID NO: 289376 - DNA, 12 bp, Artificial Sequence
  Oligonucleotide primer for the detection of SNP TSC0013910
ggtggttaaagt

SEQ ID NO: 289377 - DNA, 12 bp, Artificial Sequence
  Oligonucleotide primer for the detection of SNP TSC0013910
aggtttaagtaa

SEQ ID NO: 289378 - DNA, 12 bp, Artificial Sequence
  Oligonucleotide primer for the detection of SNP TSC0013912
ctaacttatttt

SEQ ID NO: 289379 - DNA, 12 bp, Artificial Sequence
  Oligonucleotide primer for the detection of SNP TSC0013912
tttaagtgattt

SEQ ID NO: 289380 - DNA, 12 bp, Artificial Sequence
  Oligonucleotide primer for the detection of SNP TSC0013912
ccaaataatcta

SEQ ID NO: 289381 - DNA, 12 bp, Artificial Sequence
  Oligonucleotide primer for the detection of SNP TSC0013912
ttaatttatttt

SEQ ID NO: 289382 - DNA, 12 bp, Artificial Sequence
  Oligonucleotide primer for the detection of SNP TSC0013913
caaacccaattc

SEQ ID NO: 289383 - DNA, 12 bp, Artificial Sequence
  Oligonucleotide primer for the detection of SNP TSC0013914
atcataaaataa

SEQ ID NO: 289384 - DNA, 12 bp, Artificial Sequence
  Oligonucleotide primer for the detection of SNP TSC0013914
ttatttgtttta

SEQ ID NO: 289385 - DNA, 12 bp, Artificial Sequence
  Oligonucleotide primer for the detection of SNP TSC0013914
ctacctatctca

SEQ ID NO: 289386 - DNA, 12 bp, Artificial Sequence
  Oligonucleotide primer for the detection of SNP TSC0013914
gttatggaatga

SEQ ID NO: 289387 - DNA, 12 bp, Artificial Sequence
  Oligonucleotide primer for the detection of SNP TSC0013919
aaactaaaaaca

SEQ ID NO: 289388 - DNA, 12 bp, Artificial Sequence
  Oligonucleotide primer for the detection of SNP TSC0013919
gtaggattaagg

SEQ ID NO: 289389 - DNA, 12 bp, Artificial Sequence
  Oligonucleotide primer for the detection of SNP TSC0013919
acaaaaccaaaa

SEQ ID NO: 289390 - DNA, 12 bp, Artificial Sequence
  Oligonucleotide primer for the detection of SNP TSC0013919
gaggttggggat

SEQ ID NO: 289391 - DNA, 12 bp, Artificial Sequence
  Oligonucleotide primer for the detection of SNP TSC0013920
caaatctaaact

SEQ ID NO: 289392 - DNA, 12 bp, Artificial Sequence
  Oligonucleotide primer for the detection of SNP TSC0013920
ttgttttttggg

SEQ ID NO: 289393 - DNA, 12 bp, Artificial Sequence
  Oligonucleotide primer for the detection of SNP TSC0013921
taaaaattaaac

SEQ ID NO: 289394 - DNA, 12 bp, Artificial Sequence
  Oligonucleotide primer for the detection of SNP TSC0013921
gagttaggttaa

SEQ ID NO: 289395 - DNA, 12 bp, Artificial Sequence
  Oligonucleotide primer for the detection of SNP TSC0013921
aaactaaattaa

SEQ ID NO: 289396 - DNA, 12 bp, Artificial Sequence
  Oligonucleotide primer for the detection of SNP TSC0013921
tagaagttgagt

SEQ ID NO: 289397 - DNA, 12 bp, Artificial Sequence
  Oligonucleotide primer for the detection of SNP TSC0013922
tactaacctttc

SEQ ID NO: 289398 - DNA, 12 bp, Artificial Sequence
  Oligonucleotide primer for the detection of SNP TSC0013922
tagttttaaggg

SEQ ID NO: 289399 - DNA, 12 bp, Artificial Sequence
  Oligonucleotide primer for the detection of SNP TSC0013923
aattacactctc

SEQ ID NO: 289400 - DNA, 12 bp, Artificial Sequence
  Oligonucleotide primer for the detection of SNP TSC0013923
aattacgctctc

SEQ ID NO: 289401 - DNA, 12 bp, Artificial Sequence
  Oligonucleotide primer for the detection of SNP TSC0013923
ttgaggatataa

SEQ ID NO: 289402 - DNA, 12 bp, Artificial Sequence
  Oligonucleotide primer for the detection of SNP TSC0013924
tttctaaataat

SEQ ID NO: 289403 - DNA, 12 bp, Artificial Sequence
  Oligonukleotid-Primer
agtattttaata

SEQ ID NO: 289404 - DNA, 12 bp, Artificial Sequence
  Oligonucleotide primer for the detection of SNP TSC0013925
acaaccacaact

SEQ ID NO: 289405 - DNA, 12 bp, Artificial Sequence
  Oligonucleotide primer for the detection of SNP TSC0013925
acgaccacaact

SEQ ID NO: 289406 - DNA, 12 bp, Artificial Sequence
  Oligonucleotide primer for the detection of SNP TSC0013925
gttttatttttg

SEQ ID NO: 289407 - DNA, 12 bp, Artificial Sequence
  Oligonukleotid-Primer
ttataataatat

SEQ ID NO: 289408 - DNA, 12 bp, Artificial Sequence
  Oligonucleotide primer for the detection of SNP TSC0013926
atattagaagtg

SEQ ID NO: 289409 - DNA, 12 bp, Artificial Sequence
  Oligonucleotide primer for the detection of SNP TSC0013927
ccttcctctcca

SEQ ID NO: 289410 - DNA, 12 bp, Artificial Sequence
  Oligonucleotide primer for the detection of SNP TSC0013927
gttaggtgtagt

SEQ ID NO: 289411 - DNA, 12 bp, Artificial Sequence
  Oligonucleotide primer for the detection of SNP TSC0013927
caaatacaacaa

SEQ ID NO: 289412 - DNA, 12 bp, Artificial Sequence
  Oligonucleotide primer for the detection of SNP TSC0013928
ctaaactcaacc

SEQ ID NO: 289413 - DNA, 12 bp, Artificial Sequence
  Oligonucleotide primer for the detection of SNP TSC0013928
gtatttatattg

SEQ ID NO: 289414 - DNA, 12 bp, Artificial Sequence
  Oligonucleotide primer for the detection of SNP TSC0013929
cttattaaaccc

SEQ ID NO: 289415 - DNA, 12 bp, Artificial Sequence
  Oligonucleotide primer for the detection of SNP TSC0013929
ggatttgttttt

SEQ ID NO: 289416 - DNA, 12 bp, Artificial Sequence
  Oligonucleotide primer for the detection of SNP TSC0013929
ggatttgttttc

SEQ ID NO: 289417 - DNA, 12 bp, Artificial Sequence
  Oligonucleotide primer for the detection of SNP TSC0013929
aaacctaccccc

SEQ ID NO: 289418 - DNA, 12 bp, Artificial Sequence
  Oligonucleotide primer for the detection of SNP TSC0013929
tttgttggattt

SEQ ID NO: 289419 - DNA, 12 bp, Artificial Sequence
  Oligonucleotide primer for the detection of SNP TSC0013929
tttgttggattc

SEQ ID NO: 289420 - DNA, 12 bp, Artificial Sequence
  Oligonucleotide primer for the detection of SNP TSC0013930
tctatcctactc

SEQ ID NO: 289421 - DNA, 12 bp, Artificial Sequence
  Oligonucleotide primer for the detection of SNP TSC0013930
agggttaagatg

SEQ ID NO: 289422 - DNA, 12 bp, Artificial Sequence
  Oligonucleotide primer for the detection of SNP TSC0013931
caacactaacct

SEQ ID NO: 289423 - DNA, 12 bp, Artificial Sequence
  Oligonucleotide primer for the detection of SNP TSC0013931
tccccccaccca

SEQ ID NO: 289424 - DNA, 12 bp, Artificial Sequence
  Oligonucleotide primer for the detection of SNP TSC0013931
tagtattgattt

SEQ ID NO: 289425 - DNA, 12 bp, Artificial Sequence
  Oligonucleotide primer for the detection of SNP TSC0013932
tataaaatcaaa

SEQ ID NO: 289426 - DNA, 12 bp, Artificial Sequence
  Oligonucleotide primer for the detection of SNP TSC0013932
ttgaaataatta

SEQ ID NO: 289427 - DNA, 12 bp, Artificial Sequence
  Oligonucleotide primer for the detection of SNP TSC0013932
ctaaaataatca

SEQ ID NO: 289428 - DNA, 12 bp, Artificial Sequence
  Oligonucleotide primer for the detection of SNP TSC0013932
gtgaggttaaat

SEQ ID NO: 289429 - DNA, 12 bp, Artificial Sequence
  Oligonucleotide primer for the detection of SNP TSC0013932
gtgaggttaaac

SEQ ID NO: 289430 - DNA, 12 bp, Artificial Sequence
  Oligonucleotide primer for the detection of SNP TSC0013933
actttataatta

SEQ ID NO: 289431 - DNA, 12 bp, Artificial Sequence
  Oligonucleotide primer for the detection of SNP TSC0013933
aatttttttgag

SEQ ID NO: 289432 - DNA, 12 bp, Artificial Sequence
  Oligonucleotide primer for the detection of SNP TSC0013933
aacctccctaaa

SEQ ID NO: 289433 - DNA, 12 bp, Artificial Sequence
  Oligonucleotide primer for the detection of SNP TSC0013933
gattttgtgatt

SEQ ID NO: 289434 - DNA, 12 bp, Artificial Sequence
  Oligonucleotide primer for the detection of SNP TSC0013937
tattttactttt

SEQ ID NO: 289435 - DNA, 12 bp, Artificial Sequence
  Oligonucleotide primer for the detection of SNP TSC0013938
atacatattcct

SEQ ID NO: 289436 - DNA, 12 bp, Artificial Sequence
  Oligonucleotide primer for the detection of SNP TSC0013938
ttagtaaatgta

SEQ ID NO: 289437 - DNA, 12 bp, Artificial Sequence
  Oligonucleotide primer for the detection of SNP TSC0013939
tcatcaaaactt

SEQ ID NO: 289438 - DNA, 12 bp, Artificial Sequence
  Oligonucleotide primer for the detection of SNP TSC0013939
tcgtcaaaactt

SEQ ID NO: 289439 - DNA, 12 bp, Artificial Sequence
  Oligonucleotide primer for the detection of SNP TSC0013939
taaagggttttt

SEQ ID NO: 289440 - DNA, 12 bp, Artificial Sequence
  Oligonucleotide primer for the detection of SNP TSC0013939
caaaaaatcctc

SEQ ID NO: 289441 - DNA, 12 bp, Artificial Sequence
  Oligonucleotide primer for the detection of SNP TSC0013939
ttgttagagttt

SEQ ID NO: 289442 - DNA, 12 bp, Artificial Sequence
  Oligonucleotide primer for the detection of SNP TSC0013939
tcgttagagttt

SEQ ID NO: 289443 - DNA, 12 bp, Artificial Sequence
  Oligonucleotide primer for the detection of SNP TSC0013940
cctctattatat

SEQ ID NO: 289444 - DNA, 12 bp, Artificial Sequence
  Oligonucleotide primer for the detection of SNP TSC0013940
agtttataggga

SEQ ID NO: 289445 - DNA, 12 bp, Artificial Sequence
  Oligonucleotide primer for the detection of SNP TSC0013941
ccttataaacat

SEQ ID NO: 289446 - DNA, 12 bp, Artificial Sequence
  Oligonucleotide primer for the detection of SNP TSC0013941
gttgtaaattga

SEQ ID NO: 289447 - DNA, 12 bp, Artificial Sequence
  Oligonucleotide primer for the detection of SNP TSC0013942
caactaaactta

SEQ ID NO: 289448 - DNA, 12 bp, Artificial Sequence
  Oligonucleotide primer for the detection of SNP TSC0013942
ttatatattaat

SEQ ID NO: 289449 - DNA, 12 bp, Artificial Sequence
  Oligonucleotide primer for the detection of SNP TSC0013942
ccacacattaat

SEQ ID NO: 289450 - DNA, 12 bp, Artificial Sequence
  Oligonucleotide primer for the detection of SNP TSC0013942
aattaagtttat

SEQ ID NO: 289451 - DNA, 12 bp, Artificial Sequence
  Oligonucleotide primer for the detection of SNP TSC0013944
aaacatattttt

SEQ ID NO: 289452 - DNA, 12 bp, Artificial Sequence
  Oligonucleotide primer for the detection of SNP TSC0013944
aaacgtattttt

SEQ ID NO: 289453 - DNA, 12 bp, Artificial Sequence
  Oligonucleotide primer for the detection of SNP TSC0013944
tattaagtttaa

SEQ ID NO: 289454 - DNA, 12 bp, Artificial Sequence
  Oligonucleotide primer for the detection of SNP TSC0013944
catcaaatttaa

SEQ ID NO: 289455 - DNA, 12 bp, Artificial Sequence
  Oligonucleotide primer for the detection of SNP TSC0013944
aaatgtgttttt

SEQ ID NO: 289456 - DNA, 12 bp, Artificial Sequence
  Oligonucleotide primer for the detection of SNP TSC0013944
aaacgtgttttt

SEQ ID NO: 289457 - DNA, 12 bp, Artificial Sequence
  Oligonucleotide primer for the detection of SNP TSC0013945
aaaccataccac

SEQ ID NO: 289458 - DNA, 12 bp, Artificial Sequence
  Oligonucleotide primer for the detection of SNP TSC0013945
aaaccataccgc

SEQ ID NO: 289459 - DNA, 12 bp, Artificial Sequence
  Oligonucleotide primer for the detection of SNP TSC0013945
ttttcgaattag

SEQ ID NO: 289460 - DNA, 12 bp, Artificial Sequence
  Oligonucleotide primer for the detection of SNP TSC0013946
ataacaatctat

SEQ ID NO: 289461 - DNA, 12 bp, Artificial Sequence
  Oligonucleotide primer for the detection of SNP TSC0013946
gttagtaattta

SEQ ID NO: 289462 - DNA, 12 bp, Artificial Sequence
  Oligonucleotide primer for the detection of SNP TSC0013947
acaaaacttcaa

SEQ ID NO: 289463 - DNA, 12 bp, Artificial Sequence
  Oligonucleotide primer for the detection of SNP TSC0013947
gcaaaacttcaa

SEQ ID NO: 289464 - DNA, 12 bp, Artificial Sequence
  Oligonucleotide primer for the detection of SNP TSC0013947
atggatgtgaga

SEQ ID NO: 289465 - DNA, 12 bp, Artificial Sequence
  Oligonucleotide primer for the detection of SNP TSC0013947
acggatgtgaga

SEQ ID NO: 289466 - DNA, 12 bp, Artificial Sequence
  Oligonucleotide primer for the detection of SNP TSC0013947
caaatataaaaa

SEQ ID NO: 289467 - DNA, 12 bp, Artificial Sequence
  Oligonucleotide primer for the detection of SNP TSC0013947
cgaatataaaaa

SEQ ID NO: 289468 - DNA, 12 bp, Artificial Sequence
  Oligonucleotide primer for the detection of SNP TSC0013947
tagggttttagt

SEQ ID NO: 289469 - DNA, 12 bp, Artificial Sequence
  Oligonucleotide primer for the detection of SNP TSC0013948
tataaaaaactt

SEQ ID NO: 289470 - DNA, 12 bp, Artificial Sequence
  Oligonucleotide primer for the detection of SNP TSC0013948
attagggatgtg

SEQ ID NO: 289471 - DNA, 12 bp, Artificial Sequence
  Oligonucleotide primer for the detection of SNP TSC0013949
ataaacaaaaca

SEQ ID NO: 289472 - DNA, 12 bp, Artificial Sequence
  Oligonucleotide primer for the detection of SNP TSC0013949
ttccttccacaa

SEQ ID NO: 289473 - DNA, 12 bp, Artificial Sequence
  Oligonucleotide primer for the detection of SNP TSC0013949
gataaatagagt

SEQ ID NO: 289474 - DNA, 12 bp, Artificial Sequence
  Oligonucleotide primer for the detection of SNP TSC0013951
aataccaatcca

SEQ ID NO: 289475 - DNA, 12 bp, Artificial Sequence
  Oligonucleotide primer for the detection of SNP TSC0013951
taaattttaggt

SEQ ID NO: 289476 - DNA, 12 bp, Artificial Sequence
  Oligonucleotide primer for the detection of SNP TSC0013951
caaaccccaaac

SEQ ID NO: 289477 - DNA, 12 bp, Artificial Sequence
  Oligonucleotide primer for the detection of SNP TSC0013951
ggtattagttta

SEQ ID NO: 289478 - DNA, 12 bp, Artificial Sequence
  Oligonucleotide primer for the detection of SNP TSC0013952
gggattgtttta

SEQ ID NO: 289479 - DNA, 12 bp, Artificial Sequence
  Oligonucleotide primer for the detection of SNP TSC0013952
aaactattctaa

SEQ ID NO: 289480 - DNA, 12 bp, Artificial Sequence
  Oligonucleotide primer for the detection of SNP TSC0013952
tggggtgggagt

SEQ ID NO: 289481 - DNA, 12 bp, Artificial Sequence
  Oligonucleotide primer for the detection of SNP TSC0013953
atcctaaaaact

SEQ ID NO: 289482 - DNA, 12 bp, Artificial Sequence
  Oligonucleotide primer for the detection of SNP TSC0013953
tagtttgtttgg

SEQ ID NO: 289483 - DNA, 12 bp, Artificial Sequence
  Oligonucleotide primer for the detection of SNP TSC0013953
caacctacctaa

SEQ ID NO: 289484 - DNA, 12 bp, Artificial Sequence
  Oligonukleotid-Primer
gttttgggggtt

SEQ ID NO: 289485 - DNA, 12 bp, Artificial Sequence
  Oligonucleotide primer for the detection of SNP TSC0013954
tttttagattac

SEQ ID NO: 289486 - DNA, 12 bp, Artificial Sequence
  Oligonucleotide primer for the detection of SNP TSC0013954
ccctcaaaccac

SEQ ID NO: 289487 - DNA, 12 bp, Artificial Sequence
  Oligonucleotide primer for the detection of SNP TSC0013954
agagaaggagat

SEQ ID NO: 289488 - DNA, 12 bp, Artificial Sequence
  Oligonukleotid-Primer
gagagaaaaaaa

SEQ ID NO: 289489 - DNA, 12 bp, Artificial Sequence
  Oligonucleotide primer for the detection of SNP TSC0013958
tacctataaatt

SEQ ID NO: 289490 - DNA, 12 bp, Artificial Sequence
  Oligonucleotide primer for the detection of SNP TSC0013958
aagattgtaaaa

SEQ ID NO: 289491 - DNA, 12 bp, Artificial Sequence
  Oligonucleotide primer for the detection of SNP TSC0013959
aaaaactatccc

SEQ ID NO: 289492 - DNA, 12 bp, Artificial Sequence
  Oligonukleotid-Primer
ggtatagtttag

SEQ ID NO: 289493 - DNA, 12 bp, Artificial Sequence
  Oligonucleotide primer for the detection of SNP TSC0013960
gattaatttggg

SEQ ID NO: 289494 - DNA, 12 bp, Artificial Sequence
  Oligonucleotide primer for the detection of SNP TSC0013960
aaccaacctaaa

SEQ ID NO: 289495 - DNA, 12 bp, Artificial Sequence
  Oligonucleotide primer for the detection of SNP TSC0013961
aactccctatac

SEQ ID NO: 289496 - DNA, 12 bp, Artificial Sequence
  Oligonukleotid-Primer
tgtaggtggaag

SEQ ID NO: 289497 - DNA, 12 bp, Artificial Sequence
  Oligonucleotide primer for the detection of SNP TSC0013961
tataaataaaaa

SEQ ID NO: 289498 - DNA, 12 bp, Artificial Sequence
  Oligonucleotide primer for the detection of SNP TSC0013961
ggttttttgtat

SEQ ID NO: 289499 - DNA, 12 bp, Artificial Sequence
  Oligonucleotide primer for the detection of SNP TSC0013961
ggttttttgtac

SEQ ID NO: 289500 - DNA, 12 bp, Artificial Sequence
  Oligonukleotid-Primer
tattttacccaa

SEQ ID NO: 289501 - DNA, 12 bp, Artificial Sequence
  Oligonucleotide primer for the detection of SNP TSC0013966
agtttgaggtta

SEQ ID NO: 289502 - DNA, 12 bp, Artificial Sequence
  Oligonucleotide primer for the detection of SNP TSC0013966
atttaaaactaa

SEQ ID NO: 289503 - DNA, 12 bp, Artificial Sequence
  Oligonucleotide primer for the detection of SNP TSC0013966
ttattttgttta

SEQ ID NO: 289504 - DNA, 12 bp, Artificial Sequence
  Oligonucleotide primer for the detection of SNP TSC0013967
ttttactaaact

SEQ ID NO: 289505 - DNA, 12 bp, Artificial Sequence
  Oligonucleotide primer for the detection of SNP TSC0013967
tagtgatataga

SEQ ID NO: 289506 - DNA, 12 bp, Artificial Sequence
  Oligonucleotide primer for the detection of SNP TSC0013968
acaaaacaaaaa

SEQ ID NO: 289507 - DNA, 12 bp, Artificial Sequence
  Oligonucleotide primer for the detection of SNP TSC0013968
acaaaacgaaaa

SEQ ID NO: 289508 - DNA, 12 bp, Artificial Sequence
  Oligonucleotide primer for the detection of SNP TSC0013968
acgaaacaaaaa

SEQ ID NO: 289509 - DNA, 12 bp, Artificial Sequence
  Oligonucleotide primer for the detection of SNP TSC0013968
acgaaacgaaaa

SEQ ID NO: 289510 - DNA, 12 bp, Artificial Sequence
  Oligonucleotide primer for the detection of SNP TSC0013968
gtgtaaaaggtt

SEQ ID NO: 289511 - DNA, 12 bp, Artificial Sequence
  Oligonucleotide primer for the detection of SNP TSC0013968
tataaaaaacca

SEQ ID NO: 289512 - DNA, 12 bp, Artificial Sequence
  Oligonucleotide primer for the detection of SNP TSC0013968
gtgaggtgggga

SEQ ID NO: 289513 - DNA, 12 bp, Artificial Sequence
  Oligonucleotide primer for the detection of SNP TSC0013968
gcgaggtgggga

SEQ ID NO: 289514 - DNA, 12 bp, Artificial Sequence
  Oligonucleotide primer for the detection of SNP TSC0013968
gtgaggcgggga

SEQ ID NO: 289515 - DNA, 12 bp, Artificial Sequence
  Oligonucleotide primer for the detection of SNP TSC0013968
gcgaggcgggga

SEQ ID NO: 289516 - DNA, 12 bp, Artificial Sequence
  Oligonucleotide primer for the detection of SNP TSC0013969
aattaaaaaaac

SEQ ID NO: 289517 - DNA, 12 bp, Artificial Sequence
  Oligonucleotide primer for the detection of SNP TSC0013969
tgtaggattgtg

SEQ ID NO: 289518 - DNA, 12 bp, Artificial Sequence
  Oligonucleotide primer for the detection of SNP TSC0013969
tgtaggatcgtg

SEQ ID NO: 289519 - DNA, 12 bp, Artificial Sequence
  Oligonucleotide primer for the detection of SNP TSC0013970
cctactctcctc

SEQ ID NO: 289520 - DNA, 12 bp, Artificial Sequence
  Oligonucleotide primer for the detection of SNP TSC0013970
ttttatttagag

SEQ ID NO: 289521 - DNA, 12 bp, Artificial Sequence
  Oligonucleotide primer for the detection of SNP TSC0013970
ccatccaaaaaa

SEQ ID NO: 289522 - DNA, 12 bp, Artificial Sequence
  Oligonucleotide primer for the detection of SNP TSC0013972
tctaaaatcaaa

SEQ ID NO: 289523 - DNA, 12 bp, Artificial Sequence
  Oligonucleotide primer for the detection of SNP TSC0013972
tttttttttggt

SEQ ID NO: 289524 - DNA, 12 bp, Artificial Sequence
  Oligonucleotide primer for the detection of SNP TSC0013972
ttttttttcggt

SEQ ID NO: 289525 - DNA, 12 bp, Artificial Sequence
  Oligonucleotide primer for the detection of SNP TSC0013972
tttttttttggc

SEQ ID NO: 289526 - DNA, 12 bp, Artificial Sequence
  Oligonucleotide primer for the detection of SNP TSC0013972
ttttttttcggc

SEQ ID NO: 289527 - DNA, 12 bp, Artificial Sequence
  Oligonucleotide primer for the detection of SNP TSC0013972
ccttctctccaa

SEQ ID NO: 289528 - DNA, 12 bp, Artificial Sequence
  Oligonucleotide primer for the detection of SNP TSC0013972
ccttctctccga

SEQ ID NO: 289529 - DNA, 12 bp, Artificial Sequence
  Oligonucleotide primer for the detection of SNP TSC0013972
gtttgaggttaa

SEQ ID NO: 289530 - DNA, 12 bp, Artificial Sequence
  Oligonucleotide primer for the detection of SNP TSC0013973
tatttaaacaca

SEQ ID NO: 289531 - DNA, 12 bp, Artificial Sequence
  Oligonucleotide primer for the detection of SNP TSC0013973
taatttagttat

SEQ ID NO: 289532 - DNA, 12 bp, Artificial Sequence
  Oligonucleotide primer for the detection of SNP TSC0013973
taatttaattat

SEQ ID NO: 289533 - DNA, 12 bp, Artificial Sequence
  Oligonucleotide primer for the detection of SNP TSC0013973
tgtttaaatata

SEQ ID NO: 289534 - DNA, 12 bp, Artificial Sequence
  Oligonucleotide primer for the detection of SNP TSC0013974
tttactatatta

SEQ ID NO: 289535 - DNA, 12 bp, Artificial Sequence
  Oligonucleotide primer for the detection of SNP TSC0013974
tttatttaattt

SEQ ID NO: 289536 - DNA, 12 bp, Artificial Sequence
  Oligonucleotide primer for the detection of SNP TSC0013974
aactttatccaa

SEQ ID NO: 289537 - DNA, 12 bp, Artificial Sequence
  Oligonucleotide primer for the detection of SNP TSC0013974
ttgttatattgt

SEQ ID NO: 289538 - DNA, 12 bp, Artificial Sequence
  Oligonucleotide primer for the detection of SNP TSC0013976
gggaaatggaga

SEQ ID NO: 289539 - DNA, 12 bp, Artificial Sequence
  Oligonucleotide primer for the detection of SNP TSC0013976
tagatgataaaa

SEQ ID NO: 289540 - DNA, 12 bp, Artificial Sequence
  Oligonucleotide primer for the detection of SNP TSC0013977
aacttaaccttt

SEQ ID NO: 289541 - DNA, 12 bp, Artificial Sequence
  Oligonucleotide primer for the detection of SNP TSC0013977
ggtgttagagag

SEQ ID NO: 289542 - DNA, 12 bp, Artificial Sequence
  Oligonucleotide primer for the detection of SNP TSC0013977
aataccaaaaaa

SEQ ID NO: 289543 - DNA, 12 bp, Artificial Sequence
  Oligonucleotide primer for the detection of SNP TSC0013982
atcctaatattt

SEQ ID NO: 289544 - DNA, 12 bp, Artificial Sequence
  Oligonucleotide primer for the detection of SNP TSC0013982
attattttgtag

SEQ ID NO: 289545 - DNA, 12 bp, Artificial Sequence
  Oligonucleotide primer for the detection of SNP TSC0013982
attatttcgtag

SEQ ID NO: 289546 - DNA, 12 bp, Artificial Sequence
  Oligonucleotide primer for the detection of SNP TSC0013982
attttgatgttt

SEQ ID NO: 289547 - DNA, 12 bp, Artificial Sequence
  Oligonucleotide primer for the detection of SNP TSC0013983
ctaataaacata

SEQ ID NO: 289548 - DNA, 12 bp, Artificial Sequence
  Oligonucleotide primer for the detection of SNP TSC0013983
ctaataaacgta

SEQ ID NO: 289549 - DNA, 12 bp, Artificial Sequence
  Oligonucleotide primer for the detection of SNP TSC0013983
aattatttggtt

SEQ ID NO: 289550 - DNA, 12 bp, Artificial Sequence
  Oligonucleotide primer for the detection of SNP TSC0013983
aaccacctaacc

SEQ ID NO: 289551 - DNA, 12 bp, Artificial Sequence
  Oligonucleotide primer for the detection of SNP TSC0013983
ttggtgggtgtg

SEQ ID NO: 289552 - DNA, 12 bp, Artificial Sequence
  Oligonucleotide primer for the detection of SNP TSC0013983
ttggtgggcgtg

SEQ ID NO: 289553 - DNA, 12 bp, Artificial Sequence
  Oligonucleotide primer for the detection of SNP TSC0013987
ttcttatatcta

SEQ ID NO: 289554 - DNA, 12 bp, Artificial Sequence
  Oligonucleotide primer for the detection of SNP TSC0013987
gtgggagatatt

SEQ ID NO: 289555 - DNA, 12 bp, Artificial Sequence
  Oligonucleotide primer for the detection of SNP TSC0013987
ataaaaaacatc

SEQ ID NO: 289556 - DNA, 12 bp, Artificial Sequence
  Oligonucleotide primer for the detection of SNP TSC0013988
ctcctacacaca

SEQ ID NO: 289557 - DNA, 12 bp, Artificial Sequence
  Oligonucleotide primer for the detection of SNP TSC0013988
taggggattttt

SEQ ID NO: 289558 - DNA, 12 bp, Artificial Sequence
  Oligonucleotide primer for the detection of SNP TSC0013988
caaaaaactccc

SEQ ID NO: 289559 - DNA, 12 bp, Artificial Sequence
  Oligonucleotide primer for the detection of SNP TSC0013989
accacaaactac

SEQ ID NO: 289560 - DNA, 12 bp, Artificial Sequence
  Oligonucleotide primer for the detection of SNP TSC0013989
accgcaaactac

SEQ ID NO: 289561 - DNA, 12 bp, Artificial Sequence
  Oligonucleotide primer for the detection of SNP TSC0013989
atatattttata

SEQ ID NO: 289562 - DNA, 12 bp, Artificial Sequence
  Oligonucleotide primer for the detection of SNP TSC0013989
acatatttcaca

SEQ ID NO: 289563 - DNA, 12 bp, Artificial Sequence
  Oligonucleotide primer for the detection of SNP TSC0013989
gttgtaaattgt

SEQ ID NO: 289564 - DNA, 12 bp, Artificial Sequence
  Oligonucleotide primer for the detection of SNP TSC0013989
gtcgtaaattgt

SEQ ID NO: 289565 - DNA, 12 bp, Artificial Sequence
  Oligonukleotid-Primer
ccacaactaacc

SEQ ID NO: 289566 - DNA, 12 bp, Artificial Sequence
  Oligonucleotide primer for the detection of SNP TSC0013990
ccacgactaacc

SEQ ID NO: 289567 - DNA, 12 bp, Artificial Sequence
  Oligonucleotide primer for the detection of SNP TSC0013990
aaaggtagggta

SEQ ID NO: 289568 - DNA, 12 bp, Artificial Sequence
  Oligonucleotide primer for the detection of SNP TSC0013990
ttatggttggtt

SEQ ID NO: 289569 - DNA, 12 bp, Artificial Sequence
  Oligonucleotide primer for the detection of SNP TSC0013990
ttacggttggtt

SEQ ID NO: 289570 - DNA, 12 bp, Artificial Sequence
  Oligonucleotide primer for the detection of SNP TSC0013991
actaaaaaacca

SEQ ID NO: 289571 - DNA, 12 bp, Artificial Sequence
  Oligonucleotide primer for the detection of SNP TSC0013991
ttaagagagtgt

SEQ ID NO: 289572 - DNA, 12 bp, Artificial Sequence
  Oligonucleotide primer for the detection of SNP TSC0013991
ttaagagagcgt

SEQ ID NO: 289573 - DNA, 12 bp, Artificial Sequence
  Oligonucleotide primer for the detection of SNP TSC0013991
taaaaaaacata

SEQ ID NO: 289574 - DNA, 12 bp, Artificial Sequence
  Oligonucleotide primer for the detection of SNP TSC0013991
taaaaaaacgta

SEQ ID NO: 289575 - DNA, 12 bp, Artificial Sequence
  Oligonucleotide primer for the detection of SNP TSC0013991
ttggggagttat

SEQ ID NO: 289576 - DNA, 12 bp, Artificial Sequence
  Oligonucleotide primer for the detection of SNP TSC0013991
ttggggagttac

SEQ ID NO: 289577 - DNA, 12 bp, Artificial Sequence
  Oligonucleotide primer for the detection of SNP TSC0013992
cccattccccac

SEQ ID NO: 289578 - DNA, 12 bp, Artificial Sequence
  Oligonucleotide primer for the detection of SNP TSC0013992
cccgttccccac

SEQ ID NO: 289579 - DNA, 12 bp, Artificial Sequence
  Oligonucleotide primer for the detection of SNP TSC0013992
tgtttatattgg

SEQ ID NO: 289580 - DNA, 12 bp, Artificial Sequence
  Oligonucleotide primer for the detection of SNP TSC0013992
cgtttatattgg

SEQ ID NO: 289581 - DNA, 12 bp, Artificial Sequence
  Oligonucleotide primer for the detection of SNP TSC0013992
cacccacactaa

SEQ ID NO: 289582 - DNA, 12 bp, Artificial Sequence
  Oligonucleotide primer for the detection of SNP TSC0013992
cgcccacactaa

SEQ ID NO: 289583 - DNA, 12 bp, Artificial Sequence
  Oligonucleotide primer for the detection of SNP TSC0013992
ttcgttttttat

SEQ ID NO: 289584 - DNA, 12 bp, Artificial Sequence
  Oligonucleotide primer for the detection of SNP TSC0013992
tttgttttttac

SEQ ID NO: 289585 - DNA, 12 bp, Artificial Sequence
  Oligonucleotide primer for the detection of SNP TSC0013992
ttcgttttttac

SEQ ID NO: 289586 - DNA, 12 bp, Artificial Sequence
  Oligonucleotide primer for the detection of SNP TSC0013993
tccaatatcaac

SEQ ID NO: 289587 - DNA, 12 bp, Artificial Sequence
  Oligonucleotide primer for the detection of SNP TSC0013993
tccaatatcgac

SEQ ID NO: 289588 - DNA, 12 bp, Artificial Sequence
  Oligonucleotide primer for the detection of SNP TSC0013993
tggtgtttaaag

SEQ ID NO: 289589 - DNA, 12 bp, Artificial Sequence
  Oligonucleotide primer for the detection of SNP TSC0013993
taatactcaaaa

SEQ ID NO: 289590 - DNA, 12 bp, Artificial Sequence
  Oligonucleotide primer for the detection of SNP TSC0013993
tttagtgttggt

SEQ ID NO: 289591 - DNA, 12 bp, Artificial Sequence
  Oligonucleotide primer for the detection of SNP TSC0013993
tttagtgtcggt

SEQ ID NO: 289592 - DNA, 12 bp, Artificial Sequence
  Oligonucleotide primer for the detection of SNP TSC0013998
aaagttgtttag

SEQ ID NO: 289593 - DNA, 12 bp, Artificial Sequence
  Oligonucleotide primer for the detection of SNP TSC0013998
aaaactacttaa

SEQ ID NO: 289594 - DNA, 12 bp, Artificial Sequence
  Oligonucleotide primer for the detection of SNP TSC0013998
aggagggagttt

SEQ ID NO: 289595 - DNA, 12 bp, Artificial Sequence
  Oligonucleotide primer for the detection of SNP TSC0013999
aacaacctaaat

SEQ ID NO: 289596 - DNA, 12 bp, Artificial Sequence
  Oligonucleotide primer for the detection of SNP TSC0013999
gttattagtttt

SEQ ID NO: 289597 - DNA, 12 bp, Artificial Sequence
  Oligonucleotide primer for the detection of SNP TSC0013999
ccaccaatttta

SEQ ID NO: 289598 - DNA, 12 bp, Artificial Sequence
  Oligonucleotide primer for the detection of SNP TSC0013999
gtaatttaaatt

SEQ ID NO: 289599 - DNA, 12 bp, Artificial Sequence
  Oligonucleotide primer for the detection of SNP TSC0014000
taactaaaatat

SEQ ID NO: 289600 - DNA, 12 bp, Artificial Sequence
  Oligonucleotide primer for the detection of SNP TSC0014000
atgttttatgta

SEQ ID NO: 289601 - DNA, 12 bp, Artificial Sequence
  Oligonucleotide primer for the detection of SNP TSC0014004
tgtgtttttgtg

SEQ ID NO: 289602 - DNA, 12 bp, Artificial Sequence
  Oligonucleotide primer for the detection of SNP TSC0014008
aacaacaacact

SEQ ID NO: 289603 - DNA, 12 bp, Artificial Sequence
  Oligonucleotide primer for the detection of SNP TSC0014008
attggagtttta

SEQ ID NO: 289604 - DNA, 12 bp, Artificial Sequence
  Oligonucleotide primer for the detection of SNP TSC0014009
accatcccttcc

SEQ ID NO: 289605 - DNA, 12 bp, Artificial Sequence
  Oligonucleotide primer for the detection of SNP TSC0014009
ggagtttttgaa

SEQ ID NO: 289606 - DNA, 12 bp, Artificial Sequence
  Oligonucleotide primer for the detection of SNP TSC0014010
atcacctcctcc

SEQ ID NO: 289607 - DNA, 12 bp, Artificial Sequence
  Oligonucleotide primer for the detection of SNP TSC0014010
tagggagggaaa

SEQ ID NO: 289608 - DNA, 12 bp, Artificial Sequence
  Oligonucleotide primer for the detection of SNP TSC0014012
catatttaaaac

SEQ ID NO: 289609 - DNA, 12 bp, Artificial Sequence
  Oligonucleotide primer for the detection of SNP TSC0014012
agttgggaaata

SEQ ID NO: 289610 - DNA, 12 bp, Artificial Sequence
  Oligonucleotide primer for the detection of SNP TSC0014013
agatggaaattt

SEQ ID NO: 289611 - DNA, 12 bp, Artificial Sequence
  Oligonucleotide primer for the detection of SNP TSC0014013
gaagaaggatat

SEQ ID NO: 289612 - DNA, 12 bp, Artificial Sequence
  Oligonucleotide primer for the detection of SNP TSC0014014
ataatccctctc

SEQ ID NO: 289613 - DNA, 12 bp, Artificial Sequence
  Oligonucleotide primer for the detection of SNP TSC0014014
atatttatagga

SEQ ID NO: 289614 - DNA, 12 bp, Artificial Sequence
  Oligonucleotide primer for the detection of SNP TSC0014014
acatccacaaaa

SEQ ID NO: 289615 - DNA, 12 bp, Artificial Sequence
  Oligonucleotide primer for the detection of SNP TSC0014014
gtgatttttttt

SEQ ID NO: 289616 - DNA, 12 bp, Artificial Sequence
  Oligonucleotide primer for the detection of SNP TSC0014015
gaataaattttt

SEQ ID NO: 289617 - DNA, 12 bp, Artificial Sequence
  Oligonucleotide primer for the detection of SNP TSC0014015
aaacaaacttcc

SEQ ID NO: 289618 - DNA, 12 bp, Artificial Sequence
  Oligonucleotide primer for the detection of SNP TSC0014015
taggttagtgag

SEQ ID NO: 289619 - DNA, 12 bp, Artificial Sequence
  Oligonucleotide primer for the detection of SNP TSC0014016
actacccccact

SEQ ID NO: 289620 - DNA, 12 bp, Artificial Sequence
  Oligonucleotide primer for the detection of SNP TSC0014016
tttagtttattg

SEQ ID NO: 289621 - DNA, 12 bp, Artificial Sequence
  Oligonucleotide primer for the detection of SNP TSC0014017
cacaataatata

SEQ ID NO: 289622 - DNA, 12 bp, Artificial Sequence
  Oligonucleotide primer for the detection of SNP TSC0014017
ttttgtaaaatt

SEQ ID NO: 289623 - DNA, 12 bp, Artificial Sequence
  Oligonucleotide primer for the detection of SNP TSC0014017
tcctacaaaacc

SEQ ID NO: 289624 - DNA, 12 bp, Artificial Sequence
  Oligonucleotide primer for the detection of SNP TSC0014017
tatagtggtata

SEQ ID NO: 289625 - DNA, 12 bp, Artificial Sequence
  Oligonucleotide primer for the detection of SNP TSC0014018
ttaaacctttct

SEQ ID NO: 289626 - DNA, 12 bp, Artificial Sequence
  Oligonucleotide primer for the detection of SNP TSC0014020
atactaaacaat

SEQ ID NO: 289627 - DNA, 12 bp, Artificial Sequence
  Oligonucleotide primer for the detection of SNP TSC0014020
ggtttaattttt

SEQ ID NO: 289628 - DNA, 12 bp, Artificial Sequence
  Oligonucleotide primer for the detection of SNP TSC0014021
aatacatactaa

SEQ ID NO: 289629 - DNA, 12 bp, Artificial Sequence
  Oligonucleotide primer for the detection of SNP TSC0014021
attattagtttt

SEQ ID NO: 289630 - DNA, 12 bp, Artificial Sequence
  Oligonucleotide primer for the detection of SNP TSC0014021
attaccaacccc

SEQ ID NO: 289631 - DNA, 12 bp, Artificial Sequence
  Oligonucleotide primer for the detection of SNP TSC0014021
agtgtatgttgg

SEQ ID NO: 289632 - DNA, 12 bp, Artificial Sequence
  Oligonucleotide primer for the detection of SNP TSC0014024
aataaccttaaa

SEQ ID NO: 289633 - DNA, 12 bp, Artificial Sequence
  Oligonucleotide primer for the detection of SNP TSC0014024
tttatttgtaat

SEQ ID NO: 289634 - DNA, 12 bp, Artificial Sequence
  Oligonucleotide primer for the detection of SNP TSC0014024
cctacttacaac

SEQ ID NO: 289635 - DNA, 12 bp, Artificial Sequence
  Oligonucleotide primer for the detection of SNP TSC0014024
aatggttttgag

SEQ ID NO: 289636 - DNA, 12 bp, Artificial Sequence
  Oligonucleotide primer for the detection of SNP TSC0014025
ctctactcccta

SEQ ID NO: 289637 - DNA, 12 bp, Artificial Sequence
  Oligonucleotide primer for the detection of SNP TSC0014025
tagggtggatat

SEQ ID NO: 289638 - DNA, 12 bp, Artificial Sequence
  Oligonucleotide primer for the detection of SNP TSC0014025
ccaaaataaaca

SEQ ID NO: 289639 - DNA, 12 bp, Artificial Sequence
  Oligonucleotide primer for the detection of SNP TSC0014026
atctaaaaaatc

SEQ ID NO: 289640 - DNA, 12 bp, Artificial Sequence
  Oligonucleotide primer for the detection of SNP TSC0014026
agaatagggata

SEQ ID NO: 289641 - DNA, 12 bp, Artificial Sequence
  Oligonucleotide primer for the detection of SNP TSC0014027
ccatataaaacc

SEQ ID NO: 289642 - DNA, 12 bp, Artificial Sequence
  Oligonucleotide primer for the detection of SNP TSC0014027
ttgtttttagta

SEQ ID NO: 289643 - DNA, 12 bp, Artificial Sequence
  Oligonucleotide primer for the detection of SNP TSC0014028
atttccatttcc

SEQ ID NO: 289644 - DNA, 12 bp, Artificial Sequence
  Oligonucleotide primer for the detection of SNP TSC0014028
aagggaagataa

SEQ ID NO: 289645 - DNA, 12 bp, Artificial Sequence
  Oligonucleotide primer for the detection of SNP TSC0014029
aacaaaacttac

SEQ ID NO: 289646 - DNA, 12 bp, Artificial Sequence
  Oligonucleotide primer for the detection of SNP TSC0014029
aacgaaacttac

SEQ ID NO: 289647 - DNA, 12 bp, Artificial Sequence
  Oligonucleotide primer for the detection of SNP TSC0014029
attttggattat

SEQ ID NO: 289648 - DNA, 12 bp, Artificial Sequence
  Oligonucleotide primer for the detection of SNP TSC0014029
atttcggattat

SEQ ID NO: 289649 - DNA, 12 bp, Artificial Sequence
  Oligonucleotide primer for the detection of SNP TSC0014029
attttggattac

SEQ ID NO: 289650 - DNA, 12 bp, Artificial Sequence
  Oligonukleotid-Primer
atttcggattac

SEQ ID NO: 289651 - DNA, 12 bp, Artificial Sequence
  Oligonucleotide primer for the detection of SNP TSC0014029
catctcaaatca

SEQ ID NO: 289652 - DNA, 12 bp, Artificial Sequence
  Oligonucleotide primer for the detection of SNP TSC0014029
catctcgaatca

SEQ ID NO: 289653 - DNA, 12 bp, Artificial Sequence
  Oligonucleotide primer for the detection of SNP TSC0014029
ggtggagtttgt

SEQ ID NO: 289654 - DNA, 12 bp, Artificial Sequence
  Oligonucleotide primer for the detection of SNP TSC0014029
ggcggagtttgt

SEQ ID NO: 289655 - DNA, 12 bp, Artificial Sequence
  Oligonucleotide primer for the detection of SNP TSC0014030
acctattaccat

SEQ ID NO: 289656 - DNA, 12 bp, Artificial Sequence
  Oligonucleotide primer for the detection of SNP TSC0014030
tagtgggagagt

SEQ ID NO: 289657 - DNA, 12 bp, Artificial Sequence
  Oligonucleotide primer for the detection of SNP TSC0014031
caatcacaatat

SEQ ID NO: 289658 - DNA, 12 bp, Artificial Sequence
  Oligonucleotide primer for the detection of SNP TSC0014031
gttgttgggttg

SEQ ID NO: 289659 - DNA, 12 bp, Artificial Sequence
  Oligonucleotide primer for the detection of SNP TSC0014031
actattaaacta

SEQ ID NO: 289660 - DNA, 12 bp, Artificial Sequence
  Oligonucleotide primer for the detection of SNP TSC0014031
tagttatagtgt

SEQ ID NO: 289661 - DNA, 12 bp, Artificial Sequence
  Oligonucleotide primer for the detection of SNP TSC0014032
ttatctctaatc

SEQ ID NO: 289662 - DNA, 12 bp, Artificial Sequence
  Oligonucleotide primer for the detection of SNP TSC0014035
cactactctata

SEQ ID NO: 289663 - DNA, 12 bp, Artificial Sequence
  Oligonucleotide primer for the detection of SNP TSC0014035
gtatttagtata

SEQ ID NO: 289664 - DNA, 12 bp, Artificial Sequence
  Oligonucleotide primer for the detection of SNP TSC0014035
attcaacacaaa

SEQ ID NO: 289665 - DNA, 12 bp, Artificial Sequence
  Oligonucleotide primer for the detection of SNP TSC0014035
ttattattttat

SEQ ID NO: 289666 - DNA, 12 bp, Artificial Sequence
  Oligonucleotide primer for the detection of SNP TSC0014036
aaattattcctt

SEQ ID NO: 289667 - DNA, 12 bp, Artificial Sequence
  Oligonucleotide primer for the detection of SNP TSC0014036
ggagttgagtta

SEQ ID NO: 289668 - DNA, 12 bp, Artificial Sequence
  Oligonucleotide primer for the detection of SNP TSC0014037
acaaaaaatcct

SEQ ID NO: 289669 - DNA, 12 bp, Artificial Sequence
  Oligonucleotide primer for the detection of SNP TSC0014037
tattaatatgtg

SEQ ID NO: 289670 - DNA, 12 bp, Artificial Sequence
  Oligonucleotide primer for the detection of SNP TSC0014037
cattaatatata

SEQ ID NO: 289671 - DNA, 12 bp, Artificial Sequence
  Oligonucleotide primer for the detection of SNP TSC0014037
ataaagaatttt

SEQ ID NO: 289672 - DNA, 12 bp, Artificial Sequence
  Oligonucleotide primer for the detection of SNP TSC0014038
tttcaacaaacc

SEQ ID NO: 289673 - DNA, 12 bp, Artificial Sequence
  Oligonucleotide primer for the detection of SNP TSC0014038
atggtgtaatta

SEQ ID NO: 289674 - DNA, 12 bp, Artificial Sequence
  Oligonucleotide primer for the detection of SNP TSC0014040
accaccatcacc

SEQ ID NO: 289675 - DNA, 12 bp, Artificial Sequence
  Oligonucleotide primer for the detection of SNP TSC0014040
ggttgggtttag

SEQ ID NO: 289676 - DNA, 12 bp, Artificial Sequence
  Oligonucleotide primer for the detection of SNP TSC0014041
caacccaaccca

SEQ ID NO: 289677 - DNA, 12 bp, Artificial Sequence
  Oligonucleotide primer for the detection of SNP TSC0014041
tgtggtaggtgt

SEQ ID NO: 289678 - DNA, 12 bp, Artificial Sequence
  Oligonucleotide primer for the detection of SNP TSC0014041
cgtggtaggtgt

SEQ ID NO: 289679 - DNA, 12 bp, Artificial Sequence
  Oligonucleotide primer for the detection of SNP TSC0014041
cataacaaatac

SEQ ID NO: 289680 - DNA, 12 bp, Artificial Sequence
  Oligonucleotide primer for the detection of SNP TSC0014041
cgtaacaaatac

SEQ ID NO: 289681 - DNA, 12 bp, Artificial Sequence
  Oligonucleotide primer for the detection of SNP TSC0014041
tagtttagttta

SEQ ID NO: 289682 - DNA, 12 bp, Artificial Sequence
  Oligonucleotide primer for the detection of SNP TSC0014043
tttataattctc

SEQ ID NO: 289683 - DNA, 12 bp, Artificial Sequence
  Oligonucleotide primer for the detection of SNP TSC0014043
ttatttaaagag

SEQ ID NO: 289684 - DNA, 12 bp, Artificial Sequence
  Oligonucleotide primer for the detection of SNP TSC0014043
ctacttaaaaaa

SEQ ID NO: 289685 - DNA, 12 bp, Artificial Sequence
  Oligonucleotide primer for the detection of SNP TSC0014043
tttgtaattttt

SEQ ID NO: 289686 - DNA, 12 bp, Artificial Sequence
  Oligonucleotide primer for the detection of SNP TSC0014049
gataaattttgt

SEQ ID NO: 289687 - DNA, 12 bp, Artificial Sequence
  Oligonucleotide primer for the detection of SNP TSC0014049
taacaaacttta

SEQ ID NO: 289688 - DNA, 12 bp, Artificial Sequence
  Oligonucleotide primer for the detection of SNP TSC0014049
tttaagtagagt

SEQ ID NO: 289689 - DNA, 12 bp, Artificial Sequence
  Oligonucleotide primer for the detection of SNP TSC0014050
aaactctataat

SEQ ID NO: 289690 - DNA, 12 bp, Artificial Sequence
  Oligonucleotide primer for the detection of SNP TSC0014050
tgaattaaagat

SEQ ID NO: 289691 - DNA, 12 bp, Artificial Sequence
  Oligonucleotide primer for the detection of SNP TSC0014050
ctaaattaaaaa

SEQ ID NO: 289692 - DNA, 12 bp, Artificial Sequence
  Oligonucleotide primer for the detection of SNP TSC0014050
aggttttgtaat

SEQ ID NO: 289693 - DNA, 12 bp, Artificial Sequence
  Oligonucleotide primer for the detection of SNP TSC0014051
tatgttgaggag

SEQ ID NO: 289694 - DNA, 12 bp, Artificial Sequence
  Oligonucleotide primer for the detection of SNP TSC0014052
aaaattaaatac

SEQ ID NO: 289695 - DNA, 12 bp, Artificial Sequence
  Oligonucleotide primer for the detection of SNP TSC0014052
gaaattaaatac

SEQ ID NO: 289696 - DNA, 12 bp, Artificial Sequence
  Oligonucleotide primer for the detection of SNP TSC0014052
gatgggggttgg

SEQ ID NO: 289697 - DNA, 12 bp, Artificial Sequence
  Oligonucleotide primer for the detection of SNP TSC0014053
tgtatgtgtata

SEQ ID NO: 289698 - DNA, 12 bp, Artificial Sequence
  Oligonucleotide primer for the detection of SNP TSC0014053
tacatatacata

SEQ ID NO: 289699 - DNA, 12 bp, Artificial Sequence
  Oligonucleotide primer for the detection of SNP TSC0014053
gggtgtatgtat

SEQ ID NO: 289700 - DNA, 12 bp, Artificial Sequence
  Oligonucleotide primer for the detection of SNP TSC0014053
gggtgtatgtac

SEQ ID NO: 289701 - DNA, 12 bp, Artificial Sequence
  Oligonucleotide primer for the detection of SNP TSC0014055
taattgatattt

SEQ ID NO: 289702 - DNA, 12 bp, Artificial Sequence
  Oligonucleotide primer for the detection of SNP TSC0014055
ttaactaacatc

SEQ ID NO: 289703 - DNA, 12 bp, Artificial Sequence
  Oligonucleotide primer for the detection of SNP TSC0014055
taagaaatatag

SEQ ID NO: 289704 - DNA, 12 bp, Artificial Sequence
  Oligonucleotide primer for the detection of SNP TSC0014057
ttatcctaacat

SEQ ID NO: 289705 - DNA, 12 bp, Artificial Sequence
  Oligonucleotide primer for the detection of SNP TSC0014057
ataaatagaaag

SEQ ID NO: 289706 - DNA, 12 bp, Artificial Sequence
  Oligonucleotide primer for the detection of SNP TSC0014059
tattataaacta

SEQ ID NO: 289707 - DNA, 12 bp, Artificial Sequence
  Oligonucleotide primer for the detection of SNP TSC0014059
gattttttatat

SEQ ID NO: 289708 - DNA, 12 bp, Artificial Sequence
  Oligonucleotide primer for the detection of SNP TSC0014059
aatccctcacat

SEQ ID NO: 289709 - DNA, 12 bp, Artificial Sequence
  Oligonucleotide primer for the detection of SNP TSC0014059
tattgtgaattg

SEQ ID NO: 289710 - DNA, 12 bp, Artificial Sequence
  Oligonucleotide primer for the detection of SNP TSC0014060
caaaaatttttt

SEQ ID NO: 289711 - DNA, 12 bp, Artificial Sequence
  Oligonucleotide primer for the detection of SNP TSC0014060
tttggtgttgta

SEQ ID NO: 289712 - DNA, 12 bp, Artificial Sequence
  Oligonucleotide primer for the detection of SNP TSC0014060
cctaatactata

SEQ ID NO: 289713 - DNA, 12 bp, Artificial Sequence
  Oligonucleotide primer for the detection of SNP TSC0014060
tagaagtttttt

SEQ ID NO: 289714 - DNA, 12 bp, Artificial Sequence
  Oligonucleotide primer for the detection of SNP TSC0014061
gtgttgtaaaaa

SEQ ID NO: 289715 - DNA, 12 bp, Artificial Sequence
  Oligonucleotide primer for the detection of SNP TSC0014062
aaaacatcctcc

SEQ ID NO: 289716 - DNA, 12 bp, Artificial Sequence
  Oligonucleotide primer for the detection of SNP TSC0014062
gagttttgttta

SEQ ID NO: 289717 - DNA, 12 bp, Artificial Sequence
  Oligonucleotide primer for the detection of SNP TSC0014062
aaactctaccca

SEQ ID NO: 289718 - DNA, 12 bp, Artificial Sequence
  Oligonucleotide primer for the detection of SNP TSC0014062
agaatatttttt

SEQ ID NO: 289719 - DNA, 12 bp, Artificial Sequence
  Oligonucleotide primer for the detection of SNP TSC0014063
caaaccccactc

SEQ ID NO: 289720 - DNA, 12 bp, Artificial Sequence
  Oligonucleotide primer for the detection of SNP TSC0014063
agtggataggga

SEQ ID NO: 289721 - DNA, 12 bp, Artificial Sequence
  Oligonucleotide primer for the detection of SNP TSC0014064
actcctcctata

SEQ ID NO: 289722 - DNA, 12 bp, Artificial Sequence
  Oligonucleotide primer for the detection of SNP TSC0014064
gaagttttaggg

SEQ ID NO: 289723 - DNA, 12 bp, Artificial Sequence
  Oligonucleotide primer for the detection of SNP TSC0014064
aaaatttcaaaa

SEQ ID NO: 289724 - DNA, 12 bp, Artificial Sequence
  Oligonucleotide primer for the detection of SNP TSC0014065
ccaatctataaa

SEQ ID NO: 289725 - DNA, 12 bp, Artificial Sequence
  Oligonucleotide primer for the detection of SNP TSC0014065
aggtgaattgat

SEQ ID NO: 289726 - DNA, 12 bp, Artificial Sequence
  Oligonucleotide primer for the detection of SNP TSC0014065
ttaatttgtgga

SEQ ID NO: 289727 - DNA, 12 bp, Artificial Sequence
  Oligonucleotide primer for the detection of SNP TSC0014068
ttttaaataatg

SEQ ID NO: 289728 - DNA, 12 bp, Artificial Sequence
  Oligonucleotide primer for the detection of SNP TSC0014069
aatattaactat

SEQ ID NO: 289729 - DNA, 12 bp, Artificial Sequence
  Oligonucleotide primer for the detection of SNP TSC0014069
attaggtataag

SEQ ID NO: 289730 - DNA, 12 bp, Artificial Sequence
  Oligonucleotide primer for the detection of SNP TSC0014070
ttcacctctaca

SEQ ID NO: 289731 - DNA, 12 bp, Artificial Sequence
  Oligonucleotide primer for the detection of SNP TSC0014070
atgatgaatgag

SEQ ID NO: 289732 - DNA, 12 bp, Artificial Sequence
  Oligonucleotide primer for the detection of SNP TSC0014070
tttatttttgta

SEQ ID NO: 289733 - DNA, 12 bp, Artificial Sequence
  Oligonucleotide primer for the detection of SNP TSC0014071
aaaaaatatact

SEQ ID NO: 289734 - DNA, 12 bp, Artificial Sequence
  Oligonucleotide primer for the detection of SNP TSC0014071
taaattgtggtt

SEQ ID NO: 289735 - DNA, 12 bp, Artificial Sequence
  Oligonucleotide primer for the detection of SNP TSC0014073
tcataaaaaata

SEQ ID NO: 289736 - DNA, 12 bp, Artificial Sequence
  Oligonucleotide primer for the detection of SNP TSC0014073
ccctttataaac

SEQ ID NO: 289737 - DNA, 12 bp, Artificial Sequence
  Oligonucleotide primer for the detection of SNP TSC0014073
ttatgagagatg

SEQ ID NO: 289738 - DNA, 12 bp, Artificial Sequence
  Oligonucleotide primer for the detection of SNP TSC0014076
taaaacactaac

SEQ ID NO: 289739 - DNA, 12 bp, Artificial Sequence
  Oligonucleotide primer for the detection of SNP TSC0014076
ttattatatttg

SEQ ID NO: 289740 - DNA, 12 bp, Artificial Sequence
  Oligonucleotide primer for the detection of SNP TSC0014076
ccattatactta

SEQ ID NO: 289741 - DNA, 12 bp, Artificial Sequence
  Oligonucleotide primer for the detection of SNP TSC0014076
tgaaatattaat

SEQ ID NO: 289742 - DNA, 12 bp, Artificial Sequence
  Oligonucleotide primer for the detection of SNP TSC0014077
cctcctcatcca

SEQ ID NO: 289743 - DNA, 12 bp, Artificial Sequence
  Oligonucleotide primer for the detection of SNP TSC0014077
attttttttgtt

SEQ ID NO: 289744 - DNA, 12 bp, Artificial Sequence
  Oligonucleotide primer for the detection of SNP TSC0014077
ccctccctatca

SEQ ID NO: 289745 - DNA, 12 bp, Artificial Sequence
  Oligonucleotide primer for the detection of SNP TSC0014078
tatatttctcac

SEQ ID NO: 289746 - DNA, 12 bp, Artificial Sequence
  Oligonucleotide primer for the detection of SNP TSC0014078
tatatttctcgc

SEQ ID NO: 289747 - DNA, 12 bp, Artificial Sequence
  Oligonucleotide primer for the detection of SNP TSC0014078
agatggttgaga

SEQ ID NO: 289748 - DNA, 12 bp, Artificial Sequence
  Oligonucleotide primer for the detection of SNP TSC0014079
tcttataaacaa

SEQ ID NO: 289749 - DNA, 12 bp, Artificial Sequence
  Oligonucleotide primer for the detection of SNP TSC0014079
tcttataaacga

SEQ ID NO: 289750 - DNA, 12 bp, Artificial Sequence
  Oligonucleotide primer for the detection of SNP TSC0014079
gttttgatgttt

SEQ ID NO: 289751 - DNA, 12 bp, Artificial Sequence
  Oligonukleotid-Primer
attttaataccc

SEQ ID NO: 289752 - DNA, 12 bp, Artificial Sequence
  Oligonucleotide primer for the detection of SNP TSC0014079
ttttgtaaatgg

SEQ ID NO: 289753 - DNA, 12 bp, Artificial Sequence
  Oligonucleotide primer for the detection of SNP TSC0014079
ttttgtaaacgg

SEQ ID NO: 289754 - DNA, 12 bp, Artificial Sequence
  Oligonucleotide primer for the detection of SNP TSC0014082
aaaccaatataa

SEQ ID NO: 289755 - DNA, 12 bp, Artificial Sequence
  Oligonucleotide primer for the detection of SNP TSC0014082
tttaagttgtat

SEQ ID NO: 289756 - DNA, 12 bp, Artificial Sequence
  Oligonucleotide primer for the detection of SNP TSC0014082
tccaaactatat

SEQ ID NO: 289757 - DNA, 12 bp, Artificial Sequence
  Oligonucleotide primer for the detection of SNP TSC0014082
aaattagtgtga

SEQ ID NO: 289758 - DNA, 12 bp, Artificial Sequence
  Oligonucleotide primer for the detection of SNP TSC0014083
aaataatttcca

SEQ ID NO: 289759 - DNA, 12 bp, Artificial Sequence
  Oligonucleotide primer for the detection of SNP TSC0014083
aaataagaatag

SEQ ID NO: 289760 - DNA, 12 bp, Artificial Sequence
  Oligonucleotide primer for the detection of SNP TSC0014083
aaataaaaacaa

SEQ ID NO: 289761 - DNA, 12 bp, Artificial Sequence
  Oligonucleotide primer for the detection of SNP TSC0014084
acaaaacaataa

SEQ ID NO: 289762 - DNA, 12 bp, Artificial Sequence
  Oligonucleotide primer for the detection of SNP TSC0014084
ggtgtgtttatt

SEQ ID NO: 289763 - DNA, 12 bp, Artificial Sequence
  Oligonucleotide primer for the detection of SNP TSC0014084
aatatatccatt

SEQ ID NO: 289764 - DNA, 12 bp, Artificial Sequence
  Oligonucleotide primer for the detection of SNP TSC0014084
ataaaataatga

SEQ ID NO: 289765 - DNA, 12 bp, Artificial Sequence
  Oligonucleotide primer for the detection of SNP TSC0014085
cataacaaaatt

SEQ ID NO: 289766 - DNA, 12 bp, Artificial Sequence
  Oligonucleotide primer for the detection of SNP TSC0014085
taatcttctcaa

SEQ ID NO: 289767 - DNA, 12 bp, Artificial Sequence
  Oligonucleotide primer for the detection of SNP TSC0014085
tatagtaaggtt

SEQ ID NO: 289768 - DNA, 12 bp, Artificial Sequence
  Oligonucleotide primer for the detection of SNP TSC0014086
aacaccaataat

SEQ ID NO: 289769 - DNA, 12 bp, Artificial Sequence
  Oligonucleotide primer for the detection of SNP TSC0014086
aacgccaataat

SEQ ID NO: 289770 - DNA, 12 bp, Artificial Sequence
  Oligonucleotide primer for the detection of SNP TSC0014086
tgggtgtttatg

SEQ ID NO: 289771 - DNA, 12 bp, Artificial Sequence
  Oligonucleotide primer for the detection of SNP TSC0014086
cgggtgtttatg

SEQ ID NO: 289772 - DNA, 12 bp, Artificial Sequence
  Oligonucleotide primer for the detection of SNP TSC0014086
tgggcgtttatg

SEQ ID NO: 289773 - DNA, 12 bp, Artificial Sequence
  Oligonucleotide primer for the detection of SNP TSC0014086
cgggcgtttatg

SEQ ID NO: 289774 - DNA, 12 bp, Artificial Sequence
  Oligonucleotide primer for the detection of SNP TSC0014087
attttaaacaaa

SEQ ID NO: 289775 - DNA, 12 bp, Artificial Sequence
  Oligonucleotide primer for the detection of SNP TSC0014087
taattttcttca

SEQ ID NO: 289776 - DNA, 12 bp, Artificial Sequence
  Oligonucleotide primer for the detection of SNP TSC0014087
tatattttaagt

SEQ ID NO: 289777 - DNA, 12 bp, Artificial Sequence
  Oligonucleotide primer for the detection of SNP TSC0014088
aaacaacaataa

SEQ ID NO: 289778 - DNA, 12 bp, Artificial Sequence
  Oligonucleotide primer for the detection of SNP TSC0014088
gtttttgatttt

SEQ ID NO: 289779 - DNA, 12 bp, Artificial Sequence
  Oligonucleotide primer for the detection of SNP TSC0014088
acctttaatttt

SEQ ID NO: 289780 - DNA, 12 bp, Artificial Sequence
  Oligonucleotide primer for the detection of SNP TSC0014088
aggtagtaatga

SEQ ID NO: 289781 - DNA, 12 bp, Artificial Sequence
  Oligonucleotide primer for the detection of SNP TSC0014089
tataaaaatata

SEQ ID NO: 289782 - DNA, 12 bp, Artificial Sequence
  Oligonucleotide primer for the detection of SNP TSC0014089
atgttttttatt

SEQ ID NO: 289783 - DNA, 12 bp, Artificial Sequence
  Oligonucleotide primer for the detection of SNP TSC0014089
ataccttctatc

SEQ ID NO: 289784 - DNA, 12 bp, Artificial Sequence
  Oligonucleotide primer for the detection of SNP TSC0014089
ttataagggtat

SEQ ID NO: 289785 - DNA, 12 bp, Artificial Sequence
  Oligonucleotide primer for the detection of SNP TSC0014091
acatatacctaa

SEQ ID NO: 289786 - DNA, 12 bp, Artificial Sequence
  Oligonucleotide primer for the detection of SNP TSC0014091
gggggttatttt

SEQ ID NO: 289787 - DNA, 12 bp, Artificial Sequence
  Oligonucleotide primer for the detection of SNP TSC0014091
ataaaaaccatt

SEQ ID NO: 289788 - DNA, 12 bp, Artificial Sequence
  Oligonucleotide primer for the detection of SNP TSC0014091
ggtatgtattta

SEQ ID NO: 289789 - DNA, 12 bp, Artificial Sequence
  Oligonucleotide primer for the detection of SNP TSC0014093
ttaaaataatta

SEQ ID NO: 289790 - DNA, 12 bp, Artificial Sequence
  Oligonucleotide primer for the detection of SNP TSC0014094
aagtttggagtg

SEQ ID NO: 289791 - DNA, 12 bp, Artificial Sequence
  Oligonucleotide primer for the detection of SNP TSC0014094
agtaaaaatagt

SEQ ID NO: 289792 - DNA, 12 bp, Artificial Sequence
  Oligonucleotide primer for the detection of SNP TSC0014095
actcatattact

SEQ ID NO: 289793 - DNA, 12 bp, Artificial Sequence
  Oligonucleotide primer for the detection of SNP TSC0014095
tatttaattgag

SEQ ID NO: 289794 - DNA, 12 bp, Artificial Sequence
  Oligonucleotide primer for the detection of SNP TSC0014096
acaaaaaaattc

SEQ ID NO: 289795 - DNA, 12 bp, Artificial Sequence
  Oligonucleotide primer for the detection of SNP TSC0014096
agaagagaaaga

SEQ ID NO: 289796 - DNA, 12 bp, Artificial Sequence
  Oligonucleotide primer for the detection of SNP TSC0014097
tattttacaaac

SEQ ID NO: 289797 - DNA, 12 bp, Artificial Sequence
  Oligonucleotide primer for the detection of SNP TSC0014097
tttttgtagttt

SEQ ID NO: 289798 - DNA, 12 bp, Artificial Sequence
  Oligonucleotide primer for the detection of SNP TSC0014098
taaacaacaaat

SEQ ID NO: 289799 - DNA, 12 bp, Artificial Sequence
  Oligonucleotide primer for the detection of SNP TSC0014098
tgtgtgatgggg

SEQ ID NO: 289800 - DNA, 12 bp, Artificial Sequence
  Oligonucleotide primer for the detection of SNP TSC0014098
tgggtaataagt

SEQ ID NO: 289801 - DNA, 12 bp, Artificial Sequence
  Oligonucleotide primer for the detection of SNP TSC0014099
ttcttaacccct

SEQ ID NO: 289802 - DNA, 12 bp, Artificial Sequence
  Oligonucleotide primer for the detection of SNP TSC0014099
tataaagggtgg

SEQ ID NO: 289803 - DNA, 12 bp, Artificial Sequence
  Oligonucleotide primer for the detection of SNP TSC0014103
accccatcacta

SEQ ID NO: 289804 - DNA, 12 bp, Artificial Sequence
  Oligonucleotide primer for the detection of SNP TSC0014103
taccctccattt

SEQ ID NO: 289805 - DNA, 12 bp, Artificial Sequence
  Oligonucleotide primer for the detection of SNP TSC0014103
gttttattattg

SEQ ID NO: 289806 - DNA, 12 bp, Artificial Sequence
  Oligonucleotide primer for the detection of SNP TSC0014104
cctcaaaataat

SEQ ID NO: 289807 - DNA, 12 bp, Artificial Sequence
  Oligonucleotide primer for the detection of SNP TSC0014104
cctcgaaataat

SEQ ID NO: 289808 - DNA, 12 bp, Artificial Sequence
  Oligonucleotide primer for the detection of SNP TSC0014104
gattgattttag

SEQ ID NO: 289809 - DNA, 12 bp, Artificial Sequence
  Oligonucleotide primer for the detection of SNP TSC0014105
aaccccacccaa

SEQ ID NO: 289810 - DNA, 12 bp, Artificial Sequence
  Oligonucleotide primer for the detection of SNP TSC0014105
aattttttaata

SEQ ID NO: 289811 - DNA, 12 bp, Artificial Sequence
  Oligonucleotide primer for the detection of SNP TSC0014105
aactttccaaca

SEQ ID NO: 289812 - DNA, 12 bp, Artificial Sequence
  Oligonucleotide primer for the detection of SNP TSC0014105
aggttttattta

SEQ ID NO: 289813 - DNA, 12 bp, Artificial Sequence
  Oligonucleotide primer for the detection of SNP TSC0014107
aactacctacta

SEQ ID NO: 289814 - DNA, 12 bp, Artificial Sequence
  Oligonucleotide primer for the detection of SNP TSC0014107
tttgggtaattt

SEQ ID NO: 289815 - DNA, 12 bp, Artificial Sequence
  Oligonucleotide primer for the detection of SNP TSC0014107
tttgggtaattc

SEQ ID NO: 289816 - DNA, 12 bp, Artificial Sequence
  Oligonucleotide primer for the detection of SNP TSC0014107
caccttaaacaa

SEQ ID NO: 289817 - DNA, 12 bp, Artificial Sequence
  Oligonucleotide primer for the detection of SNP TSC0014107
tggttatttgtt

SEQ ID NO: 289818 - DNA, 12 bp, Artificial Sequence
  Oligonucleotide primer for the detection of SNP TSC0014108
aatttttctttt

SEQ ID NO: 289819 - DNA, 12 bp, Artificial Sequence
  Oligonucleotide primer for the detection of SNP TSC0014110
tattaaaaatca

SEQ ID NO: 289820 - DNA, 12 bp, Artificial Sequence
  Oligonucleotide primer for the detection of SNP TSC0014110
tacttcccaaaa

SEQ ID NO: 289821 - DNA, 12 bp, Artificial Sequence
  Oligonucleotide primer for the detection of SNP TSC0014110
tattggaaatta

SEQ ID NO: 289822 - DNA, 12 bp, Artificial Sequence
  Oligonucleotide primer for the detection of SNP TSC0014111
caaaacataact

SEQ ID NO: 289823 - DNA, 12 bp, Artificial Sequence
  Oligonucleotide primer for the detection of SNP TSC0014111
atatgattgtta

SEQ ID NO: 289824 - DNA, 12 bp, Artificial Sequence
  Oligonucleotide primer for the detection of SNP TSC0014111
acataactatca

SEQ ID NO: 289825 - DNA, 12 bp, Artificial Sequence
  Oligonucleotide primer for the detection of SNP TSC0014111
taggatatggtt

SEQ ID NO: 289826 - DNA, 12 bp, Artificial Sequence
  Oligonucleotide primer for the detection of SNP TSC0014115
ggatttaaggat

SEQ ID NO: 289827 - DNA, 12 bp, Artificial Sequence
  Oligonucleotide primer for the detection of SNP TSC0014115
aatttaaaaaca

SEQ ID NO: 289828 - DNA, 12 bp, Artificial Sequence
  Oligonucleotide primer for the detection of SNP TSC0014115
gattgaaggaag

SEQ ID NO: 289829 - DNA, 12 bp, Artificial Sequence
  Oligonucleotide primer for the detection of SNP TSC0014116
ttaaccaaatat

SEQ ID NO: 289830 - DNA, 12 bp, Artificial Sequence
  Oligonucleotide primer for the detection of SNP TSC0014116
ggtgtttgttgt

SEQ ID NO: 289831 - DNA, 12 bp, Artificial Sequence
  Oligonucleotide primer for the detection of SNP TSC0014116
ggcgtttgttgt

SEQ ID NO: 289832 - DNA, 12 bp, Artificial Sequence
  Oligonucleotide primer for the detection of SNP TSC0014116
ggtgttcgttgt

SEQ ID NO: 289833 - DNA, 12 bp, Artificial Sequence
  Oligonucleotide primer for the detection of SNP TSC0014116
ggtgtttgtcgt

SEQ ID NO: 289834 - DNA, 12 bp, Artificial Sequence
  Oligonucleotide primer for the detection of SNP TSC0014116
ggcgttcgttgt

SEQ ID NO: 289835 - DNA, 12 bp, Artificial Sequence
  Oligonucleotide primer for the detection of SNP TSC0014116
ggcgtttgtcgt

SEQ ID NO: 289836 - DNA, 12 bp, Artificial Sequence
  Oligonukleotid-Primer
ggtgttcgtcgt

SEQ ID NO: 289837 - DNA, 12 bp, Artificial Sequence
  Oligonucleotide primer for the detection of SNP TSC0014116
ggcgttcgtcgt

SEQ ID NO: 289838 - DNA, 12 bp, Artificial Sequence
  Oligonucleotide primer for the detection of SNP TSC0014116
aacacccaccac

SEQ ID NO: 289839 - DNA, 12 bp, Artificial Sequence
  Oligonucleotide primer for the detection of SNP TSC0014116
aacacccaccgc

SEQ ID NO: 289840 - DNA, 12 bp, Artificial Sequence
  Oligonucleotide primer for the detection of SNP TSC0014116
aacacccgccac

SEQ ID NO: 289841 - DNA, 12 bp, Artificial Sequence
  Oligonucleotide primer for the detection of SNP TSC0014116
aacgcccaccac

SEQ ID NO: 289842 - DNA, 12 bp, Artificial Sequence
  Oligonucleotide primer for the detection of SNP TSC0014116
aacacccgccgc

SEQ ID NO: 289843 - DNA, 12 bp, Artificial Sequence
  Oligonucleotide primer for the detection of SNP TSC0014116
aacgcccaccgc

SEQ ID NO: 289844 - DNA, 12 bp, Artificial Sequence
  Oligonucleotide primer for the detection of SNP TSC0014116
aacgcccgccac

SEQ ID NO: 289845 - DNA, 12 bp, Artificial Sequence
  Oligonucleotide primer for the detection of SNP TSC0014116
aacgcccgccgc

SEQ ID NO: 289846 - DNA, 12 bp, Artificial Sequence
  Oligonucleotide primer for the detection of SNP TSC0014116
ttagttaggtgt

SEQ ID NO: 289847 - DNA, 12 bp, Artificial Sequence
  Oligonucleotide primer for the detection of SNP TSC0014117
acaattaaaatt

SEQ ID NO: 289848 - DNA, 12 bp, Artificial Sequence
  Oligonucleotide primer for the detection of SNP TSC0014117
tattttttgttt

SEQ ID NO: 289849 - DNA, 12 bp, Artificial Sequence
  Oligonucleotide primer for the detection of SNP TSC0014117
ccatattctcta

SEQ ID NO: 289850 - DNA, 12 bp, Artificial Sequence
  Oligonucleotide primer for the detection of SNP TSC0014117
aattggggtttt

SEQ ID NO: 289851 - DNA, 12 bp, Artificial Sequence
  Oligonucleotide primer for the detection of SNP TSC0014117
aattggggtttc

SEQ ID NO: 289852 - DNA, 12 bp, Artificial Sequence
  Oligonucleotide primer for the detection of SNP TSC0014119
catacatattta

SEQ ID NO: 289853 - DNA, 12 bp, Artificial Sequence
  Oligonucleotide primer for the detection of SNP TSC0014119
ttctctaccata

SEQ ID NO: 289854 - DNA, 12 bp, Artificial Sequence
  Oligonucleotide primer for the detection of SNP TSC0014120
aaatgttattta

SEQ ID NO: 289855 - DNA, 12 bp, Artificial Sequence
  Oligonucleotide primer for the detection of SNP TSC0014121
aaaacatcccaa

SEQ ID NO: 289856 - DNA, 12 bp, Artificial Sequence
  Oligonucleotide primer for the detection of SNP TSC0014121
aaaacatcccga

SEQ ID NO: 289857 - DNA, 12 bp, Artificial Sequence
  Oligonucleotide primer for the detection of SNP TSC0014121
tggagtgtttgg

SEQ ID NO: 289858 - DNA, 12 bp, Artificial Sequence
  Oligonucleotide primer for the detection of SNP TSC0014121
taaaatacctaa

SEQ ID NO: 289859 - DNA, 12 bp, Artificial Sequence
  Oligonucleotide primer for the detection of SNP TSC0014121
aaggtattttgg

SEQ ID NO: 289860 - DNA, 12 bp, Artificial Sequence
  Oligonucleotide primer for the detection of SNP TSC0014121
aaggtatttcgg

SEQ ID NO: 289861 - DNA, 12 bp, Artificial Sequence
  Oligonucleotide primer for the detection of SNP TSC0014122
accaccccaact

SEQ ID NO: 289862 - DNA, 12 bp, Artificial Sequence
  Oligonucleotide primer for the detection of SNP TSC0014122
accaccccgact

SEQ ID NO: 289863 - DNA, 12 bp, Artificial Sequence
  Oligonucleotide primer for the detection of SNP TSC0014122
accgccccaact

SEQ ID NO: 289864 - DNA, 12 bp, Artificial Sequence
  Oligonucleotide primer for the detection of SNP TSC0014122
gccaccccaact

SEQ ID NO: 289865 - DNA, 12 bp, Artificial Sequence
  Oligonucleotide primer for the detection of SNP TSC0014122
accgccccgact

SEQ ID NO: 289866 - DNA, 12 bp, Artificial Sequence
  Oligonucleotide primer for the detection of SNP TSC0014122
gccaccccgact

SEQ ID NO: 289867 - DNA, 12 bp, Artificial Sequence
  Oligonucleotide primer for the detection of SNP TSC0014122
gccgccccaact

SEQ ID NO: 289868 - DNA, 12 bp, Artificial Sequence
  Oligonucleotide primer for the detection of SNP TSC0014122
gccgccccgact

SEQ ID NO: 289869 - DNA, 12 bp, Artificial Sequence
  Oligonucleotide primer for the detection of SNP TSC0014122
gagttttttttt

SEQ ID NO: 289870 - DNA, 12 bp, Artificial Sequence
  Oligonucleotide primer for the detection of SNP TSC0014122
aaactctccttc

SEQ ID NO: 289871 - DNA, 12 bp, Artificial Sequence
  Oligonucleotide primer for the detection of SNP TSC0014122
gttgttttggtt

SEQ ID NO: 289872 - DNA, 12 bp, Artificial Sequence
  Oligonucleotide primer for the detection of SNP TSC0014122
gtcgttttggtt

SEQ ID NO: 289873 - DNA, 12 bp, Artificial Sequence
  Oligonucleotide primer for the detection of SNP TSC0014122
gttgtttcggtt

SEQ ID NO: 289874 - DNA, 12 bp, Artificial Sequence
  Oligonucleotide primer for the detection of SNP TSC0014122
gtcgtttcggtt

SEQ ID NO: 289875 - DNA, 12 bp, Artificial Sequence
  Oligonucleotide primer for the detection of SNP TSC0014123
atcaatatcaat

SEQ ID NO: 289876 - DNA, 12 bp, Artificial Sequence
  Oligonucleotide primer for the detection of SNP TSC0014123
atgaaataatat

SEQ ID NO: 289877 - DNA, 12 bp, Artificial Sequence
  Oligonucleotide primer for the detection of SNP TSC0014123
ataaaataatac

SEQ ID NO: 289878 - DNA, 12 bp, Artificial Sequence
  Oligonucleotide primer for the detection of SNP TSC0014123
attaatattaat

SEQ ID NO: 289879 - DNA, 12 bp, Artificial Sequence
  Oligonucleotide primer for the detection of SNP TSC0014125
aaattcatacaa

SEQ ID NO: 289880 - DNA, 12 bp, Artificial Sequence
  Oligonucleotide primer for the detection of SNP TSC0014125
taggttatgttt

SEQ ID NO: 289881 - DNA, 12 bp, Artificial Sequence
  Oligonucleotide primer for the detection of SNP TSC0014125
caaattatacct

SEQ ID NO: 289882 - DNA, 12 bp, Artificial Sequence
  Oligonucleotide primer for the detection of SNP TSC0014125
gaatttatgtag

SEQ ID NO: 289883 - DNA, 12 bp, Artificial Sequence
  Oligonucleotide primer for the detection of SNP TSC0014126
ctctctttccat

SEQ ID NO: 289884 - DNA, 12 bp, Artificial Sequence
  Oligonucleotide primer for the detection of SNP TSC0014126
gattttttttag

SEQ ID NO: 289885 - DNA, 12 bp, Artificial Sequence
  Oligonucleotide primer for the detection of SNP TSC0014127
aaatttctaatt

SEQ ID NO: 289886 - DNA, 12 bp, Artificial Sequence
  Oligonucleotide primer for the detection of SNP TSC0014127
agtgagataaaa

SEQ ID NO: 289887 - DNA, 12 bp, Artificial Sequence
  Oligonucleotide primer for the detection of SNP TSC0014127
ggtttttgattc

SEQ ID NO: 289888 - DNA, 12 bp, Artificial Sequence
  Oligonucleotide primer for the detection of SNP TSC0014128
agaggaatagta

SEQ ID NO: 289889 - DNA, 12 bp, Artificial Sequence
  Oligonucleotide primer for the detection of SNP TSC0014129
atctacctacct

SEQ ID NO: 289890 - DNA, 12 bp, Artificial Sequence
  Oligonucleotide primer for the detection of SNP TSC0014133
aactaaccctcc

SEQ ID NO: 289891 - DNA, 12 bp, Artificial Sequence
  Oligonucleotide primer for the detection of SNP TSC0014133
tggttatgttga

SEQ ID NO: 289892 - DNA, 12 bp, Artificial Sequence
  Oligonucleotide primer for the detection of SNP TSC0014134
cttctatcctct

SEQ ID NO: 289893 - DNA, 12 bp, Artificial Sequence
  Oligonucleotide primer for the detection of SNP TSC0014134
tgtatttatata

SEQ ID NO: 289894 - DNA, 12 bp, Artificial Sequence
  Oligonucleotide primer for the detection of SNP TSC0014135
ctaaaacttacc

SEQ ID NO: 289895 - DNA, 12 bp, Artificial Sequence
  Oligonucleotide primer for the detection of SNP TSC0014135
ataagtttaagg

SEQ ID NO: 289896 - DNA, 12 bp, Artificial Sequence
  Oligonucleotide primer for the detection of SNP TSC0014135
ataaactcaaaa

SEQ ID NO: 289897 - DNA, 12 bp, Artificial Sequence
  Oligonukleotid-Primer
ttgaggtttgtt

SEQ ID NO: 289898 - DNA, 12 bp, Artificial Sequence
  Oligonucleotide primer for the detection of SNP TSC0014136
atgaattttagg

SEQ ID NO: 289899 - DNA, 12 bp, Artificial Sequence
  Oligonucleotide primer for the detection of SNP TSC0014137
aaatttcaaact

SEQ ID NO: 289900 - DNA, 12 bp, Artificial Sequence
  Oligonucleotide primer for the detection of SNP TSC0014137
ttagtaaataaa

SEQ ID NO: 289901 - DNA, 12 bp, Artificial Sequence
  Oligonukleotid-Primer
tcaacaaataaa

SEQ ID NO: 289902 - DNA, 12 bp, Artificial Sequence
  Oligonucleotide primer for the detection of SNP TSC0014137
gaattttaggtt

SEQ ID NO: 289903 - DNA, 12 bp, Artificial Sequence
  Oligonucleotide primer for the detection of SNP TSC0014141
aaaacctatcct

SEQ ID NO: 289904 - DNA, 12 bp, Artificial Sequence
  Oligonucleotide primer for the detection of SNP TSC0014141
tttatgagaaag

SEQ ID NO: 289905 - DNA, 12 bp, Artificial Sequence
  Oligonukleotid-Primer
acaacaaaaaaa

SEQ ID NO: 289906 - DNA, 12 bp, Artificial Sequence
  Oligonucleotide primer for the detection of SNP TSC0014146
aaactcatatac

SEQ ID NO: 289907 - DNA, 12 bp, Artificial Sequence
  Oligonucleotide primer for the detection of SNP TSC0014146
taatgttttata

SEQ ID NO: 289908 - DNA, 12 bp, Artificial Sequence
  Oligonucleotide primer for the detection of SNP TSC0014146
caatactccaca

SEQ ID NO: 289909 - DNA, 12 bp, Artificial Sequence
  Oligonucleotide primer for the detection of SNP TSC0014146
agatttatgtgt

SEQ ID NO: 289910 - DNA, 12 bp, Artificial Sequence
  Oligonucleotide primer for the detection of SNP TSC0014146
agatttatgtgc

SEQ ID NO: 289911 - DNA, 12 bp, Artificial Sequence
  Oligonucleotide primer for the detection of SNP TSC0014147
aaaaatttcaaa

SEQ ID NO: 289912 - DNA, 12 bp, Artificial Sequence
  Oligonucleotide primer for the detection of SNP TSC0014147
atattgtatatg

SEQ ID NO: 289913 - DNA, 12 bp, Artificial Sequence
  Oligonucleotide primer for the detection of SNP TSC0014147
atatcgtatatg

SEQ ID NO: 289914 - DNA, 12 bp, Artificial Sequence
  Oligonucleotide primer for the detection of SNP TSC0014147
catcacacataa

SEQ ID NO: 289915 - DNA, 12 bp, Artificial Sequence
  Oligonucleotide primer for the detection of SNP TSC0014147
catcgcacataa

SEQ ID NO: 289916 - DNA, 12 bp, Artificial Sequence
  Oligonucleotide primer for the detection of SNP TSC0014147
agaaattttaga

SEQ ID NO: 289917 - DNA, 12 bp, Artificial Sequence
  Oligonucleotide primer for the detection of SNP TSC0014148
caacaaaacaac

SEQ ID NO: 289918 - DNA, 12 bp, Artificial Sequence
  Oligonucleotide primer for the detection of SNP TSC0014148
tggatgattttt

SEQ ID NO: 289919 - DNA, 12 bp, Artificial Sequence
  Oligonucleotide primer for the detection of SNP TSC0014148
taaataactttt

SEQ ID NO: 289920 - DNA, 12 bp, Artificial Sequence
  Oligonucleotide primer for the detection of SNP TSC0014148
tagtaggataat

SEQ ID NO: 289921 - DNA, 12 bp, Artificial Sequence
  Oligonucleotide primer for the detection of SNP TSC0014149
ttacttaaaccc

SEQ ID NO: 289922 - DNA, 12 bp, Artificial Sequence
  Oligonucleotide primer for the detection of SNP TSC0014150
acacataccatc

SEQ ID NO: 289923 - DNA, 12 bp, Artificial Sequence
  Oligonucleotide primer for the detection of SNP TSC0014150
tgggtatgaggg

SEQ ID NO: 289924 - DNA, 12 bp, Artificial Sequence
  Oligonucleotide primer for the detection of SNP TSC0014150
gtatatgttatt

SEQ ID NO: 289925 - DNA, 12 bp, Artificial Sequence
  Oligonucleotide primer for the detection of SNP TSC0014151
tttattttggag

SEQ ID NO: 289926 - DNA, 12 bp, Artificial Sequence
  Oligonucleotide primer for the detection of SNP TSC0014151
ctcaccttaaaa

SEQ ID NO: 289927 - DNA, 12 bp, Artificial Sequence
  Oligonucleotide primer for the detection of SNP TSC0014151
aaagttaggaaa

SEQ ID NO: 289928 - DNA, 12 bp, Artificial Sequence
  Oligonucleotide primer for the detection of SNP TSC0014153
acttcaacaaat

SEQ ID NO: 289929 - DNA, 12 bp, Artificial Sequence
  Oligonucleotide primer for the detection of SNP TSC0014153
agaattatggtt

SEQ ID NO: 289930 - DNA, 12 bp, Artificial Sequence
  Oligonucleotide primer for the detection of SNP TSC0014153
aaaaatcataac

SEQ ID NO: 289931 - DNA, 12 bp, Artificial Sequence
  Oligonucleotide primer for the detection of SNP TSC0014153
attttagtagat

SEQ ID NO: 289932 - DNA, 12 bp, Artificial Sequence
  Oligonucleotide primer for the detection of SNP TSC0014155
atttaaatcttt

SEQ ID NO: 289933 - DNA, 12 bp, Artificial Sequence
  Oligonucleotide primer for the detection of SNP TSC0014155
gtttaaatcttt

SEQ ID NO: 289934 - DNA, 12 bp, Artificial Sequence
  Oligonucleotide primer for the detection of SNP TSC0014155
aatttaagatgg

SEQ ID NO: 289935 - DNA, 12 bp, Artificial Sequence
  Oligonucleotide primer for the detection of SNP TSC0014156
accaaataaaaa

SEQ ID NO: 289936 - DNA, 12 bp, Artificial Sequence
  Oligonucleotide primer for the detection of SNP TSC0014156
ggatttattatg

SEQ ID NO: 289937 - DNA, 12 bp, Artificial Sequence
  Oligonucleotide primer for the detection of SNP TSC0014156
aaacctaccata

SEQ ID NO: 289938 - DNA, 12 bp, Artificial Sequence
  Oligonucleotide primer for the detection of SNP TSC0014156
agggaattaggt

SEQ ID NO: 289939 - DNA, 12 bp, Artificial Sequence
  Oligonucleotide primer for the detection of SNP TSC0014158
tccaacaaaaaa

SEQ ID NO: 289940 - DNA, 12 bp, Artificial Sequence
  Oligonucleotide primer for the detection of SNP TSC0014158
tccgacaaaaaa

SEQ ID NO: 289941 - DNA, 12 bp, Artificial Sequence
  Oligonucleotide primer for the detection of SNP TSC0014158
tgtatagaagtt

SEQ ID NO: 289942 - DNA, 12 bp, Artificial Sequence
  Oligonucleotide primer for the detection of SNP TSC0014158
tgtatagaagtc

SEQ ID NO: 289943 - DNA, 12 bp, Artificial Sequence
  Oligonucleotide primer for the detection of SNP TSC0014158
tacacaaaaatc

SEQ ID NO: 289944 - DNA, 12 bp, Artificial Sequence
  Oligonucleotide primer for the detection of SNP TSC0014158
tttggtagagag

SEQ ID NO: 289945 - DNA, 12 bp, Artificial Sequence
  Oligonucleotide primer for the detection of SNP TSC0014158
ttcggtagagag

SEQ ID NO: 289946 - DNA, 12 bp, Artificial Sequence
  Oligonucleotide primer for the detection of SNP TSC0014159
tatttctcaaac

SEQ ID NO: 289947 - DNA, 12 bp, Artificial Sequence
  Oligonucleotide primer for the detection of SNP TSC0014159
gtttgttaggta

SEQ ID NO: 289948 - DNA, 12 bp, Artificial Sequence
  Oligonucleotide primer for the detection of SNP TSC0014161
aaaactaatttc

SEQ ID NO: 289949 - DNA, 12 bp, Artificial Sequence
  Oligonucleotide primer for the detection of SNP TSC0014161
taggaagaaatg

SEQ ID NO: 289950 - DNA, 12 bp, Artificial Sequence
  Oligonucleotide primer for the detection of SNP TSC0014163
aataaataacac

SEQ ID NO: 289951 - DNA, 12 bp, Artificial Sequence
  Oligonucleotide primer for the detection of SNP TSC0014163
aagataggtaag

SEQ ID NO: 289952 - DNA, 12 bp, Artificial Sequence
  Oligonucleotide primer for the detection of SNP TSC0014163
ggtagatggtat

SEQ ID NO: 289953 - DNA, 12 bp, Artificial Sequence
  Oligonucleotide primer for the detection of SNP TSC0014164
aaaaaaccatca

SEQ ID NO: 289954 - DNA, 12 bp, Artificial Sequence
  Oligonucleotide primer for the detection of SNP TSC0014164
ggtttggatatt

SEQ ID NO: 289955 - DNA, 12 bp, Artificial Sequence
  Oligonucleotide primer for the detection of SNP TSC0014164
ggtttggatatc

SEQ ID NO: 289956 - DNA, 12 bp, Artificial Sequence
  Oligonucleotide primer for the detection of SNP TSC0014164
aacttaaacacc

SEQ ID NO: 289957 - DNA, 12 bp, Artificial Sequence
  Oligonucleotide primer for the detection of SNP TSC0014164
gaaagttattat

SEQ ID NO: 289958 - DNA, 12 bp, Artificial Sequence
  Oligonucleotide primer for the detection of SNP TSC0014165
cctcttttcctc

SEQ ID NO: 289959 - DNA, 12 bp, Artificial Sequence
  Oligonucleotide primer for the detection of SNP TSC0014165
gttttgggaggg

SEQ ID NO: 289960 - DNA, 12 bp, Artificial Sequence
  Oligonucleotide primer for the detection of SNP TSC0014165
gtttcgggaggg

SEQ ID NO: 289961 - DNA, 12 bp, Artificial Sequence
  Oligonucleotide primer for the detection of SNP TSC0014168
acaaataacaaa

SEQ ID NO: 289962 - DNA, 12 bp, Artificial Sequence
  Oligonucleotide primer for the detection of SNP TSC0014168
tttgagttttag

SEQ ID NO: 289963 - DNA, 12 bp, Artificial Sequence
  Oligonucleotide primer for the detection of SNP TSC0014168
tctaaacctcaa

SEQ ID NO: 289964 - DNA, 12 bp, Artificial Sequence
  Oligonucleotide primer for the detection of SNP TSC0014168
atagatgataga

SEQ ID NO: 289965 - DNA, 12 bp, Artificial Sequence
  Oligonucleotide primer for the detection of SNP TSC0014169
aacacaataact

SEQ ID NO: 289966 - DNA, 12 bp, Artificial Sequence
  Oligonucleotide primer for the detection of SNP TSC0014169
aacacgataact

SEQ ID NO: 289967 - DNA, 12 bp, Artificial Sequence
  Oligonucleotide primer for the detection of SNP TSC0014169
aacgcaataact

SEQ ID NO: 289968 - DNA, 12 bp, Artificial Sequence
  Oligonucleotide primer for the detection of SNP TSC0014169
aacgcgataact

SEQ ID NO: 289969 - DNA, 12 bp, Artificial Sequence
  Oligonucleotide primer for the detection of SNP TSC0014169
ggattataggtg

SEQ ID NO: 289970 - DNA, 12 bp, Artificial Sequence
  Oligonucleotide primer for the detection of SNP TSC0014169
ggattataggcg

SEQ ID NO: 289971 - DNA, 12 bp, Artificial Sequence
  Oligonucleotide primer for the detection of SNP TSC0014170
tcttttaaactt

SEQ ID NO: 289972 - DNA, 12 bp, Artificial Sequence
  Oligonucleotide primer for the detection of SNP TSC0014171
tattaaactctc

SEQ ID NO: 289973 - DNA, 12 bp, Artificial Sequence
  Oligonucleotide primer for the detection of SNP TSC0014171
tagaggtttttg

SEQ ID NO: 289974 - DNA, 12 bp, Artificial Sequence
  Oligonucleotide primer for the detection of SNP TSC0014171
taaaaacctcta

SEQ ID NO: 289975 - DNA, 12 bp, Artificial Sequence
  Oligonucleotide primer for the detection of SNP TSC0014171
tattagattttt

SEQ ID NO: 289976 - DNA, 12 bp, Artificial Sequence
  Oligonucleotide primer for the detection of SNP TSC0014171
tattagattttc

SEQ ID NO: 289977 - DNA, 12 bp, Artificial Sequence
  Oligonucleotide primer for the detection of SNP TSC0014172
aataaaacacac

SEQ ID NO: 289978 - DNA, 12 bp, Artificial Sequence
  Oligonukleotid-Primer
agtgaggtagga

SEQ ID NO: 289979 - DNA, 12 bp, Artificial Sequence
  Oligonucleotide primer for the detection of SNP TSC0014174
ttttgatgtttc

SEQ ID NO: 289980 - DNA, 12 bp, Artificial Sequence
  Oligonucleotide primer for the detection of SNP TSC0014174
tcctaatatccc

SEQ ID NO: 289981 - DNA, 12 bp, Artificial Sequence
  Oligonucleotide primer for the detection of SNP TSC0014174
tgtagggattag

SEQ ID NO: 289982 - DNA, 12 bp, Artificial Sequence
  Oligonukleotid-Primer
tctcctcatact

SEQ ID NO: 289983 - DNA, 12 bp, Artificial Sequence
  Oligonucleotide primer for the detection of SNP TSC0014175
ttgaggttaagg

SEQ ID NO: 289984 - DNA, 12 bp, Artificial Sequence
  Oligonucleotide primer for the detection of SNP TSC0014175
ctaaaatcaaaa

SEQ ID NO: 289985 - DNA, 12 bp, Artificial Sequence
  Oligonucleotide primer for the detection of SNP TSC0014175
tttttttatatt

SEQ ID NO: 289986 - DNA, 12 bp, Artificial Sequence
  Oligonucleotide primer for the detection of SNP TSC0014176
ttttctccaaaa

SEQ ID NO: 289987 - DNA, 12 bp, Artificial Sequence
  Oligonucleotide primer for the detection of SNP TSC0014176
tttgtggtgttt

SEQ ID NO: 289988 - DNA, 12 bp, Artificial Sequence
  Oligonucleotide primer for the detection of SNP TSC0014176
atctataatact

SEQ ID NO: 289989 - DNA, 12 bp, Artificial Sequence
  Oligonucleotide primer for the detection of SNP TSC0014176
tttttttagggt

SEQ ID NO: 289990 - DNA, 12 bp, Artificial Sequence
  Oligonucleotide primer for the detection of SNP TSC0014178
ttgatttttagg

SEQ ID NO: 289991 - DNA, 12 bp, Artificial Sequence
  Oligonucleotide primer for the detection of SNP TSC0014179
taactttactct

SEQ ID NO: 289992 - DNA, 12 bp, Artificial Sequence
  Oligonucleotide primer for the detection of SNP TSC0014179
atagggaaggta

SEQ ID NO: 289993 - DNA, 12 bp, Artificial Sequence
  Oligonucleotide primer for the detection of SNP TSC0014180
acacctaccacc

SEQ ID NO: 289994 - DNA, 12 bp, Artificial Sequence
  Oligonucleotide primer for the detection of SNP TSC0014180
acgcctaccacc

SEQ ID NO: 289995 - DNA, 12 bp, Artificial Sequence
  Oligonucleotide primer for the detection of SNP TSC0014180
attagttgggtg

SEQ ID NO: 289996 - DNA, 12 bp, Artificial Sequence
  Oligonucleotide primer for the detection of SNP TSC0014180
attagtcgggtg

SEQ ID NO: 289997 - DNA, 12 bp, Artificial Sequence
  Oligonucleotide primer for the detection of SNP TSC0014180
attaaccaaata

SEQ ID NO: 289998 - DNA, 12 bp, Artificial Sequence
  Oligonucleotide primer for the detection of SNP TSC0014180
attaaccgaata

SEQ ID NO: 289999 - DNA, 12 bp, Artificial Sequence
  Oligonucleotide primer for the detection of SNP TSC0014181
tatctcataatt

SEQ ID NO: 290000 - DNA, 12 bp, Artificial Sequence
  Oligonucleotide primer for the detection of SNP TSC0014181
ttgttatgatga

SEQ ID NO: 290001 - DNA, 12 bp, Artificial Sequence
  Oligonucleotide primer for the detection of SNP TSC0014182
atattatctacc

SEQ ID NO: 290002 - DNA, 12 bp, Artificial Sequence
  Oligonucleotide primer for the detection of SNP TSC0014182
atgtaattttat

SEQ ID NO: 290003 - DNA, 12 bp, Artificial Sequence
  Oligonucleotide primer for the detection of SNP TSC0014182
tacaaccccaca

SEQ ID NO: 290004 - DNA, 12 bp, Artificial Sequence
  Oligonucleotide primer for the detection of SNP TSC0014182
tgttgtttgttt

SEQ ID NO: 290005 - DNA, 12 bp, Artificial Sequence
  Oligonucleotide primer for the detection of SNP TSC0014184
caaaaaaataac

SEQ ID NO: 290006 - DNA, 12 bp, Artificial Sequence
  Oligonucleotide primer for the detection of SNP TSC0014184
tttattattagg

SEQ ID NO: 290007 - DNA, 12 bp, Artificial Sequence
  Oligonucleotide primer for the detection of SNP TSC0014184
cccaccaccaaa

SEQ ID NO: 290008 - DNA, 12 bp, Artificial Sequence
  Oligonucleotide primer for the detection of SNP TSC0014184
taaaaaaatagt

SEQ ID NO: 290009 - DNA, 12 bp, Artificial Sequence
  Oligonucleotide primer for the detection of SNP TSC0014185
ccctatctatac

SEQ ID NO: 290010 - DNA, 12 bp, Artificial Sequence
  Oligonucleotide primer for the detection of SNP TSC0014185
atataaaaatag

SEQ ID NO: 290011 - DNA, 12 bp, Artificial Sequence
  Oligonucleotide primer for the detection of SNP TSC0014186
taactcactcat

SEQ ID NO: 290012 - DNA, 12 bp, Artificial Sequence
  Oligonucleotide primer for the detection of SNP TSC0014186
taactcactcgt

SEQ ID NO: 290013 - DNA, 12 bp, Artificial Sequence
  Oligonucleotide primer for the detection of SNP TSC0014186
agtgggtattta

SEQ ID NO: 290014 - DNA, 12 bp, Artificial Sequence
  Oligonucleotide primer for the detection of SNP TSC0014186
aataaatattta

SEQ ID NO: 290015 - DNA, 12 bp, Artificial Sequence
  Oligonucleotide primer for the detection of SNP TSC0014186
tggtttatttgt

SEQ ID NO: 290016 - DNA, 12 bp, Artificial Sequence
  Oligonucleotide primer for the detection of SNP TSC0014186
tggtttattcgt

SEQ ID NO: 290017 - DNA, 12 bp, Artificial Sequence
  Oligonucleotide primer for the detection of SNP TSC0014187
aaaccacaaaat

SEQ ID NO: 290018 - DNA, 12 bp, Artificial Sequence
  Oligonucleotide primer for the detection of SNP TSC0014187
agttttgttgta

SEQ ID NO: 290019 - DNA, 12 bp, Artificial Sequence
  Oligonucleotide primer for the detection of SNP TSC0014187
agtttcgttgta

SEQ ID NO: 290020 - DNA, 12 bp, Artificial Sequence
  Oligonucleotide primer for the detection of SNP TSC0014187
agttttgtcgta

SEQ ID NO: 290021 - DNA, 12 bp, Artificial Sequence
  Oligonucleotide primer for the detection of SNP TSC0014187
agtttcgtcgta

SEQ ID NO: 290022 - DNA, 12 bp, Artificial Sequence
  Oligonucleotide primer for the detection of SNP TSC0014187
aacctcaccaca

SEQ ID NO: 290023 - DNA, 12 bp, Artificial Sequence
  Oligonucleotide primer for the detection of SNP TSC0014187
aacctcaccgca

SEQ ID NO: 290024 - DNA, 12 bp, Artificial Sequence
  Oligonucleotide primer for the detection of SNP TSC0014187
aacctcgccaca

SEQ ID NO: 290025 - DNA, 12 bp, Artificial Sequence
  Oligonucleotide primer for the detection of SNP TSC0014187
aacctcgccgca

SEQ ID NO: 290026 - DNA, 12 bp, Artificial Sequence
  Oligonucleotide primer for the detection of SNP TSC0014187
aggttatagggt

SEQ ID NO: 290027 - DNA, 12 bp, Artificial Sequence
  Oligonucleotide primer for the detection of SNP TSC0014188
ccacctccccaa

SEQ ID NO: 290028 - DNA, 12 bp, Artificial Sequence
  Oligonucleotide primer for the detection of SNP TSC0014188
ccgcctccccaa

SEQ ID NO: 290029 - DNA, 12 bp, Artificial Sequence
  Oligonucleotide primer for the detection of SNP TSC0014188
atgttttaggag

SEQ ID NO: 290030 - DNA, 12 bp, Artificial Sequence
  Oligonucleotide primer for the detection of SNP TSC0014188
attgttttttta

SEQ ID NO: 290031 - DNA, 12 bp, Artificial Sequence
  Oligonucleotide primer for the detection of SNP TSC0014188
atcgttttttta

SEQ ID NO: 290032 - DNA, 12 bp, Artificial Sequence
  Oligonucleotide primer for the detection of SNP TSC0014189
atctcaatcccc

SEQ ID NO: 290033 - DNA, 12 bp, Artificial Sequence
  Oligonucleotide primer for the detection of SNP TSC0014189
ttatttgtaaag

SEQ ID NO: 290034 - DNA, 12 bp, Artificial Sequence
  Oligonucleotide primer for the detection of SNP TSC0014189
tcatctacaaaa

SEQ ID NO: 290035 - DNA, 12 bp, Artificial Sequence
  Oligonucleotide primer for the detection of SNP TSC0014190
cttccccaaaat

SEQ ID NO: 290036 - DNA, 12 bp, Artificial Sequence
  Oligonucleotide primer for the detection of SNP TSC0014190
gttgtaaagtaa

SEQ ID NO: 290037 - DNA, 12 bp, Artificial Sequence
  Oligonucleotide primer for the detection of SNP TSC0014192
tacccaccactc

SEQ ID NO: 290038 - DNA, 12 bp, Artificial Sequence
  Oligonucleotide primer for the detection of SNP TSC0014192
tacccgccactc

SEQ ID NO: 290039 - DNA, 12 bp, Artificial Sequence
  Oligonucleotide primer for the detection of SNP TSC0014192
gtagtttatagg

SEQ ID NO: 290040 - DNA, 12 bp, Artificial Sequence
  Oligonucleotide primer for the detection of SNP TSC0014192
tgtttgttattt

SEQ ID NO: 290041 - DNA, 12 bp, Artificial Sequence
  Oligonucleotide primer for the detection of SNP TSC0014192
tgttcgttattt

SEQ ID NO: 290042 - DNA, 12 bp, Artificial Sequence
  Oligonucleotide primer for the detection of SNP TSC0014193
tcctaataaaaa

SEQ ID NO: 290043 - DNA, 12 bp, Artificial Sequence
  Oligonucleotide primer for the detection of SNP TSC0014193
agatatattttg

SEQ ID NO: 290044 - DNA, 12 bp, Artificial Sequence
  Oligonucleotide primer for the detection of SNP TSC0014193
aaacatacccta

SEQ ID NO: 290045 - DNA, 12 bp, Artificial Sequence
  Oligonucleotide primer for the detection of SNP TSC0014193
gattttagtaag

SEQ ID NO: 290046 - DNA, 12 bp, Artificial Sequence
  Oligonucleotide primer for the detection of SNP TSC0014197
caaccaacatcc

SEQ ID NO: 290047 - DNA, 12 bp, Artificial Sequence
  Oligonukleotid-Primer
caaccaacgtcc

SEQ ID NO: 290048 - DNA, 12 bp, Artificial Sequence
  Oligonucleotide primer for the detection of SNP TSC0014197
tagattttttag

SEQ ID NO: 290049 - DNA, 12 bp, Artificial Sequence
  Oligonucleotide primer for the detection of SNP TSC0014197
caaaccctccaa

SEQ ID NO: 290050 - DNA, 12 bp, Artificial Sequence
  Oligonucleotide primer for the detection of SNP TSC0014197
tagttagtgttt

SEQ ID NO: 290051 - DNA, 12 bp, Artificial Sequence
  Oligonucleotide primer for the detection of SNP TSC0014197
tagttagcgttt

SEQ ID NO: 290052 - DNA, 12 bp, Artificial Sequence
  Oligonucleotide primer for the detection of SNP TSC0014198
aaaaatcaataa

SEQ ID NO: 290053 - DNA, 12 bp, Artificial Sequence
  Oligonucleotide primer for the detection of SNP TSC0014198
ttaggtttttgt

SEQ ID NO: 290054 - DNA, 12 bp, Artificial Sequence
  Oligonucleotide primer for the detection of SNP TSC0014198
ccaaactcctat

SEQ ID NO: 290055 - DNA, 12 bp, Artificial Sequence
  Oligonucleotide primer for the detection of SNP TSC0014198
ggaggttaatgg

SEQ ID NO: 290056 - DNA, 12 bp, Artificial Sequence
  Oligonucleotide primer for the detection of SNP TSC0014200
cccttaacaccc

SEQ ID NO: 290057 - DNA, 12 bp, Artificial Sequence
  Oligonucleotide primer for the detection of SNP TSC0014200
tttgttagggga

SEQ ID NO: 290058 - DNA, 12 bp, Artificial Sequence
  Oligonucleotide primer for the detection of SNP TSC0014201
tataaaactatt

SEQ ID NO: 290059 - DNA, 12 bp, Artificial Sequence
  Oligonucleotide primer for the detection of SNP TSC0014201
ttgttttgttag

SEQ ID NO: 290060 - DNA, 12 bp, Artificial Sequence
  Oligonucleotide primer for the detection of SNP TSC0014203
attcaattataa

SEQ ID NO: 290061 - DNA, 12 bp, Artificial Sequence
  Oligonucleotide primer for the detection of SNP TSC0014203
catcatctcaaa

SEQ ID NO: 290062 - DNA, 12 bp, Artificial Sequence
  Oligonucleotide primer for the detection of SNP TSC0014203
tttagttatagt

SEQ ID NO: 290063 - DNA, 12 bp, Artificial Sequence
  Oligonucleotide primer for the detection of SNP TSC0014203
tttagttatagc

SEQ ID NO: 290064 - DNA, 12 bp, Artificial Sequence
  Oligonucleotide primer for the detection of SNP TSC0014204
tccaaaaaacac

SEQ ID NO: 290065 - DNA, 12 bp, Artificial Sequence
  Oligonucleotide primer for the detection of SNP TSC0014204
gtagggataaga

SEQ ID NO: 290066 - DNA, 12 bp, Artificial Sequence
  Oligonucleotide primer for the detection of SNP TSC0014205
cctcaactctac

SEQ ID NO: 290067 - DNA, 12 bp, Artificial Sequence
  Oligonucleotide primer for the detection of SNP TSC0014205
cctcgactctac

SEQ ID NO: 290068 - DNA, 12 bp, Artificial Sequence
  Oligonucleotide primer for the detection of SNP TSC0014205
gagggtgttggg

SEQ ID NO: 290069 - DNA, 12 bp, Artificial Sequence
  Oligonucleotide primer for the detection of SNP TSC0014205
gagggcgttggg

SEQ ID NO: 290070 - DNA, 12 bp, Artificial Sequence
  Oligonucleotide primer for the detection of SNP TSC0014205
gagggtgtcggg

SEQ ID NO: 290071 - DNA, 12 bp, Artificial Sequence
  Oligonucleotide primer for the detection of SNP TSC0014205
gagggcgtcggg

SEQ ID NO: 290072 - DNA, 12 bp, Artificial Sequence
  Oligonucleotide primer for the detection of SNP TSC0014206
aaaaatccttct

SEQ ID NO: 290073 - DNA, 12 bp, Artificial Sequence
  Oligonucleotide primer for the detection of SNP TSC0014206
aagaaagaaaaa

SEQ ID NO: 290074 - DNA, 12 bp, Artificial Sequence
  Oligonucleotide primer for the detection of SNP TSC0014206
aagagttttttt

SEQ ID NO: 290075 - DNA, 12 bp, Artificial Sequence
  Oligonucleotide primer for the detection of SNP TSC0014207
ttatactcttaa

SEQ ID NO: 290076 - DNA, 12 bp, Artificial Sequence
  Oligonucleotide primer for the detection of SNP TSC0014207
aaaacttttaaa

SEQ ID NO: 290077 - DNA, 12 bp, Artificial Sequence
  Oligonucleotide primer for the detection of SNP TSC0014207
ttatatttttga

SEQ ID NO: 290078 - DNA, 12 bp, Artificial Sequence
  Oligonucleotide primer for the detection of SNP TSC0014208
acacaaaaataa

SEQ ID NO: 290079 - DNA, 12 bp, Artificial Sequence
  Oligonucleotide primer for the detection of SNP TSC0014208
tttactttaaaa

SEQ ID NO: 290080 - DNA, 12 bp, Artificial Sequence
  Oligonucleotide primer for the detection of SNP TSC0014208
atataaaaataa

SEQ ID NO: 290081 - DNA, 12 bp, Artificial Sequence
  Oligonucleotide primer for the detection of SNP TSC0014210
aaactcctaacc

SEQ ID NO: 290082 - DNA, 12 bp, Artificial Sequence
  Oligonucleotide primer for the detection of SNP TSC0014210
gaactcctaacc

SEQ ID NO: 290083 - DNA, 12 bp, Artificial Sequence
  Oligonucleotide primer for the detection of SNP TSC0014210
ggtggattattt

SEQ ID NO: 290084 - DNA, 12 bp, Artificial Sequence
  Oligonucleotide primer for the detection of SNP TSC0014210
ggcggattattt

SEQ ID NO: 290085 - DNA, 12 bp, Artificial Sequence
  Oligonucleotide primer for the detection of SNP TSC0014210
aacaaatcactt

SEQ ID NO: 290086 - DNA, 12 bp, Artificial Sequence
  Oligonucleotide primer for the detection of SNP TSC0014210
aacgaatcactt

SEQ ID NO: 290087 - DNA, 12 bp, Artificial Sequence
  Oligonucleotide primer for the detection of SNP TSC0014210
aatttttgattt

SEQ ID NO: 290088 - DNA, 12 bp, Artificial Sequence
  Oligonucleotide primer for the detection of SNP TSC0014211
ataccatttata

SEQ ID NO: 290089 - DNA, 12 bp, Artificial Sequence
  Oligonucleotide primer for the detection of SNP TSC0014211
tattaaaagaat

SEQ ID NO: 290090 - DNA, 12 bp, Artificial Sequence
  Oligonucleotide primer for the detection of SNP TSC0014211
taccaaaaaaat

SEQ ID NO: 290091 - DNA, 12 bp, Artificial Sequence
  Oligonucleotide primer for the detection of SNP TSC0014211
gtattatttata

SEQ ID NO: 290092 - DNA, 12 bp, Artificial Sequence
  Oligonucleotide primer for the detection of SNP TSC0014212
ttacccaacaat

SEQ ID NO: 290093 - DNA, 12 bp, Artificial Sequence
  Oligonucleotide primer for the detection of SNP TSC0014212
ctattataccaa

SEQ ID NO: 290094 - DNA, 12 bp, Artificial Sequence
  Oligonucleotide primer for the detection of SNP TSC0014212
ttgtttaataat

SEQ ID NO: 290095 - DNA, 12 bp, Artificial Sequence
  Oligonucleotide primer for the detection of SNP TSC0014213
ctaaaaaatacc

SEQ ID NO: 290096 - DNA, 12 bp, Artificial Sequence
  Oligonucleotide primer for the detection of SNP TSC0014213
gatatagtgttt

SEQ ID NO: 290097 - DNA, 12 bp, Artificial Sequence
  Oligonucleotide primer for the detection of SNP TSC0014213
gatatagtgttc

SEQ ID NO: 290098 - DNA, 12 bp, Artificial Sequence
  Oligonucleotide primer for the detection of SNP TSC0014213
aaaatacaatat

SEQ ID NO: 290099 - DNA, 12 bp, Artificial Sequence
  Oligonucleotide primer for the detection of SNP TSC0014213
ttaggaagtatt

SEQ ID NO: 290100 - DNA, 12 bp, Artificial Sequence
  Oligonucleotide primer for the detection of SNP TSC0014216
atcttcatcaaa

SEQ ID NO: 290101 - DNA, 12 bp, Artificial Sequence
  Oligonucleotide primer for the detection of SNP TSC0014216
ttttgttttgaa

SEQ ID NO: 290102 - DNA, 12 bp, Artificial Sequence
  Oligonucleotide primer for the detection of SNP TSC0014216
ccctactctaaa

SEQ ID NO: 290103 - DNA, 12 bp, Artificial Sequence
  Oligonucleotide primer for the detection of SNP TSC0014216
tttttattaagt

SEQ ID NO: 290104 - DNA, 12 bp, Artificial Sequence
  Oligonucleotide primer for the detection of SNP TSC0014216
tttttattaagc

SEQ ID NO: 290105 - DNA, 12 bp, Artificial Sequence
  Oligonucleotide primer for the detection of SNP TSC0014217
caccaaaacaaa

SEQ ID NO: 290106 - DNA, 12 bp, Artificial Sequence
  Oligonucleotide primer for the detection of SNP TSC0014217
gattttagtgat

SEQ ID NO: 290107 - DNA, 12 bp, Artificial Sequence
  Oligonucleotide primer for the detection of SNP TSC0014217
gattttagcgat

SEQ ID NO: 290108 - DNA, 12 bp, Artificial Sequence
  Oligonucleotide primer for the detection of SNP TSC0014217
ctccaacaataa

SEQ ID NO: 290109 - DNA, 12 bp, Artificial Sequence
  Oligonucleotide primer for the detection of SNP TSC0014217
ctccaacgataa

SEQ ID NO: 290110 - DNA, 12 bp, Artificial Sequence
  Oligonucleotide primer for the detection of SNP TSC0014217
tattaggataga

SEQ ID NO: 290111 - DNA, 12 bp, Artificial Sequence
  Oligonucleotide primer for the detection of SNP TSC0014218
acaataacttca

SEQ ID NO: 290112 - DNA, 12 bp, Artificial Sequence
  Oligonucleotide primer for the detection of SNP TSC0014218
gtttttattttt

SEQ ID NO: 290113 - DNA, 12 bp, Artificial Sequence
  Oligonucleotide primer for the detection of SNP TSC0014218
acccccatcttc

SEQ ID NO: 290114 - DNA, 12 bp, Artificial Sequence
  Oligonucleotide primer for the detection of SNP TSC0014218
ataatggtttta

SEQ ID NO: 290115 - DNA, 12 bp, Artificial Sequence
  Oligonucleotide primer for the detection of SNP TSC0014219
ttggtttaaatt

SEQ ID NO: 290116 - DNA, 12 bp, Artificial Sequence
  Oligonucleotide primer for the detection of SNP TSC0014219
gaaaagaaaata

SEQ ID NO: 290117 - DNA, 12 bp, Artificial Sequence
  Oligonucleotide primer for the detection of SNP TSC0014220
cttttttttttt

SEQ ID NO: 290118 - DNA, 12 bp, Artificial Sequence
  Oligonucleotide primer for the detection of SNP TSC0014221
actttatccttc

SEQ ID NO: 290119 - DNA, 12 bp, Artificial Sequence
  Oligonucleotide primer for the detection of SNP TSC0014221
agataattaatg

SEQ ID NO: 290120 - DNA, 12 bp, Artificial Sequence
  Oligonucleotide primer for the detection of SNP TSC0014224
aaattattctaa

SEQ ID NO: 290121 - DNA, 12 bp, Artificial Sequence
  Oligonucleotide primer for the detection of SNP TSC0014224
aggttattttgg

SEQ ID NO: 290122 - DNA, 12 bp, Artificial Sequence
  Oligonucleotide primer for the detection of SNP TSC0014227
tttcttttacta

SEQ ID NO: 290123 - DNA, 12 bp, Artificial Sequence
  Oligonucleotide primer for the detection of SNP TSC0014227
tattataaagtt

SEQ ID NO: 290124 - DNA, 12 bp, Artificial Sequence
  Oligonucleotide primer for the detection of SNP TSC0014227
tattacaaaatc

SEQ ID NO: 290125 - DNA, 12 bp, Artificial Sequence
  Oligonucleotide primer for the detection of SNP TSC0014228
tataaacttcct

SEQ ID NO: 290126 - DNA, 12 bp, Artificial Sequence
  Oligonucleotide primer for the detection of SNP TSC0014228
tttttgtaatag

SEQ ID NO: 290127 - DNA, 12 bp, Artificial Sequence
  Oligonucleotide primer for the detection of SNP TSC0014228
ctcctacaataa

SEQ ID NO: 290128 - DNA, 12 bp, Artificial Sequence
  Oligonucleotide primer for the detection of SNP TSC0014228
tgtgaatttttt

SEQ ID NO: 290129 - DNA, 12 bp, Artificial Sequence
  Oligonucleotide primer for the detection of SNP TSC0014229
tctaaaatttta

SEQ ID NO: 290130 - DNA, 12 bp, Artificial Sequence
  Oligonucleotide primer for the detection of SNP TSC0014229
tcacctacttca

SEQ ID NO: 290131 - DNA, 12 bp, Artificial Sequence
  Oligonucleotide primer for the detection of SNP TSC0014229
gtttagggtttt

SEQ ID NO: 290132 - DNA, 12 bp, Artificial Sequence
  Oligonucleotide primer for the detection of SNP TSC0014230
tcaaacaaaaat

SEQ ID NO: 290133 - DNA, 12 bp, Artificial Sequence
  Oligonucleotide primer for the detection of SNP TSC0014230
tttgaaatgata

SEQ ID NO: 290134 - DNA, 12 bp, Artificial Sequence
  Oligonucleotide primer for the detection of SNP TSC0014231
accactcccttc

SEQ ID NO: 290135 - DNA, 12 bp, Artificial Sequence
  Oligonucleotide primer for the detection of SNP TSC0014231
gtagaggagtaa

SEQ ID NO: 290136 - DNA, 12 bp, Artificial Sequence
  Oligonucleotide primer for the detection of SNP TSC0014232
tttatataaaat

SEQ ID NO: 290137 - DNA, 12 bp, Artificial Sequence
  Oligonucleotide primer for the detection of SNP TSC0014232
ataaaatgataa

SEQ ID NO: 290138 - DNA, 12 bp, Artificial Sequence
  Oligonucleotide primer for the detection of SNP TSC0014233
taaaactacaca

SEQ ID NO: 290139 - DNA, 12 bp, Artificial Sequence
  Oligonucleotide primer for the detection of SNP TSC0014233
taaaactacacg

SEQ ID NO: 290140 - DNA, 12 bp, Artificial Sequence
  Oligonukleotid-Primer
gtttgaaaagtt

SEQ ID NO: 290141 - DNA, 12 bp, Artificial Sequence
  Oligonucleotide primer for the detection of SNP TSC0014233
gttcgaaaagtt

SEQ ID NO: 290142 - DNA, 12 bp, Artificial Sequence
  Oligonucleotide primer for the detection of SNP TSC0014233
cccaaaaaatca

SEQ ID NO: 290143 - DNA, 12 bp, Artificial Sequence
  Oligonucleotide primer for the detection of SNP TSC0014233
cccgaaaaatca

SEQ ID NO: 290144 - DNA, 12 bp, Artificial Sequence
  Oligonucleotide primer for the detection of SNP TSC0014233
gaagttatatgt

SEQ ID NO: 290145 - DNA, 12 bp, Artificial Sequence
  Oligonucleotide primer for the detection of SNP TSC0014233
gaagttatacgt

SEQ ID NO: 290146 - DNA, 12 bp, Artificial Sequence
  Oligonucleotide primer for the detection of SNP TSC0014234
taacttatcaac

SEQ ID NO: 290147 - DNA, 12 bp, Artificial Sequence
  Oligonucleotide primer for the detection of SNP TSC0014234
gtgagaaataaa

SEQ ID NO: 290148 - DNA, 12 bp, Artificial Sequence
  Oligonucleotide primer for the detection of SNP TSC0014235
attatactttat

SEQ ID NO: 290149 - DNA, 12 bp, Artificial Sequence
  Oligonucleotide primer for the detection of SNP TSC0014235
taatttaggttg

SEQ ID NO: 290150 - DNA, 12 bp, Artificial Sequence
  Oligonucleotide primer for the detection of SNP TSC0014236
attgattaatat

SEQ ID NO: 290151 - DNA, 12 bp, Artificial Sequence
  Oligonucleotide primer for the detection of SNP TSC0014236
attaactaacac

SEQ ID NO: 290152 - DNA, 12 bp, Artificial Sequence
  Oligonucleotide primer for the detection of SNP TSC0014236
tgggttttggga

SEQ ID NO: 290153 - DNA, 12 bp, Artificial Sequence
  Oligonucleotide primer for the detection of SNP TSC0014238
acacacaacaac

SEQ ID NO: 290154 - DNA, 12 bp, Artificial Sequence
  Oligonucleotide primer for the detection of SNP TSC0014238
acacacaacgac

SEQ ID NO: 290155 - DNA, 12 bp, Artificial Sequence
  Oligonucleotide primer for the detection of SNP TSC0014238
acacacgacaac

SEQ ID NO: 290156 - DNA, 12 bp, Artificial Sequence
  Oligonucleotide primer for the detection of SNP TSC0014238
acacgcaacaac

SEQ ID NO: 290157 - DNA, 12 bp, Artificial Sequence
  Oligonucleotide primer for the detection of SNP TSC0014238
acgcacaacaac

SEQ ID NO: 290158 - DNA, 12 bp, Artificial Sequence
  Oligonucleotide primer for the detection of SNP TSC0014238
acacacgacgac

SEQ ID NO: 290159 - DNA, 12 bp, Artificial Sequence
  Oligonucleotide primer for the detection of SNP TSC0014238
acacgcaacgac

SEQ ID NO: 290160 - DNA, 12 bp, Artificial Sequence
  Oligonucleotide primer for the detection of SNP TSC0014238
acgcacaacgac

SEQ ID NO: 290161 - DNA, 12 bp, Artificial Sequence
  Oligonucleotide primer for the detection of SNP TSC0014238
acacgcgacaac

SEQ ID NO: 290162 - DNA, 12 bp, Artificial Sequence
  Oligonucleotide primer for the detection of SNP TSC0014238
acgcacgacaac

SEQ ID NO: 290163 - DNA, 12 bp, Artificial Sequence
  Oligonucleotide primer for the detection of SNP TSC0014238
acgcgcaacaac

SEQ ID NO: 290164 - DNA, 12 bp, Artificial Sequence
  Oligonucleotide primer for the detection of SNP TSC0014238
acacgcgacgac

SEQ ID NO: 290165 - DNA, 12 bp, Artificial Sequence
  Oligonucleotide primer for the detection of SNP TSC0014238
acgcacgacgac

SEQ ID NO: 290166 - DNA, 12 bp, Artificial Sequence
  Oligonucleotide primer for the detection of SNP TSC0014238
acgcgcaacgac

SEQ ID NO: 290167 - DNA, 12 bp, Artificial Sequence
  Oligonucleotide primer for the detection of SNP TSC0014238
acgcgcgacaac

SEQ ID NO: 290168 - DNA, 12 bp, Artificial Sequence
  Oligonucleotide primer for the detection of SNP TSC0014238
acgcgcgacgac

SEQ ID NO: 290169 - DNA, 12 bp, Artificial Sequence
  Oligonucleotide primer for the detection of SNP TSC0014238
tagagttagtta

SEQ ID NO: 290170 - DNA, 12 bp, Artificial Sequence
  Oligonucleotide primer for the detection of SNP TSC0014238
caaaaccaacca

SEQ ID NO: 290171 - DNA, 12 bp, Artificial Sequence
  Oligonucleotide primer for the detection of SNP TSC0014238
gtgtgtggtggt

SEQ ID NO: 290172 - DNA, 12 bp, Artificial Sequence
  Oligonucleotide primer for the detection of SNP TSC0014238
gcgtgtggtggt

SEQ ID NO: 290173 - DNA, 12 bp, Artificial Sequence
  Oligonucleotide primer for the detection of SNP TSC0014238
gtgcgtggtggt

SEQ ID NO: 290174 - DNA, 12 bp, Artificial Sequence
  Oligonucleotide primer for the detection of SNP TSC0014238
gtgtgcggtggt

SEQ ID NO: 290175 - DNA, 12 bp, Artificial Sequence
  Oligonucleotide primer for the detection of SNP TSC0014238
gtgtgtggcggt

SEQ ID NO: 290176 - DNA, 12 bp, Artificial Sequence
  Oligonucleotide primer for the detection of SNP TSC0014238
gcgcgtggtggt

SEQ ID NO: 290177 - DNA, 12 bp, Artificial Sequence
  Oligonucleotide primer for the detection of SNP TSC0014238
gcgtgcggtggt

SEQ ID NO: 290178 - DNA, 12 bp, Artificial Sequence
  Oligonucleotide primer for the detection of SNP TSC0014238
gcgtgtggcggt

SEQ ID NO: 290179 - DNA, 12 bp, Artificial Sequence
  Oligonucleotide primer for the detection of SNP TSC0014238
gtgcgcggtggt

SEQ ID NO: 290180 - DNA, 12 bp, Artificial Sequence
  Oligonucleotide primer for the detection of SNP TSC0014238
gtgcgtggcggt

SEQ ID NO: 290181 - DNA, 12 bp, Artificial Sequence
  Oligonukleotid-Primer
gtgtgcggcggt

SEQ ID NO: 290182 - DNA, 12 bp, Artificial Sequence
  Oligonucleotide primer for the detection of SNP TSC0014238
gcgcgcggtggt

SEQ ID NO: 290183 - DNA, 12 bp, Artificial Sequence
  Oligonucleotide primer for the detection of SNP TSC0014238
gcgcgtggcggt

SEQ ID NO: 290184 - DNA, 12 bp, Artificial Sequence
  Oligonucleotide primer for the detection of SNP TSC0014238
gcgtgcggcggt

SEQ ID NO: 290185 - DNA, 12 bp, Artificial Sequence
  Oligonucleotide primer for the detection of SNP TSC0014238
gtgcgcggcggt

SEQ ID NO: 290186 - DNA, 12 bp, Artificial Sequence
  Oligonucleotide primer for the detection of SNP TSC0014238
gcgcgcggcggt

SEQ ID NO: 290187 - DNA, 12 bp, Artificial Sequence
  Oligonucleotide primer for the detection of SNP TSC0014241
taaatcaataat

SEQ ID NO: 290188 - DNA, 12 bp, Artificial Sequence
  Oligonucleotide primer for the detection of SNP TSC0014241
taaggtattttt

SEQ ID NO: 290189 - DNA, 12 bp, Artificial Sequence
  Oligonucleotide primer for the detection of SNP TSC0014241
acaaaacatccc

SEQ ID NO: 290190 - DNA, 12 bp, Artificial Sequence
  Oligonucleotide primer for the detection of SNP TSC0014241
gttagtagtttt

SEQ ID NO: 290191 - DNA, 12 bp, Artificial Sequence
  Oligonucleotide primer for the detection of SNP TSC0014241
gttagtagtttc

SEQ ID NO: 290192 - DNA, 12 bp, Artificial Sequence
  Oligonucleotide primer for the detection of SNP TSC0014242
aaaaatctatcc

SEQ ID NO: 290193 - DNA, 12 bp, Artificial Sequence
  Oligonucleotide primer for the detection of SNP TSC0014242
gtgtttagttaa

SEQ ID NO: 290194 - DNA, 12 bp, Artificial Sequence
  Oligonucleotide primer for the detection of SNP TSC0014242
gcgtttagttaa

SEQ ID NO: 290195 - DNA, 12 bp, Artificial Sequence
  Oligonucleotide primer for the detection of SNP TSC0014243
ataaaatcacta

SEQ ID NO: 290196 - DNA, 12 bp, Artificial Sequence
  Oligonucleotide primer for the detection of SNP TSC0014243
aatgtgataggg

SEQ ID NO: 290197 - DNA, 12 bp, Artificial Sequence
  Oligonucleotide primer for the detection of SNP TSC0014243
aatataataaaa

SEQ ID NO: 290198 - DNA, 12 bp, Artificial Sequence
  Oligonucleotide primer for the detection of SNP TSC0014243
gatgaaattatt

SEQ ID NO: 290199 - DNA, 12 bp, Artificial Sequence
  Oligonucleotide primer for the detection of SNP TSC0014244
ttacaatcatcc

SEQ ID NO: 290200 - DNA, 12 bp, Artificial Sequence
  Oligonucleotide primer for the detection of SNP TSC0014244
agtgatagtata

SEQ ID NO: 290201 - DNA, 12 bp, Artificial Sequence
  Oligonucleotide primer for the detection of SNP TSC0014246
aaattctcccat

SEQ ID NO: 290202 - DNA, 12 bp, Artificial Sequence
  Oligonucleotide primer for the detection of SNP TSC0014246
aaattctcccgt

SEQ ID NO: 290203 - DNA, 12 bp, Artificial Sequence
  Oligonucleotide primer for the detection of SNP TSC0014246
ttttagattaag

SEQ ID NO: 290204 - DNA, 12 bp, Artificial Sequence
  Oligonucleotide primer for the detection of SNP TSC0014247
ctaataccctaa

SEQ ID NO: 290205 - DNA, 12 bp, Artificial Sequence
  Oligonucleotide primer for the detection of SNP TSC0014247
tgttgtttttga

SEQ ID NO: 290206 - DNA, 12 bp, Artificial Sequence
  Oligonucleotide primer for the detection of SNP TSC0014247
cgttgtttttga

SEQ ID NO: 290207 - DNA, 12 bp, Artificial Sequence
  Oligonucleotide primer for the detection of SNP TSC0014247
tgtcgtttttga

SEQ ID NO: 290208 - DNA, 12 bp, Artificial Sequence
  Oligonucleotide primer for the detection of SNP TSC0014247
tgttgttttcga

SEQ ID NO: 290209 - DNA, 12 bp, Artificial Sequence
  Oligonucleotide primer for the detection of SNP TSC0014247
cgtcgtttttga

SEQ ID NO: 290210 - DNA, 12 bp, Artificial Sequence
  Oligonucleotide primer for the detection of SNP TSC0014247
cgttgttttcga

SEQ ID NO: 290211 - DNA, 12 bp, Artificial Sequence
  Oligonucleotide primer for the detection of SNP TSC0014247
tgtcgttttcga

SEQ ID NO: 290212 - DNA, 12 bp, Artificial Sequence
  Oligonucleotide primer for the detection of SNP TSC0014247
cgtcgttttcga

SEQ ID NO: 290213 - DNA, 12 bp, Artificial Sequence
  Oligonucleotide primer for the detection of SNP TSC0014247
caccacccccaa

SEQ ID NO: 290214 - DNA, 12 bp, Artificial Sequence
  Oligonucleotide primer for the detection of SNP TSC0014247
caccacccccga

SEQ ID NO: 290215 - DNA, 12 bp, Artificial Sequence
  Oligonucleotide primer for the detection of SNP TSC0014247
caccgcccccaa

SEQ ID NO: 290216 - DNA, 12 bp, Artificial Sequence
  Oligonucleotide primer for the detection of SNP TSC0014247
cgccacccccaa

SEQ ID NO: 290217 - DNA, 12 bp, Artificial Sequence
  Oligonucleotide primer for the detection of SNP TSC0014247
caccgcccccga

SEQ ID NO: 290218 - DNA, 12 bp, Artificial Sequence
  Oligonucleotide primer for the detection of SNP TSC0014247
cgccacccccga

SEQ ID NO: 290219 - DNA, 12 bp, Artificial Sequence
  Oligonucleotide primer for the detection of SNP TSC0014247
cgccgcccccaa

SEQ ID NO: 290220 - DNA, 12 bp, Artificial Sequence
  Oligonucleotide primer for the detection of SNP TSC0014247
cgccgcccccga

SEQ ID NO: 290221 - DNA, 12 bp, Artificial Sequence
  Oligonucleotide primer for the detection of SNP TSC0014247
ttggtgttttag

SEQ ID NO: 290222 - DNA, 12 bp, Artificial Sequence
  Oligonucleotide primer for the detection of SNP TSC0014248
catccctactca

SEQ ID NO: 290223 - DNA, 12 bp, Artificial Sequence
  Oligonucleotide primer for the detection of SNP TSC0014248
ggttatagtttt

SEQ ID NO: 290224 - DNA, 12 bp, Artificial Sequence
  Oligonucleotide primer for the detection of SNP TSC0014248
aactacaactcc

SEQ ID NO: 290225 - DNA, 12 bp, Artificial Sequence
  Oligonucleotide primer for the detection of SNP TSC0014249
accaaacctaca

SEQ ID NO: 290226 - DNA, 12 bp, Artificial Sequence
  Oligonucleotide primer for the detection of SNP TSC0014249
gccaaacctaca

SEQ ID NO: 290227 - DNA, 12 bp, Artificial Sequence
  Oligonucleotide primer for the detection of SNP TSC0014249
aatttgggagag

SEQ ID NO: 290228 - DNA, 12 bp, Artificial Sequence
  Oligonucleotide primer for the detection of SNP TSC0014249
tgttaaatttgt

SEQ ID NO: 290229 - DNA, 12 bp, Artificial Sequence
  Oligonucleotide primer for the detection of SNP TSC0014249
cgttaaatttgt

SEQ ID NO: 290230 - DNA, 12 bp, Artificial Sequence
  Oligonucleotide primer for the detection of SNP TSC0014250
atccatacaata

SEQ ID NO: 290231 - DNA, 12 bp, Artificial Sequence
  Oligonucleotide primer for the detection of SNP TSC0014250
gtggatagttat

SEQ ID NO: 290232 - DNA, 12 bp, Artificial Sequence
  Oligonucleotide primer for the detection of SNP TSC0014250
ataaacaatcac

SEQ ID NO: 290233 - DNA, 12 bp, Artificial Sequence
  Oligonucleotide primer for the detection of SNP TSC0014250
atttatatagtg

SEQ ID NO: 290234 - DNA, 12 bp, Artificial Sequence
  Oligonukleotid-Primer
cattatacacac

SEQ ID NO: 290235 - DNA, 12 bp, Artificial Sequence
  Oligonucleotide primer for the detection of SNP TSC0014251
tagtagaataag

SEQ ID NO: 290236 - DNA, 12 bp, Artificial Sequence
  Oligonucleotide primer for the detection of SNP TSC0014251
caacaaaacaaa

SEQ ID NO: 290237 - DNA, 12 bp, Artificial Sequence
  Oligonucleotide primer for the detection of SNP TSC0014251
tattgtgtatat

SEQ ID NO: 290238 - DNA, 12 bp, Artificial Sequence
  Oligonucleotide primer for the detection of SNP TSC0014256
cctaaaattcaa

SEQ ID NO: 290239 - DNA, 12 bp, Artificial Sequence
  Oligonucleotide primer for the detection of SNP TSC0014256
aaagatatttgt

SEQ ID NO: 290240 - DNA, 12 bp, Artificial Sequence
  Oligonucleotide primer for the detection of SNP TSC0014256
caaaaacatcta

SEQ ID NO: 290241 - DNA, 12 bp, Artificial Sequence
  Oligonucleotide primer for the detection of SNP TSC0014256
tatttaaaattt

SEQ ID NO: 290242 - DNA, 12 bp, Artificial Sequence
  Oligonucleotide primer for the detection of SNP TSC0014257
tttataaaaact

SEQ ID NO: 290243 - DNA, 12 bp, Artificial Sequence
  Oligonucleotide primer for the detection of SNP TSC0014257
aggatttggtta

SEQ ID NO: 290244 - DNA, 12 bp, Artificial Sequence
  Oligonucleotide primer for the detection of SNP TSC0014258
ctaaaacataaa

SEQ ID NO: 290245 - DNA, 12 bp, Artificial Sequence
  Oligonucleotide primer for the detection of SNP TSC0014258
gtttagttatag

SEQ ID NO: 290246 - DNA, 12 bp, Artificial Sequence
  Oligonucleotide primer for the detection of SNP TSC0014258
attcaaccataa

SEQ ID NO: 290247 - DNA, 12 bp, Artificial Sequence
  Oligonucleotide primer for the detection of SNP TSC0014258
ttggaatataga

SEQ ID NO: 290248 - DNA, 12 bp, Artificial Sequence
  Oligonucleotide primer for the detection of SNP TSC0014259
cccaaatattat

SEQ ID NO: 290249 - DNA, 12 bp, Artificial Sequence
  Oligonucleotide primer for the detection of SNP TSC0014259
taagaggtttta

SEQ ID NO: 290250 - DNA, 12 bp, Artificial Sequence
  Oligonucleotide primer for the detection of SNP TSC0014260
caaatatcaaaa

SEQ ID NO: 290251 - DNA, 12 bp, Artificial Sequence
  Oligonucleotide primer for the detection of SNP TSC0014260
tttggagatttt

SEQ ID NO: 290252 - DNA, 12 bp, Artificial Sequence
  Oligonucleotide primer for the detection of SNP TSC0014260
acctcttaaaaa

SEQ ID NO: 290253 - DNA, 12 bp, Artificial Sequence
  Oligonucleotide primer for the detection of SNP TSC0014260
tgtagatgttag

SEQ ID NO: 290254 - DNA, 12 bp, Artificial Sequence
  Oligonucleotide primer for the detection of SNP TSC0014261
caacacacaaat

SEQ ID NO: 290255 - DNA, 12 bp, Artificial Sequence
  Oligonucleotide primer for the detection of SNP TSC0014261
gagtatatgaga

SEQ ID NO: 290256 - DNA, 12 bp, Artificial Sequence
  Oligonucleotide primer for the detection of SNP TSC0014261
gagtatacgaga

SEQ ID NO: 290257 - DNA, 12 bp, Artificial Sequence
  Oligonucleotide primer for the detection of SNP TSC0014262
cacaaaacctaa

SEQ ID NO: 290258 - DNA, 12 bp, Artificial Sequence
  Oligonucleotide primer for the detection of SNP TSC0014262
cacgaaacctaa

SEQ ID NO: 290259 - DNA, 12 bp, Artificial Sequence
  Oligonucleotide primer for the detection of SNP TSC0014262
gttgttgggtgg

SEQ ID NO: 290260 - DNA, 12 bp, Artificial Sequence
  Oligonucleotide primer for the detection of SNP TSC0014262
attactaaataa

SEQ ID NO: 290261 - DNA, 12 bp, Artificial Sequence
  Oligonucleotide primer for the detection of SNP TSC0014262
tatggagtttgg

SEQ ID NO: 290262 - DNA, 12 bp, Artificial Sequence
  Oligonucleotide primer for the detection of SNP TSC0014262
tacggagtttgg

SEQ ID NO: 290263 - DNA, 12 bp, Artificial Sequence
  Oligonucleotide primer for the detection of SNP TSC0014264
aacaacaaacta

SEQ ID NO: 290264 - DNA, 12 bp, Artificial Sequence
  Oligonucleotide primer for the detection of SNP TSC0014264
aacgacaaacta

SEQ ID NO: 290265 - DNA, 12 bp, Artificial Sequence
  Oligonucleotide primer for the detection of SNP TSC0014264
tttatgggggtt

SEQ ID NO: 290266 - DNA, 12 bp, Artificial Sequence
  Oligonucleotide primer for the detection of SNP TSC0014265
aatacacaatta

SEQ ID NO: 290267 - DNA, 12 bp, Artificial Sequence
  Oligonucleotide primer for the detection of SNP TSC0014265
gtttattaatgt

SEQ ID NO: 290268 - DNA, 12 bp, Artificial Sequence
  Oligonucleotide primer for the detection of SNP TSC0014265
attcactaatat

SEQ ID NO: 290269 - DNA, 12 bp, Artificial Sequence
  Oligonucleotide primer for the detection of SNP TSC0014265
tagtgtataatt

SEQ ID NO: 290270 - DNA, 12 bp, Artificial Sequence
  Oligonucleotide primer for the detection of SNP TSC0014266
attactactcac

SEQ ID NO: 290271 - DNA, 12 bp, Artificial Sequence
  Oligonucleotide primer for the detection of SNP TSC0014266
ttttattataga

SEQ ID NO: 290272 - DNA, 12 bp, Artificial Sequence
  Oligonucleotide primer for the detection of SNP TSC0014267
tataatcaaccc

SEQ ID NO: 290273 - DNA, 12 bp, Artificial Sequence
  Oligonucleotide primer for the detection of SNP TSC0014267
tatgattagttt

SEQ ID NO: 290274 - DNA, 12 bp, Artificial Sequence
  Oligonucleotide primer for the detection of SNP TSC0014268
ctaaataataat

SEQ ID NO: 290275 - DNA, 12 bp, Artificial Sequence
  Oligonucleotide primer for the detection of SNP TSC0014268
tgtaagaattga

SEQ ID NO: 290276 - DNA, 12 bp, Artificial Sequence
  Oligonucleotide primer for the detection of SNP TSC0014269
ctattttaatcc

SEQ ID NO: 290277 - DNA, 12 bp, Artificial Sequence
  Oligonucleotide primer for the detection of SNP TSC0014269
tgtgttttttta

SEQ ID NO: 290278 - DNA, 12 bp, Artificial Sequence
  Oligonucleotide primer for the detection of SNP TSC0014270
ctactaatctta

SEQ ID NO: 290279 - DNA, 12 bp, Artificial Sequence
  Oligonucleotide primer for the detection of SNP TSC0014270
gggttggttttt

SEQ ID NO: 290280 - DNA, 12 bp, Artificial Sequence
  Oligonucleotide primer for the detection of SNP TSC0014270
aaactaaccctc

SEQ ID NO: 290281 - DNA, 12 bp, Artificial Sequence
  Oligonucleotide primer for the detection of SNP TSC0014270
ttattggttttg

SEQ ID NO: 290282 - DNA, 12 bp, Artificial Sequence
  Oligonucleotide primer for the detection of SNP TSC0014271
cattctaaatac

SEQ ID NO: 290283 - DNA, 12 bp, Artificial Sequence
  Oligonucleotide primer for the detection of SNP TSC0014271
gggtaaggaggg

SEQ ID NO: 290284 - DNA, 12 bp, Artificial Sequence
  Oligonucleotide primer for the detection of SNP TSC0014272
taaaaattaaaa

SEQ ID NO: 290285 - DNA, 12 bp, Artificial Sequence
  Oligonucleotide primer for the detection of SNP TSC0014272
tcctctttattt

SEQ ID NO: 290286 - DNA, 12 bp, Artificial Sequence
  Oligonucleotide primer for the detection of SNP TSC0014272
tgggaattgggg

SEQ ID NO: 290287 - DNA, 12 bp, Artificial Sequence
  Oligonucleotide primer for the detection of SNP TSC0014273
ataaaccaccaa

SEQ ID NO: 290288 - DNA, 12 bp, Artificial Sequence
  Oligonucleotide primer for the detection of SNP TSC0014273
atttattagggt

SEQ ID NO: 290289 - DNA, 12 bp, Artificial Sequence
  Oligonucleotide primer for the detection of SNP TSC0014273
actcaccaaaac

SEQ ID NO: 290290 - DNA, 12 bp, Artificial Sequence
  Oligonucleotide primer for the detection of SNP TSC0014273
gtgagttattag

SEQ ID NO: 290291 - DNA, 12 bp, Artificial Sequence
  Oligonucleotide primer for the detection of SNP TSC0014274
cctaaatcatct

SEQ ID NO: 290292 - DNA, 12 bp, Artificial Sequence
  Oligonucleotide primer for the detection of SNP TSC0014274
gtaatgtttgga

SEQ ID NO: 290293 - DNA, 12 bp, Artificial Sequence
  Oligonucleotide primer for the detection of SNP TSC0014275
acccaacacaat

SEQ ID NO: 290294 - DNA, 12 bp, Artificial Sequence
  Oligonucleotide primer for the detection of SNP TSC0014275
tgtgtgtgttgg

SEQ ID NO: 290295 - DNA, 12 bp, Artificial Sequence
  Oligonucleotide primer for the detection of SNP TSC0014276
tcaacactaccc

SEQ ID NO: 290296 - DNA, 12 bp, Artificial Sequence
  Oligonucleotide primer for the detection of SNP TSC0014276
tgagtgttagga

SEQ ID NO: 290297 - DNA, 12 bp, Artificial Sequence
  Oligonucleotide primer for the detection of SNP TSC0014277
aaaacccctaaa

SEQ ID NO: 290298 - DNA, 12 bp, Artificial Sequence
  Oligonucleotide primer for the detection of SNP TSC0014277
cactaccccctc

SEQ ID NO: 290299 - DNA, 12 bp, Artificial Sequence
  Oligonucleotide primer for the detection of SNP TSC0014277
ggggtttttgag

SEQ ID NO: 290300 - DNA, 12 bp, Artificial Sequence
  Oligonucleotide primer for the detection of SNP TSC0014278
aaataatcttaa

SEQ ID NO: 290301 - DNA, 12 bp, Artificial Sequence
  Oligonucleotide primer for the detection of SNP TSC0014278
gaggttgtagtg

SEQ ID NO: 290302 - DNA, 12 bp, Artificial Sequence
  Oligonucleotide primer for the detection of SNP TSC0014278
gagtgattttgg

SEQ ID NO: 290303 - DNA, 12 bp, Artificial Sequence
  Oligonucleotide primer for the detection of SNP TSC0014279
tcttaaaaataa

SEQ ID NO: 290304 - DNA, 12 bp, Artificial Sequence
  Oligonucleotide primer for the detection of SNP TSC0014279
cataccttttca

SEQ ID NO: 290305 - DNA, 12 bp, Artificial Sequence
  Oligonucleotide primer for the detection of SNP TSC0014279
tttggaagtgat

SEQ ID NO: 290306 - DNA, 12 bp, Artificial Sequence
  Oligonucleotide primer for the detection of SNP TSC0014280
tatccctttcta

SEQ ID NO: 290307 - DNA, 12 bp, Artificial Sequence
  Oligonucleotide primer for the detection of SNP TSC0014280
gtagaagtagtt

SEQ ID NO: 290308 - DNA, 12 bp, Artificial Sequence
  Oligonucleotide primer for the detection of SNP TSC0014280
aataaaaacaac

SEQ ID NO: 290309 - DNA, 12 bp, Artificial Sequence
  Oligonucleotide primer for the detection of SNP TSC0014281
tcaacacaatat

SEQ ID NO: 290310 - DNA, 12 bp, Artificial Sequence
  Oligonucleotide primer for the detection of SNP TSC0014282
agagtttttttt

SEQ ID NO: 290311 - DNA, 12 bp, Artificial Sequence
  Oligonucleotide primer for the detection of SNP TSC0014282
aaaacttccttc

SEQ ID NO: 290312 - DNA, 12 bp, Artificial Sequence
  Oligonucleotide primer for the detection of SNP TSC0014282
agaggatgtgag

SEQ ID NO: 290313 - DNA, 12 bp, Artificial Sequence
  Oligonucleotide primer for the detection of SNP TSC0014284
taactccattcc

SEQ ID NO: 290314 - DNA, 12 bp, Artificial Sequence
  Oligonucleotide primer for the detection of SNP TSC0014284
aattttagggaa

SEQ ID NO: 290315 - DNA, 12 bp, Artificial Sequence
  Oligonucleotide primer for the detection of SNP TSC0014285
aaccttaaaaaa

SEQ ID NO: 290316 - DNA, 12 bp, Artificial Sequence
  Oligonucleotide primer for the detection of SNP TSC0014285
catttaatttta

SEQ ID NO: 290317 - DNA, 12 bp, Artificial Sequence
  Oligonucleotide primer for the detection of SNP TSC0014285
attttgaggggt

SEQ ID NO: 290318 - DNA, 12 bp, Artificial Sequence
  Oligonucleotide primer for the detection of SNP TSC0014287
aacctctcaccc

SEQ ID NO: 290319 - DNA, 12 bp, Artificial Sequence
  Oligonucleotide primer for the detection of SNP TSC0014287
gagagaaaatga

SEQ ID NO: 290320 - DNA, 12 bp, Artificial Sequence
  Oligonucleotide primer for the detection of SNP TSC0014288
tatactaaactt

SEQ ID NO: 290321 - DNA, 12 bp, Artificial Sequence
  Oligonucleotide primer for the detection of SNP TSC0014288
ttttgtaataaa

SEQ ID NO: 290322 - DNA, 12 bp, Artificial Sequence
  Oligonucleotide primer for the detection of SNP TSC0014288
ctctacaataaa

SEQ ID NO: 290323 - DNA, 12 bp, Artificial Sequence
  Oligonucleotide primer for the detection of SNP TSC0014289
attaatcaacac

SEQ ID NO: 290324 - DNA, 12 bp, Artificial Sequence
  Oligonucleotide primer for the detection of SNP TSC0014289
tttgaagggtta

SEQ ID NO: 290325 - DNA, 12 bp, Artificial Sequence
  Oligonucleotide primer for the detection of SNP TSC0014295
aactaaaattcc

SEQ ID NO: 290326 - DNA, 12 bp, Artificial Sequence
  Oligonucleotide primer for the detection of SNP TSC0014295
aatgagtatttg

SEQ ID NO: 290327 - DNA, 12 bp, Artificial Sequence
  Oligonucleotide primer for the detection of SNP TSC0014296
acctcaatctcc

SEQ ID NO: 290328 - DNA, 12 bp, Artificial Sequence
  Oligonucleotide primer for the detection of SNP TSC0014296
ggtttgaagatg

SEQ ID NO: 290329 - DNA, 12 bp, Artificial Sequence
  Oligonucleotide primer for the detection of SNP TSC0014296
aacttaaaaata

SEQ ID NO: 290330 - DNA, 12 bp, Artificial Sequence
  Oligonucleotide primer for the detection of SNP TSC0014297
agaaaataagga

SEQ ID NO: 290331 - DNA, 12 bp, Artificial Sequence
  Oligonucleotide primer for the detection of SNP TSC0014297
tggagtgtaatg

SEQ ID NO: 290332 - DNA, 12 bp, Artificial Sequence
  Oligonucleotide primer for the detection of SNP TSC0014299
caaacatatacc

SEQ ID NO: 290333 - DNA, 12 bp, Artificial Sequence
  Oligonucleotide primer for the detection of SNP TSC0014299
caaacgtatacc

SEQ ID NO: 290334 - DNA, 12 bp, Artificial Sequence
  Oligonucleotide primer for the detection of SNP TSC0014301
ataaatctcccc

SEQ ID NO: 290335 - DNA, 12 bp, Artificial Sequence
  Oligonucleotide primer for the detection of SNP TSC0014301
gttgggtataga

SEQ ID NO: 290336 - DNA, 12 bp, Artificial Sequence
  Oligonucleotide primer for the detection of SNP TSC0014303
tttatagaggta

SEQ ID NO: 290337 - DNA, 12 bp, Artificial Sequence
  Oligonucleotide primer for the detection of SNP TSC0014304
tctacccaacct

SEQ ID NO: 290338 - DNA, 12 bp, Artificial Sequence
  Oligonucleotide primer for the detection of SNP TSC0014311
cccaaaaaaacc

SEQ ID NO: 290339 - DNA, 12 bp, Artificial Sequence
  Oligonucleotide primer for the detection of SNP TSC0014311
gttttggaaggg

SEQ ID NO: 290340 - DNA, 12 bp, Artificial Sequence
  Oligonucleotide primer for the detection of SNP TSC0014317
gtttcacaaacc

SEQ ID NO: 290341 - DNA, 12 bp, Artificial Sequence
  Oligonucleotide primer for the detection of SNP TSC0014317
ttagaaggaaaa

SEQ ID NO: 290342 - DNA, 12 bp, Artificial Sequence
  Oligonucleotide primer for the detection of SNP TSC0014317
gttttataggtt

SEQ ID NO: 290343 - DNA, 12 bp, Artificial Sequence
  Oligonucleotide primer for the detection of SNP TSC0014318
cacttccccaca

SEQ ID NO: 290344 - DNA, 12 bp, Artificial Sequence
  Oligonucleotide primer for the detection of SNP TSC0014318
cacttccccacg

SEQ ID NO: 290345 - DNA, 12 bp, Artificial Sequence
  Oligonucleotide primer for the detection of SNP TSC0014318
cacttccccgca

SEQ ID NO: 290346 - DNA, 12 bp, Artificial Sequence
  Oligonucleotide primer for the detection of SNP TSC0014318
cgcttccccaca

SEQ ID NO: 290347 - DNA, 12 bp, Artificial Sequence
  Oligonucleotide primer for the detection of SNP TSC0014318
cacttccccgcg

SEQ ID NO: 290348 - DNA, 12 bp, Artificial Sequence
  Oligonucleotide primer for the detection of SNP TSC0014318
cgcttccccacg

SEQ ID NO: 290349 - DNA, 12 bp, Artificial Sequence
  Oligonucleotide primer for the detection of SNP TSC0014318
cgcttccccgca

SEQ ID NO: 290350 - DNA, 12 bp, Artificial Sequence
  Oligonucleotide primer for the detection of SNP TSC0014318
cgcttccccgcg

SEQ ID NO: 290351 - DNA, 12 bp, Artificial Sequence
  Oligonucleotide primer for the detection of SNP TSC0014318
ggttggggtgtt

SEQ ID NO: 290352 - DNA, 12 bp, Artificial Sequence
  Oligonucleotide primer for the detection of SNP TSC0014318
ggttggggcgtt

SEQ ID NO: 290353 - DNA, 12 bp, Artificial Sequence
  Oligonucleotide primer for the detection of SNP TSC0014318
ggttggggtgtc

SEQ ID NO: 290354 - DNA, 12 bp, Artificial Sequence
  Oligonucleotide primer for the detection of SNP TSC0014318
ggttggggcgtc

SEQ ID NO: 290355 - DNA, 12 bp, Artificial Sequence
  Oligonucleotide primer for the detection of SNP TSC0014318
aactaaaacacc

SEQ ID NO: 290356 - DNA, 12 bp, Artificial Sequence
  Oligonucleotide primer for the detection of SNP TSC0014318
aactaaaacgcc

SEQ ID NO: 290357 - DNA, 12 bp, Artificial Sequence
  Oligonucleotide primer for the detection of SNP TSC0014318
gactaaaacacc

SEQ ID NO: 290358 - DNA, 12 bp, Artificial Sequence
  Oligonucleotide primer for the detection of SNP TSC0014318
gactaaaacgcc

SEQ ID NO: 290359 - DNA, 12 bp, Artificial Sequence
  Oligonucleotide primer for the detection of SNP TSC0014318
tgtttttttgtg

SEQ ID NO: 290360 - DNA, 12 bp, Artificial Sequence
  Oligonucleotide primer for the detection of SNP TSC0014318
cgtttttttgtg

SEQ ID NO: 290361 - DNA, 12 bp, Artificial Sequence
  Oligonucleotide primer for the detection of SNP TSC0014318
tgttttttcgtg

SEQ ID NO: 290362 - DNA, 12 bp, Artificial Sequence
  Oligonucleotide primer for the detection of SNP TSC0014318
tgtttttttgcg

SEQ ID NO: 290363 - DNA, 12 bp, Artificial Sequence
  Oligonucleotide primer for the detection of SNP TSC0014318
cgttttttcgtg

SEQ ID NO: 290364 - DNA, 12 bp, Artificial Sequence
  Oligonucleotide primer for the detection of SNP TSC0014318
cgtttttttgcg

SEQ ID NO: 290365 - DNA, 12 bp, Artificial Sequence
  Oligonucleotide primer for the detection of SNP TSC0014318
tgttttttcgcg

SEQ ID NO: 290366 - DNA, 12 bp, Artificial Sequence
  Oligonucleotide primer for the detection of SNP TSC0014318
cgttttttcgcg

SEQ ID NO: 290367 - DNA, 12 bp, Artificial Sequence
  Oligonucleotide primer for the detection of SNP TSC0014319
ccaaacaaaaca

SEQ ID NO: 290368 - DNA, 12 bp, Artificial Sequence
  Oligonucleotide primer for the detection of SNP TSC0014319
ttttttaatatt

SEQ ID NO: 290369 - DNA, 12 bp, Artificial Sequence
  Oligonucleotide primer for the detection of SNP TSC0014319
tctcccaacact

SEQ ID NO: 290370 - DNA, 12 bp, Artificial Sequence
  Oligonucleotide primer for the detection of SNP TSC0014319
ttaggtaaggta

SEQ ID NO: 290371 - DNA, 12 bp, Artificial Sequence
  Oligonucleotide primer for the detection of SNP TSC0014322
atctaactctat

SEQ ID NO: 290372 - DNA, 12 bp, Artificial Sequence
  Oligonucleotide primer for the detection of SNP TSC0014322
ctccaacctaaa

SEQ ID NO: 290373 - DNA, 12 bp, Artificial Sequence
  Oligonucleotide primer for the detection of SNP TSC0014322
tttggttttgtt

SEQ ID NO: 290374 - DNA, 12 bp, Artificial Sequence
  Oligonucleotide primer for the detection of SNP TSC0014322
tttggttttgtc

SEQ ID NO: 290375 - DNA, 12 bp, Artificial Sequence
  Oligonucleotide primer for the detection of SNP TSC0014323
tcaactaataat

SEQ ID NO: 290376 - DNA, 12 bp, Artificial Sequence
  Oligonucleotide primer for the detection of SNP TSC0014323
ttagaattttgg

SEQ ID NO: 290377 - DNA, 12 bp, Artificial Sequence
  Oligonucleotide primer for the detection of SNP TSC0014324
gaaaaaaaaata

SEQ ID NO: 290378 - DNA, 12 bp, Artificial Sequence
  Oligonucleotide primer for the detection of SNP TSC0014324
agttaaaaaatt

SEQ ID NO: 290379 - DNA, 12 bp, Artificial Sequence
  Oligonucleotide primer for the detection of SNP TSC0014324
aaccaaaaaatt

SEQ ID NO: 290380 - DNA, 12 bp, Artificial Sequence
  Oligonucleotide primer for the detection of SNP TSC0014328
tgtaattttagg

SEQ ID NO: 290381 - DNA, 12 bp, Artificial Sequence
  Oligonucleotide primer for the detection of SNP TSC0014330
aaccgccacacc

SEQ ID NO: 290382 - DNA, 12 bp, Artificial Sequence
  Oligonucleotide primer for the detection of SNP TSC0014330
aaccgccacgcc

SEQ ID NO: 290383 - DNA, 12 bp, Artificial Sequence
  Oligonucleotide primer for the detection of SNP TSC0014330
gtatttatttgg

SEQ ID NO: 290384 - DNA, 12 bp, Artificial Sequence
  Oligonucleotide primer for the detection of SNP TSC0014330
acatctacttaa

SEQ ID NO: 290385 - DNA, 12 bp, Artificial Sequence
  Oligonucleotide primer for the detection of SNP TSC0014330
ggttgttatgtt

SEQ ID NO: 290386 - DNA, 12 bp, Artificial Sequence
  Oligonucleotide primer for the detection of SNP TSC0014330
ggtcgttatgtt

SEQ ID NO: 290387 - DNA, 12 bp, Artificial Sequence
  Oligonucleotide primer for the detection of SNP TSC0014330
ggttgttacgtt

SEQ ID NO: 290388 - DNA, 12 bp, Artificial Sequence
  Oligonucleotide primer for the detection of SNP TSC0014330
ggtcgttacgtt

SEQ ID NO: 290389 - DNA, 12 bp, Artificial Sequence
  Oligonucleotide primer for the detection of SNP TSC0014331
ctccaaaattca

SEQ ID NO: 290390 - DNA, 12 bp, Artificial Sequence
  Oligonucleotide primer for the detection of SNP TSC0014331
ttttagggttta

SEQ ID NO: 290391 - DNA, 12 bp, Artificial Sequence
  Oligonucleotide primer for the detection of SNP TSC0014332
aaaaatacccac

SEQ ID NO: 290392 - DNA, 12 bp, Artificial Sequence
  Oligonucleotide primer for the detection of SNP TSC0014332
aaaaatacccgc

SEQ ID NO: 290393 - DNA, 12 bp, Artificial Sequence
  Oligonucleotide primer for the detection of SNP TSC0014332
taaatgattatg

SEQ ID NO: 290394 - DNA, 12 bp, Artificial Sequence
  Oligonucleotide primer for the detection of SNP TSC0014333
tcctctccatcc

SEQ ID NO: 290395 - DNA, 12 bp, Artificial Sequence
  Oligonucleotide primer for the detection of SNP TSC0014333
tttttttgttag

SEQ ID NO: 290396 - DNA, 12 bp, Artificial Sequence
  Oligonucleotide primer for the detection of SNP TSC0014333
cccctctactaa

SEQ ID NO: 290397 - DNA, 12 bp, Artificial Sequence
  Oligonucleotide primer for the detection of SNP TSC0014334
cttcttaatcta

SEQ ID NO: 290398 - DNA, 12 bp, Artificial Sequence
  Oligonucleotide primer for the detection of SNP TSC0014334
tactatattata

SEQ ID NO: 290399 - DNA, 12 bp, Artificial Sequence
  Oligonucleotide primer for the detection of SNP TSC0014334
tttttttggttt

SEQ ID NO: 290400 - DNA, 12 bp, Artificial Sequence
  Oligonucleotide primer for the detection of SNP TSC0014337
aatctacaaaac

SEQ ID NO: 290401 - DNA, 12 bp, Artificial Sequence
  Oligonucleotide primer for the detection of SNP TSC0014337
tggggatgatga

SEQ ID NO: 290402 - DNA, 12 bp, Artificial Sequence
  Oligonucleotide primer for the detection of SNP TSC0014338
taattattcatt

SEQ ID NO: 290403 - DNA, 12 bp, Artificial Sequence
  Oligonucleotide primer for the detection of SNP TSC0014338
aattaagtagta

SEQ ID NO: 290404 - DNA, 12 bp, Artificial Sequence
  Oligonucleotide primer for the detection of SNP TSC0014339
taaaaaactaat

SEQ ID NO: 290405 - DNA, 12 bp, Artificial Sequence
  Oligonucleotide primer for the detection of SNP TSC0014339
ttttttatatgg

SEQ ID NO: 290406 - DNA, 12 bp, Artificial Sequence
  Oligonucleotide primer for the detection of SNP TSC0014340
aacactacctaa

SEQ ID NO: 290407 - DNA, 12 bp, Artificial Sequence
  Oligonucleotide primer for the detection of SNP TSC0014340
ggatgagggttt

SEQ ID NO: 290408 - DNA, 12 bp, Artificial Sequence
  Oligonucleotide primer for the detection of SNP TSC0014340
ggacgagggttt

SEQ ID NO: 290409 - DNA, 12 bp, Artificial Sequence
  Oligonucleotide primer for the detection of SNP TSC0014340
aaacaaaaatcc

SEQ ID NO: 290410 - DNA, 12 bp, Artificial Sequence
  Oligonucleotide primer for the detection of SNP TSC0014340
aaacgaaaatcc

SEQ ID NO: 290411 - DNA, 12 bp, Artificial Sequence
  Oligonucleotide primer for the detection of SNP TSC0014340
agtattgtttgg

SEQ ID NO: 290412 - DNA, 12 bp, Artificial Sequence
  Oligonucleotide primer for the detection of SNP TSC0014341
ttcctaaatcaa

SEQ ID NO: 290413 - DNA, 12 bp, Artificial Sequence
  Oligonucleotide primer for the detection of SNP TSC0014341
tttttggatagt

SEQ ID NO: 290414 - DNA, 12 bp, Artificial Sequence
  Oligonucleotide primer for the detection of SNP TSC0014341
tttttaaattaa

SEQ ID NO: 290415 - DNA, 12 bp, Artificial Sequence
  Oligonucleotide primer for the detection of SNP TSC0014342
aaataaaattaa

SEQ ID NO: 290416 - DNA, 12 bp, Artificial Sequence
  Oligonukleotid-Primer
agagtttagatt

SEQ ID NO: 290417 - DNA, 12 bp, Artificial Sequence
  Oligonucleotide primer for the detection of SNP TSC0014342
aatccaaactaa

SEQ ID NO: 290418 - DNA, 12 bp, Artificial Sequence
  Oligonucleotide primer for the detection of SNP TSC0014342
ggtgagattgat

SEQ ID NO: 290419 - DNA, 12 bp, Artificial Sequence
  Oligonucleotide primer for the detection of SNP TSC0014343
aatcataatcac

SEQ ID NO: 290420 - DNA, 12 bp, Artificial Sequence
  Oligonucleotide primer for the detection of SNP TSC0014343
taggtttggaga

SEQ ID NO: 290421 - DNA, 12 bp, Artificial Sequence
  Oligonucleotide primer for the detection of SNP TSC0014344
ttcctcaaaaaa

SEQ ID NO: 290422 - DNA, 12 bp, Artificial Sequence
  Oligonucleotide primer for the detection of SNP TSC0014344
ttcctcgaaaaa

SEQ ID NO: 290423 - DNA, 12 bp, Artificial Sequence
  Oligonucleotide primer for the detection of SNP TSC0014344
gtaaattgattt

SEQ ID NO: 290424 - DNA, 12 bp, Artificial Sequence
  Oligonucleotide primer for the detection of SNP TSC0014344
taaattaattca

SEQ ID NO: 290425 - DNA, 12 bp, Artificial Sequence
  Oligonucleotide primer for the detection of SNP TSC0014344
ttttttgaaggg

SEQ ID NO: 290426 - DNA, 12 bp, Artificial Sequence
  Oligonucleotide primer for the detection of SNP TSC0014344
tttttcgaaggg

SEQ ID NO: 290427 - DNA, 12 bp, Artificial Sequence
  Oligonucleotide primer for the detection of SNP TSC0014345
taattaaaactt

SEQ ID NO: 290428 - DNA, 12 bp, Artificial Sequence
  Oligonucleotide primer for the detection of SNP TSC0014345
tgtttttaaaaa

SEQ ID NO: 290429 - DNA, 12 bp, Artificial Sequence
  Oligonucleotide primer for the detection of SNP TSC0014346
tacttatatttt

SEQ ID NO: 290430 - DNA, 12 bp, Artificial Sequence
  Oligonucleotide primer for the detection of SNP TSC0014346
aagttttttttt

SEQ ID NO: 290431 - DNA, 12 bp, Artificial Sequence
  Oligonucleotide primer for the detection of SNP TSC0014346
aaacttcttttt

SEQ ID NO: 290432 - DNA, 12 bp, Artificial Sequence
  Oligonucleotide primer for the detection of SNP TSC0014346
tatttgtgtttt

SEQ ID NO: 290433 - DNA, 12 bp, Artificial Sequence
  Oligonucleotide primer for the detection of SNP TSC0014347
ttcacttttttc

SEQ ID NO: 290434 - DNA, 12 bp, Artificial Sequence
  Oligonucleotide primer for the detection of SNP TSC0014347
gtaaaagagtaa

SEQ ID NO: 290435 - DNA, 12 bp, Artificial Sequence
  Oligonucleotide primer for the detection of SNP TSC0014349
ttcttaaaacct

SEQ ID NO: 290436 - DNA, 12 bp, Artificial Sequence
  Oligonucleotide primer for the detection of SNP TSC0014349
ttatagattagg

SEQ ID NO: 290437 - DNA, 12 bp, Artificial Sequence
  Oligonucleotide primer for the detection of SNP TSC0014350
aggaaggtttta

SEQ ID NO: 290438 - DNA, 12 bp, Artificial Sequence
  Oligonucleotide primer for the detection of SNP TSC0014350
aaaaaaacccca

SEQ ID NO: 290439 - DNA, 12 bp, Artificial Sequence
  Oligonucleotide primer for the detection of SNP TSC0014350
gaggtaggattt

SEQ ID NO: 290440 - DNA, 12 bp, Artificial Sequence
  Oligonucleotide primer for the detection of SNP TSC0014351
ttatttccattt

SEQ ID NO: 290441 - DNA, 12 bp, Artificial Sequence
  Oligonucleotide primer for the detection of SNP TSC0014351
atataaattgaa

SEQ ID NO: 290442 - DNA, 12 bp, Artificial Sequence
  Oligonucleotide primer for the detection of SNP TSC0014351
acacaaactaaa

SEQ ID NO: 290443 - DNA, 12 bp, Artificial Sequence
  Oligonucleotide primer for the detection of SNP TSC0014352
taacacaactcc

SEQ ID NO: 290444 - DNA, 12 bp, Artificial Sequence
  Oligonucleotide primer for the detection of SNP TSC0014352
ggagaaggtata

SEQ ID NO: 290445 - DNA, 12 bp, Artificial Sequence
  Oligonucleotide primer for the detection of SNP TSC0014353
atttattaatac

SEQ ID NO: 290446 - DNA, 12 bp, Artificial Sequence
  Oligonucleotide primer for the detection of SNP TSC0014353
tgaaatggaatg

SEQ ID NO: 290447 - DNA, 12 bp, Artificial Sequence
  Oligonucleotide primer for the detection of SNP TSC0014354
ataaaaaacact

SEQ ID NO: 290448 - DNA, 12 bp, Artificial Sequence
  Oligonucleotide primer for the detection of SNP TSC0014354
tggtttggattg

SEQ ID NO: 290449 - DNA, 12 bp, Artificial Sequence
  Oligonucleotide primer for the detection of SNP TSC0014356
aatatacaaacc

SEQ ID NO: 290450 - DNA, 12 bp, Artificial Sequence
  Oligonucleotide primer for the detection of SNP TSC0014356
ttttgaattttg

SEQ ID NO: 290451 - DNA, 12 bp, Artificial Sequence
  Oligonucleotide primer for the detection of SNP TSC0014356
aatatataaatt

SEQ ID NO: 290452 - DNA, 12 bp, Artificial Sequence
  Oligonucleotide primer for the detection of SNP TSC0014360
aattaaaaccat

SEQ ID NO: 290453 - DNA, 12 bp, Artificial Sequence
  Oligonucleotide primer for the detection of SNP TSC0014360
ttataatattaa

SEQ ID NO: 290454 - DNA, 12 bp, Artificial Sequence
  Oligonucleotide primer for the detection of SNP TSC0014361
ctaattttattt

SEQ ID NO: 290455 - DNA, 12 bp, Artificial Sequence
  Oligonucleotide primer for the detection of SNP TSC0014361
tagattttgttt

SEQ ID NO: 290456 - DNA, 12 bp, Artificial Sequence
  Oligonucleotide primer for the detection of SNP TSC0014361
caaaccctatct

SEQ ID NO: 290457 - DNA, 12 bp, Artificial Sequence
  Oligonucleotide primer for the detection of SNP TSC0014361
ttaattttattt

SEQ ID NO: 290458 - DNA, 12 bp, Artificial Sequence
  Oligonucleotide primer for the detection of SNP TSC0014362
cctaaataacta

SEQ ID NO: 290459 - DNA, 12 bp, Artificial Sequence
  Oligonucleotide primer for the detection of SNP TSC0014362
gtatttgtagtt

SEQ ID NO: 290460 - DNA, 12 bp, Artificial Sequence
  Oligonucleotide primer for the detection of SNP TSC0014362
acacctataatc

SEQ ID NO: 290461 - DNA, 12 bp, Artificial Sequence
  Oligonucleotide primer for the detection of SNP TSC0014363
atcttcccacct

SEQ ID NO: 290462 - DNA, 12 bp, Artificial Sequence
  Oligonucleotide primer for the detection of SNP TSC0014363
ttatttaggagg

SEQ ID NO: 290463 - DNA, 12 bp, Artificial Sequence
  Oligonucleotide primer for the detection of SNP TSC0014365
aataaaactaat

SEQ ID NO: 290464 - DNA, 12 bp, Artificial Sequence
  Oligonucleotide primer for the detection of SNP TSC0014365
ttttttaggaaa

SEQ ID NO: 290465 - DNA, 12 bp, Artificial Sequence
  Oligonucleotide primer for the detection of SNP TSC0014366
ctaattaacaac

SEQ ID NO: 290466 - DNA, 12 bp, Artificial Sequence
  Oligonucleotide primer for the detection of SNP TSC0014366
gatagaagaaaa

SEQ ID NO: 290467 - DNA, 12 bp, Artificial Sequence
  Oligonucleotide primer for the detection of SNP TSC0014367
ttctaaaaaata

SEQ ID NO: 290468 - DNA, 12 bp, Artificial Sequence
  Oligonucleotide primer for the detection of SNP TSC0014367
atattatatatt

SEQ ID NO: 290469 - DNA, 12 bp, Artificial Sequence
  Oligonucleotide primer for the detection of SNP TSC0014367
atactatatatc

SEQ ID NO: 290470 - DNA, 12 bp, Artificial Sequence
  Oligonucleotide primer for the detection of SNP TSC0014367
ttttgaaaaatg

SEQ ID NO: 290471 - DNA, 12 bp, Artificial Sequence
  Oligonucleotide primer for the detection of SNP TSC0014368
aataatttttat

SEQ ID NO: 290472 - DNA, 12 bp, Artificial Sequence
  Oligonucleotide primer for the detection of SNP TSC0014368
aagaaataaaaa

SEQ ID NO: 290473 - DNA, 12 bp, Artificial Sequence
  Oligonucleotide primer for the detection of SNP TSC0014368
gataatttttat

SEQ ID NO: 290474 - DNA, 12 bp, Artificial Sequence
  Oligonucleotide primer for the detection of SNP TSC0014369
tctcacactaaa

SEQ ID NO: 290475 - DNA, 12 bp, Artificial Sequence
  Oligonucleotide primer for the detection of SNP TSC0014369
gatttttttgat

SEQ ID NO: 290476 - DNA, 12 bp, Artificial Sequence
  Oligonucleotide primer for the detection of SNP TSC0014369
aacccccctaat

SEQ ID NO: 290477 - DNA, 12 bp, Artificial Sequence
  Oligonucleotide primer for the detection of SNP TSC0014369
ttttatattgga

SEQ ID NO: 290478 - DNA, 12 bp, Artificial Sequence
  Oligonucleotide primer for the detection of SNP TSC0014372
aaattaaatttt

SEQ ID NO: 290479 - DNA, 12 bp, Artificial Sequence
  Oligonucleotide primer for the detection of SNP TSC0014372
tttgtttaaata

SEQ ID NO: 290480 - DNA, 12 bp, Artificial Sequence
  Oligonucleotide primer for the detection of SNP TSC0014373
aaaaacttaatt

SEQ ID NO: 290481 - DNA, 12 bp, Artificial Sequence
  Oligonucleotide primer for the detection of SNP TSC0014373
attgatagtatg

SEQ ID NO: 290482 - DNA, 12 bp, Artificial Sequence
  Oligonucleotide primer for the detection of SNP TSC0014374
acccctccccac

SEQ ID NO: 290483 - DNA, 12 bp, Artificial Sequence
  Oligonucleotide primer for the detection of SNP TSC0014374
aggttagtagaa

SEQ ID NO: 290484 - DNA, 12 bp, Artificial Sequence
  Oligonucleotide primer for the detection of SNP TSC0014375
aaacctaaacaa

SEQ ID NO: 290485 - DNA, 12 bp, Artificial Sequence
  Oligonucleotide primer for the detection of SNP TSC0014375
ttttagttacgt

SEQ ID NO: 290486 - DNA, 12 bp, Artificial Sequence
  Oligonucleotide primer for the detection of SNP TSC0014375
tctccaaccaca

SEQ ID NO: 290487 - DNA, 12 bp, Artificial Sequence
  Oligonucleotide primer for the detection of SNP TSC0014375
tctccaaccacg

SEQ ID NO: 290488 - DNA, 12 bp, Artificial Sequence
  Oligonucleotide primer for the detection of SNP TSC0014375
gagtttgaatag

SEQ ID NO: 290489 - DNA, 12 bp, Artificial Sequence
  Oligonucleotide primer for the detection of SNP TSC0014377
cacactatcact

SEQ ID NO: 290490 - DNA, 12 bp, Artificial Sequence
  Oligonucleotide primer for the detection of SNP TSC0014377
gttttttggata

SEQ ID NO: 290491 - DNA, 12 bp, Artificial Sequence
  Oligonucleotide primer for the detection of SNP TSC0014378
catatctatcac

SEQ ID NO: 290492 - DNA, 12 bp, Artificial Sequence
  Oligonucleotide primer for the detection of SNP TSC0014378
agtaagttagtg

SEQ ID NO: 290493 - DNA, 12 bp, Artificial Sequence
  Oligonucleotide primer for the detection of SNP TSC0014378
aacaaactaata

SEQ ID NO: 290494 - DNA, 12 bp, Artificial Sequence
  Oligonucleotide primer for the detection of SNP TSC0014378
tatatttattac

SEQ ID NO: 290495 - DNA, 12 bp, Artificial Sequence
  Oligonucleotide primer for the detection of SNP TSC0014379
accaaaaaatcc

SEQ ID NO: 290496 - DNA, 12 bp, Artificial Sequence
  Oligonucleotide primer for the detection of SNP TSC0014379
gttaagtaggtt

SEQ ID NO: 290497 - DNA, 12 bp, Artificial Sequence
  Oligonucleotide primer for the detection of SNP TSC0014379
accaaacaaact

SEQ ID NO: 290498 - DNA, 12 bp, Artificial Sequence
  Oligonucleotide primer for the detection of SNP TSC0014379
gttaagagattt

SEQ ID NO: 290499 - DNA, 12 bp, Artificial Sequence
  Oligonucleotide primer for the detection of SNP TSC0014380
acataaacaaat

SEQ ID NO: 290500 - DNA, 12 bp, Artificial Sequence
  Oligonucleotide primer for the detection of SNP TSC0014380
acataaacgaat

SEQ ID NO: 290501 - DNA, 12 bp, Artificial Sequence
  Oligonucleotide primer for the detection of SNP TSC0014380
acgtaaacaaat

SEQ ID NO: 290502 - DNA, 12 bp, Artificial Sequence
  Oligonucleotide primer for the detection of SNP TSC0014380
acgtaaacgaat

SEQ ID NO: 290503 - DNA, 12 bp, Artificial Sequence
  Oligonucleotide primer for the detection of SNP TSC0014380
atttgtaagaaa

SEQ ID NO: 290504 - DNA, 12 bp, Artificial Sequence
  Oligonucleotide primer for the detection of SNP TSC0014381
ctctataaattt

SEQ ID NO: 290505 - DNA, 12 bp, Artificial Sequence
  Oligonucleotide primer for the detection of SNP TSC0014381
ggttgattgtta

SEQ ID NO: 290506 - DNA, 12 bp, Artificial Sequence
  Oligonucleotide primer for the detection of SNP TSC0014381
aattaactatta

SEQ ID NO: 290507 - DNA, 12 bp, Artificial Sequence
  Oligonucleotide primer for the detection of SNP TSC0014381
ttttgtgggttt

SEQ ID NO: 290508 - DNA, 12 bp, Artificial Sequence
  Oligonucleotide primer for the detection of SNP TSC0014382
tcactacccccc

SEQ ID NO: 290509 - DNA, 12 bp, Artificial Sequence
  Oligonucleotide primer for the detection of SNP TSC0014382
tcgctacccccc

SEQ ID NO: 290510 - DNA, 12 bp, Artificial Sequence
  Oligonucleotide primer for the detection of SNP TSC0014382
tgttgttatgag

SEQ ID NO: 290511 - DNA, 12 bp, Artificial Sequence
  Oligonucleotide primer for the detection of SNP TSC0014382
tgttgttacgag

SEQ ID NO: 290512 - DNA, 12 bp, Artificial Sequence
  Oligonucleotide primer for the detection of SNP TSC0014383
tgatgggatttt

SEQ ID NO: 290513 - DNA, 12 bp, Artificial Sequence
  Oligonukleotid-Primer
taataaaacttt

SEQ ID NO: 290514 - DNA, 12 bp, Artificial Sequence
  Oligonucleotide primer for the detection of SNP TSC0014384
gagttttatagt

SEQ ID NO: 290515 - DNA, 12 bp, Artificial Sequence
  Oligonucleotide primer for the detection of SNP TSC0014384
aattctataata

SEQ ID NO: 290516 - DNA, 12 bp, Artificial Sequence
  Oligonucleotide primer for the detection of SNP TSC0014384
aagaaatgatga

SEQ ID NO: 290517 - DNA, 12 bp, Artificial Sequence
  Oligonukleotid-Primer
tggataatatat

SEQ ID NO: 290518 - DNA, 12 bp, Artificial Sequence
  Oligonucleotide primer for the detection of SNP TSC0014385
ctaaataataca

SEQ ID NO: 290519 - DNA, 12 bp, Artificial Sequence
  Oligonucleotide primer for the detection of SNP TSC0014385
gaaatattttta

SEQ ID NO: 290520 - DNA, 12 bp, Artificial Sequence
  Oligonucleotide primer for the detection of SNP TSC0014386
tctaaaataaac

SEQ ID NO: 290521 - DNA, 12 bp, Artificial Sequence
  Oligonucleotide primer for the detection of SNP TSC0014386
ataagaaaataa

SEQ ID NO: 290522 - DNA, 12 bp, Artificial Sequence
  Oligonucleotide primer for the detection of SNP TSC0014387
caattctataca

SEQ ID NO: 290523 - DNA, 12 bp, Artificial Sequence
  Oligonucleotide primer for the detection of SNP TSC0014387
caattctatacg

SEQ ID NO: 290524 - DNA, 12 bp, Artificial Sequence
  Oligonucleotide primer for the detection of SNP TSC0014387
aggtgtggggtt

SEQ ID NO: 290525 - DNA, 12 bp, Artificial Sequence
  Oligonucleotide primer for the detection of SNP TSC0014387
gtaaatataaaa

SEQ ID NO: 290526 - DNA, 12 bp, Artificial Sequence
  Oligonucleotide primer for the detection of SNP TSC0014388
ggttattttaaa

SEQ ID NO: 290527 - DNA, 12 bp, Artificial Sequence
  Oligonucleotide primer for the detection of SNP TSC0014389
acctaccttaac

SEQ ID NO: 290528 - DNA, 12 bp, Artificial Sequence
  Oligonucleotide primer for the detection of SNP TSC0014390
aataaaaaatca

SEQ ID NO: 290529 - DNA, 12 bp, Artificial Sequence
  Oligonucleotide primer for the detection of SNP TSC0014390
tacccttacctt

SEQ ID NO: 290530 - DNA, 12 bp, Artificial Sequence
  Oligonucleotide primer for the detection of SNP TSC0014390
aataaaagatta

SEQ ID NO: 290531 - DNA, 12 bp, Artificial Sequence
  Oligonucleotide primer for the detection of SNP TSC0014391
atcacaaaaatc

SEQ ID NO: 290532 - DNA, 12 bp, Artificial Sequence
  Oligonucleotide primer for the detection of SNP TSC0014391
tattttgaagta

SEQ ID NO: 290533 - DNA, 12 bp, Artificial Sequence
  Oligonucleotide primer for the detection of SNP TSC0014391
cactttaaaaca

SEQ ID NO: 290534 - DNA, 12 bp, Artificial Sequence
  Oligonucleotide primer for the detection of SNP TSC0014391
gttataaggatt

SEQ ID NO: 290535 - DNA, 12 bp, Artificial Sequence
  Oligonucleotide primer for the detection of SNP TSC0014392
aactacaaaacc

SEQ ID NO: 290536 - DNA, 12 bp, Artificial Sequence
  Oligonucleotide primer for the detection of SNP TSC0014392
tttttataaaaa

SEQ ID NO: 290537 - DNA, 12 bp, Artificial Sequence
  Oligonucleotide primer for the detection of SNP TSC0014392
cccttataaaaa

SEQ ID NO: 290538 - DNA, 12 bp, Artificial Sequence
  Oligonucleotide primer for the detection of SNP TSC0014392
agttgtaaaatt

SEQ ID NO: 290539 - DNA, 12 bp, Artificial Sequence
  Oligonucleotide primer for the detection of SNP TSC0014397
ccaaactcctcc

SEQ ID NO: 290540 - DNA, 12 bp, Artificial Sequence
  Oligonucleotide primer for the detection of SNP TSC0014397
gttttagaagtt

SEQ ID NO: 290541 - DNA, 12 bp, Artificial Sequence
  Oligonucleotide primer for the detection of SNP TSC0014397
actccaaaaacc

SEQ ID NO: 290542 - DNA, 12 bp, Artificial Sequence
  Oligonucleotide primer for the detection of SNP TSC0014397
ttaagttttttt

SEQ ID NO: 290543 - DNA, 12 bp, Artificial Sequence
  Oligonucleotide primer for the detection of SNP TSC0014401
aaacaaatcctt

SEQ ID NO: 290544 - DNA, 12 bp, Artificial Sequence
  Oligonucleotide primer for the detection of SNP TSC0014401
tattatttaaaa

SEQ ID NO: 290545 - DNA, 12 bp, Artificial Sequence
  Oligonucleotide primer for the detection of SNP TSC0014402
tacttctccaat

SEQ ID NO: 290546 - DNA, 12 bp, Artificial Sequence
  Oligonucleotide primer for the detection of SNP TSC0014402
aaaatttaattt

SEQ ID NO: 290547 - DNA, 12 bp, Artificial Sequence
  Oligonucleotide primer for the detection of SNP TSC0014406
taatcactatac

SEQ ID NO: 290548 - DNA, 12 bp, Artificial Sequence
  Oligonucleotide primer for the detection of SNP TSC0014406
agtttattgagg

SEQ ID NO: 290549 - DNA, 12 bp, Artificial Sequence
  Oligonucleotide primer for the detection of SNP TSC0014408
aaaaatcaaaaa

SEQ ID NO: 290550 - DNA, 12 bp, Artificial Sequence
  Oligonucleotide primer for the detection of SNP TSC0014408
aaaaatcgaaaa

SEQ ID NO: 290551 - DNA, 12 bp, Artificial Sequence
  Oligonucleotide primer for the detection of SNP TSC0014408
ttattgagtggt

SEQ ID NO: 290552 - DNA, 12 bp, Artificial Sequence
  Oligonucleotide primer for the detection of SNP TSC0014408
ttattgagcggt

SEQ ID NO: 290553 - DNA, 12 bp, Artificial Sequence
  Oligonucleotide primer for the detection of SNP TSC0014408
ctattaaacaac

SEQ ID NO: 290554 - DNA, 12 bp, Artificial Sequence
  Oligonucleotide primer for the detection of SNP TSC0014408
ctattaaacgac

SEQ ID NO: 290555 - DNA, 12 bp, Artificial Sequence
  Oligonucleotide primer for the detection of SNP TSC0014408
ggaggttgagaa

SEQ ID NO: 290556 - DNA, 12 bp, Artificial Sequence
  Oligonucleotide primer for the detection of SNP TSC0014408
ggaggtcgagaa

SEQ ID NO: 290557 - DNA, 12 bp, Artificial Sequence
  Oligonucleotide primer for the detection of SNP TSC0014409
caccccaaccct

SEQ ID NO: 290558 - DNA, 12 bp, Artificial Sequence
  Oligonucleotide primer for the detection of SNP TSC0014409
gttggggagtta

SEQ ID NO: 290559 - DNA, 12 bp, Artificial Sequence
  Oligonucleotide primer for the detection of SNP TSC0014409
actaaaaaatca

SEQ ID NO: 290560 - DNA, 12 bp, Artificial Sequence
  Oligonucleotide primer for the detection of SNP TSC0014409
ttttagtttttc

SEQ ID NO: 290561 - DNA, 12 bp, Artificial Sequence
  Oligonucleotide primer for the detection of SNP TSC0014414
actataaataat

SEQ ID NO: 290562 - DNA, 12 bp, Artificial Sequence
  Oligonucleotide primer for the detection of SNP TSC0014414
agttttatttag

SEQ ID NO: 290563 - DNA, 12 bp, Artificial Sequence
  Oligonucleotide primer for the detection of SNP TSC0014417
gattgtggagtg

SEQ ID NO: 290564 - DNA, 12 bp, Artificial Sequence
  Oligonucleotide primer for the detection of SNP TSC0014417
aactataaaata

SEQ ID NO: 290565 - DNA, 12 bp, Artificial Sequence
  Oligonucleotide primer for the detection of SNP TSC0014417
aatttgtttttg

SEQ ID NO: 290566 - DNA, 12 bp, Artificial Sequence
  Oligonucleotide primer for the detection of SNP TSC0014420
aaattaatacac

SEQ ID NO: 290567 - DNA, 12 bp, Artificial Sequence
  Oligonucleotide primer for the detection of SNP TSC0014420
gagatgttggta

SEQ ID NO: 290568 - DNA, 12 bp, Artificial Sequence
  Oligonucleotide primer for the detection of SNP TSC0014420
gagatgtcggta

SEQ ID NO: 290569 - DNA, 12 bp, Artificial Sequence
  Oligonucleotide primer for the detection of SNP TSC0014421
ctaattcactaa

SEQ ID NO: 290570 - DNA, 12 bp, Artificial Sequence
  Oligonucleotide primer for the detection of SNP TSC0014421
gaaaattttagg

SEQ ID NO: 290571 - DNA, 12 bp, Artificial Sequence
  Oligonucleotide primer for the detection of SNP TSC0014421
aaaaactccaaa

SEQ ID NO: 290572 - DNA, 12 bp, Artificial Sequence
  Oligonucleotide primer for the detection of SNP TSC0014421
ttaatttattgg

SEQ ID NO: 290573 - DNA, 12 bp, Artificial Sequence
  Oligonucleotide primer for the detection of SNP TSC0014422
ttatataaattc

SEQ ID NO: 290574 - DNA, 12 bp, Artificial Sequence
  Oligonucleotide primer for the detection of SNP TSC0014422
tagtgatagtag

SEQ ID NO: 290575 - DNA, 12 bp, Artificial Sequence
  Oligonucleotide primer for the detection of SNP TSC0014422
ttgtgtggattt

SEQ ID NO: 290576 - DNA, 12 bp, Artificial Sequence
  Oligonucleotide primer for the detection of SNP TSC0014423
aattatcctatt

SEQ ID NO: 290577 - DNA, 12 bp, Artificial Sequence
  Oligonucleotide primer for the detection of SNP TSC0014423
attggaattatg

SEQ ID NO: 290578 - DNA, 12 bp, Artificial Sequence
  Oligonucleotide primer for the detection of SNP TSC0014426
taccccttcccc

SEQ ID NO: 290579 - DNA, 12 bp, Artificial Sequence
  Oligonucleotide primer for the detection of SNP TSC0014426
cctcttttttaa

SEQ ID NO: 290580 - DNA, 12 bp, Artificial Sequence
  Oligonucleotide primer for the detection of SNP TSC0014427
ctcaaacacaac

SEQ ID NO: 290581 - DNA, 12 bp, Artificial Sequence
  Oligonucleotide primer for the detection of SNP TSC0014427
gaaggtgttgag

SEQ ID NO: 290582 - DNA, 12 bp, Artificial Sequence
  Oligonucleotide primer for the detection of SNP TSC0014427
gaaggcgttgag

SEQ ID NO: 290583 - DNA, 12 bp, Artificial Sequence
  Oligonucleotide primer for the detection of SNP TSC0014427
aaaaacactaaa

SEQ ID NO: 290584 - DNA, 12 bp, Artificial Sequence
  Oligonucleotide primer for the detection of SNP TSC0014427
aaaaacgctaaa

SEQ ID NO: 290585 - DNA, 12 bp, Artificial Sequence
  Oligonucleotide primer for the detection of SNP TSC0014427
tttaagtataat

SEQ ID NO: 290586 - DNA, 12 bp, Artificial Sequence
  Oligonucleotide primer for the detection of SNP TSC0014427
tttaagtataac

SEQ ID NO: 290587 - DNA, 12 bp, Artificial Sequence
  Oligonucleotide primer for the detection of SNP TSC0014428
ctatcaaaaaat

SEQ ID NO: 290588 - DNA, 12 bp, Artificial Sequence
  Oligonucleotide primer for the detection of SNP TSC0014428
attttttttttg

SEQ ID NO: 290589 - DNA, 12 bp, Artificial Sequence
  Oligonucleotide primer for the detection of SNP TSC0014430
acaaattaaaaa

SEQ ID NO: 290590 - DNA, 12 bp, Artificial Sequence
  Oligonucleotide primer for the detection of SNP TSC0014430
ataattgtagat

SEQ ID NO: 290591 - DNA, 12 bp, Artificial Sequence
  Oligonucleotide primer for the detection of SNP TSC0014430
ataactacaaat

SEQ ID NO: 290592 - DNA, 12 bp, Artificial Sequence
  Oligonucleotide primer for the detection of SNP TSC0014430
gatagattgaga

SEQ ID NO: 290593 - DNA, 12 bp, Artificial Sequence
  Oligonucleotide primer for the detection of SNP TSC0014431
aataaaaattaa

SEQ ID NO: 290594 - DNA, 12 bp, Artificial Sequence
  Oligonucleotide primer for the detection of SNP TSC0014431
tttgttattaat

SEQ ID NO: 290595 - DNA, 12 bp, Artificial Sequence
  Oligonucleotide primer for the detection of SNP TSC0014431
tctattactaat

SEQ ID NO: 290596 - DNA, 12 bp, Artificial Sequence
  Oligonucleotide primer for the detection of SNP TSC0014431
tagggattaatt

SEQ ID NO: 290597 - DNA, 12 bp, Artificial Sequence
  Oligonucleotide primer for the detection of SNP TSC0014432
accacacaacat

SEQ ID NO: 290598 - DNA, 12 bp, Artificial Sequence
  Oligonucleotide primer for the detection of SNP TSC0014432
gttatataatat

SEQ ID NO: 290599 - DNA, 12 bp, Artificial Sequence
  Oligonucleotide primer for the detection of SNP TSC0014433
ctttcctatctc

SEQ ID NO: 290600 - DNA, 12 bp, Artificial Sequence
  Oligonucleotide primer for the detection of SNP TSC0014433
ttttgggagaag

SEQ ID NO: 290601 - DNA, 12 bp, Artificial Sequence
  Oligonucleotide primer for the detection of SNP TSC0014434
tacaactactcc

SEQ ID NO: 290602 - DNA, 12 bp, Artificial Sequence
  Oligonucleotide primer for the detection of SNP TSC0014434
ttttatgggagg

SEQ ID NO: 290603 - DNA, 12 bp, Artificial Sequence
  Oligonucleotide primer for the detection of SNP TSC0014434
ttttacgggagg

SEQ ID NO: 290604 - DNA, 12 bp, Artificial Sequence
  Oligonucleotide primer for the detection of SNP TSC0014434
cttcacaaaaaa

SEQ ID NO: 290605 - DNA, 12 bp, Artificial Sequence
  Oligonucleotide primer for the detection of SNP TSC0014434
cttcacgaaaaa

SEQ ID NO: 290606 - DNA, 12 bp, Artificial Sequence
  Oligonucleotide primer for the detection of SNP TSC0014434
tgtagttgtttt

SEQ ID NO: 290607 - DNA, 12 bp, Artificial Sequence
  Oligonucleotide primer for the detection of SNP TSC0014434
tgtagttgtttc

SEQ ID NO: 290608 - DNA, 12 bp, Artificial Sequence
  Oligonucleotide primer for the detection of SNP TSC0014435
ctcctaaaacct

SEQ ID NO: 290609 - DNA, 12 bp, Artificial Sequence
  Oligonucleotide primer for the detection of SNP TSC0014435
ggttggattgtg

SEQ ID NO: 290610 - DNA, 12 bp, Artificial Sequence
  Oligonukleotid-Primer
ggttggatcgtg

SEQ ID NO: 290611 - DNA, 12 bp, Artificial Sequence
  Oligonucleotide primer for the detection of SNP TSC0014435
ggttggattgcg

SEQ ID NO: 290612 - DNA, 12 bp, Artificial Sequence
  Oligonucleotide primer for the detection of SNP TSC0014435
ggttggatcgcg

SEQ ID NO: 290613 - DNA, 12 bp, Artificial Sequence
  Oligonucleotide primer for the detection of SNP TSC0014436
atttaaaaattt

SEQ ID NO: 290614 - DNA, 12 bp, Artificial Sequence
  Oligonucleotide primer for the detection of SNP TSC0014436
gataggatagaa

SEQ ID NO: 290615 - DNA, 12 bp, Artificial Sequence
  Oligonucleotide primer for the detection of SNP TSC0014442
ttaactaactat

SEQ ID NO: 290616 - DNA, 12 bp, Artificial Sequence
  Oligonucleotide primer for the detection of SNP TSC0014442
tggtagtaagta

SEQ ID NO: 290617 - DNA, 12 bp, Artificial Sequence
  Oligonucleotide primer for the detection of SNP TSC0014443
tacttacaaaat

SEQ ID NO: 290618 - DNA, 12 bp, Artificial Sequence
  Oligonucleotide primer for the detection of SNP TSC0014443
ttagggtttaat

SEQ ID NO: 290619 - DNA, 12 bp, Artificial Sequence
  Oligonucleotide primer for the detection of SNP TSC0014443
ccaaaacccaac

SEQ ID NO: 290620 - DNA, 12 bp, Artificial Sequence
  Oligonucleotide primer for the detection of SNP TSC0014443
tatttgtagaat

SEQ ID NO: 290621 - DNA, 12 bp, Artificial Sequence
  Oligonucleotide primer for the detection of SNP TSC0014444
acaaaaccttac

SEQ ID NO: 290622 - DNA, 12 bp, Artificial Sequence
  Oligonucleotide primer for the detection of SNP TSC0014444
acgaaaccttac

SEQ ID NO: 290623 - DNA, 12 bp, Artificial Sequence
  Oligonucleotide primer for the detection of SNP TSC0014444
ttatagtttttg

SEQ ID NO: 290624 - DNA, 12 bp, Artificial Sequence
  Oligonucleotide primer for the detection of SNP TSC0014445
ataacaataaac

SEQ ID NO: 290625 - DNA, 12 bp, Artificial Sequence
  Oligonucleotide primer for the detection of SNP TSC0014445
taaatgataagt

SEQ ID NO: 290626 - DNA, 12 bp, Artificial Sequence
  Oligonucleotide primer for the detection of SNP TSC0014445
caaataacaaac

SEQ ID NO: 290627 - DNA, 12 bp, Artificial Sequence
  Oligonucleotide primer for the detection of SNP TSC0014445
atggtagtgggt

SEQ ID NO: 290628 - DNA, 12 bp, Artificial Sequence
  Oligonucleotide primer for the detection of SNP TSC0014446
aaacaaataact

SEQ ID NO: 290629 - DNA, 12 bp, Artificial Sequence
  Oligonucleotide primer for the detection of SNP TSC0014446
aaaatatgtttg

SEQ ID NO: 290630 - DNA, 12 bp, Artificial Sequence
  Oligonucleotide primer for the detection of SNP TSC0014447
tcacaaaaaata

SEQ ID NO: 290631 - DNA, 12 bp, Artificial Sequence
  Oligonucleotide primer for the detection of SNP TSC0014447
tttcgaagtttt

SEQ ID NO: 290632 - DNA, 12 bp, Artificial Sequence
  Oligonucleotide primer for the detection of SNP TSC0014447
cctcaaaatttt

SEQ ID NO: 290633 - DNA, 12 bp, Artificial Sequence
  Oligonucleotide primer for the detection of SNP TSC0014447
cctcgaaatttt

SEQ ID NO: 290634 - DNA, 12 bp, Artificial Sequence
  Oligonucleotide primer for the detection of SNP TSC0014447
ttataaagagta

SEQ ID NO: 290635 - DNA, 12 bp, Artificial Sequence
  Oligonucleotide primer for the detection of SNP TSC0014448
aatcatatatta

SEQ ID NO: 290636 - DNA, 12 bp, Artificial Sequence
  Oligonucleotide primer for the detection of SNP TSC0014448
ttttggaaagtt

SEQ ID NO: 290637 - DNA, 12 bp, Artificial Sequence
  Oligonucleotide primer for the detection of SNP TSC0014448
tctttaaaaaat

SEQ ID NO: 290638 - DNA, 12 bp, Artificial Sequence
  Oligonucleotide primer for the detection of SNP TSC0014448
aattatatatta

SEQ ID NO: 290639 - DNA, 12 bp, Artificial Sequence
  Oligonucleotide primer for the detection of SNP TSC0014449
ataacgaaaaac

SEQ ID NO: 290640 - DNA, 12 bp, Artificial Sequence
  Oligonucleotide primer for the detection of SNP TSC0014449
ttaagggttgaa

SEQ ID NO: 290641 - DNA, 12 bp, Artificial Sequence
  Oligonucleotide primer for the detection of SNP TSC0014450
ccaaaaaaatct

SEQ ID NO: 290642 - DNA, 12 bp, Artificial Sequence
  Oligonucleotide primer for the detection of SNP TSC0014450
gtttttattaga

SEQ ID NO: 290643 - DNA, 12 bp, Artificial Sequence
  Oligonucleotide primer for the detection of SNP TSC0014451
aaaccccctcat

SEQ ID NO: 290644 - DNA, 12 bp, Artificial Sequence
  Oligonucleotide primer for the detection of SNP TSC0014451
gtgtgtttgatg

SEQ ID NO: 290645 - DNA, 12 bp, Artificial Sequence
  Oligonucleotide primer for the detection of SNP TSC0014452
aaaaaaatcaaa

SEQ ID NO: 290646 - DNA, 12 bp, Artificial Sequence
  Oligonucleotide primer for the detection of SNP TSC0014452
aaaaaaatcgaa

SEQ ID NO: 290647 - DNA, 12 bp, Artificial Sequence
  Oligonucleotide primer for the detection of SNP TSC0014452
cccactaccctc

SEQ ID NO: 290648 - DNA, 12 bp, Artificial Sequence
  Oligonucleotide primer for the detection of SNP TSC0014452
gggaaaattgag

SEQ ID NO: 290649 - DNA, 12 bp, Artificial Sequence
  Oligonucleotide primer for the detection of SNP TSC0014452
gggaaaatcgag

SEQ ID NO: 290650 - DNA, 12 bp, Artificial Sequence
  Oligonucleotide primer for the detection of SNP TSC0014454
tatattggggta

SEQ ID NO: 290651 - DNA, 12 bp, Artificial Sequence
  Oligonucleotide primer for the detection of SNP TSC0014455
tttactaaaact

SEQ ID NO: 290652 - DNA, 12 bp, Artificial Sequence
  Oligonucleotide primer for the detection of SNP TSC0014455
ttattgttgaag

SEQ ID NO: 290653 - DNA, 12 bp, Artificial Sequence
  Oligonucleotide primer for the detection of SNP TSC0014459
aaacctactcca

SEQ ID NO: 290654 - DNA, 12 bp, Artificial Sequence
  Oligonucleotide primer for the detection of SNP TSC0014459
tgtttatgttag

SEQ ID NO: 290655 - DNA, 12 bp, Artificial Sequence
  Oligonucleotide primer for the detection of SNP TSC0014459
tacttatattaa

SEQ ID NO: 290656 - DNA, 12 bp, Artificial Sequence
  Oligonucleotide primer for the detection of SNP TSC0014459
agatttgtttta

SEQ ID NO: 290657 - DNA, 12 bp, Artificial Sequence
  Oligonucleotide primer for the detection of SNP TSC0014460
ccaaacctactc

SEQ ID NO: 290658 - DNA, 12 bp, Artificial Sequence
  Oligonucleotide primer for the detection of SNP TSC0014460
tttatgttaggt

SEQ ID NO: 290659 - DNA, 12 bp, Artificial Sequence
  Oligonucleotide primer for the detection of SNP TSC0014460
cttatattaaat

SEQ ID NO: 290660 - DNA, 12 bp, Artificial Sequence
  Oligonucleotide primer for the detection of SNP TSC0014460
ttagatttgttt

SEQ ID NO: 290661 - DNA, 12 bp, Artificial Sequence
  Oligonucleotide primer for the detection of SNP TSC0014461
caaactatattc

SEQ ID NO: 290662 - DNA, 12 bp, Artificial Sequence
  Oligonucleotide primer for the detection of SNP TSC0014461
tattagggatgg

SEQ ID NO: 290663 - DNA, 12 bp, Artificial Sequence
  Oligonucleotide primer for the detection of SNP TSC0014462
tcaaatcaaatt

SEQ ID NO: 290664 - DNA, 12 bp, Artificial Sequence
  Oligonucleotide primer for the detection of SNP TSC0014462
atttttaattag

SEQ ID NO: 290665 - DNA, 12 bp, Artificial Sequence
  Oligonucleotide primer for the detection of SNP TSC0014463
aaacaataatac

SEQ ID NO: 290666 - DNA, 12 bp, Artificial Sequence
  Oligonucleotide primer for the detection of SNP TSC0014463
aaacgataatac

SEQ ID NO: 290667 - DNA, 12 bp, Artificial Sequence
  Oligonucleotide primer for the detection of SNP TSC0014463
ggattgtttggg

SEQ ID NO: 290668 - DNA, 12 bp, Artificial Sequence
  Oligonucleotide primer for the detection of SNP TSC0014463
ggatcgtttggg

SEQ ID NO: 290669 - DNA, 12 bp, Artificial Sequence
  Oligonucleotide primer for the detection of SNP TSC0014463
aaccacctaaaa

SEQ ID NO: 290670 - DNA, 12 bp, Artificial Sequence
  Oligonucleotide primer for the detection of SNP TSC0014463
aaccgcctaaaa

SEQ ID NO: 290671 - DNA, 12 bp, Artificial Sequence
  Oligonucleotide primer for the detection of SNP TSC0014463
aggtggtggtgt

SEQ ID NO: 290672 - DNA, 12 bp, Artificial Sequence
  Oligonucleotide primer for the detection of SNP TSC0014463
aggcggtggtgt

SEQ ID NO: 290673 - DNA, 12 bp, Artificial Sequence
  Oligonucleotide primer for the detection of SNP TSC0014464
actcctataacc

SEQ ID NO: 290674 - DNA, 12 bp, Artificial Sequence
  Oligonucleotide primer for the detection of SNP TSC0014465
aaaaatcaccat

SEQ ID NO: 290675 - DNA, 12 bp, Artificial Sequence
  Oligonucleotide primer for the detection of SNP TSC0014465
aaaaatcaccgt

SEQ ID NO: 290676 - DNA, 12 bp, Artificial Sequence
  Oligonucleotide primer for the detection of SNP TSC0014465
ataggagttttg

SEQ ID NO: 290677 - DNA, 12 bp, Artificial Sequence
  Oligonucleotide primer for the detection of SNP TSC0014465
ataaaaatccta

SEQ ID NO: 290678 - DNA, 12 bp, Artificial Sequence
  Oligonucleotide primer for the detection of SNP TSC0014465
aggagttattgt

SEQ ID NO: 290679 - DNA, 12 bp, Artificial Sequence
  Oligonucleotide primer for the detection of SNP TSC0014465
aggagttatcgt

SEQ ID NO: 290680 - DNA, 12 bp, Artificial Sequence
  Oligonucleotide primer for the detection of SNP TSC0014470
actcattcataa

SEQ ID NO: 290681 - DNA, 12 bp, Artificial Sequence
  Oligonucleotide primer for the detection of SNP TSC0014470
ggtttaggaagg

SEQ ID NO: 290682 - DNA, 12 bp, Artificial Sequence
  Oligonucleotide primer for the detection of SNP TSC0014470
gtttatttatgg

SEQ ID NO: 290683 - DNA, 12 bp, Artificial Sequence
  Oligonucleotide primer for the detection of SNP TSC0014472
ctactaaacatt

SEQ ID NO: 290684 - DNA, 12 bp, Artificial Sequence
  Oligonucleotide primer for the detection of SNP TSC0014472
ttagttgtatag

SEQ ID NO: 290685 - DNA, 12 bp, Artificial Sequence
  Oligonucleotide primer for the detection of SNP TSC0014473
actaaactaacc

SEQ ID NO: 290686 - DNA, 12 bp, Artificial Sequence
  Oligonucleotide primer for the detection of SNP TSC0014473
atggagtttgaa

SEQ ID NO: 290687 - DNA, 12 bp, Artificial Sequence
  Oligonucleotide primer for the detection of SNP TSC0014474
accttccccaca

SEQ ID NO: 290688 - DNA, 12 bp, Artificial Sequence
  Oligonucleotide primer for the detection of SNP TSC0014474
ttttgaattatt

SEQ ID NO: 290689 - DNA, 12 bp, Artificial Sequence
  Oligonucleotide primer for the detection of SNP TSC0014474
tcttaaattatt

SEQ ID NO: 290690 - DNA, 12 bp, Artificial Sequence
  Oligonucleotide primer for the detection of SNP TSC0014475
ctaacaaaacta

SEQ ID NO: 290691 - DNA, 12 bp, Artificial Sequence
  Oligonucleotide primer for the detection of SNP TSC0014475
ctaacgaaacta

SEQ ID NO: 290692 - DNA, 12 bp, Artificial Sequence
  Oligonucleotide primer for the detection of SNP TSC0014475
gtgaagttgtga

SEQ ID NO: 290693 - DNA, 12 bp, Artificial Sequence
  Oligonucleotide primer for the detection of SNP TSC0014475
ataaaactataa

SEQ ID NO: 290694 - DNA, 12 bp, Artificial Sequence
  Oligonucleotide primer for the detection of SNP TSC0014475
taatggggttgt

SEQ ID NO: 290695 - DNA, 12 bp, Artificial Sequence
  Oligonukleotid-Primer
taacggggttgt

SEQ ID NO: 290696 - DNA, 12 bp, Artificial Sequence
  Oligonucleotide primer for the detection of SNP TSC0014475
taatggggttgc

SEQ ID NO: 290697 - DNA, 12 bp, Artificial Sequence
  Oligonucleotide primer for the detection of SNP TSC0014475
taacggggttgc

SEQ ID NO: 290698 - DNA, 12 bp, Artificial Sequence
  Oligonucleotide primer for the detection of SNP TSC0014476
cttaaaacttac

SEQ ID NO: 290699 - DNA, 12 bp, Artificial Sequence
  Oligonucleotide primer for the detection of SNP TSC0014476
aattttttgagg

SEQ ID NO: 290700 - DNA, 12 bp, Artificial Sequence
  Oligonucleotide primer for the detection of SNP TSC0014478
tactccacaaat

SEQ ID NO: 290701 - DNA, 12 bp, Artificial Sequence
  Oligonucleotide primer for the detection of SNP TSC0014478
tttaatattgag

SEQ ID NO: 290702 - DNA, 12 bp, Artificial Sequence
  Oligonucleotide primer for the detection of SNP TSC0014478
tttaatatcgag

SEQ ID NO: 290703 - DNA, 12 bp, Artificial Sequence
  Oligonucleotide primer for the detection of SNP TSC0014479
cctactcaacct

SEQ ID NO: 290704 - DNA, 12 bp, Artificial Sequence
  Oligonucleotide primer for the detection of SNP TSC0014479
cctactcgacct

SEQ ID NO: 290705 - DNA, 12 bp, Artificial Sequence
  Oligonucleotide primer for the detection of SNP TSC0014480
tttttgttatta

SEQ ID NO: 290706 - DNA, 12 bp, Artificial Sequence
  Oligonucleotide primer for the detection of SNP TSC0014480
ttttcgttatta

SEQ ID NO: 290707 - DNA, 12 bp, Artificial Sequence
  Oligonucleotide primer for the detection of SNP TSC0014481
tcctaaaataat

SEQ ID NO: 290708 - DNA, 12 bp, Artificial Sequence
  Oligonucleotide primer for the detection of SNP TSC0014481
tttatggttgat

SEQ ID NO: 290709 - DNA, 12 bp, Artificial Sequence
  Oligonucleotide primer for the detection of SNP TSC0014481
ctcataactaat

SEQ ID NO: 290710 - DNA, 12 bp, Artificial Sequence
  Oligonucleotide primer for the detection of SNP TSC0014481
ttttgaaatggt

SEQ ID NO: 290711 - DNA, 12 bp, Artificial Sequence
  Oligonucleotide primer for the detection of SNP TSC0014482
aatatatactat

SEQ ID NO: 290712 - DNA, 12 bp, Artificial Sequence
  Oligonucleotide primer for the detection of SNP TSC0014482
ttttttaggata

SEQ ID NO: 290713 - DNA, 12 bp, Artificial Sequence
  Oligonucleotide primer for the detection of SNP TSC0014483
ttcctactaact

SEQ ID NO: 290714 - DNA, 12 bp, Artificial Sequence
  Oligonucleotide primer for the detection of SNP TSC0014483
tggagggaggag

SEQ ID NO: 290715 - DNA, 12 bp, Artificial Sequence
  Oligonucleotide primer for the detection of SNP TSC0014483
tttttgttggtt

SEQ ID NO: 290716 - DNA, 12 bp, Artificial Sequence
  Oligonucleotide primer for the detection of SNP TSC0014486
aactccaataaa

SEQ ID NO: 290717 - DNA, 12 bp, Artificial Sequence
  Oligonucleotide primer for the detection of SNP TSC0014486
ttttaatctttt

SEQ ID NO: 290718 - DNA, 12 bp, Artificial Sequence
  Oligonucleotide primer for the detection of SNP TSC0014486
aaattttaatag

SEQ ID NO: 290719 - DNA, 12 bp, Artificial Sequence
  Oligonucleotide primer for the detection of SNP TSC0014487
aaatttttaact

SEQ ID NO: 290720 - DNA, 12 bp, Artificial Sequence
  Oligonucleotide primer for the detection of SNP TSC0014487
tatgaaattgaa

SEQ ID NO: 290721 - DNA, 12 bp, Artificial Sequence
  Oligonucleotide primer for the detection of SNP TSC0014488
tttcaataaaaa

SEQ ID NO: 290722 - DNA, 12 bp, Artificial Sequence
  Oligonucleotide primer for the detection of SNP TSC0014488
ttagtaggttta

SEQ ID NO: 290723 - DNA, 12 bp, Artificial Sequence
  Oligonucleotide primer for the detection of SNP TSC0014489
caccctcccaaa

SEQ ID NO: 290724 - DNA, 12 bp, Artificial Sequence
  Oligonucleotide primer for the detection of SNP TSC0014489
cgccctcccaaa

SEQ ID NO: 290725 - DNA, 12 bp, Artificial Sequence
  Oligonucleotide primer for the detection of SNP TSC0014489
gttttagttgtt

SEQ ID NO: 290726 - DNA, 12 bp, Artificial Sequence
  Oligonucleotide primer for the detection of SNP TSC0014489
accccaattact

SEQ ID NO: 290727 - DNA, 12 bp, Artificial Sequence
  Oligonucleotide primer for the detection of SNP TSC0014489
tgtttttttagg

SEQ ID NO: 290728 - DNA, 12 bp, Artificial Sequence
  Oligonucleotide primer for the detection of SNP TSC0014489
cgtttttttagg

SEQ ID NO: 290729 - DNA, 12 bp, Artificial Sequence
  Oligonucleotide primer for the detection of SNP TSC0014491
tatactaactcc

SEQ ID NO: 290730 - DNA, 12 bp, Artificial Sequence
  Oligonucleotide primer for the detection of SNP TSC0014491
tggagaggtttg

SEQ ID NO: 290731 - DNA, 12 bp, Artificial Sequence
  Oligonucleotide primer for the detection of SNP TSC0014491
tggagaggttcg

SEQ ID NO: 290732 - DNA, 12 bp, Artificial Sequence
  Oligonucleotide primer for the detection of SNP TSC0014491
taaaaaaaccca

SEQ ID NO: 290733 - DNA, 12 bp, Artificial Sequence
  Oligonucleotide primer for the detection of SNP TSC0014491
taaaaaaacccg

SEQ ID NO: 290734 - DNA, 12 bp, Artificial Sequence
  Oligonucleotide primer for the detection of SNP TSC0014491
tgtgttggtttt

SEQ ID NO: 290735 - DNA, 12 bp, Artificial Sequence
  Oligonucleotide primer for the detection of SNP TSC0014491
tgtgttggtttc

SEQ ID NO: 290736 - DNA, 12 bp, Artificial Sequence
  Oligonucleotide primer for the detection of SNP TSC0014492
taaatttctaat

SEQ ID NO: 290737 - DNA, 12 bp, Artificial Sequence
  Oligonucleotide primer for the detection of SNP TSC0014492
agtgagaaaata

SEQ ID NO: 290738 - DNA, 12 bp, Artificial Sequence
  Oligonucleotide primer for the detection of SNP TSC0014493
taataatactaa

SEQ ID NO: 290739 - DNA, 12 bp, Artificial Sequence
  Oligonucleotide primer for the detection of SNP TSC0014493
tttaaatcctca

SEQ ID NO: 290740 - DNA, 12 bp, Artificial Sequence
  Oligonucleotide primer for the detection of SNP TSC0014493
taataatgttaa

SEQ ID NO: 290741 - DNA, 12 bp, Artificial Sequence
  Oligonucleotide primer for the detection of SNP TSC0014494
ttctaaaatact

SEQ ID NO: 290742 - DNA, 12 bp, Artificial Sequence
  Oligonucleotide primer for the detection of SNP TSC0014494
ttattatttaga

SEQ ID NO: 290743 - DNA, 12 bp, Artificial Sequence
  Oligonucleotide primer for the detection of SNP TSC0014494
ttattacctaaa

SEQ ID NO: 290744 - DNA, 12 bp, Artificial Sequence
  Oligonucleotide primer for the detection of SNP TSC0014494
ttttaagatgtt

SEQ ID NO: 290745 - DNA, 12 bp, Artificial Sequence
  Oligonucleotide primer for the detection of SNP TSC0014495
ataacccataac

SEQ ID NO: 290746 - DNA, 12 bp, Artificial Sequence
  Oligonucleotide primer for the detection of SNP TSC0014495
agtggattattg

SEQ ID NO: 290747 - DNA, 12 bp, Artificial Sequence
  Oligonucleotide primer for the detection of SNP TSC0014496
aaatctctactc

SEQ ID NO: 290748 - DNA, 12 bp, Artificial Sequence
  Oligonucleotide primer for the detection of SNP TSC0014496
ggtgtgaaatga

SEQ ID NO: 290749 - DNA, 12 bp, Artificial Sequence
  Oligonucleotide primer for the detection of SNP TSC0014497
atctcctcaaaa

SEQ ID NO: 290750 - DNA, 12 bp, Artificial Sequence
  Oligonucleotide primer for the detection of SNP TSC0014497
ctttttccccat

SEQ ID NO: 290751 - DNA, 12 bp, Artificial Sequence
  Oligonucleotide primer for the detection of SNP TSC0014497
gtttttttagag

SEQ ID NO: 290752 - DNA, 12 bp, Artificial Sequence
  Oligonucleotide primer for the detection of SNP TSC0014499
aaacaaacaaac

SEQ ID NO: 290753 - DNA, 12 bp, Artificial Sequence
  Oligonucleotide primer for the detection of SNP TSC0014499
aagtaaatagat

SEQ ID NO: 290754 - DNA, 12 bp, Artificial Sequence
  Oligonucleotide primer for the detection of SNP TSC0014500
aaaaatactcca

SEQ ID NO: 290755 - DNA, 12 bp, Artificial Sequence
  Oligonucleotide primer for the detection of SNP TSC0014500
aaaaatactccg

SEQ ID NO: 290756 - DNA, 12 bp, Artificial Sequence
  Oligonucleotide primer for the detection of SNP TSC0014500
ctacaaacatcc

SEQ ID NO: 290757 - DNA, 12 bp, Artificial Sequence
  Oligonucleotide primer for the detection of SNP TSC0014500
ggagatgttttg

SEQ ID NO: 290758 - DNA, 12 bp, Artificial Sequence
  Oligonucleotide primer for the detection of SNP TSC0014500
ggagatgtttcg

SEQ ID NO: 290759 - DNA, 12 bp, Artificial Sequence
  Oligonucleotide primer for the detection of SNP TSC0014501
atcaatcttctt

SEQ ID NO: 290760 - DNA, 12 bp, Artificial Sequence
  Oligonucleotide primer for the detection of SNP TSC0014501
ggttagagataa

SEQ ID NO: 290761 - DNA, 12 bp, Artificial Sequence
  Oligonucleotide primer for the detection of SNP TSC0014502
ccaataaataat

SEQ ID NO: 290762 - DNA, 12 bp, Artificial Sequence
  Oligonucleotide primer for the detection of SNP TSC0014502
aatgtttaaaag

SEQ ID NO: 290763 - DNA, 12 bp, Artificial Sequence
  Oligonucleotide primer for the detection of SNP TSC0014504
ttcccaattttc

SEQ ID NO: 290764 - DNA, 12 bp, Artificial Sequence
  Oligonucleotide primer for the detection of SNP TSC0014504
ctttttttttta

SEQ ID NO: 290765 - DNA, 12 bp, Artificial Sequence
  Oligonucleotide primer for the detection of SNP TSC0014505
tatatatacatt

SEQ ID NO: 290766 - DNA, 12 bp, Artificial Sequence
  Oligonucleotide primer for the detection of SNP TSC0014505
gtaattagattg

SEQ ID NO: 290767 - DNA, 12 bp, Artificial Sequence
  Oligonucleotide primer for the detection of SNP TSC0014506
gggaagtttttg

SEQ ID NO: 290768 - DNA, 12 bp, Artificial Sequence
  Oligonucleotide primer for the detection of SNP TSC0014507
tccaacaactca

SEQ ID NO: 290769 - DNA, 12 bp, Artificial Sequence
  Oligonucleotide primer for the detection of SNP TSC0014507
tgaagatgagat

SEQ ID NO: 290770 - DNA, 12 bp, Artificial Sequence
  Oligonucleotide primer for the detection of SNP TSC0014507
taaaaataaaac

SEQ ID NO: 290771 - DNA, 12 bp, Artificial Sequence
  Oligonucleotide primer for the detection of SNP TSC0014507
tttagtagttta

SEQ ID NO: 290772 - DNA, 12 bp, Artificial Sequence
  Oligonucleotide primer for the detection of SNP TSC0014508
tcattttctaac

SEQ ID NO: 290773 - DNA, 12 bp, Artificial Sequence
  Oligonucleotide primer for the detection of SNP TSC0014508
gaatttttttgg

SEQ ID NO: 290774 - DNA, 12 bp, Artificial Sequence
  Oligonucleotide primer for the detection of SNP TSC0014509
acttaataatat

SEQ ID NO: 290775 - DNA, 12 bp, Artificial Sequence
  Oligonucleotide primer for the detection of SNP TSC0014509
taaaatagatga

SEQ ID NO: 290776 - DNA, 12 bp, Artificial Sequence
  Oligonucleotide primer for the detection of SNP TSC0014510
atatattatcta

SEQ ID NO: 290777 - DNA, 12 bp, Artificial Sequence
  Oligonucleotide primer for the detection of SNP TSC0014510
ttattatatgtt

SEQ ID NO: 290778 - DNA, 12 bp, Artificial Sequence
  Oligonucleotide primer for the detection of SNP TSC0014510
ccaccacatatt

SEQ ID NO: 290779 - DNA, 12 bp, Artificial Sequence
  Oligonucleotide primer for the detection of SNP TSC0014511
acaataactcac

SEQ ID NO: 290780 - DNA, 12 bp, Artificial Sequence
  Oligonucleotide primer for the detection of SNP TSC0014511
acgataactcac

SEQ ID NO: 290781 - DNA, 12 bp, Artificial Sequence
  Oligonucleotide primer for the detection of SNP TSC0014512
accctccttaaa

SEQ ID NO: 290782 - DNA, 12 bp, Artificial Sequence
  Oligonucleotide primer for the detection of SNP TSC0014512
tgttagagagtt

SEQ ID NO: 290783 - DNA, 12 bp, Artificial Sequence
  Oligonucleotide primer for the detection of SNP TSC0014512
taccaaaaaatt

SEQ ID NO: 290784 - DNA, 12 bp, Artificial Sequence
  Oligonucleotide primer for the detection of SNP TSC0014512
gttttttttaga

SEQ ID NO: 290785 - DNA, 12 bp, Artificial Sequence
  Oligonucleotide primer for the detection of SNP TSC0014513
ccatcaaatccc

SEQ ID NO: 290786 - DNA, 12 bp, Artificial Sequence
  Oligonucleotide primer for the detection of SNP TSC0014513
gtattgtaggga

SEQ ID NO: 290787 - DNA, 12 bp, Artificial Sequence
  Oligonucleotide primer for the detection of SNP TSC0014514
cttaatacctac

SEQ ID NO: 290788 - DNA, 12 bp, Artificial Sequence
  Oligonucleotide primer for the detection of SNP TSC0014514
tgtagtgtaaaa

SEQ ID NO: 290789 - DNA, 12 bp, Artificial Sequence
  Oligonucleotide primer for the detection of SNP TSC0014515
tctcataataat

SEQ ID NO: 290790 - DNA, 12 bp, Artificial Sequence
  Oligonucleotide primer for the detection of SNP TSC0014515
tttgtaatggtg

SEQ ID NO: 290791 - DNA, 12 bp, Artificial Sequence
  Oligonucleotide primer for the detection of SNP TSC0014516
tcaatttattct

SEQ ID NO: 290792 - DNA, 12 bp, Artificial Sequence
  Oligonucleotide primer for the detection of SNP TSC0014516
ttaaagtttgag

SEQ ID NO: 290793 - DNA, 12 bp, Artificial Sequence
  Oligonucleotide primer for the detection of SNP TSC0014517
tccaaaaactac

SEQ ID NO: 290794 - DNA, 12 bp, Artificial Sequence
  Oligonucleotide primer for the detection of SNP TSC0014517
tatagtatttta

SEQ ID NO: 290795 - DNA, 12 bp, Artificial Sequence
  Oligonucleotide primer for the detection of SNP TSC0014517
cacaacacttca

SEQ ID NO: 290796 - DNA, 12 bp, Artificial Sequence
  Oligonucleotide primer for the detection of SNP TSC0014517
tttagaggttgt

SEQ ID NO: 290797 - DNA, 12 bp, Artificial Sequence
  Oligonucleotide primer for the detection of SNP TSC0014520
tacaaaaaatcc

SEQ ID NO: 290798 - DNA, 12 bp, Artificial Sequence
  Oligonucleotide primer for the detection of SNP TSC0014520
aattttgtatta

SEQ ID NO: 290799 - DNA, 12 bp, Artificial Sequence
  Oligonucleotide primer for the detection of SNP TSC0014520
aatttcgtatta

SEQ ID NO: 290800 - DNA, 12 bp, Artificial Sequence
  Oligonucleotide primer for the detection of SNP TSC0014522
taccttctcact

SEQ ID NO: 290801 - DNA, 12 bp, Artificial Sequence
  Oligonucleotide primer for the detection of SNP TSC0014522
ttttgagggtta

SEQ ID NO: 290802 - DNA, 12 bp, Artificial Sequence
  Oligonucleotide primer for the detection of SNP TSC0014522
tttcgagggtta

SEQ ID NO: 290803 - DNA, 12 bp, Artificial Sequence
  Oligonucleotide primer for the detection of SNP TSC0014522
cctcaaaaacca

SEQ ID NO: 290804 - DNA, 12 bp, Artificial Sequence
  Oligonukleotid-Primer
cctcgaaaacca

SEQ ID NO: 290805 - DNA, 12 bp, Artificial Sequence
  Oligonucleotide primer for the detection of SNP TSC0014522
tgtttttttatt

SEQ ID NO: 290806 - DNA, 12 bp, Artificial Sequence
  Oligonucleotide primer for the detection of SNP TSC0014523
ccaaacacttcc

SEQ ID NO: 290807 - DNA, 12 bp, Artificial Sequence
  Oligonucleotide primer for the detection of SNP TSC0014523
ccaaacgcttcc

SEQ ID NO: 290808 - DNA, 12 bp, Artificial Sequence
  Oligonucleotide primer for the detection of SNP TSC0014523
agtagggtttta

SEQ ID NO: 290809 - DNA, 12 bp, Artificial Sequence
  Oligonucleotide primer for the detection of SNP TSC0014523
aacaaaattcca

SEQ ID NO: 290810 - DNA, 12 bp, Artificial Sequence
  Oligonucleotide primer for the detection of SNP TSC0014523
ttaaacgttttt

SEQ ID NO: 290811 - DNA, 12 bp, Artificial Sequence
  Oligonucleotide primer for the detection of SNP TSC0014524
tcacctttttct

SEQ ID NO: 290812 - DNA, 12 bp, Artificial Sequence
  Oligonucleotide primer for the detection of SNP TSC0014524
aaaaaaaggaga

SEQ ID NO: 290813 - DNA, 12 bp, Artificial Sequence
  Oligonucleotide primer for the detection of SNP TSC0014525
attattatattc

SEQ ID NO: 290814 - DNA, 12 bp, Artificial Sequence
  Oligonucleotide primer for the detection of SNP TSC0014526
acctttttattt

SEQ ID NO: 290815 - DNA, 12 bp, Artificial Sequence
  Oligonucleotide primer for the detection of SNP TSC0014526
agattaagaaag

SEQ ID NO: 290816 - DNA, 12 bp, Artificial Sequence
  Oligonucleotide primer for the detection of SNP TSC0014527
aataactcaaac

SEQ ID NO: 290817 - DNA, 12 bp, Artificial Sequence
  Oligonucleotide primer for the detection of SNP TSC0014527
atatatatgatt

SEQ ID NO: 290818 - DNA, 12 bp, Artificial Sequence
  Oligonucleotide primer for the detection of SNP TSC0014528
aattataaattc

SEQ ID NO: 290819 - DNA, 12 bp, Artificial Sequence
  Oligonucleotide primer for the detection of SNP TSC0014528
tatatagagtta

SEQ ID NO: 290820 - DNA, 12 bp, Artificial Sequence
  Oligonucleotide primer for the detection of SNP TSC0014529
aacatatatatc

SEQ ID NO: 290821 - DNA, 12 bp, Artificial Sequence
  Oligonucleotide primer for the detection of SNP TSC0014529
ttatataagaaa

SEQ ID NO: 290822 - DNA, 12 bp, Artificial Sequence
  Oligonucleotide primer for the detection of SNP TSC0014530
aacttacctaat

SEQ ID NO: 290823 - DNA, 12 bp, Artificial Sequence
  Oligonucleotide primer for the detection of SNP TSC0014530
tttttgaaataa

SEQ ID NO: 290824 - DNA, 12 bp, Artificial Sequence
  Oligonucleotide primer for the detection of SNP TSC0014530
tctctaaaataa

SEQ ID NO: 290825 - DNA, 12 bp, Artificial Sequence
  Oligonucleotide primer for the detection of SNP TSC0014530
aatttatttgat

SEQ ID NO: 290826 - DNA, 12 bp, Artificial Sequence
  Oligonucleotide primer for the detection of SNP TSC0014531
taaatttcttct

SEQ ID NO: 290827 - DNA, 12 bp, Artificial Sequence
  Oligonucleotide primer for the detection of SNP TSC0014531
tttgattttttg

SEQ ID NO: 290828 - DNA, 12 bp, Artificial Sequence
  Oligonucleotide primer for the detection of SNP TSC0014532
ccaaaatttaaa

SEQ ID NO: 290829 - DNA, 12 bp, Artificial Sequence
  Oligonucleotide primer for the detection of SNP TSC0014532
attgtgagttat

SEQ ID NO: 290830 - DNA, 12 bp, Artificial Sequence
  Oligonucleotide primer for the detection of SNP TSC0014532
actataaattat

SEQ ID NO: 290831 - DNA, 12 bp, Artificial Sequence
  Oligonucleotide primer for the detection of SNP TSC0014532
gttaagatttaa

SEQ ID NO: 290832 - DNA, 12 bp, Artificial Sequence
  Oligonucleotide primer for the detection of SNP TSC0014533
cacacaactatc

SEQ ID NO: 290833 - DNA, 12 bp, Artificial Sequence
  Oligonucleotide primer for the detection of SNP TSC0014533
tttgtgttatta

SEQ ID NO: 290834 - DNA, 12 bp, Artificial Sequence
  Oligonucleotide primer for the detection of SNP TSC0014534
tttttaacctac

SEQ ID NO: 290835 - DNA, 12 bp, Artificial Sequence
  Oligonucleotide primer for the detection of SNP TSC0014534
tgttgggttggg

SEQ ID NO: 290836 - DNA, 12 bp, Artificial Sequence
  Oligonucleotide primer for the detection of SNP TSC0014534
tgtcgggttggg

SEQ ID NO: 290837 - DNA, 12 bp, Artificial Sequence
  Oligonucleotide primer for the detection of SNP TSC0014535
atttactcacac

SEQ ID NO: 290838 - DNA, 12 bp, Artificial Sequence
  Oligonucleotide primer for the detection of SNP TSC0014535
gtataattgttg

SEQ ID NO: 290839 - DNA, 12 bp, Artificial Sequence
  Oligonucleotide primer for the detection of SNP TSC0014536
tattttcacaaa

SEQ ID NO: 290840 - DNA, 12 bp, Artificial Sequence
  Oligonucleotide primer for the detection of SNP TSC0014536
gttataatattt

SEQ ID NO: 290841 - DNA, 12 bp, Artificial Sequence
  Oligonucleotide primer for the detection of SNP TSC0014536
gttataatattc

SEQ ID NO: 290842 - DNA, 12 bp, Artificial Sequence
  Oligonucleotide primer for the detection of SNP TSC0014536
aattacaacact

SEQ ID NO: 290843 - DNA, 12 bp, Artificial Sequence
  Oligonucleotide primer for the detection of SNP TSC0014536
atttttataaat

SEQ ID NO: 290844 - DNA, 12 bp, Artificial Sequence
  Oligonucleotide primer for the detection of SNP TSC0014537
acttaaaaactc

SEQ ID NO: 290845 - DNA, 12 bp, Artificial Sequence
  Oligonucleotide primer for the detection of SNP TSC0014537
gcttaaaaactc

SEQ ID NO: 290846 - DNA, 12 bp, Artificial Sequence
  Oligonucleotide primer for the detection of SNP TSC0014538
tcctttaaaata

SEQ ID NO: 290847 - DNA, 12 bp, Artificial Sequence
  Oligonucleotide primer for the detection of SNP TSC0014538
gaggagttttat

SEQ ID NO: 290848 - DNA, 12 bp, Artificial Sequence
  Oligonucleotide primer for the detection of SNP TSC0014538
aaaaaaccccac

SEQ ID NO: 290849 - DNA, 12 bp, Artificial Sequence
  Oligonucleotide primer for the detection of SNP TSC0014538
ttttttggggtg

SEQ ID NO: 290850 - DNA, 12 bp, Artificial Sequence
  Oligonucleotide primer for the detection of SNP TSC0014539
taactcaaatcc

SEQ ID NO: 290851 - DNA, 12 bp, Artificial Sequence
  Oligonucleotide primer for the detection of SNP TSC0014539
taatataaatag

SEQ ID NO: 290852 - DNA, 12 bp, Artificial Sequence
  Oligonucleotide primer for the detection of SNP TSC0014543
tatataactccc

SEQ ID NO: 290853 - DNA, 12 bp, Artificial Sequence
  Oligonucleotide primer for the detection of SNP TSC0014543
gttattagtagg

SEQ ID NO: 290854 - DNA, 12 bp, Artificial Sequence
  Oligonucleotide primer for the detection of SNP TSC0014543
atcatcaacaaa

SEQ ID NO: 290855 - DNA, 12 bp, Artificial Sequence
  Oligonucleotide primer for the detection of SNP TSC0014543
tgtatgattttt

SEQ ID NO: 290856 - DNA, 12 bp, Artificial Sequence
  Oligonucleotide primer for the detection of SNP TSC0014544
ctctctacttcc

SEQ ID NO: 290857 - DNA, 12 bp, Artificial Sequence
  Oligonucleotide primer for the detection of SNP TSC0014544
gatttttagttg

SEQ ID NO: 290858 - DNA, 12 bp, Artificial Sequence
  Oligonucleotide primer for the detection of SNP TSC0014545
ctcaaaataact

SEQ ID NO: 290859 - DNA, 12 bp, Artificial Sequence
  Oligonucleotide primer for the detection of SNP TSC0014545
attattttccca

SEQ ID NO: 290860 - DNA, 12 bp, Artificial Sequence
  Oligonucleotide primer for the detection of SNP TSC0014545
tttagggtggtt

SEQ ID NO: 290861 - DNA, 12 bp, Artificial Sequence
  Oligonucleotide primer for the detection of SNP TSC0014546
aatataaaaaag

SEQ ID NO: 290862 - DNA, 12 bp, Artificial Sequence
  Oligonucleotide primer for the detection of SNP TSC0014547
tataataatact

SEQ ID NO: 290863 - DNA, 12 bp, Artificial Sequence
  Oligonucleotide primer for the detection of SNP TSC0014547
gttatttttata

SEQ ID NO: 290864 - DNA, 12 bp, Artificial Sequence
  Oligonucleotide primer for the detection of SNP TSC0014548
cataactaaaac

SEQ ID NO: 290865 - DNA, 12 bp, Artificial Sequence
  Oligonucleotide primer for the detection of SNP TSC0014548
cgtaactaaaac

SEQ ID NO: 290866 - DNA, 12 bp, Artificial Sequence
  Oligonucleotide primer for the detection of SNP TSC0014548
gattttgtttag

SEQ ID NO: 290867 - DNA, 12 bp, Artificial Sequence
  Oligonucleotide primer for the detection of SNP TSC0014548
aactctacccaa

SEQ ID NO: 290868 - DNA, 12 bp, Artificial Sequence
  Oligonucleotide primer for the detection of SNP TSC0014548
tgtgattggaat

SEQ ID NO: 290869 - DNA, 12 bp, Artificial Sequence
  Oligonucleotide primer for the detection of SNP TSC0014548
cgtgattggaat

SEQ ID NO: 290870 - DNA, 12 bp, Artificial Sequence
  Oligonucleotide primer for the detection of SNP TSC0014549
accaacataaaa

SEQ ID NO: 290871 - DNA, 12 bp, Artificial Sequence
  Oligonucleotide primer for the detection of SNP TSC0014549
accaacgtaaaa

SEQ ID NO: 290872 - DNA, 12 bp, Artificial Sequence
  Oligonucleotide primer for the detection of SNP TSC0014549
attgttttagtt

SEQ ID NO: 290873 - DNA, 12 bp, Artificial Sequence
  Oligonucleotide primer for the detection of SNP TSC0014549
actattccaatc

SEQ ID NO: 290874 - DNA, 12 bp, Artificial Sequence
  Oligonucleotide primer for the detection of SNP TSC0014549
attagtgtgggg

SEQ ID NO: 290875 - DNA, 12 bp, Artificial Sequence
  Oligonucleotide primer for the detection of SNP TSC0014549
attagcgtgggg

SEQ ID NO: 290876 - DNA, 12 bp, Artificial Sequence
  Oligonucleotide primer for the detection of SNP TSC0014553
caacaaccctat

SEQ ID NO: 290877 - DNA, 12 bp, Artificial Sequence
  Oligonucleotide primer for the detection of SNP TSC0014553
tttggtgtttag

SEQ ID NO: 290878 - DNA, 12 bp, Artificial Sequence
  Oligonucleotide primer for the detection of SNP TSC0014554
aaaaaaaactct

SEQ ID NO: 290879 - DNA, 12 bp, Artificial Sequence
  Oligonucleotide primer for the detection of SNP TSC0014554
gtattaagagga

SEQ ID NO: 290880 - DNA, 12 bp, Artificial Sequence
  Oligonucleotide primer for the detection of SNP TSC0014555
ttttttaagtta

SEQ ID NO: 290881 - DNA, 12 bp, Artificial Sequence
  Oligonucleotide primer for the detection of SNP TSC0014556
aaatctatattt

SEQ ID NO: 290882 - DNA, 12 bp, Artificial Sequence
  Oligonucleotide primer for the detection of SNP TSC0014556
gataaagaggga

SEQ ID NO: 290883 - DNA, 12 bp, Artificial Sequence
  Oligonucleotide primer for the detection of SNP TSC0014557
aactataaaaat

SEQ ID NO: 290884 - DNA, 12 bp, Artificial Sequence
  Oligonucleotide primer for the detection of SNP TSC0014557
aattttttagat

SEQ ID NO: 290885 - DNA, 12 bp, Artificial Sequence
  Oligonucleotide primer for the detection of SNP TSC0014557
caacttcttaaa

SEQ ID NO: 290886 - DNA, 12 bp, Artificial Sequence
  Oligonucleotide primer for the detection of SNP TSC0014557
ggttgtaagaat

SEQ ID NO: 290887 - DNA, 12 bp, Artificial Sequence
  Oligonucleotide primer for the detection of SNP TSC0014559
aattaatacaac

SEQ ID NO: 290888 - DNA, 12 bp, Artificial Sequence
  Oligonucleotide primer for the detection of SNP TSC0014559
gttggttttttc

SEQ ID NO: 290889 - DNA, 12 bp, Artificial Sequence
  Oligonucleotide primer for the detection of SNP TSC0014559
actaacttcttc

SEQ ID NO: 290890 - DNA, 12 bp, Artificial Sequence
  Oligonucleotide primer for the detection of SNP TSC0014559
agttgatgtagt

SEQ ID NO: 290891 - DNA, 12 bp, Artificial Sequence
  Oligonucleotide primer for the detection of SNP TSC0014559
agttgatgtagc

SEQ ID NO: 290892 - DNA, 12 bp, Artificial Sequence
  Oligonucleotide primer for the detection of SNP TSC0014560
taaacttacaat

SEQ ID NO: 290893 - DNA, 12 bp, Artificial Sequence
  Oligonucleotide primer for the detection of SNP TSC0014560
taattttttgga

SEQ ID NO: 290894 - DNA, 12 bp, Artificial Sequence
  Oligonucleotide primer for the detection of SNP TSC0014560
taatttttcgga

SEQ ID NO: 290895 - DNA, 12 bp, Artificial Sequence
  Oligonucleotide primer for the detection of SNP TSC0014561
aatattttccac

SEQ ID NO: 290896 - DNA, 12 bp, Artificial Sequence
  Oligonucleotide primer for the detection of SNP TSC0014561
tttaattttttc

SEQ ID NO: 290897 - DNA, 12 bp, Artificial Sequence
  Oligonucleotide primer for the detection of SNP TSC0014561
cccctaattttt

SEQ ID NO: 290898 - DNA, 12 bp, Artificial Sequence
  Oligonucleotide primer for the detection of SNP TSC0014561
agtattttttat

SEQ ID NO: 290899 - DNA, 12 bp, Artificial Sequence
  Oligonucleotide primer for the detection of SNP TSC0014564
aaaacctataaa

SEQ ID NO: 290900 - DNA, 12 bp, Artificial Sequence
  Oligonucleotide primer for the detection of SNP TSC0014564
ttatttttatgt

SEQ ID NO: 290901 - DNA, 12 bp, Artificial Sequence
  Oligonucleotide primer for the detection of SNP TSC0014564
ccattcccatat

SEQ ID NO: 290902 - DNA, 12 bp, Artificial Sequence
  Oligonucleotide primer for the detection of SNP TSC0014564
gaggtttgtgga

SEQ ID NO: 290903 - DNA, 12 bp, Artificial Sequence
  Oligonucleotide primer for the detection of SNP TSC0014565
ataaaaatctat

SEQ ID NO: 290904 - DNA, 12 bp, Artificial Sequence
  Oligonucleotide primer for the detection of SNP TSC0014565
gagggtagaata

SEQ ID NO: 290905 - DNA, 12 bp, Artificial Sequence
  Oligonucleotide primer for the detection of SNP TSC0014566
ctatacaaaata

SEQ ID NO: 290906 - DNA, 12 bp, Artificial Sequence
  Oligonucleotide primer for the detection of SNP TSC0014566
gtgtggggtttt

SEQ ID NO: 290907 - DNA, 12 bp, Artificial Sequence
  Oligonucleotide primer for the detection of SNP TSC0014566
gcgtggggtttt

SEQ ID NO: 290908 - DNA, 12 bp, Artificial Sequence
  Oligonucleotide primer for the detection of SNP TSC0014566
gttatataaggt

SEQ ID NO: 290909 - DNA, 12 bp, Artificial Sequence
  Oligonucleotide primer for the detection of SNP TSC0014569
tttttttaatat

SEQ ID NO: 290910 - DNA, 12 bp, Artificial Sequence
  Oligonucleotide primer for the detection of SNP TSC0014569
ttgagaaattgt

SEQ ID NO: 290911 - DNA, 12 bp, Artificial Sequence
  Oligonucleotide primer for the detection of SNP TSC0014569
attaaaaaatta

SEQ ID NO: 290912 - DNA, 12 bp, Artificial Sequence
  Oligonucleotide primer for the detection of SNP TSC0014569
ttttttaatgtt

SEQ ID NO: 290913 - DNA, 12 bp, Artificial Sequence
  Oligonucleotide primer for the detection of SNP TSC0014570
cccaaaacaaca

SEQ ID NO: 290914 - DNA, 12 bp, Artificial Sequence
  Oligonucleotide primer for the detection of SNP TSC0014570
cccaaaacgaca

SEQ ID NO: 290915 - DNA, 12 bp, Artificial Sequence
  Oligonucleotide primer for the detection of SNP TSC0014570
tggttttaggtt

SEQ ID NO: 290916 - DNA, 12 bp, Artificial Sequence
  Oligonucleotide primer for the detection of SNP TSC0014570
taatcccaaatt

SEQ ID NO: 290917 - DNA, 12 bp, Artificial Sequence
  Oligonucleotide primer for the detection of SNP TSC0014570
tttaaggtgata

SEQ ID NO: 290918 - DNA, 12 bp, Artificial Sequence
  Oligonucleotide primer for the detection of SNP TSC0014570
tttaaggcgata

SEQ ID NO: 290919 - DNA, 12 bp, Artificial Sequence
  Oligonucleotide primer for the detection of SNP TSC0014571
tctaccaaatca

SEQ ID NO: 290920 - DNA, 12 bp, Artificial Sequence
  Oligonucleotide primer for the detection of SNP TSC0014571
aaagttttttat

SEQ ID NO: 290921 - DNA, 12 bp, Artificial Sequence
  Oligonucleotide primer for the detection of SNP TSC0014571
aaaactttctac

SEQ ID NO: 290922 - DNA, 12 bp, Artificial Sequence
  Oligonucleotide primer for the detection of SNP TSC0014571
ttttgttaaatt

SEQ ID NO: 290923 - DNA, 12 bp, Artificial Sequence
  Oligonucleotide primer for the detection of SNP TSC0014572
tatcaaactaaa

SEQ ID NO: 290924 - DNA, 12 bp, Artificial Sequence
  Oligonucleotide primer for the detection of SNP TSC0014572
gggatttagtta

SEQ ID NO: 290925 - DNA, 12 bp, Artificial Sequence
  Oligonucleotide primer for the detection of SNP TSC0014572
aaaattcaatta

SEQ ID NO: 290926 - DNA, 12 bp, Artificial Sequence
  Oligonucleotide primer for the detection of SNP TSC0014572
gaaattcaatta

SEQ ID NO: 290927 - DNA, 12 bp, Artificial Sequence
  Oligonucleotide primer for the detection of SNP TSC0014572
tgttaggttgag

SEQ ID NO: 290928 - DNA, 12 bp, Artificial Sequence
  Oligonucleotide primer for the detection of SNP TSC0014574
tcctcatataat

SEQ ID NO: 290929 - DNA, 12 bp, Artificial Sequence
  Oligonucleotide primer for the detection of SNP TSC0014574
ttatttgtttag

SEQ ID NO: 290930 - DNA, 12 bp, Artificial Sequence
  Oligonucleotide primer for the detection of SNP TSC0014576
tataaaataata

SEQ ID NO: 290931 - DNA, 12 bp, Artificial Sequence
  Oligonucleotide primer for the detection of SNP TSC0014576
tagaatgtaggg

SEQ ID NO: 290932 - DNA, 12 bp, Artificial Sequence
  Oligonucleotide primer for the detection of SNP TSC0014577
aatgtagggtat

SEQ ID NO: 290933 - DNA, 12 bp, Artificial Sequence
  Oligonucleotide primer for the detection of SNP TSC0014579
accattacaaac

SEQ ID NO: 290934 - DNA, 12 bp, Artificial Sequence
  Oligonucleotide primer for the detection of SNP TSC0014579
tatagtttggag

SEQ ID NO: 290935 - DNA, 12 bp, Artificial Sequence
  Oligonucleotide primer for the detection of SNP TSC0014581
ttttatacttaa

SEQ ID NO: 290936 - DNA, 12 bp, Artificial Sequence
  Oligonucleotide primer for the detection of SNP TSC0014582
ccatctatatat

SEQ ID NO: 290937 - DNA, 12 bp, Artificial Sequence
  Oligonucleotide primer for the detection of SNP TSC0014582
ccgtctatatat

SEQ ID NO: 290938 - DNA, 12 bp, Artificial Sequence
  Oligonucleotide primer for the detection of SNP TSC0014582
ttttaaggtgta

SEQ ID NO: 290939 - DNA, 12 bp, Artificial Sequence
  Oligonucleotide primer for the detection of SNP TSC0014582
ttttaaggcgta

SEQ ID NO: 290940 - DNA, 12 bp, Artificial Sequence
  Oligonucleotide primer for the detection of SNP TSC0014582
tcccaaaacaca

SEQ ID NO: 290941 - DNA, 12 bp, Artificial Sequence
  Oligonucleotide primer for the detection of SNP TSC0014582
tcccaaaacgca

SEQ ID NO: 290942 - DNA, 12 bp, Artificial Sequence
  Oligonucleotide primer for the detection of SNP TSC0014582
ttgtttgtgtgt

SEQ ID NO: 290943 - DNA, 12 bp, Artificial Sequence
  Oligonucleotide primer for the detection of SNP TSC0014582
tcgtttgtgtgt

SEQ ID NO: 290944 - DNA, 12 bp, Artificial Sequence
  Oligonucleotide primer for the detection of SNP TSC0014583
acacacaaacac

SEQ ID NO: 290945 - DNA, 12 bp, Artificial Sequence
  Oligonucleotide primer for the detection of SNP TSC0014583
acacacaaacgc

SEQ ID NO: 290946 - DNA, 12 bp, Artificial Sequence
  Oligonucleotide primer for the detection of SNP TSC0014583
tgtgttgggggg

SEQ ID NO: 290947 - DNA, 12 bp, Artificial Sequence
  Oligonucleotide primer for the detection of SNP TSC0014584
taacaatcatca

SEQ ID NO: 290948 - DNA, 12 bp, Artificial Sequence
  Oligonucleotide primer for the detection of SNP TSC0014584
taacaatcatcg

SEQ ID NO: 290949 - DNA, 12 bp, Artificial Sequence
  Oligonucleotide primer for the detection of SNP TSC0014584
taacaatcgtca

SEQ ID NO: 290950 - DNA, 12 bp, Artificial Sequence
  Oligonucleotide primer for the detection of SNP TSC0014584
taacaatcgtcg

SEQ ID NO: 290951 - DNA, 12 bp, Artificial Sequence
  Oligonucleotide primer for the detection of SNP TSC0014584
aattggaattgt

SEQ ID NO: 290952 - DNA, 12 bp, Artificial Sequence
  Oligonucleotide primer for the detection of SNP TSC0014584
aattggaatcgt

SEQ ID NO: 290953 - DNA, 12 bp, Artificial Sequence
  Oligonucleotide primer for the detection of SNP TSC0014584
aactaaaaccac

SEQ ID NO: 290954 - DNA, 12 bp, Artificial Sequence
  Oligonucleotide primer for the detection of SNP TSC0014584
aactaaaaccgc

SEQ ID NO: 290955 - DNA, 12 bp, Artificial Sequence
  Oligonucleotide primer for the detection of SNP TSC0014584
tggtagttgttg

SEQ ID NO: 290956 - DNA, 12 bp, Artificial Sequence
  Oligonucleotide primer for the detection of SNP TSC0014584
tggtagtcgttg

SEQ ID NO: 290957 - DNA, 12 bp, Artificial Sequence
  Oligonucleotide primer for the detection of SNP TSC0014584
tggtagttgtcg

SEQ ID NO: 290958 - DNA, 12 bp, Artificial Sequence
  Oligonucleotide primer for the detection of SNP TSC0014584
tggtagtcgtcg

SEQ ID NO: 290959 - DNA, 12 bp, Artificial Sequence
  Oligonucleotide primer for the detection of SNP TSC0014585
cttctaatcaac

SEQ ID NO: 290960 - DNA, 12 bp, Artificial Sequence
  Oligonucleotide primer for the detection of SNP TSC0014585
agatgtggggag

SEQ ID NO: 290961 - DNA, 12 bp, Artificial Sequence
  Oligonucleotide primer for the detection of SNP TSC0014585
agacgtggggag

SEQ ID NO: 290962 - DNA, 12 bp, Artificial Sequence
  Oligonucleotide primer for the detection of SNP TSC0014585
agatgcggggag

SEQ ID NO: 290963 - DNA, 12 bp, Artificial Sequence
  Oligonucleotide primer for the detection of SNP TSC0014585
agacgcggggag

SEQ ID NO: 290964 - DNA, 12 bp, Artificial Sequence
  Oligonucleotide primer for the detection of SNP TSC0014585
aacacaaaaaaa

SEQ ID NO: 290965 - DNA, 12 bp, Artificial Sequence
  Oligonucleotide primer for the detection of SNP TSC0014585
aacacgaaaaaa

SEQ ID NO: 290966 - DNA, 12 bp, Artificial Sequence
  Oligonucleotide primer for the detection of SNP TSC0014585
aacgcaaaaaaa

SEQ ID NO: 290967 - DNA, 12 bp, Artificial Sequence
  Oligonucleotide primer for the detection of SNP TSC0014585
aacgcgaaaaaa

SEQ ID NO: 290968 - DNA, 12 bp, Artificial Sequence
  Oligonucleotide primer for the detection of SNP TSC0014585
tttttggttagt

SEQ ID NO: 290969 - DNA, 12 bp, Artificial Sequence
  Oligonucleotide primer for the detection of SNP TSC0014585
tttttggttagc

SEQ ID NO: 290970 - DNA, 12 bp, Artificial Sequence
  Oligonucleotide primer for the detection of SNP TSC0014586
ccaacttctatc

SEQ ID NO: 290971 - DNA, 12 bp, Artificial Sequence
  Oligonucleotide primer for the detection of SNP TSC0014586
ccgacttctatc

SEQ ID NO: 290972 - DNA, 12 bp, Artificial Sequence
  Oligonucleotide primer for the detection of SNP TSC0014586
gatgtgagagag

SEQ ID NO: 290973 - DNA, 12 bp, Artificial Sequence
  Oligonucleotide primer for the detection of SNP TSC0014586
gacgtgagagag

SEQ ID NO: 290974 - DNA, 12 bp, Artificial Sequence
  Oligonukleotid-Primer
catctctctctc

SEQ ID NO: 290975 - DNA, 12 bp, Artificial Sequence
  Oligonucleotide primer for the detection of SNP TSC0014587
cgtctctctctc

SEQ ID NO: 290976 - DNA, 12 bp, Artificial Sequence
  Oligonucleotide primer for the detection of SNP TSC0014587
agagagagagag

SEQ ID NO: 290977 - DNA, 12 bp, Artificial Sequence
  Oligonucleotide primer for the detection of SNP TSC0014588
acctcttaaata

SEQ ID NO: 290978 - DNA, 12 bp, Artificial Sequence
  Oligonucleotide primer for the detection of SNP TSC0014588
ttgtagttttag

SEQ ID NO: 290979 - DNA, 12 bp, Artificial Sequence
  Oligonucleotide primer for the detection of SNP TSC0014589
taatctaatact

SEQ ID NO: 290980 - DNA, 12 bp, Artificial Sequence
  Oligonucleotide primer for the detection of SNP TSC0014589
gaaattagaatg

SEQ ID NO: 290981 - DNA, 12 bp, Artificial Sequence
  Oligonucleotide primer for the detection of SNP TSC0014589
tagtttaatatt

SEQ ID NO: 290982 - DNA, 12 bp, Artificial Sequence
  Oligonucleotide primer for the detection of SNP TSC0014590
tacttattatta

SEQ ID NO: 290983 - DNA, 12 bp, Artificial Sequence
  Oligonucleotide primer for the detection of SNP TSC0014590
agagtttagaaa

SEQ ID NO: 290984 - DNA, 12 bp, Artificial Sequence
  Oligonucleotide primer for the detection of SNP TSC0014590
tatttattattg

SEQ ID NO: 290985 - DNA, 12 bp, Artificial Sequence
  Oligonucleotide primer for the detection of SNP TSC0014591
tcttcacaccta

SEQ ID NO: 290986 - DNA, 12 bp, Artificial Sequence
  Oligonucleotide primer for the detection of SNP TSC0014591
tgttgttttagt

SEQ ID NO: 290987 - DNA, 12 bp, Artificial Sequence
  Oligonucleotide primer for the detection of SNP TSC0014591
cgttgttttagt

SEQ ID NO: 290988 - DNA, 12 bp, Artificial Sequence
  Oligonucleotide primer for the detection of SNP TSC0014591
acactactctaa

SEQ ID NO: 290989 - DNA, 12 bp, Artificial Sequence
  Oligonucleotide primer for the detection of SNP TSC0014591
acgctactctaa

SEQ ID NO: 290990 - DNA, 12 bp, Artificial Sequence
  Oligonucleotide primer for the detection of SNP TSC0014591
tttttatatttg

SEQ ID NO: 290991 - DNA, 12 bp, Artificial Sequence
  Oligonucleotide primer for the detection of SNP TSC0014592
aatctataaaaa

SEQ ID NO: 290992 - DNA, 12 bp, Artificial Sequence
  Oligonucleotide primer for the detection of SNP TSC0014592
tgtgaaattatt

SEQ ID NO: 290993 - DNA, 12 bp, Artificial Sequence
  Oligonucleotide primer for the detection of SNP TSC0014592
cgtgaaattatt

SEQ ID NO: 290994 - DNA, 12 bp, Artificial Sequence
  Oligonucleotide primer for the detection of SNP TSC0014592
tgtgaaattatc

SEQ ID NO: 290995 - DNA, 12 bp, Artificial Sequence
  Oligonucleotide primer for the detection of SNP TSC0014592
cgtgaaattatc

SEQ ID NO: 290996 - DNA, 12 bp, Artificial Sequence
  Oligonucleotide primer for the detection of SNP TSC0014592
acataaaatcat

SEQ ID NO: 290997 - DNA, 12 bp, Artificial Sequence
  Oligonucleotide primer for the detection of SNP TSC0014592
acgtaaaatcat

SEQ ID NO: 290998 - DNA, 12 bp, Artificial Sequence
  Oligonucleotide primer for the detection of SNP TSC0014592
aatttgtaaaaa

SEQ ID NO: 290999 - DNA, 12 bp, Artificial Sequence
  Oligonucleotide primer for the detection of SNP TSC0014593
cttaaacccaaa

SEQ ID NO: 291000 - DNA, 12 bp, Artificial Sequence
  Oligonucleotide primer for the detection of SNP TSC0014593
gtaatttttatc

SEQ ID NO: 291001 - DNA, 12 bp, Artificial Sequence
  Oligonucleotide primer for the detection of SNP TSC0014593
ctacaacctcca

SEQ ID NO: 291002 - DNA, 12 bp, Artificial Sequence
  Oligonucleotide primer for the detection of SNP TSC0014593
tatttgaattta

SEQ ID NO: 291003 - DNA, 12 bp, Artificial Sequence
  Oligonucleotide primer for the detection of SNP TSC0014594
aacaataattac

SEQ ID NO: 291004 - DNA, 12 bp, Artificial Sequence
  Oligonucleotide primer for the detection of SNP TSC0014594
acaaactcaaaa

SEQ ID NO: 291005 - DNA, 12 bp, Artificial Sequence
  Oligonucleotide primer for the detection of SNP TSC0014594
aataatggttat

SEQ ID NO: 291006 - DNA, 12 bp, Artificial Sequence
  Oligonucleotide primer for the detection of SNP TSC0014595
acctcccataat

SEQ ID NO: 291007 - DNA, 12 bp, Artificial Sequence
  Oligonucleotide primer for the detection of SNP TSC0014595
acctcccgtaat

SEQ ID NO: 291008 - DNA, 12 bp, Artificial Sequence
  Oligonucleotide primer for the detection of SNP TSC0014596
caacctctatct

SEQ ID NO: 291009 - DNA, 12 bp, Artificial Sequence
  Oligonucleotide primer for the detection of SNP TSC0014597
ccaacccctctt

SEQ ID NO: 291010 - DNA, 12 bp, Artificial Sequence
  Oligonucleotide primer for the detection of SNP TSC0014597
ggtgaggaaaga

SEQ ID NO: 291011 - DNA, 12 bp, Artificial Sequence
  Oligonucleotide primer for the detection of SNP TSC0014598
taaaaactaaaa

SEQ ID NO: 291012 - DNA, 12 bp, Artificial Sequence
  Oligonucleotide primer for the detection of SNP TSC0014598
tttgggtaatat

SEQ ID NO: 291013 - DNA, 12 bp, Artificial Sequence
  Oligonucleotide primer for the detection of SNP TSC0014598
cctaaacaacac

SEQ ID NO: 291014 - DNA, 12 bp, Artificial Sequence
  Oligonucleotide primer for the detection of SNP TSC0014598
tagagattagag

SEQ ID NO: 291015 - DNA, 12 bp, Artificial Sequence
  Oligonucleotide primer for the detection of SNP TSC0014599
aataaaatatcc

SEQ ID NO: 291016 - DNA, 12 bp, Artificial Sequence
  Oligonucleotide primer for the detection of SNP TSC0014599
attaatttatag

SEQ ID NO: 291017 - DNA, 12 bp, Artificial Sequence
  Oligonucleotide primer for the detection of SNP TSC0014599
attaatctataa

SEQ ID NO: 291018 - DNA, 12 bp, Artificial Sequence
  Oligonucleotide primer for the detection of SNP TSC0014600
aaaaaaatactt

SEQ ID NO: 291019 - DNA, 12 bp, Artificial Sequence
  Oligonucleotide primer for the detection of SNP TSC0014600
gtttttagttaa

SEQ ID NO: 291020 - DNA, 12 bp, Artificial Sequence
  Oligonucleotide primer for the detection of SNP TSC0014600
attctcaattaa

SEQ ID NO: 291021 - DNA, 12 bp, Artificial Sequence
  Oligonucleotide primer for the detection of SNP TSC0014600
aggggggtgttt

SEQ ID NO: 291022 - DNA, 12 bp, Artificial Sequence
  Oligonucleotide primer for the detection of SNP TSC0014601
gaaaacaaaaaa

SEQ ID NO: 291023 - DNA, 12 bp, Artificial Sequence
  Oligonucleotide primer for the detection of SNP TSC0014601
ttaatattaagt

SEQ ID NO: 291024 - DNA, 12 bp, Artificial Sequence
  Oligonucleotide primer for the detection of SNP TSC0014601
taacattaaaca

SEQ ID NO: 291025 - DNA, 12 bp, Artificial Sequence
  Oligonucleotide primer for the detection of SNP TSC0014601
gagaataggggg

SEQ ID NO: 291026 - DNA, 12 bp, Artificial Sequence
  Oligonucleotide primer for the detection of SNP TSC0014602
aaataaaacaat

SEQ ID NO: 291027 - DNA, 12 bp, Artificial Sequence
  Oligonucleotide primer for the detection of SNP TSC0014602
aaataaaacgat

SEQ ID NO: 291028 - DNA, 12 bp, Artificial Sequence
  Oligonucleotide primer for the detection of SNP TSC0014602
tttgggatagta

SEQ ID NO: 291029 - DNA, 12 bp, Artificial Sequence
  Oligonucleotide primer for the detection of SNP TSC0014602
cctaaaacaaca

SEQ ID NO: 291030 - DNA, 12 bp, Artificial Sequence
  Oligonucleotide primer for the detection of SNP TSC0014602
gggtggggtggt

SEQ ID NO: 291031 - DNA, 12 bp, Artificial Sequence
  Oligonucleotide primer for the detection of SNP TSC0014602
gggtggggcggt

SEQ ID NO: 291032 - DNA, 12 bp, Artificial Sequence
  Oligonucleotide primer for the detection of SNP TSC0014605
tatcttcaaaaa

SEQ ID NO: 291033 - DNA, 12 bp, Artificial Sequence
  Oligonucleotide primer for the detection of SNP TSC0014605
gaggaagttatt

SEQ ID NO: 291034 - DNA, 12 bp, Artificial Sequence
  Oligonucleotide primer for the detection of SNP TSC0014605
gaggaagttatc

SEQ ID NO: 291035 - DNA, 12 bp, Artificial Sequence
  Oligonucleotide primer for the detection of SNP TSC0014605
ctaaaaaaatca

SEQ ID NO: 291036 - DNA, 12 bp, Artificial Sequence
  Oligonucleotide primer for the detection of SNP TSC0014606
aaaataaatctt

SEQ ID NO: 291037 - DNA, 12 bp, Artificial Sequence
  Oligonucleotide primer for the detection of SNP TSC0014606
tgaagataaatg

SEQ ID NO: 291038 - DNA, 12 bp, Artificial Sequence
  Oligonucleotide primer for the detection of SNP TSC0014606
tgaagataaacg

SEQ ID NO: 291039 - DNA, 12 bp, Artificial Sequence
  Oligonucleotide primer for the detection of SNP TSC0014611
aatttctccctc

SEQ ID NO: 291040 - DNA, 12 bp, Artificial Sequence
  Oligonucleotide primer for the detection of SNP TSC0014611
tggtgatattta

SEQ ID NO: 291041 - DNA, 12 bp, Artificial Sequence
  Oligonucleotide primer for the detection of SNP TSC0014615
ttttggtagaat

SEQ ID NO: 291042 - DNA, 12 bp, Artificial Sequence
  Oligonucleotide primer for the detection of SNP TSC0014615
ttttaacaaaat

SEQ ID NO: 291043 - DNA, 12 bp, Artificial Sequence
  Oligonucleotide primer for the detection of SNP TSC0014616
catcactaaaac

SEQ ID NO: 291044 - DNA, 12 bp, Artificial Sequence
  Oligonucleotide primer for the detection of SNP TSC0014616
atttaggtgttg

SEQ ID NO: 291045 - DNA, 12 bp, Artificial Sequence
  Oligonucleotide primer for the detection of SNP TSC0014616
actcaaatacta

SEQ ID NO: 291046 - DNA, 12 bp, Artificial Sequence
  Oligonucleotide primer for the detection of SNP TSC0014616
tattattgaagt

SEQ ID NO: 291047 - DNA, 12 bp, Artificial Sequence
  Oligonucleotide primer for the detection of SNP TSC0014617
accctaataaat

SEQ ID NO: 291048 - DNA, 12 bp, Artificial Sequence
  Oligonucleotide primer for the detection of SNP TSC0014617
gagagttttgaa

SEQ ID NO: 291049 - DNA, 12 bp, Artificial Sequence
  Oligonucleotide primer for the detection of SNP TSC0014617
attttgatgaat

SEQ ID NO: 291050 - DNA, 12 bp, Artificial Sequence
  Oligonucleotide primer for the detection of SNP TSC0014619
actactactatt

SEQ ID NO: 291051 - DNA, 12 bp, Artificial Sequence
  Oligonukleotid-Primer
agtttatatata

SEQ ID NO: 291052 - DNA, 12 bp, Artificial Sequence
  Oligonucleotide primer for the detection of SNP TSC0014620
cccaacaaccct

SEQ ID NO: 291053 - DNA, 12 bp, Artificial Sequence
  Oligonucleotide primer for the detection of SNP TSC0014620
ttttttgatatt

SEQ ID NO: 291054 - DNA, 12 bp, Artificial Sequence
  Oligonucleotide primer for the detection of SNP TSC0014620
tttttcgatatt

SEQ ID NO: 291055 - DNA, 12 bp, Artificial Sequence
  Oligonucleotide primer for the detection of SNP TSC0014620
tttcccaacacc

SEQ ID NO: 291056 - DNA, 12 bp, Artificial Sequence
  Oligonucleotide primer for the detection of SNP TSC0014620
tttcccgacacc

SEQ ID NO: 291057 - DNA, 12 bp, Artificial Sequence
  Oligonucleotide primer for the detection of SNP TSC0014620
agtagttttttc

SEQ ID NO: 291058 - DNA, 12 bp, Artificial Sequence
  Oligonucleotide primer for the detection of SNP TSC0014621
ctcaataacaat

SEQ ID NO: 291059 - DNA, 12 bp, Artificial Sequence
  Oligonucleotide primer for the detection of SNP TSC0014621
aaaattaaggtg

SEQ ID NO: 291060 - DNA, 12 bp, Artificial Sequence
  Oligonucleotide primer for the detection of SNP TSC0014621
aaaatcaaaata

SEQ ID NO: 291061 - DNA, 12 bp, Artificial Sequence
  Oligonucleotide primer for the detection of SNP TSC0014621
tttagtagtaat

SEQ ID NO: 291062 - DNA, 12 bp, Artificial Sequence
  Oligonucleotide primer for the detection of SNP TSC0014622
aataaaaccaca

SEQ ID NO: 291063 - DNA, 12 bp, Artificial Sequence
  Oligonucleotide primer for the detection of SNP TSC0014622
aataaaaccgca

SEQ ID NO: 291064 - DNA, 12 bp, Artificial Sequence
  Oligonucleotide primer for the detection of SNP TSC0014622
gataaaaccaca

SEQ ID NO: 291065 - DNA, 12 bp, Artificial Sequence
  Oligonucleotide primer for the detection of SNP TSC0014622
gataaaaccgca

SEQ ID NO: 291066 - DNA, 12 bp, Artificial Sequence
  Oligonucleotide primer for the detection of SNP TSC0014622
ggagtgggaagt

SEQ ID NO: 291067 - DNA, 12 bp, Artificial Sequence
  Oligonucleotide primer for the detection of SNP TSC0014622
ggagcgggaagt

SEQ ID NO: 291068 - DNA, 12 bp, Artificial Sequence
  Oligonucleotide primer for the detection of SNP TSC0014622
aaaaacgaaaaa

SEQ ID NO: 291069 - DNA, 12 bp, Artificial Sequence
  Oligonucleotide primer for the detection of SNP TSC0014622
ggtgaaattgta

SEQ ID NO: 291070 - DNA, 12 bp, Artificial Sequence
  Oligonucleotide primer for the detection of SNP TSC0014622
ggtgaaatcgta

SEQ ID NO: 291071 - DNA, 12 bp, Artificial Sequence
  Oligonucleotide primer for the detection of SNP TSC0014624
taaaagttaagt

SEQ ID NO: 291072 - DNA, 12 bp, Artificial Sequence
  Oligonucleotide primer for the detection of SNP TSC0014624
taaaaattaaat

SEQ ID NO: 291073 - DNA, 12 bp, Artificial Sequence
  Oligonucleotide primer for the detection of SNP TSC0014625
aatctcaaactc

SEQ ID NO: 291074 - DNA, 12 bp, Artificial Sequence
  Oligonucleotide primer for the detection of SNP TSC0014625
aatctcgaactc

SEQ ID NO: 291075 - DNA, 12 bp, Artificial Sequence
  Oligonucleotide primer for the detection of SNP TSC0014625
tatttgaggtta

SEQ ID NO: 291076 - DNA, 12 bp, Artificial Sequence
  Oligonucleotide primer for the detection of SNP TSC0014626
tttactaactac

SEQ ID NO: 291077 - DNA, 12 bp, Artificial Sequence
  Oligonucleotide primer for the detection of SNP TSC0014626
gggtgaaggtgg

SEQ ID NO: 291078 - DNA, 12 bp, Artificial Sequence
  Oligonucleotide primer for the detection of SNP TSC0014627
ctctttcacaat

SEQ ID NO: 291079 - DNA, 12 bp, Artificial Sequence
  Oligonucleotide primer for the detection of SNP TSC0014627
ggtgtaatttta

SEQ ID NO: 291080 - DNA, 12 bp, Artificial Sequence
  Oligonucleotide primer for the detection of SNP TSC0014627
aatacaatctca

SEQ ID NO: 291081 - DNA, 12 bp, Artificial Sequence
  Oligonucleotide primer for the detection of SNP TSC0014628
aacaaatatact

SEQ ID NO: 291082 - DNA, 12 bp, Artificial Sequence
  Oligonucleotide primer for the detection of SNP TSC0014628
ttattttataga

SEQ ID NO: 291083 - DNA, 12 bp, Artificial Sequence
  Oligonucleotide primer for the detection of SNP TSC0014629
tactatactaat

SEQ ID NO: 291084 - DNA, 12 bp, Artificial Sequence
  Oligonucleotide primer for the detection of SNP TSC0014629
ttataagttaag

SEQ ID NO: 291085 - DNA, 12 bp, Artificial Sequence
  Oligonucleotide primer for the detection of SNP TSC0014630
ccaaaataatca

SEQ ID NO: 291086 - DNA, 12 bp, Artificial Sequence
  Oligonucleotide primer for the detection of SNP TSC0014630
agataagaaaag

SEQ ID NO: 291087 - DNA, 12 bp, Artificial Sequence
  Oligonucleotide primer for the detection of SNP TSC0014630
ttaaggtggtta

SEQ ID NO: 291088 - DNA, 12 bp, Artificial Sequence
  Oligonucleotide primer for the detection of SNP TSC0014631
aattctcctacc

SEQ ID NO: 291089 - DNA, 12 bp, Artificial Sequence
  Oligonucleotide primer for the detection of SNP TSC0014631
tttgagatgaag

SEQ ID NO: 291090 - DNA, 12 bp, Artificial Sequence
  Oligonucleotide primer for the detection of SNP TSC0014631
tttaaaataaaa

SEQ ID NO: 291091 - DNA, 12 bp, Artificial Sequence
  Oligonucleotide primer for the detection of SNP TSC0014631
aatttttttatt

SEQ ID NO: 291092 - DNA, 12 bp, Artificial Sequence
  Oligonucleotide primer for the detection of SNP TSC0014631
aatttttttatc

SEQ ID NO: 291093 - DNA, 12 bp, Artificial Sequence
  Oligonucleotide primer for the detection of SNP TSC0014632
aaatcatctcta

SEQ ID NO: 291094 - DNA, 12 bp, Artificial Sequence
  Oligonucleotide primer for the detection of SNP TSC0014632
atagagatatta

SEQ ID NO: 291095 - DNA, 12 bp, Artificial Sequence
  Oligonucleotide primer for the detection of SNP TSC0014632
acaaaaatatta

SEQ ID NO: 291096 - DNA, 12 bp, Artificial Sequence
  Oligonucleotide primer for the detection of SNP TSC0014632
aagttattttta

SEQ ID NO: 291097 - DNA, 12 bp, Artificial Sequence
  Oligonucleotide primer for the detection of SNP TSC0014633
acatcttttaat

SEQ ID NO: 291098 - DNA, 12 bp, Artificial Sequence
  Oligonucleotide primer for the detection of SNP TSC0014633
atattttgttgt

SEQ ID NO: 291099 - DNA, 12 bp, Artificial Sequence
  Oligonucleotide primer for the detection of SNP TSC0014633
atatcttactat

SEQ ID NO: 291100 - DNA, 12 bp, Artificial Sequence
  Oligonucleotide primer for the detection of SNP TSC0014633
gtattttttggt

SEQ ID NO: 291101 - DNA, 12 bp, Artificial Sequence
  Oligonucleotide primer for the detection of SNP TSC0014635
aaatctcacaac

SEQ ID NO: 291102 - DNA, 12 bp, Artificial Sequence
  Oligonucleotide primer for the detection of SNP TSC0014635
aaatctcgcaac

SEQ ID NO: 291103 - DNA, 12 bp, Artificial Sequence
  Oligonucleotide primer for the detection of SNP TSC0014635
agtagtagggta

SEQ ID NO: 291104 - DNA, 12 bp, Artificial Sequence
  Oligonucleotide primer for the detection of SNP TSC0014636
tctaatcttttc

SEQ ID NO: 291105 - DNA, 12 bp, Artificial Sequence
  Oligonucleotide primer for the detection of SNP TSC0014636
ttgtggttttgg

SEQ ID NO: 291106 - DNA, 12 bp, Artificial Sequence
  Oligonucleotide primer for the detection of SNP TSC0014637
actattatactc

SEQ ID NO: 291107 - DNA, 12 bp, Artificial Sequence
  Oligonucleotide primer for the detection of SNP TSC0014637
gtattttaatat

SEQ ID NO: 291108 - DNA, 12 bp, Artificial Sequence
  Oligonucleotide primer for the detection of SNP TSC0014637
gtattttaatac

SEQ ID NO: 291109 - DNA, 12 bp, Artificial Sequence
  Oligonucleotide primer for the detection of SNP TSC0014637
tatattccaaca

SEQ ID NO: 291110 - DNA, 12 bp, Artificial Sequence
  Oligonucleotide primer for the detection of SNP TSC0014641
accttccttccc

SEQ ID NO: 291111 - DNA, 12 bp, Artificial Sequence
  Oligonucleotide primer for the detection of SNP TSC0014641
aggtttgaagag

SEQ ID NO: 291112 - DNA, 12 bp, Artificial Sequence
  Oligonucleotide primer for the detection of SNP TSC0014642
caatacaaccct

SEQ ID NO: 291113 - DNA, 12 bp, Artificial Sequence
  Oligonucleotide primer for the detection of SNP TSC0014643
caacctatacac

SEQ ID NO: 291114 - DNA, 12 bp, Artificial Sequence
  Oligonucleotide primer for the detection of SNP TSC0014643
gggtggaggtgg

SEQ ID NO: 291115 - DNA, 12 bp, Artificial Sequence
  Oligonucleotide primer for the detection of SNP TSC0014644
ttataaataaat

SEQ ID NO: 291116 - DNA, 12 bp, Artificial Sequence
  Oligonucleotide primer for the detection of SNP TSC0014644
gatttatgggag

SEQ ID NO: 291117 - DNA, 12 bp, Artificial Sequence
  Oligonucleotide primer for the detection of SNP TSC0014645
aatctccaacca

SEQ ID NO: 291118 - DNA, 12 bp, Artificial Sequence
  Oligonucleotide primer for the detection of SNP TSC0014645
aatctccaaccg

SEQ ID NO: 291119 - DNA, 12 bp, Artificial Sequence
  Oligonucleotide primer for the detection of SNP TSC0014645
taagggtttttt

SEQ ID NO: 291120 - DNA, 12 bp, Artificial Sequence
  Oligonucleotide primer for the detection of SNP TSC0014645
aaaaacccccta

SEQ ID NO: 291121 - DNA, 12 bp, Artificial Sequence
  Oligonucleotide primer for the detection of SNP TSC0014645
ggtttttaattg

SEQ ID NO: 291122 - DNA, 12 bp, Artificial Sequence
  Oligonucleotide primer for the detection of SNP TSC0014645
ggtttttaatcg

SEQ ID NO: 291123 - DNA, 12 bp, Artificial Sequence
  Oligonucleotide primer for the detection of SNP TSC0014646
aatattaaaaat

SEQ ID NO: 291124 - DNA, 12 bp, Artificial Sequence
  Oligonucleotide primer for the detection of SNP TSC0014647
ttttacttattt

SEQ ID NO: 291125 - DNA, 12 bp, Artificial Sequence
  Oligonucleotide primer for the detection of SNP TSC0014648
cattctttaatt

SEQ ID NO: 291126 - DNA, 12 bp, Artificial Sequence
  Oligonucleotide primer for the detection of SNP TSC0014648
atttttttttaa

SEQ ID NO: 291127 - DNA, 12 bp, Artificial Sequence
  Oligonucleotide primer for the detection of SNP TSC0014648
tattttttaatt

SEQ ID NO: 291128 - DNA, 12 bp, Artificial Sequence
  Oligonucleotide primer for the detection of SNP TSC0014649
tgtttattattt

SEQ ID NO: 291129 - DNA, 12 bp, Artificial Sequence
  Oligonucleotide primer for the detection of SNP TSC0014649
tgtttattattc

SEQ ID NO: 291130 - DNA, 12 bp, Artificial Sequence
  Oligonucleotide primer for the detection of SNP TSC0014649
tactcaccaccc

SEQ ID NO: 291131 - DNA, 12 bp, Artificial Sequence
  Oligonucleotide primer for the detection of SNP TSC0014649
ggtatagtgggg

SEQ ID NO: 291132 - DNA, 12 bp, Artificial Sequence
  Oligonucleotide primer for the detection of SNP TSC0014652
tctcctttacat

SEQ ID NO: 291133 - DNA, 12 bp, Artificial Sequence
  Oligonucleotide primer for the detection of SNP TSC0014652
ttgtttagagaa

SEQ ID NO: 291134 - DNA, 12 bp, Artificial Sequence
  Oligonucleotide primer for the detection of SNP TSC0014652
ttatctaaaaaa

SEQ ID NO: 291135 - DNA, 12 bp, Artificial Sequence
  Oligonucleotide primer for the detection of SNP TSC0014652
ttttttttgtat

SEQ ID NO: 291136 - DNA, 12 bp, Artificial Sequence
  Oligonucleotide primer for the detection of SNP TSC0014653
gaaaaaataact

SEQ ID NO: 291137 - DNA, 12 bp, Artificial Sequence
  Oligonucleotide primer for the detection of SNP TSC0014653
aagggtatggag

SEQ ID NO: 291138 - DNA, 12 bp, Artificial Sequence
  Oligonucleotide primer for the detection of SNP TSC0014656
aatacacccaaa

SEQ ID NO: 291139 - DNA, 12 bp, Artificial Sequence
  Oligonucleotide primer for the detection of SNP TSC0014656
aatacgcccaaa

SEQ ID NO: 291140 - DNA, 12 bp, Artificial Sequence
  Oligonucleotide primer for the detection of SNP TSC0014656
gttttatttggt

SEQ ID NO: 291141 - DNA, 12 bp, Artificial Sequence
  Oligonucleotide primer for the detection of SNP TSC0014656
attccatttaac

SEQ ID NO: 291142 - DNA, 12 bp, Artificial Sequence
  Oligonucleotide primer for the detection of SNP TSC0014656
gatgtgtttagg

SEQ ID NO: 291143 - DNA, 12 bp, Artificial Sequence
  Oligonucleotide primer for the detection of SNP TSC0014656
gatgcgtttagg

SEQ ID NO: 291144 - DNA, 12 bp, Artificial Sequence
  Oligonucleotide primer for the detection of SNP TSC0014659
cccccataccaa

SEQ ID NO: 291145 - DNA, 12 bp, Artificial Sequence
  Oligonucleotide primer for the detection of SNP TSC0014659
taggagagagag

SEQ ID NO: 291146 - DNA, 12 bp, Artificial Sequence
  Oligonucleotide primer for the detection of SNP TSC0014659
tttttatgttag

SEQ ID NO: 291147 - DNA, 12 bp, Artificial Sequence
  Oligonucleotide primer for the detection of SNP TSC0014660
aaacataaactt

SEQ ID NO: 291148 - DNA, 12 bp, Artificial Sequence
  Oligonukleotid-Primer
gtttttgttgtg

SEQ ID NO: 291149 - DNA, 12 bp, Artificial Sequence
  Oligonucleotide primer for the detection of SNP TSC0014660
gtttttgtcgtg

SEQ ID NO: 291150 - DNA, 12 bp, Artificial Sequence
  Oligonucleotide primer for the detection of SNP TSC0014660
atccctaccata

SEQ ID NO: 291151 - DNA, 12 bp, Artificial Sequence
  Oligonucleotide primer for the detection of SNP TSC0014660
atccctaccgta

SEQ ID NO: 291152 - DNA, 12 bp, Artificial Sequence
  Oligonucleotide primer for the detection of SNP TSC0014660
agatatgagttt

SEQ ID NO: 291153 - DNA, 12 bp, Artificial Sequence
  Oligonucleotide primer for the detection of SNP TSC0014661
ttacaacaaacc

SEQ ID NO: 291154 - DNA, 12 bp, Artificial Sequence
  Oligonucleotide primer for the detection of SNP TSC0014661
taagatttaata

SEQ ID NO: 291155 - DNA, 12 bp, Artificial Sequence
  Oligonucleotide primer for the detection of SNP TSC0014662
ccttcaacccaa

SEQ ID NO: 291156 - DNA, 12 bp, Artificial Sequence
  Oligonucleotide primer for the detection of SNP TSC0014662
tttgtgtatagg

SEQ ID NO: 291157 - DNA, 12 bp, Artificial Sequence
  Oligonucleotide primer for the detection of SNP TSC0014662
tttatatacaaa

SEQ ID NO: 291158 - DNA, 12 bp, Artificial Sequence
  Oligonucleotide primer for the detection of SNP TSC0014663
ctatacattatt

SEQ ID NO: 291159 - DNA, 12 bp, Artificial Sequence
  Oligonucleotide primer for the detection of SNP TSC0014663
ttgggaaatagg

SEQ ID NO: 291160 - DNA, 12 bp, Artificial Sequence
  Oligonucleotide primer for the detection of SNP TSC0014665
taccaatttcat

SEQ ID NO: 291161 - DNA, 12 bp, Artificial Sequence
  Oligonucleotide primer for the detection of SNP TSC0014665
ttgggattttta

SEQ ID NO: 291162 - DNA, 12 bp, Artificial Sequence
  Oligonucleotide primer for the detection of SNP TSC0014665
ttaaaattttca

SEQ ID NO: 291163 - DNA, 12 bp, Artificial Sequence
  Oligonucleotide primer for the detection of SNP TSC0014665
tattaattttat

SEQ ID NO: 291164 - DNA, 12 bp, Artificial Sequence
  Oligonucleotide primer for the detection of SNP TSC0014666
gaatttattata

SEQ ID NO: 291165 - DNA, 12 bp, Artificial Sequence
  Oligonucleotide primer for the detection of SNP TSC0014666
aaacttaccaca

SEQ ID NO: 291166 - DNA, 12 bp, Artificial Sequence
  Oligonucleotide primer for the detection of SNP TSC0014666
attatgtagttt

SEQ ID NO: 291167 - DNA, 12 bp, Artificial Sequence
  Oligonucleotide primer for the detection of SNP TSC0014667
attaaattacaa

SEQ ID NO: 291168 - DNA, 12 bp, Artificial Sequence
  Oligonucleotide primer for the detection of SNP TSC0014667
tcactttaaaaa

SEQ ID NO: 291169 - DNA, 12 bp, Artificial Sequence
  Oligonucleotide primer for the detection of SNP TSC0014667
gtgttaaattat

SEQ ID NO: 291170 - DNA, 12 bp, Artificial Sequence
  Oligonucleotide primer for the detection of SNP TSC0014668
aaaaaaattaac

SEQ ID NO: 291171 - DNA, 12 bp, Artificial Sequence
  Oligonucleotide primer for the detection of SNP TSC0014668
atttgtaatagt

SEQ ID NO: 291172 - DNA, 12 bp, Artificial Sequence
  Oligonucleotide primer for the detection of SNP TSC0014668
atttataataat

SEQ ID NO: 291173 - DNA, 12 bp, Artificial Sequence
  Oligonucleotide primer for the detection of SNP TSC0014668
aagaaaattaat

SEQ ID NO: 291174 - DNA, 12 bp, Artificial Sequence
  Oligonucleotide primer for the detection of SNP TSC0014669
cccccccaaccc

SEQ ID NO: 291175 - DNA, 12 bp, Artificial Sequence
  Oligonucleotide primer for the detection of SNP TSC0014669
gatttgatggtg

SEQ ID NO: 291176 - DNA, 12 bp, Artificial Sequence
  Oligonucleotide primer for the detection of SNP TSC0014669
aacttaataata

SEQ ID NO: 291177 - DNA, 12 bp, Artificial Sequence
  Oligonucleotide primer for the detection of SNP TSC0014670
tataacaaaaac

SEQ ID NO: 291178 - DNA, 12 bp, Artificial Sequence
  Oligonucleotide primer for the detection of SNP TSC0014670
aatatatattgg

SEQ ID NO: 291179 - DNA, 12 bp, Artificial Sequence
  Oligonucleotide primer for the detection of SNP TSC0014670
atacacactaaa

SEQ ID NO: 291180 - DNA, 12 bp, Artificial Sequence
  Oligonucleotide primer for the detection of SNP TSC0014670
tgtaataggggt

SEQ ID NO: 291181 - DNA, 12 bp, Artificial Sequence
  Oligonucleotide primer for the detection of SNP TSC0014670
tgtaataggggc

SEQ ID NO: 291182 - DNA, 12 bp, Artificial Sequence
  Oligonucleotide primer for the detection of SNP TSC0014671
ttccttccttcc

SEQ ID NO: 291183 - DNA, 12 bp, Artificial Sequence
  Oligonucleotide primer for the detection of SNP TSC0014673
ccactaactttt

SEQ ID NO: 291184 - DNA, 12 bp, Artificial Sequence
  Oligonucleotide primer for the detection of SNP TSC0014674
aaaaaatccccc

SEQ ID NO: 291185 - DNA, 12 bp, Artificial Sequence
  Oligonucleotide primer for the detection of SNP TSC0014674
ttttcttttaaa

SEQ ID NO: 291186 - DNA, 12 bp, Artificial Sequence
  Oligonucleotide primer for the detection of SNP TSC0014674
aaagagtttttt

SEQ ID NO: 291187 - DNA, 12 bp, Artificial Sequence
  Oligonucleotide primer for the detection of SNP TSC0014675
ttttcttttacc

SEQ ID NO: 291188 - DNA, 12 bp, Artificial Sequence
  Oligonucleotide primer for the detection of SNP TSC0014675
tttgggtatttt

SEQ ID NO: 291189 - DNA, 12 bp, Artificial Sequence
  Oligonucleotide primer for the detection of SNP TSC0014675
ctaaatattcca

SEQ ID NO: 291190 - DNA, 12 bp, Artificial Sequence
  Oligonucleotide primer for the detection of SNP TSC0014676
aaaccaattact

SEQ ID NO: 291191 - DNA, 12 bp, Artificial Sequence
  Oligonucleotide primer for the detection of SNP TSC0014676
aaaccgattact

SEQ ID NO: 291192 - DNA, 12 bp, Artificial Sequence
  Oligonucleotide primer for the detection of SNP TSC0014676
atagggttggga

SEQ ID NO: 291193 - DNA, 12 bp, Artificial Sequence
  Oligonucleotide primer for the detection of SNP TSC0014677
caaatctaaaac

SEQ ID NO: 291194 - DNA, 12 bp, Artificial Sequence
  Oligonucleotide primer for the detection of SNP TSC0014677
tttgggttttag

SEQ ID NO: 291195 - DNA, 12 bp, Artificial Sequence
  Oligonucleotide primer for the detection of SNP TSC0014678
caaaaaaaccac

SEQ ID NO: 291196 - DNA, 12 bp, Artificial Sequence
  Oligonucleotide primer for the detection of SNP TSC0014678
gatttgttattg

SEQ ID NO: 291197 - DNA, 12 bp, Artificial Sequence
  Oligonucleotide primer for the detection of SNP TSC0014678
aatttaccacta

SEQ ID NO: 291198 - DNA, 12 bp, Artificial Sequence
  Oligonucleotide primer for the detection of SNP TSC0014678
taggagggttat

SEQ ID NO: 291199 - DNA, 12 bp, Artificial Sequence
  Oligonucleotide primer for the detection of SNP TSC0014679
cttccctaaaaa

SEQ ID NO: 291200 - DNA, 12 bp, Artificial Sequence
  Oligonucleotide primer for the detection of SNP TSC0014679
ttatcgtttgtt

SEQ ID NO: 291201 - DNA, 12 bp, Artificial Sequence
  Oligonucleotide primer for the detection of SNP TSC0014679
ctatcacttact

SEQ ID NO: 291202 - DNA, 12 bp, Artificial Sequence
  Oligonucleotide primer for the detection of SNP TSC0014679
ctatcgcttact

SEQ ID NO: 291203 - DNA, 12 bp, Artificial Sequence
  Oligonucleotide primer for the detection of SNP TSC0014682
ataaaagttagg

SEQ ID NO: 291204 - DNA, 12 bp, Artificial Sequence
  Oligonucleotide primer for the detection of SNP TSC0014687
atataaacaacc

SEQ ID NO: 291205 - DNA, 12 bp, Artificial Sequence
  Oligonucleotide primer for the detection of SNP TSC0014687
ggtggtagagga

SEQ ID NO: 291206 - DNA, 12 bp, Artificial Sequence
  Oligonucleotide primer for the detection of SNP TSC0014688
aataaaaatcta

SEQ ID NO: 291207 - DNA, 12 bp, Artificial Sequence
  Oligonucleotide primer for the detection of SNP TSC0014688
tttttaaatgtt

SEQ ID NO: 291208 - DNA, 12 bp, Artificial Sequence
  Oligonucleotide primer for the detection of SNP TSC0014688
cttccaaatatt

SEQ ID NO: 291209 - DNA, 12 bp, Artificial Sequence
  Oligonucleotide primer for the detection of SNP TSC0014688
gataagagtttg

SEQ ID NO: 291210 - DNA, 12 bp, Artificial Sequence
  Oligonucleotide primer for the detection of SNP TSC0014689
ctctcaacttat

SEQ ID NO: 291211 - DNA, 12 bp, Artificial Sequence
  Oligonucleotide primer for the detection of SNP TSC0014689
tgaagaagttat

SEQ ID NO: 291212 - DNA, 12 bp, Artificial Sequence
  Oligonucleotide primer for the detection of SNP TSC0014689
taaaaaaatcat

SEQ ID NO: 291213 - DNA, 12 bp, Artificial Sequence
  Oligonucleotide primer for the detection of SNP TSC0014689
tttttagtttgt

SEQ ID NO: 291214 - DNA, 12 bp, Artificial Sequence
  Oligonucleotide primer for the detection of SNP TSC0014695
atccataacaaa

SEQ ID NO: 291215 - DNA, 12 bp, Artificial Sequence
  Oligonucleotide primer for the detection of SNP TSC0014695
gtagtaggagag

SEQ ID NO: 291216 - DNA, 12 bp, Artificial Sequence
  Oligonucleotide primer for the detection of SNP TSC0014695
gtttatggtaag

SEQ ID NO: 291217 - DNA, 12 bp, Artificial Sequence
  Oligonucleotide primer for the detection of SNP TSC0014696
tacaacccccat

SEQ ID NO: 291218 - DNA, 12 bp, Artificial Sequence
  Oligonucleotide primer for the detection of SNP TSC0014697
tctaaacctcct

SEQ ID NO: 291219 - DNA, 12 bp, Artificial Sequence
  Oligonucleotide primer for the detection of SNP TSC0014697
agaagattttga

SEQ ID NO: 291220 - DNA, 12 bp, Artificial Sequence
  Oligonucleotide primer for the detection of SNP TSC0014698
acatactaactc

SEQ ID NO: 291221 - DNA, 12 bp, Artificial Sequence
  Oligonucleotide primer for the detection of SNP TSC0014698
gaaggtgaaggg

SEQ ID NO: 291222 - DNA, 12 bp, Artificial Sequence
  Oligonucleotide primer for the detection of SNP TSC0014700
aagatgttatta

SEQ ID NO: 291223 - DNA, 12 bp, Artificial Sequence
  Oligonucleotide primer for the detection of SNP TSC0014700
aagacgttatta

SEQ ID NO: 291224 - DNA, 12 bp, Artificial Sequence
  Oligonucleotide primer for the detection of SNP TSC0014700
aaaacactatca

SEQ ID NO: 291225 - DNA, 12 bp, Artificial Sequence
  Oligonucleotide primer for the detection of SNP TSC0014700
aaaacgctatca

SEQ ID NO: 291226 - DNA, 12 bp, Artificial Sequence
  Oligonucleotide primer for the detection of SNP TSC0014700
aaaaatggggat

SEQ ID NO: 291227 - DNA, 12 bp, Artificial Sequence
  Oligonucleotide primer for the detection of SNP TSC0014701
aataaaaaccct

SEQ ID NO: 291228 - DNA, 12 bp, Artificial Sequence
  Oligonucleotide primer for the detection of SNP TSC0014701
tttttgatatga

SEQ ID NO: 291229 - DNA, 12 bp, Artificial Sequence
  Oligonucleotide primer for the detection of SNP TSC0014702
aacataaaacta

SEQ ID NO: 291230 - DNA, 12 bp, Artificial Sequence
  Oligonucleotide primer for the detection of SNP TSC0014702
tagttggtgaag

SEQ ID NO: 291231 - DNA, 12 bp, Artificial Sequence
  Oligonucleotide primer for the detection of SNP TSC0014702
caactaataaaa

SEQ ID NO: 291232 - DNA, 12 bp, Artificial Sequence
  Oligonucleotide primer for the detection of SNP TSC0014702
ggtatggggttg

SEQ ID NO: 291233 - DNA, 12 bp, Artificial Sequence
  Oligonucleotide primer for the detection of SNP TSC0014704
actataatttcc

SEQ ID NO: 291234 - DNA, 12 bp, Artificial Sequence
  Oligonucleotide primer for the detection of SNP TSC0014704
ttatccctttaa

SEQ ID NO: 291235 - DNA, 12 bp, Artificial Sequence
  Oligonucleotide primer for the detection of SNP TSC0014704
attataattttt

SEQ ID NO: 291236 - DNA, 12 bp, Artificial Sequence
  Oligonucleotide primer for the detection of SNP TSC0014705
tacaaatcaata

SEQ ID NO: 291237 - DNA, 12 bp, Artificial Sequence
  Oligonucleotide primer for the detection of SNP TSC0014705
tagttattattt

SEQ ID NO: 291238 - DNA, 12 bp, Artificial Sequence
  Oligonucleotide primer for the detection of SNP TSC0014705
ttataattatta

SEQ ID NO: 291239 - DNA, 12 bp, Artificial Sequence
  Oligonucleotide primer for the detection of SNP TSC0014705
tataaattagtg

SEQ ID NO: 291240 - DNA, 12 bp, Artificial Sequence
  Oligonucleotide primer for the detection of SNP TSC0014706
aatgttttaaaa

SEQ ID NO: 291241 - DNA, 12 bp, Artificial Sequence
  Oligonucleotide primer for the detection of SNP TSC0014707
aaaaatttagta

SEQ ID NO: 291242 - DNA, 12 bp, Artificial Sequence
  Oligonucleotide primer for the detection of SNP TSC0014708
taacccacttac

SEQ ID NO: 291243 - DNA, 12 bp, Artificial Sequence
  Oligonucleotide primer for the detection of SNP TSC0014708
tgaatgagaaaa

SEQ ID NO: 291244 - DNA, 12 bp, Artificial Sequence
  Oligonucleotide primer for the detection of SNP TSC0014709
ccattaaaaaat

SEQ ID NO: 291245 - DNA, 12 bp, Artificial Sequence
  Oligonucleotide primer for the detection of SNP TSC0014709
ttattaaaaaat

SEQ ID NO: 291246 - DNA, 12 bp, Artificial Sequence
  Oligonucleotide primer for the detection of SNP TSC0014710
aaaaataaaccc

SEQ ID NO: 291247 - DNA, 12 bp, Artificial Sequence
  Oligonucleotide primer for the detection of SNP TSC0014710
ttgggtttattg

SEQ ID NO: 291248 - DNA, 12 bp, Artificial Sequence
  Oligonucleotide primer for the detection of SNP TSC0014710
ttaaacctacta

SEQ ID NO: 291249 - DNA, 12 bp, Artificial Sequence
  Oligonucleotide primer for the detection of SNP TSC0014710
aaaaataggttt

SEQ ID NO: 291250 - DNA, 12 bp, Artificial Sequence
  Oligonucleotide primer for the detection of SNP TSC0014711
aatatcaccata

SEQ ID NO: 291251 - DNA, 12 bp, Artificial Sequence
  Oligonucleotide primer for the detection of SNP TSC0014711
attttatccaaa

SEQ ID NO: 291252 - DNA, 12 bp, Artificial Sequence
  Oligonucleotide primer for the detection of SNP TSC0014711
aatgttattatg

SEQ ID NO: 291253 - DNA, 12 bp, Artificial Sequence
  Oligonucleotide primer for the detection of SNP TSC0014712
atttcaaaactt

SEQ ID NO: 291254 - DNA, 12 bp, Artificial Sequence
  Oligonucleotide primer for the detection of SNP TSC0014712
aaattataattg

SEQ ID NO: 291255 - DNA, 12 bp, Artificial Sequence
  Oligonucleotide primer for the detection of SNP TSC0014712
aaatcacaatta

SEQ ID NO: 291256 - DNA, 12 bp, Artificial Sequence
  Oligonucleotide primer for the detection of SNP TSC0014713
acttaaaaattc

SEQ ID NO: 291257 - DNA, 12 bp, Artificial Sequence
  Oligonucleotide primer for the detection of SNP TSC0014713
aagaatttggga

SEQ ID NO: 291258 - DNA, 12 bp, Artificial Sequence
  Oligonucleotide primer for the detection of SNP TSC0014714
caacctctacct

SEQ ID NO: 291259 - DNA, 12 bp, Artificial Sequence
  Oligonucleotide primer for the detection of SNP TSC0014714
gtttgtatttgg

SEQ ID NO: 291260 - DNA, 12 bp, Artificial Sequence
  Oligonucleotide primer for the detection of SNP TSC0014718
taaaaaacatat

SEQ ID NO: 291261 - DNA, 12 bp, Artificial Sequence
  Oligonucleotide primer for the detection of SNP TSC0014718
atatatgttgtg

SEQ ID NO: 291262 - DNA, 12 bp, Artificial Sequence
  Oligonucleotide primer for the detection of SNP TSC0014719
actccaactaac

SEQ ID NO: 291263 - DNA, 12 bp, Artificial Sequence
  Oligonucleotide primer for the detection of SNP TSC0014719
ttttgttagata

SEQ ID NO: 291264 - DNA, 12 bp, Artificial Sequence
  Oligonucleotide primer for the detection of SNP TSC0014720
aacttacatata

SEQ ID NO: 291265 - DNA, 12 bp, Artificial Sequence
  Oligonucleotide primer for the detection of SNP TSC0014720
gacttacatata

SEQ ID NO: 291266 - DNA, 12 bp, Artificial Sequence
  Oligonucleotide primer for the detection of SNP TSC0014720
gttttggtagtt

SEQ ID NO: 291267 - DNA, 12 bp, Artificial Sequence
  Oligonucleotide primer for the detection of SNP TSC0014720
gtttcggtagtt

SEQ ID NO: 291268 - DNA, 12 bp, Artificial Sequence
  Oligonucleotide primer for the detection of SNP TSC0014720
cttcaacaatca

SEQ ID NO: 291269 - DNA, 12 bp, Artificial Sequence
  Oligonucleotide primer for the detection of SNP TSC0014720
cttcgacaatca

SEQ ID NO: 291270 - DNA, 12 bp, Artificial Sequence
  Oligonucleotide primer for the detection of SNP TSC0014720
tgatttgtatat

SEQ ID NO: 291271 - DNA, 12 bp, Artificial Sequence
  Oligonucleotide primer for the detection of SNP TSC0014720
cgatttgtatat

SEQ ID NO: 291272 - DNA, 12 bp, Artificial Sequence
  Oligonucleotide primer for the detection of SNP TSC0014721
ctatccccatta

SEQ ID NO: 291273 - DNA, 12 bp, Artificial Sequence
  Oligonucleotide primer for the detection of SNP TSC0014721
ttatatgtaagt

SEQ ID NO: 291274 - DNA, 12 bp, Artificial Sequence
  Oligonucleotide primer for the detection of SNP TSC0014721
ctatatacaaat

SEQ ID NO: 291275 - DNA, 12 bp, Artificial Sequence
  Oligonucleotide primer for the detection of SNP TSC0014721
ttgtttttatta

SEQ ID NO: 291276 - DNA, 12 bp, Artificial Sequence
  Oligonucleotide primer for the detection of SNP TSC0014724
aagtttttttga

SEQ ID NO: 291277 - DNA, 12 bp, Artificial Sequence
  Oligonucleotide primer for the detection of SNP TSC0014724
aatttccttaaa

SEQ ID NO: 291278 - DNA, 12 bp, Artificial Sequence
  Oligonucleotide primer for the detection of SNP TSC0014724
atggagttattt

SEQ ID NO: 291279 - DNA, 12 bp, Artificial Sequence
  Oligonucleotide primer for the detection of SNP TSC0014725
atactaaaaaac

SEQ ID NO: 291280 - DNA, 12 bp, Artificial Sequence
  Oligonucleotide primer for the detection of SNP TSC0014725
ttgatattgttt

SEQ ID NO: 291281 - DNA, 12 bp, Artificial Sequence
  Oligonucleotide primer for the detection of SNP TSC0014725
ttaatactattt

SEQ ID NO: 291282 - DNA, 12 bp, Artificial Sequence
  Oligonucleotide primer for the detection of SNP TSC0014725
tattgaaaaatt

SEQ ID NO: 291283 - DNA, 12 bp, Artificial Sequence
  Oligonucleotide primer for the detection of SNP TSC0014728
cacctatattcc

SEQ ID NO: 291284 - DNA, 12 bp, Artificial Sequence
  Oligonucleotide primer for the detection of SNP TSC0014728
cgcctatattcc

SEQ ID NO: 291285 - DNA, 12 bp, Artificial Sequence
  Oligonucleotide primer for the detection of SNP TSC0014728
ttttatgggtgg

SEQ ID NO: 291286 - DNA, 12 bp, Artificial Sequence
  Oligonucleotide primer for the detection of SNP TSC0014729
caatataaacaa

SEQ ID NO: 291287 - DNA, 12 bp, Artificial Sequence
  Oligonucleotide primer for the detection of SNP TSC0014729
gttttttaagtt

SEQ ID NO: 291288 - DNA, 12 bp, Artificial Sequence
  Oligonucleotide primer for the detection of SNP TSC0014729
gttttttaagtc

SEQ ID NO: 291289 - DNA, 12 bp, Artificial Sequence
  Oligonucleotide primer for the detection of SNP TSC0014729
ccacttcccaaa

SEQ ID NO: 291290 - DNA, 12 bp, Artificial Sequence
  Oligonucleotide primer for the detection of SNP TSC0014729
ccgcttcccaaa

SEQ ID NO: 291291 - DNA, 12 bp, Artificial Sequence
  Oligonucleotide primer for the detection of SNP TSC0014729
gtaatgtaagta

SEQ ID NO: 291292 - DNA, 12 bp, Artificial Sequence
  Oligonucleotide primer for the detection of SNP TSC0014730
acctctacacca

SEQ ID NO: 291293 - DNA, 12 bp, Artificial Sequence
  Oligonucleotide primer for the detection of SNP TSC0014730
aggggaaagttt

SEQ ID NO: 291294 - DNA, 12 bp, Artificial Sequence
  Oligonucleotide primer for the detection of SNP TSC0014731
aaaaaacctact

SEQ ID NO: 291295 - DNA, 12 bp, Artificial Sequence
  Oligonucleotide primer for the detection of SNP TSC0014731
tagtgtttagta

SEQ ID NO: 291296 - DNA, 12 bp, Artificial Sequence
  Oligonucleotide primer for the detection of SNP TSC0014731
caatatctaaca

SEQ ID NO: 291297 - DNA, 12 bp, Artificial Sequence
  Oligonucleotide primer for the detection of SNP TSC0014731
ggaggatttatt

SEQ ID NO: 291298 - DNA, 12 bp, Artificial Sequence
  Oligonucleotide primer for the detection of SNP TSC0014732
ataaaacctcat

SEQ ID NO: 291299 - DNA, 12 bp, Artificial Sequence
  Oligonucleotide primer for the detection of SNP TSC0014732
gtattttttgta

SEQ ID NO: 291300 - DNA, 12 bp, Artificial Sequence
  Oligonucleotide primer for the detection of SNP TSC0014732
tgaaattttatt

SEQ ID NO: 291301 - DNA, 12 bp, Artificial Sequence
  Oligonucleotide primer for the detection of SNP TSC0014732
tgaaattttatc

SEQ ID NO: 291302 - DNA, 12 bp, Artificial Sequence
  Oligonucleotide primer for the detection of SNP TSC0014733
tggtaaattaat

SEQ ID NO: 291303 - DNA, 12 bp, Artificial Sequence
  Oligonucleotide primer for the detection of SNP TSC0014733
aacaaattaaca

SEQ ID NO: 291304 - DNA, 12 bp, Artificial Sequence
  Oligonucleotide primer for the detection of SNP TSC0014733
gtgaaggtagtt

SEQ ID NO: 291305 - DNA, 12 bp, Artificial Sequence
  Oligonucleotide primer for the detection of SNP TSC0014734
tctttctataaa

SEQ ID NO: 291306 - DNA, 12 bp, Artificial Sequence
  Oligonucleotide primer for the detection of SNP TSC0014734
tggataatattg

SEQ ID NO: 291307 - DNA, 12 bp, Artificial Sequence
  Oligonucleotide primer for the detection of SNP TSC0014734
taaacaacacta

SEQ ID NO: 291308 - DNA, 12 bp, Artificial Sequence
  Oligonucleotide primer for the detection of SNP TSC0014734
tttttttgtaaa

SEQ ID NO: 291309 - DNA, 12 bp, Artificial Sequence
  Oligonucleotide primer for the detection of SNP TSC0014737
acatattaacca

SEQ ID NO: 291310 - DNA, 12 bp, Artificial Sequence
  Oligonucleotide primer for the detection of SNP TSC0014737
gcatattaacca

SEQ ID NO: 291311 - DNA, 12 bp, Artificial Sequence
  Oligonucleotide primer for the detection of SNP TSC0014737
gtgttaggtgat

SEQ ID NO: 291312 - DNA, 12 bp, Artificial Sequence
  Oligonucleotide primer for the detection of SNP TSC0014737
gcgttaggtgat

SEQ ID NO: 291313 - DNA, 12 bp, Artificial Sequence
  Oligonucleotide primer for the detection of SNP TSC0014737
acaccaaataat

SEQ ID NO: 291314 - DNA, 12 bp, Artificial Sequence
  Oligonucleotide primer for the detection of SNP TSC0014737
acgccaaataat

SEQ ID NO: 291315 - DNA, 12 bp, Artificial Sequence
  Oligonucleotide primer for the detection of SNP TSC0014737
gtatgttggtta

SEQ ID NO: 291316 - DNA, 12 bp, Artificial Sequence
  Oligonucleotide primer for the detection of SNP TSC0014738
aataaaaacaat

SEQ ID NO: 291317 - DNA, 12 bp, Artificial Sequence
  Oligonucleotide primer for the detection of SNP TSC0014738
aattccttatta

SEQ ID NO: 291318 - DNA, 12 bp, Artificial Sequence
  Oligonucleotide primer for the detection of SNP TSC0014738
gataaagatagt

SEQ ID NO: 291319 - DNA, 12 bp, Artificial Sequence
  Oligonucleotide primer for the detection of SNP TSC0014741
ataaactcatcc

SEQ ID NO: 291320 - DNA, 12 bp, Artificial Sequence
  Oligonucleotide primer for the detection of SNP TSC0014743
aaatctatttct

SEQ ID NO: 291321 - DNA, 12 bp, Artificial Sequence
  Oligonucleotide primer for the detection of SNP TSC0014743
tatttgttgata

SEQ ID NO: 291322 - DNA, 12 bp, Artificial Sequence
  Oligonucleotide primer for the detection of SNP TSC0014748
tcaaaacttcca

SEQ ID NO: 291323 - DNA, 12 bp, Artificial Sequence
  Oligonucleotide primer for the detection of SNP TSC0014748
ttgggagaagtt

SEQ ID NO: 291324 - DNA, 12 bp, Artificial Sequence
  Oligonucleotide primer for the detection of SNP TSC0014748
tcgggagaagtt

SEQ ID NO: 291325 - DNA, 12 bp, Artificial Sequence
  Oligonucleotide primer for the detection of SNP TSC0014748
atccaaaaaaaa

SEQ ID NO: 291326 - DNA, 12 bp, Artificial Sequence
  Oligonucleotide primer for the detection of SNP TSC0014748
atccgaaaaaaa

SEQ ID NO: 291327 - DNA, 12 bp, Artificial Sequence
  Oligonucleotide primer for the detection of SNP TSC0014748
tagggtttttat

SEQ ID NO: 291328 - DNA, 12 bp, Artificial Sequence
  Oligonucleotide primer for the detection of SNP TSC0014748
tagggtttttac

SEQ ID NO: 291329 - DNA, 12 bp, Artificial Sequence
  Oligonucleotide primer for the detection of SNP TSC0014749
caattcattatt

SEQ ID NO: 291330 - DNA, 12 bp, Artificial Sequence
  Oligonucleotide primer for the detection of SNP TSC0014749
aagttgttatta

SEQ ID NO: 291331 - DNA, 12 bp, Artificial Sequence
  Oligonucleotide primer for the detection of SNP TSC0014750
ctttttttaaac

SEQ ID NO: 291332 - DNA, 12 bp, Artificial Sequence
  Oligonucleotide primer for the detection of SNP TSC0014750
tatccctttaaa

SEQ ID NO: 291333 - DNA, 12 bp, Artificial Sequence
  Oligonucleotide primer for the detection of SNP TSC0014751
tttataacctct

SEQ ID NO: 291334 - DNA, 12 bp, Artificial Sequence
  Oligonucleotide primer for the detection of SNP TSC0014751
ggtatttaatga

SEQ ID NO: 291335 - DNA, 12 bp, Artificial Sequence
  Oligonucleotide primer for the detection of SNP TSC0014752
gagattgagtgg

SEQ ID NO: 291336 - DNA, 12 bp, Artificial Sequence
  Oligonucleotide primer for the detection of SNP TSC0014752
tgtagaaaatat

SEQ ID NO: 291337 - DNA, 12 bp, Artificial Sequence
  Oligonucleotide primer for the detection of SNP TSC0014753
aataaccataaa

SEQ ID NO: 291338 - DNA, 12 bp, Artificial Sequence
  Oligonucleotide primer for the detection of SNP TSC0014753
aataaccgtaaa

SEQ ID NO: 291339 - DNA, 12 bp, Artificial Sequence
  Oligonucleotide primer for the detection of SNP TSC0014753
ttattatataat

SEQ ID NO: 291340 - DNA, 12 bp, Artificial Sequence
  Oligonucleotide primer for the detection of SNP TSC0014753
tcatcatacaat

SEQ ID NO: 291341 - DNA, 12 bp, Artificial Sequence
  Oligonucleotide primer for the detection of SNP TSC0014753
agtagttgtgaa

SEQ ID NO: 291342 - DNA, 12 bp, Artificial Sequence
  Oligonukleotid-Primer
agtagtcgtgaa

SEQ ID NO: 291343 - DNA, 12 bp, Artificial Sequence
  Oligonucleotide primer for the detection of SNP TSC0014760
ctattccacaaa

SEQ ID NO: 291344 - DNA, 12 bp, Artificial Sequence
  Oligonucleotide primer for the detection of SNP TSC0014760
aggaatgtgggt

SEQ ID NO: 291345 - DNA, 12 bp, Artificial Sequence
  Oligonucleotide primer for the detection of SNP TSC0014760
caaaaatataaa

SEQ ID NO: 291346 - DNA, 12 bp, Artificial Sequence
  Oligonucleotide primer for the detection of SNP TSC0014760
gttgttttataa

SEQ ID NO: 291347 - DNA, 12 bp, Artificial Sequence
  Oligonucleotide primer for the detection of SNP TSC0014761
aataattaaaaa

SEQ ID NO: 291348 - DNA, 12 bp, Artificial Sequence
  Oligonucleotide primer for the detection of SNP TSC0014761
tttgtatttttt

SEQ ID NO: 291349 - DNA, 12 bp, Artificial Sequence
  Oligonucleotide primer for the detection of SNP TSC0014761
tctacatttctt

SEQ ID NO: 291350 - DNA, 12 bp, Artificial Sequence
  Oligonucleotide primer for the detection of SNP TSC0014761
gatggttaggaa

SEQ ID NO: 291351 - DNA, 12 bp, Artificial Sequence
  Oligonucleotide primer for the detection of SNP TSC0014762
aataaataaata

SEQ ID NO: 291352 - DNA, 12 bp, Artificial Sequence
  Oligonucleotide primer for the detection of SNP TSC0014762
taaaaattaatt

SEQ ID NO: 291353 - DNA, 12 bp, Artificial Sequence
  Oligonucleotide primer for the detection of SNP TSC0014762
caaaaattaatt

SEQ ID NO: 291354 - DNA, 12 bp, Artificial Sequence
  Oligonucleotide primer for the detection of SNP TSC0014763
aaaatacaaaaa

SEQ ID NO: 291355 - DNA, 12 bp, Artificial Sequence
  Oligonucleotide primer for the detection of SNP TSC0014763
tatgtttggtta

SEQ ID NO: 291356 - DNA, 12 bp, Artificial Sequence
  Oligonucleotide primer for the detection of SNP TSC0014763
catacctaacta

SEQ ID NO: 291357 - DNA, 12 bp, Artificial Sequence
  Oligonucleotide primer for the detection of SNP TSC0014763
aaaatataaaaa

SEQ ID NO: 291358 - DNA, 12 bp, Artificial Sequence
  Oligonucleotide primer for the detection of SNP TSC0014764
taatcctctaaa

SEQ ID NO: 291359 - DNA, 12 bp, Artificial Sequence
  Oligonucleotide primer for the detection of SNP TSC0014764
ggtaaaggagtt

SEQ ID NO: 291360 - DNA, 12 bp, Artificial Sequence
  Oligonucleotide primer for the detection of SNP TSC0014764
aacaaaaaaatt

SEQ ID NO: 291361 - DNA, 12 bp, Artificial Sequence
  Oligonucleotide primer for the detection of SNP TSC0014765
caaacacctcct

SEQ ID NO: 291362 - DNA, 12 bp, Artificial Sequence
  Oligonucleotide primer for the detection of SNP TSC0014765
caaacgcctcct

SEQ ID NO: 291363 - DNA, 12 bp, Artificial Sequence
  Oligonucleotide primer for the detection of SNP TSC0014765
gtgtttagtata

SEQ ID NO: 291364 - DNA, 12 bp, Artificial Sequence
  Oligonucleotide primer for the detection of SNP TSC0014767
ttaatattcaat

SEQ ID NO: 291365 - DNA, 12 bp, Artificial Sequence
  Oligonucleotide primer for the detection of SNP TSC0014767
atattaaataaa

SEQ ID NO: 291366 - DNA, 12 bp, Artificial Sequence
  Oligonucleotide primer for the detection of SNP TSC0014767
atatcaaataaa

SEQ ID NO: 291367 - DNA, 12 bp, Artificial Sequence
  Oligonucleotide primer for the detection of SNP TSC0014767
ttaatgtttaat

SEQ ID NO: 291368 - DNA, 12 bp, Artificial Sequence
  Oligonucleotide primer for the detection of SNP TSC0014768
aaaattgggtat

SEQ ID NO: 291369 - DNA, 12 bp, Artificial Sequence
  Oligonucleotide primer for the detection of SNP TSC0014768
aaaattgggtac

SEQ ID NO: 291370 - DNA, 12 bp, Artificial Sequence
  Oligonucleotide primer for the detection of SNP TSC0014768
ttggaaagttaa

SEQ ID NO: 291371 - DNA, 12 bp, Artificial Sequence
  Oligonucleotide primer for the detection of SNP TSC0014769
ccccaactttcc

SEQ ID NO: 291372 - DNA, 12 bp, Artificial Sequence
  Oligonucleotide primer for the detection of SNP TSC0014769
tttagggttttg

SEQ ID NO: 291373 - DNA, 12 bp, Artificial Sequence
  Oligonucleotide primer for the detection of SNP TSC0014769
tttagggtttcg

SEQ ID NO: 291374 - DNA, 12 bp, Artificial Sequence
  Oligonucleotide primer for the detection of SNP TSC0014769
ctcaaaacccca

SEQ ID NO: 291375 - DNA, 12 bp, Artificial Sequence
  Oligonucleotide primer for the detection of SNP TSC0014769
ctcaaaaccccg

SEQ ID NO: 291376 - DNA, 12 bp, Artificial Sequence
  Oligonucleotide primer for the detection of SNP TSC0014770
acccccctacct

SEQ ID NO: 291377 - DNA, 12 bp, Artificial Sequence
  Oligonucleotide primer for the detection of SNP TSC0014770
gtatttatttag

SEQ ID NO: 291378 - DNA, 12 bp, Artificial Sequence
  Oligonucleotide primer for the detection of SNP TSC0014771
aaaattacttaa

SEQ ID NO: 291379 - DNA, 12 bp, Artificial Sequence
  Oligonucleotide primer for the detection of SNP TSC0014771
gtgattgaggtt

SEQ ID NO: 291380 - DNA, 12 bp, Artificial Sequence
  Oligonucleotide primer for the detection of SNP TSC0014771
cataactaaaat

SEQ ID NO: 291381 - DNA, 12 bp, Artificial Sequence
  Oligonucleotide primer for the detection of SNP TSC0014771
cgtaactaaaat

SEQ ID NO: 291382 - DNA, 12 bp, Artificial Sequence
  Oligonucleotide primer for the detection of SNP TSC0014771
gattgtttagtt

SEQ ID NO: 291383 - DNA, 12 bp, Artificial Sequence
  Oligonucleotide primer for the detection of SNP TSC0014772
ccatcaaatttc

SEQ ID NO: 291384 - DNA, 12 bp, Artificial Sequence
  Oligonucleotide primer for the detection of SNP TSC0014772
tatggagggagg

SEQ ID NO: 291385 - DNA, 12 bp, Artificial Sequence
  Oligonucleotide primer for the detection of SNP TSC0014777
acctaaaaaacc

SEQ ID NO: 291386 - DNA, 12 bp, Artificial Sequence
  Oligonucleotide primer for the detection of SNP TSC0014777
aaatttatataa

SEQ ID NO: 291387 - DNA, 12 bp, Artificial Sequence
  Oligonucleotide primer for the detection of SNP TSC0014777
aaacttacacaa

SEQ ID NO: 291388 - DNA, 12 bp, Artificial Sequence
  Oligonucleotide primer for the detection of SNP TSC0014777
gtttaggaaatt

SEQ ID NO: 291389 - DNA, 12 bp, Artificial Sequence
  Oligonucleotide primer for the detection of SNP TSC0014778
acctctaacatc

SEQ ID NO: 291390 - DNA, 12 bp, Artificial Sequence
  Oligonucleotide primer for the detection of SNP TSC0014778
gattaatgttag

SEQ ID NO: 291391 - DNA, 12 bp, Artificial Sequence
  Oligonucleotide primer for the detection of SNP TSC0014778
aattaatattaa

SEQ ID NO: 291392 - DNA, 12 bp, Artificial Sequence
  Oligonucleotide primer for the detection of SNP TSC0014778
atttttgatatt

SEQ ID NO: 291393 - DNA, 12 bp, Artificial Sequence
  Oligonucleotide primer for the detection of SNP TSC0014779
aacacatatcac

SEQ ID NO: 291394 - DNA, 12 bp, Artificial Sequence
  Oligonucleotide primer for the detection of SNP TSC0014779
tgtttattaaat

SEQ ID NO: 291395 - DNA, 12 bp, Artificial Sequence
  Oligonucleotide primer for the detection of SNP TSC0014780
aaaaaaacccat

SEQ ID NO: 291396 - DNA, 12 bp, Artificial Sequence
  Oligonucleotide primer for the detection of SNP TSC0014780
aaaaaaacccgt

SEQ ID NO: 291397 - DNA, 12 bp, Artificial Sequence
  Oligonucleotide primer for the detection of SNP TSC0014780
gtgtttttggta

SEQ ID NO: 291398 - DNA, 12 bp, Artificial Sequence
  Oligonucleotide primer for the detection of SNP TSC0014781
ctcatttacata

SEQ ID NO: 291399 - DNA, 12 bp, Artificial Sequence
  Oligonucleotide primer for the detection of SNP TSC0014781
accattttccac

SEQ ID NO: 291400 - DNA, 12 bp, Artificial Sequence
  Oligonucleotide primer for the detection of SNP TSC0014781
ttttatttgtat

SEQ ID NO: 291401 - DNA, 12 bp, Artificial Sequence
  Oligonucleotide primer for the detection of SNP TSC0014782
taactataattc

SEQ ID NO: 291402 - DNA, 12 bp, Artificial Sequence
  Oligonucleotide primer for the detection of SNP TSC0014782
ttatatgtaaat

SEQ ID NO: 291403 - DNA, 12 bp, Artificial Sequence
  Oligonucleotide primer for the detection of SNP TSC0014782
ggttgtaatttt

SEQ ID NO: 291404 - DNA, 12 bp, Artificial Sequence
  Oligonucleotide primer for the detection of SNP TSC0014783
tccacctcccta

SEQ ID NO: 291405 - DNA, 12 bp, Artificial Sequence
  Oligonucleotide primer for the detection of SNP TSC0014783
gtgttgtaagag

SEQ ID NO: 291406 - DNA, 12 bp, Artificial Sequence
  Oligonucleotide primer for the detection of SNP TSC0014783
atattataaaaa

SEQ ID NO: 291407 - DNA, 12 bp, Artificial Sequence
  Oligonucleotide primer for the detection of SNP TSC0014784
tcatcaactcca

SEQ ID NO: 291408 - DNA, 12 bp, Artificial Sequence
  Oligonucleotide primer for the detection of SNP TSC0014784
tcatcaactccg

SEQ ID NO: 291409 - DNA, 12 bp, Artificial Sequence
  Oligonucleotide primer for the detection of SNP TSC0014784
tcatcgactcca

SEQ ID NO: 291410 - DNA, 12 bp, Artificial Sequence
  Oligonucleotide primer for the detection of SNP TSC0014784
tcatcgactccg

SEQ ID NO: 291411 - DNA, 12 bp, Artificial Sequence
  Oligonucleotide primer for the detection of SNP TSC0014784
tagtagagttgg

SEQ ID NO: 291412 - DNA, 12 bp, Artificial Sequence
  Oligonucleotide primer for the detection of SNP TSC0014784
caacaaaactaa

SEQ ID NO: 291413 - DNA, 12 bp, Artificial Sequence
  Oligonucleotide primer for the detection of SNP TSC0014784
gttattggtttt

SEQ ID NO: 291414 - DNA, 12 bp, Artificial Sequence
  Oligonucleotide primer for the detection of SNP TSC0014784
gttatcggtttt

SEQ ID NO: 291415 - DNA, 12 bp, Artificial Sequence
  Oligonukleotid-Primer
gttattggtttc

SEQ ID NO: 291416 - DNA, 12 bp, Artificial Sequence
  Oligonucleotide primer for the detection of SNP TSC0014784
gttatcggtttc

SEQ ID NO: 291417 - DNA, 12 bp, Artificial Sequence
  Oligonucleotide primer for the detection of SNP TSC0014785
aacatcttaaaa

SEQ ID NO: 291418 - DNA, 12 bp, Artificial Sequence
  Oligonucleotide primer for the detection of SNP TSC0014785
atactccctcac

SEQ ID NO: 291419 - DNA, 12 bp, Artificial Sequence
  Oligonucleotide primer for the detection of SNP TSC0014785
gatattttgaag

SEQ ID NO: 291420 - DNA, 12 bp, Artificial Sequence
  Oligonucleotide primer for the detection of SNP TSC0014786
cctaccttcttt

SEQ ID NO: 291421 - DNA, 12 bp, Artificial Sequence
  Oligonucleotide primer for the detection of SNP TSC0014786
agttttaaataa

SEQ ID NO: 291422 - DNA, 12 bp, Artificial Sequence
  Oligonucleotide primer for the detection of SNP TSC0014787
aacaattttttt

SEQ ID NO: 291423 - DNA, 12 bp, Artificial Sequence
  Oligonukleotid-Primer
caactctcaaaa

SEQ ID NO: 291424 - DNA, 12 bp, Artificial Sequence
  Oligonucleotide primer for the detection of SNP TSC0014788
aggaaattaagg

SEQ ID NO: 291425 - DNA, 12 bp, Artificial Sequence
  Oligonucleotide primer for the detection of SNP TSC0014788
ttagtttttaaa

SEQ ID NO: 291426 - DNA, 12 bp, Artificial Sequence
  Oligonucleotide primer for the detection of SNP TSC0014792
ttaaatcaatac

SEQ ID NO: 291427 - DNA, 12 bp, Artificial Sequence
  Oligonucleotide primer for the detection of SNP TSC0014792
tattttttgaga

SEQ ID NO: 291428 - DNA, 12 bp, Artificial Sequence
  Oligonucleotide primer for the detection of SNP TSC0014793
taaatttaattt

SEQ ID NO: 291429 - DNA, 12 bp, Artificial Sequence
  Oligonucleotide primer for the detection of SNP TSC0014793
tgttagtaaatt

SEQ ID NO: 291430 - DNA, 12 bp, Artificial Sequence
  Oligonucleotide primer for the detection of SNP TSC0014793
actaataaacta

SEQ ID NO: 291431 - DNA, 12 bp, Artificial Sequence
  Oligonucleotide primer for the detection of SNP TSC0014793
tagatttggttt

SEQ ID NO: 291432 - DNA, 12 bp, Artificial Sequence
  Oligonucleotide primer for the detection of SNP TSC0014795
aaaccacaaatt

SEQ ID NO: 291433 - DNA, 12 bp, Artificial Sequence
  Oligonucleotide primer for the detection of SNP TSC0014795
attgagatgata

SEQ ID NO: 291434 - DNA, 12 bp, Artificial Sequence
  Oligonucleotide primer for the detection of SNP TSC0014796
tatttttggttg

SEQ ID NO: 291435 - DNA, 12 bp, Artificial Sequence
  Oligonucleotide primer for the detection of SNP TSC0014796
acccctaattaa

SEQ ID NO: 291436 - DNA, 12 bp, Artificial Sequence
  Oligonucleotide primer for the detection of SNP TSC0014796
aaggtagtaatt

SEQ ID NO: 291437 - DNA, 12 bp, Artificial Sequence
  Oligonucleotide primer for the detection of SNP TSC0014797
aaaataaccaca

SEQ ID NO: 291438 - DNA, 12 bp, Artificial Sequence
  Oligonucleotide primer for the detection of SNP TSC0014797
tagttagttatt

SEQ ID NO: 291439 - DNA, 12 bp, Artificial Sequence
  Oligonucleotide primer for the detection of SNP TSC0014797
ccaatcaattac

SEQ ID NO: 291440 - DNA, 12 bp, Artificial Sequence
  Oligonucleotide primer for the detection of SNP TSC0014797
aggagtggttat

SEQ ID NO: 291441 - DNA, 12 bp, Artificial Sequence
  Oligonucleotide primer for the detection of SNP TSC0014798
aaaaactaaatc

SEQ ID NO: 291442 - DNA, 12 bp, Artificial Sequence
  Oligonucleotide primer for the detection of SNP TSC0014798
atttatttaatg

SEQ ID NO: 291443 - DNA, 12 bp, Artificial Sequence
  Oligonucleotide primer for the detection of SNP TSC0014799
ttataactcaat

SEQ ID NO: 291444 - DNA, 12 bp, Artificial Sequence
  Oligonucleotide primer for the detection of SNP TSC0014799
atagatttttta

SEQ ID NO: 291445 - DNA, 12 bp, Artificial Sequence
  Oligonucleotide primer for the detection of SNP TSC0014800
tccttaaaaact

SEQ ID NO: 291446 - DNA, 12 bp, Artificial Sequence
  Oligonucleotide primer for the detection of SNP TSC0014800
aaaatttggaaa

SEQ ID NO: 291447 - DNA, 12 bp, Artificial Sequence
  Oligonucleotide primer for the detection of SNP TSC0014801
aacaaacaacca

SEQ ID NO: 291448 - DNA, 12 bp, Artificial Sequence
  Oligonucleotide primer for the detection of SNP TSC0014801
aacaaacaaccg

SEQ ID NO: 291449 - DNA, 12 bp, Artificial Sequence
  Oligonucleotide primer for the detection of SNP TSC0014801
aacaaacgacca

SEQ ID NO: 291450 - DNA, 12 bp, Artificial Sequence
  Oligonucleotide primer for the detection of SNP TSC0014801
aacgaacaacca

SEQ ID NO: 291451 - DNA, 12 bp, Artificial Sequence
  Oligonucleotide primer for the detection of SNP TSC0014801
aacaaacgaccg

SEQ ID NO: 291452 - DNA, 12 bp, Artificial Sequence
  Oligonucleotide primer for the detection of SNP TSC0014801
aacgaacaaccg

SEQ ID NO: 291453 - DNA, 12 bp, Artificial Sequence
  Oligonucleotide primer for the detection of SNP TSC0014801
aacgaacgacca

SEQ ID NO: 291454 - DNA, 12 bp, Artificial Sequence
  Oligonucleotide primer for the detection of SNP TSC0014801
aacgaacgaccg

SEQ ID NO: 291455 - DNA, 12 bp, Artificial Sequence
  Oligonucleotide primer for the detection of SNP TSC0014801
gttggggattgt

SEQ ID NO: 291456 - DNA, 12 bp, Artificial Sequence
  Oligonucleotide primer for the detection of SNP TSC0014801
ctaaaaattaca

SEQ ID NO: 291457 - DNA, 12 bp, Artificial Sequence
  Oligonucleotide primer for the detection of SNP TSC0014801
tagtgggtgatt

SEQ ID NO: 291458 - DNA, 12 bp, Artificial Sequence
  Oligonucleotide primer for the detection of SNP TSC0014801
tagcgggtgatt

SEQ ID NO: 291459 - DNA, 12 bp, Artificial Sequence
  Oligonucleotide primer for the detection of SNP TSC0014801
tagtgggcgatt

SEQ ID NO: 291460 - DNA, 12 bp, Artificial Sequence
  Oligonucleotide primer for the detection of SNP TSC0014801
tagtgggtgatc

SEQ ID NO: 291461 - DNA, 12 bp, Artificial Sequence
  Oligonucleotide primer for the detection of SNP TSC0014801
tagcgggcgatt

SEQ ID NO: 291462 - DNA, 12 bp, Artificial Sequence
  Oligonucleotide primer for the detection of SNP TSC0014801
tagcgggtgatc

SEQ ID NO: 291463 - DNA, 12 bp, Artificial Sequence
  Oligonucleotide primer for the detection of SNP TSC0014801
tagtgggcgatc

SEQ ID NO: 291464 - DNA, 12 bp, Artificial Sequence
  Oligonucleotide primer for the detection of SNP TSC0014801
tagcgggcgatc

SEQ ID NO: 291465 - DNA, 12 bp, Artificial Sequence
  Oligonucleotide primer for the detection of SNP TSC0014802
ctaatcattttt

SEQ ID NO: 291466 - DNA, 12 bp, Artificial Sequence
  Oligonucleotide primer for the detection of SNP TSC0014802
gattataaagaa

SEQ ID NO: 291467 - DNA, 12 bp, Artificial Sequence
  Oligonucleotide primer for the detection of SNP TSC0014803
attgtaggaagt

SEQ ID NO: 291468 - DNA, 12 bp, Artificial Sequence
  Oligonucleotide primer for the detection of SNP TSC0014803
attgtaggaagc

SEQ ID NO: 291469 - DNA, 12 bp, Artificial Sequence
  Oligonucleotide primer for the detection of SNP TSC0014803
attacaaaaaac

SEQ ID NO: 291470 - DNA, 12 bp, Artificial Sequence
  Oligonucleotide primer for the detection of SNP TSC0014803
agtagggagatg

SEQ ID NO: 291471 - DNA, 12 bp, Artificial Sequence
  Oligonucleotide primer for the detection of SNP TSC0014807
taatatacataa

SEQ ID NO: 291472 - DNA, 12 bp, Artificial Sequence
  Oligonucleotide primer for the detection of SNP TSC0014807
gtgtggtggggt

SEQ ID NO: 291473 - DNA, 12 bp, Artificial Sequence
  Oligonucleotide primer for the detection of SNP TSC0014807
gcgtggtggggt

SEQ ID NO: 291474 - DNA, 12 bp, Artificial Sequence
  Oligonucleotide primer for the detection of SNP TSC0014807
gtgtggcggggt

SEQ ID NO: 291475 - DNA, 12 bp, Artificial Sequence
  Oligonucleotide primer for the detection of SNP TSC0014807
gcgtggcggggt

SEQ ID NO: 291476 - DNA, 12 bp, Artificial Sequence
  Oligonucleotide primer for the detection of SNP TSC0014807
acataacaaaac

SEQ ID NO: 291477 - DNA, 12 bp, Artificial Sequence
  Oligonucleotide primer for the detection of SNP TSC0014807
acataacgaaac

SEQ ID NO: 291478 - DNA, 12 bp, Artificial Sequence
  Oligonucleotide primer for the detection of SNP TSC0014807
acgtaacaaaac

SEQ ID NO: 291479 - DNA, 12 bp, Artificial Sequence
  Oligonucleotide primer for the detection of SNP TSC0014807
acgtaacgaaac

SEQ ID NO: 291480 - DNA, 12 bp, Artificial Sequence
  Oligonukleotid-Primer
tggtgtgtatgg

SEQ ID NO: 291481 - DNA, 12 bp, Artificial Sequence
  Oligonucleotide primer for the detection of SNP TSC0014808
ccccaatacctt

SEQ ID NO: 291482 - DNA, 12 bp, Artificial Sequence
  Oligonucleotide primer for the detection of SNP TSC0014808
tgagagtgtagg

SEQ ID NO: 291483 - DNA, 12 bp, Artificial Sequence
  Oligonucleotide primer for the detection of SNP TSC0014808
cgagagtgtagg

SEQ ID NO: 291484 - DNA, 12 bp, Artificial Sequence
  Oligonucleotide primer for the detection of SNP TSC0014808
tgagagcgtagg

SEQ ID NO: 291485 - DNA, 12 bp, Artificial Sequence
  Oligonucleotide primer for the detection of SNP TSC0014808
cgagagcgtagg

SEQ ID NO: 291486 - DNA, 12 bp, Artificial Sequence
  Oligonucleotide primer for the detection of SNP TSC0014809
cacctcctacta

SEQ ID NO: 291487 - DNA, 12 bp, Artificial Sequence
  Oligonucleotide primer for the detection of SNP TSC0014809
tcaatattttct

SEQ ID NO: 291488 - DNA, 12 bp, Artificial Sequence
  Oligonucleotide primer for the detection of SNP TSC0014809
tattttttattg

SEQ ID NO: 291489 - DNA, 12 bp, Artificial Sequence
  Oligonucleotide primer for the detection of SNP TSC0014810
tcaaaaaataaa

SEQ ID NO: 291490 - DNA, 12 bp, Artificial Sequence
  Oligonucleotide primer for the detection of SNP TSC0014810
taaagttgggtt

SEQ ID NO: 291491 - DNA, 12 bp, Artificial Sequence
  Oligonucleotide primer for the detection of SNP TSC0014810
caaaactaaact

SEQ ID NO: 291492 - DNA, 12 bp, Artificial Sequence
  Oligonucleotide primer for the detection of SNP TSC0014810
ttaggagatagg

SEQ ID NO: 291493 - DNA, 12 bp, Artificial Sequence
  Oligonucleotide primer for the detection of SNP TSC0014811
aaaaataacgaa

SEQ ID NO: 291494 - DNA, 12 bp, Artificial Sequence
  Oligonucleotide primer for the detection of SNP TSC0014811
tgttatttattt

SEQ ID NO: 291495 - DNA, 12 bp, Artificial Sequence
  Oligonucleotide primer for the detection of SNP TSC0014811
tatcactcaccc

SEQ ID NO: 291496 - DNA, 12 bp, Artificial Sequence
  Oligonucleotide primer for the detection of SNP TSC0014811
gaagataatggg

SEQ ID NO: 291497 - DNA, 12 bp, Artificial Sequence
  Oligonucleotide primer for the detection of SNP TSC0014811
gaagataacggg

SEQ ID NO: 291498 - DNA, 12 bp, Artificial Sequence
  Oligonucleotide primer for the detection of SNP TSC0014813
acctattttctt

SEQ ID NO: 291499 - DNA, 12 bp, Artificial Sequence
  Oligonucleotide primer for the detection of SNP TSC0014813
taagagaaaaga

SEQ ID NO: 291500 - DNA, 12 bp, Artificial Sequence
  Oligonucleotide primer for the detection of SNP TSC0014814
aactaaacaaaa

SEQ ID NO: 291501 - DNA, 12 bp, Artificial Sequence
  Oligonucleotide primer for the detection of SNP TSC0014814
tttttttaatgt

SEQ ID NO: 291502 - DNA, 12 bp, Artificial Sequence
  Oligonucleotide primer for the detection of SNP TSC0014814
tttttttaatgc

SEQ ID NO: 291503 - DNA, 12 bp, Artificial Sequence
  Oligonucleotide primer for the detection of SNP TSC0014814
ttctttcaatac

SEQ ID NO: 291504 - DNA, 12 bp, Artificial Sequence
  Oligonucleotide primer for the detection of SNP TSC0014814
ttagttgaatag

SEQ ID NO: 291505 - DNA, 12 bp, Artificial Sequence
  Oligonucleotide primer for the detection of SNP TSC0014815
atctaccaaaaa

SEQ ID NO: 291506 - DNA, 12 bp, Artificial Sequence
  Oligonucleotide primer for the detection of SNP TSC0014815
atgagtatttta

SEQ ID NO: 291507 - DNA, 12 bp, Artificial Sequence
  Oligonucleotide primer for the detection of SNP TSC0014815
ataaacattcca

SEQ ID NO: 291508 - DNA, 12 bp, Artificial Sequence
  Oligonucleotide primer for the detection of SNP TSC0014815
ttgttagagatt

SEQ ID NO: 291509 - DNA, 12 bp, Artificial Sequence
  Oligonucleotide primer for the detection of SNP TSC0014816
ttataaatccac

SEQ ID NO: 291510 - DNA, 12 bp, Artificial Sequence
  Oligonucleotide primer for the detection of SNP TSC0014816
ttttggaggtgg

SEQ ID NO: 291511 - DNA, 12 bp, Artificial Sequence
  Oligonucleotide primer for the detection of SNP TSC0014817
tttcgttgtgta

SEQ ID NO: 291512 - DNA, 12 bp, Artificial Sequence
  Oligonucleotide primer for the detection of SNP TSC0014818
acacatattcct

SEQ ID NO: 291513 - DNA, 12 bp, Artificial Sequence
  Oligonucleotide primer for the detection of SNP TSC0014818
atagtggaggta

SEQ ID NO: 291514 - DNA, 12 bp, Artificial Sequence
  Oligonucleotide primer for the detection of SNP TSC0014818
atagcggaggta

SEQ ID NO: 291515 - DNA, 12 bp, Artificial Sequence
  Oligonucleotide primer for the detection of SNP TSC0014818
caacaaaaacaa

SEQ ID NO: 291516 - DNA, 12 bp, Artificial Sequence
  Oligonucleotide primer for the detection of SNP TSC0014818
caacgaaaacaa

SEQ ID NO: 291517 - DNA, 12 bp, Artificial Sequence
  Oligonucleotide primer for the detection of SNP TSC0014818
gtatatattttt

SEQ ID NO: 291518 - DNA, 12 bp, Artificial Sequence
  Oligonucleotide primer for the detection of SNP TSC0014819
tacacatattcc

SEQ ID NO: 291519 - DNA, 12 bp, Artificial Sequence
  Oligonucleotide primer for the detection of SNP TSC0014819
agtggaggtaga

SEQ ID NO: 291520 - DNA, 12 bp, Artificial Sequence
  Oligonucleotide primer for the detection of SNP TSC0014819
agcggaggtaga

SEQ ID NO: 291521 - DNA, 12 bp, Artificial Sequence
  Oligonucleotide primer for the detection of SNP TSC0014820
aatgtgggaaag

SEQ ID NO: 291522 - DNA, 12 bp, Artificial Sequence
  Oligonucleotide primer for the detection of SNP TSC0014820
agagagagatgt

SEQ ID NO: 291523 - DNA, 12 bp, Artificial Sequence
  Oligonucleotide primer for the detection of SNP TSC0014821
taacttatttac

SEQ ID NO: 291524 - DNA, 12 bp, Artificial Sequence
  Oligonucleotide primer for the detection of SNP TSC0014821
tgaattttgtta

SEQ ID NO: 291525 - DNA, 12 bp, Artificial Sequence
  Oligonucleotide primer for the detection of SNP TSC0014822
aaaatccaaaaa

SEQ ID NO: 291526 - DNA, 12 bp, Artificial Sequence
  Oligonucleotide primer for the detection of SNP TSC0014822
aaaatccgaaaa

SEQ ID NO: 291527 - DNA, 12 bp, Artificial Sequence
  Oligonucleotide primer for the detection of SNP TSC0014822
gtttgttaattt

SEQ ID NO: 291528 - DNA, 12 bp, Artificial Sequence
  Oligonucleotide primer for the detection of SNP TSC0014822
caatctaccaac

SEQ ID NO: 291529 - DNA, 12 bp, Artificial Sequence
  Oligonucleotide primer for the detection of SNP TSC0014822
gaatttgggaat

SEQ ID NO: 291530 - DNA, 12 bp, Artificial Sequence
  Oligonucleotide primer for the detection of SNP TSC0014822
gaattcgggaat

SEQ ID NO: 291531 - DNA, 12 bp, Artificial Sequence
  Oligonucleotide primer for the detection of SNP TSC0014822
gaatttgggaac

SEQ ID NO: 291532 - DNA, 12 bp, Artificial Sequence
  Oligonucleotide primer for the detection of SNP TSC0014822
gaattcgggaac

SEQ ID NO: 291533 - DNA, 12 bp, Artificial Sequence
  Oligonucleotide primer for the detection of SNP TSC0014823
atttttgtggga

SEQ ID NO: 291534 - DNA, 12 bp, Artificial Sequence
  Oligonucleotide primer for the detection of SNP TSC0014823
atttctataaaa

SEQ ID NO: 291535 - DNA, 12 bp, Artificial Sequence
  Oligonucleotide primer for the detection of SNP TSC0014823
agagatagaaga

SEQ ID NO: 291536 - DNA, 12 bp, Artificial Sequence
  Oligonucleotide primer for the detection of SNP TSC0014824
caataataactt

SEQ ID NO: 291537 - DNA, 12 bp, Artificial Sequence
  Oligonucleotide primer for the detection of SNP TSC0014824
gagatagtttga

SEQ ID NO: 291538 - DNA, 12 bp, Artificial Sequence
  Oligonucleotide primer for the detection of SNP TSC0014825
taattcatattt

SEQ ID NO: 291539 - DNA, 12 bp, Artificial Sequence
  Oligonucleotide primer for the detection of SNP TSC0014825
taaataggtata

SEQ ID NO: 291540 - DNA, 12 bp, Artificial Sequence
  Oligonucleotide primer for the detection of SNP TSC0014825
taaacaaatata

SEQ ID NO: 291541 - DNA, 12 bp, Artificial Sequence
  Oligonucleotide primer for the detection of SNP TSC0014825
taatttatattt

SEQ ID NO: 291542 - DNA, 12 bp, Artificial Sequence
  Oligonucleotide primer for the detection of SNP TSC0014826
ctcaatttaact

SEQ ID NO: 291543 - DNA, 12 bp, Artificial Sequence
  Oligonucleotide primer for the detection of SNP TSC0014826
tttaggtaaaaa

SEQ ID NO: 291544 - DNA, 12 bp, Artificial Sequence
  Oligonucleotide primer for the detection of SNP TSC0014827
ctactcttccca

SEQ ID NO: 291545 - DNA, 12 bp, Artificial Sequence
  Oligonucleotide primer for the detection of SNP TSC0014827
agagtttagtat

SEQ ID NO: 291546 - DNA, 12 bp, Artificial Sequence
  Oligonucleotide primer for the detection of SNP TSC0014827
aaaactcaacat

SEQ ID NO: 291547 - DNA, 12 bp, Artificial Sequence
  Oligonucleotide primer for the detection of SNP TSC0014828
actaattatatc

SEQ ID NO: 291548 - DNA, 12 bp, Artificial Sequence
  Oligonucleotide primer for the detection of SNP TSC0014828
tgtttatattag

SEQ ID NO: 291549 - DNA, 12 bp, Artificial Sequence
  Oligonucleotide primer for the detection of SNP TSC0014828
tatttatattaa

SEQ ID NO: 291550 - DNA, 12 bp, Artificial Sequence
  Oligonucleotide primer for the detection of SNP TSC0014828
attgattgtgtt

SEQ ID NO: 291551 - DNA, 12 bp, Artificial Sequence
  Oligonucleotide primer for the detection of SNP TSC0014829
aaggaatattga

SEQ ID NO: 291552 - DNA, 12 bp, Artificial Sequence
  Oligonucleotide primer for the detection of SNP TSC0014830
ctaacaaattcc

SEQ ID NO: 291553 - DNA, 12 bp, Artificial Sequence
  Oligonucleotide primer for the detection of SNP TSC0014830
ttatttgttttg

SEQ ID NO: 291554 - DNA, 12 bp, Artificial Sequence
  Oligonucleotide primer for the detection of SNP TSC0014830
ccatttacttta

SEQ ID NO: 291555 - DNA, 12 bp, Artificial Sequence
  Oligonucleotide primer for the detection of SNP TSC0014830
ttagtaagtttt

SEQ ID NO: 291556 - DNA, 12 bp, Artificial Sequence
  Oligonucleotide primer for the detection of SNP TSC0014831
ttaaaccaaata

SEQ ID NO: 291557 - DNA, 12 bp, Artificial Sequence
  Oligonucleotide primer for the detection of SNP TSC0014831
aggtattttggg

SEQ ID NO: 291558 - DNA, 12 bp, Artificial Sequence
  Oligonucleotide primer for the detection of SNP TSC0014831
ttgggttaagtg

SEQ ID NO: 291559 - DNA, 12 bp, Artificial Sequence
  Oligonucleotide primer for the detection of SNP TSC0014834
tttatatatatt

SEQ ID NO: 291560 - DNA, 12 bp, Artificial Sequence
  Oligonucleotide primer for the detection of SNP TSC0014834
tattaattttgg

SEQ ID NO: 291561 - DNA, 12 bp, Artificial Sequence
  Oligonucleotide primer for the detection of SNP TSC0014835
aaattcccttaa

SEQ ID NO: 291562 - DNA, 12 bp, Artificial Sequence
  Oligonucleotide primer for the detection of SNP TSC0014835
tttaaaattgat

SEQ ID NO: 291563 - DNA, 12 bp, Artificial Sequence
  Oligonucleotide primer for the detection of SNP TSC0014835
cccaaaattaat

SEQ ID NO: 291564 - DNA, 12 bp, Artificial Sequence
  Oligonucleotide primer for the detection of SNP TSC0014835
tggattttttta

SEQ ID NO: 291565 - DNA, 12 bp, Artificial Sequence
  Oligonukleotid-Primer
aaatactcaaaa

SEQ ID NO: 291566 - DNA, 12 bp, Artificial Sequence
  Oligonucleotide primer for the detection of SNP TSC0014836
ataagtaagttt

SEQ ID NO: 291567 - DNA, 12 bp, Artificial Sequence
  Oligonucleotide primer for the detection of SNP TSC0014836
acaaacaaattc

SEQ ID NO: 291568 - DNA, 12 bp, Artificial Sequence
  Oligonucleotide primer for the detection of SNP TSC0014836
agatgtttagga

SEQ ID NO: 291569 - DNA, 12 bp, Artificial Sequence
  Oligonucleotide primer for the detection of SNP TSC0014838
cacttaataaaa

SEQ ID NO: 291570 - DNA, 12 bp, Artificial Sequence
  Oligonucleotide primer for the detection of SNP TSC0014838
tagtaagtaata

SEQ ID NO: 291571 - DNA, 12 bp, Artificial Sequence
  Oligonucleotide primer for the detection of SNP TSC0014838
caacaaataaca

SEQ ID NO: 291572 - DNA, 12 bp, Artificial Sequence
  Oligonucleotide primer for the detection of SNP TSC0014838
ttatttagtgga

SEQ ID NO: 291573 - DNA, 12 bp, Artificial Sequence
  Oligonucleotide primer for the detection of SNP TSC0014839
cccttcaaacca

SEQ ID NO: 291574 - DNA, 12 bp, Artificial Sequence
  Oligonucleotide primer for the detection of SNP TSC0014839
acaactccacta

SEQ ID NO: 291575 - DNA, 12 bp, Artificial Sequence
  Oligonucleotide primer for the detection of SNP TSC0014839
tttttaggttat

SEQ ID NO: 291576 - DNA, 12 bp, Artificial Sequence
  Oligonucleotide primer for the detection of SNP TSC0014839
tttttaggttac

SEQ ID NO: 291577 - DNA, 12 bp, Artificial Sequence
  Oligonucleotide primer for the detection of SNP TSC0014843
aaaatacactaa

SEQ ID NO: 291578 - DNA, 12 bp, Artificial Sequence
  Oligonucleotide primer for the detection of SNP TSC0014843
aaaatacgctaa

SEQ ID NO: 291579 - DNA, 12 bp, Artificial Sequence
  Oligonucleotide primer for the detection of SNP TSC0014843
tgtgagatgtaa

SEQ ID NO: 291580 - DNA, 12 bp, Artificial Sequence
  Oligonucleotide primer for the detection of SNP TSC0014843
tataaaatacaa

SEQ ID NO: 291581 - DNA, 12 bp, Artificial Sequence
  Oligonucleotide primer for the detection of SNP TSC0014843
taagaatatgtt

SEQ ID NO: 291582 - DNA, 12 bp, Artificial Sequence
  Oligonucleotide primer for the detection of SNP TSC0014843
taagaatacgtt

SEQ ID NO: 291583 - DNA, 12 bp, Artificial Sequence
  Oligonucleotide primer for the detection of SNP TSC0014844
acccaaaatatc

SEQ ID NO: 291584 - DNA, 12 bp, Artificial Sequence
  Oligonucleotide primer for the detection of SNP TSC0014844
tagttatgataa

SEQ ID NO: 291585 - DNA, 12 bp, Artificial Sequence
  Oligonucleotide primer for the detection of SNP TSC0014845
tggttttaagga

SEQ ID NO: 291586 - DNA, 12 bp, Artificial Sequence
  Oligonucleotide primer for the detection of SNP TSC0014846
aacattttttaa

SEQ ID NO: 291587 - DNA, 12 bp, Artificial Sequence
  Oligonucleotide primer for the detection of SNP TSC0014846
tttgttaatatt

SEQ ID NO: 291588 - DNA, 12 bp, Artificial Sequence
  Oligonucleotide primer for the detection of SNP TSC0014846
ctttatcaatac

SEQ ID NO: 291589 - DNA, 12 bp, Artificial Sequence
  Oligonucleotide primer for the detection of SNP TSC0014846
gatattttttag

SEQ ID NO: 291590 - DNA, 12 bp, Artificial Sequence
  Oligonucleotide primer for the detection of SNP TSC0014847
aacaaattttct

SEQ ID NO: 291591 - DNA, 12 bp, Artificial Sequence
  Oligonucleotide primer for the detection of SNP TSC0014847
gtttagggaaga

SEQ ID NO: 291592 - DNA, 12 bp, Artificial Sequence
  Oligonucleotide primer for the detection of SNP TSC0014848
tcaattactcct

SEQ ID NO: 291593 - DNA, 12 bp, Artificial Sequence
  Oligonucleotide primer for the detection of SNP TSC0014848
tagagaatttta

SEQ ID NO: 291594 - DNA, 12 bp, Artificial Sequence
  Oligonucleotide primer for the detection of SNP TSC0014849
catataattaac

SEQ ID NO: 291595 - DNA, 12 bp, Artificial Sequence
  Oligonucleotide primer for the detection of SNP TSC0014849
tttgaagtagta

SEQ ID NO: 291596 - DNA, 12 bp, Artificial Sequence
  Oligonucleotide primer for the detection of SNP TSC0014849
ttcgaagtagta

SEQ ID NO: 291597 - DNA, 12 bp, Artificial Sequence
  Oligonucleotide primer for the detection of SNP TSC0014850
ttattatatagt

SEQ ID NO: 291598 - DNA, 12 bp, Artificial Sequence
  Oligonucleotide primer for the detection of SNP TSC0014850
tccaccacacaa

SEQ ID NO: 291599 - DNA, 12 bp, Artificial Sequence
  Oligonucleotide primer for the detection of SNP TSC0014850
ttttgatgaggg

SEQ ID NO: 291600 - DNA, 12 bp, Artificial Sequence
  Oligonucleotide primer for the detection of SNP TSC0014855
atgaattaatta

SEQ ID NO: 291601 - DNA, 12 bp, Artificial Sequence
  Oligonucleotide primer for the detection of SNP TSC0014859
tcaaatcccata

SEQ ID NO: 291602 - DNA, 12 bp, Artificial Sequence
  Oligonucleotide primer for the detection of SNP TSC0014859
ttaggtagtatt

SEQ ID NO: 291603 - DNA, 12 bp, Artificial Sequence
  Oligonucleotide primer for the detection of SNP TSC0014859
ccaaacaatacc

SEQ ID NO: 291604 - DNA, 12 bp, Artificial Sequence
  Oligonucleotide primer for the detection of SNP TSC0014859
ttaaattttatg

SEQ ID NO: 291605 - DNA, 12 bp, Artificial Sequence
  Oligonucleotide primer for the detection of SNP TSC0014860
aatttcccaaaa

SEQ ID NO: 291606 - DNA, 12 bp, Artificial Sequence
  Oligonucleotide primer for the detection of SNP TSC0014860
aatttcccgaaa

SEQ ID NO: 291607 - DNA, 12 bp, Artificial Sequence
  Oligonucleotide primer for the detection of SNP TSC0014860
tttgttttaatt

SEQ ID NO: 291608 - DNA, 12 bp, Artificial Sequence
  Oligonucleotide primer for the detection of SNP TSC0014860
aatctatcttaa

SEQ ID NO: 291609 - DNA, 12 bp, Artificial Sequence
  Oligonucleotide primer for the detection of SNP TSC0014860
aaattttttgag

SEQ ID NO: 291610 - DNA, 12 bp, Artificial Sequence
  Oligonucleotide primer for the detection of SNP TSC0014860
aaatttttcgag

SEQ ID NO: 291611 - DNA, 12 bp, Artificial Sequence
  Oligonucleotide primer for the detection of SNP TSC0014861
taaaaataacaa

SEQ ID NO: 291612 - DNA, 12 bp, Artificial Sequence
  Oligonucleotide primer for the detection of SNP TSC0014861
atatttgtttta

SEQ ID NO: 291613 - DNA, 12 bp, Artificial Sequence
  Oligonucleotide primer for the detection of SNP TSC0014861
acatctacctca

SEQ ID NO: 291614 - DNA, 12 bp, Artificial Sequence
  Oligonucleotide primer for the detection of SNP TSC0014861
taagggtggtag

SEQ ID NO: 291615 - DNA, 12 bp, Artificial Sequence
  Oligonucleotide primer for the detection of SNP TSC0014863
aggtttttaatt

SEQ ID NO: 291616 - DNA, 12 bp, Artificial Sequence
  Oligonucleotide primer for the detection of SNP TSC0014863
aaacttctaatt

SEQ ID NO: 291617 - DNA, 12 bp, Artificial Sequence
  Oligonucleotide primer for the detection of SNP TSC0014863
tagaagtataat

SEQ ID NO: 291618 - DNA, 12 bp, Artificial Sequence
  Oligonucleotide primer for the detection of SNP TSC0014864
cattcttccttt

SEQ ID NO: 291619 - DNA, 12 bp, Artificial Sequence
  Oligonucleotide primer for the detection of SNP TSC0014864
gtttagggggaa

SEQ ID NO: 291620 - DNA, 12 bp, Artificial Sequence
  Oligonucleotide primer for the detection of SNP TSC0014865
atatatttattc

SEQ ID NO: 291621 - DNA, 12 bp, Artificial Sequence
  Oligonucleotide primer for the detection of SNP TSC0014865
tggaattagtaa

SEQ ID NO: 291622 - DNA, 12 bp, Artificial Sequence
  Oligonucleotide primer for the detection of SNP TSC0014865
taaaatcaacaa

SEQ ID NO: 291623 - DNA, 12 bp, Artificial Sequence
  Oligonucleotide primer for the detection of SNP TSC0014865
gtgtatttgttt

SEQ ID NO: 291624 - DNA, 12 bp, Artificial Sequence
  Oligonucleotide primer for the detection of SNP TSC0014866
accctatccaaa

SEQ ID NO: 291625 - DNA, 12 bp, Artificial Sequence
  Oligonucleotide primer for the detection of SNP TSC0014866
ttttttttgaaa

SEQ ID NO: 291626 - DNA, 12 bp, Artificial Sequence
  Oligonucleotide primer for the detection of SNP TSC0014867
aataacataatc

SEQ ID NO: 291627 - DNA, 12 bp, Artificial Sequence
  Oligonucleotide primer for the detection of SNP TSC0014867
aactacaataaa

SEQ ID NO: 291628 - DNA, 12 bp, Artificial Sequence
  Oligonucleotide primer for the detection of SNP TSC0014867
gactacaataaa

SEQ ID NO: 291629 - DNA, 12 bp, Artificial Sequence
  Oligonucleotide primer for the detection of SNP TSC0014867
agtgatataatt

SEQ ID NO: 291630 - DNA, 12 bp, Artificial Sequence
  Oligonucleotide primer for the detection of SNP TSC0014868
aacactaaatta

SEQ ID NO: 291631 - DNA, 12 bp, Artificial Sequence
  Oligonucleotide primer for the detection of SNP TSC0014868
tataatataaaa

SEQ ID NO: 291632 - DNA, 12 bp, Artificial Sequence
  Oligonucleotide primer for the detection of SNP TSC0014868
taatattgagtt

SEQ ID NO: 291633 - DNA, 12 bp, Artificial Sequence
  Oligonucleotide primer for the detection of SNP TSC0014869
aataacacaact

SEQ ID NO: 291634 - DNA, 12 bp, Artificial Sequence
  Oligonucleotide primer for the detection of SNP TSC0014869
aataacacgact

SEQ ID NO: 291635 - DNA, 12 bp, Artificial Sequence
  Oligonucleotide primer for the detection of SNP TSC0014869
atggattaatgt

SEQ ID NO: 291636 - DNA, 12 bp, Artificial Sequence
  Oligonucleotide primer for the detection of SNP TSC0014869
atggattaacgt

SEQ ID NO: 291637 - DNA, 12 bp, Artificial Sequence
  Oligonucleotide primer for the detection of SNP TSC0014869
tataaattaacg

SEQ ID NO: 291638 - DNA, 12 bp, Artificial Sequence
  Oligonucleotide primer for the detection of SNP TSC0014869
agtgatatggtt

SEQ ID NO: 291639 - DNA, 12 bp, Artificial Sequence
  Oligonucleotide primer for the detection of SNP TSC0014869
agtgatacggtt

SEQ ID NO: 291640 - DNA, 12 bp, Artificial Sequence
  Oligonucleotide primer for the detection of SNP TSC0014870
actaaaataaca

SEQ ID NO: 291641 - DNA, 12 bp, Artificial Sequence
  Oligonucleotide primer for the detection of SNP TSC0014870
attaatgtaagt

SEQ ID NO: 291642 - DNA, 12 bp, Artificial Sequence
  Oligonucleotide primer for the detection of SNP TSC0014870
attaacgtaagt

SEQ ID NO: 291643 - DNA, 12 bp, Artificial Sequence
  Oligonucleotide primer for the detection of SNP TSC0014870
attaacacaaac

SEQ ID NO: 291644 - DNA, 12 bp, Artificial Sequence
  Oligonucleotide primer for the detection of SNP TSC0014870
attaacgcaaac

SEQ ID NO: 291645 - DNA, 12 bp, Artificial Sequence
  Oligonucleotide primer for the detection of SNP TSC0014870
gttaaagtgata

SEQ ID NO: 291646 - DNA, 12 bp, Artificial Sequence
  Oligonukleotid-Primer
caaacaaataac

SEQ ID NO: 291647 - DNA, 12 bp, Artificial Sequence
  Oligonucleotide primer for the detection of SNP TSC0014871
atatgaagggga

SEQ ID NO: 291648 - DNA, 12 bp, Artificial Sequence
  Oligonucleotide primer for the detection of SNP TSC0014874
ttctacttattc

SEQ ID NO: 291649 - DNA, 12 bp, Artificial Sequence
  Oligonucleotide primer for the detection of SNP TSC0014874
tttttaatttat

SEQ ID NO: 291650 - DNA, 12 bp, Artificial Sequence
  Oligonucleotide primer for the detection of SNP TSC0014874
tttaattcacaa

SEQ ID NO: 291651 - DNA, 12 bp, Artificial Sequence
  Oligonucleotide primer for the detection of SNP TSC0014875
ttaattggtaat

SEQ ID NO: 291652 - DNA, 12 bp, Artificial Sequence
  Oligonucleotide primer for the detection of SNP TSC0014875
ttaattggtaac

SEQ ID NO: 291653 - DNA, 12 bp, Artificial Sequence
  Oligonucleotide primer for the detection of SNP TSC0014875
cttaattaacaa

SEQ ID NO: 291654 - DNA, 12 bp, Artificial Sequence
  Oligonucleotide primer for the detection of SNP TSC0014875
aagtaagaaaaa

SEQ ID NO: 291655 - DNA, 12 bp, Artificial Sequence
  Oligonucleotide primer for the detection of SNP TSC0014879
aatccactcaat

SEQ ID NO: 291656 - DNA, 12 bp, Artificial Sequence
  Oligonucleotide primer for the detection of SNP TSC0014879
ggtagtatatta

SEQ ID NO: 291657 - DNA, 12 bp, Artificial Sequence
  Oligonucleotide primer for the detection of SNP TSC0014880
caattcacataa

SEQ ID NO: 291658 - DNA, 12 bp, Artificial Sequence
  Oligonucleotide primer for the detection of SNP TSC0014880
cgattcacataa

SEQ ID NO: 291659 - DNA, 12 bp, Artificial Sequence
  Oligonucleotide primer for the detection of SNP TSC0014880
aaaagttgtttg

SEQ ID NO: 291660 - DNA, 12 bp, Artificial Sequence
  Oligonucleotide primer for the detection of SNP TSC0014880
aaaaattaccta

SEQ ID NO: 291661 - DNA, 12 bp, Artificial Sequence
  Oligonucleotide primer for the detection of SNP TSC0014880
ttgatttatatg

SEQ ID NO: 291662 - DNA, 12 bp, Artificial Sequence
  Oligonucleotide primer for the detection of SNP TSC0014880
tcgatttatatg

SEQ ID NO: 291663 - DNA, 12 bp, Artificial Sequence
  Oligonucleotide primer for the detection of SNP TSC0014881
ttaaaaactaat

SEQ ID NO: 291664 - DNA, 12 bp, Artificial Sequence
  Oligonucleotide primer for the detection of SNP TSC0014881
aattgagtagag

SEQ ID NO: 291665 - DNA, 12 bp, Artificial Sequence
  Oligonucleotide primer for the detection of SNP TSC0014881
aatcgagtagag

SEQ ID NO: 291666 - DNA, 12 bp, Artificial Sequence
  Oligonucleotide primer for the detection of SNP TSC0014882
taaaaaaaatac

SEQ ID NO: 291667 - DNA, 12 bp, Artificial Sequence
  Oligonucleotide primer for the detection of SNP TSC0014882
tatgtagaatgg

SEQ ID NO: 291668 - DNA, 12 bp, Artificial Sequence
  Oligonucleotide primer for the detection of SNP TSC0014882
tatgtagaacgg

SEQ ID NO: 291669 - DNA, 12 bp, Artificial Sequence
  Oligonucleotide primer for the detection of SNP TSC0014883
cctaaaactatc

SEQ ID NO: 291670 - DNA, 12 bp, Artificial Sequence
  Oligonucleotide primer for the detection of SNP TSC0014884
agaatagatgga

SEQ ID NO: 291671 - DNA, 12 bp, Artificial Sequence
  Oligonucleotide primer for the detection of SNP TSC0014884
tgtaaaggaggt

SEQ ID NO: 291672 - DNA, 12 bp, Artificial Sequence
  Oligonucleotide primer for the detection of SNP TSC0014885
ttttaaaaaatt

SEQ ID NO: 291673 - DNA, 12 bp, Artificial Sequence
  Oligonucleotide primer for the detection of SNP TSC0014885
ttaggtggtgtg

SEQ ID NO: 291674 - DNA, 12 bp, Artificial Sequence
  Oligonucleotide primer for the detection of SNP TSC0014885
ttaggtggtgcg

SEQ ID NO: 291675 - DNA, 12 bp, Artificial Sequence
  Oligonucleotide primer for the detection of SNP TSC0014885
tcaaataatacg

SEQ ID NO: 291676 - DNA, 12 bp, Artificial Sequence
  Oligonucleotide primer for the detection of SNP TSC0014885
ttttgaagagtt

SEQ ID NO: 291677 - DNA, 12 bp, Artificial Sequence
  Oligonucleotide primer for the detection of SNP TSC0014886
caccaaaacaca

SEQ ID NO: 291678 - DNA, 12 bp, Artificial Sequence
  Oligonucleotide primer for the detection of SNP TSC0014886
tttttgtttaaa

SEQ ID NO: 291679 - DNA, 12 bp, Artificial Sequence
  Oligonucleotide primer for the detection of SNP TSC0014886
ttcctatccaaa

SEQ ID NO: 291680 - DNA, 12 bp, Artificial Sequence
  Oligonucleotide primer for the detection of SNP TSC0014886
atattaaaatat

SEQ ID NO: 291681 - DNA, 12 bp, Artificial Sequence
  Oligonucleotide primer for the detection of SNP TSC0014887
aaaccccactat

SEQ ID NO: 291682 - DNA, 12 bp, Artificial Sequence
  Oligonucleotide primer for the detection of SNP TSC0014887
atttgggggaga

SEQ ID NO: 291683 - DNA, 12 bp, Artificial Sequence
  Oligonucleotide primer for the detection of SNP TSC0014888
ataacatctccc

SEQ ID NO: 291684 - DNA, 12 bp, Artificial Sequence
  Oligonucleotide primer for the detection of SNP TSC0014888
gtagtgtatttg

SEQ ID NO: 291685 - DNA, 12 bp, Artificial Sequence
  Oligonucleotide primer for the detection of SNP TSC0014889
taaatttaatta

SEQ ID NO: 291686 - DNA, 12 bp, Artificial Sequence
  Oligonucleotide primer for the detection of SNP TSC0014889
ttaataaaggag

SEQ ID NO: 291687 - DNA, 12 bp, Artificial Sequence
  Oligonucleotide primer for the detection of SNP TSC0014889
ggtttagttatt

SEQ ID NO: 291688 - DNA, 12 bp, Artificial Sequence
  Oligonucleotide primer for the detection of SNP TSC0014891
ataattaaatca

SEQ ID NO: 291689 - DNA, 12 bp, Artificial Sequence
  Oligonucleotide primer for the detection of SNP TSC0014891
tctttctttatc

SEQ ID NO: 291690 - DNA, 12 bp, Artificial Sequence
  Oligonucleotide primer for the detection of SNP TSC0014891
gtggttagatta

SEQ ID NO: 291691 - DNA, 12 bp, Artificial Sequence
  Oligonucleotide primer for the detection of SNP TSC0014892
ttaataaaatct

SEQ ID NO: 291692 - DNA, 12 bp, Artificial Sequence
  Oligonucleotide primer for the detection of SNP TSC0014892
aaaagggagtta

SEQ ID NO: 291693 - DNA, 12 bp, Artificial Sequence
  Oligonucleotide primer for the detection of SNP TSC0014893
aacaaataaata

SEQ ID NO: 291694 - DNA, 12 bp, Artificial Sequence
  Oligonucleotide primer for the detection of SNP TSC0014893
ttaataatgata

SEQ ID NO: 291695 - DNA, 12 bp, Artificial Sequence
  Oligonucleotide primer for the detection of SNP TSC0014893
caataataacaa

SEQ ID NO: 291696 - DNA, 12 bp, Artificial Sequence
  Oligonucleotide primer for the detection of SNP TSC0014893
aagtaggtaaat

SEQ ID NO: 291697 - DNA, 12 bp, Artificial Sequence
  Oligonucleotide primer for the detection of SNP TSC0014894
tctaatccctat

SEQ ID NO: 291698 - DNA, 12 bp, Artificial Sequence
  Oligonucleotide primer for the detection of SNP TSC0014894
atatttttgagg

SEQ ID NO: 291699 - DNA, 12 bp, Artificial Sequence
  Oligonucleotide primer for the detection of SNP TSC0014895
aaaaaaatcttt

SEQ ID NO: 291700 - DNA, 12 bp, Artificial Sequence
  Oligonucleotide primer for the detection of SNP TSC0014895
ggttggaagtga

SEQ ID NO: 291701 - DNA, 12 bp, Artificial Sequence
  Oligonucleotide primer for the detection of SNP TSC0014895
ggtcggaagtga

SEQ ID NO: 291702 - DNA, 12 bp, Artificial Sequence
  Oligonucleotide primer for the detection of SNP TSC0014896
caaataacaaat

SEQ ID NO: 291703 - DNA, 12 bp, Artificial Sequence
  Oligonucleotide primer for the detection of SNP TSC0014896
tatttattttga

SEQ ID NO: 291704 - DNA, 12 bp, Artificial Sequence
  Oligonucleotide primer for the detection of SNP TSC0014903
taataaaattat

SEQ ID NO: 291705 - DNA, 12 bp, Artificial Sequence
  Oligonucleotide primer for the detection of SNP TSC0014903
gtgtttagtaaa

SEQ ID NO: 291706 - DNA, 12 bp, Artificial Sequence
  Oligonucleotide primer for the detection of SNP TSC0014903
atatttaataaa

SEQ ID NO: 291707 - DNA, 12 bp, Artificial Sequence
  Oligonucleotide primer for the detection of SNP TSC0014905
ccataaacatcc

SEQ ID NO: 291708 - DNA, 12 bp, Artificial Sequence
  Oligonucleotide primer for the detection of SNP TSC0014905
tgaggtaggtgg

SEQ ID NO: 291709 - DNA, 12 bp, Artificial Sequence
  Oligonucleotide primer for the detection of SNP TSC0014906
actaactaaaac

SEQ ID NO: 291710 - DNA, 12 bp, Artificial Sequence
  Oligonucleotide primer for the detection of SNP TSC0014906
tttttgatggta

SEQ ID NO: 291711 - DNA, 12 bp, Artificial Sequence
  Oligonucleotide primer for the detection of SNP TSC0014907
ttcttttatccc

SEQ ID NO: 291712 - DNA, 12 bp, Artificial Sequence
  Oligonucleotide primer for the detection of SNP TSC0014907
aatatttttaaa

SEQ ID NO: 291713 - DNA, 12 bp, Artificial Sequence
  Oligonucleotide primer for the detection of SNP TSC0014908
taaacaaccaat

SEQ ID NO: 291714 - DNA, 12 bp, Artificial Sequence
  Oligonucleotide primer for the detection of SNP TSC0014908
gttggaatttga

SEQ ID NO: 291715 - DNA, 12 bp, Artificial Sequence
  Oligonucleotide primer for the detection of SNP TSC0014908
attaaaatttaa

SEQ ID NO: 291716 - DNA, 12 bp, Artificial Sequence
  Oligonucleotide primer for the detection of SNP TSC0014908
tgagtaattagt

SEQ ID NO: 291717 - DNA, 12 bp, Artificial Sequence
  Oligonucleotide primer for the detection of SNP TSC0014909
tccaactctatc

SEQ ID NO: 291718 - DNA, 12 bp, Artificial Sequence
  Oligonucleotide primer for the detection of SNP TSC0014909
ttgtttgagttt

SEQ ID NO: 291719 - DNA, 12 bp, Artificial Sequence
  Oligonucleotide primer for the detection of SNP TSC0014909
ttatctaaactc

SEQ ID NO: 291720 - DNA, 12 bp, Artificial Sequence
  Oligonucleotide primer for the detection of SNP TSC0014909
tttagttttgtt

SEQ ID NO: 291721 - DNA, 12 bp, Artificial Sequence
  Oligonucleotide primer for the detection of SNP TSC0014910
aacaaaaacctc

SEQ ID NO: 291722 - DNA, 12 bp, Artificial Sequence
  Oligonucleotide primer for the detection of SNP TSC0014910
tgtttaagaggg

SEQ ID NO: 291723 - DNA, 12 bp, Artificial Sequence
  Oligonucleotide primer for the detection of SNP TSC0014910
cgtttaagaggg

SEQ ID NO: 291724 - DNA, 12 bp, Artificial Sequence
  Oligonucleotide primer for the detection of SNP TSC0014910
cacccaaaaaaa

SEQ ID NO: 291725 - DNA, 12 bp, Artificial Sequence
  Oligonucleotide primer for the detection of SNP TSC0014910
cgcccaaaaaaa

SEQ ID NO: 291726 - DNA, 12 bp, Artificial Sequence
  Oligonucleotide primer for the detection of SNP TSC0014910
ggtaggagtttt

SEQ ID NO: 291727 - DNA, 12 bp, Artificial Sequence
  Oligonucleotide primer for the detection of SNP TSC0014911
caatctcaactc

SEQ ID NO: 291728 - DNA, 12 bp, Artificial Sequence
  Oligonucleotide primer for the detection of SNP TSC0014911
cgatctcaactc

SEQ ID NO: 291729 - DNA, 12 bp, Artificial Sequence
  Oligonucleotide primer for the detection of SNP TSC0014911
aggtggaggttg

SEQ ID NO: 291730 - DNA, 12 bp, Artificial Sequence
  Oligonucleotide primer for the detection of SNP TSC0014911
tgattttagttt

SEQ ID NO: 291731 - DNA, 12 bp, Artificial Sequence
  Oligonucleotide primer for the detection of SNP TSC0014911
cgattttagttt

SEQ ID NO: 291732 - DNA, 12 bp, Artificial Sequence
  Oligonucleotide primer for the detection of SNP TSC0014912
caaaaaaacttc

SEQ ID NO: 291733 - DNA, 12 bp, Artificial Sequence
  Oligonucleotide primer for the detection of SNP TSC0014912
tattggttagaa

SEQ ID NO: 291734 - DNA, 12 bp, Artificial Sequence
  Oligonucleotide primer for the detection of SNP TSC0014913
aataattaacat

SEQ ID NO: 291735 - DNA, 12 bp, Artificial Sequence
  Oligonucleotide primer for the detection of SNP TSC0014913
atataggtggta

SEQ ID NO: 291736 - DNA, 12 bp, Artificial Sequence
  Oligonucleotide primer for the detection of SNP TSC0014914
cttcttcttcac

SEQ ID NO: 291737 - DNA, 12 bp, Artificial Sequence
  Oligonucleotide primer for the detection of SNP TSC0014914
tgaggtgtatag

SEQ ID NO: 291738 - DNA, 12 bp, Artificial Sequence
  Oligonucleotide primer for the detection of SNP TSC0014914
taaaatatacaa

SEQ ID NO: 291739 - DNA, 12 bp, Artificial Sequence
  Oligonucleotide primer for the detection of SNP TSC0014914
ttttttttttac

SEQ ID NO: 291740 - DNA, 12 bp, Artificial Sequence
  Oligonucleotide primer for the detection of SNP TSC0014915
acaccaaaaaca

SEQ ID NO: 291741 - DNA, 12 bp, Artificial Sequence
  Oligonucleotide primer for the detection of SNP TSC0014915
tcttctcaaatt

SEQ ID NO: 291742 - DNA, 12 bp, Artificial Sequence
  Oligonucleotide primer for the detection of SNP TSC0014915
atattaaagata

SEQ ID NO: 291743 - DNA, 12 bp, Artificial Sequence
  Oligonucleotide primer for the detection of SNP TSC0014916
aaaaataaacac

SEQ ID NO: 291744 - DNA, 12 bp, Artificial Sequence
  Oligonucleotide primer for the detection of SNP TSC0014916
gtttgtgttttt

SEQ ID NO: 291745 - DNA, 12 bp, Artificial Sequence
  Oligonucleotide primer for the detection of SNP TSC0014916
gttcgtgttttt

SEQ ID NO: 291746 - DNA, 12 bp, Artificial Sequence
  Oligonucleotide primer for the detection of SNP TSC0014916
attcatatcttt

SEQ ID NO: 291747 - DNA, 12 bp, Artificial Sequence
  Oligonucleotide primer for the detection of SNP TSC0014916
attcgtatcttt

SEQ ID NO: 291748 - DNA, 12 bp, Artificial Sequence
  Oligonucleotide primer for the detection of SNP TSC0014916
ggagatgaatat

SEQ ID NO: 291749 - DNA, 12 bp, Artificial Sequence
  Oligonucleotide primer for the detection of SNP TSC0014917
atttttaacata

SEQ ID NO: 291750 - DNA, 12 bp, Artificial Sequence
  Oligonucleotide primer for the detection of SNP TSC0014917
gtttggaggggg

SEQ ID NO: 291751 - DNA, 12 bp, Artificial Sequence
  Oligonucleotide primer for the detection of SNP TSC0014917
tctaaaaaaaaa

SEQ ID NO: 291752 - DNA, 12 bp, Artificial Sequence
  Oligonucleotide primer for the detection of SNP TSC0014917
tttttggtatat

SEQ ID NO: 291753 - DNA, 12 bp, Artificial Sequence
  Oligonucleotide primer for the detection of SNP TSC0014918
agatatgttaaa

SEQ ID NO: 291754 - DNA, 12 bp, Artificial Sequence
  Oligonucleotide primer for the detection of SNP TSC0014918
aaatataccaaa

SEQ ID NO: 291755 - DNA, 12 bp, Artificial Sequence
  Oligonucleotide primer for the detection of SNP TSC0014918
tatttgtttggt

SEQ ID NO: 291756 - DNA, 12 bp, Artificial Sequence
  Oligonucleotide primer for the detection of SNP TSC0014919
aaaagttttttt

SEQ ID NO: 291757 - DNA, 12 bp, Artificial Sequence
  Oligonucleotide primer for the detection of SNP TSC0014919
gaaataaagaaa

SEQ ID NO: 291758 - DNA, 12 bp, Artificial Sequence
  Oligonucleotide primer for the detection of SNP TSC0014920
cataaactcttc

SEQ ID NO: 291759 - DNA, 12 bp, Artificial Sequence
  Oligonucleotide primer for the detection of SNP TSC0014920
atttattgtttt

SEQ ID NO: 291760 - DNA, 12 bp, Artificial Sequence
  Oligonucleotide primer for the detection of SNP TSC0014921
gaggtaaggata

SEQ ID NO: 291761 - DNA, 12 bp, Artificial Sequence
  Oligonucleotide primer for the detection of SNP TSC0014923
cctaaatcttct

SEQ ID NO: 291762 - DNA, 12 bp, Artificial Sequence
  Oligonucleotide primer for the detection of SNP TSC0014923
aatgagaagaga

SEQ ID NO: 291763 - DNA, 12 bp, Artificial Sequence
  Oligonucleotide primer for the detection of SNP TSC0014924
aacatattactt

SEQ ID NO: 291764 - DNA, 12 bp, Artificial Sequence
  Oligonucleotide primer for the detection of SNP TSC0014924
gattagaaagaa

SEQ ID NO: 291765 - DNA, 12 bp, Artificial Sequence
  Oligonucleotide primer for the detection of SNP TSC0014925
aaatcccctacc

SEQ ID NO: 291766 - DNA, 12 bp, Artificial Sequence
  Oligonucleotide primer for the detection of SNP TSC0014925
gaatatttagga

SEQ ID NO: 291767 - DNA, 12 bp, Artificial Sequence
  Oligonucleotide primer for the detection of SNP TSC0014925
aaacatccaaaa

SEQ ID NO: 291768 - DNA, 12 bp, Artificial Sequence
  Oligonucleotide primer for the detection of SNP TSC0014925
aagttttttatt

SEQ ID NO: 291769 - DNA, 12 bp, Artificial Sequence
  Oligonucleotide primer for the detection of SNP TSC0014926
ttatcaacttaa

SEQ ID NO: 291770 - DNA, 12 bp, Artificial Sequence
  Oligonucleotide primer for the detection of SNP TSC0014926
attaccaacaaa

SEQ ID NO: 291771 - DNA, 12 bp, Artificial Sequence
  Oligonucleotide primer for the detection of SNP TSC0014926
ttattaatttga

SEQ ID NO: 291772 - DNA, 12 bp, Artificial Sequence
  Oligonucleotide primer for the detection of SNP TSC0014927
atataaaactta

SEQ ID NO: 291773 - DNA, 12 bp, Artificial Sequence
  Oligonucleotide primer for the detection of SNP TSC0014927
atgttgtttttt

SEQ ID NO: 291774 - DNA, 12 bp, Artificial Sequence
  Oligonucleotide primer for the detection of SNP TSC0014927
gtgtaggatttg

SEQ ID NO: 291775 - DNA, 12 bp, Artificial Sequence
  Oligonucleotide primer for the detection of SNP TSC0014928
accaaaatcacg

SEQ ID NO: 291776 - DNA, 12 bp, Artificial Sequence
  Oligonucleotide primer for the detection of SNP TSC0014928
accgaaatcaca

SEQ ID NO: 291777 - DNA, 12 bp, Artificial Sequence
  Oligonucleotide primer for the detection of SNP TSC0014928
accgaaatcacg

SEQ ID NO: 291778 - DNA, 12 bp, Artificial Sequence
  Oligonucleotide primer for the detection of SNP TSC0014928
aggttggtgggt

SEQ ID NO: 291779 - DNA, 12 bp, Artificial Sequence
  Oligonucleotide primer for the detection of SNP TSC0014928
aaactaataaac

SEQ ID NO: 291780 - DNA, 12 bp, Artificial Sequence
  Oligonucleotide primer for the detection of SNP TSC0014928
gttgaggttatg

SEQ ID NO: 291781 - DNA, 12 bp, Artificial Sequence
  Oligonucleotide primer for the detection of SNP TSC0014928
gtcgaggttatg

SEQ ID NO: 291782 - DNA, 12 bp, Artificial Sequence
  Oligonucleotide primer for the detection of SNP TSC0014928
gttgaggttacg

SEQ ID NO: 291783 - DNA, 12 bp, Artificial Sequence
  Oligonucleotide primer for the detection of SNP TSC0014928
gtcgaggttacg

SEQ ID NO: 291784 - DNA, 12 bp, Artificial Sequence
  Oligonucleotide primer for the detection of SNP TSC0014929
ctcaaaataaaa

SEQ ID NO: 291785 - DNA, 12 bp, Artificial Sequence
  Oligonucleotide primer for the detection of SNP TSC0014929
tagttttgggat

SEQ ID NO: 291786 - DNA, 12 bp, Artificial Sequence
  Oligonucleotide primer for the detection of SNP TSC0014929
aactctaaaata

SEQ ID NO: 291787 - DNA, 12 bp, Artificial Sequence
  Oligonucleotide primer for the detection of SNP TSC0014929
gttttaggataa

SEQ ID NO: 291788 - DNA, 12 bp, Artificial Sequence
  Oligonucleotide primer for the detection of SNP TSC0014930
tctaccaaaata

SEQ ID NO: 291789 - DNA, 12 bp, Artificial Sequence
  Oligonucleotide primer for the detection of SNP TSC0014930
ttttgaggtttt

SEQ ID NO: 291790 - DNA, 12 bp, Artificial Sequence
  Oligonucleotide primer for the detection of SNP TSC0014930
tcctaaaaccct

SEQ ID NO: 291791 - DNA, 12 bp, Artificial Sequence
  Oligonucleotide primer for the detection of SNP TSC0014930
tttgttagaata

SEQ ID NO: 291792 - DNA, 12 bp, Artificial Sequence
  Oligonucleotide primer for the detection of SNP TSC0014932
ataacatatatt

SEQ ID NO: 291793 - DNA, 12 bp, Artificial Sequence
  Oligonucleotide primer for the detection of SNP TSC0014932
gaatgataattg

SEQ ID NO: 291794 - DNA, 12 bp, Artificial Sequence
  Oligonucleotide primer for the detection of SNP TSC0014933
ataaacttataa

SEQ ID NO: 291795 - DNA, 12 bp, Artificial Sequence
  Oligonucleotide primer for the detection of SNP TSC0014933
atagtttgtaaa

SEQ ID NO: 291796 - DNA, 12 bp, Artificial Sequence
  Oligonucleotide primer for the detection of SNP TSC0014933
tagtaggtttat

SEQ ID NO: 291797 - DNA, 12 bp, Artificial Sequence
  Oligonucleotide primer for the detection of SNP TSC0014934
aactcctcatac

SEQ ID NO: 291798 - DNA, 12 bp, Artificial Sequence
  Oligonucleotide primer for the detection of SNP TSC0014934
gttattattagg

SEQ ID NO: 291799 - DNA, 12 bp, Artificial Sequence
  Oligonucleotide primer for the detection of SNP TSC0014935
aaatactaaaac

SEQ ID NO: 291800 - DNA, 12 bp, Artificial Sequence
  Oligonucleotide primer for the detection of SNP TSC0014935
agaattttaatg

SEQ ID NO: 291801 - DNA, 12 bp, Artificial Sequence
  Oligonucleotide primer for the detection of SNP TSC0014936
ttctttcaaatt

SEQ ID NO: 291802 - DNA, 12 bp, Artificial Sequence
  Oligonucleotide primer for the detection of SNP TSC0014936
taaataaaatat

SEQ ID NO: 291803 - DNA, 12 bp, Artificial Sequence
  Oligonucleotide primer for the detection of SNP TSC0014937
aactaaatctct

SEQ ID NO: 291804 - DNA, 12 bp, Artificial Sequence
  Oligonucleotide primer for the detection of SNP TSC0014937
atatatatatag

SEQ ID NO: 291805 - DNA, 12 bp, Artificial Sequence
  Oligonucleotide primer for the detection of SNP TSC0014939
caaataataaca

SEQ ID NO: 291806 - DNA, 12 bp, Artificial Sequence
  Oligonucleotide primer for the detection of SNP TSC0014939
attgtttttttt

SEQ ID NO: 291807 - DNA, 12 bp, Artificial Sequence
  Oligonucleotide primer for the detection of SNP TSC0014939
attatccctcct

SEQ ID NO: 291808 - DNA, 12 bp, Artificial Sequence
  Oligonucleotide primer for the detection of SNP TSC0014939
taaataatgata

SEQ ID NO: 291809 - DNA, 12 bp, Artificial Sequence
  Oligonucleotide primer for the detection of SNP TSC0014941
aaaaacttcctt

SEQ ID NO: 291810 - DNA, 12 bp, Artificial Sequence
  Oligonucleotide primer for the detection of SNP TSC0014941
gtggatgaggga

SEQ ID NO: 291811 - DNA, 12 bp, Artificial Sequence
  Oligonucleotide primer for the detection of SNP TSC0014942
cccacaaaaaac

SEQ ID NO: 291812 - DNA, 12 bp, Artificial Sequence
  Oligonucleotide primer for the detection of SNP TSC0014945
atggagagagaa

SEQ ID NO: 291813 - DNA, 12 bp, Artificial Sequence
  Oligonucleotide primer for the detection of SNP TSC0014946
aaccaaaaaata

SEQ ID NO: 291814 - DNA, 12 bp, Artificial Sequence
  Oligonucleotide primer for the detection of SNP TSC0014946
tctccttctctc

SEQ ID NO: 291815 - DNA, 12 bp, Artificial Sequence
  Oligonucleotide primer for the detection of SNP TSC0014946
agttaagaaatg

SEQ ID NO: 291816 - DNA, 12 bp, Artificial Sequence
  Oligonucleotide primer for the detection of SNP TSC0014947
aaaaactctcat

SEQ ID NO: 291817 - DNA, 12 bp, Artificial Sequence
  Oligonucleotide primer for the detection of SNP TSC0014947
taatatatggta

SEQ ID NO: 291818 - DNA, 12 bp, Artificial Sequence
  Oligonucleotide primer for the detection of SNP TSC0014951
accaactactcc

SEQ ID NO: 291819 - DNA, 12 bp, Artificial Sequence
  Oligonucleotide primer for the detection of SNP TSC0014951
gggttttttttc

SEQ ID NO: 291820 - DNA, 12 bp, Artificial Sequence
  Oligonucleotide primer for the detection of SNP TSC0014951
ctaaacctctct

SEQ ID NO: 291821 - DNA, 12 bp, Artificial Sequence
  Oligonucleotide primer for the detection of SNP TSC0014951
gttagttgtttt

SEQ ID NO: 291822 - DNA, 12 bp, Artificial Sequence
  Oligonucleotide primer for the detection of SNP TSC0014953
aaatctctaacc

SEQ ID NO: 291823 - DNA, 12 bp, Artificial Sequence
  Oligonucleotide primer for the detection of SNP TSC0014955
aaaccccaaaat

SEQ ID NO: 291824 - DNA, 12 bp, Artificial Sequence
  Oligonucleotide primer for the detection of SNP TSC0014955
ttatttgagtta

SEQ ID NO: 291825 - DNA, 12 bp, Artificial Sequence
  Oligonucleotide primer for the detection of SNP TSC0014956
caattctactct

SEQ ID NO: 291826 - DNA, 12 bp, Artificial Sequence
  Oligonucleotide primer for the detection of SNP TSC0014956
gtgataggttaa

SEQ ID NO: 291827 - DNA, 12 bp, Artificial Sequence
  Oligonucleotide primer for the detection of SNP TSC0014958
ctaaatattttt

SEQ ID NO: 291828 - DNA, 12 bp, Artificial Sequence
  Oligonucleotide primer for the detection of SNP TSC0014958
ttaagatagaaa

SEQ ID NO: 291829 - DNA, 12 bp, Artificial Sequence
  Oligonucleotide primer for the detection of SNP TSC0014963
aaaaaaacacct

SEQ ID NO: 291830 - DNA, 12 bp, Artificial Sequence
  Oligonucleotide primer for the detection of SNP TSC0014963
ggtggggagagg

SEQ ID NO: 291831 - DNA, 12 bp, Artificial Sequence
  Oligonucleotide primer for the detection of SNP TSC0014963
ggcggggagagg

SEQ ID NO: 291832 - DNA, 12 bp, Artificial Sequence
  Oligonucleotide primer for the detection of SNP TSC0014964
taatagtttggg

SEQ ID NO: 291833 - DNA, 12 bp, Artificial Sequence
  Oligonucleotide primer for the detection of SNP TSC0014965
atccatattatt

SEQ ID NO: 291834 - DNA, 12 bp, Artificial Sequence
  Oligonucleotide primer for the detection of SNP TSC0014965
aatttagattaa

SEQ ID NO: 291835 - DNA, 12 bp, Artificial Sequence
  Oligonucleotide primer for the detection of SNP TSC0014966
ttaataaaaaac

SEQ ID NO: 291836 - DNA, 12 bp, Artificial Sequence
  Oligonucleotide primer for the detection of SNP TSC0014966
ttttttatagtg

SEQ ID NO: 291837 - DNA, 12 bp, Artificial Sequence
  Oligonucleotide primer for the detection of SNP TSC0014967
cctcttatttct

SEQ ID NO: 291838 - DNA, 12 bp, Artificial Sequence
  Oligonucleotide primer for the detection of SNP TSC0014967
ttaaaagaagta

SEQ ID NO: 291839 - DNA, 12 bp, Artificial Sequence
  Oligonucleotide primer for the detection of SNP TSC0014968
tctataacaatt

SEQ ID NO: 291840 - DNA, 12 bp, Artificial Sequence
  Oligonucleotide primer for the detection of SNP TSC0014968
ttaaatttagta

SEQ ID NO: 291841 - DNA, 12 bp, Artificial Sequence
  Oligonucleotide primer for the detection of SNP TSC0014968
ccaaatccaata

SEQ ID NO: 291842 - DNA, 12 bp, Artificial Sequence
  Oligonucleotide primer for the detection of SNP TSC0014968
tttatagtaatt

SEQ ID NO: 291843 - DNA, 12 bp, Artificial Sequence
  Oligonucleotide primer for the detection of SNP TSC0014969
cttacataaacc

SEQ ID NO: 291844 - DNA, 12 bp, Artificial Sequence
  Oligonucleotide primer for the detection of SNP TSC0014969
atttatagagaa

SEQ ID NO: 291845 - DNA, 12 bp, Artificial Sequence
  Oligonucleotide primer for the detection of SNP TSC0014969
acccacaaaaaa

SEQ ID NO: 291846 - DNA, 12 bp, Artificial Sequence
  Oligonucleotide primer for the detection of SNP TSC0014969
tttatatgggtt

SEQ ID NO: 291847 - DNA, 12 bp, Artificial Sequence
  Oligonucleotide primer for the detection of SNP TSC0014970
aattatcataaa

SEQ ID NO: 291848 - DNA, 12 bp, Artificial Sequence
  Oligonucleotide primer for the detection of SNP TSC0014970
attaatatttaa

SEQ ID NO: 291849 - DNA, 12 bp, Artificial Sequence
  Oligonucleotide primer for the detection of SNP TSC0014970
atagttattatg

SEQ ID NO: 291850 - DNA, 12 bp, Artificial Sequence
  Oligonucleotide primer for the detection of SNP TSC0014971
ttatcataacac

SEQ ID NO: 291851 - DNA, 12 bp, Artificial Sequence
  Oligonucleotide primer for the detection of SNP TSC0014971
gttaagttatta

SEQ ID NO: 291852 - DNA, 12 bp, Artificial Sequence
  Oligonucleotide primer for the detection of SNP TSC0014971
accaaatcatca

SEQ ID NO: 291853 - DNA, 12 bp, Artificial Sequence
  Oligonucleotide primer for the detection of SNP TSC0014971
ttattatgatat

SEQ ID NO: 291854 - DNA, 12 bp, Artificial Sequence
  Oligonucleotide primer for the detection of SNP TSC0014972
cccaccacaccc

SEQ ID NO: 291855 - DNA, 12 bp, Artificial Sequence
  Oligonucleotide primer for the detection of SNP TSC0014972
ttgggtggattg

SEQ ID NO: 291856 - DNA, 12 bp, Artificial Sequence
  Oligonucleotide primer for the detection of SNP TSC0014972
ctaaataaatta

SEQ ID NO: 291857 - DNA, 12 bp, Artificial Sequence
  Oligonucleotide primer for the detection of SNP TSC0014972
tttattatattt

SEQ ID NO: 291858 - DNA, 12 bp, Artificial Sequence
  Oligonucleotide primer for the detection of SNP TSC0014978
aaacccaaaacc

SEQ ID NO: 291859 - DNA, 12 bp, Artificial Sequence
  Oligonucleotide primer for the detection of SNP TSC0014978
ttaataattgag

SEQ ID NO: 291860 - DNA, 12 bp, Artificial Sequence
  Oligonucleotide primer for the detection of SNP TSC0014979
accaatattcac

SEQ ID NO: 291861 - DNA, 12 bp, Artificial Sequence
  Oligonucleotide primer for the detection of SNP TSC0014979
gccaatattcac

SEQ ID NO: 291862 - DNA, 12 bp, Artificial Sequence
  Oligonucleotide primer for the detection of SNP TSC0014979
agttgttagtag

SEQ ID NO: 291863 - DNA, 12 bp, Artificial Sequence
  Oligonucleotide primer for the detection of SNP TSC0014980
tatccactacac

SEQ ID NO: 291864 - DNA, 12 bp, Artificial Sequence
  Oligonucleotide primer for the detection of SNP TSC0014980
tgattatgattg

SEQ ID NO: 291865 - DNA, 12 bp, Artificial Sequence
  Oligonucleotide primer for the detection of SNP TSC0014980
taactataatta

SEQ ID NO: 291866 - DNA, 12 bp, Artificial Sequence
  Oligonucleotide primer for the detection of SNP TSC0014980
tgtttattgtat

SEQ ID NO: 291867 - DNA, 12 bp, Artificial Sequence
  Oligonucleotide primer for the detection of SNP TSC0014980
tgtttattgtac

SEQ ID NO: 291868 - DNA, 12 bp, Artificial Sequence
  Oligonucleotide primer for the detection of SNP TSC0014981
ttcacactttat

SEQ ID NO: 291869 - DNA, 12 bp, Artificial Sequence
  Oligonucleotide primer for the detection of SNP TSC0014981
atatatgtttta

SEQ ID NO: 291870 - DNA, 12 bp, Artificial Sequence
  Oligonucleotide primer for the detection of SNP TSC0014985
actccttaataa

SEQ ID NO: 291871 - DNA, 12 bp, Artificial Sequence
  Oligonucleotide primer for the detection of SNP TSC0014985
agagggggatta

SEQ ID NO: 291872 - DNA, 12 bp, Artificial Sequence
  Oligonucleotide primer for the detection of SNP TSC0014986
attcttaaaaaa

SEQ ID NO: 291873 - DNA, 12 bp, Artificial Sequence
  Oligonucleotide primer for the detection of SNP TSC0014986
tatttaatatat

SEQ ID NO: 291874 - DNA, 12 bp, Artificial Sequence
  Oligonucleotide primer for the detection of SNP TSC0014986
atatttaacata

SEQ ID NO: 291875 - DNA, 12 bp, Artificial Sequence
  Oligonucleotide primer for the detection of SNP TSC0014986
ttttagaaaatt

SEQ ID NO: 291876 - DNA, 12 bp, Artificial Sequence
  Oligonukleotid-Primer
cttcaactcaac

SEQ ID NO: 291877 - DNA, 12 bp, Artificial Sequence
  Oligonucleotide primer for the detection of SNP TSC0014987
atgatattgtga

SEQ ID NO: 291878 - DNA, 12 bp, Artificial Sequence
  Oligonucleotide primer for the detection of SNP TSC0014987
acgatattgtga

SEQ ID NO: 291879 - DNA, 12 bp, Artificial Sequence
  Oligonucleotide primer for the detection of SNP TSC0014987
acaacattataa

SEQ ID NO: 291880 - DNA, 12 bp, Artificial Sequence
  Oligonucleotide primer for the detection of SNP TSC0014987
acgacattataa

SEQ ID NO: 291881 - DNA, 12 bp, Artificial Sequence
  Oligonucleotide primer for the detection of SNP TSC0014987
ttttagtttaat

SEQ ID NO: 291882 - DNA, 12 bp, Artificial Sequence
  Oligonucleotide primer for the detection of SNP TSC0014988
tccccctactac

SEQ ID NO: 291883 - DNA, 12 bp, Artificial Sequence
  Oligonucleotide primer for the detection of SNP TSC0014988
gaagagatggtg

SEQ ID NO: 291884 - DNA, 12 bp, Artificial Sequence
  Oligonucleotide primer for the detection of SNP TSC0014989
aaatacttccca

SEQ ID NO: 291885 - DNA, 12 bp, Artificial Sequence
  Oligonucleotide primer for the detection of SNP TSC0014989
ttttagggtttt

SEQ ID NO: 291886 - DNA, 12 bp, Artificial Sequence
  Oligonucleotide primer for the detection of SNP TSC0014989
cctcaaaaccct

SEQ ID NO: 291887 - DNA, 12 bp, Artificial Sequence
  Oligonucleotide primer for the detection of SNP TSC0014989
gggtgtttttta

SEQ ID NO: 291888 - DNA, 12 bp, Artificial Sequence
  Oligonucleotide primer for the detection of SNP TSC0014990
ataaaaatataa

SEQ ID NO: 291889 - DNA, 12 bp, Artificial Sequence
  Oligonucleotide primer for the detection of SNP TSC0014990
ataatttgagta

SEQ ID NO: 291890 - DNA, 12 bp, Artificial Sequence
  Oligonucleotide primer for the detection of SNP TSC0014990
ataattcgagta

SEQ ID NO: 291891 - DNA, 12 bp, Artificial Sequence
  Oligonucleotide primer for the detection of SNP TSC0014990
ataactcaaaca

SEQ ID NO: 291892 - DNA, 12 bp, Artificial Sequence
  Oligonucleotide primer for the detection of SNP TSC0014990
ataactcgaaca

SEQ ID NO: 291893 - DNA, 12 bp, Artificial Sequence
  Oligonucleotide primer for the detection of SNP TSC0014990
gtgggggtatgg

SEQ ID NO: 291894 - DNA, 12 bp, Artificial Sequence
  Oligonucleotide primer for the detection of SNP TSC0014991
actcatattctc

SEQ ID NO: 291895 - DNA, 12 bp, Artificial Sequence
  Oligonucleotide primer for the detection of SNP TSC0014991
gattggaggggg

SEQ ID NO: 291896 - DNA, 12 bp, Artificial Sequence
  Oligonucleotide primer for the detection of SNP TSC0014991
gtttatgttttt

SEQ ID NO: 291897 - DNA, 12 bp, Artificial Sequence
  Oligonucleotide primer for the detection of SNP TSC0014992
ctttcatacttt

SEQ ID NO: 291898 - DNA, 12 bp, Artificial Sequence
  Oligonucleotide primer for the detection of SNP TSC0014992
tgatttataaat

SEQ ID NO: 291899 - DNA, 12 bp, Artificial Sequence
  Oligonucleotide primer for the detection of SNP TSC0014992
cgatttataaat

SEQ ID NO: 291900 - DNA, 12 bp, Artificial Sequence
  Oligonucleotide primer for the detection of SNP TSC0014992
caatctataaac

SEQ ID NO: 291901 - DNA, 12 bp, Artificial Sequence
  Oligonucleotide primer for the detection of SNP TSC0014992
cgatctataaac

SEQ ID NO: 291902 - DNA, 12 bp, Artificial Sequence
  Oligonucleotide primer for the detection of SNP TSC0014995
atttatttcttc

SEQ ID NO: 291903 - DNA, 12 bp, Artificial Sequence
  Oligonucleotide primer for the detection of SNP TSC0014995
atttaggttaga

SEQ ID NO: 291904 - DNA, 12 bp, Artificial Sequence
  Oligonucleotide primer for the detection of SNP TSC0014997
ttcaaacctaac

SEQ ID NO: 291905 - DNA, 12 bp, Artificial Sequence
  Oligonucleotide primer for the detection of SNP TSC0014997
tttttgttttgg

SEQ ID NO: 291906 - DNA, 12 bp, Artificial Sequence
  Oligonucleotide primer for the detection of SNP TSC0014997
tttttgtttcgg

SEQ ID NO: 291907 - DNA, 12 bp, Artificial Sequence
  Oligonucleotide primer for the detection of SNP TSC0014997
tctttacctcaa

SEQ ID NO: 291908 - DNA, 12 bp, Artificial Sequence
  Oligonucleotide primer for the detection of SNP TSC0014997
tctttacctcga

SEQ ID NO: 291909 - DNA, 12 bp, Artificial Sequence
  Oligonucleotide primer for the detection of SNP TSC0014997
tttaagtttggt

SEQ ID NO: 291910 - DNA, 12 bp, Artificial Sequence
  Oligonucleotide primer for the detection of SNP TSC0015001
atccaaaccaac

SEQ ID NO: 291911 - DNA, 12 bp, Artificial Sequence
  Oligonucleotide primer for the detection of SNP TSC0015001
gtaagggtttgg

SEQ ID NO: 291912 - DNA, 12 bp, Artificial Sequence
  Oligonucleotide primer for the detection of SNP TSC0015002
atctctaatttt

SEQ ID NO: 291913 - DNA, 12 bp, Artificial Sequence
  Oligonucleotide primer for the detection of SNP TSC0015002
gtctctaatttt

SEQ ID NO: 291914 - DNA, 12 bp, Artificial Sequence
  Oligonucleotide primer for the detection of SNP TSC0015002
ttttttgtttag

SEQ ID NO: 291915 - DNA, 12 bp, Artificial Sequence
  Oligonucleotide primer for the detection of SNP TSC0015003
tattaacactaa

SEQ ID NO: 291916 - DNA, 12 bp, Artificial Sequence
  Oligonucleotide primer for the detection of SNP TSC0015003
aaggtatatttg

SEQ ID NO: 291917 - DNA, 12 bp, Artificial Sequence
  Oligonucleotide primer for the detection of SNP TSC0015003
aaggtatattcg

SEQ ID NO: 291918 - DNA, 12 bp, Artificial Sequence
  Oligonucleotide primer for the detection of SNP TSC0015003
aaaatatattca

SEQ ID NO: 291919 - DNA, 12 bp, Artificial Sequence
  Oligonucleotide primer for the detection of SNP TSC0015003
aaaatatattcg

SEQ ID NO: 291920 - DNA, 12 bp, Artificial Sequence
  Oligonucleotide primer for the detection of SNP TSC0015004
acaaaataacaa

SEQ ID NO: 291921 - DNA, 12 bp, Artificial Sequence
  Oligonucleotide primer for the detection of SNP TSC0015004
atgtttatgtgt

SEQ ID NO: 291922 - DNA, 12 bp, Artificial Sequence
  Oligonucleotide primer for the detection of SNP TSC0015004
atacccatatat

SEQ ID NO: 291923 - DNA, 12 bp, Artificial Sequence
  Oligonucleotide primer for the detection of SNP TSC0015004
ataaaataatag

SEQ ID NO: 291924 - DNA, 12 bp, Artificial Sequence
  Oligonucleotide primer for the detection of SNP TSC0015009
tttaattaaaaa

SEQ ID NO: 291925 - DNA, 12 bp, Artificial Sequence
  Oligonucleotide primer for the detection of SNP TSC0015009
agtattttttaa

SEQ ID NO: 291926 - DNA, 12 bp, Artificial Sequence
  Oligonucleotide primer for the detection of SNP TSC0015009
aacaccttctaa

SEQ ID NO: 291927 - DNA, 12 bp, Artificial Sequence
  Oligonucleotide primer for the detection of SNP TSC0015009
tttggttgagaa

SEQ ID NO: 291928 - DNA, 12 bp, Artificial Sequence
  Oligonucleotide primer for the detection of SNP TSC0015010
taaaaacacact

SEQ ID NO: 291929 - DNA, 12 bp, Artificial Sequence
  Oligonucleotide primer for the detection of SNP TSC0015010
taaaaacgcact

SEQ ID NO: 291930 - DNA, 12 bp, Artificial Sequence
  Oligonucleotide primer for the detection of SNP TSC0015010
gaagatagaggg

SEQ ID NO: 291931 - DNA, 12 bp, Artificial Sequence
  Oligonucleotide primer for the detection of SNP TSC0015012
acccaaaaataa

SEQ ID NO: 291932 - DNA, 12 bp, Artificial Sequence
  Oligonucleotide primer for the detection of SNP TSC0015012
tatctccaattt

SEQ ID NO: 291933 - DNA, 12 bp, Artificial Sequence
  Oligonucleotide primer for the detection of SNP TSC0015012
atttaggagtag

SEQ ID NO: 291934 - DNA, 12 bp, Artificial Sequence
  Oligonucleotide primer for the detection of SNP TSC0015013
ttttccatatct

SEQ ID NO: 291935 - DNA, 12 bp, Artificial Sequence
  Oligonucleotide primer for the detection of SNP TSC0015013
ttatgttaaaga

SEQ ID NO: 291936 - DNA, 12 bp, Artificial Sequence
  Oligonucleotide primer for the detection of SNP TSC0015014
acttaaattttc

SEQ ID NO: 291937 - DNA, 12 bp, Artificial Sequence
  Oligonucleotide primer for the detection of SNP TSC0015014
gatttatgatat

SEQ ID NO: 291938 - DNA, 12 bp, Artificial Sequence
  Oligonucleotide primer for the detection of SNP TSC0015014
aatttataatat

SEQ ID NO: 291939 - DNA, 12 bp, Artificial Sequence
  Oligonucleotide primer for the detection of SNP TSC0015015
taaaatacatta

SEQ ID NO: 291940 - DNA, 12 bp, Artificial Sequence
  Oligonucleotide primer for the detection of SNP TSC0015015
ttttaaaattag

SEQ ID NO: 291941 - DNA, 12 bp, Artificial Sequence
  Oligonucleotide primer for the detection of SNP TSC0015015
cctcaaaaccaa

SEQ ID NO: 291942 - DNA, 12 bp, Artificial Sequence
  Oligonucleotide primer for the detection of SNP TSC0015015
atgaaatgtatt

SEQ ID NO: 291943 - DNA, 12 bp, Artificial Sequence
  Oligonucleotide primer for the detection of SNP TSC0015016
acatttaaaaat

SEQ ID NO: 291944 - DNA, 12 bp, Artificial Sequence
  Oligonucleotide primer for the detection of SNP TSC0015016
atattaaatttg

SEQ ID NO: 291945 - DNA, 12 bp, Artificial Sequence
  Oligonucleotide primer for the detection of SNP TSC0015019
tatggattttag

SEQ ID NO: 291946 - DNA, 12 bp, Artificial Sequence
  Oligonucleotide primer for the detection of SNP TSC0015020
tcacaactttac

SEQ ID NO: 291947 - DNA, 12 bp, Artificial Sequence
  Oligonucleotide primer for the detection of SNP TSC0015020
ttagtttaaggg

SEQ ID NO: 291948 - DNA, 12 bp, Artificial Sequence
  Oligonucleotide primer for the detection of SNP TSC0015020
tcaatttaaaaa

SEQ ID NO: 291949 - DNA, 12 bp, Artificial Sequence
  Oligonukleotid-Primer
ttatagttttgt

SEQ ID NO: 291950 - DNA, 12 bp, Artificial Sequence
  Oligonucleotide primer for the detection of SNP TSC0015021
aataccaaccat

SEQ ID NO: 291951 - DNA, 12 bp, Artificial Sequence
  Oligonucleotide primer for the detection of SNP TSC0015021
aataccaaccgt

SEQ ID NO: 291952 - DNA, 12 bp, Artificial Sequence
  Oligonucleotide primer for the detection of SNP TSC0015021
aataccgaccat

SEQ ID NO: 291953 - DNA, 12 bp, Artificial Sequence
  Oligonucleotide primer for the detection of SNP TSC0015021
aataccgaccgt

SEQ ID NO: 291954 - DNA, 12 bp, Artificial Sequence
  Oligonucleotide primer for the detection of SNP TSC0015021
gttattagttag

SEQ ID NO: 291955 - DNA, 12 bp, Artificial Sequence
  Oligonucleotide primer for the detection of SNP TSC0015022
tcctaacaaaaa

SEQ ID NO: 291956 - DNA, 12 bp, Artificial Sequence
  Oligonucleotide primer for the detection of SNP TSC0015022
tcctaacgaaaa

SEQ ID NO: 291957 - DNA, 12 bp, Artificial Sequence
  Oligonucleotide primer for the detection of SNP TSC0015022
cctcctcccctc

SEQ ID NO: 291958 - DNA, 12 bp, Artificial Sequence
  Oligonucleotide primer for the detection of SNP TSC0015022
aatggaggtttt

SEQ ID NO: 291959 - DNA, 12 bp, Artificial Sequence
  Oligonucleotide primer for the detection of SNP TSC0015022
aacggaggtttt

SEQ ID NO: 291960 - DNA, 12 bp, Artificial Sequence
  Oligonucleotide primer for the detection of SNP TSC0015022
aatggaggtttc

SEQ ID NO: 291961 - DNA, 12 bp, Artificial Sequence
  Oligonucleotide primer for the detection of SNP TSC0015022
aacggaggtttc

SEQ ID NO: 291962 - DNA, 12 bp, Artificial Sequence
  Oligonucleotide primer for the detection of SNP TSC0015023
aatttattcaac

SEQ ID NO: 291963 - DNA, 12 bp, Artificial Sequence
  Oligonucleotide primer for the detection of SNP TSC0015023
aatggatttata

SEQ ID NO: 291964 - DNA, 12 bp, Artificial Sequence
  Oligonucleotide primer for the detection of SNP TSC0015024
ctaaataatatc

SEQ ID NO: 291965 - DNA, 12 bp, Artificial Sequence
  Oligonucleotide primer for the detection of SNP TSC0015024
agaatgttaata

SEQ ID NO: 291966 - DNA, 12 bp, Artificial Sequence
  Oligonucleotide primer for the detection of SNP TSC0015026
tcacaactaacc

SEQ ID NO: 291967 - DNA, 12 bp, Artificial Sequence
  Oligonucleotide primer for the detection of SNP TSC0015028
aacaatccatat

SEQ ID NO: 291968 - DNA, 12 bp, Artificial Sequence
  Oligonucleotide primer for the detection of SNP TSC0015028
aacaatccgtat

SEQ ID NO: 291969 - DNA, 12 bp, Artificial Sequence
  Oligonucleotide primer for the detection of SNP TSC0015030
atacttttaacc

SEQ ID NO: 291970 - DNA, 12 bp, Artificial Sequence
  Oligonucleotide primer for the detection of SNP TSC0015030
gtaatgttagta

SEQ ID NO: 291971 - DNA, 12 bp, Artificial Sequence
  Oligonucleotide primer for the detection of SNP TSC0015031
tatcttcttata

SEQ ID NO: 291972 - DNA, 12 bp, Artificial Sequence
  Oligonucleotide primer for the detection of SNP TSC0015031
taggtttttaag

SEQ ID NO: 291973 - DNA, 12 bp, Artificial Sequence
  Oligonucleotide primer for the detection of SNP TSC0015031
caaatctttaaa

SEQ ID NO: 291974 - DNA, 12 bp, Artificial Sequence
  Oligonucleotide primer for the detection of SNP TSC0015035
catctatattaa

SEQ ID NO: 291975 - DNA, 12 bp, Artificial Sequence
  Oligonucleotide primer for the detection of SNP TSC0015035
tagatttttttt

SEQ ID NO: 291976 - DNA, 12 bp, Artificial Sequence
  Oligonucleotide primer for the detection of SNP TSC0015035
tctaaattttcc

SEQ ID NO: 291977 - DNA, 12 bp, Artificial Sequence
  Oligonucleotide primer for the detection of SNP TSC0015035
tatttatgttag

SEQ ID NO: 291978 - DNA, 12 bp, Artificial Sequence
  Oligonucleotide primer for the detection of SNP TSC0015036
aatttttaaaat

SEQ ID NO: 291979 - DNA, 12 bp, Artificial Sequence
  Oligonucleotide primer for the detection of SNP TSC0015036
tctcattcatta

SEQ ID NO: 291980 - DNA, 12 bp, Artificial Sequence
  Oligonucleotide primer for the detection of SNP TSC0015036
aatttttaaggt

SEQ ID NO: 291981 - DNA, 12 bp, Artificial Sequence
  Oligonucleotide primer for the detection of SNP TSC0015037
tgtattattggt

SEQ ID NO: 291982 - DNA, 12 bp, Artificial Sequence
  Oligonucleotide primer for the detection of SNP TSC0015037
tacattattaat

SEQ ID NO: 291983 - DNA, 12 bp, Artificial Sequence
  Oligonucleotide primer for the detection of SNP TSC0015037
gataaagattgg

SEQ ID NO: 291984 - DNA, 12 bp, Artificial Sequence
  Oligonucleotide primer for the detection of SNP TSC0015038
acacaaaaatct

SEQ ID NO: 291985 - DNA, 12 bp, Artificial Sequence
  Oligonucleotide primer for the detection of SNP TSC0015038
acgcaaaaatct

SEQ ID NO: 291986 - DNA, 12 bp, Artificial Sequence
  Oligonucleotide primer for the detection of SNP TSC0015038
gcacaaaaatct

SEQ ID NO: 291987 - DNA, 12 bp, Artificial Sequence
  Oligonucleotide primer for the detection of SNP TSC0015038
gcgcaaaaatct

SEQ ID NO: 291988 - DNA, 12 bp, Artificial Sequence
  Oligonucleotide primer for the detection of SNP TSC0015038
ttatggtttcgg

SEQ ID NO: 291989 - DNA, 12 bp, Artificial Sequence
  Oligonucleotide primer for the detection of SNP TSC0015039
ctaatactactc

SEQ ID NO: 291990 - DNA, 12 bp, Artificial Sequence
  Oligonucleotide primer for the detection of SNP TSC0015039
ataagtatgtga

SEQ ID NO: 291991 - DNA, 12 bp, Artificial Sequence
  Oligonucleotide primer for the detection of SNP TSC0015040
ccctaactccct

SEQ ID NO: 291992 - DNA, 12 bp, Artificial Sequence
  Oligonucleotide primer for the detection of SNP TSC0015040
ggggttttttga

SEQ ID NO: 291993 - DNA, 12 bp, Artificial Sequence
  Oligonucleotide primer for the detection of SNP TSC0015040
ggggtttttcga

SEQ ID NO: 291994 - DNA, 12 bp, Artificial Sequence
  Oligonucleotide primer for the detection of SNP TSC0015041
caaaataccata

SEQ ID NO: 291995 - DNA, 12 bp, Artificial Sequence
  Oligonucleotide primer for the detection of SNP TSC0015041
agaaaataagat

SEQ ID NO: 291996 - DNA, 12 bp, Artificial Sequence
  Oligonucleotide primer for the detection of SNP TSC0015041
tagagtattata

SEQ ID NO: 291997 - DNA, 12 bp, Artificial Sequence
  Oligonucleotide primer for the detection of SNP TSC0015043
cccaaaattccc

SEQ ID NO: 291998 - DNA, 12 bp, Artificial Sequence
  Oligonucleotide primer for the detection of SNP TSC0015043
ttattgggtagg

SEQ ID NO: 291999 - DNA, 12 bp, Artificial Sequence
  Oligonucleotide primer for the detection of SNP TSC0015043
ttattaaacaaa

SEQ ID NO: 292000 - DNA, 12 bp, Artificial Sequence
  Oligonucleotide primer for the detection of SNP TSC0015043
tttagaattttt

SEQ ID NO: 292001 - DNA, 12 bp, Artificial Sequence
  Oligonucleotide primer for the detection of SNP TSC0015045
ataactcaccca

SEQ ID NO: 292002 - DNA, 12 bp, Artificial Sequence
  Oligonucleotide primer for the detection of SNP TSC0015045
ccaaaacatacc

SEQ ID NO: 292003 - DNA, 12 bp, Artificial Sequence
  Oligonucleotide primer for the detection of SNP TSC0015045
ataatttattta

SEQ ID NO: 292004 - DNA, 12 bp, Artificial Sequence
  Oligonucleotide primer for the detection of SNP TSC0015046
aatctaatatcc

SEQ ID NO: 292005 - DNA, 12 bp, Artificial Sequence
  Oligonucleotide primer for the detection of SNP TSC0015046
aagggatatagg

SEQ ID NO: 292006 - DNA, 12 bp, Artificial Sequence
  Oligonucleotide primer for the detection of SNP TSC0015047
gaaatttaattt

SEQ ID NO: 292007 - DNA, 12 bp, Artificial Sequence
  Oligonucleotide primer for the detection of SNP TSC0015047
aaaacccaacct

SEQ ID NO: 292008 - DNA, 12 bp, Artificial Sequence
  Oligonucleotide primer for the detection of SNP TSC0015047
gatagggagggg

SEQ ID NO: 292009 - DNA, 12 bp, Artificial Sequence
  Oligonucleotide primer for the detection of SNP TSC0015048
acaaaatcacta

SEQ ID NO: 292010 - DNA, 12 bp, Artificial Sequence
  Oligonucleotide primer for the detection of SNP TSC0015048
acaaaatcgcta

SEQ ID NO: 292011 - DNA, 12 bp, Artificial Sequence
  Oligonucleotide primer for the detection of SNP TSC0015048
attttttggtgt

SEQ ID NO: 292012 - DNA, 12 bp, Artificial Sequence
  Oligonucleotide primer for the detection of SNP TSC0015048
atctcctaatac

SEQ ID NO: 292013 - DNA, 12 bp, Artificial Sequence
  Oligonucleotide primer for the detection of SNP TSC0015048
gtaaagttgttg

SEQ ID NO: 292014 - DNA, 12 bp, Artificial Sequence
  Oligonucleotide primer for the detection of SNP TSC0015048
gtaaagtcgttg

SEQ ID NO: 292015 - DNA, 12 bp, Artificial Sequence
  Oligonucleotide primer for the detection of SNP TSC0015051
ctaaacaacata

SEQ ID NO: 292016 - DNA, 12 bp, Artificial Sequence
  Oligonucleotide primer for the detection of SNP TSC0015051
gagatgaggttt

SEQ ID NO: 292017 - DNA, 12 bp, Artificial Sequence
  Oligonucleotide primer for the detection of SNP TSC0015051
aaaataaaatct

SEQ ID NO: 292018 - DNA, 12 bp, Artificial Sequence
  Oligonucleotide primer for the detection of SNP TSC0015051
gggtaatatatt

SEQ ID NO: 292019 - DNA, 12 bp, Artificial Sequence
  Oligonucleotide primer for the detection of SNP TSC0015052
tttataaattaa

SEQ ID NO: 292020 - DNA, 12 bp, Artificial Sequence
  Oligonucleotide primer for the detection of SNP TSC0015052
cctttctctcta

SEQ ID NO: 292021 - DNA, 12 bp, Artificial Sequence
  Oligonucleotide primer for the detection of SNP TSC0015052
tttataaattag

SEQ ID NO: 292022 - DNA, 12 bp, Artificial Sequence
  Oligonucleotide primer for the detection of SNP TSC0015053
tcttactaaatt

SEQ ID NO: 292023 - DNA, 12 bp, Artificial Sequence
  Oligonucleotide primer for the detection of SNP TSC0015053
gttttaagagag

SEQ ID NO: 292024 - DNA, 12 bp, Artificial Sequence
  Oligonucleotide primer for the detection of SNP TSC0015054
ctctacacaaac

SEQ ID NO: 292025 - DNA, 12 bp, Artificial Sequence
  Oligonucleotide primer for the detection of SNP TSC0015054
tagaggatggat

SEQ ID NO: 292026 - DNA, 12 bp, Artificial Sequence
  Oligonucleotide primer for the detection of SNP TSC0015056
actataacataa

SEQ ID NO: 292027 - DNA, 12 bp, Artificial Sequence
  Oligonucleotide primer for the detection of SNP TSC0015056
agaggttttttt

SEQ ID NO: 292028 - DNA, 12 bp, Artificial Sequence
  Oligonucleotide primer for the detection of SNP TSC0015056
aaaaactccttc

SEQ ID NO: 292029 - DNA, 12 bp, Artificial Sequence
  Oligonucleotide primer for the detection of SNP TSC0015056
gttgtgatatgg

SEQ ID NO: 292030 - DNA, 12 bp, Artificial Sequence
  Oligonucleotide primer for the detection of SNP TSC0015057
tctaaaactcac

SEQ ID NO: 292031 - DNA, 12 bp, Artificial Sequence
  Oligonucleotide primer for the detection of SNP TSC0015057
gaattttatttg

SEQ ID NO: 292032 - DNA, 12 bp, Artificial Sequence
  Oligonucleotide primer for the detection of SNP TSC0015057
aaaccccattta

SEQ ID NO: 292033 - DNA, 12 bp, Artificial Sequence
  Oligonucleotide primer for the detection of SNP TSC0015057
tttggggtttat

SEQ ID NO: 292034 - DNA, 12 bp, Artificial Sequence
  Oligonucleotide primer for the detection of SNP TSC0015058
aacactcaataa

SEQ ID NO: 292035 - DNA, 12 bp, Artificial Sequence
  Oligonucleotide primer for the detection of SNP TSC0015058
attcaacaaata

SEQ ID NO: 292036 - DNA, 12 bp, Artificial Sequence
  Oligonucleotide primer for the detection of SNP TSC0015058
taggtatttaat

SEQ ID NO: 292037 - DNA, 12 bp, Artificial Sequence
  Oligonucleotide primer for the detection of SNP TSC0015059
atatatacacac

SEQ ID NO: 292038 - DNA, 12 bp, Artificial Sequence
  Oligonukleotid-Primer
atatatacgcac

SEQ ID NO: 292039 - DNA, 12 bp, Artificial Sequence
  Oligonucleotide primer for the detection of SNP TSC0015059
tttttattaatg

SEQ ID NO: 292040 - DNA, 12 bp, Artificial Sequence
  Oligonucleotide primer for the detection of SNP TSC0015059
ctcccattaata

SEQ ID NO: 292041 - DNA, 12 bp, Artificial Sequence
  Oligonucleotide primer for the detection of SNP TSC0015059
atgtgtgtgtat

SEQ ID NO: 292042 - DNA, 12 bp, Artificial Sequence
  Oligonucleotide primer for the detection of SNP TSC0015059
atgtgtgcgtat

SEQ ID NO: 292043 - DNA, 12 bp, Artificial Sequence
  Oligonucleotide primer for the detection of SNP TSC0015060
aaaattctttct

SEQ ID NO: 292044 - DNA, 12 bp, Artificial Sequence
  Oligonucleotide primer for the detection of SNP TSC0015060
gaataaatattt

SEQ ID NO: 292045 - DNA, 12 bp, Artificial Sequence
  Oligonucleotide primer for the detection of SNP TSC0015060
taaaaacaaaca

SEQ ID NO: 292046 - DNA, 12 bp, Artificial Sequence
  Oligonucleotide primer for the detection of SNP TSC0015060
aaagtttttttt

SEQ ID NO: 292047 - DNA, 12 bp, Artificial Sequence
  Oligonucleotide primer for the detection of SNP TSC0015061
cttccacaatct

SEQ ID NO: 292048 - DNA, 12 bp, Artificial Sequence
  Oligonucleotide primer for the detection of SNP TSC0015061
cttccacgatct

SEQ ID NO: 292049 - DNA, 12 bp, Artificial Sequence
  Oligonucleotide primer for the detection of SNP TSC0015061
tgaatgtggagg

SEQ ID NO: 292050 - DNA, 12 bp, Artificial Sequence
  Oligonucleotide primer for the detection of SNP TSC0015062
cacaatctaacc

SEQ ID NO: 292051 - DNA, 12 bp, Artificial Sequence
  Oligonucleotide primer for the detection of SNP TSC0015062
cacgatctaacc

SEQ ID NO: 292052 - DNA, 12 bp, Artificial Sequence
  Oligonucleotide primer for the detection of SNP TSC0015062
aatgaatgtgga

SEQ ID NO: 292053 - DNA, 12 bp, Artificial Sequence
  Oligonucleotide primer for the detection of SNP TSC0015064
atatttgttagg

SEQ ID NO: 292054 - DNA, 12 bp, Artificial Sequence
  Oligonucleotide primer for the detection of SNP TSC0015064
atattcgttagg

SEQ ID NO: 292055 - DNA, 12 bp, Artificial Sequence
  Oligonucleotide primer for the detection of SNP TSC0015064
atactcatcaaa

SEQ ID NO: 292056 - DNA, 12 bp, Artificial Sequence
  Oligonucleotide primer for the detection of SNP TSC0015064
atactcgtcaaa

SEQ ID NO: 292057 - DNA, 12 bp, Artificial Sequence
  Oligonucleotide primer for the detection of SNP TSC0015064
aggaagtgtaaa

SEQ ID NO: 292058 - DNA, 12 bp, Artificial Sequence
  Oligonucleotide primer for the detection of SNP TSC0015065
aacctaaatact

SEQ ID NO: 292059 - DNA, 12 bp, Artificial Sequence
  Oligonucleotide primer for the detection of SNP TSC0015065
tgtaggatggaa

SEQ ID NO: 292060 - DNA, 12 bp, Artificial Sequence
  Oligonucleotide primer for the detection of SNP TSC0015065
cgtaggatggaa

SEQ ID NO: 292061 - DNA, 12 bp, Artificial Sequence
  Oligonucleotide primer for the detection of SNP TSC0015066
ctacaactaatc

SEQ ID NO: 292062 - DNA, 12 bp, Artificial Sequence
  Oligonucleotide primer for the detection of SNP TSC0015066
ctacgactaatc

SEQ ID NO: 292063 - DNA, 12 bp, Artificial Sequence
  Oligonucleotide primer for the detection of SNP TSC0015066
tttagtaagtag

SEQ ID NO: 292064 - DNA, 12 bp, Artificial Sequence
  Oligonucleotide primer for the detection of SNP TSC0015068
caaccaacaact

SEQ ID NO: 292065 - DNA, 12 bp, Artificial Sequence
  Oligonucleotide primer for the detection of SNP TSC0015068
cgaccaacaact

SEQ ID NO: 292066 - DNA, 12 bp, Artificial Sequence
  Oligonucleotide primer for the detection of SNP TSC0015068
gttaggtttaga

SEQ ID NO: 292067 - DNA, 12 bp, Artificial Sequence
  Oligonucleotide primer for the detection of SNP TSC0015068
atcaaactcaaa

SEQ ID NO: 292068 - DNA, 12 bp, Artificial Sequence
  Oligonucleotide primer for the detection of SNP TSC0015068
gtcaaactcaaa

SEQ ID NO: 292069 - DNA, 12 bp, Artificial Sequence
  Oligonucleotide primer for the detection of SNP TSC0015068
tggttagtagtt

SEQ ID NO: 292070 - DNA, 12 bp, Artificial Sequence
  Oligonucleotide primer for the detection of SNP TSC0015068
cggttagtagtt

SEQ ID NO: 292071 - DNA, 12 bp, Artificial Sequence
  Oligonucleotide primer for the detection of SNP TSC0015069
tttgggtttttt

SEQ ID NO: 292072 - DNA, 12 bp, Artificial Sequence
  Oligonucleotide primer for the detection of SNP TSC0015069
tttgggtttttc

SEQ ID NO: 292073 - DNA, 12 bp, Artificial Sequence
  Oligonucleotide primer for the detection of SNP TSC0015069
tatctaaaccct

SEQ ID NO: 292074 - DNA, 12 bp, Artificial Sequence
  Oligonucleotide primer for the detection of SNP TSC0015069
agaaaggaaggt

SEQ ID NO: 292075 - DNA, 12 bp, Artificial Sequence
  Oligonucleotide primer for the detection of SNP TSC0015070
ccctccaacctt

SEQ ID NO: 292076 - DNA, 12 bp, Artificial Sequence
  Oligonucleotide primer for the detection of SNP TSC0015070
ccctccgacctt

SEQ ID NO: 292077 - DNA, 12 bp, Artificial Sequence
  Oligonucleotide primer for the detection of SNP TSC0015070
gtatggagaaag

SEQ ID NO: 292078 - DNA, 12 bp, Artificial Sequence
  Oligonucleotide primer for the detection of SNP TSC0015071
aattctaatcat

SEQ ID NO: 292079 - DNA, 12 bp, Artificial Sequence
  Oligonucleotide primer for the detection of SNP TSC0015071
ttgttattatta

SEQ ID NO: 292080 - DNA, 12 bp, Artificial Sequence
  Oligonucleotide primer for the detection of SNP TSC0015073
tcctcctaacac

SEQ ID NO: 292081 - DNA, 12 bp, Artificial Sequence
  Oligonucleotide primer for the detection of SNP TSC0015073
atgtttgaagag

SEQ ID NO: 292082 - DNA, 12 bp, Artificial Sequence
  Oligonucleotide primer for the detection of SNP TSC0015074
atatgtaaatag

SEQ ID NO: 292083 - DNA, 12 bp, Artificial Sequence
  Oligonucleotide primer for the detection of SNP TSC0015078
ttctatattcta

SEQ ID NO: 292084 - DNA, 12 bp, Artificial Sequence
  Oligonucleotide primer for the detection of SNP TSC0015078
ctcaaattatat

SEQ ID NO: 292085 - DNA, 12 bp, Artificial Sequence
  Oligonucleotide primer for the detection of SNP TSC0015078
ttttatatttta

SEQ ID NO: 292086 - DNA, 12 bp, Artificial Sequence
  Oligonucleotide primer for the detection of SNP TSC0015079
actctaactttt

SEQ ID NO: 292087 - DNA, 12 bp, Artificial Sequence
  Oligonucleotide primer for the detection of SNP TSC0015079
ttgagtggttag

SEQ ID NO: 292088 - DNA, 12 bp, Artificial Sequence
  Oligonucleotide primer for the detection of SNP TSC0015080
tagttgtttata

SEQ ID NO: 292089 - DNA, 12 bp, Artificial Sequence
  Oligonucleotide primer for the detection of SNP TSC0015080
caactatccata

SEQ ID NO: 292090 - DNA, 12 bp, Artificial Sequence
  Oligonucleotide primer for the detection of SNP TSC0015080
tatgattaggtt

SEQ ID NO: 292091 - DNA, 12 bp, Artificial Sequence
  Oligonucleotide primer for the detection of SNP TSC0015081
caaaacctataa

SEQ ID NO: 292092 - DNA, 12 bp, Artificial Sequence
  Oligonucleotide primer for the detection of SNP TSC0015081
tttaggaaggtt

SEQ ID NO: 292093 - DNA, 12 bp, Artificial Sequence
  Oligonucleotide primer for the detection of SNP TSC0015081
ccaaaaaaacta

SEQ ID NO: 292094 - DNA, 12 bp, Artificial Sequence
  Oligonucleotide primer for the detection of SNP TSC0015081
agggtttgtagt

SEQ ID NO: 292095 - DNA, 12 bp, Artificial Sequence
  Oligonucleotide primer for the detection of SNP TSC0015082
atattaaacttt

SEQ ID NO: 292096 - DNA, 12 bp, Artificial Sequence
  Oligonucleotide primer for the detection of SNP TSC0015082
tttaatttgttt

SEQ ID NO: 292097 - DNA, 12 bp, Artificial Sequence
  Oligonucleotide primer for the detection of SNP TSC0015082
cctaatttatcc

SEQ ID NO: 292098 - DNA, 12 bp, Artificial Sequence
  Oligonucleotide primer for the detection of SNP TSC0015082
atgttgaatttt

SEQ ID NO: 292099 - DNA, 12 bp, Artificial Sequence
  Oligonucleotide primer for the detection of SNP TSC0015083
acctaccctcaa

SEQ ID NO: 292100 - DNA, 12 bp, Artificial Sequence
  Oligonucleotide primer for the detection of SNP TSC0015083
ttgagataaaga

SEQ ID NO: 292101 - DNA, 12 bp, Artificial Sequence
  Oligonucleotide primer for the detection of SNP TSC0015083
atttgtttttaa

SEQ ID NO: 292102 - DNA, 12 bp, Artificial Sequence
  Oligonucleotide primer for the detection of SNP TSC0015084
aaaacttctaac

SEQ ID NO: 292103 - DNA, 12 bp, Artificial Sequence
  Oligonucleotide primer for the detection of SNP TSC0015084
ctcaacattaaa

SEQ ID NO: 292104 - DNA, 12 bp, Artificial Sequence
  Oligonucleotide primer for the detection of SNP TSC0015084
ggggtttttggt

SEQ ID NO: 292105 - DNA, 12 bp, Artificial Sequence
  Oligonucleotide primer for the detection of SNP TSC0015087
tctataaattta

SEQ ID NO: 292106 - DNA, 12 bp, Artificial Sequence
  Oligonucleotide primer for the detection of SNP TSC0015087
ccttttcccact

SEQ ID NO: 292107 - DNA, 12 bp, Artificial Sequence
  Oligonucleotide primer for the detection of SNP TSC0015087
tttgtgagtttg

SEQ ID NO: 292108 - DNA, 12 bp, Artificial Sequence
  Oligonucleotide primer for the detection of SNP TSC0015088
aatactacatcc

SEQ ID NO: 292109 - DNA, 12 bp, Artificial Sequence
  Oligonucleotide primer for the detection of SNP TSC0015088
tgagagatagta

SEQ ID NO: 292110 - DNA, 12 bp, Artificial Sequence
  Oligonucleotide primer for the detection of SNP TSC0015088
taaaaaataaca

SEQ ID NO: 292111 - DNA, 12 bp, Artificial Sequence
  Oligonucleotide primer for the detection of SNP TSC0015088
agtgttgtattt

SEQ ID NO: 292112 - DNA, 12 bp, Artificial Sequence
  Oligonucleotide primer for the detection of SNP TSC0015089
ttttttggaggt

SEQ ID NO: 292113 - DNA, 12 bp, Artificial Sequence
  Oligonucleotide primer for the detection of SNP TSC0015089
cttcctaaaaat

SEQ ID NO: 292114 - DNA, 12 bp, Artificial Sequence
  Oligonucleotide primer for the detection of SNP TSC0015089
gagtaggaatga

SEQ ID NO: 292115 - DNA, 12 bp, Artificial Sequence
  Oligonucleotide primer for the detection of SNP TSC0015090
taaaaaaattcc

SEQ ID NO: 292116 - DNA, 12 bp, Artificial Sequence
  Oligonucleotide primer for the detection of SNP TSC0015091
attttttctttt

SEQ ID NO: 292117 - DNA, 12 bp, Artificial Sequence
  Oligonucleotide primer for the detection of SNP TSC0015092
tactcctaacaa

SEQ ID NO: 292118 - DNA, 12 bp, Artificial Sequence
  Oligonucleotide primer for the detection of SNP TSC0015092
tactcctaacga

SEQ ID NO: 292119 - DNA, 12 bp, Artificial Sequence
  Oligonucleotide primer for the detection of SNP TSC0015092
ttttaaaagttt

SEQ ID NO: 292120 - DNA, 12 bp, Artificial Sequence
  Oligonucleotide primer for the detection of SNP TSC0015092
tgtttttgatgg

SEQ ID NO: 292121 - DNA, 12 bp, Artificial Sequence
  Oligonucleotide primer for the detection of SNP TSC0015092
tgtttttgacgg

SEQ ID NO: 292122 - DNA, 12 bp, Artificial Sequence
  Oligonucleotide primer for the detection of SNP TSC0015093
tctcatacaatt

SEQ ID NO: 292123 - DNA, 12 bp, Artificial Sequence
  Oligonukleotid-Primer
taattgtaaaaa

SEQ ID NO: 292124 - DNA, 12 bp, Artificial Sequence
  Oligonucleotide primer for the detection of SNP TSC0015094
tatacttaaaaa

SEQ ID NO: 292125 - DNA, 12 bp, Artificial Sequence
  Oligonucleotide primer for the detection of SNP TSC0015094
gatttgattttt

SEQ ID NO: 292126 - DNA, 12 bp, Artificial Sequence
  Oligonucleotide primer for the detection of SNP TSC0015094
aatctaacctcc

SEQ ID NO: 292127 - DNA, 12 bp, Artificial Sequence
  Oligonucleotide primer for the detection of SNP TSC0015094
tatgtttggagg

SEQ ID NO: 292128 - DNA, 12 bp, Artificial Sequence
  Oligonucleotide primer for the detection of SNP TSC0015095
aaaaacctaaat

SEQ ID NO: 292129 - DNA, 12 bp, Artificial Sequence
  Oligonucleotide primer for the detection of SNP TSC0015095
ttaaagggataa

SEQ ID NO: 292130 - DNA, 12 bp, Artificial Sequence
  Oligonucleotide primer for the detection of SNP TSC0015096
acaactcttaaa

SEQ ID NO: 292131 - DNA, 12 bp, Artificial Sequence
  Oligonucleotide primer for the detection of SNP TSC0015096
tatttggaatgt

SEQ ID NO: 292132 - DNA, 12 bp, Artificial Sequence
  Oligonucleotide primer for the detection of SNP TSC0015096
tatttggaatgc

SEQ ID NO: 292133 - DNA, 12 bp, Artificial Sequence
  Oligonucleotide primer for the detection of SNP TSC0015096
ctatctaaaata

SEQ ID NO: 292134 - DNA, 12 bp, Artificial Sequence
  Oligonucleotide primer for the detection of SNP TSC0015096
agtagtttttga

SEQ ID NO: 292135 - DNA, 12 bp, Artificial Sequence
  Oligonucleotide primer for the detection of SNP TSC0015097
aacctctacaac

SEQ ID NO: 292136 - DNA, 12 bp, Artificial Sequence
  Oligonucleotide primer for the detection of SNP TSC0015097
aatattttttac

SEQ ID NO: 292137 - DNA, 12 bp, Artificial Sequence
  Oligonucleotide primer for the detection of SNP TSC0015097
aaatatttttca

SEQ ID NO: 292138 - DNA, 12 bp, Artificial Sequence
  Oligonucleotide primer for the detection of SNP TSC0015097
agtttttatagt

SEQ ID NO: 292139 - DNA, 12 bp, Artificial Sequence
  Oligonucleotide primer for the detection of SNP TSC0015098
gtatgtttttat

SEQ ID NO: 292140 - DNA, 12 bp, Artificial Sequence
  Oligonucleotide primer for the detection of SNP TSC0015098
acatacctttac

SEQ ID NO: 292141 - DNA, 12 bp, Artificial Sequence
  Oligonucleotide primer for the detection of SNP TSC0015098
gaagtgataagg

SEQ ID NO: 292142 - DNA, 12 bp, Artificial Sequence
  Oligonucleotide primer for the detection of SNP TSC0015099
tatacataaact

SEQ ID NO: 292143 - DNA, 12 bp, Artificial Sequence
  Oligonucleotide primer for the detection of SNP TSC0015099
gttttatagtta

SEQ ID NO: 292144 - DNA, 12 bp, Artificial Sequence
  Oligonucleotide primer for the detection of SNP TSC0015099
actccataacta

SEQ ID NO: 292145 - DNA, 12 bp, Artificial Sequence
  Oligonucleotide primer for the detection of SNP TSC0015099
tgtgtatggatt

SEQ ID NO: 292146 - DNA, 12 bp, Artificial Sequence
  Oligonucleotide primer for the detection of SNP TSC0015102
aacataattttt

SEQ ID NO: 292147 - DNA, 12 bp, Artificial Sequence
  Oligonucleotide primer for the detection of SNP TSC0015103
caaaaaatctat

SEQ ID NO: 292148 - DNA, 12 bp, Artificial Sequence
  Oligonucleotide primer for the detection of SNP TSC0015103
cgaaaaatctat

SEQ ID NO: 292149 - DNA, 12 bp, Artificial Sequence
  Oligonucleotide primer for the detection of SNP TSC0015103
aaagtttgttgg

SEQ ID NO: 292150 - DNA, 12 bp, Artificial Sequence
  Oligonucleotide primer for the detection of SNP TSC0015104
accaaaaaatct

SEQ ID NO: 292151 - DNA, 12 bp, Artificial Sequence
  Oligonucleotide primer for the detection of SNP TSC0015104
accgaaaaatct

SEQ ID NO: 292152 - DNA, 12 bp, Artificial Sequence
  Oligonucleotide primer for the detection of SNP TSC0015104
aagtttgttgga

SEQ ID NO: 292153 - DNA, 12 bp, Artificial Sequence
  Oligonucleotide primer for the detection of SNP TSC0015105
atactccaaacc

SEQ ID NO: 292154 - DNA, 12 bp, Artificial Sequence
  Oligonucleotide primer for the detection of SNP TSC0015105
atactccgaacc

SEQ ID NO: 292155 - DNA, 12 bp, Artificial Sequence
  Oligonucleotide primer for the detection of SNP TSC0015105
attagagaaggg

SEQ ID NO: 292156 - DNA, 12 bp, Artificial Sequence
  Oligonucleotide primer for the detection of SNP TSC0015106
caaaaaactaat

SEQ ID NO: 292157 - DNA, 12 bp, Artificial Sequence
  Oligonucleotide primer for the detection of SNP TSC0015106
taatgttttaaa

SEQ ID NO: 292158 - DNA, 12 bp, Artificial Sequence
  Oligonucleotide primer for the detection of SNP TSC0015106
taacgttttaaa

SEQ ID NO: 292159 - DNA, 12 bp, Artificial Sequence
  Oligonucleotide primer for the detection of SNP TSC0015107
atcaattcaaaa

SEQ ID NO: 292160 - DNA, 12 bp, Artificial Sequence
  Oligonucleotide primer for the detection of SNP TSC0015107
tttaaggaatat

SEQ ID NO: 292161 - DNA, 12 bp, Artificial Sequence
  Oligonucleotide primer for the detection of SNP TSC0015107
taaaaaatataa

SEQ ID NO: 292162 - DNA, 12 bp, Artificial Sequence
  Oligonucleotide primer for the detection of SNP TSC0015107
ttatattaattt

SEQ ID NO: 292163 - DNA, 12 bp, Artificial Sequence
  Oligonucleotide primer for the detection of SNP TSC0015108
ctttatttcaat

SEQ ID NO: 292164 - DNA, 12 bp, Artificial Sequence
  Oligonucleotide primer for the detection of SNP TSC0015108
ttgttttggtgg

SEQ ID NO: 292165 - DNA, 12 bp, Artificial Sequence
  Oligonucleotide primer for the detection of SNP TSC0015109
ctttcaattaaa

SEQ ID NO: 292166 - DNA, 12 bp, Artificial Sequence
  Oligonucleotide primer for the detection of SNP TSC0015109
tcaattttccca

SEQ ID NO: 292167 - DNA, 12 bp, Artificial Sequence
  Oligonucleotide primer for the detection of SNP TSC0015109
ggtttttagtta

SEQ ID NO: 292168 - DNA, 12 bp, Artificial Sequence
  Oligonucleotide primer for the detection of SNP TSC0015110
tctaaattctct

SEQ ID NO: 292169 - DNA, 12 bp, Artificial Sequence
  Oligonucleotide primer for the detection of SNP TSC0015110
tagggaagtaaa

SEQ ID NO: 292170 - DNA, 12 bp, Artificial Sequence
  Oligonucleotide primer for the detection of SNP TSC0015111
tctttaactatt

SEQ ID NO: 292171 - DNA, 12 bp, Artificial Sequence
  Oligonucleotide primer for the detection of SNP TSC0015111
gtagtatgattg

SEQ ID NO: 292172 - DNA, 12 bp, Artificial Sequence
  Oligonucleotide primer for the detection of SNP TSC0015112
ttcataaaaaaa

SEQ ID NO: 292173 - DNA, 12 bp, Artificial Sequence
  Oligonucleotide primer for the detection of SNP TSC0015112
tgggttttatgt

SEQ ID NO: 292174 - DNA, 12 bp, Artificial Sequence
  Oligonucleotide primer for the detection of SNP TSC0015112
taaactccatat

SEQ ID NO: 292175 - DNA, 12 bp, Artificial Sequence
  Oligonucleotide primer for the detection of SNP TSC0015112
tttatggggagg

SEQ ID NO: 292176 - DNA, 12 bp, Artificial Sequence
  Oligonucleotide primer for the detection of SNP TSC0015113
acaataactcat

SEQ ID NO: 292177 - DNA, 12 bp, Artificial Sequence
  Oligonucleotide primer for the detection of SNP TSC0015113
acaataactcgt

SEQ ID NO: 292178 - DNA, 12 bp, Artificial Sequence
  Oligonucleotide primer for the detection of SNP TSC0015113
gttggaattata

SEQ ID NO: 292179 - DNA, 12 bp, Artificial Sequence
  Oligonucleotide primer for the detection of SNP TSC0015113
atagtggtttgt

SEQ ID NO: 292180 - DNA, 12 bp, Artificial Sequence
  Oligonucleotide primer for the detection of SNP TSC0015113
atagtggttcgt

SEQ ID NO: 292181 - DNA, 12 bp, Artificial Sequence
  Oligonucleotide primer for the detection of SNP TSC0015114
aaccacaaaata

SEQ ID NO: 292182 - DNA, 12 bp, Artificial Sequence
  Oligonucleotide primer for the detection of SNP TSC0015114
aggtttattaat

SEQ ID NO: 292183 - DNA, 12 bp, Artificial Sequence
  Oligonucleotide primer for the detection of SNP TSC0015114
aaatccactaat

SEQ ID NO: 292184 - DNA, 12 bp, Artificial Sequence
  Oligonucleotide primer for the detection of SNP TSC0015114
attataagatgt

SEQ ID NO: 292185 - DNA, 12 bp, Artificial Sequence
  Oligonucleotide primer for the detection of SNP TSC0015115
aaaccccataac

SEQ ID NO: 292186 - DNA, 12 bp, Artificial Sequence
  Oligonucleotide primer for the detection of SNP TSC0015115
tttaagttagag

SEQ ID NO: 292187 - DNA, 12 bp, Artificial Sequence
  Oligonucleotide primer for the detection of SNP TSC0015119
aaaaacttcaaa

SEQ ID NO: 292188 - DNA, 12 bp, Artificial Sequence
  Oligonucleotide primer for the detection of SNP TSC0015119
tttttgttattt

SEQ ID NO: 292189 - DNA, 12 bp, Artificial Sequence
  Oligonucleotide primer for the detection of SNP TSC0015119
cctctatcaccc

SEQ ID NO: 292190 - DNA, 12 bp, Artificial Sequence
  Oligonucleotide primer for the detection of SNP TSC0015119
gggaattttaag

SEQ ID NO: 292191 - DNA, 12 bp, Artificial Sequence
  Oligonucleotide primer for the detection of SNP TSC0015120
aaacaaccaaca

SEQ ID NO: 292192 - DNA, 12 bp, Artificial Sequence
  Oligonucleotide primer for the detection of SNP TSC0015120
tattggttagtt

SEQ ID NO: 292193 - DNA, 12 bp, Artificial Sequence
  Oligonucleotide primer for the detection of SNP TSC0015120
cactaatcaact

SEQ ID NO: 292194 - DNA, 12 bp, Artificial Sequence
  Oligonucleotide primer for the detection of SNP TSC0015120
gggtagttagta

SEQ ID NO: 292195 - DNA, 12 bp, Artificial Sequence
  Oligonucleotide primer for the detection of SNP TSC0015122
ctccaatctaaa

SEQ ID NO: 292196 - DNA, 12 bp, Artificial Sequence
  Oligonucleotide primer for the detection of SNP TSC0015122
gttttattgtgt

SEQ ID NO: 292197 - DNA, 12 bp, Artificial Sequence
  Oligonucleotide primer for the detection of SNP TSC0015122
aatctcactata

SEQ ID NO: 292198 - DNA, 12 bp, Artificial Sequence
  Oligonucleotide primer for the detection of SNP TSC0015122
tttagtttgagt

SEQ ID NO: 292199 - DNA, 12 bp, Artificial Sequence
  Oligonucleotide primer for the detection of SNP TSC0015122
tttagtttgagc

SEQ ID NO: 292200 - DNA, 12 bp, Artificial Sequence
  Oligonucleotide primer for the detection of SNP TSC0015123
gagtatagtgtg

SEQ ID NO: 292201 - DNA, 12 bp, Artificial Sequence
  Oligonucleotide primer for the detection of SNP TSC0015123
aaatacaatata

SEQ ID NO: 292202 - DNA, 12 bp, Artificial Sequence
  Oligonucleotide primer for the detection of SNP TSC0015123
agttgagattat

SEQ ID NO: 292203 - DNA, 12 bp, Artificial Sequence
  Oligonucleotide primer for the detection of SNP TSC0015123
agtcgagattat

SEQ ID NO: 292204 - DNA, 12 bp, Artificial Sequence
  Oligonucleotide primer for the detection of SNP TSC0015125
actcatacaaac

SEQ ID NO: 292205 - DNA, 12 bp, Artificial Sequence
  Oligonucleotide primer for the detection of SNP TSC0015125
gaggttggaagg

SEQ ID NO: 292206 - DNA, 12 bp, Artificial Sequence
  Oligonucleotide primer for the detection of SNP TSC0015126
aacacctcaaaa

SEQ ID NO: 292207 - DNA, 12 bp, Artificial Sequence
  Oligonucleotide primer for the detection of SNP TSC0015126
atgaggatagat

SEQ ID NO: 292208 - DNA, 12 bp, Artificial Sequence
  Oligonukleotid-Primer
acgaggatagat

SEQ ID NO: 292209 - DNA, 12 bp, Artificial Sequence
  Oligonucleotide primer for the detection of SNP TSC0015126
acaaaaacaaac

SEQ ID NO: 292210 - DNA, 12 bp, Artificial Sequence
  Oligonucleotide primer for the detection of SNP TSC0015126
acgaaaacaaac

SEQ ID NO: 292211 - DNA, 12 bp, Artificial Sequence
  Oligonucleotide primer for the detection of SNP TSC0015126
gatattttaggg

SEQ ID NO: 292212 - DNA, 12 bp, Artificial Sequence
  Oligonucleotide primer for the detection of SNP TSC0015127
aaactatcactc

SEQ ID NO: 292213 - DNA, 12 bp, Artificial Sequence
  Oligonucleotide primer for the detection of SNP TSC0015127
aagtaggtagtg

SEQ ID NO: 292214 - DNA, 12 bp, Artificial Sequence
  Oligonucleotide primer for the detection of SNP TSC0015127
aagtaggtagcg

SEQ ID NO: 292215 - DNA, 12 bp, Artificial Sequence
  Oligonucleotide primer for the detection of SNP TSC0015127
aaacaaacaaca

SEQ ID NO: 292216 - DNA, 12 bp, Artificial Sequence
  Oligonucleotide primer for the detection of SNP TSC0015127
aaacaaacaacg

SEQ ID NO: 292217 - DNA, 12 bp, Artificial Sequence
  Oligonucleotide primer for the detection of SNP TSC0015127
gggttgttattt

SEQ ID NO: 292218 - DNA, 12 bp, Artificial Sequence
  Oligonucleotide primer for the detection of SNP TSC0015129
ctcttaaaaacc

SEQ ID NO: 292219 - DNA, 12 bp, Artificial Sequence
  Oligonucleotide primer for the detection of SNP TSC0015129
taggtttgtttt

SEQ ID NO: 292220 - DNA, 12 bp, Artificial Sequence
  Oligonucleotide primer for the detection of SNP TSC0015129
actaaatctatc

SEQ ID NO: 292221 - DNA, 12 bp, Artificial Sequence
  Oligonucleotide primer for the detection of SNP TSC0015129
tttttggaggtc

SEQ ID NO: 292222 - DNA, 12 bp, Artificial Sequence
  Oligonucleotide primer for the detection of SNP TSC0015130
tttacaaaccta

SEQ ID NO: 292223 - DNA, 12 bp, Artificial Sequence
  Oligonucleotide primer for the detection of SNP TSC0015130
ttttgtaagttt

SEQ ID NO: 292224 - DNA, 12 bp, Artificial Sequence
  Oligonucleotide primer for the detection of SNP TSC0015130
ttctataaattc

SEQ ID NO: 292225 - DNA, 12 bp, Artificial Sequence
  Oligonucleotide primer for the detection of SNP TSC0015130
tttataagttta

SEQ ID NO: 292226 - DNA, 12 bp, Artificial Sequence
  Oligonucleotide primer for the detection of SNP TSC0015134
tcaaaaacactt

SEQ ID NO: 292227 - DNA, 12 bp, Artificial Sequence
  Oligonucleotide primer for the detection of SNP TSC0015134
aattattattaa

SEQ ID NO: 292228 - DNA, 12 bp, Artificial Sequence
  Oligonucleotide primer for the detection of SNP TSC0015135
ttggtgtaatat

SEQ ID NO: 292229 - DNA, 12 bp, Artificial Sequence
  Oligonucleotide primer for the detection of SNP TSC0015135
actaatacaaca

SEQ ID NO: 292230 - DNA, 12 bp, Artificial Sequence
  Oligonucleotide primer for the detection of SNP TSC0015135
ttgaggttttgg

SEQ ID NO: 292231 - DNA, 12 bp, Artificial Sequence
  Oligonucleotide primer for the detection of SNP TSC0015136
ctaaaccaaacc

SEQ ID NO: 292232 - DNA, 12 bp, Artificial Sequence
  Oligonucleotide primer for the detection of SNP TSC0015136
ctaaaccgaacc

SEQ ID NO: 292233 - DNA, 12 bp, Artificial Sequence
  Oligonucleotide primer for the detection of SNP TSC0015136
ttattggaggaa

SEQ ID NO: 292234 - DNA, 12 bp, Artificial Sequence
  Oligonucleotide primer for the detection of SNP TSC0015137
gtataagttatg

SEQ ID NO: 292235 - DNA, 12 bp, Artificial Sequence
  Oligonucleotide primer for the detection of SNP TSC0015137
atataaactata

SEQ ID NO: 292236 - DNA, 12 bp, Artificial Sequence
  Oligonucleotide primer for the detection of SNP TSC0015137
gtataaactata

SEQ ID NO: 292237 - DNA, 12 bp, Artificial Sequence
  Oligonucleotide primer for the detection of SNP TSC0015137
atatgggaggat

SEQ ID NO: 292238 - DNA, 12 bp, Artificial Sequence
  Oligonucleotide primer for the detection of SNP TSC0015137
atacgggaggat

SEQ ID NO: 292239 - DNA, 12 bp, Artificial Sequence
  Oligonucleotide primer for the detection of SNP TSC0015138
cactacacctaa

SEQ ID NO: 292240 - DNA, 12 bp, Artificial Sequence
  Oligonucleotide primer for the detection of SNP TSC0015138
aatgatgaattg

SEQ ID NO: 292241 - DNA, 12 bp, Artificial Sequence
  Oligonucleotide primer for the detection of SNP TSC0015138
aataataaatta

SEQ ID NO: 292242 - DNA, 12 bp, Artificial Sequence
  Oligonucleotide primer for the detection of SNP TSC0015138
attgtatttgat

SEQ ID NO: 292243 - DNA, 12 bp, Artificial Sequence
  Oligonucleotide primer for the detection of SNP TSC0015139
caaaaatactaa

SEQ ID NO: 292244 - DNA, 12 bp, Artificial Sequence
  Oligonucleotide primer for the detection of SNP TSC0015139
cgaaaatactaa

SEQ ID NO: 292245 - DNA, 12 bp, Artificial Sequence
  Oligonucleotide primer for the detection of SNP TSC0015139
tatatttgtaat

SEQ ID NO: 292246 - DNA, 12 bp, Artificial Sequence
  Oligonucleotide primer for the detection of SNP TSC0015139
tggaagtgttgg

SEQ ID NO: 292247 - DNA, 12 bp, Artificial Sequence
  Oligonucleotide primer for the detection of SNP TSC0015139
cggaagtgttgg

SEQ ID NO: 292248 - DNA, 12 bp, Artificial Sequence
  Oligonucleotide primer for the detection of SNP TSC0015140
acctataatccc

SEQ ID NO: 292249 - DNA, 12 bp, Artificial Sequence
  Oligonucleotide primer for the detection of SNP TSC0015140
ggttttttaaag

SEQ ID NO: 292250 - DNA, 12 bp, Artificial Sequence
  Oligonucleotide primer for the detection of SNP TSC0015141
ctctaatcaatc

SEQ ID NO: 292251 - DNA, 12 bp, Artificial Sequence
  Oligonucleotide primer for the detection of SNP TSC0015141
gaagatatttag

SEQ ID NO: 292252 - DNA, 12 bp, Artificial Sequence
  Oligonucleotide primer for the detection of SNP TSC0015142
tctaaaaaaaac

SEQ ID NO: 292253 - DNA, 12 bp, Artificial Sequence
  Oligonucleotide primer for the detection of SNP TSC0015142
tttggggaaagt

SEQ ID NO: 292254 - DNA, 12 bp, Artificial Sequence
  Oligonucleotide primer for the detection of SNP TSC0015143
tagtaattttat

SEQ ID NO: 292255 - DNA, 12 bp, Artificial Sequence
  Oligonucleotide primer for the detection of SNP TSC0015143
taacaacctcac

SEQ ID NO: 292256 - DNA, 12 bp, Artificial Sequence
  Oligonucleotide primer for the detection of SNP TSC0015143
gagagtagggtg

SEQ ID NO: 292257 - DNA, 12 bp, Artificial Sequence
  Oligonucleotide primer for the detection of SNP TSC0015144
ttaataatttaa

SEQ ID NO: 292258 - DNA, 12 bp, Artificial Sequence
  Oligonucleotide primer for the detection of SNP TSC0015144
aagataagagtt

SEQ ID NO: 292259 - DNA, 12 bp, Artificial Sequence
  Oligonucleotide primer for the detection of SNP TSC0015145
aaattcacaaac

SEQ ID NO: 292260 - DNA, 12 bp, Artificial Sequence
  Oligonucleotide primer for the detection of SNP TSC0015145
aaattcgcaaac

SEQ ID NO: 292261 - DNA, 12 bp, Artificial Sequence
  Oligonucleotide primer for the detection of SNP TSC0015145
tttttaagggta

SEQ ID NO: 292262 - DNA, 12 bp, Artificial Sequence
  Oligonucleotide primer for the detection of SNP TSC0015146
ttaaaaaacaac

SEQ ID NO: 292263 - DNA, 12 bp, Artificial Sequence
  Oligonucleotide primer for the detection of SNP TSC0015146
taattgttgata

SEQ ID NO: 292264 - DNA, 12 bp, Artificial Sequence
  Oligonucleotide primer for the detection of SNP TSC0015146
caactattaata

SEQ ID NO: 292265 - DNA, 12 bp, Artificial Sequence
  Oligonucleotide primer for the detection of SNP TSC0015146
ttggaggatagt

SEQ ID NO: 292266 - DNA, 12 bp, Artificial Sequence
  Oligonucleotide primer for the detection of SNP TSC0015147
aatacttaatat

SEQ ID NO: 292267 - DNA, 12 bp, Artificial Sequence
  Oligonucleotide primer for the detection of SNP TSC0015147
gtattatttatt

SEQ ID NO: 292268 - DNA, 12 bp, Artificial Sequence
  Oligonucleotide primer for the detection of SNP TSC0015147
taccatctatta

SEQ ID NO: 292269 - DNA, 12 bp, Artificial Sequence
  Oligonucleotide primer for the detection of SNP TSC0015147
agtatttagtat

SEQ ID NO: 292270 - DNA, 12 bp, Artificial Sequence
  Oligonucleotide primer for the detection of SNP TSC0015148
tcccaactctcc

SEQ ID NO: 292271 - DNA, 12 bp, Artificial Sequence
  Oligonucleotide primer for the detection of SNP TSC0015149
ctttttcctttt

SEQ ID NO: 292272 - DNA, 12 bp, Artificial Sequence
  Oligonucleotide primer for the detection of SNP TSC0015149
atatataaagta

SEQ ID NO: 292273 - DNA, 12 bp, Artificial Sequence
  Oligonucleotide primer for the detection of SNP TSC0015150
aaatattaacac

SEQ ID NO: 292274 - DNA, 12 bp, Artificial Sequence
  Oligonucleotide primer for the detection of SNP TSC0015150
tgttagttattt

SEQ ID NO: 292275 - DNA, 12 bp, Artificial Sequence
  Oligonucleotide primer for the detection of SNP TSC0015150
tattgatatttt

SEQ ID NO: 292276 - DNA, 12 bp, Artificial Sequence
  Oligonucleotide primer for the detection of SNP TSC0015151
aatatatatctc

SEQ ID NO: 292277 - DNA, 12 bp, Artificial Sequence
  Oligonucleotide primer for the detection of SNP TSC0015152
atatctcctacc

SEQ ID NO: 292278 - DNA, 12 bp, Artificial Sequence
  Oligonucleotide primer for the detection of SNP TSC0015152
ggtggggggggg

SEQ ID NO: 292279 - DNA, 12 bp, Artificial Sequence
  Oligonucleotide primer for the detection of SNP TSC0015152
ggcggggggggg

SEQ ID NO: 292280 - DNA, 12 bp, Artificial Sequence
  Oligonucleotide primer for the detection of SNP TSC0015152
aacgaaaaaaaa

SEQ ID NO: 292281 - DNA, 12 bp, Artificial Sequence
  Oligonucleotide primer for the detection of SNP TSC0015152
gtgttttttgtc

SEQ ID NO: 292282 - DNA, 12 bp, Artificial Sequence
  Oligonucleotide primer for the detection of SNP TSC0015154
ataaaaatatta

SEQ ID NO: 292283 - DNA, 12 bp, Artificial Sequence
  Oligonucleotide primer for the detection of SNP TSC0015154
gtaaaaatatta

SEQ ID NO: 292284 - DNA, 12 bp, Artificial Sequence
  Oligonucleotide primer for the detection of SNP TSC0015154
ctactttataaa

SEQ ID NO: 292285 - DNA, 12 bp, Artificial Sequence
  Oligonucleotide primer for the detection of SNP TSC0015154
gtgagagtatta

SEQ ID NO: 292286 - DNA, 12 bp, Artificial Sequence
  Oligonucleotide primer for the detection of SNP TSC0015155
aaacaaaacaat

SEQ ID NO: 292287 - DNA, 12 bp, Artificial Sequence
  Oligonucleotide primer for the detection of SNP TSC0015155
tttgttttagga

SEQ ID NO: 292288 - DNA, 12 bp, Artificial Sequence
  Oligonucleotide primer for the detection of SNP TSC0015156
ccaaccaaaaat

SEQ ID NO: 292289 - DNA, 12 bp, Artificial Sequence
  Oligonucleotide primer for the detection of SNP TSC0015156
ccaaccgaaaat

SEQ ID NO: 292290 - DNA, 12 bp, Artificial Sequence
  Oligonucleotide primer for the detection of SNP TSC0015156
tttgtttatggg

SEQ ID NO: 292291 - DNA, 12 bp, Artificial Sequence
  Oligonucleotide primer for the detection of SNP TSC0015157
aaacactacctt

SEQ ID NO: 292292 - DNA, 12 bp, Artificial Sequence
  Oligonucleotide primer for the detection of SNP TSC0015157
attttaggatag

SEQ ID NO: 292293 - DNA, 12 bp, Artificial Sequence
  Oligonucleotide primer for the detection of SNP TSC0015158
aactaaaacccc

SEQ ID NO: 292294 - DNA, 12 bp, Artificial Sequence
  Oligonucleotide primer for the detection of SNP TSC0015158
aggaggatttgg

SEQ ID NO: 292295 - DNA, 12 bp, Artificial Sequence
  Oligonucleotide primer for the detection of SNP TSC0015158
aaaaaaacttaa

SEQ ID NO: 292296 - DNA, 12 bp, Artificial Sequence
  Oligonucleotide primer for the detection of SNP TSC0015158
ggttgagatttt

SEQ ID NO: 292297 - DNA, 12 bp, Artificial Sequence
  Oligonukleotid-Primer
atatatctattc

SEQ ID NO: 292298 - DNA, 12 bp, Artificial Sequence
  Oligonucleotide primer for the detection of SNP TSC0015160
attaaaaaaaac

SEQ ID NO: 292299 - DNA, 12 bp, Artificial Sequence
  Oligonucleotide primer for the detection of SNP TSC0015160
tattaaaaaaaa

SEQ ID NO: 292300 - DNA, 12 bp, Artificial Sequence
  Oligonucleotide primer for the detection of SNP TSC0015160
atatatttgttt

SEQ ID NO: 292301 - DNA, 12 bp, Artificial Sequence
  Oligonucleotide primer for the detection of SNP TSC0015161
tacacattttcc

SEQ ID NO: 292302 - DNA, 12 bp, Artificial Sequence
  Oligonucleotide primer for the detection of SNP TSC0015161
atttgtggaata

SEQ ID NO: 292303 - DNA, 12 bp, Artificial Sequence
  Oligonucleotide primer for the detection of SNP TSC0015162
aaactctactaa

SEQ ID NO: 292304 - DNA, 12 bp, Artificial Sequence
  Oligonucleotide primer for the detection of SNP TSC0015162
tgagtgtggggt

SEQ ID NO: 292305 - DNA, 12 bp, Artificial Sequence
  Oligonucleotide primer for the detection of SNP TSC0015162
tgagcgtggggt

SEQ ID NO: 292306 - DNA, 12 bp, Artificial Sequence
  Oligonucleotide primer for the detection of SNP TSC0015162
aacataaaataa

SEQ ID NO: 292307 - DNA, 12 bp, Artificial Sequence
  Oligonucleotide primer for the detection of SNP TSC0015162
aacgtaaaataa

SEQ ID NO: 292308 - DNA, 12 bp, Artificial Sequence
  Oligonucleotide primer for the detection of SNP TSC0015162
agttttgttgat

SEQ ID NO: 292309 - DNA, 12 bp, Artificial Sequence
  Oligonucleotide primer for the detection of SNP TSC0015165
tactttttatct

SEQ ID NO: 292310 - DNA, 12 bp, Artificial Sequence
  Oligonucleotide primer for the detection of SNP TSC0015165
tttagatgtaag

SEQ ID NO: 292311 - DNA, 12 bp, Artificial Sequence
  Oligonucleotide primer for the detection of SNP TSC0015168
gattaataaaaa

SEQ ID NO: 292312 - DNA, 12 bp, Artificial Sequence
  Oligonucleotide primer for the detection of SNP TSC0015168
aatcaataaaaa

SEQ ID NO: 292313 - DNA, 12 bp, Artificial Sequence
  Oligonucleotide primer for the detection of SNP TSC0015169
aactctaaaccc

SEQ ID NO: 292314 - DNA, 12 bp, Artificial Sequence
  Oligonucleotide primer for the detection of SNP TSC0015169
aaagtaggttgg

SEQ ID NO: 292315 - DNA, 12 bp, Artificial Sequence
  Oligonucleotide primer for the detection of SNP TSC0015169
aaagtaggtcgg

SEQ ID NO: 292316 - DNA, 12 bp, Artificial Sequence
  Oligonucleotide primer for the detection of SNP TSC0015171
atttaatcacta

SEQ ID NO: 292317 - DNA, 12 bp, Artificial Sequence
  Oligonucleotide primer for the detection of SNP TSC0015171
atttaatcgcta

SEQ ID NO: 292318 - DNA, 12 bp, Artificial Sequence
  Oligonucleotide primer for the detection of SNP TSC0015171
taggattataat

SEQ ID NO: 292319 - DNA, 12 bp, Artificial Sequence
  Oligonucleotide primer for the detection of SNP TSC0015171
caaaactacaac

SEQ ID NO: 292320 - DNA, 12 bp, Artificial Sequence
  Oligonucleotide primer for the detection of SNP TSC0015171
atttgattgttg

SEQ ID NO: 292321 - DNA, 12 bp, Artificial Sequence
  Oligonucleotide primer for the detection of SNP TSC0015171
atttgatcgttg

SEQ ID NO: 292322 - DNA, 12 bp, Artificial Sequence
  Oligonucleotide primer for the detection of SNP TSC0015172
aatccaaataat

SEQ ID NO: 292323 - DNA, 12 bp, Artificial Sequence
  Oligonucleotide primer for the detection of SNP TSC0015172
tgtaaggaggaa

SEQ ID NO: 292324 - DNA, 12 bp, Artificial Sequence
  Oligonucleotide primer for the detection of SNP TSC0015174
ctactatcctaa

SEQ ID NO: 292325 - DNA, 12 bp, Artificial Sequence
  Oligonucleotide primer for the detection of SNP TSC0015174
gttttagatttt

SEQ ID NO: 292326 - DNA, 12 bp, Artificial Sequence
  Oligonucleotide primer for the detection of SNP TSC0015174
atttcaaaccct

SEQ ID NO: 292327 - DNA, 12 bp, Artificial Sequence
  Oligonucleotide primer for the detection of SNP TSC0015174
ttgttgttttgg

SEQ ID NO: 292328 - DNA, 12 bp, Artificial Sequence
  Oligonucleotide primer for the detection of SNP TSC0015176
agtatttaagtt

SEQ ID NO: 292329 - DNA, 12 bp, Artificial Sequence
  Oligonucleotide primer for the detection of SNP TSC0015176
aatatttaaacc

SEQ ID NO: 292330 - DNA, 12 bp, Artificial Sequence
  Oligonucleotide primer for the detection of SNP TSC0015176
tataagttatta

SEQ ID NO: 292331 - DNA, 12 bp, Artificial Sequence
  Oligonucleotide primer for the detection of SNP TSC0015177
aaataaccacat

SEQ ID NO: 292332 - DNA, 12 bp, Artificial Sequence
  Oligonucleotide primer for the detection of SNP TSC0015177
aaataaccacgt

SEQ ID NO: 292333 - DNA, 12 bp, Artificial Sequence
  Oligonucleotide primer for the detection of SNP TSC0015177
gatggtttatga

SEQ ID NO: 292334 - DNA, 12 bp, Artificial Sequence
  Oligonucleotide primer for the detection of SNP TSC0015177
aataacctataa

SEQ ID NO: 292335 - DNA, 12 bp, Artificial Sequence
  Oligonucleotide primer for the detection of SNP TSC0015177
agatggttatgt

SEQ ID NO: 292336 - DNA, 12 bp, Artificial Sequence
  Oligonucleotide primer for the detection of SNP TSC0015177
agatggttacgt

SEQ ID NO: 292337 - DNA, 12 bp, Artificial Sequence
  Oligonucleotide primer for the detection of SNP TSC0015178
tttccccaacac

SEQ ID NO: 292338 - DNA, 12 bp, Artificial Sequence
  Oligonucleotide primer for the detection of SNP TSC0015178
tagtgggttatt

SEQ ID NO: 292339 - DNA, 12 bp, Artificial Sequence
  Oligonucleotide primer for the detection of SNP TSC0015178
ataaatcatcaa

SEQ ID NO: 292340 - DNA, 12 bp, Artificial Sequence
  Oligonucleotide primer for the detection of SNP TSC0015178
tttttttagtat

SEQ ID NO: 292341 - DNA, 12 bp, Artificial Sequence
  Oligonucleotide primer for the detection of SNP TSC0015178
tttttttagtac

SEQ ID NO: 292342 - DNA, 12 bp, Artificial Sequence
  Oligonucleotide primer for the detection of SNP TSC0015179
ttaaatatcaca

SEQ ID NO: 292343 - DNA, 12 bp, Artificial Sequence
  Oligonucleotide primer for the detection of SNP TSC0015179
ttaaatatcacg

SEQ ID NO: 292344 - DNA, 12 bp, Artificial Sequence
  Oligonucleotide primer for the detection of SNP TSC0015179
gtttgtagtttg

SEQ ID NO: 292345 - DNA, 12 bp, Artificial Sequence
  Oligonucleotide primer for the detection of SNP TSC0015179
cctacaacctaa

SEQ ID NO: 292346 - DNA, 12 bp, Artificial Sequence
  Oligonucleotide primer for the detection of SNP TSC0015179
tgggtgttatgt

SEQ ID NO: 292347 - DNA, 12 bp, Artificial Sequence
  Oligonucleotide primer for the detection of SNP TSC0015179
tgggtgttacgt

SEQ ID NO: 292348 - DNA, 12 bp, Artificial Sequence
  Oligonucleotide primer for the detection of SNP TSC0015180
ttttaaatatca

SEQ ID NO: 292349 - DNA, 12 bp, Artificial Sequence
  Oligonucleotide primer for the detection of SNP TSC0015180
agtttgtagttt

SEQ ID NO: 292350 - DNA, 12 bp, Artificial Sequence
  Oligonucleotide primer for the detection of SNP TSC0015180
aacctacaacct

SEQ ID NO: 292351 - DNA, 12 bp, Artificial Sequence
  Oligonucleotide primer for the detection of SNP TSC0015180
ttttgggtgtta

SEQ ID NO: 292352 - DNA, 12 bp, Artificial Sequence
  Oligonucleotide primer for the detection of SNP TSC0015181
ttgggttaaatg

SEQ ID NO: 292353 - DNA, 12 bp, Artificial Sequence
  Oligonucleotide primer for the detection of SNP TSC0015182
cacaataaacat

SEQ ID NO: 292354 - DNA, 12 bp, Artificial Sequence
  Oligonucleotide primer for the detection of SNP TSC0015182
cgcaataaacat

SEQ ID NO: 292355 - DNA, 12 bp, Artificial Sequence
  Oligonucleotide primer for the detection of SNP TSC0015182
gatatatgtata

SEQ ID NO: 292356 - DNA, 12 bp, Artificial Sequence
  Oligonucleotide primer for the detection of SNP TSC0015182
aacacatacaca

SEQ ID NO: 292357 - DNA, 12 bp, Artificial Sequence
  Oligonucleotide primer for the detection of SNP TSC0015182
tgtaataaatat

SEQ ID NO: 292358 - DNA, 12 bp, Artificial Sequence
  Oligonucleotide primer for the detection of SNP TSC0015182
cgtaataaatat

SEQ ID NO: 292359 - DNA, 12 bp, Artificial Sequence
  Oligonucleotide primer for the detection of SNP TSC0015183
aaaaactttact

SEQ ID NO: 292360 - DNA, 12 bp, Artificial Sequence
  Oligonucleotide primer for the detection of SNP TSC0015183
gaaaatatttta

SEQ ID NO: 292361 - DNA, 12 bp, Artificial Sequence
  Oligonucleotide primer for the detection of SNP TSC0015184
tcttcccaaacc

SEQ ID NO: 292362 - DNA, 12 bp, Artificial Sequence
  Oligonucleotide primer for the detection of SNP TSC0015184
ggaagaatataa

SEQ ID NO: 292363 - DNA, 12 bp, Artificial Sequence
  Oligonucleotide primer for the detection of SNP TSC0015185
aaacatttaaaa

SEQ ID NO: 292364 - DNA, 12 bp, Artificial Sequence
  Oligonucleotide primer for the detection of SNP TSC0015185
gattaaagtgtt

SEQ ID NO: 292365 - DNA, 12 bp, Artificial Sequence
  Oligonucleotide primer for the detection of SNP TSC0015185
ttaaaatactaa

SEQ ID NO: 292366 - DNA, 12 bp, Artificial Sequence
  Oligonukleotid-Primer
ttttagatattt

SEQ ID NO: 292367 - DNA, 12 bp, Artificial Sequence
  Oligonucleotide primer for the detection of SNP TSC0015187
aaccaaacctaa

SEQ ID NO: 292368 - DNA, 12 bp, Artificial Sequence
  Oligonucleotide primer for the detection of SNP TSC0015187
gagatgtgtttt

SEQ ID NO: 292369 - DNA, 12 bp, Artificial Sequence
  Oligonucleotide primer for the detection of SNP TSC0015187
aaaatatatccc

SEQ ID NO: 292370 - DNA, 12 bp, Artificial Sequence
  Oligonukleotid-Primer
agttagatttgg

SEQ ID NO: 292371 - DNA, 12 bp, Artificial Sequence
  Oligonucleotide primer for the detection of SNP TSC0015188
tcctcacaacaa

SEQ ID NO: 292372 - DNA, 12 bp, Artificial Sequence
  Oligonucleotide primer for the detection of SNP TSC0015188
tcctcacgacaa

SEQ ID NO: 292373 - DNA, 12 bp, Artificial Sequence
  Oligonucleotide primer for the detection of SNP TSC0015188
actcctaaactt

SEQ ID NO: 292374 - DNA, 12 bp, Artificial Sequence
  Oligonucleotide primer for the detection of SNP TSC0015188
tttttatggtag

SEQ ID NO: 292375 - DNA, 12 bp, Artificial Sequence
  Oligonucleotide primer for the detection of SNP TSC0015188
tttttacggtag

SEQ ID NO: 292376 - DNA, 12 bp, Artificial Sequence
  Oligonucleotide primer for the detection of SNP TSC0015189
ttccacttaaat

SEQ ID NO: 292377 - DNA, 12 bp, Artificial Sequence
  Oligonucleotide primer for the detection of SNP TSC0015189
taggattggaag

SEQ ID NO: 292378 - DNA, 12 bp, Artificial Sequence
  Oligonucleotide primer for the detection of SNP TSC0015190
ccacccaaatac

SEQ ID NO: 292379 - DNA, 12 bp, Artificial Sequence
  Oligonucleotide primer for the detection of SNP TSC0015190
ccgcccaaatac

SEQ ID NO: 292380 - DNA, 12 bp, Artificial Sequence
  Oligonucleotide primer for the detection of SNP TSC0015190
tattgtatagag

SEQ ID NO: 292381 - DNA, 12 bp, Artificial Sequence
  Oligonucleotide primer for the detection of SNP TSC0015193
gtgatagagtga

SEQ ID NO: 292382 - DNA, 12 bp, Artificial Sequence
  Oligonucleotide primer for the detection of SNP TSC0015193
gcgatagagtga

SEQ ID NO: 292383 - DNA, 12 bp, Artificial Sequence
  Oligonucleotide primer for the detection of SNP TSC0015193
gtgatagagcga

SEQ ID NO: 292384 - DNA, 12 bp, Artificial Sequence
  Oligonucleotide primer for the detection of SNP TSC0015193
gcgatagagcga

SEQ ID NO: 292385 - DNA, 12 bp, Artificial Sequence
  Oligonucleotide primer for the detection of SNP TSC0015193
caacaaaacgaa

SEQ ID NO: 292386 - DNA, 12 bp, Artificial Sequence
  Oligonucleotide primer for the detection of SNP TSC0015193
cgacaaaacaaa

SEQ ID NO: 292387 - DNA, 12 bp, Artificial Sequence
  Oligonucleotide primer for the detection of SNP TSC0015193
cgacaaaacgaa

SEQ ID NO: 292388 - DNA, 12 bp, Artificial Sequence
  Oligonucleotide primer for the detection of SNP TSC0015193
ttttgagatgga

SEQ ID NO: 292389 - DNA, 12 bp, Artificial Sequence
  Oligonucleotide primer for the detection of SNP TSC0015194
ataatattttaa

SEQ ID NO: 292390 - DNA, 12 bp, Artificial Sequence
  Oligonucleotide primer for the detection of SNP TSC0015194
atatatagtaat

SEQ ID NO: 292391 - DNA, 12 bp, Artificial Sequence
  Oligonucleotide primer for the detection of SNP TSC0015194
atatacaacaat

SEQ ID NO: 292392 - DNA, 12 bp, Artificial Sequence
  Oligonucleotide primer for the detection of SNP TSC0015194
gtaatgttttga

SEQ ID NO: 292393 - DNA, 12 bp, Artificial Sequence
  Oligonucleotide primer for the detection of SNP TSC0015197
tataaccaaaaa

SEQ ID NO: 292394 - DNA, 12 bp, Artificial Sequence
  Oligonucleotide primer for the detection of SNP TSC0015197
ttgttgtttttt

SEQ ID NO: 292395 - DNA, 12 bp, Artificial Sequence
  Oligonucleotide primer for the detection of SNP TSC0015197
ttgttgtttttc

SEQ ID NO: 292396 - DNA, 12 bp, Artificial Sequence
  Oligonucleotide primer for the detection of SNP TSC0015197
tactattatctt

SEQ ID NO: 292397 - DNA, 12 bp, Artificial Sequence
  Oligonucleotide primer for the detection of SNP TSC0015197
ttgtgattaaga

SEQ ID NO: 292398 - DNA, 12 bp, Artificial Sequence
  Oligonucleotide primer for the detection of SNP TSC0015198
atcatttataaa

SEQ ID NO: 292399 - DNA, 12 bp, Artificial Sequence
  Oligonucleotide primer for the detection of SNP TSC0015198
ttaaatttattt

SEQ ID NO: 292400 - DNA, 12 bp, Artificial Sequence
  Oligonucleotide primer for the detection of SNP TSC0015198
ttaaacccattt

SEQ ID NO: 292401 - DNA, 12 bp, Artificial Sequence
  Oligonucleotide primer for the detection of SNP TSC0015198
gttatttataaa

SEQ ID NO: 292402 - DNA, 12 bp, Artificial Sequence
  Oligonucleotide primer for the detection of SNP TSC0015199
ctcacatactcc

SEQ ID NO: 292403 - DNA, 12 bp, Artificial Sequence
  Oligonucleotide primer for the detection of SNP TSC0015199
ttaggttttgaa

SEQ ID NO: 292404 - DNA, 12 bp, Artificial Sequence
  Oligonucleotide primer for the detection of SNP TSC0015200
tttattttcgtt

SEQ ID NO: 292405 - DNA, 12 bp, Artificial Sequence
  Oligonucleotide primer for the detection of SNP TSC0015200
accctaccctca

SEQ ID NO: 292406 - DNA, 12 bp, Artificial Sequence
  Oligonucleotide primer for the detection of SNP TSC0015200
accctaccctcg

SEQ ID NO: 292407 - DNA, 12 bp, Artificial Sequence
  Oligonucleotide primer for the detection of SNP TSC0015200
gaagaataattg

SEQ ID NO: 292408 - DNA, 12 bp, Artificial Sequence
  Oligonucleotide primer for the detection of SNP TSC0015201
gtacaaataaaa

SEQ ID NO: 292409 - DNA, 12 bp, Artificial Sequence
  Oligonucleotide primer for the detection of SNP TSC0015201
ttatgtttatgt

SEQ ID NO: 292410 - DNA, 12 bp, Artificial Sequence
  Oligonucleotide primer for the detection of SNP TSC0015201
actatatccata

SEQ ID NO: 292411 - DNA, 12 bp, Artificial Sequence
  Oligonucleotide primer for the detection of SNP TSC0015201
tgtatagataag

SEQ ID NO: 292412 - DNA, 12 bp, Artificial Sequence
  Oligonucleotide primer for the detection of SNP TSC0015201
cgtatagataag

SEQ ID NO: 292413 - DNA, 12 bp, Artificial Sequence
  Oligonucleotide primer for the detection of SNP TSC0015203
ttatgggttgaa

SEQ ID NO: 292414 - DNA, 12 bp, Artificial Sequence
  Oligonucleotide primer for the detection of SNP TSC0015204
tctatttaacat

SEQ ID NO: 292415 - DNA, 12 bp, Artificial Sequence
  Oligonucleotide primer for the detection of SNP TSC0015204
atattttggggg

SEQ ID NO: 292416 - DNA, 12 bp, Artificial Sequence
  Oligonucleotide primer for the detection of SNP TSC0015205
aaacttataaaa

SEQ ID NO: 292417 - DNA, 12 bp, Artificial Sequence
  Oligonucleotide primer for the detection of SNP TSC0015205
gaatgtgtaatt

SEQ ID NO: 292418 - DNA, 12 bp, Artificial Sequence
  Oligonucleotide primer for the detection of SNP TSC0015205
gaatgtgtaatc

SEQ ID NO: 292419 - DNA, 12 bp, Artificial Sequence
  Oligonucleotide primer for the detection of SNP TSC0015205
aaaatatacaat

SEQ ID NO: 292420 - DNA, 12 bp, Artificial Sequence
  Oligonucleotide primer for the detection of SNP TSC0015205
gtttgtaagatt

SEQ ID NO: 292421 - DNA, 12 bp, Artificial Sequence
  Oligonucleotide primer for the detection of SNP TSC0015209
atatattcctac

SEQ ID NO: 292422 - DNA, 12 bp, Artificial Sequence
  Oligonucleotide primer for the detection of SNP TSC0015209
tatttttgttga

SEQ ID NO: 292423 - DNA, 12 bp, Artificial Sequence
  Oligonucleotide primer for the detection of SNP TSC0015209
cacctctactaa

SEQ ID NO: 292424 - DNA, 12 bp, Artificial Sequence
  Oligonucleotide primer for the detection of SNP TSC0015209
atgtgtttttat

SEQ ID NO: 292425 - DNA, 12 bp, Artificial Sequence
  Oligonucleotide primer for the detection of SNP TSC0015210
tcaaacattacc

SEQ ID NO: 292426 - DNA, 12 bp, Artificial Sequence
  Oligonucleotide primer for the detection of SNP TSC0015210
aacctaaaaaca

SEQ ID NO: 292427 - DNA, 12 bp, Artificial Sequence
  Oligonucleotide primer for the detection of SNP TSC0015210
ttagatattatt

SEQ ID NO: 292428 - DNA, 12 bp, Artificial Sequence
  Oligonucleotide primer for the detection of SNP TSC0015212
aatctaatatct

SEQ ID NO: 292429 - DNA, 12 bp, Artificial Sequence
  Oligonucleotide primer for the detection of SNP TSC0015212
tataaagttttg

SEQ ID NO: 292430 - DNA, 12 bp, Artificial Sequence
  Oligonucleotide primer for the detection of SNP TSC0015213
aacttttccttt

SEQ ID NO: 292431 - DNA, 12 bp, Artificial Sequence
  Oligonucleotide primer for the detection of SNP TSC0015213
ttggtaattata

SEQ ID NO: 292432 - DNA, 12 bp, Artificial Sequence
  Oligonucleotide primer for the detection of SNP TSC0015213
ttaataaccata

SEQ ID NO: 292433 - DNA, 12 bp, Artificial Sequence
  Oligonucleotide primer for the detection of SNP TSC0015214
tttgagtagttt

SEQ ID NO: 292434 - DNA, 12 bp, Artificial Sequence
  Oligonucleotide primer for the detection of SNP TSC0015214
cctaaacaatct

SEQ ID NO: 292435 - DNA, 12 bp, Artificial Sequence
  Oligonucleotide primer for the detection of SNP TSC0015214
aatagggttaag

SEQ ID NO: 292436 - DNA, 12 bp, Artificial Sequence
  Oligonucleotide primer for the detection of SNP TSC0015217
gggaaggttttt

SEQ ID NO: 292437 - DNA, 12 bp, Artificial Sequence
  Oligonucleotide primer for the detection of SNP TSC0015217
ttgtaaggggaa

SEQ ID NO: 292438 - DNA, 12 bp, Artificial Sequence
  Oligonucleotide primer for the detection of SNP TSC0015218
tccataaatttc

SEQ ID NO: 292439 - DNA, 12 bp, Artificial Sequence
  Oligonucleotide primer for the detection of SNP TSC0015218
tccgtaaatttc

SEQ ID NO: 292440 - DNA, 12 bp, Artificial Sequence
  Oligonucleotide primer for the detection of SNP TSC0015218
ttattttggaag

SEQ ID NO: 292441 - DNA, 12 bp, Artificial Sequence
  Oligonucleotide primer for the detection of SNP TSC0015219
aaacctaaaaaa

SEQ ID NO: 292442 - DNA, 12 bp, Artificial Sequence
  Oligonucleotide primer for the detection of SNP TSC0015219
aaaaaactctat

SEQ ID NO: 292443 - DNA, 12 bp, Artificial Sequence
  Oligonucleotide primer for the detection of SNP TSC0015219
gaatttgagaag

SEQ ID NO: 292444 - DNA, 12 bp, Artificial Sequence
  Oligonucleotide primer for the detection of SNP TSC0015220
tctaaaaacata

SEQ ID NO: 292445 - DNA, 12 bp, Artificial Sequence
  Oligonucleotide primer for the detection of SNP TSC0015220
gattggttattt

SEQ ID NO: 292446 - DNA, 12 bp, Artificial Sequence
  Oligonucleotide primer for the detection of SNP TSC0015220
aattaactattt

SEQ ID NO: 292447 - DNA, 12 bp, Artificial Sequence
  Oligonucleotide primer for the detection of SNP TSC0015221
tatataaacccc

SEQ ID NO: 292448 - DNA, 12 bp, Artificial Sequence
  Oligonucleotide primer for the detection of SNP TSC0015221
tagatttttagt

SEQ ID NO: 292449 - DNA, 12 bp, Artificial Sequence
  Oligonucleotide primer for the detection of SNP TSC0015221
caaaccctcaat

SEQ ID NO: 292450 - DNA, 12 bp, Artificial Sequence
  Oligonucleotide primer for the detection of SNP TSC0015221
tgtgtagatttt

SEQ ID NO: 292451 - DNA, 12 bp, Artificial Sequence
  Oligonucleotide primer for the detection of SNP TSC0015223
tccttcaccaac

SEQ ID NO: 292452 - DNA, 12 bp, Artificial Sequence
  Oligonucleotide primer for the detection of SNP TSC0015223
tgatattagaaa

SEQ ID NO: 292453 - DNA, 12 bp, Artificial Sequence
  Oligonucleotide primer for the detection of SNP TSC0015223
taacactaaaaa

SEQ ID NO: 292454 - DNA, 12 bp, Artificial Sequence
  Oligonucleotide primer for the detection of SNP TSC0015224
aaaaaccacaat

SEQ ID NO: 292455 - DNA, 12 bp, Artificial Sequence
  Oligonukleotid-Primer
gtgaggtttaag

SEQ ID NO: 292456 - DNA, 12 bp, Artificial Sequence
  Oligonucleotide primer for the detection of SNP TSC0015225
ttaatttaatat

SEQ ID NO: 292457 - DNA, 12 bp, Artificial Sequence
  Oligonucleotide primer for the detection of SNP TSC0015225
atcaatttaaca

SEQ ID NO: 292458 - DNA, 12 bp, Artificial Sequence
  Oligonucleotide primer for the detection of SNP TSC0015225
gggaggggaggt

SEQ ID NO: 292459 - DNA, 12 bp, Artificial Sequence
  Oligonucleotide primer for the detection of SNP TSC0015225
gggaggggaggc

SEQ ID NO: 292460 - DNA, 12 bp, Artificial Sequence
  Oligonucleotide primer for the detection of SNP TSC0015227
taaataaatata

SEQ ID NO: 292461 - DNA, 12 bp, Artificial Sequence
  Oligonucleotide primer for the detection of SNP TSC0015227
taatatagattt

SEQ ID NO: 292462 - DNA, 12 bp, Artificial Sequence
  Oligonucleotide primer for the detection of SNP TSC0015227
taacacaaactt

SEQ ID NO: 292463 - DNA, 12 bp, Artificial Sequence
  Oligonucleotide primer for the detection of SNP TSC0015227
tgaataaatatg

SEQ ID NO: 292464 - DNA, 12 bp, Artificial Sequence
  Oligonucleotide primer for the detection of SNP TSC0015228
taaatttataac

SEQ ID NO: 292465 - DNA, 12 bp, Artificial Sequence
  Oligonucleotide primer for the detection of SNP TSC0015228
tgggggtgtggg

SEQ ID NO: 292466 - DNA, 12 bp, Artificial Sequence
  Oligonucleotide primer for the detection of SNP TSC0015228
taaaaatataaa

SEQ ID NO: 292467 - DNA, 12 bp, Artificial Sequence
  Oligonucleotide primer for the detection of SNP TSC0015228
tgagtttatggt

SEQ ID NO: 292468 - DNA, 12 bp, Artificial Sequence
  Oligonucleotide primer for the detection of SNP TSC0015229
atttaccctccc

SEQ ID NO: 292469 - DNA, 12 bp, Artificial Sequence
  Oligonucleotide primer for the detection of SNP TSC0015229
tgtgtattagtg

SEQ ID NO: 292470 - DNA, 12 bp, Artificial Sequence
  Oligonucleotide primer for the detection of SNP TSC0015229
cgtgtattagtg

SEQ ID NO: 292471 - DNA, 12 bp, Artificial Sequence
  Oligonucleotide primer for the detection of SNP TSC0015229
catacactaata

SEQ ID NO: 292472 - DNA, 12 bp, Artificial Sequence
  Oligonucleotide primer for the detection of SNP TSC0015229
cgtacactaata

SEQ ID NO: 292473 - DNA, 12 bp, Artificial Sequence
  Oligonucleotide primer for the detection of SNP TSC0015230
ctcacaaaacgc

SEQ ID NO: 292474 - DNA, 12 bp, Artificial Sequence
  Oligonucleotide primer for the detection of SNP TSC0015230
ctcgcaaaacgc

SEQ ID NO: 292475 - DNA, 12 bp, Artificial Sequence
  Oligonucleotide primer for the detection of SNP TSC0015230
gggaggttttag

SEQ ID NO: 292476 - DNA, 12 bp, Artificial Sequence
  Oligonucleotide primer for the detection of SNP TSC0015230
tttgtagggtgt

SEQ ID NO: 292477 - DNA, 12 bp, Artificial Sequence
  Oligonucleotide primer for the detection of SNP TSC0015230
ttcgtagggtgt

SEQ ID NO: 292478 - DNA, 12 bp, Artificial Sequence
  Oligonucleotide primer for the detection of SNP TSC0015230
tttgtagggcgt

SEQ ID NO: 292479 - DNA, 12 bp, Artificial Sequence
  Oligonucleotide primer for the detection of SNP TSC0015230
ttcgtagggcgt

SEQ ID NO: 292480 - DNA, 12 bp, Artificial Sequence
  Oligonucleotide primer for the detection of SNP TSC0015231
aaatatcataaa

SEQ ID NO: 292481 - DNA, 12 bp, Artificial Sequence
  Oligonucleotide primer for the detection of SNP TSC0015231
ttttaaacctct

SEQ ID NO: 292482 - DNA, 12 bp, Artificial Sequence
  Oligonucleotide primer for the detection of SNP TSC0015231
aaatgttatgaa

SEQ ID NO: 292483 - DNA, 12 bp, Artificial Sequence
  Oligonucleotide primer for the detection of SNP TSC0015232
ttaacaaacctc

SEQ ID NO: 292484 - DNA, 12 bp, Artificial Sequence
  Oligonucleotide primer for the detection of SNP TSC0015232
ttaacgaacctc

SEQ ID NO: 292485 - DNA, 12 bp, Artificial Sequence
  Oligonucleotide primer for the detection of SNP TSC0015232
ttggaggtggtg

SEQ ID NO: 292486 - DNA, 12 bp, Artificial Sequence
  Oligonucleotide primer for the detection of SNP TSC0015232
taaaaataataa

SEQ ID NO: 292487 - DNA, 12 bp, Artificial Sequence
  Oligonucleotide primer for the detection of SNP TSC0015232
tggtgagttttt

SEQ ID NO: 292488 - DNA, 12 bp, Artificial Sequence
  Oligonucleotide primer for the detection of SNP TSC0015232
tggcgagttttt

SEQ ID NO: 292489 - DNA, 12 bp, Artificial Sequence
  Oligonucleotide primer for the detection of SNP TSC0015233
aatacaaattaa

SEQ ID NO: 292490 - DNA, 12 bp, Artificial Sequence
  Oligonucleotide primer for the detection of SNP TSC0015233
tttaagttaagt

SEQ ID NO: 292491 - DNA, 12 bp, Artificial Sequence
  Oligonucleotide primer for the detection of SNP TSC0015233
tccaaaccaaat

SEQ ID NO: 292492 - DNA, 12 bp, Artificial Sequence
  Oligonucleotide primer for the detection of SNP TSC0015233
agtgtaggttgg

SEQ ID NO: 292493 - DNA, 12 bp, Artificial Sequence
  Oligonucleotide primer for the detection of SNP TSC0015234
cttaaccctcta

SEQ ID NO: 292494 - DNA, 12 bp, Artificial Sequence
  Oligonucleotide primer for the detection of SNP TSC0015234
agtttaggatag

SEQ ID NO: 292495 - DNA, 12 bp, Artificial Sequence
  Oligonucleotide primer for the detection of SNP TSC0015234
aactcaaaacaa

SEQ ID NO: 292496 - DNA, 12 bp, Artificial Sequence
  Oligonucleotide primer for the detection of SNP TSC0015234
ttgattttttgt

SEQ ID NO: 292497 - DNA, 12 bp, Artificial Sequence
  Oligonucleotide primer for the detection of SNP TSC0015235
ataacaaataca

SEQ ID NO: 292498 - DNA, 12 bp, Artificial Sequence
  Oligonucleotide primer for the detection of SNP TSC0015235
ataacgaataca

SEQ ID NO: 292499 - DNA, 12 bp, Artificial Sequence
  Oligonucleotide primer for the detection of SNP TSC0015235
tttaaagaaatc

SEQ ID NO: 292500 - DNA, 12 bp, Artificial Sequence
  Oligonucleotide primer for the detection of SNP TSC0015235
tccaaaaaaatc

SEQ ID NO: 292501 - DNA, 12 bp, Artificial Sequence
  Oligonucleotide primer for the detection of SNP TSC0015235
ggtggtgagtgt

SEQ ID NO: 292502 - DNA, 12 bp, Artificial Sequence
  Oligonucleotide primer for the detection of SNP TSC0015235
ggtggcgagtgt

SEQ ID NO: 292503 - DNA, 12 bp, Artificial Sequence
  Oligonucleotide primer for the detection of SNP TSC0015236
atccttataaat

SEQ ID NO: 292504 - DNA, 12 bp, Artificial Sequence
  Oligonucleotide primer for the detection of SNP TSC0015236
gttaggattttg

SEQ ID NO: 292505 - DNA, 12 bp, Artificial Sequence
  Oligonucleotide primer for the detection of SNP TSC0015236
attaaaattcta

SEQ ID NO: 292506 - DNA, 12 bp, Artificial Sequence
  Oligonucleotide primer for the detection of SNP TSC0015236
atttttatggat

SEQ ID NO: 292507 - DNA, 12 bp, Artificial Sequence
  Oligonucleotide primer for the detection of SNP TSC0015237
ctaactctacct

SEQ ID NO: 292508 - DNA, 12 bp, Artificial Sequence
  Oligonucleotide primer for the detection of SNP TSC0015237
acctcttaataa

SEQ ID NO: 292509 - DNA, 12 bp, Artificial Sequence
  Oligonucleotide primer for the detection of SNP TSC0015237
tggttttgtttt

SEQ ID NO: 292510 - DNA, 12 bp, Artificial Sequence
  Oligonucleotide primer for the detection of SNP TSC0015240
acataataacat

SEQ ID NO: 292511 - DNA, 12 bp, Artificial Sequence
  Oligonucleotide primer for the detection of SNP TSC0015240
ttgggatttagg

SEQ ID NO: 292512 - DNA, 12 bp, Artificial Sequence
  Oligonucleotide primer for the detection of SNP TSC0015240
ctaaaattcaaa

SEQ ID NO: 292513 - DNA, 12 bp, Artificial Sequence
  Oligonucleotide primer for the detection of SNP TSC0015240
gtatggtggtat

SEQ ID NO: 292514 - DNA, 12 bp, Artificial Sequence
  Oligonucleotide primer for the detection of SNP TSC0015245
caacatcacaaa

SEQ ID NO: 292515 - DNA, 12 bp, Artificial Sequence
  Oligonucleotide primer for the detection of SNP TSC0015245
caacatcacgaa

SEQ ID NO: 292516 - DNA, 12 bp, Artificial Sequence
  Oligonukleotid-Primer
caacgtcacaaa

SEQ ID NO: 292517 - DNA, 12 bp, Artificial Sequence
  Oligonucleotide primer for the detection of SNP TSC0015245
cgacatcacaaa

SEQ ID NO: 292518 - DNA, 12 bp, Artificial Sequence
  Oligonucleotide primer for the detection of SNP TSC0015245
caacgtcacgaa

SEQ ID NO: 292519 - DNA, 12 bp, Artificial Sequence
  Oligonucleotide primer for the detection of SNP TSC0015245
cgacatcacgaa

SEQ ID NO: 292520 - DNA, 12 bp, Artificial Sequence
  Oligonucleotide primer for the detection of SNP TSC0015245
cgacgtcacaaa

SEQ ID NO: 292521 - DNA, 12 bp, Artificial Sequence
  Oligonucleotide primer for the detection of SNP TSC0015245
cgacgtcacgaa

SEQ ID NO: 292522 - DNA, 12 bp, Artificial Sequence
  Oligonucleotide primer for the detection of SNP TSC0015245
ataaataggaag

SEQ ID NO: 292523 - DNA, 12 bp, Artificial Sequence
  Oligonucleotide primer for the detection of SNP TSC0015246
ctctttaataac

SEQ ID NO: 292524 - DNA, 12 bp, Artificial Sequence
  Oligonucleotide primer for the detection of SNP TSC0015246
ttaatttagttt

SEQ ID NO: 292525 - DNA, 12 bp, Artificial Sequence
  Oligonucleotide primer for the detection of SNP TSC0015246
ttttttaatggt

SEQ ID NO: 292526 - DNA, 12 bp, Artificial Sequence
  Oligonucleotide primer for the detection of SNP TSC0015246
ttttttaatggc

SEQ ID NO: 292527 - DNA, 12 bp, Artificial Sequence
  Oligonucleotide primer for the detection of SNP TSC0015248
tacattcatttt

SEQ ID NO: 292528 - DNA, 12 bp, Artificial Sequence
  Oligonucleotide primer for the detection of SNP TSC0015248
tacgttcatttt

SEQ ID NO: 292529 - DNA, 12 bp, Artificial Sequence
  Oligonucleotide primer for the detection of SNP TSC0015248
aattaagattta

SEQ ID NO: 292530 - DNA, 12 bp, Artificial Sequence
  Oligonucleotide primer for the detection of SNP TSC0015249
tatggtgttgtg

SEQ ID NO: 292531 - DNA, 12 bp, Artificial Sequence
  Oligonucleotide primer for the detection of SNP TSC0015249
tatggtgtcgtg

SEQ ID NO: 292532 - DNA, 12 bp, Artificial Sequence
  Oligonucleotide primer for the detection of SNP TSC0015249
cataatatcata

SEQ ID NO: 292533 - DNA, 12 bp, Artificial Sequence
  Oligonucleotide primer for the detection of SNP TSC0015249
cataatatcgta

SEQ ID NO: 292534 - DNA, 12 bp, Artificial Sequence
  Oligonucleotide primer for the detection of SNP TSC0015250
atcttttttctt

SEQ ID NO: 292535 - DNA, 12 bp, Artificial Sequence
  Oligonucleotide primer for the detection of SNP TSC0015250
tttttgggatga

SEQ ID NO: 292536 - DNA, 12 bp, Artificial Sequence
  Oligonucleotide primer for the detection of SNP TSC0015252
ttttgtatgttg

SEQ ID NO: 292537 - DNA, 12 bp, Artificial Sequence
  Oligonucleotide primer for the detection of SNP TSC0015253
tttttctcccct

SEQ ID NO: 292538 - DNA, 12 bp, Artificial Sequence
  Oligonucleotide primer for the detection of SNP TSC0015253
gtattgggtttg

SEQ ID NO: 292539 - DNA, 12 bp, Artificial Sequence
  Oligonucleotide primer for the detection of SNP TSC0015253
acattaaaccta

SEQ ID NO: 292540 - DNA, 12 bp, Artificial Sequence
  Oligonucleotide primer for the detection of SNP TSC0015256
atactaatatct

SEQ ID NO: 292541 - DNA, 12 bp, Artificial Sequence
  Oligonucleotide primer for the detection of SNP TSC0015256
aaaaaattattg

SEQ ID NO: 292542 - DNA, 12 bp, Artificial Sequence
  Oligonucleotide primer for the detection of SNP TSC0015256
gtgttggtgttt

SEQ ID NO: 292543 - DNA, 12 bp, Artificial Sequence
  Oligonucleotide primer for the detection of SNP TSC0015257
tttctataaaca

SEQ ID NO: 292544 - DNA, 12 bp, Artificial Sequence
  Oligonucleotide primer for the detection of SNP TSC0015257
tatagtgagatt

SEQ ID NO: 292545 - DNA, 12 bp, Artificial Sequence
  Oligonucleotide primer for the detection of SNP TSC0015257
tatagtgagatc

SEQ ID NO: 292546 - DNA, 12 bp, Artificial Sequence
  Oligonucleotide primer for the detection of SNP TSC0015257
cacaataaaacc

SEQ ID NO: 292547 - DNA, 12 bp, Artificial Sequence
  Oligonucleotide primer for the detection of SNP TSC0015257
ttttttgtagat

SEQ ID NO: 292548 - DNA, 12 bp, Artificial Sequence
  Oligonucleotide primer for the detection of SNP TSC0015260
aataacatttat

SEQ ID NO: 292549 - DNA, 12 bp, Artificial Sequence
  Oligonucleotide primer for the detection of SNP TSC0015260
ttgttttgggga

SEQ ID NO: 292550 - DNA, 12 bp, Artificial Sequence
  Oligonucleotide primer for the detection of SNP TSC0015260
gatggtatttgt

SEQ ID NO: 292551 - DNA, 12 bp, Artificial Sequence
  Oligonucleotide primer for the detection of SNP TSC0015261
tttaaacctata

SEQ ID NO: 292552 - DNA, 12 bp, Artificial Sequence
  Oligonucleotide primer for the detection of SNP TSC0015261
ctcttattttat

SEQ ID NO: 292553 - DNA, 12 bp, Artificial Sequence
  Oligonucleotide primer for the detection of SNP TSC0015261
tttgagtttgtg

SEQ ID NO: 292554 - DNA, 12 bp, Artificial Sequence
  Oligonucleotide primer for the detection of SNP TSC0015262
aacctcaataaa

SEQ ID NO: 292555 - DNA, 12 bp, Artificial Sequence
  Oligonucleotide primer for the detection of SNP TSC0015262
ggtttagtggtt

SEQ ID NO: 292556 - DNA, 12 bp, Artificial Sequence
  Oligonucleotide primer for the detection of SNP TSC0015262
aacccaataact

SEQ ID NO: 292557 - DNA, 12 bp, Artificial Sequence
  Oligonucleotide primer for the detection of SNP TSC0015262
aattttagtgaa

SEQ ID NO: 292558 - DNA, 12 bp, Artificial Sequence
  Oligonucleotide primer for the detection of SNP TSC0015263
acacccaactaa

SEQ ID NO: 292559 - DNA, 12 bp, Artificial Sequence
  Oligonucleotide primer for the detection of SNP TSC0015263
acacccgactaa

SEQ ID NO: 292560 - DNA, 12 bp, Artificial Sequence
  Oligonucleotide primer for the detection of SNP TSC0015263
tttattataaat

SEQ ID NO: 292561 - DNA, 12 bp, Artificial Sequence
  Oligonucleotide primer for the detection of SNP TSC0015263
ctactacaaata

SEQ ID NO: 292562 - DNA, 12 bp, Artificial Sequence
  Oligonucleotide primer for the detection of SNP TSC0015263
ttggttaatttt

SEQ ID NO: 292563 - DNA, 12 bp, Artificial Sequence
  Oligonucleotide primer for the detection of SNP TSC0015263
tcggttaatttt

SEQ ID NO: 292564 - DNA, 12 bp, Artificial Sequence
  Oligonucleotide primer for the detection of SNP TSC0015264
attattcaaacc

SEQ ID NO: 292565 - DNA, 12 bp, Artificial Sequence
  Oligonucleotide primer for the detection of SNP TSC0015266
tctcaaaaatat

SEQ ID NO: 292566 - DNA, 12 bp, Artificial Sequence
  Oligonucleotide primer for the detection of SNP TSC0015266
tgtatttaaata

SEQ ID NO: 292567 - DNA, 12 bp, Artificial Sequence
  Oligonucleotide primer for the detection of SNP TSC0015267
ttcctctaccca

SEQ ID NO: 292568 - DNA, 12 bp, Artificial Sequence
  Oligonucleotide primer for the detection of SNP TSC0015267
gttttataagga

SEQ ID NO: 292569 - DNA, 12 bp, Artificial Sequence
  Oligonucleotide primer for the detection of SNP TSC0015267
atcctataaaaa

SEQ ID NO: 292570 - DNA, 12 bp, Artificial Sequence
  Oligonucleotide primer for the detection of SNP TSC0015267
ttttgtttattt

SEQ ID NO: 292571 - DNA, 12 bp, Artificial Sequence
  Oligonucleotide primer for the detection of SNP TSC0015267
ttttgtttattc

SEQ ID NO: 292572 - DNA, 12 bp, Artificial Sequence
  Oligonucleotide primer for the detection of SNP TSC0015268
caataacatccc

SEQ ID NO: 292573 - DNA, 12 bp, Artificial Sequence
  Oligonucleotide primer for the detection of SNP TSC0015268
aagggattgtgg

SEQ ID NO: 292574 - DNA, 12 bp, Artificial Sequence
  Oligonucleotide primer for the detection of SNP TSC0015268
aaaaaactataa

SEQ ID NO: 292575 - DNA, 12 bp, Artificial Sequence
  Oligonucleotide primer for the detection of SNP TSC0015268
tagtgatatttt

SEQ ID NO: 292576 - DNA, 12 bp, Artificial Sequence
  Oligonucleotide primer for the detection of SNP TSC0015269
aaatctcactct

SEQ ID NO: 292577 - DNA, 12 bp, Artificial Sequence
  Oligonucleotide primer for the detection of SNP TSC0015269
ttagtttgggta

SEQ ID NO: 292578 - DNA, 12 bp, Artificial Sequence
  Oligonucleotide primer for the detection of SNP TSC0015270
atataactaccc

SEQ ID NO: 292579 - DNA, 12 bp, Artificial Sequence
  Oligonucleotide primer for the detection of SNP TSC0015270
gtgttttttagg

SEQ ID NO: 292580 - DNA, 12 bp, Artificial Sequence
  Oligonucleotide primer for the detection of SNP TSC0015271
ttaagtttgaaa

SEQ ID NO: 292581 - DNA, 12 bp, Artificial Sequence
  Oligonucleotide primer for the detection of SNP TSC0015272
aatataaacaat

SEQ ID NO: 292582 - DNA, 12 bp, Artificial Sequence
  Oligonucleotide primer for the detection of SNP TSC0015272
aatataaacgat

SEQ ID NO: 292583 - DNA, 12 bp, Artificial Sequence
  Oligonucleotide primer for the detection of SNP TSC0015272
aataatttggta

SEQ ID NO: 292584 - DNA, 12 bp, Artificial Sequence
  Oligonucleotide primer for the detection of SNP TSC0015272
aacaatttaaca

SEQ ID NO: 292585 - DNA, 12 bp, Artificial Sequence
  Oligonucleotide primer for the detection of SNP TSC0015272
ggtgtgaatgat

SEQ ID NO: 292586 - DNA, 12 bp, Artificial Sequence
  Oligonucleotide primer for the detection of SNP TSC0015272
ggtgtgaacgat

SEQ ID NO: 292587 - DNA, 12 bp, Artificial Sequence
  Oligonucleotide primer for the detection of SNP TSC0015273
cacactcaaaac

SEQ ID NO: 292588 - DNA, 12 bp, Artificial Sequence
  Oligonucleotide primer for the detection of SNP TSC0015273
cgcactcaaaac

SEQ ID NO: 292589 - DNA, 12 bp, Artificial Sequence
  Oligonucleotide primer for the detection of SNP TSC0015273
gaagatgtgggt

SEQ ID NO: 292590 - DNA, 12 bp, Artificial Sequence
  Oligonucleotide primer for the detection of SNP TSC0015273
gaagacgtgggt

SEQ ID NO: 292591 - DNA, 12 bp, Artificial Sequence
  Oligonucleotide primer for the detection of SNP TSC0015273
gaagatgcgggt

SEQ ID NO: 292592 - DNA, 12 bp, Artificial Sequence
  Oligonucleotide primer for the detection of SNP TSC0015273
gaagacgcgggt

SEQ ID NO: 292593 - DNA, 12 bp, Artificial Sequence
  Oligonucleotide primer for the detection of SNP TSC0015273
taaaaacacaaa

SEQ ID NO: 292594 - DNA, 12 bp, Artificial Sequence
  Oligonucleotide primer for the detection of SNP TSC0015273
taaaaacacgaa

SEQ ID NO: 292595 - DNA, 12 bp, Artificial Sequence
  Oligonucleotide primer for the detection of SNP TSC0015273
taaaaacgcaaa

SEQ ID NO: 292596 - DNA, 12 bp, Artificial Sequence
  Oligonucleotide primer for the detection of SNP TSC0015273
taaaaacgcgaa

SEQ ID NO: 292597 - DNA, 12 bp, Artificial Sequence
  Oligonucleotide primer for the detection of SNP TSC0015273
tgtatttaaagt

SEQ ID NO: 292598 - DNA, 12 bp, Artificial Sequence
  Oligonucleotide primer for the detection of SNP TSC0015273
cgtatttaaagt

SEQ ID NO: 292599 - DNA, 12 bp, Artificial Sequence
  Oligonucleotide primer for the detection of SNP TSC0015273
tgtatttaaagc

SEQ ID NO: 292600 - DNA, 12 bp, Artificial Sequence
  Oligonucleotide primer for the detection of SNP TSC0015273
cgtatttaaagc

SEQ ID NO: 292601 - DNA, 12 bp, Artificial Sequence
  Oligonucleotide primer for the detection of SNP TSC0015274
aattaaataaac

SEQ ID NO: 292602 - DNA, 12 bp, Artificial Sequence
  Oligonucleotide primer for the detection of SNP TSC0015274
ggttgagtgagt

SEQ ID NO: 292603 - DNA, 12 bp, Artificial Sequence
  Oligonucleotide primer for the detection of SNP TSC0015275
ttaggtttaagt

SEQ ID NO: 292604 - DNA, 12 bp, Artificial Sequence
  Oligonucleotide primer for the detection of SNP TSC0015275
ccaaattcaaac

SEQ ID NO: 292605 - DNA, 12 bp, Artificial Sequence
  Oligonucleotide primer for the detection of SNP TSC0015276
tacaatatatca

SEQ ID NO: 292606 - DNA, 12 bp, Artificial Sequence
  Oligonucleotide primer for the detection of SNP TSC0015276
taagtgatgttt

SEQ ID NO: 292607 - DNA, 12 bp, Artificial Sequence
  Oligonucleotide primer for the detection of SNP TSC0015276
ttaaataatacc

SEQ ID NO: 292608 - DNA, 12 bp, Artificial Sequence
  Oligonucleotide primer for the detection of SNP TSC0015276
ttataatgtgtt

SEQ ID NO: 292609 - DNA, 12 bp, Artificial Sequence
  Oligonucleotide primer for the detection of SNP TSC0015277
caaaaaatattt

SEQ ID NO: 292610 - DNA, 12 bp, Artificial Sequence
  Oligonucleotide primer for the detection of SNP TSC0015277
ttatagttaggg

SEQ ID NO: 292611 - DNA, 12 bp, Artificial Sequence
  Oligonucleotide primer for the detection of SNP TSC0015277
tcacaaccaaaa

SEQ ID NO: 292612 - DNA, 12 bp, Artificial Sequence
  Oligonucleotide primer for the detection of SNP TSC0015277
taaaaggtattt

SEQ ID NO: 292613 - DNA, 12 bp, Artificial Sequence
  Oligonucleotide primer for the detection of SNP TSC0015279
cttcctcactat

SEQ ID NO: 292614 - DNA, 12 bp, Artificial Sequence
  Oligonucleotide primer for the detection of SNP TSC0015279
tagttgttttgt

SEQ ID NO: 292615 - DNA, 12 bp, Artificial Sequence
  Oligonucleotide primer for the detection of SNP TSC0015279
caactactctac

SEQ ID NO: 292616 - DNA, 12 bp, Artificial Sequence
  Oligonucleotide primer for the detection of SNP TSC0015280
ggttttttttag

SEQ ID NO: 292617 - DNA, 12 bp, Artificial Sequence
  Oligonucleotide primer for the detection of SNP TSC0015280
aacttcctccaa

SEQ ID NO: 292618 - DNA, 12 bp, Artificial Sequence
  Oligonucleotide primer for the detection of SNP TSC0015280
aaaaggatagag

SEQ ID NO: 292619 - DNA, 12 bp, Artificial Sequence
  Oligonucleotide primer for the detection of SNP TSC0015281
ttcaactaataa

SEQ ID NO: 292620 - DNA, 12 bp, Artificial Sequence
  Oligonucleotide primer for the detection of SNP TSC0015281
taagggaggttt

SEQ ID NO: 292621 - DNA, 12 bp, Artificial Sequence
  Oligonucleotide primer for the detection of SNP TSC0015281
taaaaaaaaccc

SEQ ID NO: 292622 - DNA, 12 bp, Artificial Sequence
  Oligonucleotide primer for the detection of SNP TSC0015281
tttagttgataa

SEQ ID NO: 292623 - DNA, 12 bp, Artificial Sequence
  Oligonucleotide primer for the detection of SNP TSC0015282
tgaattaagatt

SEQ ID NO: 292624 - DNA, 12 bp, Artificial Sequence
  Oligonucleotide primer for the detection of SNP TSC0015282
actaaattaaaa

SEQ ID NO: 292625 - DNA, 12 bp, Artificial Sequence
  Oligonucleotide primer for the detection of SNP TSC0015282
ttttgtgtaaag

SEQ ID NO: 292626 - DNA, 12 bp, Artificial Sequence
  Oligonucleotide primer for the detection of SNP TSC0015283
catcattttccc

SEQ ID NO: 292627 - DNA, 12 bp, Artificial Sequence
  Oligonucleotide primer for the detection of SNP TSC0015283
ttttgtattagg

SEQ ID NO: 292628 - DNA, 12 bp, Artificial Sequence
  Oligonucleotide primer for the detection of SNP TSC0015284
catatcccaacc

SEQ ID NO: 292629 - DNA, 12 bp, Artificial Sequence
  Oligonucleotide primer for the detection of SNP TSC0015284
cccctaacctca

SEQ ID NO: 292630 - DNA, 12 bp, Artificial Sequence
  Oligonucleotide primer for the detection of SNP TSC0015284
tatgttttagtt

SEQ ID NO: 292631 - DNA, 12 bp, Artificial Sequence
  Oligonucleotide primer for the detection of SNP TSC0015285
gttgtgggagat

SEQ ID NO: 292632 - DNA, 12 bp, Artificial Sequence
  Oligonucleotide primer for the detection of SNP TSC0015285
attgggaggaga

SEQ ID NO: 292633 - DNA, 12 bp, Artificial Sequence
  Oligonucleotide primer for the detection of SNP TSC0015286
aacataatatac

SEQ ID NO: 292634 - DNA, 12 bp, Artificial Sequence
  Oligonucleotide primer for the detection of SNP TSC0015286
aacgtaatatac

SEQ ID NO: 292635 - DNA, 12 bp, Artificial Sequence
  Oligonucleotide primer for the detection of SNP TSC0015286
tgaaataggaaa

SEQ ID NO: 292636 - DNA, 12 bp, Artificial Sequence
  Oligonucleotide primer for the detection of SNP TSC0015287
gaaaaaacaaca

SEQ ID NO: 292637 - DNA, 12 bp, Artificial Sequence
  Oligonucleotide primer for the detection of SNP TSC0015287
atatttttagga

SEQ ID NO: 292638 - DNA, 12 bp, Artificial Sequence
  Oligonucleotide primer for the detection of SNP TSC0015287
acatctctaaaa

SEQ ID NO: 292639 - DNA, 12 bp, Artificial Sequence
  Oligonucleotide primer for the detection of SNP TSC0015287
tgggagggtagt

SEQ ID NO: 292640 - DNA, 12 bp, Artificial Sequence
  Oligonucleotide primer for the detection of SNP TSC0015287
cgggagggtagt

SEQ ID NO: 292641 - DNA, 12 bp, Artificial Sequence
  Oligonucleotide primer for the detection of SNP TSC0015288
tccttctcccca

SEQ ID NO: 292642 - DNA, 12 bp, Artificial Sequence
  Oligonucleotide primer for the detection of SNP TSC0015288
taatagtggaaa

SEQ ID NO: 292643 - DNA, 12 bp, Artificial Sequence
  Oligonucleotide primer for the detection of SNP TSC0015288
caacaataaaaa

SEQ ID NO: 292644 - DNA, 12 bp, Artificial Sequence
  Oligonucleotide primer for the detection of SNP TSC0015288
tttttttttatc

SEQ ID NO: 292645 - DNA, 12 bp, Artificial Sequence
  Oligonucleotide primer for the detection of SNP TSC0015289
acccaacaacaa

SEQ ID NO: 292646 - DNA, 12 bp, Artificial Sequence
  Oligonucleotide primer for the detection of SNP TSC0015289
gattatgtatga

SEQ ID NO: 292647 - DNA, 12 bp, Artificial Sequence
  Oligonucleotide primer for the detection of SNP TSC0015290
actatttttatt

SEQ ID NO: 292648 - DNA, 12 bp, Artificial Sequence
  Oligonucleotide primer for the detection of SNP TSC0015290
attgtttttgtt

SEQ ID NO: 292649 - DNA, 12 bp, Artificial Sequence
  Oligonucleotide primer for the detection of SNP TSC0015292
aaatcctatacc

SEQ ID NO: 292650 - DNA, 12 bp, Artificial Sequence
  Oligonucleotide primer for the detection of SNP TSC0015292
tatttgtttaag

SEQ ID NO: 292651 - DNA, 12 bp, Artificial Sequence
  Oligonucleotide primer for the detection of SNP TSC0015293
ctaaaataaaac

SEQ ID NO: 292652 - DNA, 12 bp, Artificial Sequence
  Oligonucleotide primer for the detection of SNP TSC0015293
atattagttgga

SEQ ID NO: 292653 - DNA, 12 bp, Artificial Sequence
  Oligonucleotide primer for the detection of SNP TSC0015294
tctattttaaat

SEQ ID NO: 292654 - DNA, 12 bp, Artificial Sequence
  Oligonucleotide primer for the detection of SNP TSC0015294
ataatttaggag

SEQ ID NO: 292655 - DNA, 12 bp, Artificial Sequence
  Oligonucleotide primer for the detection of SNP TSC0015296
taaatttcaact

SEQ ID NO: 292656 - DNA, 12 bp, Artificial Sequence
  Oligonucleotide primer for the detection of SNP TSC0015296
ttgtatttttta

SEQ ID NO: 292657 - DNA, 12 bp, Artificial Sequence
  Oligonucleotide primer for the detection of SNP TSC0015296
tcgtatttttta

SEQ ID NO: 292658 - DNA, 12 bp, Artificial Sequence
  Oligonucleotide primer for the detection of SNP TSC0015297
tatcttcaactc

SEQ ID NO: 292659 - DNA, 12 bp, Artificial Sequence
  Oligonucleotide primer for the detection of SNP TSC0015297
tgtgtattttta

SEQ ID NO: 292660 - DNA, 12 bp, Artificial Sequence
  Oligonucleotide primer for the detection of SNP TSC0015298
ttaaactaactt

SEQ ID NO: 292661 - DNA, 12 bp, Artificial Sequence
  Oligonucleotide primer for the detection of SNP TSC0015298
taattttgaagg

SEQ ID NO: 292662 - DNA, 12 bp, Artificial Sequence
  Oligonucleotide primer for the detection of SNP TSC0015298
caattttaaaaa

SEQ ID NO: 292663 - DNA, 12 bp, Artificial Sequence
  Oligonucleotide primer for the detection of SNP TSC0015298
ttgaattgattt

SEQ ID NO: 292664 - DNA, 12 bp, Artificial Sequence
  Oligonucleotide primer for the detection of SNP TSC0015299
cataacatcaaa

SEQ ID NO: 292665 - DNA, 12 bp, Artificial Sequence
  Oligonucleotide primer for the detection of SNP TSC0015299
cataacatcgaa

SEQ ID NO: 292666 - DNA, 12 bp, Artificial Sequence
  Oligonucleotide primer for the detection of SNP TSC0015299
tgggaattgatt

SEQ ID NO: 292667 - DNA, 12 bp, Artificial Sequence
  Oligonucleotide primer for the detection of SNP TSC0015299
tgggaatcgatt

SEQ ID NO: 292668 - DNA, 12 bp, Artificial Sequence
  Oligonucleotide primer for the detection of SNP TSC0015299
taaaaatcaatc

SEQ ID NO: 292669 - DNA, 12 bp, Artificial Sequence
  Oligonucleotide primer for the detection of SNP TSC0015299
taaaaatcgatc

SEQ ID NO: 292670 - DNA, 12 bp, Artificial Sequence
  Oligonukleotid-Primer
tatggtattgag

SEQ ID NO: 292671 - DNA, 12 bp, Artificial Sequence
  Oligonucleotide primer for the detection of SNP TSC0015299
tatggtatcgag

SEQ ID NO: 292672 - DNA, 12 bp, Artificial Sequence
  Oligonucleotide primer for the detection of SNP TSC0015300
aaaaaacataat

SEQ ID NO: 292673 - DNA, 12 bp, Artificial Sequence
  Oligonucleotide primer for the detection of SNP TSC0015300
aaaaaacgtaat

SEQ ID NO: 292674 - DNA, 12 bp, Artificial Sequence
  Oligonucleotide primer for the detection of SNP TSC0015300
gttagatagtta

SEQ ID NO: 292675 - DNA, 12 bp, Artificial Sequence
  Oligonucleotide primer for the detection of SNP TSC0015301
attcttacaact

SEQ ID NO: 292676 - DNA, 12 bp, Artificial Sequence
  Oligonucleotide primer for the detection of SNP TSC0015301
aaatttaaagaa

SEQ ID NO: 292677 - DNA, 12 bp, Artificial Sequence
  Oligonucleotide primer for the detection of SNP TSC0015302
taatattcattt

SEQ ID NO: 292678 - DNA, 12 bp, Artificial Sequence
  Oligonucleotide primer for the detection of SNP TSC0015302
ttttttgtgtaa

SEQ ID NO: 292679 - DNA, 12 bp, Artificial Sequence
  Oligonucleotide primer for the detection of SNP TSC0015303
acatctcttttt

SEQ ID NO: 292680 - DNA, 12 bp, Artificial Sequence
  Oligonucleotide primer for the detection of SNP TSC0015303
gtggttattttt

SEQ ID NO: 292681 - DNA, 12 bp, Artificial Sequence
  Oligonucleotide primer for the detection of SNP TSC0015303
taactatttcta

SEQ ID NO: 292682 - DNA, 12 bp, Artificial Sequence
  Oligonucleotide primer for the detection of SNP TSC0015304
tttatacatttt

SEQ ID NO: 292683 - DNA, 12 bp, Artificial Sequence
  Oligonucleotide primer for the detection of SNP TSC0015304
tttatacgtttt

SEQ ID NO: 292684 - DNA, 12 bp, Artificial Sequence
  Oligonucleotide primer for the detection of SNP TSC0015304
tttagttagaga

SEQ ID NO: 292685 - DNA, 12 bp, Artificial Sequence
  Oligonucleotide primer for the detection of SNP TSC0015305
tatgaatttaga

SEQ ID NO: 292686 - DNA, 12 bp, Artificial Sequence
  Oligonucleotide primer for the detection of SNP TSC0015305
tataaacttaaa

SEQ ID NO: 292687 - DNA, 12 bp, Artificial Sequence
  Oligonucleotide primer for the detection of SNP TSC0015305
gaaaagttggga

SEQ ID NO: 292688 - DNA, 12 bp, Artificial Sequence
  Oligonucleotide primer for the detection of SNP TSC0015306
cctcttaaacac

SEQ ID NO: 292689 - DNA, 12 bp, Artificial Sequence
  Oligonucleotide primer for the detection of SNP TSC0015306
tttttttgaaga

SEQ ID NO: 292690 - DNA, 12 bp, Artificial Sequence
  Oligonucleotide primer for the detection of SNP TSC0015307
aaaacttaatca

SEQ ID NO: 292691 - DNA, 12 bp, Artificial Sequence
  Oligonucleotide primer for the detection of SNP TSC0015307
aaaacttaatcg

SEQ ID NO: 292692 - DNA, 12 bp, Artificial Sequence
  Oligonucleotide primer for the detection of SNP TSC0015307
tattaatttgat

SEQ ID NO: 292693 - DNA, 12 bp, Artificial Sequence
  Oligonucleotide primer for the detection of SNP TSC0015307
tattaacttaac

SEQ ID NO: 292694 - DNA, 12 bp, Artificial Sequence
  Oligonucleotide primer for the detection of SNP TSC0015307
agggtttaattg

SEQ ID NO: 292695 - DNA, 12 bp, Artificial Sequence
  Oligonucleotide primer for the detection of SNP TSC0015307
agggtttaatcg

SEQ ID NO: 292696 - DNA, 12 bp, Artificial Sequence
  Oligonucleotide primer for the detection of SNP TSC0015308
caataaatttta

SEQ ID NO: 292697 - DNA, 12 bp, Artificial Sequence
  Oligonucleotide primer for the detection of SNP TSC0015308
aaatatgtatgt

SEQ ID NO: 292698 - DNA, 12 bp, Artificial Sequence
  Oligonucleotide primer for the detection of SNP TSC0015308
atatatatataa

SEQ ID NO: 292699 - DNA, 12 bp, Artificial Sequence
  Oligonucleotide primer for the detection of SNP TSC0015308
taatggattttg

SEQ ID NO: 292700 - DNA, 12 bp, Artificial Sequence
  Oligonucleotide primer for the detection of SNP TSC0015309
actctaacccct

SEQ ID NO: 292701 - DNA, 12 bp, Artificial Sequence
  Oligonucleotide primer for the detection of SNP TSC0015309
taatgatttgta

SEQ ID NO: 292702 - DNA, 12 bp, Artificial Sequence
  Oligonucleotide primer for the detection of SNP TSC0015310
caaattattaac

SEQ ID NO: 292703 - DNA, 12 bp, Artificial Sequence
  Oligonucleotide primer for the detection of SNP TSC0015310
taaaggggttag

SEQ ID NO: 292704 - DNA, 12 bp, Artificial Sequence
  Oligonucleotide primer for the detection of SNP TSC0015311
aaaaattttatt

SEQ ID NO: 292705 - DNA, 12 bp, Artificial Sequence
  Oligonucleotide primer for the detection of SNP TSC0015312
ttttaaaataaa

SEQ ID NO: 292706 - DNA, 12 bp, Artificial Sequence
  Oligonucleotide primer for the detection of SNP TSC0015312
aagatatagtag

SEQ ID NO: 292707 - DNA, 12 bp, Artificial Sequence
  Oligonucleotide primer for the detection of SNP TSC0015313
aaattcaacttt

SEQ ID NO: 292708 - DNA, 12 bp, Artificial Sequence
  Oligonucleotide primer for the detection of SNP TSC0015313
gtaaatagtgag

SEQ ID NO: 292709 - DNA, 12 bp, Artificial Sequence
  Oligonucleotide primer for the detection of SNP TSC0015314
aaaccaataaat

SEQ ID NO: 292710 - DNA, 12 bp, Artificial Sequence
  Oligonucleotide primer for the detection of SNP TSC0015314
aaaccgataaat

SEQ ID NO: 292711 - DNA, 12 bp, Artificial Sequence
  Oligonucleotide primer for the detection of SNP TSC0015314
ttgaaaatattg

SEQ ID NO: 292712 - DNA, 12 bp, Artificial Sequence
  Oligonucleotide primer for the detection of SNP TSC0015314
ttaaaaacacta

SEQ ID NO: 292713 - DNA, 12 bp, Artificial Sequence
  Oligonucleotide primer for the detection of SNP TSC0015314
gggttggtgggt

SEQ ID NO: 292714 - DNA, 12 bp, Artificial Sequence
  Oligonucleotide primer for the detection of SNP TSC0015314
gggtcggtgggt

SEQ ID NO: 292715 - DNA, 12 bp, Artificial Sequence
  Oligonucleotide primer for the detection of SNP TSC0015318
atttaaaaacaa

SEQ ID NO: 292716 - DNA, 12 bp, Artificial Sequence
  Oligonucleotide primer for the detection of SNP TSC0015318
gaatttaaggta

SEQ ID NO: 292717 - DNA, 12 bp, Artificial Sequence
  Oligonucleotide primer for the detection of SNP TSC0015318
atttggaaataa

SEQ ID NO: 292718 - DNA, 12 bp, Artificial Sequence
  Oligonucleotide primer for the detection of SNP TSC0015319
taaattttaata

SEQ ID NO: 292719 - DNA, 12 bp, Artificial Sequence
  Oligonucleotide primer for the detection of SNP TSC0015319
atattttttgtt

SEQ ID NO: 292720 - DNA, 12 bp, Artificial Sequence
  Oligonucleotide primer for the detection of SNP TSC0015319
atactttttatc

SEQ ID NO: 292721 - DNA, 12 bp, Artificial Sequence
  Oligonucleotide primer for the detection of SNP TSC0015319
taggttttaata

SEQ ID NO: 292722 - DNA, 12 bp, Artificial Sequence
  Oligonucleotide primer for the detection of SNP TSC0015321
accccaataaat

SEQ ID NO: 292723 - DNA, 12 bp, Artificial Sequence
  Oligonucleotide primer for the detection of SNP TSC0015321
gaggtatttata

SEQ ID NO: 292724 - DNA, 12 bp, Artificial Sequence
  Oligonucleotide primer for the detection of SNP TSC0015322
aaatctcccaaa

SEQ ID NO: 292725 - DNA, 12 bp, Artificial Sequence
  Oligonucleotide primer for the detection of SNP TSC0015322
tataataagagg

SEQ ID NO: 292726 - DNA, 12 bp, Artificial Sequence
  Oligonucleotide primer for the detection of SNP TSC0015322
tttaagtttttt

SEQ ID NO: 292727 - DNA, 12 bp, Artificial Sequence
  Oligonucleotide primer for the detection of SNP TSC0015323
tctctaccttcc

SEQ ID NO: 292728 - DNA, 12 bp, Artificial Sequence
  Oligonucleotide primer for the detection of SNP TSC0015323
aatatagaaaaa

SEQ ID NO: 292729 - DNA, 12 bp, Artificial Sequence
  Oligonucleotide primer for the detection of SNP TSC0015324
aaaaacacttcc

SEQ ID NO: 292730 - DNA, 12 bp, Artificial Sequence
  Oligonucleotide primer for the detection of SNP TSC0015324
tttgtgttattt

SEQ ID NO: 292731 - DNA, 12 bp, Artificial Sequence
  Oligonucleotide primer for the detection of SNP TSC0015325
accataacacac

SEQ ID NO: 292732 - DNA, 12 bp, Artificial Sequence
  Oligonucleotide primer for the detection of SNP TSC0015325
tgtgttttagag

SEQ ID NO: 292733 - DNA, 12 bp, Artificial Sequence
  Oligonucleotide primer for the detection of SNP TSC0015325
cgtgttttagag

SEQ ID NO: 292734 - DNA, 12 bp, Artificial Sequence
  Oligonucleotide primer for the detection of SNP TSC0015327
gaatttattttt

SEQ ID NO: 292735 - DNA, 12 bp, Artificial Sequence
  Oligonucleotide primer for the detection of SNP TSC0015327
aaattcaccttt

SEQ ID NO: 292736 - DNA, 12 bp, Artificial Sequence
  Oligonucleotide primer for the detection of SNP TSC0015327
aaagaaggtaaa

SEQ ID NO: 292737 - DNA, 12 bp, Artificial Sequence
  Oligonucleotide primer for the detection of SNP TSC0015328
aatacaaacatt

SEQ ID NO: 292738 - DNA, 12 bp, Artificial Sequence
  Oligonucleotide primer for the detection of SNP TSC0015328
aataaaatagga

SEQ ID NO: 292739 - DNA, 12 bp, Artificial Sequence
  Oligonucleotide primer for the detection of SNP TSC0015328
atgtaggtattt

SEQ ID NO: 292740 - DNA, 12 bp, Artificial Sequence
  Oligonucleotide primer for the detection of SNP TSC0015328
atgtaggtattc

SEQ ID NO: 292741 - DNA, 12 bp, Artificial Sequence
  Oligonucleotide primer for the detection of SNP TSC0015331
tccatttaaccc

SEQ ID NO: 292742 - DNA, 12 bp, Artificial Sequence
  Oligonucleotide primer for the detection of SNP TSC0015331
ggttaggattgg

SEQ ID NO: 292743 - DNA, 12 bp, Artificial Sequence
  Oligonucleotide primer for the detection of SNP TSC0015331
aactaaaattaa

SEQ ID NO: 292744 - DNA, 12 bp, Artificial Sequence
  Oligonucleotide primer for the detection of SNP TSC0015331
tttatttagttt

SEQ ID NO: 292745 - DNA, 12 bp, Artificial Sequence
  Oligonucleotide primer for the detection of SNP TSC0015332
tattaacaaact

SEQ ID NO: 292746 - DNA, 12 bp, Artificial Sequence
  Oligonucleotide primer for the detection of SNP TSC0015332
tttgatataagg

SEQ ID NO: 292747 - DNA, 12 bp, Artificial Sequence
  Oligonucleotide primer for the detection of SNP TSC0015335
aatttttaactt

SEQ ID NO: 292748 - DNA, 12 bp, Artificial Sequence
  Oligonucleotide primer for the detection of SNP TSC0015335
aaatatatatta

SEQ ID NO: 292749 - DNA, 12 bp, Artificial Sequence
  Oligonucleotide primer for the detection of SNP TSC0015336
caacaacctctc

SEQ ID NO: 292750 - DNA, 12 bp, Artificial Sequence
  Oligonucleotide primer for the detection of SNP TSC0015336
aaagtgtggtta

SEQ ID NO: 292751 - DNA, 12 bp, Artificial Sequence
  Oligonucleotide primer for the detection of SNP TSC0015339
atttccccactc

SEQ ID NO: 292752 - DNA, 12 bp, Artificial Sequence
  Oligonucleotide primer for the detection of SNP TSC0015339
ttgaattttata

SEQ ID NO: 292753 - DNA, 12 bp, Artificial Sequence
  Oligonucleotide primer for the detection of SNP TSC0015339
ttaaatcttaca

SEQ ID NO: 292754 - DNA, 12 bp, Artificial Sequence
  Oligonucleotide primer for the detection of SNP TSC0015340
caattaaactta

SEQ ID NO: 292755 - DNA, 12 bp, Artificial Sequence
  Oligonucleotide primer for the detection of SNP TSC0015340
ctaaaccttcct

SEQ ID NO: 292756 - DNA, 12 bp, Artificial Sequence
  Oligonucleotide primer for the detection of SNP TSC0015341
atcactaaacct

SEQ ID NO: 292757 - DNA, 12 bp, Artificial Sequence
  Oligonucleotide primer for the detection of SNP TSC0015341
tatattattaag

SEQ ID NO: 292758 - DNA, 12 bp, Artificial Sequence
  Oligonucleotide primer for the detection of SNP TSC0015342
taaaccatcata

SEQ ID NO: 292759 - DNA, 12 bp, Artificial Sequence
  Oligonucleotide primer for the detection of SNP TSC0015342
ttagttgtaggt

SEQ ID NO: 292760 - DNA, 12 bp, Artificial Sequence
  Oligonucleotide primer for the detection of SNP TSC0015342
ccaattacaaac

SEQ ID NO: 292761 - DNA, 12 bp, Artificial Sequence
  Oligonucleotide primer for the detection of SNP TSC0015345
aataataaacct

SEQ ID NO: 292762 - DNA, 12 bp, Artificial Sequence
  Oligonucleotide primer for the detection of SNP TSC0015345
ggttttatatgg

SEQ ID NO: 292763 - DNA, 12 bp, Artificial Sequence
  Oligonucleotide primer for the detection of SNP TSC0015346
taattatacttt

SEQ ID NO: 292764 - DNA, 12 bp, Artificial Sequence
  Oligonucleotide primer for the detection of SNP TSC0015346
aagtttatggaa

SEQ ID NO: 292765 - DNA, 12 bp, Artificial Sequence
  Oligonucleotide primer for the detection of SNP TSC0015348
aatatatacaac

SEQ ID NO: 292766 - DNA, 12 bp, Artificial Sequence
  Oligonucleotide primer for the detection of SNP TSC0015348
tttgtgtttgag

SEQ ID NO: 292767 - DNA, 12 bp, Artificial Sequence
  Oligonucleotide primer for the detection of SNP TSC0015349
ggaggttttatc

SEQ ID NO: 292768 - DNA, 12 bp, Artificial Sequence
  Oligonucleotide primer for the detection of SNP TSC0015349
aaaaaccttatc

SEQ ID NO: 292769 - DNA, 12 bp, Artificial Sequence
  Oligonucleotide primer for the detection of SNP TSC0015349
gatggagaggtt

SEQ ID NO: 292770 - DNA, 12 bp, Artificial Sequence
  Oligonucleotide primer for the detection of SNP TSC0015350
ctaactctatct

SEQ ID NO: 292771 - DNA, 12 bp, Artificial Sequence
  Oligonucleotide primer for the detection of SNP TSC0015350
ttataaagatga

SEQ ID NO: 292772 - DNA, 12 bp, Artificial Sequence
  Oligonucleotide primer for the detection of SNP TSC0015350
cacaaaaataaa

SEQ ID NO: 292773 - DNA, 12 bp, Artificial Sequence
  Oligonucleotide primer for the detection of SNP TSC0015350
ttagttttgttt

SEQ ID NO: 292774 - DNA, 12 bp, Artificial Sequence
  Oligonucleotide primer for the detection of SNP TSC0015353
cccaaaaatttc

SEQ ID NO: 292775 - DNA, 12 bp, Artificial Sequence
  Oligonucleotide primer for the detection of SNP TSC0015353
cccgaaaatttc

SEQ ID NO: 292776 - DNA, 12 bp, Artificial Sequence
  Oligonucleotide primer for the detection of SNP TSC0015353
attattggttta

SEQ ID NO: 292777 - DNA, 12 bp, Artificial Sequence
  Oligonucleotide primer for the detection of SNP TSC0015354
aaaaaatccttc

SEQ ID NO: 292778 - DNA, 12 bp, Artificial Sequence
  Oligonucleotide primer for the detection of SNP TSC0015354
tgtggatataag

SEQ ID NO: 292779 - DNA, 12 bp, Artificial Sequence
  Oligonucleotide primer for the detection of SNP TSC0015355
catccttctcca

SEQ ID NO: 292780 - DNA, 12 bp, Artificial Sequence
  Oligonucleotide primer for the detection of SNP TSC0015355
ttttgtatgggt

SEQ ID NO: 292781 - DNA, 12 bp, Artificial Sequence
  Oligonucleotide primer for the detection of SNP TSC0015355
ctctacataaat

SEQ ID NO: 292782 - DNA, 12 bp, Artificial Sequence
  Oligonucleotide primer for the detection of SNP TSC0015356
ctaaccctaaac

SEQ ID NO: 292783 - DNA, 12 bp, Artificial Sequence
  Oligonucleotide primer for the detection of SNP TSC0015356
tgtaaagatagg

SEQ ID NO: 292784 - DNA, 12 bp, Artificial Sequence
  Oligonucleotide primer for the detection of SNP TSC0015357
taaaatcttctt

SEQ ID NO: 292785 - DNA, 12 bp, Artificial Sequence
  Oligonucleotide primer for the detection of SNP TSC0015357
ggtattatattt

SEQ ID NO: 292786 - DNA, 12 bp, Artificial Sequence
  Oligonucleotide primer for the detection of SNP TSC0015357
aatactataccc

SEQ ID NO: 292787 - DNA, 12 bp, Artificial Sequence
  Oligonucleotide primer for the detection of SNP TSC0015357
tgggattttttt

SEQ ID NO: 292788 - DNA, 12 bp, Artificial Sequence
  Oligonucleotide primer for the detection of SNP TSC0015358
actatcttccta

SEQ ID NO: 292789 - DNA, 12 bp, Artificial Sequence
  Oligonucleotide primer for the detection of SNP TSC0015358
atataaaattaa

SEQ ID NO: 292790 - DNA, 12 bp, Artificial Sequence
  Oligonucleotide primer for the detection of SNP TSC0015359
ctattaactcta

SEQ ID NO: 292791 - DNA, 12 bp, Artificial Sequence
  Oligonucleotide primer for the detection of SNP TSC0015360
taaataaaaacc

SEQ ID NO: 292792 - DNA, 12 bp, Artificial Sequence
  Oligonucleotide primer for the detection of SNP TSC0015360
ttggagtattta

SEQ ID NO: 292793 - DNA, 12 bp, Artificial Sequence
  Oligonucleotide primer for the detection of SNP TSC0015363
aataacaataat

SEQ ID NO: 292794 - DNA, 12 bp, Artificial Sequence
  Oligonucleotide primer for the detection of SNP TSC0015363
atatttattgtt

SEQ ID NO: 292795 - DNA, 12 bp, Artificial Sequence
  Oligonucleotide primer for the detection of SNP TSC0015363
atatttattatt

SEQ ID NO: 292796 - DNA, 12 bp, Artificial Sequence
  Oligonucleotide primer for the detection of SNP TSC0015363
agtagtaatagt

SEQ ID NO: 292797 - DNA, 12 bp, Artificial Sequence
  Oligonucleotide primer for the detection of SNP TSC0015364
ccactacacaac

SEQ ID NO: 292798 - DNA, 12 bp, Artificial Sequence
  Oligonucleotide primer for the detection of SNP TSC0015364
gtaaattagtta

SEQ ID NO: 292799 - DNA, 12 bp, Artificial Sequence
  Oligonucleotide primer for the detection of SNP TSC0015366
ctactaccccac

SEQ ID NO: 292800 - DNA, 12 bp, Artificial Sequence
  Oligonucleotide primer for the detection of SNP TSC0015366
gtgggggatgga

SEQ ID NO: 292801 - DNA, 12 bp, Artificial Sequence
  Oligonucleotide primer for the detection of SNP TSC0015367
ctaccttaaaac

SEQ ID NO: 292802 - DNA, 12 bp, Artificial Sequence
  Oligonucleotide primer for the detection of SNP TSC0015367
taattgtgtata

SEQ ID NO: 292803 - DNA, 12 bp, Artificial Sequence
  Oligonukleotid-Primer
taattgcgtata

SEQ ID NO: 292804 - DNA, 12 bp, Artificial Sequence
  Oligonucleotide primer for the detection of SNP TSC0015368
cacccaacctaa

SEQ ID NO: 292805 - DNA, 12 bp, Artificial Sequence
  Oligonucleotide primer for the detection of SNP TSC0015368
ttttattgattt

SEQ ID NO: 292806 - DNA, 12 bp, Artificial Sequence
  Oligonucleotide primer for the detection of SNP TSC0015368
tcattaacccaa

SEQ ID NO: 292807 - DNA, 12 bp, Artificial Sequence
  Oligonucleotide primer for the detection of SNP TSC0015368
gatatttagttt

SEQ ID NO: 292808 - DNA, 12 bp, Artificial Sequence
  Oligonucleotide primer for the detection of SNP TSC0015369
atccttctacct

SEQ ID NO: 292809 - DNA, 12 bp, Artificial Sequence
  Oligonucleotide primer for the detection of SNP TSC0015369
agtgattttttt

SEQ ID NO: 292810 - DNA, 12 bp, Artificial Sequence
  Oligonucleotide primer for the detection of SNP TSC0015370
gggagggtggaa

SEQ ID NO: 292811 - DNA, 12 bp, Artificial Sequence
  Oligonukleotid-Primer
gattttttagag

SEQ ID NO: 292812 - DNA, 12 bp, Artificial Sequence
  Oligonucleotide primer for the detection of SNP TSC0015371
atcctccaaaaa

SEQ ID NO: 292813 - DNA, 12 bp, Artificial Sequence
  Oligonucleotide primer for the detection of SNP TSC0015371
aaaaatataaga

SEQ ID NO: 292814 - DNA, 12 bp, Artificial Sequence
  Oligonucleotide primer for the detection of SNP TSC0015372
tattatttattt

SEQ ID NO: 292815 - DNA, 12 bp, Artificial Sequence
  Oligonucleotide primer for the detection of SNP TSC0015372
catcactcatct

SEQ ID NO: 292816 - DNA, 12 bp, Artificial Sequence
  Oligonucleotide primer for the detection of SNP TSC0015372
agtgaagtaaga

SEQ ID NO: 292817 - DNA, 12 bp, Artificial Sequence
  Oligonucleotide primer for the detection of SNP TSC0015373
atccccatttta

SEQ ID NO: 292818 - DNA, 12 bp, Artificial Sequence
  Oligonucleotide primer for the detection of SNP TSC0015373
ggttttttgatt

SEQ ID NO: 292819 - DNA, 12 bp, Artificial Sequence
  Oligonucleotide primer for the detection of SNP TSC0015373
aacttcttaatc

SEQ ID NO: 292820 - DNA, 12 bp, Artificial Sequence
  Oligonucleotide primer for the detection of SNP TSC0015373
gacttcttaatc

SEQ ID NO: 292821 - DNA, 12 bp, Artificial Sequence
  Oligonucleotide primer for the detection of SNP TSC0015376
ttgggagtagtt

SEQ ID NO: 292822 - DNA, 12 bp, Artificial Sequence
  Oligonucleotide primer for the detection of SNP TSC0015376
ctaaaaacaact

SEQ ID NO: 292823 - DNA, 12 bp, Artificial Sequence
  Oligonucleotide primer for the detection of SNP TSC0015376
agtttagtggat

SEQ ID NO: 292824 - DNA, 12 bp, Artificial Sequence
  Oligonucleotide primer for the detection of SNP TSC0015377
ttaagaagttga

SEQ ID NO: 292825 - DNA, 12 bp, Artificial Sequence
  Oligonucleotide primer for the detection of SNP TSC0015377
tcaaaaaactaa

SEQ ID NO: 292826 - DNA, 12 bp, Artificial Sequence
  Oligonucleotide primer for the detection of SNP TSC0015377
aaataggttaag

SEQ ID NO: 292827 - DNA, 12 bp, Artificial Sequence
  Oligonucleotide primer for the detection of SNP TSC0015378
ctaaccatttct

SEQ ID NO: 292828 - DNA, 12 bp, Artificial Sequence
  Oligonucleotide primer for the detection of SNP TSC0015378
ctaaccgtttct

SEQ ID NO: 292829 - DNA, 12 bp, Artificial Sequence
  Oligonucleotide primer for the detection of SNP TSC0015378
atgattttagta

SEQ ID NO: 292830 - DNA, 12 bp, Artificial Sequence
  Oligonucleotide primer for the detection of SNP TSC0015378
acgattttagta

SEQ ID NO: 292831 - DNA, 12 bp, Artificial Sequence
  Oligonucleotide primer for the detection of SNP TSC0015379
acaaaaataaac

SEQ ID NO: 292832 - DNA, 12 bp, Artificial Sequence
  Oligonucleotide primer for the detection of SNP TSC0015379
tttttgatgttg

SEQ ID NO: 292833 - DNA, 12 bp, Artificial Sequence
  Oligonucleotide primer for the detection of SNP TSC0015380
catttaaaacca

SEQ ID NO: 292834 - DNA, 12 bp, Artificial Sequence
  Oligonucleotide primer for the detection of SNP TSC0015380
atttgttgagat

SEQ ID NO: 292835 - DNA, 12 bp, Artificial Sequence
  Oligonucleotide primer for the detection of SNP TSC0015380
attcgttgagat

SEQ ID NO: 292836 - DNA, 12 bp, Artificial Sequence
  Oligonucleotide primer for the detection of SNP TSC0015380
atttgtcgagat

SEQ ID NO: 292837 - DNA, 12 bp, Artificial Sequence
  Oligonucleotide primer for the detection of SNP TSC0015380
attcgtcgagat

SEQ ID NO: 292838 - DNA, 12 bp, Artificial Sequence
  Oligonucleotide primer for the detection of SNP TSC0015380
actcaccgaaac

SEQ ID NO: 292839 - DNA, 12 bp, Artificial Sequence
  Oligonucleotide primer for the detection of SNP TSC0015380
actcgccaaaac

SEQ ID NO: 292840 - DNA, 12 bp, Artificial Sequence
  Oligonucleotide primer for the detection of SNP TSC0015380
actcgccgaaac

SEQ ID NO: 292841 - DNA, 12 bp, Artificial Sequence
  Oligonucleotide primer for the detection of SNP TSC0015380
tatttagagtta

SEQ ID NO: 292842 - DNA, 12 bp, Artificial Sequence
  Oligonucleotide primer for the detection of SNP TSC0015381
aaaacactaaaa

SEQ ID NO: 292843 - DNA, 12 bp, Artificial Sequence
  Oligonucleotide primer for the detection of SNP TSC0015381
taaggataagtt

SEQ ID NO: 292844 - DNA, 12 bp, Artificial Sequence
  Oligonucleotide primer for the detection of SNP TSC0015381
taaaaacaaacc

SEQ ID NO: 292845 - DNA, 12 bp, Artificial Sequence
  Oligonucleotide primer for the detection of SNP TSC0015381
aaaatattgagg

SEQ ID NO: 292846 - DNA, 12 bp, Artificial Sequence
  Oligonucleotide primer for the detection of SNP TSC0015382
tcatttctaaaa

SEQ ID NO: 292847 - DNA, 12 bp, Artificial Sequence
  Oligonucleotide primer for the detection of SNP TSC0015382
tattatccttct

SEQ ID NO: 292848 - DNA, 12 bp, Artificial Sequence
  Oligonucleotide primer for the detection of SNP TSC0015383
ccaaaataaata

SEQ ID NO: 292849 - DNA, 12 bp, Artificial Sequence
  Oligonucleotide primer for the detection of SNP TSC0015383
tgagttttttgg

SEQ ID NO: 292850 - DNA, 12 bp, Artificial Sequence
  Oligonucleotide primer for the detection of SNP TSC0015383
taaattccctaa

SEQ ID NO: 292851 - DNA, 12 bp, Artificial Sequence
  Oligonucleotide primer for the detection of SNP TSC0015383
ttaggatggatg

SEQ ID NO: 292852 - DNA, 12 bp, Artificial Sequence
  Oligonucleotide primer for the detection of SNP TSC0015384
tcacaacaacct

SEQ ID NO: 292853 - DNA, 12 bp, Artificial Sequence
  Oligonucleotide primer for the detection of SNP TSC0015384
tcacgacaacct

SEQ ID NO: 292854 - DNA, 12 bp, Artificial Sequence
  Oligonucleotide primer for the detection of SNP TSC0015384
tgagtttgggag

SEQ ID NO: 292855 - DNA, 12 bp, Artificial Sequence
  Oligonucleotide primer for the detection of SNP TSC0015384
taaacctaaaaa

SEQ ID NO: 292856 - DNA, 12 bp, Artificial Sequence
  Oligonucleotide primer for the detection of SNP TSC0015384
ttatggtagttt

SEQ ID NO: 292857 - DNA, 12 bp, Artificial Sequence
  Oligonucleotide primer for the detection of SNP TSC0015384
ttacggtagttt

SEQ ID NO: 292858 - DNA, 12 bp, Artificial Sequence
  Oligonucleotide primer for the detection of SNP TSC0015385
catcttcacaac

SEQ ID NO: 292859 - DNA, 12 bp, Artificial Sequence
  Oligonucleotide primer for the detection of SNP TSC0015385
tatttagtaata

SEQ ID NO: 292860 - DNA, 12 bp, Artificial Sequence
  Oligonucleotide primer for the detection of SNP TSC0015386
ttatttagataa

SEQ ID NO: 292861 - DNA, 12 bp, Artificial Sequence
  Oligonucleotide primer for the detection of SNP TSC0015387
ttcaaaacatct

SEQ ID NO: 292862 - DNA, 12 bp, Artificial Sequence
  Oligonucleotide primer for the detection of SNP TSC0015387
ttagagaaaaaa

SEQ ID NO: 292863 - DNA, 12 bp, Artificial Sequence
  Oligonucleotide primer for the detection of SNP TSC0015389
ctaaactatatc

SEQ ID NO: 292864 - DNA, 12 bp, Artificial Sequence
  Oligonucleotide primer for the detection of SNP TSC0015389
tattgtattggg

SEQ ID NO: 292865 - DNA, 12 bp, Artificial Sequence
  Oligonucleotide primer for the detection of SNP TSC0015389
cactatactaaa

SEQ ID NO: 292866 - DNA, 12 bp, Artificial Sequence
  Oligonucleotide primer for the detection of SNP TSC0015389
ttgagttgtgtt

SEQ ID NO: 292867 - DNA, 12 bp, Artificial Sequence
  Oligonucleotide primer for the detection of SNP TSC0015390
tattctttcaac

SEQ ID NO: 292868 - DNA, 12 bp, Artificial Sequence
  Oligonucleotide primer for the detection of SNP TSC0015390
gatttttgtata

SEQ ID NO: 292869 - DNA, 12 bp, Artificial Sequence
  Oligonucleotide primer for the detection of SNP TSC0015391
taaaactcctcc

SEQ ID NO: 292870 - DNA, 12 bp, Artificial Sequence
  Oligonucleotide primer for the detection of SNP TSC0015391
ggagggaaggga

SEQ ID NO: 292871 - DNA, 12 bp, Artificial Sequence
  Oligonucleotide primer for the detection of SNP TSC0015392
atttaaaaaaat

SEQ ID NO: 292872 - DNA, 12 bp, Artificial Sequence
  Oligonucleotide primer for the detection of SNP TSC0015392
taaagtagtggt

SEQ ID NO: 292873 - DNA, 12 bp, Artificial Sequence
  Oligonucleotide primer for the detection of SNP TSC0015392
aaaacaataata

SEQ ID NO: 292874 - DNA, 12 bp, Artificial Sequence
  Oligonucleotide primer for the detection of SNP TSC0015392
atttgaaagaat

SEQ ID NO: 292875 - DNA, 12 bp, Artificial Sequence
  Oligonucleotide primer for the detection of SNP TSC0015394
tattataactat

SEQ ID NO: 292876 - DNA, 12 bp, Artificial Sequence
  Oligonucleotide primer for the detection of SNP TSC0015394
ttgtattttaaa

SEQ ID NO: 292877 - DNA, 12 bp, Artificial Sequence
  Oligonucleotide primer for the detection of SNP TSC0015395
ataatacttctc

SEQ ID NO: 292878 - DNA, 12 bp, Artificial Sequence
  Oligonucleotide primer for the detection of SNP TSC0015395
ttaattttgtta

SEQ ID NO: 292879 - DNA, 12 bp, Artificial Sequence
  Oligonucleotide primer for the detection of SNP TSC0015395
tcaattttatta

SEQ ID NO: 292880 - DNA, 12 bp, Artificial Sequence
  Oligonucleotide primer for the detection of SNP TSC0015395
atggtatttttt

SEQ ID NO: 292881 - DNA, 12 bp, Artificial Sequence
  Oligonucleotide primer for the detection of SNP TSC0015396
ccaaataaacca

SEQ ID NO: 292882 - DNA, 12 bp, Artificial Sequence
  Oligonucleotide primer for the detection of SNP TSC0015396
accccttctccc

SEQ ID NO: 292883 - DNA, 12 bp, Artificial Sequence
  Oligonucleotide primer for the detection of SNP TSC0015396
attaggtgggtt

SEQ ID NO: 292884 - DNA, 12 bp, Artificial Sequence
  Oligonucleotide primer for the detection of SNP TSC0015397
aatacgaaaatc

SEQ ID NO: 292885 - DNA, 12 bp, Artificial Sequence
  Oligonucleotide primer for the detection of SNP TSC0015397
ttttttgtttgg

SEQ ID NO: 292886 - DNA, 12 bp, Artificial Sequence
  Oligonucleotide primer for the detection of SNP TSC0015397
tctcctacctaa

SEQ ID NO: 292887 - DNA, 12 bp, Artificial Sequence
  Oligonucleotide primer for the detection of SNP TSC0015397
aatgtgggaatt

SEQ ID NO: 292888 - DNA, 12 bp, Artificial Sequence
  Oligonucleotide primer for the detection of SNP TSC0015397
aatgcgggaatt

SEQ ID NO: 292889 - DNA, 12 bp, Artificial Sequence
  Oligonucleotide primer for the detection of SNP TSC0015398
aaatattcaaca

SEQ ID NO: 292890 - DNA, 12 bp, Artificial Sequence
  Oligonucleotide primer for the detection of SNP TSC0015398
attatattttat

SEQ ID NO: 292891 - DNA, 12 bp, Artificial Sequence
  Oligonucleotide primer for the detection of SNP TSC0015398
atcatatttcat

SEQ ID NO: 292892 - DNA, 12 bp, Artificial Sequence
  Oligonukleotid-Primer
aaatgtttaata

SEQ ID NO: 292893 - DNA, 12 bp, Artificial Sequence
  Oligonucleotide primer for the detection of SNP TSC0015399
taaaaataatat

SEQ ID NO: 292894 - DNA, 12 bp, Artificial Sequence
  Oligonucleotide primer for the detection of SNP TSC0015399
tttttttgtagt

SEQ ID NO: 292895 - DNA, 12 bp, Artificial Sequence
  Oligonucleotide primer for the detection of SNP TSC0015399
tcctctataata

SEQ ID NO: 292896 - DNA, 12 bp, Artificial Sequence
  Oligonucleotide primer for the detection of SNP TSC0015399
aggaatggtatt

SEQ ID NO: 292897 - DNA, 12 bp, Artificial Sequence
  Oligonucleotide primer for the detection of SNP TSC0015400
ttaaaacattaa

SEQ ID NO: 292898 - DNA, 12 bp, Artificial Sequence
  Oligonucleotide primer for the detection of SNP TSC0015400
ttgtataaaaat

SEQ ID NO: 292899 - DNA, 12 bp, Artificial Sequence
  Oligonucleotide primer for the detection of SNP TSC0015400
ctacataaaaat

SEQ ID NO: 292900 - DNA, 12 bp, Artificial Sequence
  Oligonucleotide primer for the detection of SNP TSC0015400
ttagagtattga

SEQ ID NO: 292901 - DNA, 12 bp, Artificial Sequence
  Oligonucleotide primer for the detection of SNP TSC0015401
cataaaatcctc

SEQ ID NO: 292902 - DNA, 12 bp, Artificial Sequence
  Oligonucleotide primer for the detection of SNP TSC0015401
gggtatttttta

SEQ ID NO: 292903 - DNA, 12 bp, Artificial Sequence
  Oligonucleotide primer for the detection of SNP TSC0015401
aaacacctctca

SEQ ID NO: 292904 - DNA, 12 bp, Artificial Sequence
  Oligonucleotide primer for the detection of SNP TSC0015401
tataagattttt

SEQ ID NO: 292905 - DNA, 12 bp, Artificial Sequence
  Oligonucleotide primer for the detection of SNP TSC0015402
caaaaaatatct

SEQ ID NO: 292906 - DNA, 12 bp, Artificial Sequence
  Oligonucleotide primer for the detection of SNP TSC0015402
ttagagtatgta

SEQ ID NO: 292907 - DNA, 12 bp, Artificial Sequence
  Oligonucleotide primer for the detection of SNP TSC0015403
cctattcacatt

SEQ ID NO: 292908 - DNA, 12 bp, Artificial Sequence
  Oligonucleotide primer for the detection of SNP TSC0015403
cctattcacgtt

SEQ ID NO: 292909 - DNA, 12 bp, Artificial Sequence
  Oligonucleotide primer for the detection of SNP TSC0015403
attagaggtaaa

SEQ ID NO: 292910 - DNA, 12 bp, Artificial Sequence
  Oligonucleotide primer for the detection of SNP TSC0015404
caaacccaactt

SEQ ID NO: 292911 - DNA, 12 bp, Artificial Sequence
  Oligonucleotide primer for the detection of SNP TSC0015404
ggaggtaatgaa

SEQ ID NO: 292912 - DNA, 12 bp, Artificial Sequence
  Oligonucleotide primer for the detection of SNP TSC0015407
cttctaatttac

SEQ ID NO: 292913 - DNA, 12 bp, Artificial Sequence
  Oligonucleotide primer for the detection of SNP TSC0015407
gtatgtttttta

SEQ ID NO: 292914 - DNA, 12 bp, Artificial Sequence
  Oligonucleotide primer for the detection of SNP TSC0015407
gtacgtttttta

SEQ ID NO: 292915 - DNA, 12 bp, Artificial Sequence
  Oligonucleotide primer for the detection of SNP TSC0015408
ttaattttcaca

SEQ ID NO: 292916 - DNA, 12 bp, Artificial Sequence
  Oligonucleotide primer for the detection of SNP TSC0015408
ttcatccccaaa

SEQ ID NO: 292917 - DNA, 12 bp, Artificial Sequence
  Oligonucleotide primer for the detection of SNP TSC0015408
tttggtttttat

SEQ ID NO: 292918 - DNA, 12 bp, Artificial Sequence
  Oligonucleotide primer for the detection of SNP TSC0015413
atataaatcacc

SEQ ID NO: 292919 - DNA, 12 bp, Artificial Sequence
  Oligonucleotide primer for the detection of SNP TSC0015413
agggtggttagg

SEQ ID NO: 292920 - DNA, 12 bp, Artificial Sequence
  Oligonucleotide primer for the detection of SNP TSC0015414
aaaattctattt

SEQ ID NO: 292921 - DNA, 12 bp, Artificial Sequence
  Oligonucleotide primer for the detection of SNP TSC0015414
tttggagagatg

SEQ ID NO: 292922 - DNA, 12 bp, Artificial Sequence
  Oligonucleotide primer for the detection of SNP TSC0015415
aaaaaccatcac

SEQ ID NO: 292923 - DNA, 12 bp, Artificial Sequence
  Oligonucleotide primer for the detection of SNP TSC0015416
tacaataaactc

SEQ ID NO: 292924 - DNA, 12 bp, Artificial Sequence
  Oligonucleotide primer for the detection of SNP TSC0015416
agtagatatggg

SEQ ID NO: 292925 - DNA, 12 bp, Artificial Sequence
  Oligonucleotide primer for the detection of SNP TSC0015416
aataaatataaa

SEQ ID NO: 292926 - DNA, 12 bp, Artificial Sequence
  Oligonucleotide primer for the detection of SNP TSC0015416
aatgggtttttt

SEQ ID NO: 292927 - DNA, 12 bp, Artificial Sequence
  Oligonucleotide primer for the detection of SNP TSC0015417
aaatattttttg

SEQ ID NO: 292928 - DNA, 12 bp, Artificial Sequence
  Oligonucleotide primer for the detection of SNP TSC0015418
aatatttcttat

SEQ ID NO: 292929 - DNA, 12 bp, Artificial Sequence
  Oligonucleotide primer for the detection of SNP TSC0015419
atagtggttttt

SEQ ID NO: 292930 - DNA, 12 bp, Artificial Sequence
  Oligonucleotide primer for the detection of SNP TSC0015419
tgggattataag

SEQ ID NO: 292931 - DNA, 12 bp, Artificial Sequence
  Oligonucleotide primer for the detection of SNP TSC0015420
tatattggggtt

SEQ ID NO: 292932 - DNA, 12 bp, Artificial Sequence
  Oligonucleotide primer for the detection of SNP TSC0015420
tatatcggggtt

SEQ ID NO: 292933 - DNA, 12 bp, Artificial Sequence
  Oligonucleotide primer for the detection of SNP TSC0015420
tatattggggtc

SEQ ID NO: 292934 - DNA, 12 bp, Artificial Sequence
  Oligonucleotide primer for the detection of SNP TSC0015420
tatatcggggtc

SEQ ID NO: 292935 - DNA, 12 bp, Artificial Sequence
  Oligonucleotide primer for the detection of SNP TSC0015420
tataccaaaacc

SEQ ID NO: 292936 - DNA, 12 bp, Artificial Sequence
  Oligonucleotide primer for the detection of SNP TSC0015420
tataccgaaacc

SEQ ID NO: 292937 - DNA, 12 bp, Artificial Sequence
  Oligonucleotide primer for the detection of SNP TSC0015421
tactatttccta

SEQ ID NO: 292938 - DNA, 12 bp, Artificial Sequence
  Oligonucleotide primer for the detection of SNP TSC0015421
tgggatgaggat

SEQ ID NO: 292939 - DNA, 12 bp, Artificial Sequence
  Oligonucleotide primer for the detection of SNP TSC0015422
ctaaaaaaacac

SEQ ID NO: 292940 - DNA, 12 bp, Artificial Sequence
  Oligonucleotide primer for the detection of SNP TSC0015422
aagattgttgtt

SEQ ID NO: 292941 - DNA, 12 bp, Artificial Sequence
  Oligonucleotide primer for the detection of SNP TSC0015422
aaaactactatt

SEQ ID NO: 292942 - DNA, 12 bp, Artificial Sequence
  Oligonucleotide primer for the detection of SNP TSC0015422
ttggaggaatat

SEQ ID NO: 292943 - DNA, 12 bp, Artificial Sequence
  Oligonucleotide primer for the detection of SNP TSC0015423
aaaaaacctctt

SEQ ID NO: 292944 - DNA, 12 bp, Artificial Sequence
  Oligonucleotide primer for the detection of SNP TSC0015423
tgaagtttttta

SEQ ID NO: 292945 - DNA, 12 bp, Artificial Sequence
  Oligonucleotide primer for the detection of SNP TSC0015425
aaaaacccaaac

SEQ ID NO: 292946 - DNA, 12 bp, Artificial Sequence
  Oligonucleotide primer for the detection of SNP TSC0015425
ttttgggttaga

SEQ ID NO: 292947 - DNA, 12 bp, Artificial Sequence
  Oligonucleotide primer for the detection of SNP TSC0015426
ttattacttaat

SEQ ID NO: 292948 - DNA, 12 bp, Artificial Sequence
  Oligonucleotide primer for the detection of SNP TSC0015426
aaaaataattaa

SEQ ID NO: 292949 - DNA, 12 bp, Artificial Sequence
  Oligonucleotide primer for the detection of SNP TSC0015426
aaaaacaattaa

SEQ ID NO: 292950 - DNA, 12 bp, Artificial Sequence
  Oligonucleotide primer for the detection of SNP TSC0015426
attgtttgattt

SEQ ID NO: 292951 - DNA, 12 bp, Artificial Sequence
  Oligonucleotide primer for the detection of SNP TSC0015427
tggaattttttg

SEQ ID NO: 292952 - DNA, 12 bp, Artificial Sequence
  Oligonucleotide primer for the detection of SNP TSC0015427
tggaatttttcg

SEQ ID NO: 292953 - DNA, 12 bp, Artificial Sequence
  Oligonucleotide primer for the detection of SNP TSC0015427
taaaacctctca

SEQ ID NO: 292954 - DNA, 12 bp, Artificial Sequence
  Oligonucleotide primer for the detection of SNP TSC0015427
taaaacctctcg

SEQ ID NO: 292955 - DNA, 12 bp, Artificial Sequence
  Oligonucleotide primer for the detection of SNP TSC0015427
aaagatataaat

SEQ ID NO: 292956 - DNA, 12 bp, Artificial Sequence
  Oligonucleotide primer for the detection of SNP TSC0015428
aatttctatcat

SEQ ID NO: 292957 - DNA, 12 bp, Artificial Sequence
  Oligonucleotide primer for the detection of SNP TSC0015428
agaaaaagataa

SEQ ID NO: 292958 - DNA, 12 bp, Artificial Sequence
  Oligonucleotide primer for the detection of SNP TSC0015429
aagttaggttga

SEQ ID NO: 292959 - DNA, 12 bp, Artificial Sequence
  Oligonucleotide primer for the detection of SNP TSC0015430
tttcaaaatacc

SEQ ID NO: 292960 - DNA, 12 bp, Artificial Sequence
  Oligonucleotide primer for the detection of SNP TSC0015430
taggtttgttta

SEQ ID NO: 292961 - DNA, 12 bp, Artificial Sequence
  Oligonucleotide primer for the detection of SNP TSC0015431
attcaattaaat

SEQ ID NO: 292962 - DNA, 12 bp, Artificial Sequence
  Oligonucleotide primer for the detection of SNP TSC0015431
attgaattttaa

SEQ ID NO: 292963 - DNA, 12 bp, Artificial Sequence
  Oligonucleotide primer for the detection of SNP TSC0015432
tttcacttctat

SEQ ID NO: 292964 - DNA, 12 bp, Artificial Sequence
  Oligonucleotide primer for the detection of SNP TSC0015432
ttttaatattta

SEQ ID NO: 292965 - DNA, 12 bp, Artificial Sequence
  Oligonucleotide primer for the detection of SNP TSC0015433
caaattaatatt

SEQ ID NO: 292966 - DNA, 12 bp, Artificial Sequence
  Oligonucleotide primer for the detection of SNP TSC0015433
aaatttttagaa

SEQ ID NO: 292967 - DNA, 12 bp, Artificial Sequence
  Oligonucleotide primer for the detection of SNP TSC0015435
atatttcaaata

SEQ ID NO: 292968 - DNA, 12 bp, Artificial Sequence
  Oligonucleotide primer for the detection of SNP TSC0015435
gattgttggagt

SEQ ID NO: 292969 - DNA, 12 bp, Artificial Sequence
  Oligonucleotide primer for the detection of SNP TSC0015435
aaattattaaaa

SEQ ID NO: 292970 - DNA, 12 bp, Artificial Sequence
  Oligonucleotide primer for the detection of SNP TSC0015435
atattttaaatg

SEQ ID NO: 292971 - DNA, 12 bp, Artificial Sequence
  Oligonucleotide primer for the detection of SNP TSC0015437
tttctattatat

SEQ ID NO: 292972 - DNA, 12 bp, Artificial Sequence
  Oligonucleotide primer for the detection of SNP TSC0015437
tttttttaaata

SEQ ID NO: 292973 - DNA, 12 bp, Artificial Sequence
  Oligonucleotide primer for the detection of SNP TSC0015439
aatttaacaaaa

SEQ ID NO: 292974 - DNA, 12 bp, Artificial Sequence
  Oligonucleotide primer for the detection of SNP TSC0015439
ttattttttgtt

SEQ ID NO: 292975 - DNA, 12 bp, Artificial Sequence
  Oligonucleotide primer for the detection of SNP TSC0015439
ttatttttcgtt

SEQ ID NO: 292976 - DNA, 12 bp, Artificial Sequence
  Oligonucleotide primer for the detection of SNP TSC0015439
ttatttttcacc

SEQ ID NO: 292977 - DNA, 12 bp, Artificial Sequence
  Oligonucleotide primer for the detection of SNP TSC0015439
ttatttttcgcc

SEQ ID NO: 292978 - DNA, 12 bp, Artificial Sequence
  Oligonucleotide primer for the detection of SNP TSC0015439
aatttggtagaa

SEQ ID NO: 292979 - DNA, 12 bp, Artificial Sequence
  Oligonucleotide primer for the detection of SNP TSC0015441
cccaacaaactc

SEQ ID NO: 292980 - DNA, 12 bp, Artificial Sequence
  Oligonucleotide primer for the detection of SNP TSC0015441
cccaacgaactc

SEQ ID NO: 292981 - DNA, 12 bp, Artificial Sequence
  Oligonucleotide primer for the detection of SNP TSC0015441
cccgacaaactc

SEQ ID NO: 292982 - DNA, 12 bp, Artificial Sequence
  Oligonucleotide primer for the detection of SNP TSC0015441
cccgacgaactc

SEQ ID NO: 292983 - DNA, 12 bp, Artificial Sequence
  Oligonucleotide primer for the detection of SNP TSC0015441
gttgttttgtaa

SEQ ID NO: 292984 - DNA, 12 bp, Artificial Sequence
  Oligonucleotide primer for the detection of SNP TSC0015442
aaaacaaaaaac

SEQ ID NO: 292985 - DNA, 12 bp, Artificial Sequence
  Oligonucleotide primer for the detection of SNP TSC0015442
tatttttatatg

SEQ ID NO: 292986 - DNA, 12 bp, Artificial Sequence
  Oligonucleotide primer for the detection of SNP TSC0015443
tcttcccacatt

SEQ ID NO: 292987 - DNA, 12 bp, Artificial Sequence
  Oligonucleotide primer for the detection of SNP TSC0015443
aagaggtttgga

SEQ ID NO: 292988 - DNA, 12 bp, Artificial Sequence
  Oligonucleotide primer for the detection of SNP TSC0015443
aaaaaatttaaa

SEQ ID NO: 292989 - DNA, 12 bp, Artificial Sequence
  Oligonucleotide primer for the detection of SNP TSC0015445
taaataaaataa

SEQ ID NO: 292990 - DNA, 12 bp, Artificial Sequence
  Oligonucleotide primer for the detection of SNP TSC0015445
ggattttatata

SEQ ID NO: 292991 - DNA, 12 bp, Artificial Sequence
  Oligonucleotide primer for the detection of SNP TSC0015445
aatctcatataa

SEQ ID NO: 292992 - DNA, 12 bp, Artificial Sequence
  Oligonucleotide primer for the detection of SNP TSC0015445
tggatggggtgg

SEQ ID NO: 292993 - DNA, 12 bp, Artificial Sequence
  Oligonucleotide primer for the detection of SNP TSC0015446
atttaatatctt

SEQ ID NO: 292994 - DNA, 12 bp, Artificial Sequence
  Oligonucleotide primer for the detection of SNP TSC0015446
agttttatgttg

SEQ ID NO: 292995 - DNA, 12 bp, Artificial Sequence
  Oligonucleotide primer for the detection of SNP TSC0015447
ataatatcacac

SEQ ID NO: 292996 - DNA, 12 bp, Artificial Sequence
  Oligonucleotide primer for the detection of SNP TSC0015447
ttgaaattaggg

SEQ ID NO: 292997 - DNA, 12 bp, Artificial Sequence
  Oligonucleotide primer for the detection of SNP TSC0015447
tcgaaattaggg

SEQ ID NO: 292998 - DNA, 12 bp, Artificial Sequence
  Oligonucleotide primer for the detection of SNP TSC0015447
tcaaaatcaaaa

SEQ ID NO: 292999 - DNA, 12 bp, Artificial Sequence
  Oligonucleotide primer for the detection of SNP TSC0015447
tcgaaatcaaaa

SEQ ID NO: 293000 - DNA, 12 bp, Artificial Sequence
  Oligonucleotide primer for the detection of SNP TSC0015447
atgatgttatat

SEQ ID NO: 293001 - DNA, 12 bp, Artificial Sequence
  Oligonucleotide primer for the detection of SNP TSC0015448
taactacttaac

SEQ ID NO: 293002 - DNA, 12 bp, Artificial Sequence
  Oligonucleotide primer for the detection of SNP TSC0015448
agattttattag

SEQ ID NO: 293003 - DNA, 12 bp, Artificial Sequence
  Oligonucleotide primer for the detection of SNP TSC0015448
aaatttcactaa

SEQ ID NO: 293004 - DNA, 12 bp, Artificial Sequence
  Oligonucleotide primer for the detection of SNP TSC0015448
attgtttaattt

SEQ ID NO: 293005 - DNA, 12 bp, Artificial Sequence
  Oligonukleotid-Primer
caacacacacac

SEQ ID NO: 293006 - DNA, 12 bp, Artificial Sequence
  Oligonucleotide primer for the detection of SNP TSC0015453
gtgtgtggtgtg

SEQ ID NO: 293007 - DNA, 12 bp, Artificial Sequence
  Oligonucleotide primer for the detection of SNP TSC0015457
ctataactaatt

SEQ ID NO: 293008 - DNA, 12 bp, Artificial Sequence
  Oligonucleotide primer for the detection of SNP TSC0015458
aaacctaaaaat

SEQ ID NO: 293009 - DNA, 12 bp, Artificial Sequence
  Oligonukleotid-Primer
gtttgagttggg

SEQ ID NO: 293010 - DNA, 12 bp, Artificial Sequence
  Oligonucleotide primer for the detection of SNP TSC0015458
gttcgagttggg

SEQ ID NO: 293011 - DNA, 12 bp, Artificial Sequence
  Oligonucleotide primer for the detection of SNP TSC0015459
aaatttaaaaac

SEQ ID NO: 293012 - DNA, 12 bp, Artificial Sequence
  Oligonucleotide primer for the detection of SNP TSC0015459
aatattggtggt

SEQ ID NO: 293013 - DNA, 12 bp, Artificial Sequence
  Oligonucleotide primer for the detection of SNP TSC0015459
aatattaataat

SEQ ID NO: 293014 - DNA, 12 bp, Artificial Sequence
  Oligonucleotide primer for the detection of SNP TSC0015459
gggtttgagaat

SEQ ID NO: 293015 - DNA, 12 bp, Artificial Sequence
  Oligonucleotide primer for the detection of SNP TSC0015460
taaataatacaa

SEQ ID NO: 293016 - DNA, 12 bp, Artificial Sequence
  Oligonucleotide primer for the detection of SNP TSC0015460
taattttccctt

SEQ ID NO: 293017 - DNA, 12 bp, Artificial Sequence
  Oligonucleotide primer for the detection of SNP TSC0015460
tggatagtgtaa

SEQ ID NO: 293018 - DNA, 12 bp, Artificial Sequence
  Oligonucleotide primer for the detection of SNP TSC0015462
tccttttcactc

SEQ ID NO: 293019 - DNA, 12 bp, Artificial Sequence
  Oligonucleotide primer for the detection of SNP TSC0015462
tgaaggtttttg

SEQ ID NO: 293020 - DNA, 12 bp, Artificial Sequence
  Oligonucleotide primer for the detection of SNP TSC0015463
aattttctatct

SEQ ID NO: 293021 - DNA, 12 bp, Artificial Sequence
  Oligonucleotide primer for the detection of SNP TSC0015465
ataaaatacttt

SEQ ID NO: 293022 - DNA, 12 bp, Artificial Sequence
  Oligonucleotide primer for the detection of SNP TSC0015465
atataattaatg

SEQ ID NO: 293023 - DNA, 12 bp, Artificial Sequence
  Oligonucleotide primer for the detection of SNP TSC0015466
ttaatttactat

SEQ ID NO: 293024 - DNA, 12 bp, Artificial Sequence
  Oligonucleotide primer for the detection of SNP TSC0015466
ttagtggggtgt

SEQ ID NO: 293025 - DNA, 12 bp, Artificial Sequence
  Oligonucleotide primer for the detection of SNP TSC0015466
ttcaataaaata

SEQ ID NO: 293026 - DNA, 12 bp, Artificial Sequence
  Oligonucleotide primer for the detection of SNP TSC0015466
taatttattatt

SEQ ID NO: 293027 - DNA, 12 bp, Artificial Sequence
  Oligonucleotide primer for the detection of SNP TSC0015467
taaaatatttat

SEQ ID NO: 293028 - DNA, 12 bp, Artificial Sequence
  Oligonucleotide primer for the detection of SNP TSC0015467
tttgttttaggg

SEQ ID NO: 293029 - DNA, 12 bp, Artificial Sequence
  Oligonucleotide primer for the detection of SNP TSC0015471
atattaaatacc

SEQ ID NO: 293030 - DNA, 12 bp, Artificial Sequence
  Oligonucleotide primer for the detection of SNP TSC0015471
ttgattaagtga

SEQ ID NO: 293031 - DNA, 12 bp, Artificial Sequence
  Oligonucleotide primer for the detection of SNP TSC0015472
tttgagttaaat

SEQ ID NO: 293032 - DNA, 12 bp, Artificial Sequence
  Oligonucleotide primer for the detection of SNP TSC0015472
tctaaactaaat

SEQ ID NO: 293033 - DNA, 12 bp, Artificial Sequence
  Oligonucleotide primer for the detection of SNP TSC0015472
tagaaggtaaaa

SEQ ID NO: 293034 - DNA, 12 bp, Artificial Sequence
  Oligonucleotide primer for the detection of SNP TSC0015473
acaaattaacct

SEQ ID NO: 293035 - DNA, 12 bp, Artificial Sequence
  Oligonucleotide primer for the detection of SNP TSC0015473
ttttttaaatta

SEQ ID NO: 293036 - DNA, 12 bp, Artificial Sequence
  Oligonucleotide primer for the detection of SNP TSC0015473
tccctcaaatca

SEQ ID NO: 293037 - DNA, 12 bp, Artificial Sequence
  Oligonucleotide primer for the detection of SNP TSC0015473
atagattggttt

SEQ ID NO: 293038 - DNA, 12 bp, Artificial Sequence
  Oligonucleotide primer for the detection of SNP TSC0015474
ctatataatcaa

SEQ ID NO: 293039 - DNA, 12 bp, Artificial Sequence
  Oligonucleotide primer for the detection of SNP TSC0015474
ttataagaatta

SEQ ID NO: 293040 - DNA, 12 bp, Artificial Sequence
  Oligonucleotide primer for the detection of SNP TSC0015474
ttatgtaattag

SEQ ID NO: 293041 - DNA, 12 bp, Artificial Sequence
  Oligonucleotide primer for the detection of SNP TSC0015475
aaaaaataatcc

SEQ ID NO: 293042 - DNA, 12 bp, Artificial Sequence
  Oligonucleotide primer for the detection of SNP TSC0015475
attattttagaa

SEQ ID NO: 293043 - DNA, 12 bp, Artificial Sequence
  Oligonucleotide primer for the detection of SNP TSC0015475
attatcctaaaa

SEQ ID NO: 293044 - DNA, 12 bp, Artificial Sequence
  Oligonucleotide primer for the detection of SNP TSC0015475
agagagtggttt

SEQ ID NO: 293045 - DNA, 12 bp, Artificial Sequence
  Oligonucleotide primer for the detection of SNP TSC0015477
gaggttatgaga

SEQ ID NO: 293046 - DNA, 12 bp, Artificial Sequence
  Oligonucleotide primer for the detection of SNP TSC0015477
gaggttacgaga

SEQ ID NO: 293047 - DNA, 12 bp, Artificial Sequence
  Oligonucleotide primer for the detection of SNP TSC0015477
aaaatcacaaaa

SEQ ID NO: 293048 - DNA, 12 bp, Artificial Sequence
  Oligonucleotide primer for the detection of SNP TSC0015477
aaaatcacgaaa

SEQ ID NO: 293049 - DNA, 12 bp, Artificial Sequence
  Oligonucleotide primer for the detection of SNP TSC0015477
ttaggagggttt

SEQ ID NO: 293050 - DNA, 12 bp, Artificial Sequence
  Oligonucleotide primer for the detection of SNP TSC0015478
gtataggttagg

SEQ ID NO: 293051 - DNA, 12 bp, Artificial Sequence
  Oligonucleotide primer for the detection of SNP TSC0015478
acacaaaccaaa

SEQ ID NO: 293052 - DNA, 12 bp, Artificial Sequence
  Oligonucleotide primer for the detection of SNP TSC0015483
tctaccctaatt

SEQ ID NO: 293053 - DNA, 12 bp, Artificial Sequence
  Oligonucleotide primer for the detection of SNP TSC0015483
tgtgaaaatttg

SEQ ID NO: 293054 - DNA, 12 bp, Artificial Sequence
  Oligonucleotide primer for the detection of SNP TSC0015484
tcttccataaca

SEQ ID NO: 293055 - DNA, 12 bp, Artificial Sequence
  Oligonucleotide primer for the detection of SNP TSC0015484
ttgtattttgtt

SEQ ID NO: 293056 - DNA, 12 bp, Artificial Sequence
  Oligonucleotide primer for the detection of SNP TSC0015484
ctacattttatt

SEQ ID NO: 293057 - DNA, 12 bp, Artificial Sequence
  Oligonucleotide primer for the detection of SNP TSC0015484
ttttttatggta

SEQ ID NO: 293058 - DNA, 12 bp, Artificial Sequence
  Oligonucleotide primer for the detection of SNP TSC0015485
caaaacaataat

SEQ ID NO: 293059 - DNA, 12 bp, Artificial Sequence
  Oligonucleotide primer for the detection of SNP TSC0015485
tttttggaatag

SEQ ID NO: 293060 - DNA, 12 bp, Artificial Sequence
  Oligonucleotide primer for the detection of SNP TSC0015487
ccaaaccctaaa

SEQ ID NO: 293061 - DNA, 12 bp, Artificial Sequence
  Oligonucleotide primer for the detection of SNP TSC0015487
aggttggggttt

SEQ ID NO: 293062 - DNA, 12 bp, Artificial Sequence
  Oligonucleotide primer for the detection of SNP TSC0015487
aaactaaaattc

SEQ ID NO: 293063 - DNA, 12 bp, Artificial Sequence
  Oligonucleotide primer for the detection of SNP TSC0015487
ttaggttttgga

SEQ ID NO: 293064 - DNA, 12 bp, Artificial Sequence
  Oligonucleotide primer for the detection of SNP TSC0015488
tcatcctaacct

SEQ ID NO: 293065 - DNA, 12 bp, Artificial Sequence
  Oligonucleotide primer for the detection of SNP TSC0015488
tttgtaggtaga

SEQ ID NO: 293066 - DNA, 12 bp, Artificial Sequence
  Oligonucleotide primer for the detection of SNP TSC0015488
cctataaacaaa

SEQ ID NO: 293067 - DNA, 12 bp, Artificial Sequence
  Oligonucleotide primer for the detection of SNP TSC0015488
ttattttgattt

SEQ ID NO: 293068 - DNA, 12 bp, Artificial Sequence
  Oligonucleotide primer for the detection of SNP TSC0015489
tactcttataac

SEQ ID NO: 293069 - DNA, 12 bp, Artificial Sequence
  Oligonucleotide primer for the detection of SNP TSC0015489
aggttaggatga

SEQ ID NO: 293070 - DNA, 12 bp, Artificial Sequence
  Oligonucleotide primer for the detection of SNP TSC0015490
cttctcttcttt

SEQ ID NO: 293071 - DNA, 12 bp, Artificial Sequence
  Oligonucleotide primer for the detection of SNP TSC0015490
ttagtgagtatt

SEQ ID NO: 293072 - DNA, 12 bp, Artificial Sequence
  Oligonucleotide primer for the detection of SNP TSC0015490
ccaataaatacc

SEQ ID NO: 293073 - DNA, 12 bp, Artificial Sequence
  Oligonucleotide primer for the detection of SNP TSC0015491
caaaatccctac

SEQ ID NO: 293074 - DNA, 12 bp, Artificial Sequence
  Oligonucleotide primer for the detection of SNP TSC0015491
tgagtagttagg

SEQ ID NO: 293075 - DNA, 12 bp, Artificial Sequence
  Oligonucleotide primer for the detection of SNP TSC0015491
taaacaaccaaa

SEQ ID NO: 293076 - DNA, 12 bp, Artificial Sequence
  Oligonucleotide primer for the detection of SNP TSC0015491
taaaatttttgt

SEQ ID NO: 293077 - DNA, 12 bp, Artificial Sequence
  Oligonucleotide primer for the detection of SNP TSC0015492
aaaaccacacac

SEQ ID NO: 293078 - DNA, 12 bp, Artificial Sequence
  Oligonucleotide primer for the detection of SNP TSC0015492
aaaaccacacgc

SEQ ID NO: 293079 - DNA, 12 bp, Artificial Sequence
  Oligonucleotide primer for the detection of SNP TSC0015492
tgtgttgatgtg

SEQ ID NO: 293080 - DNA, 12 bp, Artificial Sequence
  Oligonucleotide primer for the detection of SNP TSC0015492
tgtgttgacgtg

SEQ ID NO: 293081 - DNA, 12 bp, Artificial Sequence
  Oligonucleotide primer for the detection of SNP TSC0015492
tatactaacata

SEQ ID NO: 293082 - DNA, 12 bp, Artificial Sequence
  Oligonucleotide primer for the detection of SNP TSC0015492
tatactaacgta

SEQ ID NO: 293083 - DNA, 12 bp, Artificial Sequence
  Oligonucleotide primer for the detection of SNP TSC0015492
aagattatatgt

SEQ ID NO: 293084 - DNA, 12 bp, Artificial Sequence
  Oligonucleotide primer for the detection of SNP TSC0015492
aagattatacgt

SEQ ID NO: 293085 - DNA, 12 bp, Artificial Sequence
  Oligonucleotide primer for the detection of SNP TSC0015493
aaacctcacaaa

SEQ ID NO: 293086 - DNA, 12 bp, Artificial Sequence
  Oligonucleotide primer for the detection of SNP TSC0015493
ttttggaggatt

SEQ ID NO: 293087 - DNA, 12 bp, Artificial Sequence
  Oligonucleotide primer for the detection of SNP TSC0015493
tttcggaggatt

SEQ ID NO: 293088 - DNA, 12 bp, Artificial Sequence
  Oligonucleotide primer for the detection of SNP TSC0015493
ttttggaggatc

SEQ ID NO: 293089 - DNA, 12 bp, Artificial Sequence
  Oligonucleotide primer for the detection of SNP TSC0015493
tttcggaggatc

SEQ ID NO: 293090 - DNA, 12 bp, Artificial Sequence
  Oligonukleotid-Primer
ccccaaaaaacc

SEQ ID NO: 293091 - DNA, 12 bp, Artificial Sequence
  Oligonucleotide primer for the detection of SNP TSC0015493
ccccgaaaaacc

SEQ ID NO: 293092 - DNA, 12 bp, Artificial Sequence
  Oligonucleotide primer for the detection of SNP TSC0015493
aggttttatagg

SEQ ID NO: 293093 - DNA, 12 bp, Artificial Sequence
  Oligonucleotide primer for the detection of SNP TSC0015494
cttccaactatt

SEQ ID NO: 293094 - DNA, 12 bp, Artificial Sequence
  Oligonucleotide primer for the detection of SNP TSC0015494
ataagtaggata

SEQ ID NO: 293095 - DNA, 12 bp, Artificial Sequence
  Oligonucleotide primer for the detection of SNP TSC0015495
ctccccactctt

SEQ ID NO: 293096 - DNA, 12 bp, Artificial Sequence
  Oligonucleotide primer for the detection of SNP TSC0015495
gtattaatgttg

SEQ ID NO: 293097 - DNA, 12 bp, Artificial Sequence
  Oligonucleotide primer for the detection of SNP TSC0015495
acattaatatta

SEQ ID NO: 293098 - DNA, 12 bp, Artificial Sequence
  Oligonucleotide primer for the detection of SNP TSC0015496
ataactacaaaa

SEQ ID NO: 293099 - DNA, 12 bp, Artificial Sequence
  Oligonucleotide primer for the detection of SNP TSC0015496
aggtaagagtat

SEQ ID NO: 293100 - DNA, 12 bp, Artificial Sequence
  Oligonucleotide primer for the detection of SNP TSC0015496
aataaaaacaca

SEQ ID NO: 293101 - DNA, 12 bp, Artificial Sequence
  Oligonucleotide primer for the detection of SNP TSC0015496
tggttgtagaat

SEQ ID NO: 293102 - DNA, 12 bp, Artificial Sequence
  Oligonucleotide primer for the detection of SNP TSC0015500
tacccacatcct

SEQ ID NO: 293103 - DNA, 12 bp, Artificial Sequence
  Oligonucleotide primer for the detection of SNP TSC0015500
ggtagtggttgg

SEQ ID NO: 293104 - DNA, 12 bp, Artificial Sequence
  Oligonucleotide primer for the detection of SNP TSC0015500
aacaataactaa

SEQ ID NO: 293105 - DNA, 12 bp, Artificial Sequence
  Oligonucleotide primer for the detection of SNP TSC0015500
gacaataactaa

SEQ ID NO: 293106 - DNA, 12 bp, Artificial Sequence
  Oligonucleotide primer for the detection of SNP TSC0015501
aaaccttccccc

SEQ ID NO: 293107 - DNA, 12 bp, Artificial Sequence
  Oligonucleotide primer for the detection of SNP TSC0015501
gtaggatttttt

SEQ ID NO: 293108 - DNA, 12 bp, Artificial Sequence
  Oligonucleotide primer for the detection of SNP TSC0015501
taatataaaatc

SEQ ID NO: 293109 - DNA, 12 bp, Artificial Sequence
  Oligonucleotide primer for the detection of SNP TSC0015501
agattttttttc

SEQ ID NO: 293110 - DNA, 12 bp, Artificial Sequence
  Oligonucleotide primer for the detection of SNP TSC0015502
ccaatttatcct

SEQ ID NO: 293111 - DNA, 12 bp, Artificial Sequence
  Oligonucleotide primer for the detection of SNP TSC0015502
atttattgagta

SEQ ID NO: 293112 - DNA, 12 bp, Artificial Sequence
  Oligonucleotide primer for the detection of SNP TSC0015502
atttatcgagta

SEQ ID NO: 293113 - DNA, 12 bp, Artificial Sequence
  Oligonucleotide primer for the detection of SNP TSC0015505
cccacaattata

SEQ ID NO: 293114 - DNA, 12 bp, Artificial Sequence
  Oligonucleotide primer for the detection of SNP TSC0015505
ttttattattga

SEQ ID NO: 293115 - DNA, 12 bp, Artificial Sequence
  Oligonucleotide primer for the detection of SNP TSC0015505
ttttattatcga

SEQ ID NO: 293116 - DNA, 12 bp, Artificial Sequence
  Oligonucleotide primer for the detection of SNP TSC0015505
cccatcaccaaa

SEQ ID NO: 293117 - DNA, 12 bp, Artificial Sequence
  Oligonucleotide primer for the detection of SNP TSC0015505
cccatcaccgaa

SEQ ID NO: 293118 - DNA, 12 bp, Artificial Sequence
  Oligonucleotide primer for the detection of SNP TSC0015505
gtttataattgt

SEQ ID NO: 293119 - DNA, 12 bp, Artificial Sequence
  Oligonucleotide primer for the detection of SNP TSC0015507
ccatacctcata

SEQ ID NO: 293120 - DNA, 12 bp, Artificial Sequence
  Oligonucleotide primer for the detection of SNP TSC0015507
agaattttaatt

SEQ ID NO: 293121 - DNA, 12 bp, Artificial Sequence
  Oligonucleotide primer for the detection of SNP TSC0015507
aaaactccaact

SEQ ID NO: 293122 - DNA, 12 bp, Artificial Sequence
  Oligonucleotide primer for the detection of SNP TSC0015508
gggggattattt

SEQ ID NO: 293123 - DNA, 12 bp, Artificial Sequence
  Oligonucleotide primer for the detection of SNP TSC0015508
aaaaaaccatct

SEQ ID NO: 293124 - DNA, 12 bp, Artificial Sequence
  Oligonucleotide primer for the detection of SNP TSC0015508
ggatggaaatag

SEQ ID NO: 293125 - DNA, 12 bp, Artificial Sequence
  Oligonucleotide primer for the detection of SNP TSC0015509
cataaaaaaact

SEQ ID NO: 293126 - DNA, 12 bp, Artificial Sequence
  Oligonucleotide primer for the detection of SNP TSC0015510
cctctctaacta

SEQ ID NO: 293127 - DNA, 12 bp, Artificial Sequence
  Oligonucleotide primer for the detection of SNP TSC0015510
gagttgggtttt

SEQ ID NO: 293128 - DNA, 12 bp, Artificial Sequence
  Oligonucleotide primer for the detection of SNP TSC0015510
aaactaaacctt

SEQ ID NO: 293129 - DNA, 12 bp, Artificial Sequence
  Oligonucleotide primer for the detection of SNP TSC0015510
ttttggttgttt

SEQ ID NO: 293130 - DNA, 12 bp, Artificial Sequence
  Oligonucleotide primer for the detection of SNP TSC0015512
ccatactcaact

SEQ ID NO: 293131 - DNA, 12 bp, Artificial Sequence
  Oligonucleotide primer for the detection of SNP TSC0015512
ccgtactcaact

SEQ ID NO: 293132 - DNA, 12 bp, Artificial Sequence
  Oligonucleotide primer for the detection of SNP TSC0015512
ataggttttgag

SEQ ID NO: 293133 - DNA, 12 bp, Artificial Sequence
  Oligonucleotide primer for the detection of SNP TSC0015512
acaaatcctaaa

SEQ ID NO: 293134 - DNA, 12 bp, Artificial Sequence
  Oligonucleotide primer for the detection of SNP TSC0015512
ttgtatttagtt

SEQ ID NO: 293135 - DNA, 12 bp, Artificial Sequence
  Oligonucleotide primer for the detection of SNP TSC0015512
tcgtatttagtt

SEQ ID NO: 293136 - DNA, 12 bp, Artificial Sequence
  Oligonucleotide primer for the detection of SNP TSC0015514
tttccttccaaa

SEQ ID NO: 293137 - DNA, 12 bp, Artificial Sequence
  Oligonucleotide primer for the detection of SNP TSC0015514
taacctctttta

SEQ ID NO: 293138 - DNA, 12 bp, Artificial Sequence
  Oligonucleotide primer for the detection of SNP TSC0015514
tttttttttaag

SEQ ID NO: 293139 - DNA, 12 bp, Artificial Sequence
  Oligonucleotide primer for the detection of SNP TSC0015515
ttttaaagtgtc

SEQ ID NO: 293140 - DNA, 12 bp, Artificial Sequence
  Oligonucleotide primer for the detection of SNP TSC0015515
acctccaaaata

SEQ ID NO: 293141 - DNA, 12 bp, Artificial Sequence
  Oligonucleotide primer for the detection of SNP TSC0015516
taaccaaactac

SEQ ID NO: 293142 - DNA, 12 bp, Artificial Sequence
  Oligonucleotide primer for the detection of SNP TSC0015516
taaccgaactac

SEQ ID NO: 293143 - DNA, 12 bp, Artificial Sequence
  Oligonucleotide primer for the detection of SNP TSC0015516
taaattttccaa

SEQ ID NO: 293144 - DNA, 12 bp, Artificial Sequence
  Oligonucleotide primer for the detection of SNP TSC0015516
taattggattat

SEQ ID NO: 293145 - DNA, 12 bp, Artificial Sequence
  Oligonucleotide primer for the detection of SNP TSC0015516
taatcggattat

SEQ ID NO: 293146 - DNA, 12 bp, Artificial Sequence
  Oligonucleotide primer for the detection of SNP TSC0015517
atttttttcaat

SEQ ID NO: 293147 - DNA, 12 bp, Artificial Sequence
  Oligonucleotide primer for the detection of SNP TSC0015517
agtttatagaaa

SEQ ID NO: 293148 - DNA, 12 bp, Artificial Sequence
  Oligonucleotide primer for the detection of SNP TSC0015517
aacttataaaaa

SEQ ID NO: 293149 - DNA, 12 bp, Artificial Sequence
  Oligonucleotide primer for the detection of SNP TSC0015517
attttttttaat

SEQ ID NO: 293150 - DNA, 12 bp, Artificial Sequence
  Oligonucleotide primer for the detection of SNP TSC0015518
taccttcatttt

SEQ ID NO: 293151 - DNA, 12 bp, Artificial Sequence
  Oligonucleotide primer for the detection of SNP TSC0015518
gaagagagtggt

SEQ ID NO: 293152 - DNA, 12 bp, Artificial Sequence
  Oligonucleotide primer for the detection of SNP TSC0015520
ttaacatcttcc

SEQ ID NO: 293153 - DNA, 12 bp, Artificial Sequence
  Oligonucleotide primer for the detection of SNP TSC0015520
ttaacgtcttcc

SEQ ID NO: 293154 - DNA, 12 bp, Artificial Sequence
  Oligonucleotide primer for the detection of SNP TSC0015520
aaagagaaggaa

SEQ ID NO: 293155 - DNA, 12 bp, Artificial Sequence
  Oligonucleotide primer for the detection of SNP TSC0015521
taacccctataa

SEQ ID NO: 293156 - DNA, 12 bp, Artificial Sequence
  Oligonucleotide primer for the detection of SNP TSC0015521
tagagaataaat

SEQ ID NO: 293157 - DNA, 12 bp, Artificial Sequence
  Oligonucleotide primer for the detection of SNP TSC0015521
tagtttttgtga

SEQ ID NO: 293158 - DNA, 12 bp, Artificial Sequence
  Oligonucleotide primer for the detection of SNP TSC0015522
acaaactctaca

SEQ ID NO: 293159 - DNA, 12 bp, Artificial Sequence
  Oligonucleotide primer for the detection of SNP TSC0015522
acaaactctacg

SEQ ID NO: 293160 - DNA, 12 bp, Artificial Sequence
  Oligonucleotide primer for the detection of SNP TSC0015522
ttttttttatgg

SEQ ID NO: 293161 - DNA, 12 bp, Artificial Sequence
  Oligonucleotide primer for the detection of SNP TSC0015522
tccttcccataa

SEQ ID NO: 293162 - DNA, 12 bp, Artificial Sequence
  Oligonucleotide primer for the detection of SNP TSC0015522
tataggttttgt

SEQ ID NO: 293163 - DNA, 12 bp, Artificial Sequence
  Oligonucleotide primer for the detection of SNP TSC0015522
tataggttttgc

SEQ ID NO: 293164 - DNA, 12 bp, Artificial Sequence
  Oligonucleotide primer for the detection of SNP TSC0015523
ttaagatggaga

SEQ ID NO: 293165 - DNA, 12 bp, Artificial Sequence
  Oligonucleotide primer for the detection of SNP TSC0015524
cactatattata

SEQ ID NO: 293166 - DNA, 12 bp, Artificial Sequence
  Oligonucleotide primer for the detection of SNP TSC0015524
tctacatctctc

SEQ ID NO: 293167 - DNA, 12 bp, Artificial Sequence
  Oligonucleotide primer for the detection of SNP TSC0015524
tattgtattgta

SEQ ID NO: 293168 - DNA, 12 bp, Artificial Sequence
  Oligonucleotide primer for the detection of SNP TSC0015526
aaaaccactaaa

SEQ ID NO: 293169 - DNA, 12 bp, Artificial Sequence
  Oligonucleotide primer for the detection of SNP TSC0015526
gttattgtttaa

SEQ ID NO: 293170 - DNA, 12 bp, Artificial Sequence
  Oligonucleotide primer for the detection of SNP TSC0015526
tcattatccaaa

SEQ ID NO: 293171 - DNA, 12 bp, Artificial Sequence
  Oligonukleotid-Primer
agagttattgag

SEQ ID NO: 293172 - DNA, 12 bp, Artificial Sequence
  Oligonucleotide primer for the detection of SNP TSC0015527
caaataaaaaat

SEQ ID NO: 293173 - DNA, 12 bp, Artificial Sequence
  Oligonucleotide primer for the detection of SNP TSC0015527
tagttgtgtgtg

SEQ ID NO: 293174 - DNA, 12 bp, Artificial Sequence
  Oligonucleotide primer for the detection of SNP TSC0015527
tagttgtgcgtg

SEQ ID NO: 293175 - DNA, 12 bp, Artificial Sequence
  Oligonukleotid-Primer
catcacaaaata

SEQ ID NO: 293176 - DNA, 12 bp, Artificial Sequence
  Oligonucleotide primer for the detection of SNP TSC0015528
ttttttatatgt

SEQ ID NO: 293177 - DNA, 12 bp, Artificial Sequence
  Oligonucleotide primer for the detection of SNP TSC0015528
tctttatataca

SEQ ID NO: 293178 - DNA, 12 bp, Artificial Sequence
  Oligonucleotide primer for the detection of SNP TSC0015528
tattataaagtg

SEQ ID NO: 293179 - DNA, 12 bp, Artificial Sequence
  Oligonucleotide primer for the detection of SNP TSC0015529
gtgtgtatatat

SEQ ID NO: 293180 - DNA, 12 bp, Artificial Sequence
  Oligonucleotide primer for the detection of SNP TSC0015529
gtgtgtatatac

SEQ ID NO: 293181 - DNA, 12 bp, Artificial Sequence
  Oligonucleotide primer for the detection of SNP TSC0015529
aatatatatata

SEQ ID NO: 293182 - DNA, 12 bp, Artificial Sequence
  Oligonucleotide primer for the detection of SNP TSC0015530
tttgttataagt

SEQ ID NO: 293183 - DNA, 12 bp, Artificial Sequence
  Oligonucleotide primer for the detection of SNP TSC0015530
tttgttataagc

SEQ ID NO: 293184 - DNA, 12 bp, Artificial Sequence
  Oligonucleotide primer for the detection of SNP TSC0015530
cctaccataaac

SEQ ID NO: 293185 - DNA, 12 bp, Artificial Sequence
  Oligonucleotide primer for the detection of SNP TSC0015531
actcctaaaact

SEQ ID NO: 293186 - DNA, 12 bp, Artificial Sequence
  Oligonucleotide primer for the detection of SNP TSC0015531
tttttggggtgg

SEQ ID NO: 293187 - DNA, 12 bp, Artificial Sequence
  Oligonucleotide primer for the detection of SNP TSC0015532
ttcataaatttt

SEQ ID NO: 293188 - DNA, 12 bp, Artificial Sequence
  Oligonucleotide primer for the detection of SNP TSC0015532
taattattttta

SEQ ID NO: 293189 - DNA, 12 bp, Artificial Sequence
  Oligonucleotide primer for the detection of SNP TSC0015533
ttccaactaaac

SEQ ID NO: 293190 - DNA, 12 bp, Artificial Sequence
  Oligonucleotide primer for the detection of SNP TSC0015533
gaaatagggaag

SEQ ID NO: 293191 - DNA, 12 bp, Artificial Sequence
  Oligonucleotide primer for the detection of SNP TSC0015533
ttttagttgagt

SEQ ID NO: 293192 - DNA, 12 bp, Artificial Sequence
  Oligonucleotide primer for the detection of SNP TSC0015533
ttttagttgagc

SEQ ID NO: 293193 - DNA, 12 bp, Artificial Sequence
  Oligonucleotide primer for the detection of SNP TSC0015534
ccccatcactac

SEQ ID NO: 293194 - DNA, 12 bp, Artificial Sequence
  Oligonucleotide primer for the detection of SNP TSC0015534
ataaagttttta

SEQ ID NO: 293195 - DNA, 12 bp, Artificial Sequence
  Oligonucleotide primer for the detection of SNP TSC0015538
ctatctacatac

SEQ ID NO: 293196 - DNA, 12 bp, Artificial Sequence
  Oligonucleotide primer for the detection of SNP TSC0015538
ctatctacgtac

SEQ ID NO: 293197 - DNA, 12 bp, Artificial Sequence
  Oligonucleotide primer for the detection of SNP TSC0015538
atattgtaaagg

SEQ ID NO: 293198 - DNA, 12 bp, Artificial Sequence
  Oligonucleotide primer for the detection of SNP TSC0015539
attaacaataaa

SEQ ID NO: 293199 - DNA, 12 bp, Artificial Sequence
  Oligonucleotide primer for the detection of SNP TSC0015539
gttaacaataaa

SEQ ID NO: 293200 - DNA, 12 bp, Artificial Sequence
  Oligonucleotide primer for the detection of SNP TSC0015539
taatattaatga

SEQ ID NO: 293201 - DNA, 12 bp, Artificial Sequence
  Oligonucleotide primer for the detection of SNP TSC0015539
caacattaataa

SEQ ID NO: 293202 - DNA, 12 bp, Artificial Sequence
  Oligonucleotide primer for the detection of SNP TSC0015539
gttggtaatgaa

SEQ ID NO: 293203 - DNA, 12 bp, Artificial Sequence
  Oligonucleotide primer for the detection of SNP TSC0015540
accttttttttt

SEQ ID NO: 293204 - DNA, 12 bp, Artificial Sequence
  Oligonucleotide primer for the detection of SNP TSC0015541
aaaactataaat

SEQ ID NO: 293205 - DNA, 12 bp, Artificial Sequence
  Oligonucleotide primer for the detection of SNP TSC0015541
aattctcccatc

SEQ ID NO: 293206 - DNA, 12 bp, Artificial Sequence
  Oligonucleotide primer for the detection of SNP TSC0015541
aaggttgtagat

SEQ ID NO: 293207 - DNA, 12 bp, Artificial Sequence
  Oligonucleotide primer for the detection of SNP TSC0015545
ctttattacttc

SEQ ID NO: 293208 - DNA, 12 bp, Artificial Sequence
  Oligonucleotide primer for the detection of SNP TSC0015545
tataaggataga

SEQ ID NO: 293209 - DNA, 12 bp, Artificial Sequence
  Oligonucleotide primer for the detection of SNP TSC0015546
ctcaaaccctac

SEQ ID NO: 293210 - DNA, 12 bp, Artificial Sequence
  Oligonucleotide primer for the detection of SNP TSC0015546
gttggttatgga

SEQ ID NO: 293211 - DNA, 12 bp, Artificial Sequence
  Oligonucleotide primer for the detection of SNP TSC0015547
aattcataaaaa

SEQ ID NO: 293212 - DNA, 12 bp, Artificial Sequence
  Oligonucleotide primer for the detection of SNP TSC0015547
gataggaaggag

SEQ ID NO: 293213 - DNA, 12 bp, Artificial Sequence
  Oligonucleotide primer for the detection of SNP TSC0015547
atttataggggt

SEQ ID NO: 293214 - DNA, 12 bp, Artificial Sequence
  Oligonucleotide primer for the detection of SNP TSC0015548
taacccctaaaa

SEQ ID NO: 293215 - DNA, 12 bp, Artificial Sequence
  Oligonucleotide primer for the detection of SNP TSC0015548
agtattatttat

SEQ ID NO: 293216 - DNA, 12 bp, Artificial Sequence
  Oligonucleotide primer for the detection of SNP TSC0015548
aataccatccat

SEQ ID NO: 293217 - DNA, 12 bp, Artificial Sequence
  Oligonucleotide primer for the detection of SNP TSC0015548
taatttttggaa

SEQ ID NO: 293218 - DNA, 12 bp, Artificial Sequence
  Oligonucleotide primer for the detection of SNP TSC0015549
ccacatactcct

SEQ ID NO: 293219 - DNA, 12 bp, Artificial Sequence
  Oligonucleotide primer for the detection of SNP TSC0015549
agtatagggatg

SEQ ID NO: 293220 - DNA, 12 bp, Artificial Sequence
  Oligonucleotide primer for the detection of SNP TSC0015549
agtatagggacg

SEQ ID NO: 293221 - DNA, 12 bp, Artificial Sequence
  Oligonucleotide primer for the detection of SNP TSC0015550
ttatctaattta

SEQ ID NO: 293222 - DNA, 12 bp, Artificial Sequence
  Oligonucleotide primer for the detection of SNP TSC0015550
atttgaatggtg

SEQ ID NO: 293223 - DNA, 12 bp, Artificial Sequence
  Oligonucleotide primer for the detection of SNP TSC0015550
atttaaataata

SEQ ID NO: 293224 - DNA, 12 bp, Artificial Sequence
  Oligonucleotide primer for the detection of SNP TSC0015550
tttgtttagttt

SEQ ID NO: 293225 - DNA, 12 bp, Artificial Sequence
  Oligonucleotide primer for the detection of SNP TSC0015551
caaaacaaaaaa

SEQ ID NO: 293226 - DNA, 12 bp, Artificial Sequence
  Oligonucleotide primer for the detection of SNP TSC0015551
tggtttatttat

SEQ ID NO: 293227 - DNA, 12 bp, Artificial Sequence
  Oligonucleotide primer for the detection of SNP TSC0015551
taactcatctac

SEQ ID NO: 293228 - DNA, 12 bp, Artificial Sequence
  Oligonucleotide primer for the detection of SNP TSC0015551
taaaataggagg

SEQ ID NO: 293229 - DNA, 12 bp, Artificial Sequence
  Oligonucleotide primer for the detection of SNP TSC0015552
aatttaaacaat

SEQ ID NO: 293230 - DNA, 12 bp, Artificial Sequence
  Oligonucleotide primer for the detection of SNP TSC0015552
tattaatggaaa

SEQ ID NO: 293231 - DNA, 12 bp, Artificial Sequence
  Oligonucleotide primer for the detection of SNP TSC0015552
tattaacggaaa

SEQ ID NO: 293232 - DNA, 12 bp, Artificial Sequence
  Oligonucleotide primer for the detection of SNP TSC0015553
ttcttcctacct

SEQ ID NO: 293233 - DNA, 12 bp, Artificial Sequence
  Oligonucleotide primer for the detection of SNP TSC0015553
aagttatgaggg

SEQ ID NO: 293234 - DNA, 12 bp, Artificial Sequence
  Oligonucleotide primer for the detection of SNP TSC0015553
aagttacgaggg

SEQ ID NO: 293235 - DNA, 12 bp, Artificial Sequence
  Oligonucleotide primer for the detection of SNP TSC0015554
ttttgtttggag

SEQ ID NO: 293236 - DNA, 12 bp, Artificial Sequence
  Oligonucleotide primer for the detection of SNP TSC0015555
tatatacttata

SEQ ID NO: 293237 - DNA, 12 bp, Artificial Sequence
  Oligonucleotide primer for the detection of SNP TSC0015555
taatgtatgtat

SEQ ID NO: 293238 - DNA, 12 bp, Artificial Sequence
  Oligonucleotide primer for the detection of SNP TSC0015555
taatatatacat

SEQ ID NO: 293239 - DNA, 12 bp, Artificial Sequence
  Oligonucleotide primer for the detection of SNP TSC0015555
tatatgtttatg

SEQ ID NO: 293240 - DNA, 12 bp, Artificial Sequence
  Oligonucleotide primer for the detection of SNP TSC0015556
aaccctaaaatc

SEQ ID NO: 293241 - DNA, 12 bp, Artificial Sequence
  Oligonucleotide primer for the detection of SNP TSC0015556
ttattttttggg

SEQ ID NO: 293242 - DNA, 12 bp, Artificial Sequence
  Oligonucleotide primer for the detection of SNP TSC0015556
ttatttttcggg

SEQ ID NO: 293243 - DNA, 12 bp, Artificial Sequence
  Oligonucleotide primer for the detection of SNP TSC0015557
cctaaaaatcat

SEQ ID NO: 293244 - DNA, 12 bp, Artificial Sequence
  Oligonucleotide primer for the detection of SNP TSC0015557
cctaaaaatcgt

SEQ ID NO: 293245 - DNA, 12 bp, Artificial Sequence
  Oligonucleotide primer for the detection of SNP TSC0015557
ttttttttagaa

SEQ ID NO: 293246 - DNA, 12 bp, Artificial Sequence
  Oligonucleotide primer for the detection of SNP TSC0015557
tttccttcaaaa

SEQ ID NO: 293247 - DNA, 12 bp, Artificial Sequence
  Oligonucleotide primer for the detection of SNP TSC0015557
tttgaaggttgt

SEQ ID NO: 293248 - DNA, 12 bp, Artificial Sequence
  Oligonucleotide primer for the detection of SNP TSC0015557
tttgaaggtcgt

SEQ ID NO: 293249 - DNA, 12 bp, Artificial Sequence
  Oligonucleotide primer for the detection of SNP TSC0015561
aacaccaacctc

SEQ ID NO: 293250 - DNA, 12 bp, Artificial Sequence
  Oligonucleotide primer for the detection of SNP TSC0015561
aacgccaacctc

SEQ ID NO: 293251 - DNA, 12 bp, Artificial Sequence
  Oligonucleotide primer for the detection of SNP TSC0015561
tgaagttaataa

SEQ ID NO: 293252 - DNA, 12 bp, Artificial Sequence
  Oligonucleotide primer for the detection of SNP TSC0015561
taaaactaacaa

SEQ ID NO: 293253 - DNA, 12 bp, Artificial Sequence
  Oligonucleotide primer for the detection of SNP TSC0015561
aatgttagtttt

SEQ ID NO: 293254 - DNA, 12 bp, Artificial Sequence
  Oligonucleotide primer for the detection of SNP TSC0015561
aacgttagtttt

SEQ ID NO: 293255 - DNA, 12 bp, Artificial Sequence
  Oligonucleotide primer for the detection of SNP TSC0015562
atattttacatt

SEQ ID NO: 293256 - DNA, 12 bp, Artificial Sequence
  Oligonucleotide primer for the detection of SNP TSC0015562
tgtttttatgaa

SEQ ID NO: 293257 - DNA, 12 bp, Artificial Sequence
  Oligonucleotide primer for the detection of SNP TSC0015562
cgtttttatgaa

SEQ ID NO: 293258 - DNA, 12 bp, Artificial Sequence
  Oligonucleotide primer for the detection of SNP TSC0015562
tgtttttacgaa

SEQ ID NO: 293259 - DNA, 12 bp, Artificial Sequence
  Oligonucleotide primer for the detection of SNP TSC0015562
cgtttttacgaa

SEQ ID NO: 293260 - DNA, 12 bp, Artificial Sequence
  Oligonukleotid-Primer
tatattttttgt

SEQ ID NO: 293261 - DNA, 12 bp, Artificial Sequence
  Oligonucleotide primer for the detection of SNP TSC0015563
tatatttttcgt

SEQ ID NO: 293262 - DNA, 12 bp, Artificial Sequence
  Oligonucleotide primer for the detection of SNP TSC0015563
tacattcttcat

SEQ ID NO: 293263 - DNA, 12 bp, Artificial Sequence
  Oligonucleotide primer for the detection of SNP TSC0015563
tacattcttcgt

SEQ ID NO: 293264 - DNA, 12 bp, Artificial Sequence
  Oligonucleotide primer for the detection of SNP TSC0015563
agagattagaaa

SEQ ID NO: 293265 - DNA, 12 bp, Artificial Sequence
  Oligonucleotide primer for the detection of SNP TSC0015564
aacaaccacacc

SEQ ID NO: 293266 - DNA, 12 bp, Artificial Sequence
  Oligonucleotide primer for the detection of SNP TSC0015564
aacaaccacgcc

SEQ ID NO: 293267 - DNA, 12 bp, Artificial Sequence
  Oligonucleotide primer for the detection of SNP TSC0015564
aacaaccgcacc

SEQ ID NO: 293268 - DNA, 12 bp, Artificial Sequence
  Oligonucleotide primer for the detection of SNP TSC0015564
aacgaccacacc

SEQ ID NO: 293269 - DNA, 12 bp, Artificial Sequence
  Oligonucleotide primer for the detection of SNP TSC0015564
aacaaccgcgcc

SEQ ID NO: 293270 - DNA, 12 bp, Artificial Sequence
  Oligonucleotide primer for the detection of SNP TSC0015564
aacgaccacgcc

SEQ ID NO: 293271 - DNA, 12 bp, Artificial Sequence
  Oligonucleotide primer for the detection of SNP TSC0015564
aacgaccgcacc

SEQ ID NO: 293272 - DNA, 12 bp, Artificial Sequence
  Oligonucleotide primer for the detection of SNP TSC0015564
aacgaccgcgcc

SEQ ID NO: 293273 - DNA, 12 bp, Artificial Sequence
  Oligonucleotide primer for the detection of SNP TSC0015564
taaataaaaagg

SEQ ID NO: 293274 - DNA, 12 bp, Artificial Sequence
  Oligonucleotide primer for the detection of SNP TSC0015564
caaacaaaaaaa

SEQ ID NO: 293275 - DNA, 12 bp, Artificial Sequence
  Oligonucleotide primer for the detection of SNP TSC0015564
agtgattgtgtt

SEQ ID NO: 293276 - DNA, 12 bp, Artificial Sequence
  Oligonucleotide primer for the detection of SNP TSC0015564
agcgattgtgtt

SEQ ID NO: 293277 - DNA, 12 bp, Artificial Sequence
  Oligonucleotide primer for the detection of SNP TSC0015564
agtgatcgtgtt

SEQ ID NO: 293278 - DNA, 12 bp, Artificial Sequence
  Oligonucleotide primer for the detection of SNP TSC0015564
agtgattgcgtt

SEQ ID NO: 293279 - DNA, 12 bp, Artificial Sequence
  Oligonucleotide primer for the detection of SNP TSC0015564
agcgatcgtgtt

SEQ ID NO: 293280 - DNA, 12 bp, Artificial Sequence
  Oligonucleotide primer for the detection of SNP TSC0015564
agcgattgcgtt

SEQ ID NO: 293281 - DNA, 12 bp, Artificial Sequence
  Oligonucleotide primer for the detection of SNP TSC0015564
agtgatcgcgtt

SEQ ID NO: 293282 - DNA, 12 bp, Artificial Sequence
  Oligonucleotide primer for the detection of SNP TSC0015564
agcgatcgcgtt

SEQ ID NO: 293283 - DNA, 12 bp, Artificial Sequence
  Oligonucleotide primer for the detection of SNP TSC0015565
gttaggtgtggt

SEQ ID NO: 293284 - DNA, 12 bp, Artificial Sequence
  Oligonucleotide primer for the detection of SNP TSC0015565
gttaggcgtggt

SEQ ID NO: 293285 - DNA, 12 bp, Artificial Sequence
  Oligonucleotide primer for the detection of SNP TSC0015565
gttaggtgcggt

SEQ ID NO: 293286 - DNA, 12 bp, Artificial Sequence
  Oligonucleotide primer for the detection of SNP TSC0015565
gttaggcgcggt

SEQ ID NO: 293287 - DNA, 12 bp, Artificial Sequence
  Oligonucleotide primer for the detection of SNP TSC0015565
aaccaaacacaa

SEQ ID NO: 293288 - DNA, 12 bp, Artificial Sequence
  Oligonucleotide primer for the detection of SNP TSC0015565
aaccaaacacga

SEQ ID NO: 293289 - DNA, 12 bp, Artificial Sequence
  Oligonucleotide primer for the detection of SNP TSC0015565
aaccaaacgcaa

SEQ ID NO: 293290 - DNA, 12 bp, Artificial Sequence
  Oligonucleotide primer for the detection of SNP TSC0015565
aaccaaacgcga

SEQ ID NO: 293291 - DNA, 12 bp, Artificial Sequence
  Oligonucleotide primer for the detection of SNP TSC0015565
ataggtgtgagt

SEQ ID NO: 293292 - DNA, 12 bp, Artificial Sequence
  Oligonucleotide primer for the detection of SNP TSC0015565
ataggcgtgagt

SEQ ID NO: 293293 - DNA, 12 bp, Artificial Sequence
  Oligonucleotide primer for the detection of SNP TSC0015565
ataggtgtgagc

SEQ ID NO: 293294 - DNA, 12 bp, Artificial Sequence
  Oligonucleotide primer for the detection of SNP TSC0015565
ataggcgtgagc

SEQ ID NO: 293295 - DNA, 12 bp, Artificial Sequence
  Oligonucleotide primer for the detection of SNP TSC0015566
gtgtggttgttt

SEQ ID NO: 293296 - DNA, 12 bp, Artificial Sequence
  Oligonucleotide primer for the detection of SNP TSC0015566
gcgtggttgttt

SEQ ID NO: 293297 - DNA, 12 bp, Artificial Sequence
  Oligonucleotide primer for the detection of SNP TSC0015566
gtgcggttgttt

SEQ ID NO: 293298 - DNA, 12 bp, Artificial Sequence
  Oligonucleotide primer for the detection of SNP TSC0015566
gtgtggtcgttt

SEQ ID NO: 293299 - DNA, 12 bp, Artificial Sequence
  Oligonucleotide primer for the detection of SNP TSC0015566
gcgcggttgttt

SEQ ID NO: 293300 - DNA, 12 bp, Artificial Sequence
  Oligonucleotide primer for the detection of SNP TSC0015566
gcgtggtcgttt

SEQ ID NO: 293301 - DNA, 12 bp, Artificial Sequence
  Oligonucleotide primer for the detection of SNP TSC0015566
gtgcggtcgttt

SEQ ID NO: 293302 - DNA, 12 bp, Artificial Sequence
  Oligonucleotide primer for the detection of SNP TSC0015566
gcgcggtcgttt

SEQ ID NO: 293303 - DNA, 12 bp, Artificial Sequence
  Oligonucleotide primer for the detection of SNP TSC0015566
acacaatcactc

SEQ ID NO: 293304 - DNA, 12 bp, Artificial Sequence
  Oligonucleotide primer for the detection of SNP TSC0015566
acacaatcgctc

SEQ ID NO: 293305 - DNA, 12 bp, Artificial Sequence
  Oligonucleotide primer for the detection of SNP TSC0015566
acacgatcactc

SEQ ID NO: 293306 - DNA, 12 bp, Artificial Sequence
  Oligonucleotide primer for the detection of SNP TSC0015566
acgcaatcactc

SEQ ID NO: 293307 - DNA, 12 bp, Artificial Sequence
  Oligonucleotide primer for the detection of SNP TSC0015566
acacgatcgctc

SEQ ID NO: 293308 - DNA, 12 bp, Artificial Sequence
  Oligonucleotide primer for the detection of SNP TSC0015566
acgcaatcgctc

SEQ ID NO: 293309 - DNA, 12 bp, Artificial Sequence
  Oligonucleotide primer for the detection of SNP TSC0015566
acgcgatcactc

SEQ ID NO: 293310 - DNA, 12 bp, Artificial Sequence
  Oligonucleotide primer for the detection of SNP TSC0015566
acgcgatcgctc

SEQ ID NO: 293311 - DNA, 12 bp, Artificial Sequence
  Oligonucleotide primer for the detection of SNP TSC0015568
tctaaacacata

SEQ ID NO: 293312 - DNA, 12 bp, Artificial Sequence
  Oligonucleotide primer for the detection of SNP TSC0015568
tctaaacacgta

SEQ ID NO: 293313 - DNA, 12 bp, Artificial Sequence
  Oligonucleotide primer for the detection of SNP TSC0015568
attttactcatc

SEQ ID NO: 293314 - DNA, 12 bp, Artificial Sequence
  Oligonucleotide primer for the detection of SNP TSC0015568
tttgggtatgtg

SEQ ID NO: 293315 - DNA, 12 bp, Artificial Sequence
  Oligonucleotide primer for the detection of SNP TSC0015568
tttgggtacgtg

SEQ ID NO: 293316 - DNA, 12 bp, Artificial Sequence
  Oligonucleotide primer for the detection of SNP TSC0015569
accaaaatcata

SEQ ID NO: 293317 - DNA, 12 bp, Artificial Sequence
  Oligonucleotide primer for the detection of SNP TSC0015569
accaaaatcgta

SEQ ID NO: 293318 - DNA, 12 bp, Artificial Sequence
  Oligonucleotide primer for the detection of SNP TSC0015569
accgaaatcata

SEQ ID NO: 293319 - DNA, 12 bp, Artificial Sequence
  Oligonucleotide primer for the detection of SNP TSC0015569
accgaaatcgta

SEQ ID NO: 293320 - DNA, 12 bp, Artificial Sequence
  Oligonucleotide primer for the detection of SNP TSC0015569
ttagattggagt

SEQ ID NO: 293321 - DNA, 12 bp, Artificial Sequence
  Oligonucleotide primer for the detection of SNP TSC0015569
ccaaactaaaat

SEQ ID NO: 293322 - DNA, 12 bp, Artificial Sequence
  Oligonucleotide primer for the detection of SNP TSC0015569
gttgagattgtg

SEQ ID NO: 293323 - DNA, 12 bp, Artificial Sequence
  Oligonucleotide primer for the detection of SNP TSC0015569
gtcgagattgtg

SEQ ID NO: 293324 - DNA, 12 bp, Artificial Sequence
  Oligonucleotide primer for the detection of SNP TSC0015569
gttgagatcgtg

SEQ ID NO: 293325 - DNA, 12 bp, Artificial Sequence
  Oligonucleotide primer for the detection of SNP TSC0015569
gtcgagatcgtg

SEQ ID NO: 293326 - DNA, 12 bp, Artificial Sequence
  Oligonucleotide primer for the detection of SNP TSC0015570
aataaaccgaaa

SEQ ID NO: 293327 - DNA, 12 bp, Artificial Sequence
  Oligonucleotide primer for the detection of SNP TSC0015570
gagtggagtggt

SEQ ID NO: 293328 - DNA, 12 bp, Artificial Sequence
  Oligonucleotide primer for the detection of SNP TSC0015570
gagtggagcggt

SEQ ID NO: 293329 - DNA, 12 bp, Artificial Sequence
  Oligonucleotide primer for the detection of SNP TSC0015570
aaataaaacaac

SEQ ID NO: 293330 - DNA, 12 bp, Artificial Sequence
  Oligonucleotide primer for the detection of SNP TSC0015570
aaataaaacgac

SEQ ID NO: 293331 - DNA, 12 bp, Artificial Sequence
  Oligonucleotide primer for the detection of SNP TSC0015570
aatgagttgaga

SEQ ID NO: 293332 - DNA, 12 bp, Artificial Sequence
  Oligonucleotide primer for the detection of SNP TSC0015570
aatgagtcgaga

SEQ ID NO: 293333 - DNA, 12 bp, Artificial Sequence
  Oligonucleotide primer for the detection of SNP TSC0015571
aattcataccta

SEQ ID NO: 293334 - DNA, 12 bp, Artificial Sequence
  Oligonucleotide primer for the detection of SNP TSC0015571
agtagttgggat

SEQ ID NO: 293335 - DNA, 12 bp, Artificial Sequence
  Oligonucleotide primer for the detection of SNP TSC0015571
ggtttatgtttg

SEQ ID NO: 293336 - DNA, 12 bp, Artificial Sequence
  Oligonucleotide primer for the detection of SNP TSC0015572
ccaaattaattt

SEQ ID NO: 293337 - DNA, 12 bp, Artificial Sequence
  Oligonucleotide primer for the detection of SNP TSC0015572
tgagttatatta

SEQ ID NO: 293338 - DNA, 12 bp, Artificial Sequence
  Oligonucleotide primer for the detection of SNP TSC0015573
ttttgtagaagg

SEQ ID NO: 293339 - DNA, 12 bp, Artificial Sequence
  Oligonucleotide primer for the detection of SNP TSC0015574
ttcctaaatccc

SEQ ID NO: 293340 - DNA, 12 bp, Artificial Sequence
  Oligonucleotide primer for the detection of SNP TSC0015574
aatatttttata

SEQ ID NO: 293341 - DNA, 12 bp, Artificial Sequence
  Oligonucleotide primer for the detection of SNP TSC0015575
tctaaaaaaccc

SEQ ID NO: 293342 - DNA, 12 bp, Artificial Sequence
  Oligonucleotide primer for the detection of SNP TSC0015575
aggtaggaatta

SEQ ID NO: 293343 - DNA, 12 bp, Artificial Sequence
  Oligonucleotide primer for the detection of SNP TSC0015575
aaacaaaaatca

SEQ ID NO: 293344 - DNA, 12 bp, Artificial Sequence
  Oligonucleotide primer for the detection of SNP TSC0015575
tttaggagattt

SEQ ID NO: 293345 - DNA, 12 bp, Artificial Sequence
  Oligonucleotide primer for the detection of SNP TSC0015576
aaatcttccctc

SEQ ID NO: 293346 - DNA, 12 bp, Artificial Sequence
  Oligonucleotide primer for the detection of SNP TSC0015576
gagggaaggaaa

SEQ ID NO: 293347 - DNA, 12 bp, Artificial Sequence
  Oligonucleotide primer for the detection of SNP TSC0015578
attttaggattt

SEQ ID NO: 293348 - DNA, 12 bp, Artificial Sequence
  Oligonucleotide primer for the detection of SNP TSC0015578
accactccaaaa

SEQ ID NO: 293349 - DNA, 12 bp, Artificial Sequence
  Oligonucleotide primer for the detection of SNP TSC0015578
atgaaaggagag

SEQ ID NO: 293350 - DNA, 12 bp, Artificial Sequence
  Oligonucleotide primer for the detection of SNP TSC0015579
tacaaatataaa

SEQ ID NO: 293351 - DNA, 12 bp, Artificial Sequence
  Oligonucleotide primer for the detection of SNP TSC0015579
aacccttctcta

SEQ ID NO: 293352 - DNA, 12 bp, Artificial Sequence
  Oligonucleotide primer for the detection of SNP TSC0015579
gtgtagatatgg

SEQ ID NO: 293353 - DNA, 12 bp, Artificial Sequence
  Oligonucleotide primer for the detection of SNP TSC0015580
tattaatacatt

SEQ ID NO: 293354 - DNA, 12 bp, Artificial Sequence
  Oligonucleotide primer for the detection of SNP TSC0015580
tattaatacgtt

SEQ ID NO: 293355 - DNA, 12 bp, Artificial Sequence
  Oligonucleotide primer for the detection of SNP TSC0015580
tgtatgatttta

SEQ ID NO: 293356 - DNA, 12 bp, Artificial Sequence
  Oligonucleotide primer for the detection of SNP TSC0015581
tagagtgaaatg

SEQ ID NO: 293357 - DNA, 12 bp, Artificial Sequence
  Oligonucleotide primer for the detection of SNP TSC0015581
tagagcgaaatg

SEQ ID NO: 293358 - DNA, 12 bp, Artificial Sequence
  Oligonucleotide primer for the detection of SNP TSC0015581
caaaacgaaata

SEQ ID NO: 293359 - DNA, 12 bp, Artificial Sequence
  Oligonucleotide primer for the detection of SNP TSC0015581
tgagttttgttt

SEQ ID NO: 293360 - DNA, 12 bp, Artificial Sequence
  Oligonucleotide primer for the detection of SNP TSC0015584
aaaaaattatcc

SEQ ID NO: 293361 - DNA, 12 bp, Artificial Sequence
  Oligonucleotide primer for the detection of SNP TSC0015584
ttttttcatcaa

SEQ ID NO: 293362 - DNA, 12 bp, Artificial Sequence
  Oligonukleotid-Primer
gggaaattgttt

SEQ ID NO: 293363 - DNA, 12 bp, Artificial Sequence
  Oligonucleotide primer for the detection of SNP TSC0015584
gggaaattgttc

SEQ ID NO: 293364 - DNA, 12 bp, Artificial Sequence
  Oligonucleotide primer for the detection of SNP TSC0015585
cataaaatctat

SEQ ID NO: 293365 - DNA, 12 bp, Artificial Sequence
  Oligonucleotide primer for the detection of SNP TSC0015585
cgtaaaatctat

SEQ ID NO: 293366 - DNA, 12 bp, Artificial Sequence
  Oligonucleotide primer for the detection of SNP TSC0015585
attggttttttt

SEQ ID NO: 293367 - DNA, 12 bp, Artificial Sequence
  Oligonucleotide primer for the detection of SNP TSC0015585
atcggttttttt

SEQ ID NO: 293368 - DNA, 12 bp, Artificial Sequence
  Oligonucleotide primer for the detection of SNP TSC0015585
aatcaatttctc

SEQ ID NO: 293369 - DNA, 12 bp, Artificial Sequence
  Oligonucleotide primer for the detection of SNP TSC0015585
aatcgatttctc

SEQ ID NO: 293370 - DNA, 12 bp, Artificial Sequence
  Oligonucleotide primer for the detection of SNP TSC0015585
tgtaagatttgt

SEQ ID NO: 293371 - DNA, 12 bp, Artificial Sequence
  Oligonucleotide primer for the detection of SNP TSC0015585
cgtaagatttgt

SEQ ID NO: 293372 - DNA, 12 bp, Artificial Sequence
  Oligonucleotide primer for the detection of SNP TSC0015586
tattttatatta

SEQ ID NO: 293373 - DNA, 12 bp, Artificial Sequence
  Oligonucleotide primer for the detection of SNP TSC0015587
ttctaccactta

SEQ ID NO: 293374 - DNA, 12 bp, Artificial Sequence
  Oligonucleotide primer for the detection of SNP TSC0015587
ttctaccgctta

SEQ ID NO: 293375 - DNA, 12 bp, Artificial Sequence
  Oligonucleotide primer for the detection of SNP TSC0015587
atagtatgttat

SEQ ID NO: 293376 - DNA, 12 bp, Artificial Sequence
  Oligonucleotide primer for the detection of SNP TSC0015587
acaacataccat

SEQ ID NO: 293377 - DNA, 12 bp, Artificial Sequence
  Oligonucleotide primer for the detection of SNP TSC0015589
tctacctaaaaa

SEQ ID NO: 293378 - DNA, 12 bp, Artificial Sequence
  Oligonucleotide primer for the detection of SNP TSC0015589
agaaatataaat

SEQ ID NO: 293379 - DNA, 12 bp, Artificial Sequence
  Oligonucleotide primer for the detection of SNP TSC0015589
caaaaacacaaa

SEQ ID NO: 293380 - DNA, 12 bp, Artificial Sequence
  Oligonucleotide primer for the detection of SNP TSC0015589
ttatttggaagt

SEQ ID NO: 293381 - DNA, 12 bp, Artificial Sequence
  Oligonucleotide primer for the detection of SNP TSC0015589
ttatttggaagc

SEQ ID NO: 293382 - DNA, 12 bp, Artificial Sequence
  Oligonucleotide primer for the detection of SNP TSC0015590
aaatacatacat

SEQ ID NO: 293383 - DNA, 12 bp, Artificial Sequence
  Oligonucleotide primer for the detection of SNP TSC0015590
ataaatgatata

SEQ ID NO: 293384 - DNA, 12 bp, Artificial Sequence
  Oligonucleotide primer for the detection of SNP TSC0015590
acaaataataca

SEQ ID NO: 293385 - DNA, 12 bp, Artificial Sequence
  Oligonucleotide primer for the detection of SNP TSC0015590
agatatatgtat

SEQ ID NO: 293386 - DNA, 12 bp, Artificial Sequence
  Oligonucleotide primer for the detection of SNP TSC0015591
taaaaaaacaaa

SEQ ID NO: 293387 - DNA, 12 bp, Artificial Sequence
  Oligonucleotide primer for the detection of SNP TSC0015591
tgaaaggtgttt

SEQ ID NO: 293388 - DNA, 12 bp, Artificial Sequence
  Oligonucleotide primer for the detection of SNP TSC0015591
cgaaaggtgttt

SEQ ID NO: 293389 - DNA, 12 bp, Artificial Sequence
  Oligonucleotide primer for the detection of SNP TSC0015591
tgaaaggcgttt

SEQ ID NO: 293390 - DNA, 12 bp, Artificial Sequence
  Oligonucleotide primer for the detection of SNP TSC0015591
cgaaaggcgttt

SEQ ID NO: 293391 - DNA, 12 bp, Artificial Sequence
  Oligonucleotide primer for the detection of SNP TSC0015591
aaaaaacattca

SEQ ID NO: 293392 - DNA, 12 bp, Artificial Sequence
  Oligonucleotide primer for the detection of SNP TSC0015591
aaaaaacgttca

SEQ ID NO: 293393 - DNA, 12 bp, Artificial Sequence
  Oligonucleotide primer for the detection of SNP TSC0015591
gaaaaacattca

SEQ ID NO: 293394 - DNA, 12 bp, Artificial Sequence
  Oligonucleotide primer for the detection of SNP TSC0015591
gaaaaacgttca

SEQ ID NO: 293395 - DNA, 12 bp, Artificial Sequence
  Oligonucleotide primer for the detection of SNP TSC0015591
gtaagaggatag

SEQ ID NO: 293396 - DNA, 12 bp, Artificial Sequence
  Oligonucleotide primer for the detection of SNP TSC0015593
aataccttaata

SEQ ID NO: 293397 - DNA, 12 bp, Artificial Sequence
  Oligonucleotide primer for the detection of SNP TSC0015593
aatatttatatt

SEQ ID NO: 293398 - DNA, 12 bp, Artificial Sequence
  Oligonucleotide primer for the detection of SNP TSC0015593
gtgttttgatat

SEQ ID NO: 293399 - DNA, 12 bp, Artificial Sequence
  Oligonucleotide primer for the detection of SNP TSC0015594
ccattaaaccac

SEQ ID NO: 293400 - DNA, 12 bp, Artificial Sequence
  Oligonucleotide primer for the detection of SNP TSC0015594
ttggaatgatta

SEQ ID NO: 293401 - DNA, 12 bp, Artificial Sequence
  Oligonucleotide primer for the detection of SNP TSC0015595
atcattcttatc

SEQ ID NO: 293402 - DNA, 12 bp, Artificial Sequence
  Oligonucleotide primer for the detection of SNP TSC0015595
aagaaatagtta

SEQ ID NO: 293403 - DNA, 12 bp, Artificial Sequence
  Oligonucleotide primer for the detection of SNP TSC0015595
aaaaaacaacca

SEQ ID NO: 293404 - DNA, 12 bp, Artificial Sequence
  Oligonucleotide primer for the detection of SNP TSC0015595
gttatttttgtt

SEQ ID NO: 293405 - DNA, 12 bp, Artificial Sequence
  Oligonucleotide primer for the detection of SNP TSC0015597
acaataacaata

SEQ ID NO: 293406 - DNA, 12 bp, Artificial Sequence
  Oligonucleotide primer for the detection of SNP TSC0015597
ataataataata

SEQ ID NO: 293407 - DNA, 12 bp, Artificial Sequence
  Oligonucleotide primer for the detection of SNP TSC0015598
atctcatccacc

SEQ ID NO: 293408 - DNA, 12 bp, Artificial Sequence
  Oligonucleotide primer for the detection of SNP TSC0015598
attttgagtaag

SEQ ID NO: 293409 - DNA, 12 bp, Artificial Sequence
  Oligonucleotide primer for the detection of SNP TSC0015598
actctaaataaa

SEQ ID NO: 293410 - DNA, 12 bp, Artificial Sequence
  Oligonucleotide primer for the detection of SNP TSC0015599
ttagtagtagta

SEQ ID NO: 293411 - DNA, 12 bp, Artificial Sequence
  Oligonucleotide primer for the detection of SNP TSC0015600
gtattatttttt

SEQ ID NO: 293412 - DNA, 12 bp, Artificial Sequence
  Oligonucleotide primer for the detection of SNP TSC0015600
acaccacccctt

SEQ ID NO: 293413 - DNA, 12 bp, Artificial Sequence
  Oligonucleotide primer for the detection of SNP TSC0015600
gagaatagtatt

SEQ ID NO: 293414 - DNA, 12 bp, Artificial Sequence
  Oligonucleotide primer for the detection of SNP TSC0015609
attcctaaaaaa

SEQ ID NO: 293415 - DNA, 12 bp, Artificial Sequence
  Oligonucleotide primer for the detection of SNP TSC0015609
tgtttaatatat

SEQ ID NO: 293416 - DNA, 12 bp, Artificial Sequence
  Oligonucleotide primer for the detection of SNP TSC0015609
tacttaatatac

SEQ ID NO: 293417 - DNA, 12 bp, Artificial Sequence
  Oligonucleotide primer for the detection of SNP TSC0015609
gtttttgaagaa

SEQ ID NO: 293418 - DNA, 12 bp, Artificial Sequence
  Oligonucleotide primer for the detection of SNP TSC0015610
aaattaactaac

SEQ ID NO: 293419 - DNA, 12 bp, Artificial Sequence
  Oligonucleotide primer for the detection of SNP TSC0015610
ttatatgatttg

SEQ ID NO: 293420 - DNA, 12 bp, Artificial Sequence
  Oligonucleotide primer for the detection of SNP TSC0015610
ttacataattta

SEQ ID NO: 293421 - DNA, 12 bp, Artificial Sequence
  Oligonucleotide primer for the detection of SNP TSC0015610
agttaattaatt

SEQ ID NO: 293422 - DNA, 12 bp, Artificial Sequence
  Oligonucleotide primer for the detection of SNP TSC0015611
ttcccattatac

SEQ ID NO: 293423 - DNA, 12 bp, Artificial Sequence
  Oligonucleotide primer for the detection of SNP TSC0015611
aattcctttata

SEQ ID NO: 293424 - DNA, 12 bp, Artificial Sequence
  Oligonucleotide primer for the detection of SNP TSC0015611
tttttattgtat

SEQ ID NO: 293425 - DNA, 12 bp, Artificial Sequence
  Oligonucleotide primer for the detection of SNP TSC0015616
caataataactc

SEQ ID NO: 293426 - DNA, 12 bp, Artificial Sequence
  Oligonucleotide primer for the detection of SNP TSC0015616
aaatgttataag

SEQ ID NO: 293427 - DNA, 12 bp, Artificial Sequence
  Oligonucleotide primer for the detection of SNP TSC0015616
aaatatcacaaa

SEQ ID NO: 293428 - DNA, 12 bp, Artificial Sequence
  Oligonucleotide primer for the detection of SNP TSC0015616
tagtgatagttt

SEQ ID NO: 293429 - DNA, 12 bp, Artificial Sequence
  Oligonucleotide primer for the detection of SNP TSC0015617
ttattggtttga

SEQ ID NO: 293430 - DNA, 12 bp, Artificial Sequence
  Oligonucleotide primer for the detection of SNP TSC0015617
ttattggttcga

SEQ ID NO: 293431 - DNA, 12 bp, Artificial Sequence
  Oligonukleotid-Primer
ccactaacccaa

SEQ ID NO: 293432 - DNA, 12 bp, Artificial Sequence
  Oligonucleotide primer for the detection of SNP TSC0015617
ccactaacccga

SEQ ID NO: 293433 - DNA, 12 bp, Artificial Sequence
  Oligonucleotide primer for the detection of SNP TSC0015617
aaggaagatgaa

SEQ ID NO: 293434 - DNA, 12 bp, Artificial Sequence
  Oligonucleotide primer for the detection of SNP TSC0015618
tggtgtttgaag

SEQ ID NO: 293435 - DNA, 12 bp, Artificial Sequence
  Oligonucleotide primer for the detection of SNP TSC0015618
tggcgtttgaag

SEQ ID NO: 293436 - DNA, 12 bp, Artificial Sequence
  Oligonucleotide primer for the detection of SNP TSC0015618
gtctaaaaaaaa

SEQ ID NO: 293437 - DNA, 12 bp, Artificial Sequence
  Oligonucleotide primer for the detection of SNP TSC0015618
ggaataattatt

SEQ ID NO: 293438 - DNA, 12 bp, Artificial Sequence
  Oligonucleotide primer for the detection of SNP TSC0015620
tctcttaaaaat

SEQ ID NO: 293439 - DNA, 12 bp, Artificial Sequence
  Oligonucleotide primer for the detection of SNP TSC0015620
gtttaaattagg

SEQ ID NO: 293440 - DNA, 12 bp, Artificial Sequence
  Oligonucleotide primer for the detection of SNP TSC0015621
taaaataaacct

SEQ ID NO: 293441 - DNA, 12 bp, Artificial Sequence
  Oligonucleotide primer for the detection of SNP TSC0015622
tttaatttacaa

SEQ ID NO: 293442 - DNA, 12 bp, Artificial Sequence
  Oligonucleotide primer for the detection of SNP TSC0015622
tttaattagttg

SEQ ID NO: 293443 - DNA, 12 bp, Artificial Sequence
  Oligonucleotide primer for the detection of SNP TSC0015622
tctaattaatta

SEQ ID NO: 293444 - DNA, 12 bp, Artificial Sequence
  Oligonucleotide primer for the detection of SNP TSC0015622
ttttaatttgta

SEQ ID NO: 293445 - DNA, 12 bp, Artificial Sequence
  Oligonucleotide primer for the detection of SNP TSC0015623
ataaaaataatt

SEQ ID NO: 293446 - DNA, 12 bp, Artificial Sequence
  Oligonucleotide primer for the detection of SNP TSC0015623
atttttagtagg

SEQ ID NO: 293447 - DNA, 12 bp, Artificial Sequence
  Oligonucleotide primer for the detection of SNP TSC0015623
atttccaacaaa

SEQ ID NO: 293448 - DNA, 12 bp, Artificial Sequence
  Oligonucleotide primer for the detection of SNP TSC0015624
tttaagttgata

SEQ ID NO: 293449 - DNA, 12 bp, Artificial Sequence
  Oligonucleotide primer for the detection of SNP TSC0015625
aaatatacatac

SEQ ID NO: 293450 - DNA, 12 bp, Artificial Sequence
  Oligonucleotide primer for the detection of SNP TSC0015625
taatgggatata

SEQ ID NO: 293451 - DNA, 12 bp, Artificial Sequence
  Oligonucleotide primer for the detection of SNP TSC0015625
taacgggatata

SEQ ID NO: 293452 - DNA, 12 bp, Artificial Sequence
  Oligonucleotide primer for the detection of SNP TSC0015625
taacaaaacata

SEQ ID NO: 293453 - DNA, 12 bp, Artificial Sequence
  Oligonucleotide primer for the detection of SNP TSC0015625
taacgaaacata

SEQ ID NO: 293454 - DNA, 12 bp, Artificial Sequence
  Oligonucleotide primer for the detection of SNP TSC0015625
aaatgtgtatgt

SEQ ID NO: 293455 - DNA, 12 bp, Artificial Sequence
  Oligonucleotide primer for the detection of SNP TSC0015625
aaatgtgtatgc

SEQ ID NO: 293456 - DNA, 12 bp, Artificial Sequence
  Oligonucleotide primer for the detection of SNP TSC0015626
tcccaaaacaaa

SEQ ID NO: 293457 - DNA, 12 bp, Artificial Sequence
  Oligonucleotide primer for the detection of SNP TSC0015626
tcttactacttt

SEQ ID NO: 293458 - DNA, 12 bp, Artificial Sequence
  Oligonucleotide primer for the detection of SNP TSC0015626
ttttagggtaga

SEQ ID NO: 293459 - DNA, 12 bp, Artificial Sequence
  Oligonucleotide primer for the detection of SNP TSC0015629
aatccacaaaat

SEQ ID NO: 293460 - DNA, 12 bp, Artificial Sequence
  Oligonucleotide primer for the detection of SNP TSC0015629
aatccacgaaat

SEQ ID NO: 293461 - DNA, 12 bp, Artificial Sequence
  Oligonucleotide primer for the detection of SNP TSC0015629
ttgtgtttttgg

SEQ ID NO: 293462 - DNA, 12 bp, Artificial Sequence
  Oligonucleotide primer for the detection of SNP TSC0015629
tcgtgtttttgg

SEQ ID NO: 293463 - DNA, 12 bp, Artificial Sequence
  Oligonucleotide primer for the detection of SNP TSC0015629
ccatactcctaa

SEQ ID NO: 293464 - DNA, 12 bp, Artificial Sequence
  Oligonucleotide primer for the detection of SNP TSC0015629
ccgtactcctaa

SEQ ID NO: 293465 - DNA, 12 bp, Artificial Sequence
  Oligonucleotide primer for the detection of SNP TSC0015629
agtttatgaggt

SEQ ID NO: 293466 - DNA, 12 bp, Artificial Sequence
  Oligonucleotide primer for the detection of SNP TSC0015629
agtttacgaggt

SEQ ID NO: 293467 - DNA, 12 bp, Artificial Sequence
  Oligonucleotide primer for the detection of SNP TSC0015630
ataaaatatcaa

SEQ ID NO: 293468 - DNA, 12 bp, Artificial Sequence
  Oligonucleotide primer for the detection of SNP TSC0015630
agttttagtttg

SEQ ID NO: 293469 - DNA, 12 bp, Artificial Sequence
  Oligonucleotide primer for the detection of SNP TSC0015630
aattttaactta

SEQ ID NO: 293470 - DNA, 12 bp, Artificial Sequence
  Oligonucleotide primer for the detection of SNP TSC0015630
gtagagtgttaa

SEQ ID NO: 293471 - DNA, 12 bp, Artificial Sequence
  Oligonucleotide primer for the detection of SNP TSC0015631
actcttaaaatt

SEQ ID NO: 293472 - DNA, 12 bp, Artificial Sequence
  Oligonucleotide primer for the detection of SNP TSC0015631
gtaaagtgatta

SEQ ID NO: 293473 - DNA, 12 bp, Artificial Sequence
  Oligonucleotide primer for the detection of SNP TSC0015631
atttttggaatt

SEQ ID NO: 293474 - DNA, 12 bp, Artificial Sequence
  Oligonucleotide primer for the detection of SNP TSC0015632
accaactaaacc

SEQ ID NO: 293475 - DNA, 12 bp, Artificial Sequence
  Oligonucleotide primer for the detection of SNP TSC0015632
accgactaaacc

SEQ ID NO: 293476 - DNA, 12 bp, Artificial Sequence
  Oligonucleotide primer for the detection of SNP TSC0015632
aatttttagttg

SEQ ID NO: 293477 - DNA, 12 bp, Artificial Sequence
  Oligonucleotide primer for the detection of SNP TSC0015632
aaccttcaacta

SEQ ID NO: 293478 - DNA, 12 bp, Artificial Sequence
  Oligonucleotide primer for the detection of SNP TSC0015632
attggttgagtt

SEQ ID NO: 293479 - DNA, 12 bp, Artificial Sequence
  Oligonucleotide primer for the detection of SNP TSC0015632
atcggttgagtt

SEQ ID NO: 293480 - DNA, 12 bp, Artificial Sequence
  Oligonucleotide primer for the detection of SNP TSC0015633
ccccaaaccaca

SEQ ID NO: 293481 - DNA, 12 bp, Artificial Sequence
  Oligonucleotide primer for the detection of SNP TSC0015633
atgttttaaagt

SEQ ID NO: 293482 - DNA, 12 bp, Artificial Sequence
  Oligonucleotide primer for the detection of SNP TSC0015633
acgttttaaagt

SEQ ID NO: 293483 - DNA, 12 bp, Artificial Sequence
  Oligonucleotide primer for the detection of SNP TSC0015633
atgttttaaagc

SEQ ID NO: 293484 - DNA, 12 bp, Artificial Sequence
  Oligonucleotide primer for the detection of SNP TSC0015633
acgttttaaagc

SEQ ID NO: 293485 - DNA, 12 bp, Artificial Sequence
  Oligonucleotide primer for the detection of SNP TSC0015633
cacatcccaaaa

SEQ ID NO: 293486 - DNA, 12 bp, Artificial Sequence
  Oligonucleotide primer for the detection of SNP TSC0015633
cacgtcccaaaa

SEQ ID NO: 293487 - DNA, 12 bp, Artificial Sequence
  Oligonucleotide primer for the detection of SNP TSC0015633
tttaggttatat

SEQ ID NO: 293488 - DNA, 12 bp, Artificial Sequence
  Oligonucleotide primer for the detection of SNP TSC0015634
ataaaactcaac

SEQ ID NO: 293489 - DNA, 12 bp, Artificial Sequence
  Oligonucleotide primer for the detection of SNP TSC0015634
aattgtaggtta

SEQ ID NO: 293490 - DNA, 12 bp, Artificial Sequence
  Oligonucleotide primer for the detection of SNP TSC0015635
aattaaccaatc

SEQ ID NO: 293491 - DNA, 12 bp, Artificial Sequence
  Oligonucleotide primer for the detection of SNP TSC0015635
tgggtattttga

SEQ ID NO: 293492 - DNA, 12 bp, Artificial Sequence
  Oligonucleotide primer for the detection of SNP TSC0015635
taaataccttaa

SEQ ID NO: 293493 - DNA, 12 bp, Artificial Sequence
  Oligonucleotide primer for the detection of SNP TSC0015635
gattggttagtt

SEQ ID NO: 293494 - DNA, 12 bp, Artificial Sequence
  Oligonucleotide primer for the detection of SNP TSC0015636
actaaacataac

SEQ ID NO: 293495 - DNA, 12 bp, Artificial Sequence
  Oligonucleotide primer for the detection of SNP TSC0015636
tattattatttg

SEQ ID NO: 293496 - DNA, 12 bp, Artificial Sequence
  Oligonukleotid-Primer
cattattatcta

SEQ ID NO: 293497 - DNA, 12 bp, Artificial Sequence
  Oligonucleotide primer for the detection of SNP TSC0015636
gttaaatatgat

SEQ ID NO: 293498 - DNA, 12 bp, Artificial Sequence
  Oligonucleotide primer for the detection of SNP TSC0015637
tcctctccctct

SEQ ID NO: 293499 - DNA, 12 bp, Artificial Sequence
  Oligonucleotide primer for the detection of SNP TSC0015637
ttgtgagagatg

SEQ ID NO: 293500 - DNA, 12 bp, Artificial Sequence
  Oligonucleotide primer for the detection of SNP TSC0015637
ttgcgagagatg

SEQ ID NO: 293501 - DNA, 12 bp, Artificial Sequence
  Oligonucleotide primer for the detection of SNP TSC0015641
ttcaacctttct

SEQ ID NO: 293502 - DNA, 12 bp, Artificial Sequence
  Oligonucleotide primer for the detection of SNP TSC0015641
tgtatataatta

SEQ ID NO: 293503 - DNA, 12 bp, Artificial Sequence
  Oligonucleotide primer for the detection of SNP TSC0015642
agtagtaagggg

SEQ ID NO: 293504 - DNA, 12 bp, Artificial Sequence
  Oligonukleotid-Primer
atataaattaac

SEQ ID NO: 293505 - DNA, 12 bp, Artificial Sequence
  Oligonucleotide primer for the detection of SNP TSC0015643
tttttaaatgta

SEQ ID NO: 293506 - DNA, 12 bp, Artificial Sequence
  Oligonucleotide primer for the detection of SNP TSC0015648
acaccctaccct

SEQ ID NO: 293507 - DNA, 12 bp, Artificial Sequence
  Oligonucleotide primer for the detection of SNP TSC0015648
ggagtgttagta

SEQ ID NO: 293508 - DNA, 12 bp, Artificial Sequence
  Oligonukleotid-Primer
gaggaaatatgt

SEQ ID NO: 293509 - DNA, 12 bp, Artificial Sequence
  Oligonucleotide primer for the detection of SNP TSC0015649
gaggaaatatgc

SEQ ID NO: 293510 - DNA, 12 bp, Artificial Sequence
  Oligonucleotide primer for the detection of SNP TSC0015649
aaaaaaatatac

SEQ ID NO: 293511 - DNA, 12 bp, Artificial Sequence
  Oligonucleotide primer for the detection of SNP TSC0015649
tgttaatgtttg

SEQ ID NO: 293512 - DNA, 12 bp, Artificial Sequence
  Oligonucleotide primer for the detection of SNP TSC0015651
atatatatacat

SEQ ID NO: 293513 - DNA, 12 bp, Artificial Sequence
  Oligonucleotide primer for the detection of SNP TSC0015651
gtatatatacat

SEQ ID NO: 293514 - DNA, 12 bp, Artificial Sequence
  Oligonucleotide primer for the detection of SNP TSC0015652
acacatacacac

SEQ ID NO: 293515 - DNA, 12 bp, Artificial Sequence
  Oligonucleotide primer for the detection of SNP TSC0015652
tgtgtgtatgag

SEQ ID NO: 293516 - DNA, 12 bp, Artificial Sequence
  Oligonucleotide primer for the detection of SNP TSC0015652
tatatacataaa

SEQ ID NO: 293517 - DNA, 12 bp, Artificial Sequence
  Oligonucleotide primer for the detection of SNP TSC0015654
ccttcaaaatat

SEQ ID NO: 293518 - DNA, 12 bp, Artificial Sequence
  Oligonucleotide primer for the detection of SNP TSC0015654
tccttctctctc

SEQ ID NO: 293519 - DNA, 12 bp, Artificial Sequence
  Oligonucleotide primer for the detection of SNP TSC0015654
tttttagggtgt

SEQ ID NO: 293520 - DNA, 12 bp, Artificial Sequence
  Oligonucleotide primer for the detection of SNP TSC0015655
ataatttatacc

SEQ ID NO: 293521 - DNA, 12 bp, Artificial Sequence
  Oligonucleotide primer for the detection of SNP TSC0015655
agaaatttgttt

SEQ ID NO: 293522 - DNA, 12 bp, Artificial Sequence
  Oligonucleotide primer for the detection of SNP TSC0015656
tccatatcaact

SEQ ID NO: 293523 - DNA, 12 bp, Artificial Sequence
  Oligonucleotide primer for the detection of SNP TSC0015656
aatgttttttta

SEQ ID NO: 293524 - DNA, 12 bp, Artificial Sequence
  Oligonucleotide primer for the detection of SNP TSC0015656
aatattccttta

SEQ ID NO: 293525 - DNA, 12 bp, Artificial Sequence
  Oligonucleotide primer for the detection of SNP TSC0015656
tttatgttagtt

SEQ ID NO: 293526 - DNA, 12 bp, Artificial Sequence
  Oligonucleotide primer for the detection of SNP TSC0015657
tttttctcaatt

SEQ ID NO: 293527 - DNA, 12 bp, Artificial Sequence
  Oligonucleotide primer for the detection of SNP TSC0015657
ttgatatggagg

SEQ ID NO: 293528 - DNA, 12 bp, Artificial Sequence
  Oligonucleotide primer for the detection of SNP TSC0015658
aaactattttct

SEQ ID NO: 293529 - DNA, 12 bp, Artificial Sequence
  Oligonucleotide primer for the detection of SNP TSC0015658
tttatttgagaa

SEQ ID NO: 293530 - DNA, 12 bp, Artificial Sequence
  Oligonucleotide primer for the detection of SNP TSC0015659
aaaaaatattat

SEQ ID NO: 293531 - DNA, 12 bp, Artificial Sequence
  Oligonucleotide primer for the detection of SNP TSC0015659
tattaataaaat

SEQ ID NO: 293532 - DNA, 12 bp, Artificial Sequence
  Oligonucleotide primer for the detection of SNP TSC0015659
agagaatattat

SEQ ID NO: 293533 - DNA, 12 bp, Artificial Sequence
  Oligonucleotide primer for the detection of SNP TSC0015661
tacttaaaaata

SEQ ID NO: 293534 - DNA, 12 bp, Artificial Sequence
  Oligonucleotide primer for the detection of SNP TSC0015661
aattattatttt

SEQ ID NO: 293535 - DNA, 12 bp, Artificial Sequence
  Oligonucleotide primer for the detection of SNP TSC0015661
aattaccacctt

SEQ ID NO: 293536 - DNA, 12 bp, Artificial Sequence
  Oligonucleotide primer for the detection of SNP TSC0015661
tatttaaaaatg

SEQ ID NO: 293537 - DNA, 12 bp, Artificial Sequence
  Oligonucleotide primer for the detection of SNP TSC0015662
aacaaaatatct

SEQ ID NO: 293538 - DNA, 12 bp, Artificial Sequence
  Oligonucleotide primer for the detection of SNP TSC0015662
aacgaaatatct

SEQ ID NO: 293539 - DNA, 12 bp, Artificial Sequence
  Oligonucleotide primer for the detection of SNP TSC0015662
ttggttaatatg

SEQ ID NO: 293540 - DNA, 12 bp, Artificial Sequence
  Oligonucleotide primer for the detection of SNP TSC0015663
tcaaaccacctt

SEQ ID NO: 293541 - DNA, 12 bp, Artificial Sequence
  Oligonucleotide primer for the detection of SNP TSC0015663
agattgttaggt

SEQ ID NO: 293542 - DNA, 12 bp, Artificial Sequence
  Oligonucleotide primer for the detection of SNP TSC0015663
aaaactatcaaa

SEQ ID NO: 293543 - DNA, 12 bp, Artificial Sequence
  Oligonucleotide primer for the detection of SNP TSC0015664
agattttaaaat

SEQ ID NO: 293544 - DNA, 12 bp, Artificial Sequence
  Oligonucleotide primer for the detection of SNP TSC0015664
aaacttcaaaat

SEQ ID NO: 293545 - DNA, 12 bp, Artificial Sequence
  Oligonucleotide primer for the detection of SNP TSC0015664
atttgggaatga

SEQ ID NO: 293546 - DNA, 12 bp, Artificial Sequence
  Oligonucleotide primer for the detection of SNP TSC0015665
taaacataatcc

SEQ ID NO: 293547 - DNA, 12 bp, Artificial Sequence
  Oligonucleotide primer for the detection of SNP TSC0015665
tttaggtagggt

SEQ ID NO: 293548 - DNA, 12 bp, Artificial Sequence
  Oligonucleotide primer for the detection of SNP TSC0015665
tcaaacaaaaca

SEQ ID NO: 293549 - DNA, 12 bp, Artificial Sequence
  Oligonucleotide primer for the detection of SNP TSC0015665
taagtatggttt

SEQ ID NO: 293550 - DNA, 12 bp, Artificial Sequence
  Oligonucleotide primer for the detection of SNP TSC0015665
taagtatggttc

SEQ ID NO: 293551 - DNA, 12 bp, Artificial Sequence
  Oligonucleotide primer for the detection of SNP TSC0015666
ttaaaacattct

SEQ ID NO: 293552 - DNA, 12 bp, Artificial Sequence
  Oligonucleotide primer for the detection of SNP TSC0015666
gggattattgta

SEQ ID NO: 293553 - DNA, 12 bp, Artificial Sequence
  Oligonucleotide primer for the detection of SNP TSC0015667
aaataaaactaa

SEQ ID NO: 293554 - DNA, 12 bp, Artificial Sequence
  Oligonucleotide primer for the detection of SNP TSC0015668
aaatacaaaaat

SEQ ID NO: 293555 - DNA, 12 bp, Artificial Sequence
  Oligonucleotide primer for the detection of SNP TSC0015668
ggaaaggagaaa

SEQ ID NO: 293556 - DNA, 12 bp, Artificial Sequence
  Oligonucleotide primer for the detection of SNP TSC0015673
attctcttcctt

SEQ ID NO: 293557 - DNA, 12 bp, Artificial Sequence
  Oligonucleotide primer for the detection of SNP TSC0015673
gaatatgattta

SEQ ID NO: 293558 - DNA, 12 bp, Artificial Sequence
  Oligonucleotide primer for the detection of SNP TSC0015673
aaatataactta

SEQ ID NO: 293559 - DNA, 12 bp, Artificial Sequence
  Oligonucleotide primer for the detection of SNP TSC0015675
atacaaaaaatc

SEQ ID NO: 293560 - DNA, 12 bp, Artificial Sequence
  Oligonucleotide primer for the detection of SNP TSC0015675
ttattattttga

SEQ ID NO: 293561 - DNA, 12 bp, Artificial Sequence
  Oligonucleotide primer for the detection of SNP TSC0015678
ctaaaacgaaac

SEQ ID NO: 293562 - DNA, 12 bp, Artificial Sequence
  Oligonucleotide primer for the detection of SNP TSC0015678
aggtatgagtta

SEQ ID NO: 293563 - DNA, 12 bp, Artificial Sequence
  Oligonucleotide primer for the detection of SNP TSC0015678
aaacataaacca

SEQ ID NO: 293564 - DNA, 12 bp, Artificial Sequence
  Oligonucleotide primer for the detection of SNP TSC0015678
ttgggatgaggt

SEQ ID NO: 293565 - DNA, 12 bp, Artificial Sequence
  Oligonucleotide primer for the detection of SNP TSC0015678
ttgggacgaggt

SEQ ID NO: 293566 - DNA, 12 bp, Artificial Sequence
  Oligonucleotide primer for the detection of SNP TSC0015678
ttgggatgaggc

SEQ ID NO: 293567 - DNA, 12 bp, Artificial Sequence
  Oligonucleotide primer for the detection of SNP TSC0015678
ttgggacgaggc

SEQ ID NO: 293568 - DNA, 12 bp, Artificial Sequence
  Oligonucleotide primer for the detection of SNP TSC0015680
tagttttttatt

SEQ ID NO: 293569 - DNA, 12 bp, Artificial Sequence
  Oligonucleotide primer for the detection of SNP TSC0015680
tagttttttatc

SEQ ID NO: 293570 - DNA, 12 bp, Artificial Sequence
  Oligonucleotide primer for the detection of SNP TSC0015680
tctaactcttca

SEQ ID NO: 293571 - DNA, 12 bp, Artificial Sequence
  Oligonucleotide primer for the detection of SNP TSC0015680
tatgggtttaga

SEQ ID NO: 293572 - DNA, 12 bp, Artificial Sequence
  Oligonucleotide primer for the detection of SNP TSC0015681
caaaaattatat

SEQ ID NO: 293573 - DNA, 12 bp, Artificial Sequence
  Oligonucleotide primer for the detection of SNP TSC0015681
ttggttttgaga

SEQ ID NO: 293574 - DNA, 12 bp, Artificial Sequence
  Oligonucleotide primer for the detection of SNP TSC0015683
agttatatgatt

SEQ ID NO: 293575 - DNA, 12 bp, Artificial Sequence
  Oligonucleotide primer for the detection of SNP TSC0015690
aataaaataacc

SEQ ID NO: 293576 - DNA, 12 bp, Artificial Sequence
  Oligonucleotide primer for the detection of SNP TSC0015690
tttgtgtttttg

SEQ ID NO: 293577 - DNA, 12 bp, Artificial Sequence
  Oligonucleotide primer for the detection of SNP TSC0015691
cctctctaaaaa

SEQ ID NO: 293578 - DNA, 12 bp, Artificial Sequence
  Oligonucleotide primer for the detection of SNP TSC0015691
tgtttattgaga

SEQ ID NO: 293579 - DNA, 12 bp, Artificial Sequence
  Oligonucleotide primer for the detection of SNP TSC0015691
actcactaaaaa

SEQ ID NO: 293580 - DNA, 12 bp, Artificial Sequence
  Oligonucleotide primer for the detection of SNP TSC0015691
ttttttgggggt

SEQ ID NO: 293581 - DNA, 12 bp, Artificial Sequence
  Oligonucleotide primer for the detection of SNP TSC0015691
ttttttgggggc

SEQ ID NO: 293582 - DNA, 12 bp, Artificial Sequence
  Oligonucleotide primer for the detection of SNP TSC0015692
aaaattcaaaaa

SEQ ID NO: 293583 - DNA, 12 bp, Artificial Sequence
  Oligonucleotide primer for the detection of SNP TSC0015692
ttttaggaaatt

SEQ ID NO: 293584 - DNA, 12 bp, Artificial Sequence
  Oligonucleotide primer for the detection of SNP TSC0015692
ttttaggaaatc

SEQ ID NO: 293585 - DNA, 12 bp, Artificial Sequence
  Oligonucleotide primer for the detection of SNP TSC0015692
tcccccaaaaaa

SEQ ID NO: 293586 - DNA, 12 bp, Artificial Sequence
  Oligonucleotide primer for the detection of SNP TSC0015692
gaggtttaggga

SEQ ID NO: 293587 - DNA, 12 bp, Artificial Sequence
  Oligonucleotide primer for the detection of SNP TSC0015693
acaaatccttcc

SEQ ID NO: 293588 - DNA, 12 bp, Artificial Sequence
  Oligonucleotide primer for the detection of SNP TSC0015693
gcaaatccttcc

SEQ ID NO: 293589 - DNA, 12 bp, Artificial Sequence
  Oligonucleotide primer for the detection of SNP TSC0015693
gtgggaattgag

SEQ ID NO: 293590 - DNA, 12 bp, Artificial Sequence
  Oligonucleotide primer for the detection of SNP TSC0015696
caacaaatacac

SEQ ID NO: 293591 - DNA, 12 bp, Artificial Sequence
  Oligonucleotide primer for the detection of SNP TSC0015696
tggtttaatgag

SEQ ID NO: 293592 - DNA, 12 bp, Artificial Sequence
  Oligonucleotide primer for the detection of SNP TSC0015696
tggtttaacgag

SEQ ID NO: 293593 - DNA, 12 bp, Artificial Sequence
  Oligonucleotide primer for the detection of SNP TSC0015697
atcacttttttt

SEQ ID NO: 293594 - DNA, 12 bp, Artificial Sequence
  Oligonucleotide primer for the detection of SNP TSC0015700
catataccacca

SEQ ID NO: 293595 - DNA, 12 bp, Artificial Sequence
  Oligonucleotide primer for the detection of SNP TSC0015700
taaaaattaact

SEQ ID NO: 293596 - DNA, 12 bp, Artificial Sequence
  Oligonucleotide primer for the detection of SNP TSC0015700
tatgtgttatta

SEQ ID NO: 293597 - DNA, 12 bp, Artificial Sequence
  Oligonucleotide primer for the detection of SNP TSC0015701
actaaacataat

SEQ ID NO: 293598 - DNA, 12 bp, Artificial Sequence
  Oligonucleotide primer for the detection of SNP TSC0015701
actaaacgtaat

SEQ ID NO: 293599 - DNA, 12 bp, Artificial Sequence
  Oligonucleotide primer for the detection of SNP TSC0015701
gttataagtatg

SEQ ID NO: 293600 - DNA, 12 bp, Artificial Sequence
  Oligonucleotide primer for the detection of SNP TSC0015702
tttaatattaat

SEQ ID NO: 293601 - DNA, 12 bp, Artificial Sequence
  Oligonucleotide primer for the detection of SNP TSC0015702
gtttgaatttag

SEQ ID NO: 293602 - DNA, 12 bp, Artificial Sequence
  Oligonucleotide primer for the detection of SNP TSC0015703
cactcttactca

SEQ ID NO: 293603 - DNA, 12 bp, Artificial Sequence
  Oligonucleotide primer for the detection of SNP TSC0015703
ttgggagttgat

SEQ ID NO: 293604 - DNA, 12 bp, Artificial Sequence
  Oligonucleotide primer for the detection of SNP TSC0015704
tgtgtgtgtaat

SEQ ID NO: 293605 - DNA, 12 bp, Artificial Sequence
  Oligonucleotide primer for the detection of SNP TSC0015704
tatatatataat

SEQ ID NO: 293606 - DNA, 12 bp, Artificial Sequence
  Oligonucleotide primer for the detection of SNP TSC0015704
ttttggagaaaa

SEQ ID NO: 293607 - DNA, 12 bp, Artificial Sequence
  Oligonucleotide primer for the detection of SNP TSC0015705
aaccattttctt

SEQ ID NO: 293608 - DNA, 12 bp, Artificial Sequence
  Oligonucleotide primer for the detection of SNP TSC0015705
aaccgttttctt

SEQ ID NO: 293609 - DNA, 12 bp, Artificial Sequence
  Oligonucleotide primer for the detection of SNP TSC0015705
tttaaatttata

SEQ ID NO: 293610 - DNA, 12 bp, Artificial Sequence
  Oligonucleotide primer for the detection of SNP TSC0015706
caccctctccac

SEQ ID NO: 293611 - DNA, 12 bp, Artificial Sequence
  Oligonucleotide primer for the detection of SNP TSC0015706
ggagattttttg

SEQ ID NO: 293612 - DNA, 12 bp, Artificial Sequence
  Oligonucleotide primer for the detection of SNP TSC0015706
aaaaattctcta

SEQ ID NO: 293613 - DNA, 12 bp, Artificial Sequence
  Oligonucleotide primer for the detection of SNP TSC0015707
aaactacacata

SEQ ID NO: 293614 - DNA, 12 bp, Artificial Sequence
  Oligonucleotide primer for the detection of SNP TSC0015707
aaactacacgta

SEQ ID NO: 293615 - DNA, 12 bp, Artificial Sequence
  Oligonucleotide primer for the detection of SNP TSC0015707
agagggtgagaa

SEQ ID NO: 293616 - DNA, 12 bp, Artificial Sequence
  Oligonucleotide primer for the detection of SNP TSC0015707
gagttgtatgtg

SEQ ID NO: 293617 - DNA, 12 bp, Artificial Sequence
  Oligonucleotide primer for the detection of SNP TSC0015707
gagttgtacgtg

SEQ ID NO: 293618 - DNA, 12 bp, Artificial Sequence
  Oligonucleotide primer for the detection of SNP TSC0015708
actaaaatataa

SEQ ID NO: 293619 - DNA, 12 bp, Artificial Sequence
  Oligonucleotide primer for the detection of SNP TSC0015708
tttgtttggtat

SEQ ID NO: 293620 - DNA, 12 bp, Artificial Sequence
  Oligonucleotide primer for the detection of SNP TSC0015708
ttcgtttggtat

SEQ ID NO: 293621 - DNA, 12 bp, Artificial Sequence
  Oligonucleotide primer for the detection of SNP TSC0015708
tttgttcggtat

SEQ ID NO: 293622 - DNA, 12 bp, Artificial Sequence
  Oligonucleotide primer for the detection of SNP TSC0015708
ttcgttcggtat

SEQ ID NO: 293623 - DNA, 12 bp, Artificial Sequence
  Oligonucleotide primer for the detection of SNP TSC0015708
cacccaacataa

SEQ ID NO: 293624 - DNA, 12 bp, Artificial Sequence
  Oligonucleotide primer for the detection of SNP TSC0015708
cacccgacataa

SEQ ID NO: 293625 - DNA, 12 bp, Artificial Sequence
  Oligonucleotide primer for the detection of SNP TSC0015708
cgcccaacataa

SEQ ID NO: 293626 - DNA, 12 bp, Artificial Sequence
  Oligonucleotide primer for the detection of SNP TSC0015708
cgcccgacataa

SEQ ID NO: 293627 - DNA, 12 bp, Artificial Sequence
  Oligonucleotide primer for the detection of SNP TSC0015708
tgggatgtggtt

SEQ ID NO: 293628 - DNA, 12 bp, Artificial Sequence
  Oligonucleotide primer for the detection of SNP TSC0015709
agggtttttttt

SEQ ID NO: 293629 - DNA, 12 bp, Artificial Sequence
  Oligonucleotide primer for the detection of SNP TSC0015709
aaaactctccct

SEQ ID NO: 293630 - DNA, 12 bp, Artificial Sequence
  Oligonucleotide primer for the detection of SNP TSC0015709
ggatagaggtgg

SEQ ID NO: 293631 - DNA, 12 bp, Artificial Sequence
  Oligonucleotide primer for the detection of SNP TSC0015710
acaaatcaaaac

SEQ ID NO: 293632 - DNA, 12 bp, Artificial Sequence
  Oligonucleotide primer for the detection of SNP TSC0015710
acaaatcgaaac

SEQ ID NO: 293633 - DNA, 12 bp, Artificial Sequence
  Oligonucleotide primer for the detection of SNP TSC0015710
ttgttattattt

SEQ ID NO: 293634 - DNA, 12 bp, Artificial Sequence
  Oligonucleotide primer for the detection of SNP TSC0015710
cctaccatcacc

SEQ ID NO: 293635 - DNA, 12 bp, Artificial Sequence
  Oligonucleotide primer for the detection of SNP TSC0015710
gtaaattggggt

SEQ ID NO: 293636 - DNA, 12 bp, Artificial Sequence
  Oligonucleotide primer for the detection of SNP TSC0015710
gtaaatcggggt

SEQ ID NO: 293637 - DNA, 12 bp, Artificial Sequence
  Oligonucleotide primer for the detection of SNP TSC0015710
gtaaattggggc

SEQ ID NO: 293638 - DNA, 12 bp, Artificial Sequence
  Oligonucleotide primer for the detection of SNP TSC0015710
gtaaatcggggc

SEQ ID NO: 293639 - DNA, 12 bp, Artificial Sequence
  Oligonucleotide primer for the detection of SNP TSC0015711
atcacaatacta

SEQ ID NO: 293640 - DNA, 12 bp, Artificial Sequence
  Oligonucleotide primer for the detection of SNP TSC0015711
agaagttttttt

SEQ ID NO: 293641 - DNA, 12 bp, Artificial Sequence
  Oligonucleotide primer for the detection of SNP TSC0015711
aaaaacttctcc

SEQ ID NO: 293642 - DNA, 12 bp, Artificial Sequence
  Oligonucleotide primer for the detection of SNP TSC0015711
attatagtgttg

SEQ ID NO: 293643 - DNA, 12 bp, Artificial Sequence
  Oligonucleotide primer for the detection of SNP TSC0015712
caaatccatcac

SEQ ID NO: 293644 - DNA, 12 bp, Artificial Sequence
  Oligonucleotide primer for the detection of SNP TSC0015712
ttttttttgtag

SEQ ID NO: 293645 - DNA, 12 bp, Artificial Sequence
  Oligonucleotide primer for the detection of SNP TSC0015712
tttttttcgtag

SEQ ID NO: 293646 - DNA, 12 bp, Artificial Sequence
  Oligonucleotide primer for the detection of SNP TSC0015712
cttctcccacaa

SEQ ID NO: 293647 - DNA, 12 bp, Artificial Sequence
  Oligonucleotide primer for the detection of SNP TSC0015712
cttctcccgcaa

SEQ ID NO: 293648 - DNA, 12 bp, Artificial Sequence
  Oligonucleotide primer for the detection of SNP TSC0015713
aaaaattttaaa

SEQ ID NO: 293649 - DNA, 12 bp, Artificial Sequence
  Oligonucleotide primer for the detection of SNP TSC0015713
tggggtggaggg

SEQ ID NO: 293650 - DNA, 12 bp, Artificial Sequence
  Oligonucleotide primer for the detection of SNP TSC0015713
ggagttttgggt

SEQ ID NO: 293651 - DNA, 12 bp, Artificial Sequence
  Oligonucleotide primer for the detection of SNP TSC0015714
aaaaccctcata

SEQ ID NO: 293652 - DNA, 12 bp, Artificial Sequence
  Oligonucleotide primer for the detection of SNP TSC0015714
aaaaccctcgta

SEQ ID NO: 293653 - DNA, 12 bp, Artificial Sequence
  Oligonucleotide primer for the detection of SNP TSC0015714
tagagtataaag

SEQ ID NO: 293654 - DNA, 12 bp, Artificial Sequence
  Oligonucleotide primer for the detection of SNP TSC0015714
caaaacataaaa

SEQ ID NO: 293655 - DNA, 12 bp, Artificial Sequence
  Oligonucleotide primer for the detection of SNP TSC0015714
aggatttttgta

SEQ ID NO: 293656 - DNA, 12 bp, Artificial Sequence
  Oligonucleotide primer for the detection of SNP TSC0015714
aggattttcgta

SEQ ID NO: 293657 - DNA, 12 bp, Artificial Sequence
  Oligonucleotide primer for the detection of SNP TSC0015719
ttttataacaaa

SEQ ID NO: 293658 - DNA, 12 bp, Artificial Sequence
  Oligonucleotide primer for the detection of SNP TSC0015719
attttttgggat

SEQ ID NO: 293659 - DNA, 12 bp, Artificial Sequence
  Oligonucleotide primer for the detection of SNP TSC0015719
atttcttaaaat

SEQ ID NO: 293660 - DNA, 12 bp, Artificial Sequence
  Oligonucleotide primer for the detection of SNP TSC0015719
attttatgataa

SEQ ID NO: 293661 - DNA, 12 bp, Artificial Sequence
  Oligonucleotide primer for the detection of SNP TSC0015720
tctactaatttt

SEQ ID NO: 293662 - DNA, 12 bp, Artificial Sequence
  Oligonucleotide primer for the detection of SNP TSC0015720
ttgggatgtttg

SEQ ID NO: 293663 - DNA, 12 bp, Artificial Sequence
  Oligonucleotide primer for the detection of SNP TSC0015720
ttaaaatactta

SEQ ID NO: 293664 - DNA, 12 bp, Artificial Sequence
  Oligonucleotide primer for the detection of SNP TSC0015721
tcctccccaata

SEQ ID NO: 293665 - DNA, 12 bp, Artificial Sequence
  Oligonucleotide primer for the detection of SNP TSC0015721
gagattttggtg

SEQ ID NO: 293666 - DNA, 12 bp, Artificial Sequence
  Oligonucleotide primer for the detection of SNP TSC0015721
gagattttggcg

SEQ ID NO: 293667 - DNA, 12 bp, Artificial Sequence
  Oligonucleotide primer for the detection of SNP TSC0015722
aaactccaactt

SEQ ID NO: 293668 - DNA, 12 bp, Artificial Sequence
  Oligonucleotide primer for the detection of SNP TSC0015722
gttaaggtttag

SEQ ID NO: 293669 - DNA, 12 bp, Artificial Sequence
  Oligonucleotide primer for the detection of SNP TSC0015723
ttctctacatta

SEQ ID NO: 293670 - DNA, 12 bp, Artificial Sequence
  Oligonucleotide primer for the detection of SNP TSC0015723
acctcaacctaa

SEQ ID NO: 293671 - DNA, 12 bp, Artificial Sequence
  Oligonucleotide primer for the detection of SNP TSC0015723
attttttatatt

SEQ ID NO: 293672 - DNA, 12 bp, Artificial Sequence
  Oligonucleotide primer for the detection of SNP TSC0015724
actattctacca

SEQ ID NO: 293673 - DNA, 12 bp, Artificial Sequence
  Oligonucleotide primer for the detection of SNP TSC0015724
ttgttttgattt

SEQ ID NO: 293674 - DNA, 12 bp, Artificial Sequence
  Oligonukleotid-Primer
ctactttaatct

SEQ ID NO: 293675 - DNA, 12 bp, Artificial Sequence
  Oligonucleotide primer for the detection of SNP TSC0015724
gttgttttgtta

SEQ ID NO: 293676 - DNA, 12 bp, Artificial Sequence
  Oligonucleotide primer for the detection of SNP TSC0015730
atctatttcata

SEQ ID NO: 293677 - DNA, 12 bp, Artificial Sequence
  Oligonucleotide primer for the detection of SNP TSC0015730
tgggagtattgt

SEQ ID NO: 293678 - DNA, 12 bp, Artificial Sequence
  Oligonucleotide primer for the detection of SNP TSC0015730
taaaaacactac

SEQ ID NO: 293679 - DNA, 12 bp, Artificial Sequence
  Oligonucleotide primer for the detection of SNP TSC0015730
gtttgttttatg

SEQ ID NO: 293680 - DNA, 12 bp, Artificial Sequence
  Oligonucleotide primer for the detection of SNP TSC0015731
ccaaaattatcc

SEQ ID NO: 293681 - DNA, 12 bp, Artificial Sequence
  Oligonucleotide primer for the detection of SNP TSC0015731
ttttagagttta

SEQ ID NO: 293682 - DNA, 12 bp, Artificial Sequence
  Oligonucleotide primer for the detection of SNP TSC0015734
ttattcattatt

SEQ ID NO: 293683 - DNA, 12 bp, Artificial Sequence
  Oligonucleotide primer for the detection of SNP TSC0015735
tgttgaaaattt

SEQ ID NO: 293684 - DNA, 12 bp, Artificial Sequence
  Oligonucleotide primer for the detection of SNP TSC0015735
tactaaaaattc

SEQ ID NO: 293685 - DNA, 12 bp, Artificial Sequence
  Oligonucleotide primer for the detection of SNP TSC0015735
agatatttgggg

SEQ ID NO: 293686 - DNA, 12 bp, Artificial Sequence
  Oligonucleotide primer for the detection of SNP TSC0015736
tctactaaaaat

SEQ ID NO: 293687 - DNA, 12 bp, Artificial Sequence
  Oligonucleotide primer for the detection of SNP TSC0015736
atatttggttaa

SEQ ID NO: 293688 - DNA, 12 bp, Artificial Sequence
  Oligonucleotide primer for the detection of SNP TSC0015737
tataaatacata

SEQ ID NO: 293689 - DNA, 12 bp, Artificial Sequence
  Oligonucleotide primer for the detection of SNP TSC0015737
ccaaatataata

SEQ ID NO: 293690 - DNA, 12 bp, Artificial Sequence
  Oligonucleotide primer for the detection of SNP TSC0015737
tataggtgtatg

SEQ ID NO: 293691 - DNA, 12 bp, Artificial Sequence
  Oligonucleotide primer for the detection of SNP TSC0015741
tattttatcttt

SEQ ID NO: 293692 - DNA, 12 bp, Artificial Sequence
  Oligonucleotide primer for the detection of SNP TSC0015741
taataaattaaa

SEQ ID NO: 293693 - DNA, 12 bp, Artificial Sequence
  Oligonucleotide primer for the detection of SNP TSC0015742
aacacataactc

SEQ ID NO: 293694 - DNA, 12 bp, Artificial Sequence
  Oligonucleotide primer for the detection of SNP TSC0015742
aacacgtaactc

SEQ ID NO: 293695 - DNA, 12 bp, Artificial Sequence
  Oligonucleotide primer for the detection of SNP TSC0015742
aacgcataactc

SEQ ID NO: 293696 - DNA, 12 bp, Artificial Sequence
  Oligonucleotide primer for the detection of SNP TSC0015742
aacgcgtaactc

SEQ ID NO: 293697 - DNA, 12 bp, Artificial Sequence
  Oligonucleotide primer for the detection of SNP TSC0015742
gttgggtatgag

SEQ ID NO: 293698 - DNA, 12 bp, Artificial Sequence
  Oligonucleotide primer for the detection of SNP TSC0015742
gttgggtacgag

SEQ ID NO: 293699 - DNA, 12 bp, Artificial Sequence
  Oligonucleotide primer for the detection of SNP TSC0015742
actaaacacaaa

SEQ ID NO: 293700 - DNA, 12 bp, Artificial Sequence
  Oligonucleotide primer for the detection of SNP TSC0015742
actaaacacgaa

SEQ ID NO: 293701 - DNA, 12 bp, Artificial Sequence
  Oligonucleotide primer for the detection of SNP TSC0015742
aatgtgtggttt

SEQ ID NO: 293702 - DNA, 12 bp, Artificial Sequence
  Oligonucleotide primer for the detection of SNP TSC0015742
aacgtgtggttt

SEQ ID NO: 293703 - DNA, 12 bp, Artificial Sequence
  Oligonucleotide primer for the detection of SNP TSC0015742
aatgcgtggttt

SEQ ID NO: 293704 - DNA, 12 bp, Artificial Sequence
  Oligonucleotide primer for the detection of SNP TSC0015742
aacgcgtggttt

SEQ ID NO: 293705 - DNA, 12 bp, Artificial Sequence
  Oligonucleotide primer for the detection of SNP TSC0015743
tcttctccaaac

SEQ ID NO: 293706 - DNA, 12 bp, Artificial Sequence
  Oligonucleotide primer for the detection of SNP TSC0015743
gtttaggggtta

SEQ ID NO: 293707 - DNA, 12 bp, Artificial Sequence
  Oligonucleotide primer for the detection of SNP TSC0015744
ttctcataaatt

SEQ ID NO: 293708 - DNA, 12 bp, Artificial Sequence
  Oligonucleotide primer for the detection of SNP TSC0015744
ttctcgtaaatt

SEQ ID NO: 293709 - DNA, 12 bp, Artificial Sequence
  Oligonucleotide primer for the detection of SNP TSC0015744
gagaagagttta

SEQ ID NO: 293710 - DNA, 12 bp, Artificial Sequence
  Oligonucleotide primer for the detection of SNP TSC0015744
ttttcgtaggtt

SEQ ID NO: 293711 - DNA, 12 bp, Artificial Sequence
  Oligonucleotide primer for the detection of SNP TSC0015745
ctacatcttaac

SEQ ID NO: 293712 - DNA, 12 bp, Artificial Sequence
  Oligonucleotide primer for the detection of SNP TSC0015745
ggtgtttttgta

SEQ ID NO: 293713 - DNA, 12 bp, Artificial Sequence
  Oligonucleotide primer for the detection of SNP TSC0015745
ggtgttttcgta

SEQ ID NO: 293714 - DNA, 12 bp, Artificial Sequence
  Oligonucleotide primer for the detection of SNP TSC0015746
aatttacctttt

SEQ ID NO: 293715 - DNA, 12 bp, Artificial Sequence
  Oligonucleotide primer for the detection of SNP TSC0015746
gattgttatggg

SEQ ID NO: 293716 - DNA, 12 bp, Artificial Sequence
  Oligonucleotide primer for the detection of SNP TSC0015747
tttataccccca

SEQ ID NO: 293717 - DNA, 12 bp, Artificial Sequence
  Oligonucleotide primer for the detection of SNP TSC0015747
gattattttgtg

SEQ ID NO: 293718 - DNA, 12 bp, Artificial Sequence
  Oligonucleotide primer for the detection of SNP TSC0015747
aattatcttata

SEQ ID NO: 293719 - DNA, 12 bp, Artificial Sequence
  Oligonucleotide primer for the detection of SNP TSC0015748
ataataacaaac

SEQ ID NO: 293720 - DNA, 12 bp, Artificial Sequence
  Oligonucleotide primer for the detection of SNP TSC0015748
ataataacgaac

SEQ ID NO: 293721 - DNA, 12 bp, Artificial Sequence
  Oligonucleotide primer for the detection of SNP TSC0015749
ctaaacattcat

SEQ ID NO: 293722 - DNA, 12 bp, Artificial Sequence
  Oligonucleotide primer for the detection of SNP TSC0015749
ggataattagag

SEQ ID NO: 293723 - DNA, 12 bp, Artificial Sequence
  Oligonucleotide primer for the detection of SNP TSC0015753
atccacaaaaca

SEQ ID NO: 293724 - DNA, 12 bp, Artificial Sequence
  Oligonucleotide primer for the detection of SNP TSC0015753
aaggataggttt

SEQ ID NO: 293725 - DNA, 12 bp, Artificial Sequence
  Oligonucleotide primer for the detection of SNP TSC0015753
aaaaacaaattt

SEQ ID NO: 293726 - DNA, 12 bp, Artificial Sequence
  Oligonucleotide primer for the detection of SNP TSC0015753
atttatagagta

SEQ ID NO: 293727 - DNA, 12 bp, Artificial Sequence
  Oligonucleotide primer for the detection of SNP TSC0015754
ccctctaatcac

SEQ ID NO: 293728 - DNA, 12 bp, Artificial Sequence
  Oligonucleotide primer for the detection of SNP TSC0015754
aagatattagga

SEQ ID NO: 293729 - DNA, 12 bp, Artificial Sequence
  Oligonucleotide primer for the detection of SNP TSC0015755
aacccattatta

SEQ ID NO: 293730 - DNA, 12 bp, Artificial Sequence
  Oligonucleotide primer for the detection of SNP TSC0015755
gacccattatta

SEQ ID NO: 293731 - DNA, 12 bp, Artificial Sequence
  Oligonucleotide primer for the detection of SNP TSC0015755
ttgtggtagatt

SEQ ID NO: 293732 - DNA, 12 bp, Artificial Sequence
  Oligonucleotide primer for the detection of SNP TSC0015755
cttataacaaat

SEQ ID NO: 293733 - DNA, 12 bp, Artificial Sequence
  Oligonucleotide primer for the detection of SNP TSC0015755
ggtttattatta

SEQ ID NO: 293734 - DNA, 12 bp, Artificial Sequence
  Oligonucleotide primer for the detection of SNP TSC0015756
agatttggagag

SEQ ID NO: 293735 - DNA, 12 bp, Artificial Sequence
  Oligonucleotide primer for the detection of SNP TSC0015757
cctcccactccc

SEQ ID NO: 293736 - DNA, 12 bp, Artificial Sequence
  Oligonucleotide primer for the detection of SNP TSC0015757
ttttttgtatag

SEQ ID NO: 293737 - DNA, 12 bp, Artificial Sequence
  Oligonucleotide primer for the detection of SNP TSC0015757
ctccctacacaa

SEQ ID NO: 293738 - DNA, 12 bp, Artificial Sequence
  Oligonucleotide primer for the detection of SNP TSC0015758
cacactcataca

SEQ ID NO: 293739 - DNA, 12 bp, Artificial Sequence
  Oligonucleotide primer for the detection of SNP TSC0015758
atatttatatat

SEQ ID NO: 293740 - DNA, 12 bp, Artificial Sequence
  Oligonucleotide primer for the detection of SNP TSC0015760
aaactcaaacaa

SEQ ID NO: 293741 - DNA, 12 bp, Artificial Sequence
  Oligonucleotide primer for the detection of SNP TSC0015760
ttgaggtgggag

SEQ ID NO: 293742 - DNA, 12 bp, Artificial Sequence
  Oligonucleotide primer for the detection of SNP TSC0015760
ggtttaagtaat

SEQ ID NO: 293743 - DNA, 12 bp, Artificial Sequence
  Oligonucleotide primer for the detection of SNP TSC0015764
aaatatctataa

SEQ ID NO: 293744 - DNA, 12 bp, Artificial Sequence
  Oligonucleotide primer for the detection of SNP TSC0015765
ctacccttatat

SEQ ID NO: 293745 - DNA, 12 bp, Artificial Sequence
  Oligonucleotide primer for the detection of SNP TSC0015767
atcaaaaatacc

SEQ ID NO: 293746 - DNA, 12 bp, Artificial Sequence
  Oligonucleotide primer for the detection of SNP TSC0015767
atgggtttgaaa

SEQ ID NO: 293747 - DNA, 12 bp, Artificial Sequence
  Oligonucleotide primer for the detection of SNP TSC0015767
ataaatttaaaa

SEQ ID NO: 293748 - DNA, 12 bp, Artificial Sequence
  Oligonucleotide primer for the detection of SNP TSC0015767
gttagggatgtt

SEQ ID NO: 293749 - DNA, 12 bp, Artificial Sequence
  Oligonucleotide primer for the detection of SNP TSC0015771
acacatatatat

SEQ ID NO: 293750 - DNA, 12 bp, Artificial Sequence
  Oligonucleotide primer for the detection of SNP TSC0015771
cacacacaaata

SEQ ID NO: 293751 - DNA, 12 bp, Artificial Sequence
  Oligonucleotide primer for the detection of SNP TSC0015771
gtatatatatgt

SEQ ID NO: 293752 - DNA, 12 bp, Artificial Sequence
  Oligonucleotide primer for the detection of SNP TSC0015772
acccaaatacac

SEQ ID NO: 293753 - DNA, 12 bp, Artificial Sequence
  Oligonucleotide primer for the detection of SNP TSC0015772
agggtgtgaata

SEQ ID NO: 293754 - DNA, 12 bp, Artificial Sequence
  Oligonucleotide primer for the detection of SNP TSC0015773
catatatataca

SEQ ID NO: 293755 - DNA, 12 bp, Artificial Sequence
  Oligonucleotide primer for the detection of SNP TSC0015773
tttatataatat

SEQ ID NO: 293756 - DNA, 12 bp, Artificial Sequence
  Oligonucleotide primer for the detection of SNP TSC0015773
ttacacaataca

SEQ ID NO: 293757 - DNA, 12 bp, Artificial Sequence
  Oligonucleotide primer for the detection of SNP TSC0015773
atgtatatatat

SEQ ID NO: 293758 - DNA, 12 bp, Artificial Sequence
  Oligonucleotide primer for the detection of SNP TSC0015774
aataactcacac

SEQ ID NO: 293759 - DNA, 12 bp, Artificial Sequence
  Oligonucleotide primer for the detection of SNP TSC0015774
tttgggattata

SEQ ID NO: 293760 - DNA, 12 bp, Artificial Sequence
  Oligonucleotide primer for the detection of SNP TSC0015775
cttaaaaacgaa

SEQ ID NO: 293761 - DNA, 12 bp, Artificial Sequence
  Oligonucleotide primer for the detection of SNP TSC0015775
tatttaaccttt

SEQ ID NO: 293762 - DNA, 12 bp, Artificial Sequence
  Oligonucleotide primer for the detection of SNP TSC0015775
ttaggagtgggt

SEQ ID NO: 293763 - DNA, 12 bp, Artificial Sequence
  Oligonucleotide primer for the detection of SNP TSC0015775
ttaggagcgggt

SEQ ID NO: 293764 - DNA, 12 bp, Artificial Sequence
  Oligonucleotide primer for the detection of SNP TSC0015776
aatatctttacc

SEQ ID NO: 293765 - DNA, 12 bp, Artificial Sequence
  Oligonucleotide primer for the detection of SNP TSC0015776
atacttttcaaa

SEQ ID NO: 293766 - DNA, 12 bp, Artificial Sequence
  Oligonucleotide primer for the detection of SNP TSC0015777
aaaaaacccccc

SEQ ID NO: 293767 - DNA, 12 bp, Artificial Sequence
  Oligonucleotide primer for the detection of SNP TSC0015777
tttttgtagaga

SEQ ID NO: 293768 - DNA, 12 bp, Artificial Sequence
  Oligonucleotide primer for the detection of SNP TSC0015778
catctcctcata

SEQ ID NO: 293769 - DNA, 12 bp, Artificial Sequence
  Oligonucleotide primer for the detection of SNP TSC0015778
agtgtaaaagat

SEQ ID NO: 293770 - DNA, 12 bp, Artificial Sequence
  Oligonucleotide primer for the detection of SNP TSC0015778
atacaaaaaata

SEQ ID NO: 293771 - DNA, 12 bp, Artificial Sequence
  Oligonucleotide primer for the detection of SNP TSC0015779
ttttcaataatt

SEQ ID NO: 293772 - DNA, 12 bp, Artificial Sequence
  Oligonucleotide primer for the detection of SNP TSC0015779
gttatgaattta

SEQ ID NO: 293773 - DNA, 12 bp, Artificial Sequence
  Oligonucleotide primer for the detection of SNP TSC0015779
gttacgaattta

SEQ ID NO: 293774 - DNA, 12 bp, Artificial Sequence
  Oligonucleotide primer for the detection of SNP TSC0015780
acaacatcccct

SEQ ID NO: 293775 - DNA, 12 bp, Artificial Sequence
  Oligonucleotide primer for the detection of SNP TSC0015780
acgacatcccct

SEQ ID NO: 293776 - DNA, 12 bp, Artificial Sequence
  Oligonucleotide primer for the detection of SNP TSC0015780
gttaggaggaga

SEQ ID NO: 293777 - DNA, 12 bp, Artificial Sequence
  Oligonucleotide primer for the detection of SNP TSC0015781
taaacaaatact

SEQ ID NO: 293778 - DNA, 12 bp, Artificial Sequence
  Oligonucleotide primer for the detection of SNP TSC0015781
ttaattatttga

SEQ ID NO: 293779 - DNA, 12 bp, Artificial Sequence
  Oligonucleotide primer for the detection of SNP TSC0015783
caaataaacctt

SEQ ID NO: 293780 - DNA, 12 bp, Artificial Sequence
  Oligonucleotide primer for the detection of SNP TSC0015783
cgaataaacctt

SEQ ID NO: 293781 - DNA, 12 bp, Artificial Sequence
  Oligonucleotide primer for the detection of SNP TSC0015783
attattttggtg

SEQ ID NO: 293782 - DNA, 12 bp, Artificial Sequence
  Oligonucleotide primer for the detection of SNP TSC0015784
tcacaccactac

SEQ ID NO: 293783 - DNA, 12 bp, Artificial Sequence
  Oligonucleotide primer for the detection of SNP TSC0015784
tcacgccactac

SEQ ID NO: 293784 - DNA, 12 bp, Artificial Sequence
  Oligonucleotide primer for the detection of SNP TSC0015784
ggttggagtgta

SEQ ID NO: 293785 - DNA, 12 bp, Artificial Sequence
  Oligonucleotide primer for the detection of SNP TSC0015786
acaaaatctaac

SEQ ID NO: 293786 - DNA, 12 bp, Artificial Sequence
  Oligonucleotide primer for the detection of SNP TSC0015786
tgggttattata

SEQ ID NO: 293787 - DNA, 12 bp, Artificial Sequence
  Oligonukleotid-Primer
cgggttattata

SEQ ID NO: 293788 - DNA, 12 bp, Artificial Sequence
  Oligonucleotide primer for the detection of SNP TSC0015787
tctcacaaaacc

SEQ ID NO: 293789 - DNA, 12 bp, Artificial Sequence
  Oligonucleotide primer for the detection of SNP TSC0015787
ggagggaggttg

SEQ ID NO: 293790 - DNA, 12 bp, Artificial Sequence
  Oligonucleotide primer for the detection of SNP TSC0015788
atcaaactaaac

SEQ ID NO: 293791 - DNA, 12 bp, Artificial Sequence
  Oligonukleotid-Primer
atcgaactaaac

SEQ ID NO: 293792 - DNA, 12 bp, Artificial Sequence
  Oligonucleotide primer for the detection of SNP TSC0015788
ataatgtaattg

SEQ ID NO: 293793 - DNA, 12 bp, Artificial Sequence
  Oligonucleotide primer for the detection of SNP TSC0015788
ataatgtaatcg

SEQ ID NO: 293794 - DNA, 12 bp, Artificial Sequence
  Oligonucleotide primer for the detection of SNP TSC0015790
cctaccttcccc

SEQ ID NO: 293795 - DNA, 12 bp, Artificial Sequence
  Oligonucleotide primer for the detection of SNP TSC0015790
agagggtggggg

SEQ ID NO: 293796 - DNA, 12 bp, Artificial Sequence
  Oligonucleotide primer for the detection of SNP TSC0015791
cctttactatac

SEQ ID NO: 293797 - DNA, 12 bp, Artificial Sequence
  Oligonucleotide primer for the detection of SNP TSC0015791
tttggggtaggg

SEQ ID NO: 293798 - DNA, 12 bp, Artificial Sequence
  Oligonucleotide primer for the detection of SNP TSC0015791
tttttattatac

SEQ ID NO: 293799 - DNA, 12 bp, Artificial Sequence
  Oligonucleotide primer for the detection of SNP TSC0015799
tttttgttgttg

SEQ ID NO: 293800 - DNA, 12 bp, Artificial Sequence
  Oligonucleotide primer for the detection of SNP TSC0015799
ttttcgttgttg

SEQ ID NO: 293801 - DNA, 12 bp, Artificial Sequence
  Oligonucleotide primer for the detection of SNP TSC0015801
atttcgaaactc

SEQ ID NO: 293802 - DNA, 12 bp, Artificial Sequence
  Oligonucleotide primer for the detection of SNP TSC0015802
tagttttttttc

SEQ ID NO: 293803 - DNA, 12 bp, Artificial Sequence
  Oligonucleotide primer for the detection of SNP TSC0015802
caaccccccccc

SEQ ID NO: 293804 - DNA, 12 bp, Artificial Sequence
  Oligonucleotide primer for the detection of SNP TSC0015802
aaagaaatgatt

SEQ ID NO: 293805 - DNA, 12 bp, Artificial Sequence
  Oligonucleotide primer for the detection of SNP TSC0015803
atctaaaatttt

SEQ ID NO: 293806 - DNA, 12 bp, Artificial Sequence
  Oligonucleotide primer for the detection of SNP TSC0015803
tagtaggggaaa

SEQ ID NO: 293807 - DNA, 12 bp, Artificial Sequence
  Oligonucleotide primer for the detection of SNP TSC0015804
cattattataaa

SEQ ID NO: 293808 - DNA, 12 bp, Artificial Sequence
  Oligonucleotide primer for the detection of SNP TSC0015804
cgttattataaa

SEQ ID NO: 293809 - DNA, 12 bp, Artificial Sequence
  Oligonucleotide primer for the detection of SNP TSC0015804
gagtttttagtg

SEQ ID NO: 293810 - DNA, 12 bp, Artificial Sequence
  Oligonucleotide primer for the detection of SNP TSC0015804
aatctccaataa

SEQ ID NO: 293811 - DNA, 12 bp, Artificial Sequence
  Oligonucleotide primer for the detection of SNP TSC0015804
tgttgttgtgga

SEQ ID NO: 293812 - DNA, 12 bp, Artificial Sequence
  Oligonucleotide primer for the detection of SNP TSC0015804
cgttgttgtgga

SEQ ID NO: 293813 - DNA, 12 bp, Artificial Sequence
  Oligonucleotide primer for the detection of SNP TSC0015806
ttctaccctcta

SEQ ID NO: 293814 - DNA, 12 bp, Artificial Sequence
  Oligonucleotide primer for the detection of SNP TSC0015806
tttgtattaagt

SEQ ID NO: 293815 - DNA, 12 bp, Artificial Sequence
  Oligonucleotide primer for the detection of SNP TSC0015806
tttatactaaac

SEQ ID NO: 293816 - DNA, 12 bp, Artificial Sequence
  Oligonucleotide primer for the detection of SNP TSC0015808
aactaatttttt

SEQ ID NO: 293817 - DNA, 12 bp, Artificial Sequence
  Oligonucleotide primer for the detection of SNP TSC0015808
atataaaaattt

SEQ ID NO: 293818 - DNA, 12 bp, Artificial Sequence
  Oligonucleotide primer for the detection of SNP TSC0015808
ggttaatttttt

SEQ ID NO: 293819 - DNA, 12 bp, Artificial Sequence
  Oligonucleotide primer for the detection of SNP TSC0015809
accacacctaac

SEQ ID NO: 293820 - DNA, 12 bp, Artificial Sequence
  Oligonucleotide primer for the detection of SNP TSC0015809
accacgcctaac

SEQ ID NO: 293821 - DNA, 12 bp, Artificial Sequence
  Oligonucleotide primer for the detection of SNP TSC0015810
tacaaactccac

SEQ ID NO: 293822 - DNA, 12 bp, Artificial Sequence
  Oligonucleotide primer for the detection of SNP TSC0015810
tacaaactccgc

SEQ ID NO: 293823 - DNA, 12 bp, Artificial Sequence
  Oligonucleotide primer for the detection of SNP TSC0015810
atggggtgaatt

SEQ ID NO: 293824 - DNA, 12 bp, Artificial Sequence
  Oligonucleotide primer for the detection of SNP TSC0015810
ataaaataaacc

SEQ ID NO: 293825 - DNA, 12 bp, Artificial Sequence
  Oligonucleotide primer for the detection of SNP TSC0015810
tgtaagttttgt

SEQ ID NO: 293826 - DNA, 12 bp, Artificial Sequence
  Oligonucleotide primer for the detection of SNP TSC0015810
tgtaagtttcgt

SEQ ID NO: 293827 - DNA, 12 bp, Artificial Sequence
  Oligonucleotide primer for the detection of SNP TSC0015812
actttaaaatat

SEQ ID NO: 293828 - DNA, 12 bp, Artificial Sequence
  Oligonucleotide primer for the detection of SNP TSC0015818
acaattactaaa

SEQ ID NO: 293829 - DNA, 12 bp, Artificial Sequence
  Oligonucleotide primer for the detection of SNP TSC0015818
ttttttgttaat

SEQ ID NO: 293830 - DNA, 12 bp, Artificial Sequence
  Oligonucleotide primer for the detection of SNP TSC0015818
ttttatcaataa

SEQ ID NO: 293831 - DNA, 12 bp, Artificial Sequence
  Oligonucleotide primer for the detection of SNP TSC0015818
atagttattaag

SEQ ID NO: 293832 - DNA, 12 bp, Artificial Sequence
  Oligonucleotide primer for the detection of SNP TSC0015823
aaaaaaactaac

SEQ ID NO: 293833 - DNA, 12 bp, Artificial Sequence
  Oligonucleotide primer for the detection of SNP TSC0015823
ttttattagtga

SEQ ID NO: 293834 - DNA, 12 bp, Artificial Sequence
  Oligonucleotide primer for the detection of SNP TSC0015824
aaactcaaaaca

SEQ ID NO: 293835 - DNA, 12 bp, Artificial Sequence
  Oligonucleotide primer for the detection of SNP TSC0015824
cttccttctcac

SEQ ID NO: 293836 - DNA, 12 bp, Artificial Sequence
  Oligonucleotide primer for the detection of SNP TSC0015824
agggtttagagt

SEQ ID NO: 293837 - DNA, 12 bp, Artificial Sequence
  Oligonucleotide primer for the detection of SNP TSC0015825
ccccactcatac

SEQ ID NO: 293838 - DNA, 12 bp, Artificial Sequence
  Oligonucleotide primer for the detection of SNP TSC0015826
ataataattctt

SEQ ID NO: 293839 - DNA, 12 bp, Artificial Sequence
  Oligonucleotide primer for the detection of SNP TSC0015826
ttatattatgaa

SEQ ID NO: 293840 - DNA, 12 bp, Artificial Sequence
  Oligonucleotide primer for the detection of SNP TSC0015827
tctaacccctaa

SEQ ID NO: 293841 - DNA, 12 bp, Artificial Sequence
  Oligonucleotide primer for the detection of SNP TSC0015827
tttagagaagtt

SEQ ID NO: 293842 - DNA, 12 bp, Artificial Sequence
  Oligonucleotide primer for the detection of SNP TSC0015827
gtttagtttttg

SEQ ID NO: 293843 - DNA, 12 bp, Artificial Sequence
  Oligonucleotide primer for the detection of SNP TSC0015828
ataaaaaacgaa

SEQ ID NO: 293844 - DNA, 12 bp, Artificial Sequence
  Oligonucleotide primer for the detection of SNP TSC0015828
ttgagttgtttt

SEQ ID NO: 293845 - DNA, 12 bp, Artificial Sequence
  Oligonucleotide primer for the detection of SNP TSC0015828
aactaaattacc

SEQ ID NO: 293846 - DNA, 12 bp, Artificial Sequence
  Oligonucleotide primer for the detection of SNP TSC0015828
agtgggggatgg

SEQ ID NO: 293847 - DNA, 12 bp, Artificial Sequence
  Oligonucleotide primer for the detection of SNP TSC0015828
agtgggggacgg

SEQ ID NO: 293848 - DNA, 12 bp, Artificial Sequence
  Oligonucleotide primer for the detection of SNP TSC0015829
caaaccttactt

SEQ ID NO: 293849 - DNA, 12 bp, Artificial Sequence
  Oligonucleotide primer for the detection of SNP TSC0015829
tttagagtttta

SEQ ID NO: 293850 - DNA, 12 bp, Artificial Sequence
  Oligonucleotide primer for the detection of SNP TSC0015832
tacctaaccttt

SEQ ID NO: 293851 - DNA, 12 bp, Artificial Sequence
  Oligonucleotide primer for the detection of SNP TSC0015832
tggtgaagttta

SEQ ID NO: 293852 - DNA, 12 bp, Artificial Sequence
  Oligonucleotide primer for the detection of SNP TSC0015840
aaacccccaaaa

SEQ ID NO: 293853 - DNA, 12 bp, Artificial Sequence
  Oligonucleotide primer for the detection of SNP TSC0015840
ttattgatttat

SEQ ID NO: 293854 - DNA, 12 bp, Artificial Sequence
  Oligonucleotide primer for the detection of SNP TSC0015840
ctattaactcat

SEQ ID NO: 293855 - DNA, 12 bp, Artificial Sequence
  Oligonucleotide primer for the detection of SNP TSC0015840
aagtttttaagg

SEQ ID NO: 293856 - DNA, 12 bp, Artificial Sequence
  Oligonucleotide primer for the detection of SNP TSC0015841
aattatttctca

SEQ ID NO: 293857 - DNA, 12 bp, Artificial Sequence
  Oligonucleotide primer for the detection of SNP TSC0015841
tatttgttttaa

SEQ ID NO: 293858 - DNA, 12 bp, Artificial Sequence
  Oligonucleotide primer for the detection of SNP TSC0015841
tattcgttttaa

SEQ ID NO: 293859 - DNA, 12 bp, Artificial Sequence
  Oligonucleotide primer for the detection of SNP TSC0015841
cccatcccaaaa

SEQ ID NO: 293860 - DNA, 12 bp, Artificial Sequence
  Oligonucleotide primer for the detection of SNP TSC0015841
cccgtcccaaaa

SEQ ID NO: 293861 - DNA, 12 bp, Artificial Sequence
  Oligonucleotide primer for the detection of SNP TSC0015841
gggttgtttttt

SEQ ID NO: 293862 - DNA, 12 bp, Artificial Sequence
  Oligonucleotide primer for the detection of SNP TSC0015844
tttggtaaattg

SEQ ID NO: 293863 - DNA, 12 bp, Artificial Sequence
  Oligonucleotide primer for the detection of SNP TSC0015844
tttaacaaacta

SEQ ID NO: 293864 - DNA, 12 bp, Artificial Sequence
  Oligonucleotide primer for the detection of SNP TSC0015844
atgtatattttt

SEQ ID NO: 293865 - DNA, 12 bp, Artificial Sequence
  Oligonucleotide primer for the detection of SNP TSC0015845
cctcccaaaacc

SEQ ID NO: 293866 - DNA, 12 bp, Artificial Sequence
  Oligonucleotide primer for the detection of SNP TSC0015845
agaagaattaag

SEQ ID NO: 293867 - DNA, 12 bp, Artificial Sequence
  Oligonucleotide primer for the detection of SNP TSC0015845
ttttttagaatt

SEQ ID NO: 293868 - DNA, 12 bp, Artificial Sequence
  Oligonucleotide primer for the detection of SNP TSC0015849
actcataattca

SEQ ID NO: 293869 - DNA, 12 bp, Artificial Sequence
  Oligonucleotide primer for the detection of SNP TSC0015849
tgttgttttatg

SEQ ID NO: 293870 - DNA, 12 bp, Artificial Sequence
  Oligonucleotide primer for the detection of SNP TSC0015849
attatttcataa

SEQ ID NO: 293871 - DNA, 12 bp, Artificial Sequence
  Oligonucleotide primer for the detection of SNP TSC0015852
ctccaaaaaatt

SEQ ID NO: 293872 - DNA, 12 bp, Artificial Sequence
  Oligonucleotide primer for the detection of SNP TSC0015852
gataattatgaa

SEQ ID NO: 293873 - DNA, 12 bp, Artificial Sequence
  Oligonucleotide primer for the detection of SNP TSC0015852
gataattacgaa

SEQ ID NO: 293874 - DNA, 12 bp, Artificial Sequence
  Oligonucleotide primer for the detection of SNP TSC0015852
aacaatcacaaa

SEQ ID NO: 293875 - DNA, 12 bp, Artificial Sequence
  Oligonucleotide primer for the detection of SNP TSC0015852
aacaatcacgaa

SEQ ID NO: 293876 - DNA, 12 bp, Artificial Sequence
  Oligonucleotide primer for the detection of SNP TSC0015852
ttttaggaagtt

SEQ ID NO: 293877 - DNA, 12 bp, Artificial Sequence
  Oligonucleotide primer for the detection of SNP TSC0015853
cacaacacactt

SEQ ID NO: 293878 - DNA, 12 bp, Artificial Sequence
  Oligonucleotide primer for the detection of SNP TSC0015853
attttaaagtaa

SEQ ID NO: 293879 - DNA, 12 bp, Artificial Sequence
  Oligonucleotide primer for the detection of SNP TSC0015854
aattttgaagtg

SEQ ID NO: 293880 - DNA, 12 bp, Artificial Sequence
  Oligonucleotide primer for the detection of SNP TSC0015855
acctaaacctct

SEQ ID NO: 293881 - DNA, 12 bp, Artificial Sequence
  Oligonucleotide primer for the detection of SNP TSC0015856
taacaacctatt

SEQ ID NO: 293882 - DNA, 12 bp, Artificial Sequence
  Oligonucleotide primer for the detection of SNP TSC0015856
atattagtttag

SEQ ID NO: 293883 - DNA, 12 bp, Artificial Sequence
  Oligonucleotide primer for the detection of SNP TSC0015857
aacaacctattc

SEQ ID NO: 293884 - DNA, 12 bp, Artificial Sequence
  Oligonucleotide primer for the detection of SNP TSC0015857
aatattagttta

SEQ ID NO: 293885 - DNA, 12 bp, Artificial Sequence
  Oligonucleotide primer for the detection of SNP TSC0015861
ttagttttgatg

SEQ ID NO: 293886 - DNA, 12 bp, Artificial Sequence
  Oligonucleotide primer for the detection of SNP TSC0015862
aaattaaataat

SEQ ID NO: 293887 - DNA, 12 bp, Artificial Sequence
  Oligonucleotide primer for the detection of SNP TSC0015862
aagtaaattgta

SEQ ID NO: 293888 - DNA, 12 bp, Artificial Sequence
  Oligonucleotide primer for the detection of SNP TSC0015863
caccacccaaac

SEQ ID NO: 293889 - DNA, 12 bp, Artificial Sequence
  Oligonucleotide primer for the detection of SNP TSC0015863
caccacccgaac

SEQ ID NO: 293890 - DNA, 12 bp, Artificial Sequence
  Oligonucleotide primer for the detection of SNP TSC0015863
cgccacccaaac

SEQ ID NO: 293891 - DNA, 12 bp, Artificial Sequence
  Oligonucleotide primer for the detection of SNP TSC0015863
cgccacccgaac

SEQ ID NO: 293892 - DNA, 12 bp, Artificial Sequence
  Oligonucleotide primer for the detection of SNP TSC0015863
ttgtattgtata

SEQ ID NO: 293893 - DNA, 12 bp, Artificial Sequence
  Oligonucleotide primer for the detection of SNP TSC0015863
tcgtattgtata

SEQ ID NO: 293894 - DNA, 12 bp, Artificial Sequence
  Oligonucleotide primer for the detection of SNP TSC0015863
ccgcactacaca

SEQ ID NO: 293895 - DNA, 12 bp, Artificial Sequence
  Oligonucleotide primer for the detection of SNP TSC0015863
tgttatttgggt

SEQ ID NO: 293896 - DNA, 12 bp, Artificial Sequence
  Oligonukleotid-Primer
cgttatttgggt

SEQ ID NO: 293897 - DNA, 12 bp, Artificial Sequence
  Oligonucleotide primer for the detection of SNP TSC0015863
tgttattcgggt

SEQ ID NO: 293898 - DNA, 12 bp, Artificial Sequence
  Oligonucleotide primer for the detection of SNP TSC0015863
cgttattcgggt

SEQ ID NO: 293899 - DNA, 12 bp, Artificial Sequence
  Oligonucleotide primer for the detection of SNP TSC0015864
cgaaataaaaaa

SEQ ID NO: 293900 - DNA, 12 bp, Artificial Sequence
  Oligonucleotide primer for the detection of SNP TSC0015864
gaagtttttaaa

SEQ ID NO: 293901 - DNA, 12 bp, Artificial Sequence
  Oligonucleotide primer for the detection of SNP TSC0015865
aatactatccct

SEQ ID NO: 293902 - DNA, 12 bp, Artificial Sequence
  Oligonucleotide primer for the detection of SNP TSC0015865
tggggggtgggg

SEQ ID NO: 293903 - DNA, 12 bp, Artificial Sequence
  Oligonucleotide primer for the detection of SNP TSC0015865
tggggggcgggg

SEQ ID NO: 293904 - DNA, 12 bp, Artificial Sequence
  Oligonucleotide primer for the detection of SNP TSC0015865
taaaaaacgaaa

SEQ ID NO: 293905 - DNA, 12 bp, Artificial Sequence
  Oligonucleotide primer for the detection of SNP TSC0015865
aatgttattttt

SEQ ID NO: 293906 - DNA, 12 bp, Artificial Sequence
  Oligonucleotide primer for the detection of SNP TSC0015866
taacattaaata

SEQ ID NO: 293907 - DNA, 12 bp, Artificial Sequence
  Oligonucleotide primer for the detection of SNP TSC0015866
tagtattaggag

SEQ ID NO: 293908 - DNA, 12 bp, Artificial Sequence
  Oligonucleotide primer for the detection of SNP TSC0015866
aacattaaaaaa

SEQ ID NO: 293909 - DNA, 12 bp, Artificial Sequence
  Oligonucleotide primer for the detection of SNP TSC0015866
agtattaggtat

SEQ ID NO: 293910 - DNA, 12 bp, Artificial Sequence
  Oligonucleotide primer for the detection of SNP TSC0015867
atatcttctaaa

SEQ ID NO: 293911 - DNA, 12 bp, Artificial Sequence
  Oligonucleotide primer for the detection of SNP TSC0015867
ggatagttatgt

SEQ ID NO: 293912 - DNA, 12 bp, Artificial Sequence
  Oligonucleotide primer for the detection of SNP TSC0015867
aaacaatcatat

SEQ ID NO: 293913 - DNA, 12 bp, Artificial Sequence
  Oligonucleotide primer for the detection of SNP TSC0015867
atgttttttggg

SEQ ID NO: 293914 - DNA, 12 bp, Artificial Sequence
  Oligonucleotide primer for the detection of SNP TSC0015868
cctcaaaactat

SEQ ID NO: 293915 - DNA, 12 bp, Artificial Sequence
  Oligonucleotide primer for the detection of SNP TSC0015868
cctcgaaactat

SEQ ID NO: 293916 - DNA, 12 bp, Artificial Sequence
  Oligonucleotide primer for the detection of SNP TSC0015868
gtttaaattaag

SEQ ID NO: 293917 - DNA, 12 bp, Artificial Sequence
  Oligonucleotide primer for the detection of SNP TSC0015868
acccaaatcaaa

SEQ ID NO: 293918 - DNA, 12 bp, Artificial Sequence
  Oligonucleotide primer for the detection of SNP TSC0015868
ttttgaagttat

SEQ ID NO: 293919 - DNA, 12 bp, Artificial Sequence
  Oligonucleotide primer for the detection of SNP TSC0015868
tttcgaagttat

SEQ ID NO: 293920 - DNA, 12 bp, Artificial Sequence
  Oligonucleotide primer for the detection of SNP TSC0015869
aataaatttaat

SEQ ID NO: 293921 - DNA, 12 bp, Artificial Sequence
  Oligonucleotide primer for the detection of SNP TSC0015869
gaaatgttattg

SEQ ID NO: 293922 - DNA, 12 bp, Artificial Sequence
  Oligonucleotide primer for the detection of SNP TSC0015870
acaaaactcaat

SEQ ID NO: 293923 - DNA, 12 bp, Artificial Sequence
  Oligonucleotide primer for the detection of SNP TSC0015870
tttatgtgtttg

SEQ ID NO: 293924 - DNA, 12 bp, Artificial Sequence
  Oligonucleotide primer for the detection of SNP TSC0015870
tttatatattta

SEQ ID NO: 293925 - DNA, 12 bp, Artificial Sequence
  Oligonucleotide primer for the detection of SNP TSC0015870
gtagggtttagt

SEQ ID NO: 293926 - DNA, 12 bp, Artificial Sequence
  Oligonucleotide primer for the detection of SNP TSC0015873
ttttgtgttatt

SEQ ID NO: 293927 - DNA, 12 bp, Artificial Sequence
  Oligonucleotide primer for the detection of SNP TSC0015873
ttttgcgttatt

SEQ ID NO: 293928 - DNA, 12 bp, Artificial Sequence
  Oligonucleotide primer for the detection of SNP TSC0015873
ccctacaccatc

SEQ ID NO: 293929 - DNA, 12 bp, Artificial Sequence
  Oligonucleotide primer for the detection of SNP TSC0015873
ccctacgccatc

SEQ ID NO: 293930 - DNA, 12 bp, Artificial Sequence
  Oligonucleotide primer for the detection of SNP TSC0015873
gggaattagggg

SEQ ID NO: 293931 - DNA, 12 bp, Artificial Sequence
  Oligonucleotide primer for the detection of SNP TSC0015874
tacacgaaataa

SEQ ID NO: 293932 - DNA, 12 bp, Artificial Sequence
  Oligonucleotide primer for the detection of SNP TSC0015874
aaacttacctct

SEQ ID NO: 293933 - DNA, 12 bp, Artificial Sequence
  Oligonucleotide primer for the detection of SNP TSC0015874
tatatgaggtga

SEQ ID NO: 293934 - DNA, 12 bp, Artificial Sequence
  Oligonucleotide primer for the detection of SNP TSC0015874
tatacgaggtga

SEQ ID NO: 293935 - DNA, 12 bp, Artificial Sequence
  Oligonucleotide primer for the detection of SNP TSC0015875
aaccccactcca

SEQ ID NO: 293936 - DNA, 12 bp, Artificial Sequence
  Oligonucleotide primer for the detection of SNP TSC0015875
ttttgtgtatgt

SEQ ID NO: 293937 - DNA, 12 bp, Artificial Sequence
  Oligonucleotide primer for the detection of SNP TSC0015875
tttcgtgtatgt

SEQ ID NO: 293938 - DNA, 12 bp, Artificial Sequence
  Oligonucleotide primer for the detection of SNP TSC0015875
cctcatatatac

SEQ ID NO: 293939 - DNA, 12 bp, Artificial Sequence
  Oligonucleotide primer for the detection of SNP TSC0015875
cctcgtatatac

SEQ ID NO: 293940 - DNA, 12 bp, Artificial Sequence
  Oligonucleotide primer for the detection of SNP TSC0015875
ggttttatttta

SEQ ID NO: 293941 - DNA, 12 bp, Artificial Sequence
  Oligonucleotide primer for the detection of SNP TSC0015877
ataaattaactt

SEQ ID NO: 293942 - DNA, 12 bp, Artificial Sequence
  Oligonucleotide primer for the detection of SNP TSC0015877
ttgagttagata

SEQ ID NO: 293943 - DNA, 12 bp, Artificial Sequence
  Oligonucleotide primer for the detection of SNP TSC0015880
caaaaattcaac

SEQ ID NO: 293944 - DNA, 12 bp, Artificial Sequence
  Oligonucleotide primer for the detection of SNP TSC0015880
ttagttaggttg

SEQ ID NO: 293945 - DNA, 12 bp, Artificial Sequence
  Oligonucleotide primer for the detection of SNP TSC0015881
attttagtttgt

SEQ ID NO: 293946 - DNA, 12 bp, Artificial Sequence
  Oligonucleotide primer for the detection of SNP TSC0015881
actccaacctat

SEQ ID NO: 293947 - DNA, 12 bp, Artificial Sequence
  Oligonucleotide primer for the detection of SNP TSC0015882
atcataacccca

SEQ ID NO: 293948 - DNA, 12 bp, Artificial Sequence
  Oligonucleotide primer for the detection of SNP TSC0015882
gtggttagatgt

SEQ ID NO: 293949 - DNA, 12 bp, Artificial Sequence
  Oligonucleotide primer for the detection of SNP TSC0015882
ataaccaaatat

SEQ ID NO: 293950 - DNA, 12 bp, Artificial Sequence
  Oligonucleotide primer for the detection of SNP TSC0015882
attatggtttta

SEQ ID NO: 293951 - DNA, 12 bp, Artificial Sequence
  Oligonucleotide primer for the detection of SNP TSC0015883
ttcaaaaacatc

SEQ ID NO: 293952 - DNA, 12 bp, Artificial Sequence
  Oligonucleotide primer for the detection of SNP TSC0015883
ttcgaaaacatc

SEQ ID NO: 293953 - DNA, 12 bp, Artificial Sequence
  Oligonucleotide primer for the detection of SNP TSC0015883
tgattgtatttg

SEQ ID NO: 293954 - DNA, 12 bp, Artificial Sequence
  Oligonucleotide primer for the detection of SNP TSC0015883
cgattgtatttg

SEQ ID NO: 293955 - DNA, 12 bp, Artificial Sequence
  Oligonucleotide primer for the detection of SNP TSC0015884
ccaccaccaaaa

SEQ ID NO: 293956 - DNA, 12 bp, Artificial Sequence
  Oligonucleotide primer for the detection of SNP TSC0015884
ccaccgccaaaa

SEQ ID NO: 293957 - DNA, 12 bp, Artificial Sequence
  Oligonucleotide primer for the detection of SNP TSC0015884
acgttttgtatt

SEQ ID NO: 293958 - DNA, 12 bp, Artificial Sequence
  Oligonucleotide primer for the detection of SNP TSC0015884
acgtcctacact

SEQ ID NO: 293959 - DNA, 12 bp, Artificial Sequence
  Oligonucleotide primer for the detection of SNP TSC0015884
ttattgttaggg

SEQ ID NO: 293960 - DNA, 12 bp, Artificial Sequence
  Oligonucleotide primer for the detection of SNP TSC0015884
ttatcgttaggg

SEQ ID NO: 293961 - DNA, 12 bp, Artificial Sequence
  Oligonucleotide primer for the detection of SNP TSC0015892
attcacatacac

SEQ ID NO: 293962 - DNA, 12 bp, Artificial Sequence
  Oligonucleotide primer for the detection of SNP TSC0015892
tgtgtgtgtttg

SEQ ID NO: 293963 - DNA, 12 bp, Artificial Sequence
  Oligonucleotide primer for the detection of SNP TSC0015892
cgtgtgtgtttg

SEQ ID NO: 293964 - DNA, 12 bp, Artificial Sequence
  Oligonucleotide primer for the detection of SNP TSC0015892
tgtgcgtgtttg

SEQ ID NO: 293965 - DNA, 12 bp, Artificial Sequence
  Oligonucleotide primer for the detection of SNP TSC0015892
cgtgcgtgtttg

SEQ ID NO: 293966 - DNA, 12 bp, Artificial Sequence
  Oligonucleotide primer for the detection of SNP TSC0015892
catacataccta

SEQ ID NO: 293967 - DNA, 12 bp, Artificial Sequence
  Oligonucleotide primer for the detection of SNP TSC0015892
catacgtaccta

SEQ ID NO: 293968 - DNA, 12 bp, Artificial Sequence
  Oligonucleotide primer for the detection of SNP TSC0015892
cgtacataccta

SEQ ID NO: 293969 - DNA, 12 bp, Artificial Sequence
  Oligonucleotide primer for the detection of SNP TSC0015892
cgtacgtaccta

SEQ ID NO: 293970 - DNA, 12 bp, Artificial Sequence
  Oligonucleotide primer for the detection of SNP TSC0015892
gtttatatatat

SEQ ID NO: 293971 - DNA, 12 bp, Artificial Sequence
  Oligonucleotide primer for the detection of SNP TSC0015893
ctaattaatatt

SEQ ID NO: 293972 - DNA, 12 bp, Artificial Sequence
  Oligonucleotide primer for the detection of SNP TSC0015893
atatatagaaag

SEQ ID NO: 293973 - DNA, 12 bp, Artificial Sequence
  Oligonucleotide primer for the detection of SNP TSC0015894
aacaaaccaaac

SEQ ID NO: 293974 - DNA, 12 bp, Artificial Sequence
  Oligonucleotide primer for the detection of SNP TSC0015894
aacgaaccaaac

SEQ ID NO: 293975 - DNA, 12 bp, Artificial Sequence
  Oligonucleotide primer for the detection of SNP TSC0015894
gtttatattttg

SEQ ID NO: 293976 - DNA, 12 bp, Artificial Sequence
  Oligonucleotide primer for the detection of SNP TSC0015894
acccacacccta

SEQ ID NO: 293977 - DNA, 12 bp, Artificial Sequence
  Oligonucleotide primer for the detection of SNP TSC0015894
gatgggttaagt

SEQ ID NO: 293978 - DNA, 12 bp, Artificial Sequence
  Oligonucleotide primer for the detection of SNP TSC0015894
gacgggttaagt

SEQ ID NO: 293979 - DNA, 12 bp, Artificial Sequence
  Oligonucleotide primer for the detection of SNP TSC0015898
tctctactcctt

SEQ ID NO: 293980 - DNA, 12 bp, Artificial Sequence
  Oligonucleotide primer for the detection of SNP TSC0015899
taggaatagatt

SEQ ID NO: 293981 - DNA, 12 bp, Artificial Sequence
  Oligonucleotide primer for the detection of SNP TSC0015899
ttttggaggaag

SEQ ID NO: 293982 - DNA, 12 bp, Artificial Sequence
  Oligonucleotide primer for the detection of SNP TSC0015904
taaacatattaa

SEQ ID NO: 293983 - DNA, 12 bp, Artificial Sequence
  Oligonucleotide primer for the detection of SNP TSC0015904
taggtttttgtt

SEQ ID NO: 293984 - DNA, 12 bp, Artificial Sequence
  Oligonucleotide primer for the detection of SNP TSC0015904
taaatctttatt

SEQ ID NO: 293985 - DNA, 12 bp, Artificial Sequence
  Oligonucleotide primer for the detection of SNP TSC0015906
cacaaccaaccc

SEQ ID NO: 293986 - DNA, 12 bp, Artificial Sequence
  Oligonucleotide primer for the detection of SNP TSC0015906
cacgaccaaccc

SEQ ID NO: 293987 - DNA, 12 bp, Artificial Sequence
  Oligonucleotide primer for the detection of SNP TSC0015906
cgcaaccaaccc

SEQ ID NO: 293988 - DNA, 12 bp, Artificial Sequence
  Oligonucleotide primer for the detection of SNP TSC0015906
cgcgaccaaccc

SEQ ID NO: 293989 - DNA, 12 bp, Artificial Sequence
  Oligonucleotide primer for the detection of SNP TSC0015906
gagttggtggtg

SEQ ID NO: 293990 - DNA, 12 bp, Artificial Sequence
  Oligonucleotide primer for the detection of SNP TSC0015906
gagtcggtggtg

SEQ ID NO: 293991 - DNA, 12 bp, Artificial Sequence
  Oligonucleotide primer for the detection of SNP TSC0015906
gagttggcggtg

SEQ ID NO: 293992 - DNA, 12 bp, Artificial Sequence
  Oligonucleotide primer for the detection of SNP TSC0015906
gagttggtggcg

SEQ ID NO: 293993 - DNA, 12 bp, Artificial Sequence
  Oligonucleotide primer for the detection of SNP TSC0015906
gagtcggcggtg

SEQ ID NO: 293994 - DNA, 12 bp, Artificial Sequence
  Oligonucleotide primer for the detection of SNP TSC0015906
gagtcggtggcg

SEQ ID NO: 293995 - DNA, 12 bp, Artificial Sequence
  Oligonucleotide primer for the detection of SNP TSC0015906
gagttggcggcg

SEQ ID NO: 293996 - DNA, 12 bp, Artificial Sequence
  Oligonucleotide primer for the detection of SNP TSC0015906
gagtcggcggcg

SEQ ID NO: 293997 - DNA, 12 bp, Artificial Sequence
  Oligonucleotide primer for the detection of SNP TSC0015907
tatctctcactt

SEQ ID NO: 293998 - DNA, 12 bp, Artificial Sequence
  Oligonucleotide primer for the detection of SNP TSC0015907
tattgtatgttg

SEQ ID NO: 293999 - DNA, 12 bp, Artificial Sequence
  Oligonucleotide primer for the detection of SNP TSC0015907
tactacatatta

SEQ ID NO: 294000 - DNA, 12 bp, Artificial Sequence
  Oligonucleotide primer for the detection of SNP TSC0015908
tcctaaatactc

SEQ ID NO: 294001 - DNA, 12 bp, Artificial Sequence
  Oligonucleotide primer for the detection of SNP TSC0015908
tggattgtggga

SEQ ID NO: 294002 - DNA, 12 bp, Artificial Sequence
  Oligonucleotide primer for the detection of SNP TSC0015908
ttttgaatgttt

SEQ ID NO: 294003 - DNA, 12 bp, Artificial Sequence
  Oligonucleotide primer for the detection of SNP TSC0015909
tctaatctcaat

SEQ ID NO: 294004 - DNA, 12 bp, Artificial Sequence
  Oligonucleotide primer for the detection of SNP TSC0015909
gaatagagatat

SEQ ID NO: 294005 - DNA, 12 bp, Artificial Sequence
  Oligonucleotide primer for the detection of SNP TSC0015909
aaacaaaaacat

SEQ ID NO: 294006 - DNA, 12 bp, Artificial Sequence
  Oligonucleotide primer for the detection of SNP TSC0015909
tttggttttagt

SEQ ID NO: 294007 - DNA, 12 bp, Artificial Sequence
  Oligonucleotide primer for the detection of SNP TSC0015910
ttaaaaaaaccc

SEQ ID NO: 294008 - DNA, 12 bp, Artificial Sequence
  Oligonucleotide primer for the detection of SNP TSC0015910
tatatatttttg

SEQ ID NO: 294009 - DNA, 12 bp, Artificial Sequence
  Oligonucleotide primer for the detection of SNP TSC0015911
ttccaacaatcc

SEQ ID NO: 294010 - DNA, 12 bp, Artificial Sequence
  Oligonucleotide primer for the detection of SNP TSC0015911
taaagggaagtt

SEQ ID NO: 294011 - DNA, 12 bp, Artificial Sequence
  Oligonucleotide primer for the detection of SNP TSC0015911
taaagggaagtc

SEQ ID NO: 294012 - DNA, 12 bp, Artificial Sequence
  Oligonucleotide primer for the detection of SNP TSC0015912
acaaccaataat

SEQ ID NO: 294013 - DNA, 12 bp, Artificial Sequence
  Oligonucleotide primer for the detection of SNP TSC0015913
accaataaaaac

SEQ ID NO: 294014 - DNA, 12 bp, Artificial Sequence
  Oligonucleotide primer for the detection of SNP TSC0015913
aatagattttga

SEQ ID NO: 294015 - DNA, 12 bp, Artificial Sequence
  Oligonucleotide primer for the detection of SNP TSC0015914
acaactcacaaa

SEQ ID NO: 294016 - DNA, 12 bp, Artificial Sequence
  Oligonucleotide primer for the detection of SNP TSC0015914
ttgtgttattgt

SEQ ID NO: 294017 - DNA, 12 bp, Artificial Sequence
  Oligonucleotide primer for the detection of SNP TSC0015914
cttataccacta

SEQ ID NO: 294018 - DNA, 12 bp, Artificial Sequence
  Oligonucleotide primer for the detection of SNP TSC0015914
agtagtttatag

SEQ ID NO: 294019 - DNA, 12 bp, Artificial Sequence
  Oligonucleotide primer for the detection of SNP TSC0015915
cacctcaaacaa

SEQ ID NO: 294020 - DNA, 12 bp, Artificial Sequence
  Oligonucleotide primer for the detection of SNP TSC0015915
cgcctcaaacaa

SEQ ID NO: 294021 - DNA, 12 bp, Artificial Sequence
  Oligonucleotide primer for the detection of SNP TSC0015915
tgtgaaattaat

SEQ ID NO: 294022 - DNA, 12 bp, Artificial Sequence
  Oligonucleotide primer for the detection of SNP TSC0015915
tataaaattaat

SEQ ID NO: 294023 - DNA, 12 bp, Artificial Sequence
  Oligonucleotide primer for the detection of SNP TSC0015915
tgttttagatag

SEQ ID NO: 294024 - DNA, 12 bp, Artificial Sequence
  Oligonucleotide primer for the detection of SNP TSC0015915
cgttttagatag

SEQ ID NO: 294025 - DNA, 12 bp, Artificial Sequence
  Oligonucleotide primer for the detection of SNP TSC0015918
taccaccacacc

SEQ ID NO: 294026 - DNA, 12 bp, Artificial Sequence
  Oligonucleotide primer for the detection of SNP TSC0015918
taccaccacgcc

SEQ ID NO: 294027 - DNA, 12 bp, Artificial Sequence
  Oligonucleotide primer for the detection of SNP TSC0015918
ataaaaaattag

SEQ ID NO: 294028 - DNA, 12 bp, Artificial Sequence
  Oligonucleotide primer for the detection of SNP TSC0015918
acaaaaaattaa

SEQ ID NO: 294029 - DNA, 12 bp, Artificial Sequence
  Oligonucleotide primer for the detection of SNP TSC0015918
tgttattacgtt

SEQ ID NO: 294030 - DNA, 12 bp, Artificial Sequence
  Oligonukleotid-Primer
tttataaataat

SEQ ID NO: 294031 - DNA, 12 bp, Artificial Sequence
  Oligonucleotide primer for the detection of SNP TSC0015919
aggatttttata

SEQ ID NO: 294032 - DNA, 12 bp, Artificial Sequence
  Oligonucleotide primer for the detection of SNP TSC0015920
ataacattacta

SEQ ID NO: 294033 - DNA, 12 bp, Artificial Sequence
  Oligonucleotide primer for the detection of SNP TSC0015920
attatatttttt

SEQ ID NO: 294034 - DNA, 12 bp, Artificial Sequence
  Oligonucleotide primer for the detection of SNP TSC0015920
aaccacaccctc

SEQ ID NO: 294035 - DNA, 12 bp, Artificial Sequence
  Oligonucleotide primer for the detection of SNP TSC0015920
gtggtattgttg

SEQ ID NO: 294036 - DNA, 12 bp, Artificial Sequence
  Oligonucleotide primer for the detection of SNP TSC0015921
aaatataatcct

SEQ ID NO: 294037 - DNA, 12 bp, Artificial Sequence
  Oligonucleotide primer for the detection of SNP TSC0015921
gtataattgata

SEQ ID NO: 294038 - DNA, 12 bp, Artificial Sequence
  Oligonucleotide primer for the detection of SNP TSC0015924
aacccacacaca

SEQ ID NO: 294039 - DNA, 12 bp, Artificial Sequence
  Oligonucleotide primer for the detection of SNP TSC0015924
ttttagttaggt

SEQ ID NO: 294040 - DNA, 12 bp, Artificial Sequence
  Oligonucleotide primer for the detection of SNP TSC0015924
tccaaccaaaca

SEQ ID NO: 294041 - DNA, 12 bp, Artificial Sequence
  Oligonucleotide primer for the detection of SNP TSC0015924
taatttatatat

SEQ ID NO: 294042 - DNA, 12 bp, Artificial Sequence
  Oligonucleotide primer for the detection of SNP TSC0015925
tcctaacatcac

SEQ ID NO: 294043 - DNA, 12 bp, Artificial Sequence
  Oligonucleotide primer for the detection of SNP TSC0015925
gttaagttttta

SEQ ID NO: 294044 - DNA, 12 bp, Artificial Sequence
  Oligonucleotide primer for the detection of SNP TSC0015929
attctaacttat

SEQ ID NO: 294045 - DNA, 12 bp, Artificial Sequence
  Oligonucleotide primer for the detection of SNP TSC0015929
aagtttttatag

SEQ ID NO: 294046 - DNA, 12 bp, Artificial Sequence
  Oligonucleotide primer for the detection of SNP TSC0015931
ccaccaaaaaat

SEQ ID NO: 294047 - DNA, 12 bp, Artificial Sequence
  Oligonucleotide primer for the detection of SNP TSC0015931
tagatggtattt

SEQ ID NO: 294048 - DNA, 12 bp, Artificial Sequence
  Oligonucleotide primer for the detection of SNP TSC0015931
aaataacaccta

SEQ ID NO: 294049 - DNA, 12 bp, Artificial Sequence
  Oligonucleotide primer for the detection of SNP TSC0015931
ttattagaagat

SEQ ID NO: 294050 - DNA, 12 bp, Artificial Sequence
  Oligonucleotide primer for the detection of SNP TSC0015932
aaatttctaaaa

SEQ ID NO: 294051 - DNA, 12 bp, Artificial Sequence
  Oligonucleotide primer for the detection of SNP TSC0015932
tatttagttaat

SEQ ID NO: 294052 - DNA, 12 bp, Artificial Sequence
  Oligonucleotide primer for the detection of SNP TSC0015932
tatccaattaat

SEQ ID NO: 294053 - DNA, 12 bp, Artificial Sequence
  Oligonucleotide primer for the detection of SNP TSC0015932
aaatttttaaaa

SEQ ID NO: 294054 - DNA, 12 bp, Artificial Sequence
  Oligonucleotide primer for the detection of SNP TSC0015933
cacacacataca

SEQ ID NO: 294055 - DNA, 12 bp, Artificial Sequence
  Oligonucleotide primer for the detection of SNP TSC0015934
aaatcccttcct
